(19) United States
(12) Patent Application Publication
(10) Pub. No.: US 2024/0131093 A1
(43) Pub. Date: Apr. 25, 2024

(54) COMPOSITIONS AND METHODS OF TREATING HUNTINGTON'S DISEASE

(71) Applicant: VOYAGER THERAPEUTICS, INC., Cambridge, MA (US)

(72) Inventors: Dinah Wen-Yee Sah, Hopkinton, MA (US); Fen Chen, Saugus, MA (US); Pengcheng Zhou, Lexington, MA (US); Xin Wang, Arlington, MA (US); Yanqun Shu, Winchester, MA (US); Jinzhao Hou, Lexington, MA (US); Jochen Deckert, Bayreuth (DE); Markus Hossbach, Kulmbach (DE)

(21) Appl. No.: 18/351,930

(22) Filed: Jul. 12, 2023

Related U.S. Application Data
(63) Continuation of application No. 16/611,041, filed on Nov. 5, 2019, now Pat. No. 11,752,181.
(60) Provisional application No. 62/520,086, filed on Jun. 15, 2017.
(60) Provisional application No. 62/507,921, filed on May 18, 2017.
(60) Provisional application No. 62/501,786, filed on May 5, 2017.

(51) Int. Cl. A61K 35/76; A61P 25/14; C12N 7/00; C12N 15/113; C12N 15/86

(52) U.S. Cl. CPC A61K 35/76; A61P 25/14; C12N 7/00; C12N 15/113; C12N 15/86; A61K 48/00

(57) ABSTRACT

The present invention relates to adeno-associated viral (AAV) particles encoding siRNA molecules and methods for treating Huntington's Disease (HD).

### CROSS REFERENCE TO RELATED APPLICATIONS

[0001] This application is a continuation of U.S. patent application Ser. No. 16/611,041, entitled COMPOSITIONS AND METHODS OF TREATING HUNTINGTON'S DISEASE, filed Nov. 5, 2019, which is a 35 U.S.C. § 371 U.S. National Stage Entry of International Application No. PCT/US2018/031117 filed May 4, 2018 which claims priority to U.S. Provisional Patent Application No. 62/501,786, entitled COMPOSITIONS AND METHODS OF TREATING HUNTINGTON'S DISEASE, filed May 5, 2017, U.S. Provisional Patent Application No. 62/507,921, entitled COMPOSITIONS AND METHODS OF TREATING HUNTINGTON'S DISEASE, filed May 18, 2017 and U.S. Provisional Patent Application No. 62/520,086, entitled COMPOSITIONS AND METHODS OF TREATING HUNTINGTON'S DISEASE, filed Jun. 15, 2017; the contents of each of which are herein incorporated by reference in their entirety.

### REFERENCE TO THE SEQUENCE LISTING

[0002] The instant application contains a Sequence Listing which has been submitted electronically in XML file format and is hereby incorporated by reference in its entirety. Said XML file copy, created on Jul. 13, 2023, is named V2071-1044USCON1_SL.XML and is 4,529,445 bytes in size.

### FIELD OF THE INVENTION

[0003] The present invention relates to compositions, methods and processes for the design, preparation, manufacture, use and/or formulation of AAV particles comprising modulatory polynucleotides, e.g., polynucleotides encoding small interfering RNA (siRNA) molecules which target the Huntingtin (HTT) gene (e.g., the wild-type or the mutated CAG-expanded HTT gene). Targeting of the mutated HTT gene may interfere with the HTT gene expression and the resultant HTT protein production. The AAV particles comprising modulatory polynucleotides encoding the siRNA molecules may be inserted into recombinant adeno-associated virus (AAV) vectors. Methods for using the AAV particles to inhibit the HTT gene expression in a subject with a neurodegenerative disease (e.g., Huntington's Disease (HD)) are also disclosed.

### BACKGROUND OF THE INVENTION

[0004] Huntington's Disease (HD) is a monogenic fatal neurodegenerative disease characterized by progressive chorea, neuropsychiatric and cognitive dysfunction. Huntington's Disease is known to be caused by an autosomal dominant triplet (CAG) repeat expansion which encodes poly-glutamine in the N-terminus of the huntingtin (HTT) protein. This repeat expansion results in a toxic gain of function of HTT and ultimately leads to striatal neurodegeneration which progresses to widespread brain atrophy. Symptoms typically appear between the ages of 35-44 and life expectancy subsequent to onset is 10-25 years. Interestingly, the length of the HTT expansion correlates with both age of onset and rate of disease progression, with longer expansions linked to greater severity of disease. In a small percentage of the HD population (˜6%), disease onset occurs from 2-20 years of age with appearance of an akinetic-rigid syndrome. These cases tend to progress faster than those of the later onset variety and have been classified as juvenile or Westphal variant HD. It is estimated that approximately 35,000-70,000 patients are currently suffering from HD in the US and Europe. Currently, only symptomatic relief and supportive therapies are available for treatment of HD, with a cure yet to be identified. Ultimately, individuals with HD succumb to other diseases (e.g., pneumonia, heart failure), choking, suffocation or other complications such as physical injury from falls.

[0005] The mechanisms by which CAG-expanded HTT results in neurotoxicity are not well understood. Huntingtin protein is expressed in all cells, though its concentration is highest in the brain. The normal function of HTT is unknown, but in the brains of HD patients, HTT aggregates into abnormal nuclear inclusions. It is now believed that it is this process of misfolding and aggregating along with the associated protein intermediates (i.e. the soluble species and toxic N-terminal fragments) that result in neurotoxicity.

[0006] Studies in animal models of HD have suggested that phenotypic reversal is feasible, for example, subsequent to gene shut off in regulated-expression models. Further, animal models in which silencing of HTT was tested, demonstrated promising results with the therapy being both well tolerated and showing potential therapeutic benefit. These findings indicate that HTT silencing may serve as a potential therapeutic target for treatment of HD.

[0007] The adeno-associated virus (AAV) is a member of the parvovirus family and has emerged as an attractive vector for gene therapy in large part because this virus is apparently non-pathogenic; in fact, AAV has not been associated with any human disease. Further appeal is due to its ability to transduce dividing and non-diving cells (including efficient transduction of neurons), diminished proinflammatory and immune responses in humans, its inability to autonomously replicate without a helper virus (AAV is a helper-dependent DNA parvovirus which belongs to the genus Dependovirus), and its long-term gene expression. Although over 10 recombinant AAV serotypes (rAAV) have been engineered into vectors, rAAV2 is the most frequently employed serotype for gene therapy trials. Additional rAAV serotypes have been developed and tested in animal models that are more efficient at neuronal transduction.

[0008] The present invention develops an AAV particle comprising modulatory polynucleotides encoding novel double stranded RNA (dsRNA) constructs and siRNA constructs and methods of their design, to inhibit or prevent the expression of CAG-expanded HTT in HD patients for treatment of the disease.

### SUMMARY OF THE INVENTION

[0009] Described herein are methods, processes, compositions kits and devices for the administration of AAV particles comprising modulatory polynucleotides encoding siRNA molecules for the treatment, prophylaxis, palliation and/or amelioration of Huntington's Disease (HD) related symptoms and disorders.

[0010] The present invention provides viral genomes comprising modulatory polynucleotides encoding siRNA molecules to target HTT and reduce the expression of HTT in a cell and/or subject.

[0011] In some embodiments the viral genome comprises a 5′ inverted terminal repeat (ITR) sequence region such as, but not limited to, SEQ ID NO: 1380 and 1381, an enhancer sequence region such as, but not limited to, SEQ ID NO: 1408 and 1409, a promoter sequence region such as, but not limited to, SEQ ID NO: 1410-1411 and the sequence GTTG, at least one intron sequence region such as, but not limited to, SEQ ID NO: 1417-1419, a modulatory polynucleotide sequence region such as, but not limited to, SEQ ID NO: 1183-1279 and 1346-1347, a polyadenylation (polyA) signal sequence region such as, but not limited to, SEQ ID NO: 1420-1423, and a 3′ ITR sequence region such as, but not limited to, SEQ ID NO: 1382 and 1383.

[0012] In some embodiments, the viral genome may comprise at least one more sequence region.

[0013] In one embodiment, the viral genome comprises at least one multiple cloning site (MCS) sequence region such as, but not limited to, SEQ ID NO: 384-1390 and the sequence TCGAG. In one embodiment, the viral genome comprises one MCS sequence region. In one embodiment, the viral genome comprises two MCS sequence regions.

[0014] In one embodiment, the viral genome comprises at least one filler sequence region such as, but not limited to, SEQ ID NO: 1390-1407. In one embodiment, the AAV viral genome comprises one filler sequence region. In one embodiment, the AAV viral genome comprises two filler sequence regions.

[0015] In one embodiment, the viral genome comprises at least one exon sequence region such as, but not limited to, SEQ ID NO: 1415 and 1416.

[0016] In one embodiment, the viral genome comprises one intron sequence region.

[0017] In one embodiment, the viral genome comprises two intron sequence regions.

[0018] In one embodiment, the viral genome comprises a 5′ inverted terminal repeat (ITR) sequence region, an enhancer sequence region, a promoter sequence region, at least one intron sequence region, a modulatory polynucleotide sequence region, a polyadenylation (polyA) signal sequence region, and a 3′ ITR sequence region. As a non-limiting example, the AAV viral genome comprises a sequence such as SEQ ID NO: 1352-1379 or a fragment or variant thereof.

[0019] In one embodiment, the viral genome such as, but not limited to, any of SEQ ID NO: 1352-1379 or variants having at least 95% identity thereto.

[0020] In one embodiment, an AAV particle may comprise a viral genome such as, but not limited to, any of SEQ ID NO: 1352-1379 or variants having at least 95% identity thereto. The AAV particle may comprise a serotype such as, but not limited to, any of the serotypes listed in Table 1.

[0021] Provided herein are also pharmaceutical compositions of AAV particles. The AAV particle may comprise a viral genome such as, but not limited to, any of SEQ ID NO: 1352-1379 or variants having at least 95% identity thereto. The AAV particle may comprise a serotype such as, but not limited to, any of the serotypes listed in Table 1.

[0022] In some embodiments, the present invention provides methods for inhibiting/silencing HTT gene expression in a cell. The cell may be a neuron (e.g., medium spiny neurons of the putamen, caudate or striatum, and cortical neurons in the cerebral cortex), an astrocyte (e.g., astrocyte in the striatum, cortical astrocytes in the cerebral cortex) and/or oligodendrocytes. As a non-limiting example, the inhibition (or lowering) of the HTT gene expression in the putamen, caudate and cortex reduces the effect of Huntington's Disease in a subject. As another non-limiting example, the inhibition (or lowering) of the HTT gene expression in the medium spiny neurons in the striatum reduces the effect of Huntington's Disease in a subject. As yet another non-limiting example, the inhibition (or lowering) of the HTT gene expression in the astrocytes in the striatum reduces the effect of Huntington's Disease in a subject. In some aspects, the inhibition of the HTT gene expression refers to an inhibition or lowering by at least about 20%, preferably by at least about 30%, 40%, 50%, 60%, 70%, 80%, 85%, 90%, 95% and 100%. Accordingly, the protein product of the targeted gene may be inhibited by at least about 20%, preferably by at least about 30%, 40%, 50%, 60%, 70%, 80%, 85%, 90%, 95% and 100%.

[0023] In one embodiment, the present invention provides methods for inhibiting/silencing HTT gene expression by at least about 40% in a cell using the viral genomes comprising the modulatory polynucleotides encoding the siRNA molecules. The cell may be a neuron (e.g., medium spiny neurons of the putamen or striatum, and cortical neurons in the cerebral cortex), an astrocyte (e.g., astrocyte in the striatum, cortical astrocytes in the cerebral cortex) and/or oligodendrocytes. As a non-limiting example, the at least 40% inhibition (or lowering) of the HTT gene expression in the putamen and cortex reduces the effect of Huntington's Disease in a subject. As another non-limiting example, the at least 40% inhibition (or lowering) of the HTT gene expression in the medium spiny neurons in the striatum reduces the effect of Huntington's Disease in a subject. As yet another non-limiting example, the at least 40% inhibition (or lowering) of the HTT gene expression in the astrocytes in the striatum reduces the effect of Huntington's Disease in a subject.

[0024] In some embodiments, the present invention provides methods for treating, or ameliorating Huntington's Disease associated with the HTT gene (e.g., CAG-expanded HTT gene) and the resultant HTT protein (e.g., poly-Q protein) in a subject in need of treatment, the method comprising administering to the subject a pharmaceutically effective amount a pharmaceutical composition comprising the AAV particles described herein, and ameliorating symptoms of HD in the subject.

[0025] In some embodiments, an AAV particle comprising the nucleic acid sequence encoding at least one siRNA duplex targeting the HTT gene is administered to the subject in need for treating and/or ameliorating HD. The AAV vector serotype may be any of the serotypes listed in Table 1.

[0026] In some embodiments, the AAV particles may be introduced directly into the central nervous system of the subject, for example, by intracranial injection.

[0027] In some embodiments, the pharmaceutical composition of the present invention is used as a solo therapy. In other embodiments, the pharmaceutical composition of the present invention is used in combination therapy. The combination therapy may be in combination with one or more neuroprotective agents such as small molecule compounds, growth factors and hormones which have been tested for their neuroprotective effect on neuron degeneration.

[0028] In some embodiments, the present invention provides methods for treating, or ameliorating Huntington's Disease by administering to a subject in need thereof a therapeutically effective amount of a plasmid or AAV vector described herein.

[0029] In some embodiments, the present invention provides a method for inhibiting the expression of the HTT gene in a region of the central nervous system of a subject by administering to the subject a composition with at least one AAV particle which comprises a modulatory polynucleotide encoding an siRNA molecule that, when expressed, inhibits or suppresses the expression of HTT in the subject. The expression may be reduced in a region of the subject such as, but not limited to, the forebrain of a subject or a region of the forebrain such as, but not limited to, the putamen. The expression of HTT in the forebrain or region of the forebrain (e.g., putamen) may be reduced by 40-70%, 40-60%, 50-70%, 50-60%, or it may be reduced by 50%, 51%, 52%, 53%, 54%, 55%, 56%, 57%, 58%, 59%, or 60%.

[0030] In some embodiments, the present invention provides a method for treating Huntington's Disease (HD) in a subject in need of treatment. The method may inhibit the expression of the HTT gene in a region of the central nervous system of a subject comprising administering to the subject a composition comprising at least one AAV particle which comprises a modulatory polynucleotide encoding an siRNA molecule that, when expressed, inhibits or suppresses the expression of HTT in the subject. The expression may be reduced in a region of the subject such as, but not limited to, the forebrain of a subject or a region of the forebrain such as, but not limited to, the putamen. The expression of HTT in the forebrain or region of the forebrain (e.g., putamen) may be reduced by 40-70%, 40-60%, 50-70%, 50-60%, or it may be reduced by 50%, 51%, 52%, 53%, 54%, 55%, 56%, 57%, 58%, 59%, or 60%.

### BRIEF DESCRIPTION OF THE DRAWINGS

[0031] The foregoing and other objects, features and advantages will be apparent from the following description of particular embodiments of the invention, as illustrated in the accompanying drawings. The drawings are not necessarily to scale, emphasis instead being placed upon illustrating the principles of various embodiments of the invention.

[0032] FIG. 1 is a schematic of a viral genome of the invention.

[0033] FIG. 2 is a schematic of a viral genome of the invention.

[0034] FIG. 3 is a schematic of a viral genome of the invention.

[0035] FIG. 4 is a schematic of a viral genome of the invention.

[0036] FIG. 5 is a schematic of a viral genome of the invention.

[0037] FIG. 6 is a schematic of a viral genome of the invention.

[0038] FIG. 7 is a schematic of a viral genome of the invention.

[0039] FIG. 8 is a schematic of a viral genome of the invention.

[0040] FIG. 9 is a schematic of a viral genome of the invention.

[0041] The details of one or more embodiments of the invention are set forth in the accompanying description below. Although any materials and methods similar or equivalent to those described herein can be used in the practice or testing of the present invention, the preferred materials and methods are now described. Other features, objects and advantages of the invention will be apparent from the description. In the description, the singular forms also include the plural unless the context clearly dictates otherwise. Unless defined otherwise, all technical and scientific terms used herein have the same meaning as commonly understood by one of ordinary skill in the art to which this invention belongs. In the case of conflict, the present description will control.

### DETAILED DESCRIPTION OF THE INVENTION

### I. Compositions of the Invention

[0042] According to the present invention, compositions for delivering modulatory polynucleotides and/or modulatory polynucleotide-based compositions by adeno-associated viruses (AAVs) are provided. AAV particles of the invention may be provided via any of several routes of administration, to a cell, tissue, organ, or organism, in vivo, ex vivo or in vitro.

[0043] As used herein, an “AAV particle” is a virus which comprises a viral genome with at least one payload region and at least one inverted terminal repeat (ITR) region.

[0044] As used herein, “viral genome” or “vector genome” or “viral vector” refers to the nucleic acid sequence(s) encapsulated in an AAV particle. Viral genomes comprise at least one payload region encoding polypeptides or fragments thereof.

[0045] As used herein, a “payload” or “payload region” is any nucleic acid molecule which encodes one or more polypeptides of the invention. At a minimum, a payload region comprises nucleic acid sequences that encode a sense and antisense sequence, an siRNA-based composition, or a fragment thereof, but may also optionally comprise one or more functional or regulatory elements to facilitate transcriptional expression and/or polypeptide translation.

[0046] The nucleic acid sequences and polypeptides disclosed herein may be engineered to contain modular elements and/or sequence motifs assembled to enable expression of the modulatory polynucleotides and/or modulatory polynucleotide-based compositions of the invention. In some embodiments, the nucleic acid sequence comprising the payload region may comprise one or more of a promoter region, an intron, a Kozak sequence, an enhancer or a polyadenylation sequence. Payload regions of the invention typically encode at least one sense and antisense sequence, an siRNA-based compositions, or fragments of the foregoing in combination with each other or in combination with other polypeptide moieties.

[0047] The payload regions of the invention may be delivered to one or more target cells, tissues, organs or organisms within the viral genome of an AAV particle.

### Adeno-Associated Viruses (AAVs) and AAV Particles

[0048] Viruses of the Parvoviridae family are small non-enveloped icosahedral capsid viruses characterized by a single stranded DNA genome. Parvoviridae family viruses consist of two subfamilies: Parvovirinae, which infect vertebrates, and Densovirinae, which infect invertebrates. Due to its relatively simple structure, easily manipulated using standard molecular biology techniques, this virus family is useful as a biological tool. The genome of the virus may be modified to contain a minimum of components for the assembly of a functional recombinant virus, or viral particle, which is loaded with or engineered to express or deliver a desired payload, which may be delivered to a target cell, tissue, organ, or organism.

[0049] The parvoviruses and other members of the Parvoviridae family are generally described in Kenneth I. Berns, “Parvoviridae: The Viruses and Their Replication,” Chapter 69 in FIELDS VIROLOGY (3d Ed. 1996), the contents of which are incorporated by reference in their entirety.

[0050] The Parvoviridae family comprises the Dependovirus genus which includes adeno-associated viruses (AAV) capable of replication in vertebrate hosts including, but not limited to, human, primate, bovine, canine, equine, and ovine species.

[0051] The AAV viral genome is a linear, single-stranded DNA (ssDNA) molecule approximately 5,000 nucleotides (nt) in length. The AAV viral genome can comprise a payload region and at least one inverted terminal repeat (ITR) or ITR region. ITRs traditionally flank the coding nucleotide sequences for the non-structural proteins (encoded by Rep genes) and the structural proteins (encoded by capsid genes or Cap genes). While not wishing to be bound by theory, an AAV viral genome typically comprises two ITR sequences. The AAV viral genome comprises a characteristic T-shaped hairpin structure defined by the self-complementary terminal 145 nt of the 5′ and 3′ ends of the ssDNA which form an energetically stable double stranded region. The double stranded hairpin structures comprise multiple functions including, but not limited to, acting as an origin for DNA replication by functioning as primers for the endogenous DNA polymerase complex of the host viral replication cell.

[0052] In addition to the encoded heterologous payload, AAV vectors may comprise the viral genome, in whole or in part, of any naturally occurring and/or recombinant AAV serotype nucleotide sequence or variant. AAV variants may have sequences of significant homology at the nucleic acid (genome or capsid) and amino acid levels (capsids), to produce constructs which are generally physical and functional equivalents, replicate by similar mechanisms, and assemble by similar mechanisms. Chiorini et al., J. Vir. 71: 6823-33(1997); Srivastava et al., J. Vir. 45:555-64 (1983); Chiorini et al., J. Vir. 73:1309-1319 (1999); Rutledge et al., J. Vir. 72:309-319 (1998); and Wu et al., J. Vir. 74: 8635-47 (2000), the contents of each of which are incorporated herein by reference in their entirety.

[0053] In one embodiment, AAV particles of the present invention are recombinant AAV vectors which are replication defective, lacking sequences encoding functional Rep and Cap proteins within their viral genome. These defective AAV vectors may lack most or all parental coding sequences and essentially carry only one or two AAV ITR sequences and the nucleic acid of interest for delivery to a cell, a tissue, an organ or an organism.

[0054] In one embodiment, the viral genome of the AAV particles of the present invention comprise at least one control element which provides for the replication, transcription and translation of a coding sequence encoded therein. Not all of the control elements need always be present as long as the coding sequence is capable of being replicated, transcribed and/or translated in an appropriate host cell. Non-limiting examples of expression control elements include sequences for transcription initiation and/or termination, promoter and/or enhancer sequences, efficient RNA processing signals such as splicing and polyadenylation signals, sequences that stabilize cytoplasmic mRNA, sequences that enhance translation efficacy (e.g., Kozak consensus sequence), sequences that enhance protein stability, and/or sequences that enhance protein processing and/or secretion.

[0055] According to the present invention, AAV particles for use in therapeutics and/or diagnostics comprise a virus that has been distilled or reduced to the minimum components necessary for transduction of a nucleic acid payload or cargo of interest. In this manner, AAV particles are engineered as vehicles for specific delivery while lacking the deleterious replication and/or integration features found in wild-type viruses.

[0056] AAV vectors of the present invention may be produced recombinantly and may be based on adeno-associated virus (AAV) parent or reference sequences. As used herein, a “vector” is any molecule or moiety which transports, transduces or otherwise acts as a carrier of a heterologous molecule such as the nucleic acids described herein.

[0057] In addition to single stranded AAV viral genomes (e.g., ssAAVs), the present invention also provides for self-complementary AAV (scAAVs) viral genomes. scAAV viral genomes contain DNA strands which anneal together to form double stranded DNA. By skipping second strand synthesis, scAAVs allow for rapid expression in the cell.

[0058] In one embodiment, the AAV particle of the present invention is an scAAV.

[0059] In one embodiment, the AAV particle of the present invention is an ssAAV.

[0060] Methods for producing and/or modifying AAV particles are disclosed in the art such as pseudotyped AAV vectors (PCT Patent Publication Nos. WO200028004; WO200123001; WO2004112727; WO 2005005610 and WO 2005072364, the content of each of which is incorporated herein by reference in its entirety).

[0061] AAV particles may be modified to enhance the efficiency of delivery. Such modified AAV particles can be packaged efficiently and be used to successfully infect the target cells at high frequency and with minimal toxicity. In some embodiments the capsids of the AAV particles are engineered according to the methods described in US Publication Number US 20130195801, the contents of which are incorporated herein by reference in their entirety.

[0062] In one embodiment, the AAV particles comprising a payload region encoding the polypeptides of the invention may be introduced into mammalian cells.

### AAV Serotypes

[0063] AAV particles of the present invention may comprise or be derived from any natural or recombinant AAV serotype. According to the present invention, the AAV particles may utilize or be based on a serotype selected from any of the following AAV1, AAV2, AAV2G9, AAV3, AAV3a, AAV3b, AAV3-3, AAV4, AAV4-4, AAV5, AAV6, AAV6.1, AAV6.2, AAV6.1.2, AAV7, AAV7.2, AAV8, AAV9, AAV9.11, AAV9.13, AAV9.16, AAV9.24, AAV9.45, AAV9.47, AAV9.61, AAV9.68, AAV9.84, AAV9.9, AAV10, AAV11, AAV12, AAV16.3, AAV24.1, AAV27.3, AAV42.12, AAV42-1b, AAV42-2, AAV42-3a, AAV42-3b, AAV42-4, AAV42-5a, AAV42-5b, AAV42-6b, AAV42-8, AAV42-10, AAV42-11, AAV42-12, AAV42-13, AAV42-15, AAV42-aa, AAV43-1, AAV43-12, AAV43-20, AAV43-21, AAV43-23, AAV43-25, AAV43-5, AAV44.1, AAV44.2, AAV44.5, AAV223.1, AAV223.2, AAV223.4, AAV223.5, AAV223.6, AAV223.7, AAV1-7/rh.48, AAV1-8/rh.49, AAV2-15/rh.62, AAV2-3/rh.61, AAV2-4/rh.50, AAV2-5/rh.51, AAV3.1/hu.6, AAV3.1/hu.9, AAV3-9/rh.52, AAV3-11/rh.53, AAV4-8/r11.64, AAV4-9/rh.54, AAV4-19/rh.55, AAV5-3/rh.57, AAV5-22/rh.58, AAV7.3/hu.7, AAV16.8/hu.10, AAV16.12/hu.11, AAV29.3/bb.1, AAV29.5/bb.2, AAV106.1/hu.37, AAV114.3/hu.40, AAV127.2/hu.41, AAV127.5/hu.42, AAV128.3/hu.44, AAV130.4/hu.48, AAV145.1/hu.53, AAV145.5/hu.54, AAV145.6/hu.55, AAV161.10/hu.60, AAV161.6/hu.61, AAV33.12/hu.17, AAV33.4/hu.15, AAV33.8/hu.16, AAV52/hu.19, AAV52.1/hu.20, AAV58.2/hu.25, AAVA3.3, AAVA3.4, AAVA3.5, AAVA3.7, AAVC1, AAVC2, AAVC5, AAV-DJ, AAV-DJ8, AAVF3, AAVF5, AAVH2, AAVrh.72, AAVhu.8, AAVrh.68, AAVrh.70, AAVpi.1, AAVpi.3, AAVpi.2, AAVrh.60, AAVrh.44, AAVrh.65, AAVrh.55, AAVrh.47, AAVrh.69, AAVrh.45, AAVrh.59, AAVhu.12, AAVH6, AAVLK03, AAVH-1/hu.1, AAVH-5/hu.3, AAVLG-10/rh.40, AAVLG-4/rh.38, AAVLG-9/hu.39, AAVN721-8/rh.43, AAVCh.5, AAVCh.5R1, AAVcy.2, AAVcy.3, AAVcy.4, AAVcy.5, AAVCy.5R1, AAVCy.5R2, AAVCy.5R3, AAVCy.5R4, AAVcy.6, AAVhu.1, AAVhu.2, AAVhu.3, AAVhu.4, AAVhu.5, AAVhu.6, AAVhu.7, AAVhu.9, AAVhu.10, AAVhu.11, AAVhu.13, AAVhu.15, AAVhu.16, AAVhu.17, AAVhu.18, AAVhu.20, AAVhu.21, AAVhu.22, AAVhu.23.2, AAVhu.24, AAVhu.25, AAVhu.27, AAVhu.28, AAVhu.29, AAVhu.29R, AAVhu.31, AAVhu.32, AAVhu.34, AAVhu.35, AAVhu.37, AAVhu.39, AAVhu.40, AAVhu.41, AAVhu.42, AAVhu.43, AAVhu.44, AAVhu.44R1, AAVhu.44R2, AAVhu.44R3, AAVhu.45, AAVhu.46, AAVhu.47, AAVhu.48, AAVhu.48R1, AAVhu.48R2, AAVhu.48R3, AAVhu.49, AAVhu.51, AAVhu.52, AAVhu.54, AAVhu.55, AAVhu.56, AAVhu.57, AAVhu.58, AAVhu.60, AAVhu.61, AAVhu.63, AAVhu.64, AAVhu.66, AAVhu.67, AAVhu.14/9, AAVhu.t 19, AAVrh.2, AAVrh.2R, AAVrh.8, AAVrh.8R, AAVrh.10, AAVrh.12, AAVrh.13, AAVrh.13R, AAVrh.14, AAVrh.17, AAVrh.18, AAVrh.19, AAVrh.20, AAVrh.21, AAVrh.22, AAVrh.23, AAVrh.24, AAVrh.25, AAVrh.31, AAVrh.32, AAVrh.33, AAVrh.34, AAVrh.35, AAVrh.36, AAVrh.37, AAVrh.37R2, AAVrh.38, AAVrh.39, AAVrh.40, AAVrh.46, AAVrh.48, AAVrh.48.1, AAVrh.48.1.2, AAVrh.48.2, AAVrh.49, AAVrh.51, AAVrh.52, AAVrh.53, AAVrh.54, AAVrh.56, AAVrh.57, AAVrh.58, AAVrh.61, AAVrh.64, AAVrh.64R1, AAVrh.64R2, AAVrh.67, AAVrh.73, AAVrh.74, AAVrh8R, AAVrh8R A586R mutant, AAVrh8R R533A mutant, AAAV, BAAV, caprine AAV, bovine AAV, ovine AAV, AAVhE1.1, AAVhEr1.5, AAVhER1.14, AAVhEr1.8, AAVhEr1.16, AAVhEr1.18, AAVhEr1.35, AAVhEr1.7, AAVhEr1.36, AAVhEr2.29, AAVhEr2.4, AAVhEr2.16, AAVhEr2.30, AAVhEr2.31, AAVhEr2.36, AAVhER1.23, AAVhEr3.1, AAV2.5T, AAV-PAEC, AAV-LK01, AAV-LK02, AAV-LK03, AAV-LK04, AAV-LK05, AAV-LK06, AAV-LK07, AAV-LK08, AAV-LK09, AAV-LK10, AAV-LK11, AAV-LK12, AAV-LK13, AAV-LK14, AAV-LK15, AAV-LK16, AAV-LK17, AAV-LK18, AAV-LK19, AAV-PAEC2, AAV-PAEC4, AAV-PAEC6, AAV-PAEC7, AAV-PAEC8, AAV-PAEC11, AAV-PAEC12, AAV-2-pre-miRNA-101, AAV-8h, AAV-8b, AAV-h, AAV-b, AAV SM 10-2, AAV Shuffle 100-1, AAV Shuffle 100-3, AAV Shuffle 100-7, AAV Shuffle 10-2, AAV Shuffle 10-6, AAV Shuffle 10-8, AAV Shuffle 100-2, AAV SM 10-1, AAV SM 10-8, AAV SM 100-3, AAV SM 100-10, BNP61 AAV, BNP62 AAV, BNP63 AAV, AAVrh.50, AAVrh.43, AAVrh.62, AAVrh.48, AAVhu.19, AAVhu.11, AAVhu.53, AAV4-8/rh.64, AAVLG-9/hu.39, AAV54.5/hu.23, AAV54.2/hu.22, AAV54.7/hu.24, AAV54.1/hu.21, AAV54.4R/hu.27, AAV46.2/hu.28, AAV46.6/hu.29, AAV128.1/hu.43, true type AAV (ttAAV), UPENN AAV 10, Japanese AAV 10 serotypes, AAV CBr-7.1, AAV CBr-7.10, AAV CBr-7.2, AAV CBr-7.3, AAV CBr-7.4, AAV CBr-7.5, AAV CBr-7.7, AAV CBr-7.8, AAV CBr-B7.3, AAV CBr-B7.4, AAV CBr-E1, AAV CBr-E2, AAV CBr-E3, AAV CBr-E4, AAV CBr-E5, AAV CBr-e5, AAV CBr-E6, AAV CBr-E7, AAV CBr-E8, AAV CHt-1, AAV CHt-2, AAV CHt-3, AAV CHt-6.1, AAV CHt-6.10, AAV CHt-6.5, AAV CHt-6.6, AAV CHt-6.7, AAV CHt-6.8, AAV CHt-P1, AAV CHt-P2, AAV CHt-P5, AAV CHt-P6, AAV CHt-P8, AAV CHt-P9, AAV CKd-1, AAV CKd-10, AAV CKd-2, AAV CKd-3, AAV CKd-4, AAV CKd-6, AAV CKd-7, AAV CKd-8, AAV CKd-B1, AAV CKd-B2, AAV CKd-B3, AAV CKd-B4, AAV CKd-B5, AAV CKd-B6, AAV CKd-B7, AAV CKd-B8, AAV CKd-H1, AAV CKd-H2, AAV CKd-H3, AAV CKd-H4, AAV CKd-H5, AAV CKd-H6, AAV CKd-N3, AAV CKd-N4, AAV CKd-N9, AAV CLg-F1, AAV CLg-F2, AAV CLg-F3, AAV CLg-F4, AAV CLg-F5, AAV CLg-F6, AAV CLg-F7, AAV CLg-F8, AAV CLv-1, AAV CLv1-1, AAV Clv1-10, AAV CLv1-2, AAV CLv-12, AAV CLv1-3, AAV CLv-13, AAV CLv1-4, AAV Clv1-7, AAV Clv1-8, AAV Clv1-9, AAV CLv-2, AAV CLv-3, AAV CLv-4, AAV CLv-6, AAV CLv-8, AAV CLv-D1, AAV CLv-D2, AAV CLv-D3, AAV CLv-D4, AAV CLv-D5, AAV CLv-D6, AAV CLv-D7, AAV CLv-D8, AAV CLv-E1, AAV CLv-K1, AAV CLv-K3, AAV CLv-K6, AAV CLv-L4, AAV CLv-L5, AAV CLv-L6, AAV CLv-M1, AAV CLv-M11, AAV CLv-M2, AAV CLv-M5, AAV CLv-M6, AAV CLv-M7, AAV CLv-M8, AAV CLv-M9, AAV CLv-R1, AAV CLv-R2, AAV CLv-R3, AAV CLv-R4, AAV CLv-R5, AAV CLv-R6, AAV CLv-R7, AAV CLv-R8, AAV CLv-R9, AAV CSp-1, AAV CSp-10, AAV CSp-11, AAV CSp-2, AAV CSp-3, AAV CSp-4, AAV CSp-6, AAV CSp-7, AAV CSp-8, AAV CSp-8.10, AAV CSp-8.2, AAV CSp-8.4, AAV CSp-8.5, AAV CSp-8.6, AAV CSp-8.7, AAV CSp-8.8, AAV CSp-8.9, AAV CSp-9, AAV.hu.48R3, AAV.VR-355, AAV3B, AAV4, AAV5, AAVF1/HSC1, AAVF11/HSC11, AAVF12/HSC12, AAVF13/HSC13, AAVF14/HSC14, AAVF15/HSC15, AAVF16/HSC16, AAVF17/HSC17, AAVF2/HSC2, AAVF3/HSC3, AAVF4/HSC4, AAVF5/HSC5, AAVF6/HSC6, AAVF7/HSC7, AAVF8/HSC8, AAVF9/HSC9, AAV-PHP.B (PHP.B), AAV-PHP.A (PHP.A), G2B-26, G2B-13, TH1.1-32, TH1.1-35, AAVPHP.B2, AAVPHP.B3, AAVPHP.N/PHP.B-DGT, AAVPHP.B-EST, AAVPHP.B-GGT, AAVPHP.B-ATP, AAVPHP.B-ATT-T, AAVPHP.B-DGT-T, AAVPHP.B-GGT-T, AAVPHP.B-SGS, AAVPHP.B-AQP, AAVPHP.B-QQP, AAVPHP.B-SNP(3), AAVPHP.B-SNP, AAVPHP.B-QGT, AAVPHP.B-NQT, AAVPHP.B-EGS, AAVPHP.B-SGN, AAVPHP.B-EGT, AAVPHP.B-DST, AAVPHP.B-DST, AAVPHP.B-STP, AAVPHP.B-PQP, AAVPHP.B-SQP, AAVPHP.B-QLP, AAVPHP.B-TMP, AAVPHP.B-TTP, AAVPHP.S/G2A12, AAVG2A15/G2A3, AAVG2B4, and/or AAVG2B5 and variants thereof.

[0064] In some embodiments, the AAV serotype may be, or have, a modification as described in United States Publication No. US 20160361439, the contents of which are herein incorporated by reference in their entirety, such as but not limited to, Y252F, Y272F, Y444F, Y500F, Y700F, Y704F, Y730F, Y275F, Y281F, Y508F, Y576F, Y612G, Y673F, and Y720F of the wild-type AAV1, AAV2, AAV3, AAV4, AAV5, AAV6, AAV7, AAV8, AAV9, AAV10, AAV11, AAV12, and hybrids thereof.

[0065] In some embodiments, the AAV serotype may be, or have, a mutation as described in U.S. Pat. No. 9,546,112, the contents of which are herein incorporated by reference in their entirety, such as, but not limited to, at least two, but not all the F129L, D418E, K531E, L584F, V598A and H642N mutations in the sequence of AAV6 (SEQ ID NO:4 of U.S. Pat. No. 9,546,112), AAV1 (SEQ ID NO:6 of U.S. Pat. No. 9,546,112), AAV2, AAV3, AAV4, AAV5, AAV7, AAV9, AAV10 or AAV 11 or derivatives thereof. In yet another embodiment, the AAV serotype may be, or have, an AAV6 sequence comprising the K531E mutation (SEQ ID NO:5 of U.S. Pat. No. 9,546,112).

[0066] In some embodiments, the AAV serotype may be, or have, a mutation in the AAV1 sequence, as described in in United States Publication No. US 20130224836, the contents of which are herein incorporated by reference in their entirety, such as, but not limited to, at least one of the surface-exposed tyrosine residues, preferably, at positions 252, 273, 445, 701, 705 and 731 of AAV1 (SEQ ID NO: 2 of US 20130224836) substituted with another amino acid, preferably with a phenylalanine residue. In one embodiment, the AAV serotype may be, or have, a mutation in the AAV9 sequence, such as, but not limited to, at least one of the surface-exposed tyrosine residues, preferably, at positions 252, 272, 444, 500, 700, 704 and 730 of AAV2 (SEQ ID NO: 4 of US 20130224836) substituted with another amino acid, preferably with a phenylalanine residue. In one embodiment, the tyrosine residue at position 446 of AAV9 (SEQ ID NO: 6 US 20130224836) is substituted with a phenylalanine residue.

[0067] In some embodiments, the serotype may be AAV2 or a variant thereof, as described in International Publication No. WO2016130589, herein incorporated by reference in its entirety. The amino acid sequence of AAV2 may comprise N587A, E548A, or N708A mutations. In one embodiment, the amino acid sequence of any AAV may comprise a V708K mutation.

[0068] In some embodiments, the AAV serotype may be, or have, a sequence as described in United States Publication No. US20030138772, the contents of which are herein incorporated by reference in their entirety, such as, but not limited to, AAV1 (SEQ ID NO: 6 and 64 of US20030138772), AAV2 (SEQ ID NO: 7 and 70 of US20030138772), AAV3 (SEQ ID NO: 8 and 71 of US20030138772), AAV4 (SEQ ID NO: 63 of US20030138772), AAV5 (SEQ ID NO: 114 of US20030138772), AAV6 (SEQ ID NO: 65 of US20030138772), AAV7 (SEQ ID NO: 1-3 of US20030138772), AAV8 (SEQ ID NO: 4 and 95 of US20030138772), AAV9 (SEQ ID NO: 5 and 100 of US20030138772), AAV10 (SEQ ID NO: 117 of US20030138772), AAV11 (SEQ ID NO: 118 of US20030138772), AAV12 (SEQ ID NO: 119 of US20030138772), AAVrh10 (amino acids 1 to 738 of SEQ ID NO: 81 of US20030138772), AAV16.3 (US20030138772 SEQ ID NO: 10), AAV29.3/bb.1 (US20030138772 SEQ ID NO: 11), AAV29.4 (US20030138772 SEQ ID NO: 12), AAV29.5/bb.2 (US20030138772 SEQ ID NO: 13), AAV1.3 (US20030138772 SEQ ID NO: 14), AAV13.3 (US20030138772 SEQ ID NO: 15), AAV24.1 (US20030138772 SEQ ID NO: 16), AAV27.3 (US20030138772 SEQ ID NO: 17), AAV7.2 (US20030138772 SEQ ID NO: 18), AAVC1 (US20030138772 SEQ ID NO: 19), AAVC3 (US20030138772 SEQ ID NO: 20), AAVC5 (US20030138772 SEQ ID NO: 21), AAVF1 (US20030138772 SEQ ID NO: 22), AAVF3 (US20030138772 SEQ ID NO: 23), AAVF5 (US20030138772 SEQ ID NO: 24), AAVH6 (US20030138772 SEQ ID NO: 25), AAVH2 (US20030138772 SEQ ID NO: 26), AAV42-8 (US20030138772 SEQ ID NO: 27), AAV42-15 (US20030138772 SEQ ID NO: 28), AAV42-5b (US20030138772 SEQ ID NO: 29), AAV42-1b (US20030138772 SEQ ID NO: 30), AAV42-13 (US20030138772 SEQ ID NO: 31), AAV42-3a (US20030138772 SEQ ID NO: 32), AAV42-4 (US20030138772 SEQ ID NO: 33), AAV42-5a (US20030138772 SEQ ID NO: 34), AAV42-10 (US20030138772 SEQ ID NO: 35), AAV42-3b (US20030138772 SEQ ID NO: 36), AAV42-11 (US20030138772 SEQ ID NO: 37), AAV42-6b (US20030138772 SEQ ID NO: 38), AAV43-1 (US20030138772 SEQ ID NO: 39), AAV43-5 (US20030138772 SEQ ID NO: 40), AAV43-12 (US20030138772 SEQ ID NO: 41), AAV43-20 (US20030138772 SEQ ID NO: 42), AAV43-21 (US20030138772 SEQ ID NO: 43), AAV43-23 (US20030138772 SEQ ID NO: 44), AAV43-25 (US20030138772 SEQ ID NO: 45), AAV44.1 (US20030138772 SEQ ID NO: 46), AAV44.5 (US20030138772 SEQ ID NO: 47), AAV223.1 (US20030138772 SEQ ID NO: 48), AAV223.2 (US20030138772 SEQ ID NO: 49), AAV223.4 (US20030138772 SEQ ID NO: 50), AAV223.5 (US20030138772 SEQ ID NO: 51), AAV223.6 (US20030138772 SEQ ID NO: 52), AAV223.7 (US20030138772 SEQ ID NO: 53), AAVA3.4 (US20030138772 SEQ ID NO: 54), AAVA3.5 (US20030138772 SEQ ID NO: 55), AAVA3.7 (US20030138772 SEQ ID NO: 56), AAVA3.3 (US20030138772 SEQ ID NO: 57), AAV42.12 (US20030138772 SEQ ID NO: 58), AAV44.2 (US20030138772 SEQ ID NO: 59), AAV42-2 (US20030138772 SEQ ID NO: 9), or variants thereof.

[0069] In some embodiments, the AAV serotype may be, or have, a sequence as described in United States Publication No. US20150159173, the contents of which are herein incorporated by reference in their entirety, such as, but not limited to, AAV2 (SEQ ID NO: 7 and 23 of US20150159173), rh20 (SEQ ID NO: 1 of US20150159173), rh32/33 (SEQ ID NO: 2 of US20150159173), rh39 (SEQ ID NO: 3, 20 and 36 of US20150159173), rh46 (SEQ ID NO: 4 and 22 of US20150159173), rh73 (SEQ ID NO: 5 of US20150159173), rh74 (SEQ ID NO: 6 of US20150159173), AAV6.1 (SEQ ID NO: 29 of US20150159173), rh.8 (SEQ ID NO: 41 of US20150159173), rh.48.1 (SEQ ID NO: 44 of US20150159173), hu.44 (SEQ ID NO: 45 of US20150159173), hu.29 (SEQ ID NO: 42 of US20150159173), hu.48 (SEQ ID NO: 38 of US20150159173), rh54 (SEQ ID NO: 49 of US20150159173), AAV2 (SEQ ID NO: 7 of US20150159173), cy.5 (SEQ ID NO: 8 and 24 of US20150159173), rh.10 (SEQ ID NO: 9 and 25 of US20150159173), rh.13 (SEQ ID NO: 10 and 26 of US20150159173), AAV1 (SEQ ID NO: 11 and 27 of US20150159173), AAV3 (SEQ ID NO: 12 and 28 of US20150159173), AAV6 (SEQ ID NO: 13 and 29 of US20150159173), AAV7 (SEQ ID NO: 14 and 30 of US20150159173), AAV8 (SEQ ID NO: 15 and 31 of US20150159173), hu.13 (SEQ ID NO: 16 and 32 of US20150159173), hu.26 (SEQ ID NO: 17 and 33 of US20150159173), hu.37 (SEQ ID NO: 18 and 34 of US20150159173), hu.53 (SEQ ID NO: 19 and 35 of US20150159173), rh.43 (SEQ ID NO: 21 and 37 of US20150159173), rh2 (SEQ ID NO: 39 of US20150159173), rh.37 (SEQ ID NO: 40 of US20150159173), rh.64 (SEQ ID NO: 43 of US20150159173), rh.48 (SEQ ID NO: 44 of US20150159173), ch.5 (SEQ ID NO 46 of US20150159173), rh.67 (SEQ ID NO: 47 of US20150159173), rh.58 (SEQ ID NO: 48 of US20150159173), or variants thereof including, but not limited to Cy5R1, Cy5R2, Cy5R3, Cy5R4, rh.13R, rh.37R2, rh.2R, rh.8R, rh.48.1, rh.48.2, rh.48.1.2, hu.44R1, hu.44R2, hu.44R3, hu.29R, ch.5R1, rh64R1, rh64R2, AAV6.2, AAV6.1, AAV6.12, hu.48R1, hu.48R2, and hu.48R3.

[0070] In some embodiments, the AAV serotype may be, or have, a sequence as described in U.S. Pat. No. 7,198,951, the contents of which are herein incorporated by reference in their entirety, such as, but not limited to, AAV9 (SEQ ID NO: 1-3 of U.S. Pat. No. 7,198,951), AAV2 (SEQ ID NO: 4 of U.S. Pat. No. 7,198,951), AAV1 (SEQ ID NO: 5 of U.S. Pat. No. 7,198,951), AAV3 (SEQ ID NO: 6 of U.S. Pat. No. 7,198,951), and AAV8 (SEQ ID NO: 7 of U.S. Pat. No. 7,198,951).

[0071] In some embodiments, the AAV serotype may be, or have, a mutation in the AAV9 sequence as described by N Pulicherla et al. (Molecular Therapy 19(6):1070-1078 (2011), herein incorporated by reference in its entirety), such as but not limited to, AAV9.9, AAV9.11, AAV9.13, AAV9.16, AAV9.24, AAV9.45, AAV9.47, AAV9.61, AAV9.68, AAV9.84.

[0072] In some embodiments, the AAV serotype may be, or have, a sequence as described in U.S. Pat. No. 6,156,303, the contents of which are herein incorporated by reference in their entirety, such as, but not limited to, AAV3B (SEQ ID NO: 1 and 10 of U.S. Pat. No. 6,156,303), AAV6 (SEQ ID NO: 2, 7 and 11 of U.S. Pat. No. 6,156,303), AAV2 (SEQ ID NO: 3 and 8 of U.S. Pat. No. 6,156,303), AAV3A (SEQ ID NO: 4 and 9, of U.S. Pat. No. 6,156,303), or derivatives thereof.

[0073] In some embodiments, the AAV serotype may be, or have, a sequence as described in United States Publication No. US20140359799, the contents of which are herein incorporated by reference in their entirety, such as, but not limited to, AAV8 (SEQ ID NO: 1 of US20140359799), AAVDJ (SEQ ID NO: 2 and 3 of US20140359799), or variants thereof.

[0074] In some embodiments, the serotype may be AAVDJ (or AAV-DJ) or a variant thereof, such as AAVDJ8 (or AAV-DJ8), as described by Grimm et al. (Journal of Virology 82(12): 5887-5911 (2008), herein incorporated by reference in its entirety). The amino acid sequence of AAVDJ8 may comprise two or more mutations in order to remove the heparin binding domain (HBD). As a non-limiting example, the AAV-DJ sequence described as SEQ ID NO: 1 in U.S. Pat. No. 7,588,772, the contents of which are herein incorporated by reference in their entirety, may comprise two mutations: (1) R587Q where arginine (R; Arg) at amino acid 587 is changed to glutamine (Q; Gln) and (2) R590T where arginine (R; Arg) at amino acid 590 is changed to threonine (T; Thr). As another non-limiting example, may comprise three mutations: (1) K406R where lysine (K; Lys) at amino acid 406 is changed to arginine (R; Arg), (2) R587Q where arginine (R; Arg) at amino acid 587 is changed to glutamine (Q; Gln) and (3) R590T where arginine (R; Arg) at amino acid 590 is changed to threonine (T; Thr).

[0075] In some embodiments, the AAV serotype may be, or have, a sequence of AAV4 as described in International Publication No. WO1998011244, the contents of which are herein incorporated by reference in their entirety, such as, but not limited to AAV4 (SEQ ID NO: 1-20 of WO1998011244).

[0076] In some embodiments, the AAV serotype may be, or have, a mutation in the AAV2 sequence to generate AAV2G9 as described in International Publication No. WO2014144229 and herein incorporated by reference in its entirety.

[0077] In some embodiments, the AAV serotype may be, or have, a sequence as described in International Publication No. WO2005033321, the contents of which are herein incorporated by reference in their entirety, such as, but not limited to AAV3-3 (SEQ ID NO: 217 of WO2005033321), AAV1 (SEQ ID NO: 219 and 202 of WO2005033321), AAV106.1/hu.37 (SEQ ID No: 10 of WO2005033321), AAV114.3/hu.40 (SEQ ID No: 11 of WO2005033321), AAV127.2/hu.41 (SEQ ID NO:6 and 8 of WO2005033321), AAV128.3/hu.44 (SEQ ID No: 81 of WO2005033321), AAV130.4/hu.48 (SEQ ID NO: 78 of WO2005033321), AAV145.1/hu.53 (SEQ ID No: 176 and 177 of WO2005033321), AAV145.6/hu.56 (SEQ ID NO: 168 and 192 of WO2005033321), AAV16.12/hu.11 (SEQ ID NO: 153 and 57 of WO2005033321), AAV16.8/hu.10 (SEQ ID NO: 156 and 56 of WO2005033321), AAV161.10/hu.60 (SEQ ID No: 170 of WO2005033321), AAV161.6/hu.61 (SEQ ID No: 174 of WO2005033321), AAV1-7/rh.48 (SEQ ID NO: 32 of WO2005033321), AAV1-8/rh.49 (SEQ ID NOs: 103 and 25 of WO2005033321), AAV2 (SEQ ID NO: 211 and 221 of WO2005033321), AAV2-15/rh.62 (SEQ ID No: 33 and 114 of WO2005033321), AAV2-3/rh.61 (SEQ ID NO: 21 of WO2005033321), AAV2-4/rh.50 (SEQ ID No: 23 and 108 of WO2005033321), AAV2-5/rh.51 (SEQ ID NO: 104 and 22 of WO2005033321), AAV3.1/hu.6 (SEQ ID NO: 5 and 84 of WO2005033321), AAV3.1/hu.9 (SEQ ID NO: 155 and 58 of WO2005033321), AAV3-11/rh.53 (SEQ ID NO: 186 and 176 of WO2005033321), AAV3-3 (SEQ ID NO: 200 of WO2005033321), AAV33.12/hu.17 (SEQ ID NO:4 of WO2005033321), AAV33.4/hu.15 (SEQ ID No: 50 of WO2005033321), AAV33.8/hu.16 (SEQ ID No: 51 of WO2005033321), AAV3-9/rh.52 (SEQ ID NO: 96 and 18 of WO2005033321), AAV4-19/rh.55 (SEQ ID NO: 117 of WO2005033321), AAV4-4 (SEQ ID NO: 201 and 218 of WO2005033321), AAV4-9/rh.54 (SEQ ID NO: 116 of WO2005033321), AAV5 (SEQ ID NO: 199 and 216 of WO2005033321), AAV52.1/hu.20 (SEQ ID NO: 63 of WO2005033321), AAV52/hu.19 (SEQ ID NO: 133 of WO2005033321), AAV5-22/rh.58 (SEQ ID No: 27 of WO2005033321), AAV5-3/rh.57 (SEQ ID NO: 105 of WO2005033321), AAV5-3/rh.57 (SEQ ID No: 26 of WO2005033321), AAV58.2/hu.25 (SEQ ID No: 49 of WO2005033321), AAV6 (SEQ ID NO: 203 and 220 of WO2005033321), AAV7 (SEQ ID NO: 222 and 213 of WO2005033321), AAV7.3/hu.7 (SEQ ID No: 55 of WO2005033321), AAV8 (SEQ ID NO: 223 and 214 of WO2005033321), AAVH-1/hu.1 (SEQ ID No: 46 of WO2005033321), AAVH-5/hu.3 (SEQ ID No: 44 of WO2005033321), AAVhu.1 (SEQ ID NO: 144 of WO2005033321), AAVhu.10 (SEQ ID NO: 156 of WO2005033321), AAVhu.11 (SEQ ID NO: 153 of WO2005033321), AAVhu.12 (WO2005033321 SEQ ID NO: 59), AAVhu.13 (SEQ ID NO: 129 of WO2005033321), AAVhu.14/AAV9 (SEQ ID NO: 123 and 3 of WO2005033321), AAVhu.15 (SEQ ID NO: 147 of WO2005033321), AAVhu.16 (SEQ ID NO: 148 of WO2005033321), AAVhu.17 (SEQ ID NO: 83 of WO2005033321), AAVhu.18 (SEQ ID NO: 149 of WO2005033321), AAVhu.19 (SEQ ID NO: 133 of WO2005033321), AAVhu.2 (SEQ ID NO: 143 of WO2005033321), AAVhu.20 (SEQ ID NO: 134 of WO2005033321), AAVhu.21 (SEQ ID NO: 135 of WO2005033321), AAVhu.22 (SEQ ID NO: 138 of WO2005033321), AAVhu.23.2 (SEQ ID NO: 137 of WO2005033321), AAVhu.24 (SEQ ID NO: 136 of WO2005033321), AAVhu.25 (SEQ ID NO: 146 of WO2005033321), AAVhu.27 (SEQ ID NO: 140 of WO2005033321), AAVhu.29 (SEQ ID NO: 132 of WO2005033321), AAVhu.3 (SEQ ID NO: 145 of WO2005033321), AAVhu.31 (SEQ ID NO: 121 of WO2005033321), AAVhu.32 (SEQ ID NO: 122 of WO2005033321), AAVhu.34 (SEQ ID NO: 125 of WO2005033321), AAVhu.35 (SEQ ID NO: 164 of WO2005033321), AAVhu.37 (SEQ ID NO: 88 of WO2005033321), AAVhu.39 (SEQ ID NO: 102 of WO2005033321), AAVhu.4 (SEQ ID NO: 141 of WO2005033321), AAVhu.40 (SEQ ID NO: 87 of WO2005033321), AAVhu.41 (SEQ ID NO: 91 of WO2005033321), AAVhu.42 (SEQ ID NO: 85 of WO2005033321), AAVhu.43 (SEQ ID NO: 160 of WO2005033321), AAVhu.44 (SEQ ID NO: 144 of WO2005033321), AAVhu.45 (SEQ ID NO: 127 of WO2005033321), AAVhu.46 (SEQ ID NO: 159 of WO2005033321), AAVhu.47 (SEQ ID NO: 128 of WO2005033321), AAVhu.48 (SEQ ID NO: 157 of WO2005033321), AAVhu.49 (SEQ ID NO: 189 of WO2005033321), AAVhu.51 (SEQ ID NO: 190 of WO2005033321), AAVhu.52 (SEQ ID NO: 191 of WO2005033321), AAVhu.53 (SEQ ID NO: 186 of WO2005033321), AAVhu.54 (SEQ ID NO: 188 of WO2005033321), AAVhu.55 (SEQ ID NO: 187 of WO2005033321), AAVhu.56 (SEQ ID NO: 192 of WO2005033321), AAVhu.57 (SEQ ID NO: 193 of WO2005033321), AAVhu.58 (SEQ ID NO: 194 of WO2005033321), AAVhu.6 (SEQ ID NO: 84 of WO2005033321), AAVhu.60 (SEQ ID NO: 184 of WO2005033321), AAVhu.61 (SEQ ID NO: 185 of WO2005033321), AAVhu.63 (SEQ ID NO: 195 of WO2005033321), AAVhu.64 (SEQ ID NO: 196 of WO2005033321), AAVhu.66 (SEQ ID NO: 197 of WO2005033321), AAVhu.67 (SEQ ID NO: 198 of WO2005033321), AAVhu.7 (SEQ ID NO: 150 of WO2005033321), AAVhu.8 (WO2005033321 SEQ ID NO: 12), AAVhu.9 (SEQ ID NO: 155 of WO2005033321), AAVLG-10/rh.40 (SEQ ID No: 14 of WO2005033321), AAVLG-4/rh.38 (SEQ ID NO: 86 of WO2005033321), AAVLG-4/rh.38 (SEQ ID No: 7 of WO2005033321), AAVN721-8/rh.43 (SEQ ID NO: 163 of WO2005033321), AAVN721-8/rh.43 (SEQ ID No: 43 of WO2005033321), AAVpi.1 (WO2005033321 SEQ ID NO: 28), AAVpi.2 (WO2005033321 SEQ ID NO: 30), AAVpi.3 (WO2005033321 SEQ ID NO: 29), AAVrh.38 (SEQ ID NO: 86 of WO2005033321), AAVrh.40 (SEQ ID NO: 92 of WO2005033321), AAVrh.43 (SEQ ID NO: 163 of WO2005033321), AAVrh.44 (WO2005033321 SEQ ID NO: 34), AAVrh.45 (WO2005033321 SEQ ID NO: 41), AAVrh.47 (WO2005033321 SEQ ID NO: 38), AAVrh.48 (SEQ ID NO: 115 of WO2005033321), AAVrh.49 (SEQ ID NO: 103 of WO2005033321), AAVrh.50 (SEQ ID NO: 108 of WO2005033321), AAVrh.51 (SEQ ID NO: 104 of WO2005033321), AAVrh.52 (SEQ ID NO: 96 of WO2005033321), AAVrh.53 (SEQ ID NO: 97 of WO2005033321), AAVrh.55 (WO2005033321 SEQ ID NO: 37), AAVrh.56 (SEQ ID NO: 152 of WO2005033321), AAVrh.57 (SEQ ID NO: 105 of WO2005033321), AAVrh.58 (SEQ ID NO: 106 of WO2005033321), AAVrh.59 (WO2005033321 SEQ ID NO: 42), AAVrh.60 (WO2005033321 SEQ ID NO: 31), AAVrh.61 (SEQ ID NO: 107 of WO2005033321), AAVrh.62 (SEQ ID NO: 114 of WO2005033321), AAVrh.64 (SEQ ID NO: 99 of WO2005033321), AAVrh.65 (WO2005033321 SEQ ID NO: 35), AAVrh.68 (WO2005033321 SEQ ID NO: 16), AAVrh.69 (WO2005033321 SEQ ID NO: 39), AAVrh.70 (WO2005033321 SEQ ID NO: 20), AAVrh.72 (WO2005033321 SEQ ID NO: 9), or variants thereof including, but not limited to, AAVcy.2, AAVcy.3, AAVcy.4, AAVcy.5, AAVcy.6, AAVrh.12, AAVrh.17, AAVrh.18, AAVrh.19, AAVrh.21, AAVrh.22, AAVrh.23, AAVrh.24, AAVrh.25, AAVrh.25/42 15, AAVrh.31, AAVrh.32, AAVrh.33, AAVrh.34, AAVrh.35, AAVrh.36, AAVrh.37, AAVrh14. Non limiting examples of variants include SEQ ID NO: 13, 15, 17, 19, 24, 36, 40, 45, 47, 48, 51-54, 60-62, 64-77, 79, 80, 82, 89, 90, 93-95, 98, 100, 101, 109-113, 118-120, 124, 126, 131, 139, 142, 151,154, 158, 161, 162, 165-183, 202, 204-212, 215, 219, 224-236, of WO2005033321, the contents of which are herein incorporated by reference in their entirety.

[0078] In some embodiments, the AAV serotype may be, or have, a sequence as described in International Publication No. WO2015168666, the contents of which are herein incorporated by reference in their entirety, such as, but not limited to, AAVrh8R (SEQ ID NO: 9 of WO2015168666), AAVrh8R A586R mutant (SEQ ID NO: 10 of WO2015168666), AAVrh8R R533A mutant (SEQ ID NO: 11 of WO2015168666), or variants thereof.

[0079] In some embodiments, the AAV serotype may be, or have, a sequence as described in U.S. Pat. No. 9,233,131, the contents of which are herein incorporated by reference in their entirety, such as, but not limited to, AAVhE1.1 (SEQ ID NO:44 of U.S. Pat. No. 9,233,131), AAVhEr1.5 (SEQ ID NO:45 of U.S. Pat. No. 9,233,131), AAVhER1.14 (SEQ ID NO:46 of U.S. Pat. No. 9,233,131), AAVhEr1.8 (SEQ ID NO:47 of U.S. Pat. No. 9,233,131), AAVhEr1.16 (SEQ ID NO:48 of U.S. Pat. No. 9,233,131), AAVhEr1.18 (SEQ ID NO:49 of U.S. Pat. No. 9,233,131), AAVhEr1.35 (SEQ ID NO:50 of U.S. Pat. No. 9,233,131), AAVhEr1.7 (SEQ ID NO:51 of U.S. Pat. No. 9,233,131), AAVhEr1.36 (SEQ ID NO:52 of U.S. Pat. No. 9,233,131), AAVhEr2.29 (SEQ ID NO:53 of U.S. Pat. No. 9,233,131), AAVhEr2.4 (SEQ ID NO:54 of U.S. Pat. No. 9,233,131), AAVhEr2.16 (SEQ ID NO:55 of U.S. Pat. No. 9,233,131), AAVhEr2.30 (SEQ ID NO:56 of U.S. Pat. No. 9,233,131), AAVhEr2.31 (SEQ ID NO:58 of U.S. Pat. No. 9,233,131), AAVhEr2.36 (SEQ ID NO:57 of U.S. Pat. No. 9,233,131), AAVhER1.23 (SEQ ID NO:53 of U.S. Pat. No. 9,233,131), AAVhEr3.1 (SEQ ID NO:59 of U.S. Pat. No. 9,233,131), AAV2.5T (SEQ ID NO:42 of U.S. Pat. No. 9,233,131), or variants thereof.

[0080] In some embodiments, the AAV serotype may be, or have, a sequence as described in United States Patent Publication No. US20150376607, the contents of which are herein incorporated by reference in their entirety, such as, but not limited to, AAV-PAEC (SEQ ID NO:1 of US20150376607), AAV-LK01 (SEQ ID NO:2 of US20150376607), AAV-LK02 (SEQ ID NO:3 of US20150376607), AAV-LK03 (SEQ ID NO:4 of US20150376607), AAV-LK04 (SEQ ID NO:5 of US20150376607), AAV-LK05 (SEQ ID NO:6 of US20150376607), AAV-LK06 (SEQ ID NO:7 of US20150376607), AAV-LK07 (SEQ ID NO:8 of US20150376607), AAV-LK08 (SEQ ID NO:9 of US20150376607), AAV-LK09 (SEQ ID NO:10 of US20150376607), AAV-LK10 (SEQ ID NO:11 of US20150376607), AAV-LK11 (SEQ ID NO:12 of US20150376607), AAV-LK12 (SEQ ID NO:13 of US20150376607), AAV-LK13 (SEQ ID NO:14 of US20150376607), AAV-LK14 (SEQ ID NO:15 of US20150376607), AAV-LK15 (SEQ ID NO:16 of US20150376607), AAV-LK16 (SEQ ID NO:17 of US20150376607), AAV-LK17 (SEQ ID NO:18 of US20150376607), AAV-LK18 (SEQ ID NO:19 of US20150376607), AAV-LK19 (SEQ ID NO:20 of US20150376607), AAV-PAEC2 (SEQ ID NO:21 of US20150376607), AAV-PAEC4 (SEQ ID NO:22 of US20150376607), AAV-PAEC6 (SEQ ID NO:23 of US20150376607), AAV-PAEC7 (SEQ ID NO:24 of US20150376607), AAV-PAEC8 (SEQ ID NO:25 of US20150376607), AAV-PAEC11 (SEQ ID NO:26 of US20150376607), AAV-PAEC12 (SEQ ID NO:27, of US20150376607), or variants thereof.

[0081] In some embodiments, the AAV serotype may be, or have, a sequence as described in U.S. Pat. No. 9,163,261, the contents of which are herein incorporated by reference in their entirety, such as, but not limited to, AAV-2-pre-miRNA-101 (SEQ ID NO: 1 U.S. Pat. No. 9,163,261), or variants thereof.

[0082] In some embodiments, the AAV serotype may be, or have, a sequence as described in United States Patent Publication No. US20150376240, the contents of which are herein incorporated by reference in their entirety, such as, but not limited to, AAV-8h (SEQ ID NO: 6 of US20150376240), AAV-8b (SEQ ID NO: 5 of US20150376240), AAV-h (SEQ ID NO: 2 of US20150376240), AAV-b (SEQ ID NO: 1 of US20150376240), or variants thereof.

[0083] In some embodiments, the AAV serotype may be, or have, a sequence as described in United States Patent Publication No. US20160017295, the contents of which are herein incorporated by reference in their entirety, such as, but not limited to, AAV SM 10-2 (SEQ ID NO: 22 of US20160017295), AAV Shuffle 100-1 (SEQ ID NO: 23 of US20160017295), AAV Shuffle 100-3 (SEQ ID NO: 24 of US20160017295), AAV Shuffle 100-7 (SEQ ID NO: 25 of US20160017295), AAV Shuffle 10-2 (SEQ ID NO: 34 of US20160017295), AAV Shuffle 10-6 (SEQ ID NO: 35 of US20160017295), AAV Shuffle 10-8 (SEQ ID NO: 36 of US20160017295), AAV Shuffle 100-2 (SEQ ID NO: 37 of US20160017295), AAV SM 10-1 (SEQ ID NO: 38 of US20160017295), AAV SM 10-8 (SEQ ID NO: 39 of US20160017295), AAV SM 100-3 (SEQ ID NO: 40 of US20160017295), AAV SM 100-10 (SEQ ID NO: 41 of US20160017295), or variants thereof.

[0084] In some embodiments, the AAV serotype may be, or have, a sequence as described in United States Patent Publication No. US20150238550, the contents of which are herein incorporated by reference in their entirety, such as, but not limited to, BNP61 AAV (SEQ ID NO: 1 of US20150238550), BNP62 AAV (SEQ ID NO: 3 of US20150238550), BNP63 AAV (SEQ ID NO: 4 of US20150238550), or variants thereof.

[0085] In some embodiments, the AAV serotype may be or may have a sequence as described in United States Patent Publication No. US20150315612, the contents of which are herein incorporated by reference in their entirety, such as, but not limited to, AAVrh.50 (SEQ ID NO: 108 of US20150315612), AAVrh.43 (SEQ ID NO: 163 of US20150315612), AAVrh.62 (SEQ ID NO: 114 of US20150315612), AAVrh.48 (SEQ ID NO: 115 of US20150315612), AAVhu.19 (SEQ ID NO: 133 of US20150315612), AAVhu.11 (SEQ ID NO: 153 of US20150315612), AAVhu.53 (SEQ ID NO: 186 of US20150315612), AAV4-8/rh.64 (SEQ ID No: 15 of US20150315612), AAVLG-9/hu.39 (SEQ ID No: 24 of US20150315612), AAV54.5/hu.23 (SEQ ID No: 60 of US20150315612), AAV54.2/hu.22 (SEQ ID No: 67 of US20150315612), AAV54.7/hu.24 (SEQ ID No: 66 of US20150315612), AAV54.1/hu.21 (SEQ ID No: 65 of US20150315612), AAV54.4R/hu.27 (SEQ ID No: 64 of US20150315612), AAV46.2/hu.28 (SEQ ID No: 68 of US20150315612), AAV46.6/hu.29 (SEQ ID No: 69 of US20150315612), AAV128.1/hu.43 (SEQ ID No: 80 of US20150315612), or variants thereof.

[0086] In some embodiments, the AAV serotype may be, or have, a sequence as described in International Publication No. WO2015121501, the contents of which are herein incorporated by reference in their entirety, such as, but not limited to, true type AAV (ttAAV) (SEQ ID NO: 2 of WO2015121501), “UPenn AAV10” (SEQ ID NO: 8 of WO2015121501), “Japanese AAV10” (SEQ ID NO: 9 of WO2015121501), or variants thereof.

[0087] According to the present invention, AAV capsid serotype selection or use may be from a variety of species. In one embodiment, the AAV may be an avian AAV (AAAV). The AAAV serotype may be, or have, a sequence as described in U.S. Pat. No. 9,238,800, the contents of which are herein incorporated by reference in their entirety, such as, but not limited to, AAAV (SEQ ID NO: 1, 2, 4, 6, 8, 10, 12, and 14 of U.S. Pat. No. 9,238,800), or variants thereof.

[0088] In one embodiment, the AAV may be a bovine AAV (BAAV). The BAAV serotype may be, or have, a sequence as described in U.S. Pat. No. 9,193,769, the contents of which are herein incorporated by reference in their entirety, such as, but not limited to, BAAV (SEQ ID NO: 1 and 6 of U.S. Pat. No. 9,193,769), or variants thereof. The BAAV serotype may be or have a sequence as described in U.S. Pat. No. 7,427,396, the contents of which are herein incorporated by reference in their entirety, such as, but not limited to, BAAV (SEQ ID NO: 5 and 6 of U.S. Pat. No. 7,427,396), or variants thereof.

[0089] In one embodiment, the AAV may be a caprine AAV. The caprine AAV serotype may be, or have, a sequence as described in U.S. Pat. No. 7,427,396, the contents of which are herein incorporated by reference in their entirety, such as, but not limited to, caprine AAV (SEQ ID NO: 3 of U.S. Pat. No. 7,427,396), or variants thereof.

[0090] In other embodiments the AAV may be engineered as a hybrid AAV from two or more parental serotypes. In one embodiment, the AAV may be AAV2G9 which comprises sequences from AAV2 and AAV9. The AAV2G9 AAV serotype may be, or have, a sequence as described in United States Patent Publication No. US20160017005, the contents of which are herein incorporated by reference in its entirety.

[0091] In one embodiment, the AAV may be a serotype generated by the AAV9 capsid library with mutations in amino acids 390-627 (VP1 numbering) as described by Pulicherla et al. (Molecular Therapy 19(6):1070-1078 (2011), the contents of which are herein incorporated by reference in their entirety. The serotype and corresponding nucleotide and amino acid substitutions may be, but is not limited to, AAV9.1 (G1594C; D532H), AAV6.2 (T1418A and T1436X; V473D and 1479K), AAV9.3 (T1238A; F413Y), AAV9.4 (T1250C and A1617T; F417S), AAV9.5 (A1235G, A1314T, A1642G, C1760T; Q412R, T548A, A587V), AAV9.6 (T1231A; F4111), AAV9.9 (G1203A, G1785T; W595C), AAV9.10 (A1500G, T1676C; M559T), AAV9.11 (A1425T, A1702C, A1769T; T568P, Q590L), AAV9.13 (A1369C, A1720T; N457H, T574S), AAV9.14 (T1340A, T1362C, T1560C, G1713A; L447H), AAV9.16 (A1775T; Q592L), AAV9.24 (T1507C, T1521G; W503R), AAV9.26 (A1337G, A1769C; Y446C, Q590P), AAV9.33 (A1667C; D556A), AAV9.34 (A1534G, C1794T; N512D), AAV9.35 (A1289T, T1450A, C1494T, A1515T, C1794A, G1816A; Q430L, Y484N, N98K, V6061), AAV9.40 (A1694T, E565V), AAV9.41 (A1348T, T1362C; T450S), AAV9.44 (A1684C, A1701T, A1737G; N562H, K567N), AAV9.45 (A1492T, C1804T; N498Y, L602F), AAV9.46 (G1441C, T1525C, T1549G; G481R, W509R, L517V), 9.47 (G1241A, G1358A, A1669G, C1745T; S414N, G453D, K557E, T5821), AAV9.48 (C1445T, A1736T; P482L, Q579L), AAV9.50 (A1638T, C1683T, T1805A; Q546H, L602H), AAV9.53 (G1301A, A1405C, C1664T, G1811T; R134Q, S469R, A555V, G604V), AAV9.54 (C1531A, T1609A; L511I, L537M), AAV9.55 (T1605A; F535L), AAV9.58 (C1475T, C1579A; T492I, H527N), AAV.59 (T1336C; Y446H), AAV9.61 (A1493T; N498I), AAV9.64 (C1531A, A1617T; L511I), AAV9.65 (C1335T, T1530C, C1568A; A523D), AAV9.68 (C1510A; P504T), AAV9.80 (G1441A; G481R), AAV9.83 (C1402A, A1500T; P468T, E500D), AAV9.87 (T1464C, T1468C; S490P), AAV9.90 (A1196T; Y399F), AAV9.91 (T1316G, A1583T, C1782G, T1806C; L439R, K5281), AAV9.93 (A1273G, A1421G, A1638C, C1712T, G1732A, A1744T, A1832T; S425G, Q474R, Q546H, P571L, G578R, T582S, D611V), AAV9.94 (A1675T; M559L) and AAV9.95 (T1605A; F535L).

[0092] In some embodiments, the AAV serotype may be, or have, a sequence as described in International Publication No. WO2016049230, the contents of which are herein incorporated by reference in their entirety, such as, but not limited to AAVF1/HSC1 (SEQ ID NO: 2 and 20 of WO2016049230), AAVF2/HSC2 (SEQ ID NO: 3 and 21 of WO2016049230), AAVF3/HSC3 (SEQ ID NO: 5 and 22 of WO2016049230), AAVF4/HSC4 (SEQ ID NO: 6 and 23 of WO2016049230), AAVF5/HSC5 (SEQ ID NO: 11 and 25 of WO2016049230), AAVF6/HSC6 (SEQ ID NO: 7 and 24 of WO2016049230), AAVF7/HSC7 (SEQ ID NO: 8 and 27 of WO2016049230), AAVF8/HSC8 (SEQ ID NO: 9 and 28 of WO2016049230), AAVF9/HSC9 (SEQ ID NO: 10 and 29 of WO2016049230), AAVF11/HSC11 (SEQ ID NO: 4 and 26 of WO2016049230), AAVF12/HSC12 (SEQ ID NO: 12 and 30 of WO2016049230), AAVF13/HSC13 (SEQ ID NO: 14 and 31 of WO2016049230), AAVF14/HSC14 (SEQ ID NO: 15 and 32 of WO2016049230), AAVF15/HSC15 (SEQ ID NO: 16 and 33 of WO2016049230), AAVF16/HSC16 (SEQ ID NO: 17 and 34 of WO2016049230), AAVF17/HSC17 (SEQ ID NO: 13 and 35 of WO2016049230), or variants or derivatives thereof.

[0093] In some embodiments, the AAV serotype may be, or have, a sequence as described in U.S. Pat. No. 8,734,809, the contents of which are herein incorporated by reference in their entirety, such as, but not limited to, AAV CBr-E1 (SEQ ID NO: 13 and 87 of U.S. Pat. No. 8,734,809), AAV CBr-E2 (SEQ ID NO: 14 and 88 of U.S. Pat. No. 8,734,809), AAV CBr-E3 (SEQ ID NO: 15 and 89 of U.S. Pat. No. 8,734,809), AAV CBr-E4 (SEQ ID NO: 16 and 90 of U.S. Pat. No. 8,734,809), AAV CBr-E5 (SEQ ID NO: 17 and 91 of U.S. Pat. No. 8,734,809), AAV CBr-e5 (SEQ ID NO: 18 and 92 of U.S. Pat. No. 8,734,809), AAV CBr-E6 (SEQ ID NO: 19 and 93 of U.S. Pat. No. 8,734,809), AAV CBr-E7 (SEQ ID NO: 20 and 94 of U.S. Pat. No. 8,734,809), AAV CBr-E8 (SEQ ID NO: 21 and 95 of U.S. Pat. No. 8,734,809), AAV CLv-D1 (SEQ ID NO: 22 and 96 of U.S. Pat. No. 8,734,809), AAV CLv-D2 (SEQ ID NO: 23 and 97 of U.S. Pat. No. 8,734,809), AAV CLv-D3 (SEQ ID NO: 24 and 98 of U.S. Pat. No. 8,734,809), AAV CLv-D4 (SEQ ID NO: 25 and 99 of U.S. Pat. No. 8,734,809), AAV CLv-D5 (SEQ ID NO: 26 and 100 of U.S. Pat. No. 8,734,809), AAV CLv-D6 (SEQ ID NO: 27 and 101 of U.S. Pat. No. 8,734,809), AAV CLv-D7 (SEQ ID NO: 28 and 102 of U.S. Pat. No. 8,734,809), AAV CLv-D8 (SEQ ID NO: 29 and 103 of U.S. Pat. No. 8,734,809), AAV CLv-E1 (SEQ ID NO: 13 and 87 of U.S. Pat. No. 8,734,809), AAV CLv-R1 (SEQ ID NO: 30 and 104 of U.S. Pat. No. 8,734,809), AAV CLv-R2 (SEQ ID NO: 31 and 105 of U.S. Pat. No. 8,734,809), AAV CLv-R3 (SEQ ID NO: 32 and 106 of U.S. Pat. No. 8,734,809), AAV CLv-R4 (SEQ ID NO: 33 and 107 of U.S. Pat. No. 8,734,809), AAV CLv-R5 (SEQ ID NO: 34 and 108 of U.S. Pat. No. 8,734,809), AAV CLv-R6 (SEQ ID NO: 35 and 109 of U.S. Pat. No. 8,734,809), AAV CLv-R7 (SEQ ID NO: 36 and 110 of U.S. Pat. No. 8,734,809), AAV CLv-R8 (SEQ ID NO: 37 and 111 of U.S. Pat. No. 8,734,809), AAV CLv-R9 (SEQ ID NO: 38 and 112 of U.S. Pat. No. 8,734,809), AAV CLg-F1 (SEQ ID NO: 39 and 113 of U.S. Pat. No. 8,734,809), AAV CLg-F2 (SEQ ID NO: 40 and 114 of U.S. Pat. No. 8,734,809), AAV CLg-F3 (SEQ ID NO: 41 and 115 of U.S. Pat. No. 8,734,809), AAV CLg-F4 (SEQ ID NO: 42 and 116 of U.S. Pat. No. 8,734,809), AAV CLg-F5 (SEQ ID NO: 43 and 117 of U.S. Pat. No. 8,734,809), AAV CLg-F6 (SEQ ID NO: 43 and 117 of U.S. Pat. No. 8,734,809), AAV CLg-F7 (SEQ ID NO: 44 and 118 of U.S. Pat. No. 8,734,809), AAV CLg-F8 (SEQ ID NO: 43 and 117 of U.S. Pat. No. 8,734,809), AAV CSp-1 (SEQ ID NO: 45 and 119 of U.S. Pat. No. 8,734,809), AAV CSp-10 (SEQ ID NO: 46 and 120 of U.S. Pat. No. 8,734,809), AAV CSp-11 (SEQ ID NO: 47 and 121 of U.S. Pat. No. 8,734,809), AAV CSp-2 (SEQ ID NO: 48 and 122 of U.S. Pat. No. 8,734,809), AAV CSp-3 (SEQ ID NO: 49 and 123 of U.S. Pat. No. 8,734,809), AAV CSp-4 (SEQ ID NO: 50 and 124 of U.S. Pat. No. 8,734,809), AAV CSp-6 (SEQ ID NO: 51 and 125 of U.S. Pat. No. 8,734,809), AAV CSp-7 (SEQ ID NO: 52 and 126 of U.S. Pat. No. 8,734,809), AAV CSp-8 (SEQ ID NO: 53 and 127 of U.S. Pat. No. 8,734,809), AAV CSp-9 (SEQ ID NO: 54 and 128 of U.S. Pat. No. 8,734,809), AAV CHt-2 (SEQ ID NO: 55 and 129 of U.S. Pat. No. 8,734,809), AAV CHt-3 (SEQ ID NO: 56 and 130 of U.S. Pat. No. 8,734,809), AAV CKd-1 (SEQ ID NO: 57 and 131 of U.S. Pat. No. 8,734,809), AAV CKd-10 (SEQ ID NO: 58 and 132 of U.S. Pat. No. 8,734,809), AAV CKd-2 (SEQ ID NO: 59 and 133 of U.S. Pat. No. 8,734,809), AAV CKd-3 (SEQ ID NO: 60 and 134 of U.S. Pat. No. 8,734,809), AAV CKd-4 (SEQ ID NO: 61 and 135 of U.S. Pat. No. 8,734,809), AAV CKd-6 (SEQ ID NO: 62 and 136 of U.S. Pat. No. 8,734,809), AAV CKd-7 (SEQ ID NO: 63 and 137 of U.S. Pat. No. 8,734,809), AAV CKd-8 (SEQ ID NO: 64 and 138 of U.S. Pat. No. 8,734,809), AAV CLv-1 (SEQ ID NO: 35 and 139 of U.S. Pat. No. 8,734,809), AAV CLv-12 (SEQ ID NO: 66 and 140 of U.S. Pat. No. 8,734,809), AAV CLv-13 (SEQ ID NO: 67 and 141 of U.S. Pat. No. 8,734,809), AAV CLv-2 (SEQ ID NO: 68 and 142 of U.S. Pat. No. 8,734,809), AAV CLv-3 (SEQ ID NO: 69 and 143 of U.S. Pat. No. 8,734,809), AAV CLv-4 (SEQ ID NO: 70 and 144 of U.S. Pat. No. 8,734,809), AAV CLv-6 (SEQ ID NO: 71 and 145 of U.S. Pat. No. 8,734,809), AAV CLv-8 (SEQ ID NO: 72 and 146 of U.S. Pat. No. 8,734,809), AAV CKd-B1 (SEQ ID NO: 73 and 147 of U.S. Pat. No. 8,734,809), AAV CKd-B2 (SEQ ID NO: 74 and 148 of U.S. Pat. No. 8,734,809), AAV CKd-B3 (SEQ ID NO: 75 and 149 of U.S. Pat. No. 8,734,809), AAV CKd-B4 (SEQ ID NO: 76 and 150 of U.S. Pat. No. 8,734,809), AAV CKd-B5 (SEQ ID NO: 77 and 151 of U.S. Pat. No. 8,734,809), AAV CKd-B6 (SEQ ID NO: 78 and 152 of U.S. Pat. No. 8,734,809), AAV CKd-B7 (SEQ ID NO: 79 and 153 of U.S. Pat. No. 8,734,809), AAV CKd-B8 (SEQ ID NO: 80 and 154 of U.S. Pat. No. 8,734,809), AAV CKd-H1 (SEQ ID NO: 81 and 155 of U.S. Pat. No. 8,734,809), AAV CKd-H2 (SEQ ID NO: 82 and 156 of U.S. Pat. No. 8,734,809), AAV CKd-H3 (SEQ ID NO: 83 and 157 of U.S. Pat. No. 8,734,809), AAV CKd-H4 (SEQ ID NO: 84 and 158 of U.S. Pat. No. 8,734,809), AAV CKd-H5 (SEQ ID NO: 85 and 159 of U.S. Pat. No. 8,734,809), AAV CKd-H6 (SEQ ID NO: 77 and 151 of U.S. Pat. No. 8,734,809), AAV CHt-1 (SEQ ID NO: 86 and 160 of U.S. Pat. No. 8,734,809), AAV CLv1-1 (SEQ ID NO: 171 of U.S. Pat. No. 8,734,809), AAV CLv1-2 (SEQ ID NO: 172 of U.S. Pat. No. 8,734,809), AAV CLv1-3 (SEQ ID NO: 173 of U.S. Pat. No. 8,734,809), AAV CLv1-4 (SEQ ID NO: 174 of U.S. Pat. No. 8,734,809), AAV Clv1-7 (SEQ ID NO: 175 of U.S. Pat. No. 8,734,809), AAV Clv1-8 (SEQ ID NO: 176 of U.S. Pat. No. 8,734,809), AAV Clv1-9 (SEQ ID NO: 177 of U.S. Pat. No. 8,734,809), AAV Clv1-10 (SEQ ID NO: 178 of U.S. Pat. No. 8,734,809), AAV.VR-355 (SEQ ID NO: 181 of U.S. Pat. No. 8,734,809), AAV.hu.48R3 (SEQ ID NO: 183 of U.S. Pat. No. 8,734,809), or variants or derivatives thereof.

[0094] In some embodiments, the AAV serotype may be, or have, a sequence as described in International Publication No. WO2016065001, the contents of which are herein incorporated by reference in their entirety, such as, but not limited to AAV CHt-P2 (SEQ ID NO: 1 and 51 of WO2016065001), AAV CHt-P5 (SEQ ID NO: 2 and 52 of WO2016065001), AAV CHt-P9 (SEQ ID NO: 3 and 53 of WO2016065001), AAV CBr-7.1 (SEQ ID NO: 4 and 54 of WO2016065001), AAV CBr-7.2 (SEQ ID NO: 5 and 55 of WO2016065001), AAV CBr-7.3 (SEQ ID NO: 6 and 56 of WO2016065001), AAV CBr-7.4 (SEQ ID NO: 7 and 57 of WO2016065001), AAV CBr-7.5 (SEQ ID NO: 8 and 58 of WO2016065001), AAV CBr-7.7 (SEQ ID NO: 9 and 59 of WO2016065001), AAV CBr-7.8 (SEQ ID NO: 10 and 60 of WO2016065001), AAV CBr-7.10 (SEQ ID NO: 11 and 61 of WO2016065001), AAV CKd-N3 (SEQ ID NO: 12 and 62 of WO2016065001), AAV CKd-N4 (SEQ ID NO: 13 and 63 of WO2016065001), AAV CKd-N9 (SEQ ID NO: 14 and 64 of WO2016065001), AAV CLv-L4 (SEQ ID NO: 15 and 65 of WO2016065001), AAV CLv-L5 (SEQ ID NO: 16 and 66 of WO2016065001), AAV CLv-L6 (SEQ ID NO: 17 and 67 of WO2016065001), AAV CLv-K1 (SEQ ID NO: 18 and 68 of WO2016065001), AAV CLv-K3 (SEQ ID NO: 19 and 69 of WO2016065001), AAV CLv-K6 (SEQ ID NO: 20 and 70 of WO2016065001), AAV CLv-M1 (SEQ ID NO: 21 and 71 of WO2016065001), AAV CLv-M11 (SEQ ID NO: 22 and 72 of WO2016065001), AAV CLv-M2 (SEQ ID NO: 23 and 73 of WO2016065001), AAV CLv-M5 (SEQ ID NO: 24 and 74 of WO2016065001), AAV CLv-M6 (SEQ ID NO: 25 and 75 of WO2016065001), AAV CLv-M7 (SEQ ID NO: 26 and 76 of WO2016065001), AAV CLv-M8 (SEQ ID NO: 27 and 77 of WO2016065001), AAV CLv-M9 (SEQ ID NO: 28 and 78 of WO2016065001), AAV CHt-P1 (SEQ ID NO: 29 and 79 of WO2016065001), AAV CHt-P6 (SEQ ID NO: 30 and 80 of WO2016065001), AAV CHt-P8 (SEQ ID NO: 31 and 81 of WO2016065001), AAV CHt-6.1 (SEQ ID NO: 32 and 82 of WO2016065001), AAV CHt-6.10 (SEQ ID NO: 33 and 83 of WO2016065001), AAV CHt-6.5 (SEQ ID NO: 34 and 84 of WO2016065001), AAV CHt-6.6 (SEQ ID NO: 35 and 85 of WO2016065001), AAV CHt-6.7 (SEQ ID NO: 36 and 86 of WO2016065001), AAV CHt-6.8 (SEQ ID NO: 37 and 87 of WO2016065001), AAV CSp-8.10 (SEQ ID NO: 38 and 88 of WO2016065001), AAV CSp-8.2 (SEQ ID NO: 39 and 89 of WO2016065001), AAV CSp-8.4 (SEQ ID NO: 40 and 90 of WO2016065001), AAV CSp-8.5 (SEQ ID NO: 41 and 91 of WO2016065001), AAV CSp-8.6 (SEQ ID NO: 42 and 92 of WO2016065001), AAV CSp-8.7 (SEQ ID NO: 43 and 93 of WO2016065001), AAV CSp-8.8 (SEQ ID NO: 44 and 94 of WO2016065001), AAV CSp-8.9 (SEQ ID NO: 45 and 95 of WO2016065001), AAV CBr-B7.3 (SEQ ID NO: 46 and 96 of WO2016065001), AAV CBr-B7.4 (SEQ ID NO: 47 and 97 of WO2016065001), AAV3B (SEQ ID NO: 48 and 98 of WO2016065001), AAV4 (SEQ ID NO: 49 and 99 of WO2016065001), AAV5 (SEQ ID NO: 50 and 100 of WO2016065001), or variants or derivatives thereof.

[0095] In one embodiment, the AAV may be a serotype selected from any of those found in Table 1.

[0096] In one embodiment, the AAV may comprise a sequence, fragment or variant thereof, of the sequences in Table 1.

[0097] In one embodiment, the AAV may be encoded by a sequence, fragment or variant as described in Table 1.

TABLE 1
AAV Serotypes

| | SEQ | |
|---|---|---|
| | ID | |
| Serotype | NO | Reference Information |
| AAV1 | 1 | US20150159173 SEQ ID NO: 11, |
| | | US20150315612 SEQ ID NO: 202 |
| AAV1 | 2 | US20160017295 SEQ ID NO: 1 |
| | | US20030138772 SEQ ID NO: 64, |
| | | US20150159173 SEQ ID NO: 27, |
| | | US20150315612 SEQ ID NO: 219, |
| | | U.S. Pat. No. 7,198,951 SEQ ID NO: 5 |
| AAV1 | 3 | US20030138772 SEQ ID NO: 6 |
| AAV1.3 | 4 | US20030138772 SEQ ID NO: 14 |
| AAV10 | 5 | US20030138772 SEQ ID NO: 117 |
| AAV10 | 6 | WO2015121501 SEQ ID NO: 9 |
| AAV10 | 7 | WO2015121501 SEQ ID NO: 8 |
| AAV11 | 8 | US20030138772 SEQ ID NO: 118 |
| AAV12 | 9 | US20030138772 SEQ ID NO: 119 |
| AAV2 | 10 | US20150159173 SEQ ID NO: 7, |
| | | US20150315612 SEQ ID NO: 211 |
| AAV2 | 11 | US20030138772 SEQ ID NO: 70, |
| | | US20150159173 SEQ ID NO: 23, |
| | | US20150315612 SEQ ID NO: 221, |
| | | US20160017295 SEQ ID NO: 2, |
| | | U.S. Pat. No. 6,156,303 SEQ ID NO: 4, |
| | | U.S. Pat. No. 7,198,951 SEQ ID NO: 4, |
| | | WO2015121501 SEQ ID NO: 1 |
| AAV2 | 12 | U.S. Pat. No. 6,156,303 SEQ ID NO: 8 |
| AAV2 | 13 | US20030138772 SEQ ID NO: 7 |
| AAV2 | 14 | U.S. Pat. No. 6,156,303 SEQ ID NO: 3 |
| AAV2.5T | 15 | U.S. Pat. No. 9,233,131 SEQ ID NO: 42 |
| AAV223.10 | 16 | US20030138772 SEQ ID NO: 75 |
| AAV223.2 | 17 | US20030138772 SEQ ID NO: 49 |
| AAV223.2 | 18 | US20030138772 SEQ ID NO: 76 |
| AAV223.4 | 19 | US20030138772 SEQ ID NO: 50 |
| AAV223.4 | 20 | US20030138772 SEQ ID NO: 73 |
| AAV223.5 | 21 | US20030138772 SEQ ID NO: 51 |
| AAV223.5 | 22 | US20030138772 SEQ ID NO: 74 |
| AAV223.6 | 23 | US20030138772 SEQ ID NO: 52 |
| AAV223.6 | 24 | US20030138772 SEQ ID NO: 78 |
| AAV223.7 | 25 | US20030138772 SEQ ID NO: 53 |
| AAV223.7 | 26 | US20030138772 SEQ ID NO: 77 |
| AAV29.3 | 27 | US20030138772 SEQ ID NO: 82 |
| AAV29.4 | 28 | US20030138772 SEQ ID NO: 12 |
| AAV29.5 | 29 | US20030138772 SEQ ID NO: 83 |
| AAV29.5 | 30 | US20030138772 SEQ ID NO: 13 |
| (AAVbb.2) | | |
| AAV3 | 31 | US20150159173 SEQ ID NO: 12 |
| AAV3 | 32 | US20030138772 SEQ ID NO: 71, |
| | | US20150159173 SEQ ID NO: 28, |
| | | US20160017295 SEQ ID NO: 3, |
| | | U.S. Pat. No. 7,198,951 SEQ ID NO: 6 |
| AAV3 | 33 | US20030138772 SEQ ID NO: 8 |
| AAV3.3b | 34 | US20030138772 SEQ ID NO: 72 |
| AAV3-3 | 35 | US20150315612 SEQ ID NO: 200 |
| AAV3-3 | 36 | US20150315612 SEQ ID NO: 217 |
| AAV3a | 37 | U.S. Pat. No. 6,156,303 SEQ ID NO: 5 |
| AAV3a | 38 | U.S. Pat. No. 6,156,303 SEQ ID NO: 9 |
| AAV3b | 39 | U.S. Pat. No. 6,156,303 SEQ ID NO: 6 |
| AAV3b | 40 | U.S. Pat. No. 6,156,303 SEQ ID NO: 10 |
| AAV3b | 41 | U.S. Pat. No. 6,156,303 SEQ ID NO: 1 |
| AAV4 | 42 | US20140348794 SEQ ID NO: 17 |
| AAV4 | 43 | US20140348794 SEQ ID NO: 5 |
| AAV4 | 44 | US20140348794 SEQ ID NO: 3 |
| AAV4 | 45 | US20140348794 SEQ ID NO: 14 |
| AAV4 | 46 | US20140348794 SEQ ID NO: 15 |
| AAV4 | 47 | US20140348794 SEQ ID NO: 19 |
| AAV4 | 48 | US20140348794 SEQ ID NO: 12 |
| AAV4 | 49 | US20140348794 SEQ ID NO: 13 |
| AAV4 | 50 | US20140348794 SEQ ID NO: 7 |
| AAV4 | 51 | US20140348794 SEQ ID NO: 8 |
| AAV4 | 52 | US20140348794 SEQ ID NO: 9 |
| AAV4 | 53 | US20140348794 SEQ ID NO: 2 |
| AAV4 | 54 | US20140348794 SEQ ID NO: 10 |
| AAV4 | 55 | US20140348794 SEQ ID NO: 11 |
| AAV4 | 56 | US20140348794 SEQ ID NO: 18 |
| AAV4 | 57 | US20030138772 SEQ ID NO: 63, |
| | | US20160017295 SEQ ID NO: 4, |
| | | US20140348794 SEQ ID NO: 4 |
| AAV4 | 58 | US20140348794 SEQ ID NO: 16 |
| AAV4 | 59 | US20140348794 SEQ ID NO: 20 |
| AAV4 | 60 | US20140348794 SEQ ID NO: 6 |
| AAV4 | 61 | US20140348794 SEQ ID NO: 1 |
| AAV42.2 | 62 | US20030138772 SEQ ID NO: 9 |
| AAV42.2 | 63 | US20030138772 SEQ ID NO: 102 |
| AAV42.3b | 64 | US20030138772 SEQ ID NO: 36 |
| AAV42.3B | 65 | US20030138772 SEQ ID NO: 107 |
| AAV42.4 | 66 | US20030138772 SEQ ID NO: 33 |
| AAV42.4 | 67 | US20030138772 SEQ ID NO: 88 |
| AAV42.8 | 68 | US20030138772 SEQ ID NO: 27 |
| AAV42.8 | 69 | US20030138772 SEQ ID NO: 85 |
| AAV43.1 | 70 | US20030138772 SEQ ID NO: 39 |
| AAV43.1 | 71 | US20030138772 SEQ ID NO: 92 |
| AAV43.12 | 72 | US20030138772 SEQ ID NO: 41 |
| AAV43.12 | 73 | US20030138772 SEQ ID NO: 93 |
| AAV43.20 | 74 | US20030138772 SEQ ID NO: 42 |
| AAV43.20 | 75 | US20030138772 SEQ ID NO: 99 |
| AAV43.21 | 76 | US20030138772 SEQ ID NO: 43 |
| AAV43.21 | 77 | US20030138772 SEQ ID NO: 96 |
| AAV43.23 | 78 | US20030138772 SEQ ID NO: 44 |
| AAV43.23 | 79 | US20030138772 SEQ ID NO: 98 |
| AAV43.25 | 80 | US20030138772 SEQ ID NO: 45 |
| AAV43.25 | 81 | US20030138772 SEQ ID NO: 97 |
| AAV43.5 | 82 | US20030138772 SEQ ID NO: 40 |
| AAV43.5 | 83 | US20030138772 SEQ ID NO: 94 |
| AAV4-4 | 84 | US20150315612 SEQ ID NO: 201 |
| AAV4-4 | 85 | US20150315612 SEQ ID NO: 218 |
| AAV44.1 | 86 | US20030138772 SEQ ID NO: 46 |
| AAV44.1 | 87 | US20030138772 SEQ ID NO: 79 |
| AAV44.5 | 88 | US20030138772 SEQ ID NO: 47 |
| AAV44.5 | 89 | US20030138772 SEQ ID NO: 80 |
| AAV4407 | 90 | US20150315612 SEQ ID NO: 90 |
| AAV5 | 91 | U.S. Pat. No. 7,427,396 SEQ ID NO: 1 |
| AAV5 | 92 | US20030138772 SEQ ID NO: 114 |
| AAV5 | 93 | US20160017295 SEQ ID NO: 5, |
| | | U.S. Pat. No. 7,427,396 SEQ ID NO: 2, |
| | | US20150315612 SEQ ID NO: 216 |
| AAV5 | 94 | US20150315612 SEQ ID NO: 199 |
| AAV6 | 95 | US20150159173 SEQ ID NO: 13 |
| AAV6 | 96 | US20030138772 SEQ ID NO: 65, |
| | | US20150159173 SEQ ID NO: 29, |
| | | US20160017295 SEQ ID NO: 6, |
| | | U.S. Pat. No. 6,156,303 SEQ ID NO: 7 |
| AAV6 | 97 | U.S. Pat. No. 6,156,303 SEQ ID NO: 11 |
| AAV6 | 98 | U.S. Pat. No. 6,156,303 SEQ ID NO: 2 |
| AAV6 | 99 | US20150315612 SEQ ID NO: 203 |
| AAV6 | 100 | US20150315612 SEQ ID NO: 220 |
| AAV6.1 | 101 | US20150159173 |
| AAV6.12 | 102 | US20150159173 |
| AAV6.2 | 103 | US20150159173 |
| AAV7 | 104 | US20150159173 SEQ ID NO: 14 |
| AAV7 | 105 | US20150315612 SEQ ID NO: 183 |
| AAV7 | 106 | US20030138772 SEQ ID NO: 2, |
| | | US20150159173 SEQ ID NO: 30, |
| | | US20150315612 SEQ ID NO: 181, |
| | | US20160017295 SEQ ID NO: 7 |
| AAV7 | 107 | US20030138772 SEQ ID NO: 3 |
| AAV7 | 108 | US20030138772 SEQ ID NO: 1, |
| | | US20150315612 SEQ ID NO: 180 |
| AAV7 | 109 | US20150315612 SEQ ID NO: 213 |
| AAV7 | 110 | US20150315612 SEQ ID NO: 222 |
| AAV8 | 111 | US20150159173 SEQ ID NO: 15 |
| AAV8 | 112 | US20150376240 SEQ ID NO: 7 |
| AAV8 | 113 | US20030138772 SEQ ID NO: 4, |
| | | US20150315612 SEQ ID NO: 182 |
| AAV8 | 114 | US20030138772 SEQ ID NO: 95, |
| | | US20140359799 SEQ ID NO: 1, |
| | | US20150159173 SEQ ID NO: 31, |
| | | US20160017295 SEQ ID NO: 8, |
| | | U.S. Pat. No. 7,198,951 SEQ ID NO: 7, |
| | | US20150315612 SEQ ID NO: 223 |
| AAV8 | 115 | US20150376240 SEQ ID NO: 8 |
| AAV8 | 116 | US20150315612 SEQ ID NO: 214 |
| AAV-8b | 117 | US20150376240 SEQ ID NO: 5 |
| AAV-8b | 118 | US20150376240 SEQ ID NO: 3 |
| AAV-8h | 119 | US20150376240 SEQ ID NO: 6 |
| AAV-8h | 120 | US20150376240 SEQ ID NO: 4 |
| AAV9 | 121 | US20030138772 SEQ ID NO: 5 |
| AAV9 | 122 | U.S. Pat. No. 7,198,951 SEQ ID NO: 1 |
| AAV9 | 123 | US20160017295 SEQ ID NO: 9 |
| AAV9 | 124 | US20030138772 SEQ ID NO: 100, |
| | | U.S. Pat. No. 7,198,951 SEQ ID NO: 2 |
| AAV9 | 125 | U.S. Pat. No. 7,198,951 SEQ ID NO: 3 |
| AAV9 | 126 | U.S. Pat. No. 7,906,111 SEQ ID NO: 3; |
| (AAVhu.14) | | WO2015038958 SEQ ID NO: 11 |
| AAV9 | 127 | U.S. Pat. No. 7,906,111 SEQ ID NO: 123; |
| (AAVhu.14) | | WO2015038958 SEQ ID NO: 2 |
| AAVA3.1 | 128 | US20030138772 SEQ ID NO: 120 |
| AAVA3.3 | 129 | US20030138772 SEQ ID NO: 57 |
| AAVA3.3 | 130 | US20030138772 SEQ ID NO: 66 |
| AAVA3.4 | 131 | US20030138772 SEQ ID NO: 54 |
| AAVA3.4 | 132 | US20030138772 SEQ ID NO: 68 |
| AAVA3.5 | 133 | US20030138772 SEQ ID NO: 55 |
| AAVA3.5 | 134 | US20030138772 SEQ ID NO: 69 |
| AAVA3.7 | 135 | US20030138772 SEQ ID NO: 56 |
| AAVA3.7 | 136 | US20030138772 SEQ ID NO: 67 |
| AAV29.3 | 137 | US20030138772 SEQ ID NO: 11 |
| (AAVbb.1) | | |
| AAVC2 | 138 | US20030138772 SEQ ID NO: 61 |
| AAV Ch.5 | 139 | US20150159173 SEQ ID NO: 46, |
| | | US20150315612 SEQ ID NO: 234 |
| AAVcy.2 | 140 | US20030138772 SEQ ID NO: 15 |
| (AAV13.3) | | |
| AAV24.1 | 141 | US20030138772 SEQ ID NO: 101 |
| AAVcy.3 | 142 | US20030138772 SEQ ID NO: 16 |
| (AAV24.1) | | |
| AAV27.3 | 143 | US20030138772 SEQ ID NO: 104 |
| AAVcy.4 | 144 | US20030138772 SEQ ID NO: 17 |
| (AAV27.3) | | |
| AAVcy.5 | 145 | US20150315612 SEQ ID NO: 227 |
| AAV7.2 | 146 | US20030138772 SEQ ID NO: 103 |
| AAVcy.5 | 147 | US20030138772 SEQ ID NO: 18 |
| (AAV7.2) | | |
| AAV16.3 | 148 | US20030138772 SEQ ID NO: 105 |
| AAVcy.6 | 149 | US20030138772 SEQ ID NO: 10 |
| (AAV16.3) | | |
| AAVcy.5 | 150 | US20150159173 SEQ ID NO: 8 |
| AAVcy.5 | 151 | US20150159173 SEQ ID NO: 24 |
| AAVCy.5R1 | 152 | US20150159173 |
| AAVCy.5R2 | 153 | US20150159173 |
| AAVCy.5R3 | 154 | US20150159173 |
| AAVCy.5R4 | 155 | US20150159173 |
| AAVDJ | 156 | US20140359799 SEQ ID NO: 3, |
| | | U.S. Pat. No. 7,588,772 SEQ ID NO: 2 |
| AAVDJ | 157 | US20140359799 SEQ ID NO: 2, |
| | | U.S. Pat. No. 7,588,772 SEQ ID NO: 1 |
| AAVDJ-8 | 158 | U.S. Pat. No. 7,588,772; Grimm et al |
| | | 2008 |
| AAVDJ-8 | 159 | U.S. Pat. No. 7,588,772; Grimm et al |
| | | 2008 |
| AAVF5 | 160 | US20030138772 SEQ ID NO: 110 |
| AAVH2 | 161 | US20030138772 SEQ ID NO: 26 |
| AAVH6 | 162 | US20030138772 SEQ ID NO: 25 |
| AAVhE1.1 | 163 | U.S. Pat. No. 9,233,131 SEQ ID NO: 44 |
| AAVhEr1.14 | 164 | U.S. Pat. No. 9,233,131 SEQ ID NO: 46 |
| AAVhEr1.16 | 165 | U.S. Pat. No. 9,233,131 SEQ ID NO: 48 |
| AAVhEr1.18 | 166 | U.S. Pat. No. 9,233,131 SEQ ID NO: 49 |
| AAVhEr1.23 | 167 | U.S. Pat. No. 9,233,131 SEQ ID NO: 53 |
| (AAVhEr2.29) | | |
| AAVhEr1.35 | 168 | U.S. Pat. No. 9,233,131 SEQ ID NO: 50 |
| AAVhEr1.36 | 169 | U.S. Pat. No. 9,233,131 SEQ ID NO: 52 |
| AAVhEr1.5 | 170 | U.S. Pat. No. 9,233,131 SEQ ID NO: 45 |
| AAVhEr1.7 | 171 | U.S. Pat. No. 9,233,131 SEQ ID NO: 51 |
| AAVhEr1.8 | 172 | U.S. Pat. No. 9,233,131 SEQ ID NO: 47 |
| AAVhEr2.16 | 173 | U.S. Pat. No. 9,233,131 SEQ ID NO: 55 |
| AAVhEr2.30 | 174 | U.S. Pat. No. 9,233,131 SEQ ID NO: 56 |
| AAVhEr2.31 | 175 | U.S. Pat. No. 9,233,131 SEQ ID NO: 58 |
| AAVhEr2.36 | 176 | U.S. Pat. No. 9,233,131 SEQ ID NO: 57 |
| AAVhEr2.4 | 177 | U.S. Pat. No. 9,233,131 SEQ ID NO: 54 |
| AAVhEr3.1 | 178 | U.S. Pat. No. 9,233,131 SEQ ID NO: 59 |
| AAVhu.1 | 179 | US20150315612 SEQ ID NO: 46 |
| AAVhu.1 | 180 | US20150315612 SEQ ID NO: 144 |
| AAVhu.10 | 181 | US20150315612 SEQ ID NO: 56 |
| (AAV16.8) | | |
| AAVhu.10 | 182 | US20150315612 SEQ ID NO: 156 |
| (AAV16.8) | | |
| AAVhu.11 | 183 | US20150315612 SEQ ID NO: 57 |
| (AAV16.12) | | |
| AAVhu.11 | 184 | US20150315612 SEQ ID NO: 153 |
| (AAV16.12) | | |
| AAVhu.12 | 185 | US20150315612 SEQ ID NO: 59 |
| AAVhu.12 | 186 | US20150315612 SEQ ID NO: 154 |
| AAVhu.13 | 187 | US20150159173 SEQ ID NO: 16, |
| | | US20150315612 SEQ ID NO: 71 |
| AAVhu.13 | 188 | US20150159173 SEQ ID NO: 32, |
| | | US20150315612 SEQ ID NO: 129 |
| AAVhu.136.1 | 189 | US20150315612 SEQ ID NO: 165 |
| AAVhu.140.1 | 190 | US20150315612 SEQ ID NO: 166 |
| AAVhu.140.2 | 191 | US20150315612 SEQ ID NO: 167 |
| AAVhu.145.6 | 192 | US20150315612 SEQ ID No: 178 |
| AAVhu.15 | 193 | US20150315612 SEQ ID NO: 147 |
| AAVhu.15 | 194 | US20150315612 SEQ ID NO: 50 |
| (AAV33.4) | | |
| AAVhu.156.1 | 195 | US20150315612 SEQ ID No: 179 |
| AAVhu.16 | 196 | US20150315612 SEQ ID NO: 148 |
| AAVhu.16 | 197 | US20150315612 SEQ ID NO: 51 |
| (AAV33.8) | | |
| AAVhu.17 | 198 | US20150315612 SEQ ID NO: 83 |
| AAVhu.17 | 199 | US20150315612 SEQ ID NO: 4 |
| (AAV33.12) | | |
| AAVhu.172.1 | 200 | US20150315612 SEQ ID NO: 171 |
| AAVhu.172.2 | 201 | US20150315612 SEQ ID NO: 172 |
| AAVhu.173.4 | 202 | US20150315612 SEQ ID NO: 173 |
| AAVhu.173.8 | 203 | US20150315612 SEQ ID NO: 175 |
| AAVhu.18 | 204 | US20150315612 SEQ ID NO: 52 |
| AAVhu.18 | 205 | US20150315612 SEQ ID NO: 149 |
| AAVhu.19 | 206 | US20150315612 SEQ ID NO: 62 |
| AAVhu.19 | 207 | US20150315612 SEQ ID NO: 133 |
| AAVhu.2 | 208 | US20150315612 SEQ ID NO: 48 |
| AAVhu.2 | 209 | US20150315612 SEQ ID NO: 143 |
| AAVhu.20 | 210 | US20150315612 SEQ ID NO: 63 |
| AAVhu.20 | 211 | US20150315612 SEQ ID NO: 134 |
| AAVhu.21 | 212 | US20150315612 SEQ ID NO: 65 |
| AAVhu.21 | 213 | US20150315612 SEQ ID NO: 135 |
| AAVhu.22 | 214 | US20150315612 SEQ ID NO: 67 |
| AAVhu.22 | 215 | US20150315612 SEQ ID NO: 138 |
| AAVhu.23 | 216 | US20150315612 SEQ ID NO: 60 |
| AAVhu.23.2 | 217 | US20150315612 SEQ ID NO: 137 |
| AAVhu.24 | 218 | US20150315612 SEQ ID NO: 66 |
| AAVhu.24 | 219 | US20150315612 SEQ ID NO: 136 |
| AAVhu.25 | 220 | US20150315612 SEQ ID NO: 49 |
| AAVhu.25 | 221 | US20150315612 SEQ ID NO: 146 |
| AAVhu.26 | 222 | US20150159173 SEQ ID NO: 17, |
| | | US20150315612 SEQ ID NO: 61 |
| AAVhu.26 | 223 | US20150159173 SEQ ID NO: 33, |
| | | US20150315612 SEQ ID NO: 139 |
| AAVhu.27 | 224 | US20150315612 SEQ ID NO: 64 |
| AAVhu.27 | 225 | US20150315612 SEQ ID NO: 140 |
| AAVhu.28 | 226 | US20150315612 SEQ ID NO: 68 |
| AAVhu.28 | 227 | US20150315612 SEQ ID NO: 130 |
| AAVhu.29 | 228 | US20150315612 SEQ ID NO: 69 |
| AAVhu.29 | 229 | US20150159173 SEQ ID NO: 42, |
| | | US20150315612 SEQ ID NO: 132 |
| AAVhu.29 | 230 | US20150315612 SEQ ID NO: 225 |
| AAVhu.29R | 231 | US20150159173 |
| AAVhu.3 | 232 | US20150315612 SEQ ID NO: 44 |
| AAVhu.3 | 233 | US20150315612 SEQ ID NO: 145 |
| AAVhu.30 | 234 | US20150315612 SEQ ID NO: 70 |
| AAVhu.30 | 235 | US20150315612 SEQ ID NO: 131 |
| AAVhu.31 | 236 | US20150315612 SEQ ID NO: 1 |
| AAVhu.31 | 237 | US20150315612 SEQ ID NO: 121 |
| AAVhu.32 | 238 | US20150315612 SEQ ID NO: 2 |
| AAVhu.32 | 239 | US20150315612 SEQ ID NO: 122 |
| AAVhu.33 | 240 | US20150315612 SEQ ID NO: 75 |
| AAVhu.33 | 241 | US20150315612 SEQ ID NO: 124 |
| AAVhu.34 | 242 | US20150315612 SEQ ID NO: 72 |
| AAVhu.34 | 243 | US20150315612 SEQ ID NO: 125 |
| AAVhu.35 | 244 | US20150315612 SEQ ID NO: 73 |
| AAVhu.35 | 245 | US20150315612 SEQ ID NO: 164 |
| AAVhu.36 | 246 | US20150315612 SEQ ID NO: 74 |
| AAVhu.36 | 247 | US20150315612 SEQ ID NO: 126 |
| AAVhu.37 | 248 | US20150159173 SEQ ID NO: 34, |
| | | US20150315612 SEQ ID NO: 88 |
| AAVhu.37 | 249 | US20150315612 SEQ ID NO: 10, |
| (AAV106.1) | | US20150159173 SEQ ID NO: 18 |
| AAVhu.38 | 250 | US20150315612 SEQ ID NO: 161 |
| AAVhu.39 | 251 | US20150315612 SEQ ID NO: 102 |
| AAVhu.39 | 252 | US20150315612 SEQ ID NO: 24 |
| (AAVLG-9) | | |
| AAVhu.4 | 253 | US20150315612 SEQ ID NO: 47 |
| AAVhu.4 | 254 | US20150315612 SEQ ID NO: 141 |
| AAVhu.40 | 255 | US20150315612 SEQ ID NO: 87 |
| AAVhu.40 | 256 | US20150315612 SEQ ID No: 11 |
| (AAV114.3) | | |
| AAVhu.41 | 257 | US20150315612 SEQ ID NO: 91 |
| AAVhu.41 | 258 | US20150315612 SEQ ID NO: 6 |
| (AAV127.2) | | |
| AAVhu.42 | 259 | US20150315612 SEQ ID NO: 85 |
| AAVhu.42 | 260 | US20150315612 SEQ ID NO: 8 |
| (AAV127.5) | | |
| AAVhu.43 | 261 | US20150315612 SEQ ID NO: 160 |
| AAVhu.43 | 262 | US20150315612 SEQ ID NO: 236 |
| AAVhu.43 | 263 | US20150315612 SEQ ID NO: 80 |
| (AAV128.1) | | |
| AAVhu.44 | 264 | US20150159173 SEQ ID NO: 45, |
| | | US20150315612 SEQ ID NO: 158 |
| AAVhu.44 | 265 | US20150315612 SEQ ID NO: 81 |
| AAV1283 | | |
| AAVhu.44R1 | 266 | US20150159173 |
| AAVhu.44R2 | 267 | US20150159173 |
| AAVhu.44R3 | 268 | US20150159173 |
| AAVhu.45 | 269 | US20150315612 SEQ ID NO: 76 |
| AAVhu.45 | 270 | US20150315612 SEQ ID NO: 127 |
| AAVhu.46 | 271 | US20150315612 SEQ ID NO: 82 |
| AAVhu.46 | 272 | US20150315612 SEQ ID NO: 159 |
| AAVhu.46 | 273 | US20150315612 SEQ ID NO: 224 |
| AAVhu.47 | 274 | US20150315612 SEQ ID NO: 77 |
| AAVhu.47 | 275 | US20150315612 SEQ ID NO: 128 |
| AAVhu.48 | 276 | US20150159173 SEQ ID NO: 38 |
| AAVhu.48 | 277 | US20150315612 SEQ ID NO: 157 |
| AAVhu.48 | 278 | US20150315612 SEQ ID NO: 78 |
| (AAV130.4) | | |
| AAVhu.48R1 | 279 | US20150159173 |
| AAVhu.48R2 | 280 | US20150159173 |
| AAVhu.48R3 | 281 | US20150159173 |
| AAVhu.49 | 282 | US20150315612 SEQ ID NO: 209 |
| AAVhu.49 | 283 | US20150315612 SEQ ID NO: 189 |
| AAVhu.5 | 284 | US20150315612 SEQ ID NO: 45 |
| AAVhu.5 | 285 | US20150315612 SEQ ID NO: 142 |
| AAVhu.51 | 286 | US20150315612 SEQ ID NO: 208 |
| AAVhu.51 | 287 | US20150315612 SEQ ID NO: 190 |
| AAVhu.52 | 288 | US20150315612 SEQ ID NO: 210 |
| AAVhu.52 | 289 | US20150315612 SEQ ID NO: 191 |
| AAVhu.53 | 290 | US20150159173 SEQ ID NO: 19 |
| AAVhu.53 | 291 | US20150159173 SEQ ID NO: 35 |
| AAVhu.53 | 292 | US20150315612 SEQ ID NO: 176 |
| (AAV145.1) | | |
| AAVhu.54 | 293 | US20150315612 SEQ ID NO: 188 |
| AAVhu.54 | 294 | US20150315612 SEQ ID No: 177 |
| (AAV145.5) | | |
| AAVhu.55 | 295 | US20150315612 SEQ ID NO: 187 |
| AAVhu.56 | 296 | US20150315612 SEQ ID NO: 205 |
| AAVhu.56 | 297 | US20150315612 SEQ ID NO: 168 |
| (AAV145.6) | | |
| AAVhu.56 | 298 | US20150315612 SEQ ID NO: 192 |
| (AAV145.6) | | |
| AAVhu.57 | 299 | US20150315612 SEQ ID NO: 206 |
| AAVhu.57 | 300 | US20150315612 SEQ ID NO: 169 |
| AAVhu.57 | 301 | US20150315612 SEQ ID NO: 193 |
| AAVhu.58 | 302 | US20150315612 SEQ ID NO: 207 |
| AAVhu.58 | 303 | US20150315612 SEQ ID NO: 194 |
| AAVhu.6 | 304 | US20150315612 SEQ ID NO: 5 |
| (AAV3.1) | | |
| AAVhu.6 | 305 | US20150315612 SEQ ID NO: 84 |
| (AAV3.1) | | |
| AAVhu.60 | 306 | US20150315612 SEQ ID NO: 184 |
| AAVhu.60 | 307 | US20150315612 SEQ ID NO: 170 |
| (AAV161.10) | | |
| AAVhu.61 | 308 | US20150315612 SEQ ID NO: 185 |
| AAVhu.61 | 309 | US20150315612 SEQ ID NO: 174 |
| (AAV161.6) | | |
| AAVhu.63 | 310 | US20150315612 SEQ ID NO: 204 |
| AAVhu.63 | 311 | US20150315612 SEQ ID NO: 195 |
| AAVhu.64 | 312 | US20150315612 SEQ ID NO: 212 |
| AAVhu.64 | 313 | US20150315612 SEQ ID NO: 196 |
| AAVhu.66 | 314 | US20150315612 SEQ ID NO: 197 |
| AAVhu.67 | 315 | US20150315612 SEQ ID NO: 215 |
| AAVhu.67 | 316 | US20150315612 SEQ ID NO: 198 |
| AAVhu.7 | 317 | US20150315612 SEQ ID NO: 226 |
| AAVhu.7 | 318 | US20150315612 SEQ ID NO: 150 |
| AAVhu.7 | 319 | US20150315612 SEQ ID NO: 55 |
| (AAV7.3) | | |
| AAVhu.71 | 320 | US20150315612 SEQ ID NO: 79 |
| AAVhu.8 | 321 | US20150315612 SEQ ID NO: 53 |
| AAVhu.8 | 322 | US20150315612 SEQ ID NO: 12 |
| AAVhu.8 | 323 | US20150315612 SEQ ID NO: 151 |
| AAVhu.9 | 324 | US20150315612 SEQ ID NO: 58 |
| (AAV3.1) | | |
| AAVhu.9 | 325 | US20150315612 SEQ ID NO: 155 |
| (AAV3.1) | | |
| AAV-LK01 | 326 | US20150376607 SEQ ID NO: 2 |
| AAV-LK01 | 327 | US20150376607 SEQ ID NO: 29 |
| AAV-LK02 | 328 | US20150376607 SEQ ID NO: 3 |
| AAV-LK02 | 329 | US20150376607 SEQ ID NO: 30 |
| AAV-LK03 | 330 | US20150376607 SEQ ID NO: 4 |
| AAV-LK03 | 331 | WO2015121501 SEQ ID NO: 12, |
| | | US20150376607 SEQ ID NO: 31 |
| AAV-LK04 | 332 | US20150376607 SEQ ID NO: 5 |
| AAV-LK04 | 333 | US20150376607 SEQ ID NO: 32 |
| AAV-LK05 | 334 | US20150376607 SEQ ID NO: 6 |
| AAV-LK05 | 335 | US20150376607 SEQ ID NO: 33 |
| AAV-LK06 | 336 | US20150376607 SEQ ID NO: 7 |
| AAV-LK06 | 337 | US20150376607 SEQ ID NO: 34 |
| AAV-LK07 | 338 | US20150376607 SEQ ID NO: 8 |
| AAV-LK07 | 339 | US20150376607 SEQ ID NO: 35 |
| AAV-LK08 | 340 | US20150376607 SEQ ID NO: 9 |
| AAV-LK08 | 341 | US20150376607 SEQ ID NO: 36 |
| AAV-LK09 | 342 | US20150376607 SEQ ID NO: 10 |
| AAV-LK09 | 343 | US20150376607 SEQ ID NO: 37 |
| AAV-LK10 | 344 | US20150376607 SEQ ID NO: 11 |
| AAV-LK10 | 345 | US20150376607 SEQ ID NO: 38 |
| AAV-LK11 | 346 | US20150376607 SEQ ID NO: 12 |
| AAV-LK11 | 347 | US20150376607 SEQ ID NO: 39 |
| AAV-LK12 | 348 | US20150376607 SEQ ID NO: 13 |
| AAV-LK12 | 349 | US20150376607 SEQ ID NO: 40 |
| AAV-LK13 | 350 | US20150376607 SEQ ID NO: 14 |
| AAV-LK13 | 351 | US20150376607 SEQ ID NO: 41 |
| AAV-LK14 | 352 | US20150376607 SEQ ID NO: 15 |
| AAV-LK14 | 353 | US20150376607 SEQ ID NO: 42 |
| AAV-LK15 | 354 | US20150376607 SEQ ID NO: 16 |
| AAV-LK15 | 355 | US20150376607 SEQ ID NO: 43 |
| AAV-LK16 | 356 | US20150376607 SEQ ID NO: 17 |
| AAV-LK16 | 357 | US20150376607 SEQ ID NO: 44 |
| AAV-LK17 | 358 | US20150376607 SEQ ID NO: 18 |
| AAV-LK17 | 359 | US20150376607 SEQ ID NO: 45 |
| AAV-LK18 | 360 | US20150376607 SEQ ID NO: 19 |
| AAV-LK18 | 361 | US20150376607 SEQ ID NO: 46 |
| AAV-LK19 | 362 | US20150376607 SEQ ID NO: 20 |
| AAV-LK19 | 363 | US20150376607 SEQ ID NO: 47 |
| AAV-PAEC | 364 | US20150376607 SEQ ID NO: 1 |
| AAV-PAEC | 365 | US20150376607 SEQ ID NO: 48 |
| AAV- | 366 | US20150376607 SEQ ID NO: 26 |
| PAEC11 | | |
| AAV- | 367 | US20150376607 SEQ ID NO: 54 |
| PAEC11 | | |
| AAV- | 368 | US20150376607 SEQ ID NO: 27 |
| PAEC12 | | |
| AAV- | 369 | US20150376607 SEQ ID NO: 51 |
| PAEC12 | | |
| AAV- | 370 | US20150376607 SEQ ID NO: 28 |
| PAEC13 | | |
| AAV- | 371 | US20150376607 SEQ ID NO: 49 |
| PAEC13 | | |
| AAV-PAEC2 | 372 | US20150376607 SEQ ID NO: 21 |
| AAV-PAEC2 | 373 | US20150376607 SEQ ID NO: 56 |
| AAV-PAEC4 | 374 | US20150376607 SEQ ID NO: 22 |
| AAV-PAEC4 | 375 | US20150376607 SEQ ID NO: 55 |
| AAV-PAEC6 | 376 | US20150376607 SEQ ID NO: 23 |
| AAV-PAEC6 | 377 | US20150376607 SEQ ID NO: 52 |
| AAV-PAEC7 | 378 | US20150376607 SEQ ID NO: 24 |
| AAV-PAEC7 | 379 | US20150376607 SEQ ID NO: 53 |
| AAV-PAEC8 | 380 | US20150376607 SEQ ID NO: 25 |
| AAV-PAEC8 | 381 | US20150376607 SEQ ID NO: 50 |
| AAVpi.1 | 382 | US20150315612 SEQ ID NO: 28 |
| AAVpi.1 | 383 | US20150315612 SEQ ID NO: 93 |
| AAVpi.2 | 384 | US20150315612 SEQ ID NO: 30 |
| AAVpi.2 | 385 | US20150315612 SEQ ID NO: 95 |
| AAVpi.3 | 386 | US20150315612 SEQ ID NO: 29 |
| AAVpi.3 | 387 | US20150315612 SEQ ID NO: 94 |
| AAVrh.10 | 388 | US20150159173 SEQ ID NO: 9 |
| AAVrh.10 | 389 | US20150159173 SEQ ID NO: 25 |
| AAV44.2 | 390 | US20030138772 SEQ ID NO: 59 |
| AAVrh.10 | 391 | US20030138772 SEQ ID NO: 81 |
| (AAV44.2) | | |
| AAV42.1B | 392 | US20030138772 SEQ ID NO: 90 |
| AAVrh.12 | 393 | US20030138772 SEQ ID NO: 30 |
| (AAV42.1b) | | |
| AAVrh.13 | 394 | US20150159173 SEQ ID NO: 10 |
| AAVrh.13 | 395 | US20150159173 SEQ ID NO: 26 |
| AAVrh.13 | 396 | US20150315612 SEQ ID NO: 228 |
| AAVrh3.13R | 397 | US20150159173 |
| AAV42.3A | 398 | US20030138772 SEQ ID NO: 87 |
| AAVrh.14 | 399 | US20030138772 SEQ ID NO: 32 |
| (AAV42.3a) | | |
| AAV42.5A | 400 | US20030138772 SEQ ID NO: 89 |
| AAVrh.17 | 401 | US20030138772 SEQ ID NO: 34 |
| (AAV42.5a) | | |
| AAV42.5B | 402 | US20030138772 SEQ ID NO: 91 |
| AAVrh.18 | 403 | US20030138772 SEQ ID NO: 29 |
| (AAV42.5b) | | |
| AAV42.6B | 404 | US20030138772 SEQ ID NO: 112 |
| AAVrh.19 | 405 | US20030138772 SEQ ID NO: 38 |
| (AAV42.6b) | | |
| AAVrh.2 | 406 | US20150159173 SEQ ID NO: 39 |
| AAVrh.2 | 407 | US20150315612 SEQ ID NO: 231 |
| AAVrh.20 | 408 | US20150159173 SEQ ID NO: 1 |
| AAV42.10 | 409 | US20030138772 SEQ ID NO: 106 |
| AAVrh.21 | 410 | US20030138772 SEQ ID NO: 35 |
| (AAV42.10) | | |
| AAV42.11 | 411 | US20030138772 SEQ ID NO: 108 |
| AAVrh.22 | 412 | US20030138772 SEQ ID NO: 37 |
| (AAV42.11) | | |
| AAV42.12 | 413 | US20030138772 SEQ ID NO: 113 |
| AAVrh.23 | 414 | US20030138772 SEQ ID NO: 58 |
| (AAV42.12) | | |
| AAV42.13 | 415 | US20030138772 SEQ ID NO: 86 |
| AAVrh.24 | 416 | US20030138772 SEQ ID NO: 31 |
| (AAV42.13) | | |
| AAV42.15 | 417 | US20030138772 SEQ ID NO: 84 |
| AAVrh.25 | 418 | US20030138772 SEQ ID NO: 28 |
| (AAV42.15) | | |
| AAVrh.2R | 419 | US20150159173 |
| AAVrh.31 | 420 | US20030138772 SEQ ID NO: 48 |
| (AAV223.1) | | |
| AAVC1 | 421 | US20030138772 SEQ ID NO: 60 |
| AAVrh.32 | 422 | US20030138772 SEQ ID NO: 19 |
| (AAVC1) | | |
| AAVrh.32/33 | 423 | US20150159173 SEQ ID NO: 2 |
| AAVrh.33 | 424 | US20030138772 SEQ ID NO: 20 |
| (AAVC3) | | |
| AAVC5 | 425 | US20030138772 SEQ ID NO: 62 |
| AAVrh.34 | 426 | US20030138772 SEQ ID NO: 21 |
| (AAVC5) | | |
| AAVF1 | 427 | US20030138772 SEQ ID NO: 109 |
| AAVrh.35 | 428 | US20030138772 SEQ ID NO: 22 |
| (AAVF1) | | |
| AAVF3 | 429 | US20030138772 SEQ ID NO: 111 |
| AAVrh.36 | 430 | US20030138772 SEQ ID NO: 23 |
| (AAVF3) | | |
| AAVrh.37 | 431 | US20030138772 SEQ ID NO: 24 |
| AAVrh.37 | 432 | US20150159173 SEQ ID NO: 40 |
| AAVrh.37 | 433 | US20150315612 SEQ ID NO: 229 |
| AAVrh.37R2 | 434 | US20150159173 |
| AAVrh.38 | 435 | US20150315612 SEQ ID NO: 7 |
| (AAVLG-4) | | |
| AAVrh.38 | 436 | US20450315612 SEQ ID NO: 86 |
| (AAVLG-4) | | |
| AAVrh.39 | 437 | US20150159173 SEQ ID NO: 20, |
| | | US20150315612 SEQ ID NO: 13 |
| AAVrh.39 | 438 | US20150159173 SEQ ID NO: 3, |
| | | US20150159173 SEQ ID NO: 36, |
| | | US20150315612 SEQ ID NO: 89 |
| AAVrh.40 | 439 | US20150315612 SEQ ID NO: 92 |
| AAVrh.40 | 440 | US20150315612 SEQ ID No: 14 |
| (AAVLG-10) | | |
| AAVrh.43 | 441 | US20150315612 SEQ ID NO: 43, |
| (AAVN721-8) | | US20150159173 SEQ ID NO: 21 |
| AAVrh.43 | 442 | US20450315612 SEQ ID NO: 163, |
| (AAVN721-8) | | US20150159173 SEQ ID NO: 37 |
| AAVrh.44 | 443 | US20150315612 SEQ ID NO: 34 |
| AAVrh.44 | 444 | US20150315612 SEQ ID NO: 111 |
| AAVrh.45 | 445 | US20150315612 SEQ ID NO: 41 |
| AAVrh.45 | 446 | US20150315612 SEQ ID NO: 109 |
| AAVrh.46 | 447 | US20150159173 SEQ ID NO: 22, |
| | | US20150315612 SEQ ID NO: 19 |
| AAVrh.46 | 448 | US20150159173 SEQ ID NO: 4, |
| | | US20150315612 SEQ ID NO: 101 |
| AAVrh.47 | 449 | US20150315612 SEQ ID NO: 38 |
| AAVrh.47 | 450 | US20150315612 SEQ ID NO: 118 |
| AAVrh.48 | 451 | US20150159173 SEQ ID NO: 44, |
| | | US20150315612 SEQ ID NO: 115 |
| AAVrh.48.1 | 452 | US20150159173 |
| AAVrh.48.1.2 | 453 | US20150159173 |
| AAVrh.48.2 | 454 | US20150159173 |
| AAVrh.48 | 455 | US20150315612 SEQ ID NO: 32 |
| (AAV1-7) | | |
| AAVrh.49 | 456 | US20150315612 SEQ ID NO: 25 |
| (AAV1-8) | | |
| AAVrh.49 | 457 | US20150315612 SEQ ID NO: 103 |
| (AAV1-8) | | |
| AAVrh.50 | 458 | US20150315612 SEQ ID NO: 23 |
| (AAV2-4) | | |
| AAVrh.50 | 459 | US20150315612 SEQ ID NO: 108 |
| (AAV2-4) | | |
| AAVrh.51 | 460 | US20150315612 SEQ ID No: 22 |
| (AAV2-5) | | |
| AAVrh.51 | 461 | US20150315612 SEQ ID NO: 104 |
| (AAV2-5) | | |
| AAVrh.52 | 462 | US20150315612 SEQ ID NO: 18 |
| (AAV3-9) | | |
| AAVrh.52 | 463 | US20150315612 SEQ ID NO: 96 |
| (AAV3-9) | | |
| AAVrh.53 | 464 | US20150315612 SEQ ID NO: 97 |
| AAVrh.53 | 465 | US20150315612 SEQ ID NO: 17 |
| (AAV3-11) | | |
| AAVrh.53 | 466 | US20150315612 SEQ ID NO: 186 |
| (AAV3-11) | | |
| AAVrh.54 | 467 | US20150315612 SEQ ID NO: 40 |
| AAVrh.54 | 468 | US20150159173 SEQ ID NO: 49, |
| | | US20150315612 SEQ ID NO: 116 |
| AAVrh.55 | 469 | US20150315612 SEQ ID NO: 37 |
| AAVrh.55 | 470 | US20150315612 SEQ ID NO: 117 |
| (AAV4-19) | | |
| AAVrh.56 | 471 | US20150315612 SEQ ID NO: 54 |
| AAVrh.56 | 472 | US20150315612 SEQ ID NO: 152 |
| AAVrh.57 | 473 | US20150315612 SEQ ID NO: 26 |
| AAVrh.57 | 474 | US20150315612 SEQ ID NO: 105 |
| AAVrh.58 | 475 | US20150315612 SEQ ID NO: 27 |
| AAVrh.58 | 476 | US20150159173 SEQ ID NO: 48, |
| | | US20150315612 SEQ ID NO: 106 |
| AAVrh.58 | 477 | US20150315612 SEQ ID NO: 232 |
| AAVrh.59 | 478 | US20150315612 SEQ ID NO: 42 |
| AAVrh.59 | 479 | US20150315612 SEQ ID NO: 110 |
| AAVrh.60 | 480 | US20150315612 SEQ ID NO: 31 |
| AAVrh.60 | 481 | US20150315612 SEQ ID NO: 120 |
| AAVrh.61 | 482 | US20150315612 SEQ ID NO: 107 |
| AAVrh.61 | 483 | US20150315612 SEQ ID NO: 21 |
| (AAV2-3) | | |
| AAVrh.62 | 484 | US20150315612 SEQ ID No: 33 |
| (AAV2-15) | | |
| AAVrh.62 | 485 | US20150315612 SEQ ID NO: 114 |
| (AAV2-15) | | |
| AAVrh.64 | 486 | US20150315612 SEQ ID No: 15 |
| AAVrh.64 | 487 | US20150159173 SEQ ID NO: 43, |
| | | US20150315612 SEQ ID NO: 99 |
| AAVrh.64 | 488 | US20150315612 SEQ ID NO: 233 |
| AAVRh.64R1 | 489 | US20150159173 |
| AAVRh.64R2 | 490 | US20150159173 |
| AAVrh.65 | 491 | US20150315612 SEQ ID NO: 35 |
| AAVrh.65 | 492 | US20150315612 SEQ ID NO: 112 |
| AAVrh.67 | 493 | US20150315612 SEQ ID NO: 36 |
| AAVrh.67 | 494 | US20150315612 SEQ ID NO: 230 |
| AAVrh.67 | 495 | US20150159173 SEQ ID NO: 47, |
| | | US20150315612 SEQ ID NO: 113 |
| AAVrh.68 | 496 | US20150315612 SEQ ID NO: 16 |
| AAVrh.68 | 497 | US20150315612 SEQ ID NO: 100 |
| AAVrh.69 | 498 | US20150315612 SEQ ID NO: 39 |
| AAVrh.69 | 499 | US20150315612 SEQ ID NO: 119 |
| AAVrh.70 | 500 | US20150315612 SEQ ID NO: 20 |
| AAVrh.70 | 501 | US20150315612 SEQ ID NO: 98 |
| AAVrh.71 | 502 | US20150315612 SEQ ID NO: 162 |
| AAVrh.72 | 503 | US20150315612 SEQ ID NO: 9 |
| AAVrh.73 | 504 | US20150159173 SEQ ID NO: 5 |
| AAVrh.74 | 505 | US20150159173 SEQ ID NO: 6 |
| AAVrh.8 | 506 | US20150159173 SEQ ID NO: 41 |
| AAVrh.8 | 507 | US20150315612 SEQ ID NO: 235 |
| AAVrh.8R | 508 | US20150159173, WO2015168666 |
| | | SEQ ID NO: 9 |
| AAVrh.8R | 509 | WO2015168666 SEQ ID NO: 10 |
| A586R | | |
| mutant | | |
| AAVrh.8R | 510 | WO2015168666 SEQ ID NO: 11 |
| R533A | | |
| mutant | | |
| BAAV | 511 | U.S. Pat. No. 9,193,769 SEQ ID NO: 8 |
| (bovine | | |
| AAV) | | |
| BAAV | 512 | U.S. Pat. No. 9,193,769 SEQ ID NO: 10 |
| (bovine | | |
| AAV) | | |
| BAAV | 513 | U.S. Pat. No. 9,193,769 SEQ ID NO: 4 |
| (bovine | | |
| AAV) | | |
| BAAV | 514 | U.S. Pat. No. 9,193,769 SEQ ID NO: 2 |
| (bovine | | |
| AAV) | | |
| BAAV | 515 | U.S. Pat. No. 9,193,769 SEQ ID NO: 6 |
| (bovine | | |
| AAV) | | |
| BAAV | 516 | U.S. Pat. No. 9,193,769 SEQ ID NO: 1 |
| (bovine | | |
| AAV) | | |
| BAAV | 517 | U.S. Pat. No. 9,193,769 SEQ ID NO: 5 |
| (bovine | | |
| AAV) | | |
| BAAV | 518 | U.S. Pat. No. 9,193,769 SEQ ID NO: 3 |
| (bovine | | |
| AAV) | | |
| BAAV | 519 | U.S. Pat. No. 9,193,769 SEQ ID NO: 11 |
| (bovine | | |
| AAV) | | |
| BAAV | 520 | U.S. Pat. No. 7,427,396 SEQ ID NO: 5 |
| (bovine | | |
| AAV) | | |
| BAAV | 521 | U.S. Pat. No. 7,427,396 SEQ ID NO: 6 |
| (bovine | | |
| AAV) | | |
| BAAV | 522 | U.S. Pat. No. 9,193,769 SEQ ID NO: 7 |
| (bovine | | |
| AAV) | | |
| BAAV | 523 | U.S. Pat. No. 9,193,769 SEQ ID NO: 9 |
| (bovine | | |
| AAV) | | |
| BNP61 AAV | 524 | US20150238550 SEQ ID NO: 1 |
| BNP61 AAV | 525 | US20150238550 SEQ ID NO: 2 |
| BNP62 AAV | 526 | US20150238550 SEQ ID NO: 3 |
| BNP63 AAV | 527 | US20150238550 SEQ ID NO: 4 |
| caprine AAV | 528 | U.S. Pat. No. 7,427,396 SEQ ID NO: 3 |
| caprine AAV | 529 | U.S. Pat. No. 7,427,396 SEQ ID NO: 4 |
| true type | 530 | WO2015121501 SEQ ID NO: 2 |
| AAV | | |
| (ttAAV) | | |
| AAAV | 531 | U.S. Pat. No. 9,238,800 SEQ ID NO: 12 |
| (Avian AAV) | | |
| AAAV | 532 | U.S. Pat. No. 9,238,800 SEQ ID NO: 2 |
| (Avian AAV) | | |
| AAAV | 533 | U.S. Pat. No. 9,238,800 SEQ ID NO: 6 |
| (Avian AAV) | | |
| AAAV | 534 | U.S. Pat. No. 9,238,800 SEQ ID NO: 4 |
| (Avian AAV) | | |
| AAAV | 535 | U.S. Pat. No. 9,238,800 SEQ ID NO: 8 |
| (Avian AAV) | | |
| AAAV | 536 | U.S. Pat. No. 9,238,800 SEQ ID NO: 14 |
| (Avian AAV) | | |
| AAAV | 537 | U.S. Pat. No. 9,238,800 SEQ ID NO: 10 |
| (Avian AAV) | | |
| AAAV | 538 | U.S. Pat. No. 9,238,800 SEQ ID NO: 15 |
| (Avian AAV) | | |
| AAAV | 539 | U.S. Pat. No. 9,238,800 SEQ ID NO: 5 |
| (Avian AAV) | | |
| AAAV | 540 | U.S. Pat. No. 9,238,800 SEQ ID NO: 9 |
| (Avian AAV) | | |
| AAAV | 541 | U.S. Pat. No. 9,238,800 SEQ ID NO: 3 |
| (Avian AAV) | | |
| AAAV | 542 | U.S. Pat. No. 9,238,800 SEQ ID NO: 7 |
| (Avian AAV) | | |
| AAAV | 543 | U.S. Pat. No. 9,238,800 SEQ ID NO: 11 |
| (Avian AAV) | | |
| AAAV | 544 | U.S. Pat. No. 9,238,800 SEQ ID NO: 13 |
| (Avian AAV) | | |
| AAAV | 545 | U.S. Pat. No. 9,238,800 SEQ ID NO: 1 |
| (Avian AAV) | | |
| AAV Shuffle | 546 | US20160017295 SEQ ID NO: 23 |
| 100-1 | | |
| AAV Shuffle | 547 | US20160017295 SEQ ID NO: 11 |
| 100-1 | | |
| AAV Shuffle | 548 | US20160017295 SEQ ID NO: 37 |
| 100-2 | | |
| AAV Shuffle | 549 | US20160017295 SEQ ID NO: 29 |
| 100-2 | | |
| AAV Shuffle | 550 | US20160017295 SEQ ID NO: 24 |
| 100-3 | | |
| AAV Shuffle | 551 | US20160017295 SEQ ID NO: 12 |
| 100-3 | | |
| AAV Shuffle | 552 | US20160017295 SEQ ID NO: 25 |
| 100-7 | | |
| AAV Shuffle | 553 | US20160017295 SEQ ID NO: 13 |
| 100-7 | | |
| AAV Shuffle | 554 | US20160017295 SEQ ID NO: 34 |
| 10-2 | | |
| AAV Shuffle | 555 | US20160017295 SEQ ID NO: 26 |
| 10-2 | | |
| AAV Shuffle | 556 | US20160017295 SEQ ID NO: 35 |
| 10-6 | | |
| AAV Shuffle | 557 | US20160017295 SEQ ID NO: 27 |
| 10-6 | | |
| AAV Shuffle | 558 | US20160017295 SEQ ID NO: 36 |
| 10-8 | | |
| AAV Shuffle | 559 | US20160017295 SEQ ID NO: 28 |
| 10-8 | | |
| AAV SM | 560 | US20160017295 SEQ ID NO: 41 |
| 100-10 | | |
| AAV SM | 561 | US20160017295 SEQ ID NO: 33 |
| 100-10 | | |
| AAV SM | 562 | US20160017295 SEQ ID NO: 40 |
| 100-3 | | |
| AAV SM | 563 | US20160017295 SEQ ID NO: 32 |
| 100-3 | | |
| AAV SM | 564 | US20160017295 SEQ ID NO: 38 |
| 10-1 | | |
| AAV SM | 565 | US20160017295 SEQ ID NO: 30 |
| 10-1 | | |
| AAV SM | 566 | US20160017295 SEQ ID NO: 10 |
| 10-2 | | |
| AAV SM | 567 | US20160017295 SEQ ID NO: 22 |
| 10-2 | | |
| AAV SM | 568 | US20160017295 SEQ ID NO: 39 |
| 10-8 | | |
| AAV SM | 569 | US20160017295 SEQ ID NO: 31 |
| 10-8 | | |
| AAV SM | 560 | US20160017295 SEQ ID NO: 41 |
| 100-10 | | |
| AAV SM | 561 | US20160017295 SEQ ID NO: 33 |
| 100-10 | | |
| AAV SM | 562 | US20160017295 SEQ ID NO: 40 |
| 100-3 | | |
| AAV SM | 563 | US20160017295 SEQ ID NO: 32 |
| 100-3 | | |
| AAV SM 10-1 | 564 | US20160017295 SEQ ID NO: 38 |
| AAV SM 10-1 | 565 | US20160017295 SEQ ID NO: 30 |
| AAV SM 10-2 | 566 | US20160017295 SEQ ID NO: 10 |
| AAV SM 10-2 | 567 | US20160017295 SEQ ID NO: 22 |
| AAV SM 10-8 | 568 | US20160017295 SEQ ID NO: 39 |
| AAV SM 10-8 | 569 | US20160017295 SEQ ID NO: 31 |
| AAVF1/HSC1 | 570 | WO2016049230 SEQ ID NO: 20 |
| AAVF2/HSC2 | 571 | WO2016049230 SEQ ID NO: 21 |
| AAVF3/HSC3 | 572 | WO2016049230 SEQ ID NO: 22 |
| AAVF4/HSC4 | 573 | WO2016049230 SEQ ID NO: 23 |
| AAVF5/HSC5 | 574 | WO2016049230 SEQ ID NO: 25 |
| AAVF6/HSC6 | 575 | WO2016049230 SEQ ID NO: 24 |
| AAVF7/HSC7 | 576 | WO2016049230 SEQ ID NO: 27 |
| AAVF8/HSC8 | 577 | WO2016049230 SEQ ID NO: 28 |
| AAVF9/HSC9 | 578 | WO2016049230 SEQ ID NO: 29 |
| AAVF11/ | 579 | WO2016049230 SEQ ID NO: 26 |
| HSC11 | | |
| AAVF12/ | 580 | WO2016049230 SEQ ID NO: 30 |
| HSC12 | | |
| AAVF13/ | 581 | WO2016049230 SEQ ID NO: 31 |
| HSC13 | | |
| AAVF14/ | 582 | WO2016049230 SEQ ID NO: 32 |
| HSC14 | | |
| AAVF15/ | 583 | WO2016049230 SEQ ID NO: 33 |
| HSC15 | | |
| AAVF16/ | 584 | WO2016049230 SEQ ID NO: 34 |
| HSC16 | | |
| AAVF17/ | 585 | WO2016049230 SEQ ID NO: 35 |
| HSC17 | | |
| AAVF1/ | 586 | WO2016049230 SEQ ID NO: 2 |
| HSC1 | | |
| AAVF2/ | 587 | WO2016049230 SEQ ID NO: 3 |
| HSC2 | | |
| AAVF3/ | 588 | WO2016049230 SEQ ID NO: 5 |
| HSC3 | | |
| AAVF4/ | 589 | WO2016049230 SEQ ID NO: 6 |
| HSC4 | | |
| AAVF5/ | 590 | WO2016049230 SEQ ID NO: 11 |
| HSC5 | | |
| AAVF6/ | 591 | WO2016049230 SEQ ID NO: 7 |
| HSC6 | | |
| AAVF7/ | 592 | WO2016049230 SEQ ID NO: 8 |
| HSC7 | | |
| AAVF8/ | 593 | WO2016049230 SEQ ID NO: 9 |
| HSC8 | | |
| AAVF9/ | 594 | WO2016049230 SEQ ID NO: 10 |
| HSC9 | | |
| AAVF11/ | 595 | WO2016049230 SEQ ID NO: 4 |
| HSC11 | | |
| AAVF12/ | 596 | WO2016049230 SEQ ID NO: 12 |
| HSC12 | | |
| AAVF13/ | 597 | WO2016049230 SEQ ID NO: 14 |
| HSC13 | | |
| AAVF14/ | 598 | WO2016049230 SEQ ID NO: 15 |
| HSC14 | | |
| AAVF15/ | 599 | WO2016049230 SEQ ID NO: 16 |
| HSC15 | | |
| AAVF16/ | 600 | WO2016049230 SEQ ID NO: 17 |
| HSC16 | | |
| AAVF17/ | 601 | WO2016149230 SEQ ID NO: 13 |
| HSC17 | | |
| AAV CBr-E1 | 602 | U.S. Pat. No. 8,734,809 SEQ ID NO: 13 |
| AAV CBr-E2 | 603 | U.S. Pat. No. 8,734,809 SEQ ID NO: 14 |
| AAV CBr-E3 | 604 | U.S. Pat. No. 8,734,809 SEQ ID NO: 15 |
| AAV CBr-E4 | 605 | U.S. Pat. No. 8,734,809 SEQ ID NO: 16 |
| AAV CBr-E5 | 606 | U.S. Pat. No. 8,734,809 SEQ ID NO: 17 |
| AAV CBr-e5 | 607 | U.S. Pat. No. 8,734,809 SEQ ID NO: 18 |
| AAV CBr-E6 | 608 | U.S. Pat. No. 8,734,809 SEQ ID NO: 19 |
| AAV CBr-E7 | 609 | U.S. Pat. No. 8,734,809 SEQ ID NO: 20 |
| AAV CBr-E8 | 610 | U.S. Pat. No. 8,734,809 SEQ ID NO: 21 |
| AAV CLv- | 611 | U.S. Pat. No. 8,734,809 SEQ ID NO: 22 |
| D1 | | |
| AAV CLv- | 612 | U.S. Pat. No. 8,734,809 SEQ ID NO: 23 |
| D2 | | |
| AAV CLv- | 613 | U.S. Pat. No. 8,734,809 SEQ ID NO: 24 |
| D3 | | |
| AAV CLv- | 614 | U.S. Pat. No. 8,734,809 SEQ ID NO: 25 |
| D4 | | |
| AAV CLv- | 615 | U.S. Pat. No. 8,734,809 SEQ ID NO: 26 |
| D5 | | |
| AAV CLv- | 616 | U.S. Pat. No. 8,734,809 SEQ ID NO: 27 |
| D6 | | |
| AAV CLv- | 617 | U.S. Pat. No. 8,734,809 SEQ ID NO: 28 |
| D7 | | |
| AAV CLv- | 618 | U.S. Pat. No. 8,734,809 SEQ ID NO: 29 |
| D8 | | |
| AAV CLv- | 619 | U.S. Pat. No. 8,734,809 SEQ ID NO: 13 |
| E1 | | |
| AAV CLv- | 620 | U.S. Pat. No. 8,734,809 SEQ ID NO: 30 |
| R1 | | |
| AAV CLv- | 621 | U.S. Pat. No. 8,734,809 SEQ ID NO: 31 |
| R2 | | |
| AAV CLv- | 622 | U.S. Pat. No. 8,734,809 SEQ ID NO: 32 |
| R3 | | |
| AAV CLv- | 623 | U.S. Pat. No. 8,734,809 SEQ ID NO: 33 |
| R4 | | |
| AAV CLv- | 624 | U.S. Pat. No. 8,734,809 SEQ ID NO: 34 |
| R5 | | |
| AAV CLv- | 625 | U.S. Pat. No. 8,734,809 SEQ ID NO: 35 |
| R6 | | |
| AAV CLv- | 626 | U.S. Pat. No. 8,734,809 SEQ ID NO: 36 |
| R7 | | |
| AAV CLv- | 627 | U.S. Pat. No. 8,734,809 SEQ ID NO: 37 |
| R8 | | |
| AAV CLv- | 628 | U.S. Pat. No. 8,734,809 SEQ ID NO: 38 |
| R9 | | |
| AAV CLg-F1 | 629 | U.S. Pat. No. 8,734,809 SEQ ID NO: 39 |
| AAV CLg-F2 | 630 | U.S. Pat. No. 8,734,809 SEQ ID NO: 40 |
| AAV CLg-F3 | 631 | U.S. Pat. No. 8,734,809 SEQ ID NO: 41 |
| AAV CLg-F4 | 632 | U.S. Pat. No. 8,734,809 SEQ ID NO: 42 |
| AAV CLg-F5 | 633 | U.S. Pat. No. 8,734,809 SEQ ID NO: 43 |
| AAV CLg-F6 | 634 | U.S. Pat. No. 8,734,809 SEQ ID NO: 43 |
| AAV CLg-F7 | 635 | U.S. Pat. No. 8,734,809 SEQ ID NO: 44 |
| AAV CLg-F8 | 636 | U.S. Pat. No. 8,734,809 SEQ ID NO: 43 |
| AAV CSp-1 | 637 | U.S. Pat. No. 8,734,809 SEQ ID NO: 45 |
| AAV CSp-10 | 638 | U.S. Pat. No. 8,734,809 SEQ ID NO: 46 |
| AAV CSp-11 | 639 | U.S. Pat. No. 8,734,809 SEQ ID NO: 47 |
| AAV CSp-2 | 640 | U.S. Pat. No. 8,734,809 SEQ ID NO: 48 |
| AAV CSp-3 | 641 | U.S. Pat. No. 8,734,809 SEQ ID NO: 49 |
| AAV CSp-4 | 642 | U.S. Pat. No. 8,734,809 SEQ ID NO: 50 |
| AAV CSp-6 | 643 | U.S. Pat. No. 8,734,809 SEQ ID NO: 51 |
| AAV CSp-7 | 644 | U.S. Pat. No. 8,734,809 SEQ ID NO: 52 |
| AAV CSp-8 | 645 | U.S. Pat. No. 8,734,809 SEQ ID NO: 53 |
| AAV CSp-9 | 646 | U.S. Pat. No. 8,734,809 SEQ ID NO: 54 |
| AAV CHt-2 | 647 | U.S. Pat. No. 8,734,809 SEQ ID NO: 55 |
| AAV CHt-3 | 648 | U.S. Pat. No. 8,734,809 SEQ ID NO: 56 |
| AAV CKd-1 | 649 | U.S. Pat. No. 8,734,809 SEQ ID NO: 57 |
| AAV CKd-10 | 650 | U.S. Pat. No. 8,734,809 SEQ ID NO: 58 |
| AAV CKd-2 | 651 | U.S. Pat. No. 8,734,809 SEQ ID NO: 59 |
| AAV CKd-3 | 652 | U.S. Pat. No. 8,734,809 SEQ ID NO: 60 |
| AAV CKd-4 | 653 | U.S. Pat. No. 8,734,809 SEQ ID NO: 61 |
| AAV CKd-6 | 654 | U.S. Pat. No. 8,734,809 SEQ ID NO: 62 |
| AAV CKd-7 | 655 | U.S. Pat. No. 8,734,809 SEQ ID NO: 63 |
| AAV CKd-8 | 656 | U.S. Pat. No. 8,734,809 SEQ ID NO: 64 |
| AAV CLv-1 | 657 | U.S. Pat. No. 8,734,809 SEQ ID NO: 65 |
| AAV CLv-12 | 658 | U.S. Pat. No. 8,734,809 SEQ ID NO: 66 |
| AAV CLv-13 | 659 | U.S. Pat. No. 8,734,809 SEQ ID NO: 67 |
| AAV CLv-2 | 660 | U.S. Pat. No. 8,734,809 SEQ ID NO: 68 |
| AAV CLv-3 | 661 | U.S. Pat. No. 8,734,809 SEQ ID NO: 69 |
| AAV CLv-4 | 662 | U.S. Pat. No. 8,734,809 SEQ ID NO: 70 |
| AAV CLv-6 | 663 | U.S. Pat. No. 8,734,809 SEQ ID NO: 71 |
| AAV CLv-8 | 664 | U.S. Pat. No. 8,734,809 SEQ ID NO: 72 |
| AAV CKd- | 665 | U.S. Pat. No. 8,734,809 SEQ ID NO: 73 |
| B1 | | |
| AAV CKd- | 666 | U.S. Pat. No. 8,734,809 SEQ ID NO: 74 |
| B2 | | |
| AAV CKd- | 667 | U.S. Pat. No. 8,734,809 SEQ ID NO: 75 |
| B3 | | |
| AAV CKd- | 668 | U.S. Pat. No. 8,734,809 SEQ ID NO: 76 |
| B4 | | |
| AAV CKd- | 669 | U.S. Pat. No. 8,734,809 SEQ ID NO: 77 |
| B5 | | |
| AAV CKd- | 670 | U.S. Pat. No. 8,734,809 SEQ ID NO: 78 |
| B6 | | |
| AAV CKd- | 671 | U.S. Pat. No. 8,734,809 SEQ ID NO: 79 |
| B7 | | |
| AAV CKd- | 672 | U.S. Pat. No. 8,734,809 SEQ ID NO: 80 |
| B8 | | |
| AAV CKd- | 673 | U.S. Pat. No. 8,734,809 SEQ ID NO: 81 |
| H1 | | |
| AAV CKd- | 674 | U.S. Pat. No. 8,734,809 SEQ ID NO: 82 |
| H2 | | |
| AAV CKd- | 675 | U.S. Pat. No. 8,734,809 SEQ ID NO: 83 |
| H3 | | |
| AAV CKd- | 676 | U.S. Pat. No. 8,734,809 SEQ ID NO: 84 |
| H4 | | |
| AAV CKd- | 677 | U.S. Pat. No. 8,734,809 SEQ ID NO: 85 |
| H5 | | |
| AAV CKd- | 678 | U.S. Pat. No. 8,734,809 SEQ ID NO: 77 |
| H6 | | |
| AAV CHt-1 | 679 | U.S. Pat. No. 8,734,809 SEQ ID NO: 86 |
| AAV CLv1-1 | 680 | U.S. Pat. No. 8,734,809 SEQ ID NO: 171 |
| AAV CLv1-2 | 681 | U.S. Pat. No. 8,734,809 SEQ ID NO: 172 |
| AAV CLv1-3 | 682 | U.S. Pat. No. 8,734,809 SEQ ID NO: 173 |
| AAV CLv1-4 | 683 | U.S. Pat. No. 8,734,809 SEQ ID NO: 174 |
| AAV CLv1-7 | 684 | U.S. Pat. No. 8,734,809 SEQ ID NO: 175 |
| AAV CLv1-8 | 685 | U.S. Pat. No. 8,734,809 SEQ ID NO: 176 |
| AAV CLv1-9 | 686 | U.S. Pat. No. 8,734,809 SEQ ID NO: 177 |
| AAV CLv1-10 | 687 | U.S. Pat. No. 8,734,809 SEQ ID NO: 178 |
| AAV.VR-355 | 688 | U.S. Pat. No. 8,734,809 SEQ ID NO: 181 |
| AAV.hu.48R3 | 689 | U.S. Pat. No. 8,734,809 SEQ ID NO: 183 |
| AAV CBr-E1 | 690 | U.S. Pat. No. 8,734,809 SEQ ID NO: 87 |
| AAV CBr-E2 | 691 | U.S. Pat. No. 8,734,809 SEQ ID NO: 88 |
| AAV CBr-E3 | 692 | U.S. Pat. No. 8,734,809 SEQ ID NO: 89 |
| AAV CBr-E4 | 693 | U.S. Pat. No. 8,734,809 SEQ ID NO: 90 |
| AAV CBr-E5 | 694 | U.S. Pat. No. 8,734,809 SEQ 11 NO: 91 |
| AAV CBr-e5 | 695 | U.S. Pat. No. 8,734,809 SEQ ID NO: 92 |
| AAV CBr-E6 | 696 | U.S. Pat. No. 8,734,809 SEQ ID NO: 93 |
| AAV CBr-E7 | 697 | U.S. Pat. No. 8,734,809 SEQ ID NO: 94 |
| AAV CBr-E8 | 698 | U.S. Pat. No. 8,734,809 SEQ ID NO: 95 |
| AAV CLv- | 699 | U.S. Pat. No. 8,734,809 SEQ ID NO: 96 |
| D1 | | |
| AAV CLv- | 700 | U.S. Pat. No. 8,734,809 SEQ ID NO: 97 |
| D2 | | |
| AAV CLv- | 701 | U.S. Pat. No. 8,734,809 SEQ ID NO: 98 |
| D3 | | |
| AAV CLv- | 702 | U.S. Pat. No. 8,734,809 SEQ ID NO: 99 |
| D4 | | |
| AAV CLv- | 703 | U.S. Pat. No. 8,734,809 SEQ ID NO: 100 |
| D5 | | |
| AAV CLv- | 704 | U.S. Pat. No. 8,734,809 SEQ ID NO: 101 |
| D6 | | |
| AAV CLv- | 705 | U.S. Pat. No. 8,734,809 SEQ ID NO: 102 |
| D7 | | |
| AAV CLv- | 706 | U.S. Pat. No. 8,734,809 SEQ ID NO: 103 |
| D8 | | |
| AAV CLv-E1 | 707 | U.S. Pat. No. 8,734,809 SEQ ID NO: 87 |
| AAV CLv- | 708 | U.S. Pat. No. 8,734,809 SEQ ID NO: 104 |
| R1 | | |
| AAV CLv- | 709 | U.S. Pat. No. 8,734,809 SEQ ID NO: 105 |
| R2 | | |
| AAV CLv- | 710 | U.S. Pat. No. 8,734,809 SEQ ID NO: 106 |
| R3 | | |
| AAV CLv- | 711 | U.S. Pat. No. 8,734,809 SEQ ID NO: 107 |
| R4 | | |
| AAV CLv- | 712 | U.S. Pat. No. 8,734,809 SEQ ID NO: 108 |
| R5 | | |
| AAV CLv- | 713 | U.S. Pat. No. 8,734,809 SEQ ID NO: 109 |
| R6 | | |
| AAV CLv- | 714 | U.S. Pat. No. 8,734,809 SEQ ID NO: 110 |
| R7 | | |
| AAV CLv- | 715 | U.S. Pat. No. 8,734,809 SEQ ID NO: 111 |
| R8 | | |
| AAV CLv- | 716 | U.S. Pat. No. 8,734,809 SEQ ID NO: 112 |
| R9 | | |
| AAV CLg-F1 | 717 | U.S. Pat. No. 8,734,809 SEQ ID NO: 113 |
| AAV CLg-F2 | 718 | U.S. Pat. No. 8,734,809 SEQ ID NO: 114 |
| AAV CLg-F3 | 719 | U.S. Pat. No. 8,734,809 SEQ ID NO: 115 |
| AAV CLg-74 | 720 | U.S. Pat. No. 8,734,809 SEQ ID NO: 116 |
| AAV CLg-F5 | 721 | U.S. Pat. No. 8,734,809 SEQ ID NO: 117 |
| AAV CLg-F6 | 722 | U.S. Pat. No. 8,734,809 SEQ ID NO: 117 |
| AAV CLg-F7 | 723 | U.S. Pat. No. 8,734,809 SEQ ID NO: 118 |
| AAV CLg-F8 | 724 | U.S. Pat. No. 8,734,809 SEQ ID NO: 117 |
| AAV CSp-1 | 725 | U.S. Pat. No. 8,734,809 SEQ ID NO: 119 |
| AAV CSp-10 | 726 | U.S. Pat. No. 8,734,809 SEQ ID NO: 120 |
| AAV CSp-11 | 727 | U.S. Pat. No. 8,734,809 SEQ ID NO: 121 |
| AAV CSp-2 | 728 | U.S. Pat. No. 8,734,809 SEQ ID NO: 122 |
| AAV CSp-3 | 729 | U.S. Pat. No. 8,734,809 SEQ ID NO: 123 |
| AAV CSp-4 | 730 | U.S. Pat. No. 8,734,809 SEQ ID NO: 124 |
| AAV CSp-6 | 731 | U.S. Pat. No. 8,734,809 SEQ ID NO: 125 |
| AAV CSp-7 | 732 | U.S. Pat. No. 8,734,809 SEQ ID NO: 126 |
| AAV CSp-8 | 733 | U.S. Pat. No. 8,734,809 SEQ ID NO: 127 |
| AAV CSp-9 | 734 | U.S. Pat. No. 8,734,809 SEQ ID NO: 128 |
| AAV CHt-2 | 735 | U.S. Pat. No. 8,734,809 SEQ ID NO: 129 |
| AAV CHt-3 | 736 | U.S. Pat. No. 8,734,809 SEQ ID NO: 130 |
| AAV CKd-1 | 737 | U.S. Pat. No. 8,734,809 SEQ ID NO: 131 |
| AAV CKd-10 | 738 | U.S. Pat. No. 8,734,809 SEQ ID NO: 132 |
| AAV CKd-2 | 739 | U.S. Pat. No. 8,734,809 SEQ ID NO: 133 |
| AAV CKd-3 | 740 | U.S. Pat. No. 8,734,809 SEQ ID NO: 134 |
| AAV CKd-4 | 741 | U.S. Pat. No. 8,734,809 SEQ ID NO: 135 |
| AAV CKd-6 | 742 | U.S. Pat. No. 8,734,809 SEQ ID NO: 136 |
| AAV CKd-7 | 743 | U.S. Pat. No. 8,734,809 SEQ ID NO: 137 |
| AAV CKd-8 | 744 | U.S. Pat. No. 8,734,809 SEQ ID NO: 138 |
| AAV CLv-1 | 745 | U.S. Pat. No. 8,734,809 SEQ ID NO: 139 |
| AAV CLv-12 | 746 | U.S. Pat. No. 8,734,809 SEQ ID NO: 140 |
| AAV CLv-13 | 747 | U.S. Pat. No. 8,734,809 SEQ ID NO: 141 |
| AAV CLv-2 | 748 | U.S. Pat. No. 8,734,809 SEQ ID NO: 142 |
| AAV CLv-3 | 749 | U.S. Pat. No. 8,734,809 SEQ ID NO: 143 |
| AAV CLv-4 | 750 | U.S. Pat. No. 8,734,809 SEQ ID NO: 144 |
| AAV CLv-6 | 751 | U.S. Pat. No. 8,734,809 SEQ ID NO: 145 |
| AAV CLv-8 | 752 | U.S. Pat. No. 8,734,809 SEQ ID NO: 146 |
| AAV CKd- | 753 | U.S. Pat. No. 8,734,809 SEQ ID NO: 147 |
| B1 | | |
| AAV CKd- | 754 | U.S. Pat. No. 8,734,809 SEQ ID NO: 148 |
| B2 | | |
| AAV CKd- | 755 | U.S. Pat. No. 8,734,809 SEQ ID NO: 149 |
| B3 | | |
| AAV CKd- | 756 | U.S. Pat. No. 8,734,809 SEQ ID NO: 150 |
| B4 | | |
| AAV CKd- | 757 | U.S. Pat. No. 8,734,809 SEQ ID NO: 151 |
| B5 | | |
| AAV CKd- | 758 | U.S. Pat. No. 8,734,809 SEQ ID NO: 152 |
| B6 | | |
| AAV CKd- | 759 | U.S. Pat. No. 8,734,809 SEQ ID NO: 153 |
| B7 | | |
| AAV CKd- | 760 | U.S. Pat. No. 8,734,809 SEQ ID NO: 154 |
| B8 | | |
| AAV CKd- | 761 | U.S. Pat. No. 8,734,809 SEQ ID NO: 155 |
| H1 | | |
| AAV CKd- | 762 | U.S. Pat. No. 8,734,809 SEQ ID NO: 156 |
| H2 | | |
| AAV CKd- | 763 | U.S. Pat. No. 8,734,809 SEQ ID NO: 157 |
| H3 | | |
| AAV CKd- | 764 | U.S. Pat. No. 8,734,809 SEQ ID NO: 158 |
| H4 | | |
| AAV CKd- | 765 | U.S. Pat. No. 8,734,809 SEQ ID NO: 159 |
| H5 | | |
| AAV CKd- | 766 | U.S. Pat. No. 8,734,809 SEQ ID NO: 151 |
| H6 | | |
| AAV CHt-1 | 767 | U.S. Pat. No. 8,734,809 SEQ ID NO: 160 |
| AAV CHt-P2 | 768 | WO2016065001 SEQ ID NO: 1 |
| AAV CHt-P5 | 769 | WO2016065001 SEQ ID NO: 2 |
| AAV CHt-P9 | 770 | WO2016065001 SEQ ID NO: 3 |
| AAV CBr- | 771 | WO2016065001 SEQ ID NO: 4 |
| 7.1 | | |
| AAV CBr- | 772 | WO2016065001 SEQ ID NO: 5 |
| 7.2 | | |
| AAV CBr- | 773 | WO2016065001 SEQ ID NO: 6 |
| 7.3 | | |
| AAV CBr- | 774 | WO2016065001 SEQ ID NO: 7 |
| 7.4 | | |
| AAV CBr- | 775 | WO2016065001 SEQ ID NO: 8 |
| 7.5 | | |
| AAV CBr- | 776 | WO2016065001 SEQ ID NO: 9 |
| 7.7 | | |
| AAV CBr- | 777 | WO2016065001 SEQ ID NO: 10 |
| 7.8 | | |
| AAV CBr- | 778 | WO2016065001 SEQ ID NO: 11 |
| 7.10 | | |
| AAV CKd- | 779 | WO2016065001 SEQ ID NO: 12 |
| N3 | | |
| AAV CKd- | 780 | WO2016065001 SEQ ID NO: 13 |
| N4 | | |
| AAV CKd- | 781 | WO2016065001 SEQ ID NO: 14 |
| N9 | | |
| AAV CLv-L4 | 782 | WO2016065001 SEQ ID NO: 15 |
| AAV CLv-L5 | 783 | WO2016065001 SEQ ID NO: 16 |
| AAV CLv-L6 | 784 | WO2016065001 SEQ ID NO: 17 |
| AAV CLv- | 785 | WO2016065001 SEQ ID NO: 18 |
| K1 | | |
| AAV CLv- | 786 | WO2016065001 SEQ ID NO: 19 |
| K3 | | |
| AAV CLv- | 787 | WO2016065001 SEQ ID NO: 20 |
| K6 | | |
| AAV CLv- | 788 | WO2016065001 SEQ ID NO: 21 |
| M1 | | |
| AAV CLv- | 789 | WO2016065001 SEQ ID NO: 22 |
| M11 | | |
| AAV CLv- | 790 | WO2016065001 SEQ ID NO: 23 |
| M2 | | |
| AAV CLv- | 791 | WO2016065001 SEQ ID NO: 24 |
| M5 | | |
| AAV CLv- | 792 | WO2016065001 SEQ ID NO: 25 |
| M6 | | |
| AAV CLv- | 793 | WO2016065001 SEQ ID NO: 26 |
| M7 | | |
| AAV CLv- | 794 | WO2016065001 SEQ ID NO: 27 |
| M8 | | |
| AAV CLv- | 795 | WO2016065001 SEQ ID NO: 28 |
| M9 | | |
| AAV CHt-P1 | 796 | WO2016065001 SEQ ID NO: 29 |
| AAV CHt-P6 | 797 | WO2016065001 SEQ ID NO: 30 |
| AAV CHt-P8 | 798 | WO2016065001 SEQ ID NO: 31 |
| AAV CHt- | 799 | WO2016065001 SEQ ID NO: 32 |
| 6.1 | | |
| AAV CHt- | 800 | WO2016065001 SEQ ID NO: 33 |
| 6.10 | | |
| AAV CHt- | 801 | WO2016065001 SEQ ID NO: 34 |
| 6.5 | | |
| AAV CHt- | 802 | WO2016065001 SEQ ID NO: 35 |
| 6.6 | | |
| AAV CHt- | 803 | WO2016065001 SEQ ID NO: 36 |
| 6.7 | | |
| AAV CHt- | 804 | WO2016065001 SEQ ID NO: 37 |
| 6.8 | | |
| AAV CSp- | 805 | WO2016065001 SEQ ID NO: 38 |
| 8.10 | | |
| AAV CSp- | 806 | WO2016065001 SEQ ID NO: 39 |
| 8.2 | | |
| AAV CSp- | 807 | WO2016065001 SEQ ID NO: 40 |
| 8.4 | | |
| AAV CSp- | 808 | WO2016065001 SEQ ID NO: 41 |
| 8.5 | | |
| AAV CSp- | 809 | WO2016065001 SEQ ID NO: 42 |
| 8.6 | | |
| AAV CSp- | 810 | WO2016065001 SEQ ID NO: 43 |
| 8.7 | | |
| AAV CSp- | 811 | WO2016065001 SEQ ID NO: 44 |
| 8.8 | | |
| AAV CSp- | 812 | WO2016065001 SEQ ID NO: 45 |
| 8.9 | | |
| AAV CBr- | 813 | WO2016065001 SEQ ID NO: 46 |
| B7.3 | | |
| AAV CBr- | 814 | WO2016065001 SEQ ID NO: 47 |
| B7.4 | | |
| AAV3B | 815 | WO2016065001 SEQ ID NO: 48 |
| AAV4 | 816 | WO2016065001 SEQ ID NO: 49 |
| AAV5 | 817 | WO2016065001 SEQ ID NO: 50 |
| AAV CHt-P2 | 818 | WO2016065001 SEQ ID NO: 51 |
| AAV CHt-P5 | 819 | WO2016065001 SEQ ID NO: 52 |
| AAV CHt-P9 | 820 | WO2016065001 SEQ ID NO: 53 |
| AAV CBr- | 821 | WO2016065001 SEQ ID NO: 54 |
| 7.1 | | |
| AAV CBr- | 822 | WO2016065001 SEQ ID NO: 55 |
| 7.2 | | |
| AAV CBr- | 823 | WO2016065001 SEQ ID NO: 56 |
| 7.3 | | |
| AAV CBr- | 824 | WO2016065001 SEQ ID NO: 57 |
| 7.4 | | |
| AAV CBr- | 825 | WO2016065001 SEQ ID NO: 58 |
| 7.5 | | |
| AAV CBr- | 826 | WO2016065001 SEQ ID NO: 59 |
| 7.7 | | |
| AAV CBr- | 827 | WO2016065001 SEQ ID NO: 60 |
| 7.8 | | |
| AAV CBr- | 828 | WO2016065001 SEQ ID NO: 61 |
| 7.10 | | |
| AAV CKd- | 829 | WO2016065001 SEQ ID NO: 62 |
| N3 | | |
| AAV CKd- | 830 | WO2016065001 SEQ ID NO: 63 |
| N4 | | |
| AAV CKd- | 831 | WO2016065001 SEQ ID NO: 64 |
| N9 | | |
| AAV CLv-L4 | 832 | WO2016065001 SEQ ID NO: 65 |
| AAV CLv-L5 | 833 | WO2016065001 SEQ ID NO: 66 |
| AAV CLv-L6 | 834 | WO2016065001 SEQ ID NO: 67 |
| AAV CLv- | 835 | WO2016065001 SEQ ID NO: 68 |
| K1 | | |
| AAV CLv- | 836 | WO2016065001 SEQ ID NO: 69 |
| K3 | | |
| AAV CLv- | 837 | WO2016065001 SEQ ID NO: 70 |
| K6 | | |
| AAV CL- | 838 | WO2016065001 SEQ ID NO: 71 |
| M1 | | |
| AAV CLv- | 839 | WO2016065001 SEQ ID NO: 72 |
| M11 | | |
| AAV CLv- | 840 | WO2016065001 SEQ ID NO: 73 |
| M2 | | |
| AAV CLv- | 841 | WO2016065001 SEQ ID NO: 74 |
| M5 | | |
| AAV CLv- | 842 | WO2016065001 SEQ ID NO: 75 |
| M6 | | |
| AAV CLv- | 843 | WO2016065001 SEQ ID NO: 76 |
| M7 | | |
| AAV CLv- | 844 | WO2016065001 SEQ ID NO: 77 |
| M8 | | |
| AAV CLv- | 845 | WO2016065001 SEQ ID NO: 78 |
| M9 | | |
| AAV CHt-P1 | 846 | WO2016065001 SEQ ID NO: 79 |
| AAV CHt-P6 | 847 | WO2016065001 SEQ ID NO: 80 |
| AAV CHt-P8 | 848 | WO2016065001 SEQ ID NO: 81 |
| AAV CHt- | 849 | WO2016065001 SEQ ID NO: 82 |
| 6.1 | | |
| AAV CHt- | 850 | WO2016065001 SEQ ID NO: 83 |
| 6.10 | | |
| AAV CHt- | 851 | WO2016065001 SEQ ID NO: 84 |
| 6.5 | | |
| AAV CHt- | 852 | WO2016065001 SEQ ID NO: 85 |
| 6.6 | | |
| AAV CHt- | 853 | WO2016065001 SEQ ID NO: 86 |
| 6.7 | | |
| AAV CHt- | 854 | WO2016065001 SEQ ID NO: 87 |
| 6.8 | | |
| AAV CSp- | 855 | WO2016065001 SEQ ID NO: 88 |
| 8.10 | | |
| AAV CSp- | 856 | WO2016i65001 SEQ ID NO: 89 |
| 8.2 | | |
| AAV CSp- | 857 | WO2016065001 SEQ ID NO: 90 |
| 8.4 | | |
| AAVTSp- | 858 | WO2016065001 SEQ ID NO: 91 |
| 8.5 | | |
| AAV CSp- | 859 | WO2016065001 SEQ ID NO: 92 |
| 8.6 | | |
| AAV CSp- | 860 | WO2016065001 SEQ ID NO: 93 |
| 8.7 | | |
| AAV CSp- | 861 | WO2016065001 SEQ ID NO: 94 |
| 8.8 | | |
| AAV CSp- | 862 | WO2016065001 SEQ ID NO: 95 |
| 8.9 | | |
| AAV CBr- | 863 | WO2016065001 SEQ ID NO: 96 |
| B7.3 | | |
| AAV CBr- | 864 | WO2016065001 SEQ ID NO: 97 |
| B7.4 | | |
| AAV3B | 865 | WO2016065001 SEQ ID NO: 98 |
| AAV4 | 866 | WO2016065001 SEQ ID NO: 99 |
| AAV5 | 867 | WO2016065001 SEQ ID NO: 100 |
| AAVPHP.B | 868 | WO2015038958 SEQ ID NO: 8 and 13; |
| or G2B-26 | | GenBankALU85156.1 |
| AAVPHP.B | 869 | WO2015038958 SEQ ID NO: 9 |
| AAVG2B-13 | 870 | WO2015038958 SEQ ID NO: 12 |
| AAVTH1.1- | 871 | WO2015038958 SEQ ID NO: 14 |
| 32 | | |
| AAVTH1.1- | 872 | WO2015038958 SEQ ID NO: 15 |
| 35 | | |
| PHP.N/ | 1439 | WO2017100671 SEQ ID NO: 46 |
| PHP.B-DGT | | |
| PHP.S/ | 1440 | WO2017100671 SEQ ID NO: 47 |
| G2A12 | | |
| AAV9/hu.14 | 1441 | WO2017100671 SEQ ID NO: 45 |
| K449R | | |
| GPV | 1518 | US9624274B2 SEQ ID NO: 192 |
| B19 | 1519 | US9624274B2 SEQ ID NO: 193 |
| MVM | 1520 | US9624274B2 SEQ ID NO: 194 |
| FPV | 1521 | US9624274B2 SEQ ID NO: 195 |
| CPV | 1522 | US9624274B2 SEQ ID NO: 196 |
| AAV6 | 1523 | US9546112B2 SEQ ID NO: 5 |
| AAV6 | 1524 | US9457103B2 SEQ ID NO: 1 |
| AAV2 | 1525 | US9457103B2 SEQ ID NO: 2 |
| ShH10 | 1526 | US9457103B2 SEQ ID NO: 3 |
| ShH13 | 1527 | US9457103B2 SEQ ID NO: 4 |
| ShH10 | 1528 | US9457103B2 SEQ ID NO: 5 |
| ShH10 | 1529 | US9457103B2 SEQ ID NO: 6 |
| ShH10 | 1530 | US9457103B2 SEQ ID NO: 7 |
| ShH10 | 1531 | US9457103B2 SEQ ID NO: 8 |
| ShH10 | 1532 | US9457103B2 SEQ ID NO: 9 |
| rh74 | 1533 | US9434928B2 SEQ ID NO: 1, |
| | | US2015023924A1 SEQ ID NO: 2 |
| rh74 | 1534 | US9434928B2 SEQ ID NO: 2, |
| | | US2015023924A1 SEQ ID NO: 1 |
| AAV8 | 1535 | US9434928B2 SEQ ID NO: 4 |
| rh74 | 1536 | US9434928B2 SEQ ID NO: 5 |
| rh74 | 1537 | US2015023924A1 SEQ ID NO: 5, |
| (RHM4-1) | | US20160375110A1 SEQ ID NO: 4 |
| rh74 | 1538 | US2015023924A1 SEQ ID NO: 6, |
| (RHM15-1) | | US20160375110A1 SEQ ID NO: 5 |
| rh74 | 1539 | US2015023924A1 SEQ ID NO: 7, |
| (RHM15-2) | | US20160375110A1 SEQ ID NO: 6 |
| rh74 | 1540 | US2015023924A1 SEQ ID NO: 8, |
| (RHM15- | | US20160375110A1 SEQ ID NO: 7 |
| 3/RHM15-5) | | |
| rh74 | 1541 | US2015023924A1 SEQ ID NO: 9, |
| (RHM15-4) | | US20160375110A1 SEQ ID NO: 8 |
| rh74 | 1542 | US2015023924A1 SEQ ID NO: 10, |
| (RHM15-6) | | US20160375110A1 SEQ ID NO: 9 |
| rh74 | 1543 | US2015023924A1 SEQ ID NO: 11 |
| (RHM4-1) | | |
| rh74 | 1544 | US2015023924A1 SEQ ID NO: 12 |
| (RHM15-1) | | |
| rh74 | 1545 | US2015023924A1 SEQ ID NO: 13 |
| (RHM15-2) | | |
| rh74 | 1546 | US2015023924A1 SEQ ID NO: 14 |
| (RHM15- | | |
| 3/RHM15-5) | | |
| rh74 | 1547 | US2015023924A1 SEQ ID NO: 15 |
| (RHM15-4) | | |
| rh74 | 1548 | US2015023924A1 SEQ ID NO: 16 |
| (RHM15-6) | | |
| AAV2 | 1549 | US20160175389A1 SEQ ID NO: 9 |
| (comprising | | |
| lung specific | | |
| polypeptide) | | |
| AAV2 | 1550 | US20160175389A1 SEQ ID NO: 10 |
| (comprising | | |
| lung specific | | |
| polypeptide) | | |
| Anc80 | 1551 | US20170051257A1 SEQ ID NO: 1 |
| Anc80 | 1552 | US20170051257A1 SEQ ID NO: 2 |
| Anc81 | 1553 | US20170051257A1 SEQ ID NO: 3 |
| Anc80 | 1554 | US20170051257A1 SEQ ID NO: 4 |
| Anc82 | 1555 | US20170051257A1 SEQ ID NO: 5 |
| Anc82 | 1556 | US20170051257A1 SEQ ID NO: 6 |
| Anc83 | 1557 | US20170051257A1 SEQ ID NO: 7 |
| Anc83 | 1558 | US20170051257A1 SEQ ID NO: 8 |
| Anc84 | 1559 | US20170051257A1 SEQ ID NO: 9 |
| Anc84 | 1560 | US20170051257A1 SEQ ID NO: 10 |
| Anc94 | 1561 | US20170051257A1 SEQ ID NO: 11 |
| Anc94 | 1562 | US20170051257A1 SEQ ID NO: 12 |
| Anc113 | 1563 | US20170051257A1 SEQ ID NO: 13 |
| Anc113 | 1564 | US20170051257A1 SEQ ID NO: 14 |
| Anc126 | 1565 | US20170051257A1 SEQ ID NO: 15 |
| Anc126 | 1566 | US20170051257A1 SEQ ID NO: 16 |
| Anc127 | 1567 | US20170051257A1 SEQ ID NO: 17 |
| Anc127 | 1568 | US20170051257A1 SEQ ID NO: 18 |
| Anc80L27 | 1569 | US20170051257A1 SEQ ID NO: 19 |
| Anc80L59 | 1570 | US20170051257A1 SEQ ID NO: 20 |
| Anc80L60 | 1571 | US20170051257A1 SEQ ID NO: 21 |
| Anc80L62 | 1572 | US20170051257A1 SEQ ID NO: 22 |
| Anc80L65 | 1573 | US20170051257A1 SEQ ID NO: 23 |
| Anc80L33 | 1574 | US20170051257A1 SEQ ID NO: 24 |
| Anc80L36 | 1575 | US20170051257A1 SEQ ID NO: 25 |
| Anc80L44 | 1576 | US20170051257A1 SEQ ID NO: 26 |
| Anc80L1 | 1577 | US20170051257A1 SEQ ID NO: 35 |
| Anc80L1 | 1578 | US20170051257A1 SEQ ID NO: 36 |
| AAV-X1 | 1579 | US8283151B2 SEQ ID NO: 11 |
| AAV-X1b | 1580 | US8283151B2 SEQ ID NO: 12 |
| AAV-X5 | 1581 | US8283151B2 SEQ ID NO: 13 |
| AAV-X19 | 1582 | US8283151B2 SEQ ID NO: 14 |
| AAV-X21 | 1583 | US8283151B2 SEQ ID NO: 15 |
| AAV-X22 | 1584 | US8283151B2 SEQ ID NO: 16 |
| AAV-X23 | 1585 | US8283151B2 SEQ ID NO: 17 |
| AAV-X24 | 1586 | US8283151B2 SEQ ID NO: 18 |
| AAV-X25 | 1587 | US8283151B2 SEQ ID NO: 19 |
| AAV-X26 | 1588 | US8283151B2 SEQ ID NO: 20 |
| AAV-X1 | 1589 | US8283151B2 SEQ ID NO: 21 |
| AAV-X1b | 1590 | US8283151B2 SEQ ID NO: 22 |
| AAV-X5 | 1591 | US8283151B2 SEQ ID NO: 23 |
| AAV-X19 | 1592 | US8283151B2 SEQ ID NO: 24 |
| AAV-X21 | 1593 | US8283151B2 SEQ ID NO: 25 |
| AAV-X22 | 1594 | US8283151B2 SEQ ID NO: 26 |
| AAV-X23 | 1595 | US8283151B2 SEQ ID NO: 27 |
| AAV-X24 | 1596 | US8283151B2 SEQ ID NO: 28 |
| AAV-X25 | 1597 | US8283151B2 SEQ ID NO: 29 |
| AAV-X26 | 1598 | US8283151B2 SEQ ID NO: 30 |
| AAVrh8 | 1599 | WO2016054554A1 SEQ ID NO: 8 |
| AAVrh8VP2 | 1600 | WO2016054554A1 SEQ ID NO: 9 |
| FCS | | |
| AAVrh8VP2 | 1601 | WO2016054554A1 SEQ ID NO: 10 |
| FC44 | | |
| AAVrh8VP2 | 1602 | WO2016054554A1 SEQ ID NO: 11 |
| ApoB100 | | |
| AAVrh8VP2 | 1603 | WO2016054554A1 SEQ ID NO: 12 |
| RVG | | |
| AAVrh8VP2 | 1604 | WO2016054554A1 SEQ ID NO: 13 |
| Angiopep-2 | | |
| VP2 | | |
| AAV9.47VP | 1605 | WO2016054554A1 SEQ ID NO: 14 |
| 1.3 | | |
| AAV9.47VP | 1606 | WO2016054554A1 SEQ ID NO: 15 |
| 2ICAMg3 | | |
| AAV9.47VP | 1607 | WO2016054554A1 SEQ ID NO: 16 |
| 2RVG | | |
| AAV9.47VP | 1608 | WO2016054554A1 SEQ ID NO: 17 |
| 2Angiopep-2 | | |
| AAV9.47VP | 1609 | WO2016054554A1 SEQ ID NO: 18 |
| 2A-string | | |
| AAVrh8VP2 | 1610 | WO2016054554A1 SEQ ID NO: 19 |
| FC5 VP2 | | |
| AAVrh8VP2 | 1611 | WO2016054554A1 SEQ ID NO: 20 |
| FC44 VP2 | | |
| AAVrh8VP2 | 1612 | WO2016054554A1 SEQ ID NO: 21 |
| ApoB100 | | |
| VP2 | | |
| AAVrh8VP2 | 1613 | WO2016054554A1 SEQ ID NO: 22 |
| RVG VP2 | | |
| AAVrh8VP2 | 1614 | WO2016054554A1 SEQ ID NO: 23 |
| Angiopep-2 | | |
| VP2 | | |
| AAV9.47VP | 1615 | WO2016054554A1 SEQ ID NO: 24 |
| 2ICAMg3 | | |
| VP2 | | |
| AAV9.47VP | 1616 | WO2016054554A1 SEQ ID NO: 25 |
| 2RVG VP2 | | |
| AAV9.47VP | 1617 | WO2016054554A1 SEQ ID NO: 26 |
| 2Angiopep-2 | | |
| VP2 | | |
| AAV9.47VP | 1618 | WO2016054554A1 SEQ ID NO: 27 |
| 2A-string | | |
| VP2 | | |
| rAAV-B1 | 1619 | WO2016054557A1 SEQ ID NO: 1 |
| rAAV-B2 | 1620 | WO2016054557A1 SEQ ID NO: 2 |
| rAAV-B3 | 1621 | WO2016054557A1 SEQ ID NO: 3 |
| rAAV-B4 | 1622 | WO2016054557A1 SEQ ID NO: 4 |
| rAAV-B1 | 1623 | WO2016054557A1 SEQ ID NO: 5 |
| rAAV-B2 | 1624 | WO2016054557A1 SEQ ID NO: 6 |
| rAAV-B3 | 1625 | WO2016054557A1 SEQ ID NO: 7 |
| rAAV-B4 | 1626 | WO2016054557A1 SEQ ID NO: 8 |
| rAAV-L1 | 1627 | WO2016054557A1 SEQ ID NO: 9 |
| rAAV-L2 | 1628 | WO2016054557A1 SEQ ID NO: 10 |
| rAAV-L3 | 1629 | WO2016054557A1 SEQ ID NO: 11 |
| rAAV-L4 | 1630 | WO2016054557A1 SEQ ID NO: 12 |
| rAAV-L1 | 1631 | WO2016054557A1 SEQ ID NO: 13 |
| rAAV-L2 | 1632 | WO2016054557A1 SEQ ID NO: 14 |
| rAAV-L3 | 1633 | WO2016054557A1 SEQ ID NO: 15 |
| rAAV-L4 | 1634 | WO2016054557A1 SEQ ID NO: 16 |
| AAV9 | 1635 | WO2016073739A1 SEQ ID NO: 3 |
| rAAV | 1636 | WO2016081811A1 SEQ ID NO: 1 |
| rAAV | 1637 | WO2016081811A1 SEQ ID NO: 2 |
| rAAV | 1638 | WO2016081811A1 SEQ ID NO: 3 |
| rAAV | 1639 | WO2016081811A1 SEQ ID NO: 4 |
| rAAV | 1640 | WO2016081811A1 SEQ ID NO: 5 |
| rAAV | 1641 | WO2016081811A1 SEQ ID NO: 6 |
| rAAV | 1642 | WO2016081811A1 SEQ ID NO: 7 |
| rAAV | 1643 | WO2016081811A1 SEQ ID NO: 8 |
| rAAV | 1644 | WO2016081811A1 SEQ ID NO: 9 |
| rAAV | 1645 | WO2016081811A1 SEQ ID NO: 10 |
| rAAV | 1646 | WO2016081811A1 SEQ ID NO: 11 |
| rAAV | 1647 | WO2016081811A1 SEQ ID NO: 12 |
| rAAV | 1648 | WO2016081811A1 SEQ ID NO: 13 |
| rAAV | 1649 | WO2016081811A1 SEQ ID NO: 14 |
| rAAV | 1650 | WO2016081811A1 SEQ ID NO: 15 |
| rAAV | 1651 | WO2016081811A1 SEQ ID NO: 16 |
| rAAV | 1652 | WO2016081811A1 SEQ ID NO: 17 |
| rAAV | 1653 | WO2016081811A1 SEQ ID NO: 18 |
| rAAV | 1654 | WO2016081811A1 SEQ ID NO: 19 |
| rAAV | 1655 | WO2016081811A1 SEQ ID NO: 20 |
| rAAV | 1656 | WO2016081811A1 SEQ ID NO: 21 |
| rAAV | 1657 | WO2016081811A1 SEQ ID NO: 22 |
| rAAV | 1658 | WO2016081811A1 SEQ ID NO: 23 |
| rAAV | 1659 | WO2016081811A1 SEQ ID NO: 24 |
| rAAV | 1660 | WO2016081811A1 SEQ ID NO: 25 |
| rAAV | 1661 | WO2016081811A1 SEQ ID NO: 26 |
| rAAV | 1662 | WO2016081811A1 SEQ ID NO: 27 |
| rAAV | 1663 | WO2016081811A1 SEQ ID NO: 28 |
| rAAV | 1664 | WO2016081811A1 SEQ ID NO: 29 |
| rAAV | 1665 | WO2016081811A1 SEQ ID NO: 30 |
| rAAV | 1666 | WO2016081811A1 SEQ ID NO: 31 |
| rAAV | 1667 | WO2016081811A1 SEQ ID NO: 32 |
| rAAV | 1668 | WO2016081811A1 SEQ ID NO: 33 |
| rAAV | 1669 | WO2016081811A1 SEQ ID NO: 34 |
| rAAV | 1670 | WO2016081811A1 SEQ ID NO: 35 |
| rAAV | 1671 | WO2016081811A1 SEQ ID NO: 36 |
| rAAV | 1672 | WO2016081811A1 SEQ ID NO: 37 |
| rAAV | 1673 | WO2016081811A1 SEQ ID NO: 38 |
| rAAV | 1674 | WO2016081811A1 SEQ ID NO: 39 |
| rAAV | 1675 | WO2016081811A1 SEQ ID NO: 40 |
| rAAV | 1676 | WO2016081811A1 SEQ ID NO: 41 |
| rAAV | 1677 | WO2016081811A1 SEQ ID NO: 42 |
| rAAV | 1678 | WO2016081811A1 SEQ ID NO: 43 |
| rAAV | 1679 | WO2016081811A1 SEQ ID NO: 44 |
| rAAV | 1680 | WO2016081811A1 SEQ ID NO: 45 |
| rAAV | 1681 | WO2016081811A1 SEQ ID NO: 46 |
| rAAV | 1682 | WO2016081811A1 SEQ ID NO: 47 |
| rAAV | 1683 | WO2016081811A1 SEQ ID NO: 48 |
| rAAV | 1684 | WO2016081811A1 SEQ ID NO: 49 |
| rAAV | 1685 | WO2016081811A1 SEQ ID NO: 50 |
| rAAV | 1686 | WO2016081811A1 SEQ ID NO: 51 |
| rAAV | 1687 | WO2016081811A1 SEQ ID NO: 52 |
| rAAV | 1688 | WO2016081811A1 SEQ ID NO: 53 |
| rAAV | 1689 | WO2016081811A1 SEQ ID NO: 54 |
| rAAV | 1690 | WO2016081811A1 SEQ ID NO: 55 |
| rAAV | 1691 | WO2016081811A1 SEQ ID NO: 56 |
| rAAV | 1692 | WO2016081811A1 SEQ ID NO: 57 |
| rAAV | 1693 | WO2016081811A1 SEQ ID NO: 58 |
| rAAV | 1694 | WO2016081811A1 SEQ ID NO: 59 |
| rAAV | 1695 | WO2016081811A1 SEQ ID NO: 60 |
| rAAV | 1696 | WO2016081811A1 SEQ ID NO: 61 |
| rAAV | 1697 | WO2016081811A1 SEQ ID NO: 62 |
| rAAV | 1698 | WO2016081811A1 SEQ ID NO: 63 |
| rAAV | 1699 | WO2016081811A1 SEQ ID NO: 64 |
| rAAV | 1700 | WO2016081811A1 SEQ ID NO: 65 |
| rAAV | 1701 | WO2016081811A1 SEQ ID NO: 66 |
| rAAV | 1702 | WO2016081811A1 SEQ ID NO: 67 |
| rAAV | 1703 | WO2016081811A1 SEQ ID NO: 68 |
| rAAV | 1704 | WO2016081811A1 SEQ ID NO: 69 |
| rAAV | 1705 | WO2016081811A1 SEQ ID NO: 70 |
| rAAV | 1706 | WO2016081811A1 SEQ ID NO: 71 |
| rAAV | 1707 | WO2016081811A1 SEQ ID NO: 72 |
| rAAV | 1708 | WO2016081811A1 SEQ ID NO: 73 |
| rAAV | 1709 | WO2016081811A1 SEQ ID NO: 74 |
| rAAV | 1710 | WO2016081811A1 SEQ ID NO: 75 |
| rAAV | 1711 | WO2016081811A1 SEQ ID NO: 76 |
| rAAV | 1712 | WO2016081811A1 SEQ ID NO: 77 |
| rAAV | 1713 | WO2016081811A1 SEQ ID NO: 78 |
| rAAV | 1714 | WO2016081811A1 SEQ ID NO: 79 |
| rAAV | 1715 | WO2016081811A1 SEQ ID NO: 80 |
| rAAV | 1716 | WO2016081811A1 SEQ ID NO: 81 |
| rAAV | 1717 | WO2016081811A1 SEQ ID NO: 82 |
| rAAV | 1718 | WO2016081811A1 SEQ ID NO: 83 |
| rAAV | 1719 | WO2016081811A1 SEQ ID NO: 84 |
| rAAV | 1720 | WO2016081811A1 SEQ ID NO: 85 |
| rAAV | 1721 | WO2016081811A1 SEQ ID NO: 86 |
| rAAV | 1722 | WO2016081811A1 SEQ ID NO: 87 |
| rAAV | 1723 | WO2016081811A1 SEQ ID NO: 88 |
| rAAV | 1724 | WO2016081811A1 SEQ ID NO: 89 |
| rAAV | 1725 | WO2016081811A1 SEQ ID NO: 90 |
| rAAV | 1726 | WO2016081811A1 SEQ ID NO: 91 |
| rAAV | 1727 | WO2016081811A1 SEQ ID NO: 92 |
| rAAV | 1728 | WO2016081811A1 SEQ ID NO: 93 |
| rAAV | 1729 | WO2016081811A1 SEQ ID NO: 94 |
| rAAV | 1730 | WO2016081811A1 SEQ ID NO: 95 |
| rAAV | 1731 | WO2016081811A1 SEQ ID NO: 96 |
| rAAV | 1732 | WO2016081811A1 SEQ ID NO: 97 |
| rAAV | 1733 | WO2016081811A1 SEQ ID NO: 98 |
| rAAV | 1734 | WO2016081811A1 SEQ ID NO: 99 |
| rAAV | 1735 | WO2016081811A1 SEQ ID NO: 100 |
| rAAV | 1736 | WO2016081811A1 SEQ ID NO: 101 |
| rAAV | 1737 | WO2016081811A1 SEQ ID NO: 102 |
| rAAV | 1738 | WO2016081811A1 SEQ ID NO: 103 |
| rAAV | 1739 | WO2016081811A1 SEQ ID NO: 104 |
| rAAV | 1740 | WO2016081811A1 SEQ ID NO: 105 |
| rAAV | 1741 | WO2016081811A1 SEQ ID NO: 106 |
| rAAV | 1742 | WO2016081811A1 SEQ ID NO: 107 |
| rAAV | 1743 | WO2016081811A1 SEQ ID NO: 108 |
| rAAV | 1744 | WO2016081811A1 SEQ ID NO: 109 |
| rAAV | 1745 | WO2016081811A1 SEQ ID NO: 110 |
| rAAV | 1746 | WO2016081811A1 SEQ ID NO: 111 |
| rAAV | 1747 | WO2016081811A1 SEQ ID NO: 112 |
| rAAV | 1748 | WO2016081811A1 SEQ ID NO: 113 |
| rAAV | 1749 | WO2016081811A1 SEQ ID NO: 114 |
| rAAV | 1750 | WO2016081811A1 SEQ ID NO: 115 |
| rAAV | 1751 | WO2016081811A1 SEQ ID NO: 116 |
| rAAV | 1752 | WO2016081811A1 SEQ ID NO: 117 |
| rAAV | 1753 | WO2016081811A1 SEQ ID NO: 118 |
| rAAV | 1754 | WO2016081811A1 SEQ ID NO: 119 |
| rAAV | 1755 | WO2016081811A1 SEQ ID NO: 120 |
| rAAV | 1756 | WO2016081811A1 SEQ ID NO: 121 |
| rAAV | 1757 | WO2016081811A1 SEQ ID NO: 122 |
| rAAV | 1758 | WO2016081811A1 SEQ ID NO: 123 |
| rAAV | 1759 | WO2016081811A1 SEQ ID NO: 124 |
| rAAV | 1760 | WO2016081811A1 SEQ ID NO: 125 |
| rAAV | 1761 | WO2016081811A1 SEQ ID NO: 126 |
| rAAV | 1762 | WO2016081811A1 SEQ ID NO: 127 |
| rAAV | 1763 | WO2016081811A1 SEQ ID NO: 128 |
| AAV8 | 1764 | WO2016081811A1 SEQ ID NO: 133 |
| E532K | | |
| AAV8 | 1765 | WO2016081811A1 SEQ ID NO: 134 |
| E532K | | |
| rAAV4 | 1766 | WO2016115382A1 SEQ ID NO: 2 |
| rAAV4 | 1767 | WO2016115382A1 SEQ ID NO: 3 |
| rAAV4 | 1768 | WO2016115382A1 SEQ ID NO: 4 |
| rAAV4 | 1769 | WO2016115382A1 SEQ ID NO: 5 |
| rAAV4 | 1770 | WO2016115382A1 SEQ ID NO: 6 |
| rAAV4 | 1771 | WO2016115382A1 SEQ ID NO: 7 |
| rAAV4 | 1772 | WO2016115382A1 SEQ ID NO: 8 |
| rAAV4 | 1773 | WO2016115382A1 SEQ ID NO: 9 |
| rAAV4 | 1774 | WO2016115382A1 SEQ ID NO: 10 |
| rAAV4 | 1775 | WO2016115382A1 SEQ ID NO: 11 |
| rAAV4 | 1776 | WO2016115382A1 SEQ ID NO: 12 |
| rAAV4 | 1777 | WO2016115382A1 SEQ ID NO: 13 |
| rAAV4 | 1778 | WO2016115382A1 SEQ ID NO: 14 |
| rAAV4 | 1779 | WO2016115382A1 SEQ ID NO: 15 |
| rAAV4 | 1780 | WO2016115382A1 SEQ ID NO: 16 |
| rAAV4 | 1781 | WO2016115382A1 SEQ ID NO: 17 |
| rAAV4 | 1782 | WO2016115382A1 SEQ ID NO: 18 |
| rAAV4 | 1783 | WO2016115382A1 SEQ ID NO: 19 |
| rAAV4 | 1784 | WO2016115382A1 SEQ ID NO: 20 |
| rAAV4 | 1785 | WO2016115382A1 SEQ ID NO: 21 |
| AAV11 | 1786 | WO2016115382A1 SEQ ID NO: 22 |
| AAV12 | 1787 | WO2016115382A1 SEQ ID NO: 23 |
| rh32 | 1788 | WO2016115382A1 SEQ ID NO: 25 |
| rh33 | 1789 | WO2016115382A1 SEQ ID NO: 26 |
| rh34 | 1790 | WO2016115382A1 SEQ ID NO: 27 |
| rAAV4 | 1791 | WO2016115382A1 SEQ ID NO: 28 |
| rAAV4 | 1792 | WO2016115382A1 SEQ ID NO: 29 |
| rAAV4 | 1793 | WO2016115382A1 SEQ ID NO: 30 |
| rAAV4 | 1794 | WO2016115382A1 SEQ ID NO: 31 |
| rAAV4 | 1795 | WO2016115382A1 SEQ ID NO: 32 |
| rAAV4 | 1796 | WO2016115382A1 SEQ ID NO: 33 |
| AAV2/8 | 1797 | WO2016115382A1 SEQ ID NO: 47 |
| AAV2/8 | 1798 | WO2016115382A1 SEQ ID NO: 48 |
| ancestral | 1799 | WO2016154344A1 SEQ ID NO: 7 |
| AAV | | |
| ancestral | 1800 | WO2016154344A1 SEQ ID NO: 13 |
| AAV variant | | |
| C4 | | |
| ancestral | 1801 | WO2016154344A1 SEQ ID NO: 14 |
| AAV variant | | |
| C7 | | |
| ancestral | 1802 | WO2016154344A1 SEQ ID NO: 15 |
| AAV variant | | |
| G4 | | |
| consensus | 1803 | WO2016154344A1 SEQ ID NO: 16 |
| amino acid | | |
| sequence of | | |
| ancestral | | |
| AAV | | |
| variants, C4, | | |
| C7 and G4 | | |
| consensus | 1804 | WO2016154344A1 SEQ ID NO: 17 |
| amino acid | | |
| sequence of | | |
| ancestral | | |
| AAV | | |
| variants, C4 | | |
| and C7 | | |
| AAV8 (with | 1805 | WO2016150403A1 SEQ ID NO: 13 |
| a AAV2 | | |
| phospholipase | | |
| domain) | | |
| AAV VR- | 1806 | US20160289275A1 SEQ ID NO: 10 |
| 942n | | |
| AAV5-A | 1807 | US20160289275A1 SEQ ID NO: 13 |
| (M569V) | | |
| AAV5-A | 1808 | US20160289275A1 SEQ ID NO: 14 |
| (M569V) | | |
| AAV5-A | 1809 | US20160289275A1 SEQ ID NO: 16 |
| (Y585V) | | |
| AAV5-A | 1810 | US20160289275A1 SEQ ID NO: 17 |
| (Y585V) | | |
| AAV5-A | 1811 | US20160289275A1 SEQ ID NO: 19 |
| (L587T) | | |
| AAV5-A | 1812 | US20160289275A1 SEQ ID NO: 20 |
| (L587T) | | |
| AAV5-A | 1813 | US20160289275A1 SEQ ID NO: 22 |
| (Y585V/ | | |
| L587T) | | |
| AAV5-A | 1814 | US20160289275A1 SEQ ID NO: 23 |
| (Y585V/ | | |
| L587T) | | |
| AAV5-B | 1815 | US20160289275A1 SEQ ID NO: 25 |
| (D652.A) | | |
| AAV5-B | 1816 | US20160289275A1 SEQ ID NO: 26 |
| (D652A) | | |
| AAV5-B | 1817 | US20160289275A1 SEQ ID NO: 28 |
| (T362M) | | |
| AAV5-B | 1818 | US20160289275A1 SEQ ID NO: 29 |
| (T362M) | | |
| AAV5-B | 1819 | US20160289275A1 SEQ ID NO: 31 |
| (Q359D) | | |
| AAV5-B | 1820 | US20160289275A1 SEQ ID NO: 32 |
| (Q359D) | | |
| AAV5-B | 1821 | US20160289275A1 SEQ ID NO: 34 |
| (E350Q) | | |
| AAV5-B | 1822 | US20160289275A1 SEQ ID NO: 35 |
| (E350Q) | | |
| AAV5-B | 1823 | US20160289275A1 SEQ ID NO: 37 |
| (P533S) | | |
| AAV5-B | 1824 | US20160289275A1 SEQ ID NO: 38 |
| (P533S) | | |
| AAV5-B | 1825 | US20160289275A1 SEQ ID NO: 40 |
| (P533G) | | |
| AAV5B | 1826 | US20160289275A1 SEQ ID NO: 41 |
| (P533G) | | |
| AAV5- | 1827 | US20160289275A1 SEQ ID NO: 43 |
| mutation in | | |
| loop VII | | |
| AAV5- | 1828 | US20160289275A1 SEQ ID NO: 44 |
| mutation in | | |
| loop VII | | |
| AAV8 | 1829 | US20160289275A1 SEQ ID NO: 47 |
| Mut A | 1830 | WO2016181123A1 SEQ ID NO: 1 |
| (LK03/AAV8) | | |
| Mut B | 1831 | WO2016181123A1 SEQ ID NO: 2 |
| (LK03/AAV5) | | |
| Mut C | 1832 | WO2016181123A1 SEQ ID NO: 3 |
| (AAV8/ | | |
| AAV3B) | | |
| Mut D | 1833 | WO2016181123A1 SEQ ID NO: 4 |
| (AAV5/ | | |
| AAV3E) | | |
| Mut E | 1834 | WO2016181123A1 SEQ ID NO: 5 |
| (AAV8/ | | |
| AAV3B) | | |
| Mut F | 1835 | WO2016181123A1 SEQ ID NO: 6 |
| (AAV3B/ | | |
| AAV8) | | |
| AAV44.9 | 1836 | WO2016183297A1 SEQ ID NO: 4 |
| AAV44.9 | 1837 | WO2016183297A1 SEQ ID NO: 5 |
| AAVrh8 | 1838 | WO2016183297A1 SEQ ID NO: 6 |
| AAV44.9 | 1839 | WO2016183297A1 SEQ ID NO: 9 |
| (S470N) | | |
| rh74 VP1 | 1840 | US20160375110A1 SEQ ID NO: 1 |
| AAV-LK03 | 1841 | WO2017015102A1 SEQ ID NO: 5 |
| (L125I) | | |
| AAV3B | 1842 | WO2017015102A1 SEQ ID NO: 6 |
| (S663V + | | |
| T492V) | | |
| Anc80 | 1843 | WO2017019994A2 SEQ ID NO: 1 |
| Anc80 | 1844 | WO2017019994A2 SEQ ID NO: 2 |
| Anc81 | 1845 | WO2017019994A2 SEQ ID NO: 3 |
| Anc81 | 1846 | WO2017019994A2 SEQ ID NO: 4 |
| Anc82 | 1847 | WO2017019994A2 SEQ ID NO: 5 |
| Anc82 | 1848 | WO2017019994A2 SEQ ID NO: 6 |
| Anc83 | 1849 | WO2017019994A2 SEQ ID NO: 7 |
| Anc83 | 1850 | WO2017019994A2 SEQ ID NO: 8 |
| Anc84 | 1851 | WO2017019994A2 SEQ ID NO: 9 |
| Anc84 | 1852 | WO2017019994A2 SEQ ID NO: 10 |
| Anc94 | 1853 | WO2017019994A2 SEQ ID NO: 11 |
| Anc94 | 1854 | WO2017019994A2 SEQ ID NO: 12 |
| Anc113 | 1855 | WO2017019994A2 SEQ ID NO: 13 |
| Anc113 | 1856 | WO2017019994A2 SEQ ID NO: 14 |
| Anc126 | 1857 | WO2017019994A2 SEQ ID NO: 15 |
| Anc126 | 1858 | WO2017019994A2 SEQ ID NO: 16 |
| Anc127 | 1859 | WO2017019994A2 SEQ ID NO: 17 |
| Anc127 | 1860 | WO2017019994A2 SEQ ID NO: 18 |
| Anc80L27 | 1861 | WO2017019994A2 SEQ ID NO: 19 |
| Anc80L59 | 1862 | WO2017019994A2 SEQ ID NO: 20 |
| Anc80L60 | 1863 | WO2017019994A2 SEQ ID NO: 21 |
| Anc80L62 | 1864 | WO2017019994A2 SEQ ID NO: 22 |
| Anc80L65 | 1865 | WO2017019994A2 SEQ ID NO: 23 |
| Anc80L33 | 1866 | WO2017019994A2 SEQ ID NO: 24 |
| Anc80L36 | 1867 | WO2017019994A2 SEQ ID NO: 25 |
| Am80L44 | 1868 | WO2017019994A2 SEQ ID NO: 26 |
| Anc80L1 | 1869 | WO2017019994A2 SEQ ID NO: 35 |
| Anc80L1 | 1870 | WO2017019994A2 SEQ ID NO: 36 |
| AAVrh10 | 1871 | WO2017019994A2 SEQ ID NO: 41 |
| Anc110 | 1872 | WO2017019994A2 SEQ ID NO: 42 |
| Anc110 | 1873 | WO2017019994A2 SEQ ID NO: 43 |
| AAVrh32.33 | 1874 | WO2017019994A2 SEQ ID NO: 45 |
| AAVrh74 | 1875 | WO2017049031A1 SEQ ID NO: 1 |
| AAV2 | 1876 | WO2017053629A2 SEQ ID NO: 49 |
| AAV2 | 1877 | WO2017053629A2 SEQ ID NO: 50 |
| AAV2 | 1878 | WO2017053629A2 SEQ ID NO: 82 |
| Parvo-like | 1879 | WO2017070476A2 SEQ ID NO: 1 |
| virus | | |
| Parvo-like | 1880 | WO2017070476A2 SEQ ID NO: 2 |
| virus | | |
| Parvo-like | 1881 | WO2017070476A2 SEQ ID NO: 3 |
| virus | | |
| Parvo-like | 1882 | WO2017070476A2 SEQ ID NO: 4 |
| virus | | |
| Parvo-like | 1883 | WO2017070476A2 SEQ ID NO: 5 |
| virus | | |
| Parvo-like | 1884 | WO2017070476A2 SEQ ID NO: 6 |
| vints | | |
| AAVrh.10 | 1885 | WO2017070516A1 SEQ ID NO: 7 |
| AAVrh.10 | 1886 | WO2017070516A1 SEQ ID NO: 14 |
| AAV2tYF | 1887 | WO2017070491A1 SEQ ID NO: 1 |
| AAV-SPK | 1888 | WO2017075619A1 SEQ ID NO: 28 |
| AAV2.5 | 1889 | US20170128528A1 SEQ ID NO: 13 |
| AAV1.1 | 1890 | US20170128528A1 SEQ ID NO: 15 |
| AAV6.1 | 1891 | US20170128528A1 SEQ ID NO: 17 |
| AAV6.3.1 | 1892 | US20170128528A1 SEQ ID NO: 18 |
| AAV2i8 | 1893 | US20170128528A1 SEQ ID NO: 28 |
| AAV2i8 | 1894 | US20170128528A1 SEQ ID NO: 29 |
| ttAAV | 1895 | US20170128528A1 SEQ ID NO: 30 |
| ttAAV- | 1896 | U820170128528A1 SEQ ID NO: 32 |
| S312N | | |
| ttAAV- | 1897 | US20170128528A1 SEQ ID NO: 33 |
| S312N | | |
| AAV6 | 1898 | WO2016134337A1 SEQ ID NO: 24 |
| (Y705, Y731, | | |
| and T492) | | |
| AAV2 | 1899 | WO2016134375A1 SEQ ID NO: 9 |
| AAV2 | 1900 | WO2016134375A1 SEQ ID NO: 10 |

[0098] Each of the patents, applications and/or publications listed in Table 1 are hereby incorporated by reference in their entirety.

[0099] In one embodiment, the AAV serotype may be, or may have a sequence as described in International Patent Publication WO2015038958, the contents of which are herein incorporated by reference in their entirety, such as, but not limited to, AAV9 (SEQ ID NO: 2 and 11 of WO2015038958 or SEQ ID NO: 127 and 126 respectively herein), PHP.B (SEQ ID NO: 8 and 9 of WO2015038958, herein SEQ ID NO: 868 and 869), G21B-13 (SEQ ID NO: 12 of WO2015038958, herein SEQ ID NO: 870), G2B3-26 (SEQ ID NO: 13 of WO2015038958, herein SEQ ID NO: 868 and 869), TH1.1-32 (SEQ ID NO: 14 of WO2015038958, herein SEQ ID NO: 871), TH1.1-35 (SEQ ID NO: 15 of WO2015038958, herein SEQ ID NO: 872) or variants thereof. Further, any of the targeting peptides or amino acid inserts described in WO2015038958, may be inserted into any parent AAV serotype, such as, but not limited to, AAV9 (SEQ ID NO: 126 for the DNA sequence and SEQ ID NO: 127 for the amino acid sequence). In one embodiment, the amino acid insert is inserted between amino acids 586-592 of the parent AAV (e.g., AAV9). In another embodiment, the amino acid insert is inserted between amino acids 588-589 of the parent AAV sequence. The amino acid insert may be, but is not limited to, any of the following amino acid sequences, TLAVPFK (SEQ ID NO: 1 of WO2015038958; herein SEQ ID NO: 873), KFPVALT (SEQ ID NO: 3 of WO2015038958; herein SEQ ID NO: 874), LAVPFK (SEQ ID NO: 31 of WO2015038958; herein SEQ ID NO: 875), AVPFK (SEQ ID NO: 32 of WO2015038958; herein SEQ ID NO: 876), VPFK (SEQ ID NO: 33 of WO2015038958; herein SEQ ID NO: 877), TLAVPF (SEQ ID NO: 34 of WO2015038958; herein SEQ ID NO: 878), TLAVP (SEQ ID NO: 35 of WO2015038958; herein SEQ ID NO: 879), TLAV (SEQ ID NO: 36 of WO2015038958; herein SEQ ID NO: 880), SVSKPFL (SEQ ID NO: 28 of WO2015038958; herein SEQ ID NO: 881), FTLTTPK (SEQ ID NO: 29 of WO2015038958; herein SEQ ID NO: 882), MNATKNV (SEQ ID NO: 30 of WO2015038958; herein SEQ ID NO: 883), QSSQTPR (SEQ ID NO: 54 of WO2015038958; herein SEQ ID NO: 884), ILGTGTS (SEQ ID NO: 55 of WO2015038958; herein SEQ ID NO: 885), TRTNPEA (SEQ ID NO: 56 of WO2015038958; herein SEQ ID NO: 886), NGGTSSS (SEQ ID NO: 58 of WO2015038958; herein SEQ ID NO: 887), or YTLSQGW (SEQ ID NO: 60 of WO2015038958; herein SEQ ID NO: 888). Non-limiting examples of nucleotide sequences that may encode the amino acid inserts include the following, AAGTTTCCTGTGGCGTTGACT (for SEQ ID NO: 3 of WO2015038958; herein SEQ ID NO: 889), ACTTTGGCGGTGCCTTTTAAG (SEQ ID NO: 24 and 49 of WO2015038958; herein SEQ ID NO: 890), AGTGTGAGTAAGCCTTTTTTG (SEQ ID NO: 25 of WO2015038958; herein SEQ ID NO: 891), TTTACGTTGACGACGCCTAAG (SEQ ID NO: 26 of WO2015038958; herein SEQ ID NO: 892), ATGAATGCTACGAAGAATGTG (SEQ ID NO: 27 of WO2015038958; herein SEQ ID NO: 893), CAGTCGTCGCAGACGCCTAGG (SEQ ID NO: 48 of WO2015038958; herein SEQ ID NO: 894), ATTCTGGGGACTGGTACTTCG (SEQ ID NO: 50 and 52 of WO2015038958; herein SEQ ID NO: 895), ACGCGGACTAATCCTGAGGCT (SEQ ID NO: 51 of WO2015038958; herein SEQ ID NO: 896), AATGGGGGGACTAGTAGTTCT (SEQ ID NO: 53 of WO2015038958; herein SEQ ID NO: 897), or TATACTTTGTCGCAGGGTTGG (SEQ ID NO: 59 of WO2015038958; herein SEQ ID NO: 898).

[0100] In one embodiment, the AAV serotype may be engineered to comprise at least one AAV capsid CD8+ T-cell epitope for AAV2 such as, but not limited to, SADNNNSEY (SEQ ID NO: 899), LIDQYLYYL (SEQ ID NO: 900), VPQYGYLTL (SEQ ID NO: 901), TTSTRTWAL (SEQ ID NO: 902), YHLNGRDSL (SEQ ID NO: 903), SQAVGRSSF (SEQ ID NO: 904), VPANPSTTF (SEQ ID NO: 905), FPQSGVLIF (SEQ ID NO: 906), YFDFNRFHCHFSPRD (SEQ ID NO: 907), VGNSSGNWHCDSTWM (SEQ ID NO: 908), QFSQAGASDIRDQSR (SEQ ID NO: 909), GASDIRQSRNWLP (SEQ ID NO: 910) and GNRQAATADVNTQGV (SEQ ID NO: 911).

[0101] In one embodiment, the AAV serotype may be engineered to comprise at least one AAV capsid CD8+ T-cell epitope for AAV1 such as, but not limited to, LDRLMNPLI (SEQ ID NO: 912), TTSTRTWAL (SEQ ID NO: 902), and QPAKKRLNF (SEQ ID NO: 913)).

[0102] In one embodiment, peptides for inclusion in an AAV serotype may be identified using the methods described by Hui et al. (Molecular Therapy—Methods & Clinical Development (2015) 2, 15029 doi:10.1038/mtm.2015.29; the contents of which are herein incorporated by reference in its entirety). As a non-limiting example, the procedure includes isolating human splenocytes, restimulating the splenocytes in vitro using individual peptides spanning the amino acid sequence of the AAV capsid protein, IFN-gamma ELISpot with the individual peptides used for the in vitro restimulation, bioinformatics analysis to determine the HLA restriction of 15-mers identified by IFN-gamma ELISpot, identification of candidate reactive 9-mer epitopes for a given HLA allele, synthesis candidate 9-mers, second IFN-gamma ELISpot screening of splenocytes from subjects carrying the HLA alleles to which identified AAV epitopes are predicted to bind, determine the AAV capsid-reactive CD8+ T cell epitopes and determine the frequency of subjects reacting to a given AAV epitope.

[0103] In one embodiment, the AAV may be a serotype generated by Cre-recombination-based AAV targeted evolution (CREATE) as described by Deverman et al., (Nature Biotechnology 34(2):204-209 (2016)), the contents of which are herein incorporated by reference in their entirety. In one embodiment, AAV serotypes generated in this manner have improved CNS transduction and/or neuronal and astrocytic tropism, as compared to other AAV serotypes. As non-limiting examples, the AAV serotype may be PHP.B, PHP.B2, PHP.B3, PHP.A, G2A12, G2A15. In one embodiment, these AAV serotypes may be AAV9 (SEQ ID NO: 126 and 127) derivatives with a 7-amino acid insert between amino acids 588-589. Non-limiting examples of these 7-amino acid inserts include TLAVPFK (SEQ ID NO: 873), SVSKPFL (SEQ ID NO: 1249), FTLTTPK (SEQ ID NO: 882), YTLSQGW (SEQ ID NO: 888), QAVRTSL (SEQ ID NO: 1176) and/or LAKERLS (SEQ ID NO: 1177).

[0104] In one embodiment, the AAV serotype may be, or may have a sequence as described in International Patent Publication WO2017100671, the contents of which are herein incorporated by reference in their entirety, such as, but not limited to, AAV9 (SEQ ID NO: 45 of WO2017100671, herein SEQ ID NO: 1441), PHP.N (SEQ ID NO: 46 of WO2017100671, herein SEQ ID NO: 1439), PHP.S (SEQ ID NO: 47 of WO2017100671, herein SEQ ID NO: 1440), or variants thereof. Further, any of the targeting peptides or amino acid inserts described in WO2017100671 may be inserted into any parent AAV serotype, such as, but not limited to, AAV9 (SEQ ID NO: 122 or SEQ ID NO: 1441). In one embodiment, the amino acid insert is inserted between amino acids 586-592 of the parent AAV (e.g., AAV9). In another embodiment, the amino acid insert is inserted between amino acids 588-589 of the parent AAV sequence. The amino acid insert may be, but is not limited to, any of the following amino acid sequences, AQTLAVPFKAQ (SEQ ID NO: 1 of WO2017100671; herein SEQ ID NO: 1442), AQSVSKPFLAQ (SEQ ID NO: 2 of WO2017100671; herein SEQ ID NO: 1443), AQFTLTTPKAQ (SEQ ID NO: 3 in the sequence listing of WO2017100671; herein SEQ ID NO: 1444), DGTLAVPFKAQ (SEQ ID NO: 4 in the sequence listing of WO2017100671; herein SEQ ID NO: 1445), ESTLAVPFKAQ (SEQ ID NO: 5 of WO2017100671; herein SEQ ID NO: 1446), GGTLAVPFKAQ (SEQ ID NO: 6 of WO2017100671; herein SEQ ID NO: 1447), AQTLATPFKAQ (SEQ ID NO: 7 and 33 of WO2017100671; herein SEQ ID NO: 1448), ATTLATPFKAQ (SEQ ID NO: 8 of WO2017100671; herein SEQ ID NO: 1449), DGTLATPFKAQ (SEQ ID NO: 9 of WO2017100671; herein SEQ ID NO: 1450), GGTLATPFKAQ (SEQ ID NO: 10 of WO2017100671; herein SEQ ID NO: 1451), SGSLAVPFKAQ (SEQ ID NO: 11 of WO2017100671; herein SEQ ID NO: 1452), AQTLAQPFKAQ (SEQ ID NO: 12 of WO2017100671; herein SEQ ID NO: 1453), AQTLQQPFKAQ (SEQ ID NO: 13 of WO2017100671; herein SEQ ID NO: 1454), AQTLSNPFKAQ (SEQ ID NO: 14 of WO2017100671; herein SEQ ID NO: 1455), AQTLAVPFSNP (SEQ ID NO: 15 of WO2017100671; herein SEQ ID NO: 1456), QGTLAVPFKAQ (SEQ ID NO: 16 of WO2017100671; herein SEQ ID NO: 1457), NQTLAVPFKAQ (SEQ ID NO: 17 of WO2017100671; herein SEQ ID NO: 1458), EGSLAVPFKAQ (SEQ ID NO: 18 of WO2017100671; herein SEQ ID NO: 1459), SGNLAVPFKAQ (SEQ ID NO: 19 of WO2017100671; herein SEQ ID NO: 1460), EGTLAVPFKAQ (SEQ ID NO: 20 of WO2017100671; herein SEQ ID NO: 1461), DSTLAVPFKAQ (SEQ ID NO: 21 in Table 1 of WO2017100671; herein SEQ ID NO: 1462), AVTLAVPFKAQ (SEQ ID NO: 22 of WO2017100671; herein SEQ ID NO: 1463), AQTLSTPFKAQ (SEQ ID NO: 23 of WO2017100671; herein SEQ ID NO: 1464), AQTLPQPFKAQ (SEQ ID NO: 24 and 32 of WO2017100671; herein SEQ ID NO: 1465), AQTLSQPFKAQ (SEQ ID NO: 25 of WO2017100671; herein SEQ ID NO: 1466), AQTLQLPFKAQ (SEQ ID NO: 26 of WO2017100671; herein SEQ ID NO: 1467), AQTLTMPFKAQ (SEQ ID NO: 27, and 34 of WO2017100671 and SEQ ID NO: 35 in the sequence listing of WO2017100671; herein SEQ ID NO: 1468), AQTLTTPFKAQ (SEQ ID NO: 28 of WO2017100671; herein SEQ ID NO: 1469), AQYTLSQGWAQ (SEQ ID NO: 29 of WO2017100671; herein SEQ ID NO: 1470), AQMNATKNVAQ (SEQ ID NO: 30 of WO2017100671; herein SEQ ID NO: 1471), AQVSGGHHSAQ (SEQ ID NO: 31 of WO2017100671; herein SEQ ID NO: 1472), AQTLTAPFKAQ (SEQ ID NO: 35 in Table 1 of WO2017100671; herein SEQ ID NO: 1473), AQTLSKPFKAQ (SEQ ID NO: 36 of WO2017100671; herein SEQ ID NO: 1474), QAVRTSL (SEQ ID NO: 37 of WO2017100671; herein SEQ ID NO: 1475), YTLSQGW (SEQ ID NO: 38 of WO2017100671; herein SEQ ID NO: 888), LAKERLS (SEQ ID NO: 39 of WO2017100671; herein SEQ ID NO: 1476), TLAVPFK (SEQ ID NO: 40 in the sequence listing of WO2017100671; herein SEQ ID NO: 873), SVSKPFL (SEQ ID NO: 41 of WO2017100671; herein SEQ ID NO: 881), FTLTTPK (SEQ ID NO: 42 of WO2017100671; herein SEQ ID NO: 882), MNSTKNV (SEQ ID NO: 43 of WO2017100671; herein SEQ ID NO: 1477), VSGGHHS (SEQ ID NO: 44 of WO2017100671; herein SEQ ID NO: 1478), SAQTLAVPFKAQAQ (SEQ ID NO: 48 of WO2017100671; herein SEQ ID NO: 1479), SXXXLAVPFKAQAQ (SEQ ID NO: 49 of WO2017100671 wherein X may be any amino acid; herein SEQ ID NO: 1480), SAQXXXVPFKAQAQ (SEQ ID NO: 50 of WO2017100671 wherein X may be any amino acid; herein SEQ ID NO: 1481), SAQTLXXXFKAQAQ (SEQ ID NO: 51 of WO2017100671 wherein X may be any amino acid; herein SEQ ID NO: 1482), SAQTLAVXXXAQAQ (SEQ ID NO: 52 of WO2017100671 wherein X may be any amino acid; herein SEQ ID NO: 1483), SAQTLAVPFXXXAQ (SEQ ID NO: 53 of WO2017100671 wherein X may be any amino acid; herein SEQ ID NO: 1484), TNHQSAQ (SEQ ID NO: 65 of WO2017100671; herein SEQ ID NO: 1485), AQAQTGW (SEQ ID NO: 66 of WO2017100671; herein SEQ ID NO: 1486), DGTLATPFK (SEQ ID NO: 67 of WO2017100671; herein SEQ ID NO: 1487), DGTLATPFKXX (SEQ ID NO: 68 of WO2017100671 wherein X may be any amino acid; herein SEQ ID NO: 1488), LAVPFKAQ (SEQ ID NO: 80 of WO2017100671; herein SEQ ID NO: 1489), VPFKAQ (SEQ ID NO: 81 of WO2017100671; herein SEQ ID NO: 1490), FKAQ (SEQ ID NO: 82 of WO2017100671; herein SEQ ID NO: 1491), AQTLAV (SEQ ID NO: 83 of WO2017100671; herein SEQ ID NO: 1492), AQTLAVPF (SEQ ID NO: 84 of WO2017100671; herein SEQ ID NO: 1493), QAVR (SEQ ID NO: 85 of WO2017100671; herein SEQ ID NO: 1494), AVRT (SEQ ID NO: 86 of WO2017100671; herein SEQ ID NO: 1495), VRTS (SEQ ID NO: 87 of WO2017100671; herein SEQ ID NO: 1496), RTSL (SEQ ID NO: 88 of WO2017100671; herein SEQ ID NO: 1497), QAVRT (SEQ ID NO: 89 of WO2017100671; herein SEQ ID NO: 1498), AVRTS (SEQ ID NO: 90 of WO2017100671; herein SEQ ID NO: 1499), VRTSL (SEQ ID NO: 91 of WO2017100671; herein SEQ ID NO: 1500), QAVRTS (SEQ ID NO: 92 of WO2017100671; herein SEQ ID NO: 1501), or AVRTSL (SEQ ID NO: 93 of WO2017100671; herein SEQ ID NO: 1502).

[0105] Non-limiting examples of nucleotide sequences that may encode the amino acid inserts include the following, GATGGGACTTTGGCGGTGCCTTTTAAGGCACAG (SEQ ID NO: 54 of WO2017100671; herein SEQ ID NO: 1503), GATGGGACGTTGGCGGTGCCTTTTAAGGCACAG (SEQ ID NO: 55 of WO2017100671; herein SEQ ID NO: 1504), CAGGCGGTTAGGACGTCTTTG (SEQ ID NO: 56 of WO2017100671; herein SEQ ID NO: 1505), CAGGTCTTCACGGACTCAGACTATCAG (SEQ ID NO: 57 and 78 of WO2017100671; herein SEQ ID NO: 1506), CAAGTAAAACCTCTACAAATGTGGTAAAATCG (SEQ ID NO: 58 of WO2017100671; herein SEQ ID NO: 1507), ACTCATCGACCAATACTTGTACTATCTCTCTAGAAC (SEQ ID NO: 59 of WO2017100671; herein SEQ ID NO: 1508), GGAAGTATTCCTTGGTTTTGAACCCA (SEQ ID NO: 60 of WO2017100671; herein SEQ ID NO: 1509), GGTCGCGGTTCTTGTTTGTGGAT (SEQ ID NO: 61 of WO2017100671; herein SEQ ID NO: 1510), CGACCTTGAAGCGCATGAACTCCT (SEQ ID NO: 62 of WO2017100671; herein SEQ ID NO: 1511), GTATTCCTTGGTTTTGAACCCAACCGGTCTGCGCCTGTGCMNNMNNMNNMNNMNN MNNMNNTTGGGCACTCTGGTGGTTTGTC (SEQ ID NO: 63 of WO2017100671 wherein N may be A, C, T, or G; herein SEQ ID NO: 1512), GTATTCCTTGGTTTTGAACCCAACCGGTCTGCGCMNNMNNMNNAAAAGGCACCGCC AAAGTTTG (SEQ ID NO: 69 of WO2017100671 wherein N may be A, C, T, or G; herein SEQ ID NO: 1513), GTATTCCTTGGTTTTGAACCCAACCGGTCTGCGCCTGTGCMNNMNNMNNCACCGCC AAAGTTTGGGCACT (SEQ ID NO: 70 of WO2017100671 wherein N may be A, C, T, or G; herein SEQ ID NO: 1514), GTATTCCTTGGTTTTGAACCCAACCGGTCTGCGCCTGTGCCTTAAAMNNMNNMNNC AAAGTTTGGGCACTCTGGTGG (SEQ ID NO: 71 of WO2017100671 wherein N may be A, C, T, or G; herein SEQ ID NO: 1515), GTATTCCTTGGTTTTGAACCCAACCGGTCTGCGCCTGTGCCTTAAAAGGCACMNNM NNMNNTTGGGCACTCTGGTGGTTTGTG (SEQ ID NO: 72 of WO2017100671 wherein N may be A, C, T, or G; herein SEQ ID NO: 1516), ACTTTGGCGGTGCCTTTTAAG (SEQ ID NO: 74 of WO2017100671; herein SEQ ID NO: 890), AGTGTGAGTAAGCCTTTTTTG (SEQ ID NO: 75 of WO2017100671; herein SEQ ID NO: 891), TTTACGTTGACGACGCCTAAG (SEQ ID NO: 76 of WO2017100671; herein SEQ ID NO: 892), TATACTTTGTCGCAGGGTTGG (SEQ ID NO: 77 of WO2017100671; herein SEQ ID NO: 898), or CTTGCGAAGGAGCGGCTTTCG (SEQ ID NO: 79 of WO2017100671; herein SEQ ID NO: 1517).

[0106] In one embodiment, the AAV serotype may be, or may have a sequence as described in U.S. Pat. No. 9,624,274, the contents of which are herein incorporated by reference in their entirety, such as, but not limited to, AAV1 (SEQ ID NO: 181 of U.S. Pat. No. 9,624,274), AAV6 (SEQ ID NO: 182 of U.S. Pat. No. 9,624,274), AAV2 (SEQ ID NO: 183 of U.S. Pat. No. 9,624,274), AAV3b (SEQ ID NO: 184 of U.S. Pat. No. 9,624,274), AAV7 (SEQ ID NO: 185 of U.S. Pat. No. 9,624,274), AAV8 (SEQ ID NO: 186 of U.S. Pat. No. 9,624,274), AAV10 (SEQ ID NO: 187 of U.S. Pat. No. 9,624,274), AAV4 (SEQ ID NO: 188 of U.S. Pat. No. 9,624,274), AAV 11 (SEQ ID NO: 189 of U.S. Pat. No. 9,624,274), bAAV (SEQ ID NO: 190 of U.S. Pat. No. 9,624,274), AAV5 (SEQ ID NO: 191 of U.S. Pat. No. 9,624,274), GPV (SEQ ID NO: 192 of U.S. Pat. No. 9,624,274; herein SEQ ID NO: 1518), B19 (SEQ ID NO: 193 of U.S. Pat. No. 9,624,274; herein SEQ ID NO: 1519), MVM (SEQ ID NO: 194 of U.S. Pat. No. 9,624,274; herein SEQ ID NO: 1520), FPV (SEQ ID NO: 195 of U.S. Pat. No. 9,624,274; herein SEQ ID NO: 1521), CPV (SEQ ID NO: 196 of U.S. Pat. No. 9,624,274; herein SEQ ID NO: 1522) or variants thereof. Further, any of the structural protein inserts described in U.S. Pat. No. 9,624,274, may be inserted into, but not limited to, 1-453 and 1-587 of any parent AAV serotype, such as, but not limited to, AAV2 (SEQ ID NO: 183 of U.S. Pat. No. 9,624,274). The amino acid insert may be, but is not limited to, any of the following amino acid sequences, VNLTWSRASG (SEQ ID NO: 50 of U.S. Pat. No. 9,624,274; herein SEQ ID NO: 1901), EFCINHRGYWVCGD (SEQ ID NO:55 of U.S. Pat. No. 9,624,274; herein SEQ ID NO: 1902), EDGQVMDVDLS (SEQ ID NO: 85 of U.S. Pat. No. 9,624,274; herein SEQ ID NO: 1903), EKQRNGTLT (SEQ ID NO: 86 of U.S. Pat. No. 9,624,274; herein SEQ ID NO: 1904), TYQCRVTHPHLPRALMR (SEQ ID NO: 87 of U.S. Pat. No. 9,624,274; herein SEQ ID NO: 1905), RHSTTQPRKTKGSG (SEQ ID NO: 88 of U.S. Pat. No. 9,624,274; herein SEQ ID NO: 1906), DSNPRGVSAYLSR (SEQ ID NO: 89 of U.S. Pat. No. 9,624,274; herein SEQ ID NO: 1907), TITCLWDLAPSK (SEQ ID NO: 90 of U.S. Pat. No. 9,624,274; herein SEQ ID NO: 1908), KTKGSGFFVF (SEQ ID NO: 91 of U.S. Pat. No. 9,624,274; herein SEQ ID NO: 1909), THPHLPRALMRS (SEQ ID NO: 92 of U.S. Pat. No. 9,624,274; herein SEQ ID NO: 1910), GETYQCRVTHPHLPRALMRSTTK (SEQ ID NO: 93 of U.S. Pat. No. 9,624,274; herein SEQ ID NO: 1911), LPRALMRS (SEQ ID NO: 94 of U.S. Pat. No. 9,624,274; herein SEQ ID NO: 1912), INHRGYWV (SEQ ID NO: 95 of U.S. Pat. No. 9,624,274; herein SEQ ID NO: 1913), CDAGSVRTNAPD (SEQ ID NO: 60 of U.S. Pat. No. 9,624,274; herein SEQ ID NO: 1914), AKAVSNLTESRSESLQS (SEQ ID NO: 96 of U.S. Pat. No. 9,624,274; herein SEQ ID NO: 1915), SLTGDEFKKVLET (SEQ ID NO: 97 of U.S. Pat. No. 9,624,274; herein SEQ ID NO: 1916), REAVAYRFEED (SEQ ID NO: 98 of U.S. Pat. No. 9,624,274; herein SEQ ID NO: 1917), INPEIITLDG (SEQ ID NO: 99 of U.S. Pat. No. 9,624,274; herein SEQ ID NO: 1918), DISVTGAPVITATYL (SEQ ID NO: 100 of U.S. Pat. No. 9,624,274; herein SEQ ID NO: 1919), DISVTGAPVITA (SEQ ID NO: 101 of U.S. Pat. No. 9,624,274; herein SEQ ID NO: 1920), PKTVSNLTESSSESVQS (SEQ ID NO: 102 of U.S. Pat. No. 9,624,274; herein SEQ ID NO: 1921), SLMGDEFKAVLET (SEQ ID NO: 103 of U.S. Pat. No. 9,624,274; herein SEQ ID NO: 1922), QHSVAYTFEED (SEQ ID NO: 104 of U.S. Pat. No. 9,624,274; herein SEQ ID NO: 1923), INPEIITRDG (SEQ ID NO: 105 of U.S. Pat. No. 9,624,274; herein SEQ ID NO: 1924), DISLTGDPVITASYL (SEQ ID NO: 106 of U.S. Pat. No. 9,624,274; herein SEQ ID NO: 1925), DISLTGDPVITA (SEQ ID NO: 107 of U.S. Pat. No. 9,624,274; herein SEQ ID NO: 1926), DQSIDFEIDSA (SEQ ID NO: 108 of U.S. Pat. No. 9,624,274; herein SEQ ID NO: 1927), KNVSEDLPLPTFSPTLLGDS (SEQ ID NO: 109 of U.S. Pat. No. 9,624,274; herein SEQ ID NO: 1928), KNVSEDLPLPT (SEQ ID NO: 110 of U.S. Pat. No. 9,624,274; herein SEQ ID NO: 1929), CDSGRVRTDAPD (SEQ ID NO: 111 of U.S. Pat. No. 9,624,274; herein SEQ ID NO: 1930), FPEHLLVDFLQSLS (SEQ ID NO: 112 of U.S. Pat. No. 9,624,274; herein SEQ ID NO: 1931), DAEFRHDSG (SEQ ID NO: 65 of U.S. Pat. No. 9,624,274; herein SEQ ID NO: 1932), HYAAAQWDFGNTMCQL (SEQ ID NO: 113 of U.S. Pat. No. 9,624,274; herein SEQ ID NO: 1933), YAAQWDFGNTMCQ (SEQ ID NO: 114 of U.S. Pat. No. 9,624,274; herein SEQ ID NO: 1934), RSQKEGLHYT (SEQ ID NO: 115 of U.S. Pat. No. 9,624,274; herein SEQ ID NO: 1935), SSRTPSDKPVAHWANPQAE (SEQ ID NO: 116 of U.S. Pat. No. 9,624,274; herein SEQ ID NO: 1936), SRTPSDKPVAHWANP (SEQ ID NO: 117 of U.S. Pat. No. 9,624,274; herein SEQ ID NO: 1937), SSRTPSDKP (SEQ ID NO: 118 of U.S. Pat. No. 9,624,274; herein SEQ ID NO: 1938), NADGNVDYHMNSVP (SEQ ID NO: 119 of U.S. Pat. No. 9,624,274; herein SEQ ID NO: 1939), DGNVDYHMNSV (SEQ ID NO: 120 of U.S. Pat. No. 9,624,274; herein SEQ ID NO: 1940), RSFKEFLQSSLRALRQ (SEQ ID NO: 121 of U.S. Pat. No. 9,624,274; herein SEQ ID NO: 1941); FKEFLQSSLRA (SEQ ID NO: 122 of U.S. Pat. No. 9,624,274; herein SEQ ID NO: 1942), or QMWAPQWGPD (SEQ ID NO: 123 of U.S. Pat. No. 9,624,274; herein SEQ ID NO: 1943).

[0107] In one embodiment, the AAV serotype may be, or may have a sequence as described in U.S. Pat. No. 9,475,845, the contents of which are herein incorporated by reference in their entirety, such as, but not limited to, AAV capsid proteins comprising modification of one or more amino acids at amino acid positions 585 to 590 of the native AAV2 capsid protein. Further the modification may result in, but not limited to, the amino acid sequence RGNRQA (SEQ ID NO: 3 of U.S. Pat. No. 9,475,845; herein SEQ ID NO: 1944), SSSTDP (SEQ ID NO: 4 of U.S. Pat. No. 9,475,845; herein SEQ ID NO: 1945), SSNTAP (SEQ ID NO: 5 of U.S. Pat. No. 9,475,845; herein SEQ ID NO: 1946), SNSNLP (SEQ ID NO: 6 of U.S. Pat. No. 9,475,845; herein SEQ ID NO: 1947), SSTTAP (SEQ ID NO: 7 of U.S. Pat. No. 9,475,845; herein SEQ ID NO: 1948), AANTAA (SEQ ID NO: 8 of U.S. Pat. No. 9,475,845; herein SEQ ID NO: 1949), QQNTAP (SEQ ID NO: 9 of U.S. Pat. No. 9,475,845; herein SEQ ID NO: 1950), SAQAQA (SEQ ID NO: 10 of U.S. Pat. No. 9,475,845; herein SEQ ID NO: 1951), QANTGP (SEQ ID NO: 11 of U.S. Pat. No. 9,475,845; herein SEQ ID NO: 1952), NATTAP (SEQ ID NO: 12 of U.S. Pat. No. 9,475,845; herein SEQ ID NO: 1953), SSTAGP (SEQ ID NO: 13 and 20 of U.S. Pat. No. 9,475,845; herein SEQ ID NO: 1954), QQNTAA (SEQ ID NO: 14 of U.S. Pat. No. 9,475,845; herein SEQ ID NO: 1955), PSTAGP (SEQ ID NO: 15 of U.S. Pat. No. 9,475,845; herein SEQ ID NO: 1956), NQNTAP (SEQ ID NO: 16 of U.S. Pat. No. 9,475,845; herein SEQ ID NO: 1957), QAANAP (SEQ ID NO: 17 of U.S. Pat. No. 9,475,845; herein SEQ ID NO: 1958), SIVGLP (SEQ ID NO: 18 of U.S. Pat. No. 9,475,845; herein SEQ ID NO: 1959), AASTAA (SEQ ID NO: 19, and 27 of U.S. Pat. No. 9,475,845; herein SEQ ID NO: 1960), SQNTTA (SEQ ID NO: 21 of U.S. Pat. No. 9,475,845; herein SEQ ID NO: 1961), QQDTAP (SEQ ID NO: 22 of U.S. Pat. No. 9,475,845; herein SEQ ID NO: 1962), QTNTGP (SEQ ID NO: 23 of U.S. Pat. No. 9,475,845; herein SEQ ID NO: 1963), QTNGAP (SEQ ID NO: 24 of U.S. Pat. No. 9,475,845; herein SEQ ID NO: 1964), QQNAAP (SEQ ID NO: 25 of U.S. Pat. No. 9,475,845; herein SEQ ID NO: 1965), or AANTQA (SEQ ID NO: 26 of U.S. Pat. No. 9,475,845; herein SEQ ID NO: 1966). In one embodiment, the amino acid modification is a substitution at amino acid positions 262 through 265 in the native AAV2 capsid protein or the corresponding position in the capsid protein of another AAV with a targeting sequence. The targeting sequence may be, but is not limited to, any of the amino acid sequences, NGRAHA (SEQ ID NO: 38 of U.S. Pat. No. 9,475,845; herein SEQ ID NO: 1967), QPEHSST (SEQ ID NO: 39 and 50 of U.S. Pat. No. 9,475,845; herein SEQ ID NO: 1968), VNTANST (SEQ ID NO: 40 of U.S. Pat. No. 9,475,845; herein SEQ ID NO: 1969), HGPMQKS (SEQ ID NO: 41 of U.S. Pat. No. 9,475,845; herein SEQ ID NO: 1970), PHKPPLA (SEQ ID NO: 42 of U.S. Pat. No. 9,475,845; herein SEQ ID NO: 1971), IKNNEMW (SEQ ID NO: 43 of U.S. Pat. No. 9,475,845; herein SEQ ID NO: 1972), RNLDTPM (SEQ ID NO: 44 of U.S. Pat. No. 9,475,845; herein SEQ ID NO: 1973), VDSHRQS (SEQ ID NO: 45 of U.S. Pat. No. 9,475,845; herein SEQ ID NO: 1974), YDSKTKT (SEQ ID NO: 46 of U.S. Pat. No. 9,475,845; herein SEQ ID NO: 1975), SQLPHQK (SEQ ID NO: 47 of U.S. Pat. No. 9,475,845; herein SEQ ID NO: 1976), STMQQNT (SEQ ID NO: 48 of U.S. Pat. No. 9,475,845; herein SEQ ID NO: 1977), TERYMTQ (SEQ ID NO: 49 of U.S. Pat. No. 9,475,845; herein SEQ ID NO: 1978), DASLSTS (SEQ ID NO: 51 of U.S. Pat. No. 9,475,845; herein SEQ ID NO: 1979), DLPNKKT (SEQ ID NO: 52 of U.S. Pat. No. 9,475,845; herein SEQ ID NO: 1980), DLTAARL (SEQ ID NO: 53 of U.S. Pat. No. 9,475,845; herein SEQ ID NO: 1981), EPHQFNY (SEQ ID NO: 54 of U.S. Pat. No. 9,475,845; herein SEQ ID NO: 1982), EPQSNHT (SEQ ID NO: 55 of U.S. Pat. No. 9,475,845; herein SEQ ID NO: 1983), MSSWPSQ (SEQ ID NO: 56 of U.S. Pat. No. 9,475,845; herein SEQ ID NO: 1984), NPKHNAT (SEQ ID NO: 57 of U.S. Pat. No. 9,475,845; herein SEQ ID NO: 1985), PDGMRTT (SEQ ID NO: 58 of U.S. Pat. No. 9,475,845; herein SEQ ID NO: 1986), PNNNKTT (SEQ ID NO: 59 of U.S. Pat. No. 9,475,845; herein SEQ ID NO: 1987), QSTTHDS (SEQ ID NO: 60 of U.S. Pat. No. 9,475,845; herein SEQ ID NO: 1988), TGSKQKQ (SEQ ID NO: 61 of U.S. Pat. No. 9,475,845; herein SEQ ID NO: 1989), SLKHQAL (SEQ ID NO: 62 of U.S. Pat. No. 9,475,845; herein SEQ ID NO: 1990), SPIDGEQ (SEQ ID NO: 63 of U.S. Pat. No. 9,475,845; herein SEQ ID NO: 1991), WIFPWIQL (SEQ ID NO: 64 and 112 of U.S. Pat. No. 9,475,845; herein SEQ ID NO: 1992), CDCRGDCFC (SEQ ID NO: 65 of U.S. Pat. No. 9,475,845; herein SEQ ID NO: 1993), CNGRC (SEQ ID NO: 66 of U.S. Pat. No. 9,475,845; herein SEQ ID NO: 1994), CPRECES (SEQ ID NO: 67 of U.S. Pat. No. 9,475,845; herein SEQ ID NO: 1995), CTTHWGFTLC (SEQ ID NO: 68 and 123 of U.S. Pat. No. 9,475,845; herein SEQ ID NO: 1996), CGRRAGGSC (SEQ ID NO: 69 of U.S. Pat. No. 9,475,845; herein SEQ ID NO: 1997), CKGGRAKDC (SEQ ID NO: 70 of U.S. Pat. No. 9,475,845; herein SEQ ID NO: 1998), CVPELGHEC (SEQ ID NO: 71 and 115 of U.S. Pat. No. 9,475,845; herein SEQ ID NO: 1999), CRRETAWAK (SEQ ID NO: 72 of U.S. Pat. No. 9,475,845; herein SEQ ID NO: 2000), VSWFSHRYSPFAVS (SEQ ID NO: 73 of U.S. Pat. No. 9,475,845; herein SEQ ID NO: 2001), GYRDGYAGPILYN (SEQ ID NO: 74 of U.S. Pat. No. 9,475,845; herein SEQ ID NO: 2002), XXXYXXX (SEQ ID NO: 75 of U.S. Pat. No. 9,475,845; herein SEQ ID NO: 2003), YXNW (SEQ ID NO: 76 of U.S. Pat. No. 9,475,845; herein SEQ ID NO: 2004), RPLPPLP (SEQ ID NO: 77 of U.S. Pat. No. 9,475,845; herein SEQ ID NO: 2005), APPLPPR (SEQ ID NO: 78 of U.S. Pat. No. 9,475,845; herein SEQ ID NO: 2006), DVFYPYPYASGS (SEQ ID NO: 79 of U.S. Pat. No. 9,475,845; herein SEQ ID NO: 2007), MYWYPY (SEQ ID NO: 80 of U.S. Pat. No. 9,475,845; herein SEQ ID NO: 2008), DITWDQLWDLMK (SEQ ID NO: 81 of U.S. Pat. No. 9,475,845; herein SEQ ID NO: 2009), CWDDXWLC (SEQ ID NO: 82 of U.S. Pat. No. 9,475,845; herein SEQ ID NO: 2010), EWCEYLGGYLRCYA (SEQ ID NO: 83 of U.S. Pat. No. 9,475,845; herein SEQ ID NO: 2011), YXCXXGPXTWXCXP (SEQ ID NO: 84 of U.S. Pat. No. 9,475,845; herein SEQ ID NO: 2012), IEGPTLRQWLAARA (SEQ ID NO: 85 of U.S. Pat. No. 9,475,845; herein SEQ ID NO: 2013), LWXXX (SEQ ID NO: 86 of U.S. Pat. No. 9,475,845; herein SEQ ID NO: 2014), XFXXYLW (SEQ ID NO: 87 of U.S. Pat. No. 9,475,845; herein SEQ ID NO: 2015), SSIISHFRWGLCD (SEQ ID NO: 88 of U.S. Pat. No. 9,475,845; herein SEQ ID NO: 2016), MSRPACPPNDKYE (SEQ ID NO: 89 of U.S. Pat. No. 9,475,845; herein SEQ ID NO: 2017), CLRSGRGC (SEQ ID NO: 90 of U.S. Pat. No. 9,475,845; herein SEQ ID NO: 2018), CHWMFSPWC (SEQ ID NO: 91 of U.S. Pat. No. 9,475,845; herein SEQ ID NO: 2019), WXXF (SEQ ID NO: 92 of U.S. Pat. No. 9,475,845; herein SEQ ID NO: 2020), CSSRLDAC (SEQ ID NO: 93 of U.S. Pat. No. 9,475,845; herein SEQ ID NO: 2021), CLPVASC (SEQ ID NO: 94 of U.S. Pat. No. 9,475,845; herein SEQ ID NO: 2022), CGFECVRQCPERC (SEQ ID NO: 95 of U.S. Pat. No. 9,475,845; herein SEQ ID NO: 2023), CVALCREACGEGC (SEQ ID NO: 96 of U.S. Pat. No. 9,475,845; herein SEQ ID NO: 2024), SWCEPGWCR (SEQ ID NO: 97 of U.S. Pat. No. 9,475,845; herein SEQ ID NO: 2025), YSGKWGW (SEQ ID NO: 98 of U.S. Pat. No. 9,475,845; herein SEQ ID NO: 2026), GLSGGRS (SEQ ID NO: 99 of U.S. Pat. No. 9,475,845; herein SEQ ID NO: 2027), LMLPRAD (SEQ ID NO: 100 of U.S. Pat. No. 9,475,845; herein SEQ ID NO: 2028), CSCFRDVCC (SEQ ID NO: 101 of U.S. Pat. No. 9,475,845; herein SEQ ID NO: 2029), CRDVVSVIC (SEQ ID NO: 102 of U.S. Pat. No. 9,475,845; herein SEQ ID NO: 2030), MARSGL (SEQ ID NO: 103 of U.S. Pat. No. 9,475,845; herein SEQ ID NO: 2031), MARAKE (SEQ ID NO: 104 of U.S. Pat. No. 9,475,845; herein SEQ ID NO: 2032), MSRTMS (SEQ ID NO: 105 of U.S. Pat. No. 9,475,845; herein SEQ ID NO: 2033), KCCYSL (SEQ ID NO: 106 of U.S. Pat. No. 9,475,845; herein SEQ ID NO: 2034), MYWGDSHWLQYWYE (SEQ ID NO: 107 of U.S. Pat. No. 9,475,845; herein SEQ ID NO: 2035), MQLPLAT (SEQ ID NO: 108 of U.S. Pat. No. 9,475,845; herein SEQ ID NO: 2036), EWLS (SEQ ID NO: 109 of U.S. Pat. No. 9,475,845; herein SEQ ID NO: 2037), SNEW (SEQ ID NO: 110 of U.S. Pat. No. 9,475,845; herein SEQ ID NO: 2038), TNYL (SEQ ID NO: 111 of U.S. Pat. No. 9,475,845; herein SEQ ID NO: 2039), WDLAWMFRLPVG (SEQ ID NO: 113 of U.S. Pat. No. 9,475,845; herein SEQ ID NO: 2040), CTVALPGGYVRVC (SEQ ID NO: 114 of U.S. Pat. No. 9,475,845; herein SEQ ID NO: 2041), CVAYCIEHHCWTC (SEQ ID NO: 116 of U.S. Pat. No. 9,475,845; herein SEQ ID NO: 2042), CVFAHNYDYLVC (SEQ ID NO: 117 of U.S. Pat. No. 9,475,845; herein SEQ ID NO: 2043), CVFTSNYAFC (SEQ ID NO: 118 of U.S. Pat. No. 9,475,845; herein SEQ ID NO: 2044), VHSPNKK (SEQ ID NO: 119 of U.S. Pat. No. 9,475,845; herein SEQ ID NO: 2045), CRGDGWC (SEQ ID NO: 120 of U.S. Pat. No. 9,475,845; herein SEQ ID NO: 2046), XRGCDX (SEQ ID NO: 121 of U.S. Pat. No. 9,475,845; herein SEQ ID NO: 2047), PXXX (SEQ ID NO: 122 of U.S. Pat. No. 9,475,845; herein SEQ ID NO: 2048), SGKGPRQITAL (SEQ ID NO: 124 of U.S. Pat. No. 9,475,845; herein SEQ ID NO: 2049), AAAAAAAAAXXXXX (SEQ ID NO: 125 of U.S. Pat. No. 9,475,845; herein SEQ ID NO: 2050), VYMSPF (SEQ ID NO: 126 of U.S. Pat. No. 9,475,845; herein SEQ ID NO: 2051), ATWLPPR (SEQ ID NO: 127 of U.S. Pat. No. 9,475,845; herein SEQ ID NO: 2052), HTMYYHHYQHHL (SEQ ID NO: 128 of U.S. Pat. No. 9,475,845; herein SEQ ID NO: 2053), SEVGCRAGPLQWLCEKYFG (SEQ ID NO: 129 of U.S. Pat. No. 9,475,845; herein SEQ ID NO: 2054), CGLLPVGRPDRNVWRWLC (SEQ ID NO: 130 of U.S. Pat. No. 9,475,845; herein SEQ ID NO: 2055), CKGQCDRFKGLPWEC (SEQ ID NO: 131 of U.S. Pat. No. 9,475,845; herein SEQ ID NO: 2056), SGRSA (SEQ ID NO: 132 of U.S. Pat. No. 9,475,845; herein SEQ ID NO: 2057), WGFP (SEQ ID NO: 133 of U.S. Pat. No. 9,475,845; herein SEQ ID NO: 2058), AEPMPHSLNFSQYLWYT (SEQ ID NO: 134 of U.S. Pat. No. 9,475,845; herein SEQ ID NO: 2059), WAYXSP (SEQ ID NO: 135 of U.S. Pat. No. 9,475,845; herein SEQ ID NO: 2060), IELLQAR (SEQ ID NO: 136 of U.S. Pat. No. 9,475,845; herein SEQ ID NO: 2061), AYTKCSRQWRTCMTTH (SEQ ID NO: 137 of U.S. Pat. No. 9,475,845; herein SEQ ID NO: 2062), PQNSKIPGPTFLDPH (SEQ ID NO: 138 of U.S. Pat. No. 9,475,845; herein SEQ ID NO: 2063), SMEPALPDWWWKMFK (SEQ ID NO: 139 of U.S. Pat. No. 9,475,845; herein SEQ ID NO: 2064), ANTPCGPYTHDCPVKR (SEQ ID NO: 140 of U.S. Pat. No. 9,475,845; herein SEQ ID NO: 2065), TACHQHVRMVRP (SEQ ID NO: 141 of U.S. Pat. No. 9,475,845; herein SEQ ID NO: 2066), VPWMEPAYQRFL (SEQ ID NO: 142 of U.S. Pat. No. 9,475,845; herein SEQ ID NO: 2067), DPRATPGS (SEQ ID NO: 143 of U.S. Pat. No. 9,475,845; herein SEQ ID NO: 2068), FRPNRAQDYNTN (SEQ ID NO: 144 of U.S. Pat. No. 9,475,845; herein SEQ ID NO: 2069), CTKNSYLMC (SEQ ID NO: 145 of U.S. Pat. No. 9,475,845; herein SEQ ID NO: 2070), CXXTXXXGXGC (SEQ ID NO: 146 of U.S. Pat. No. 9,475,845; herein SEQ ID NO: 2071), CPIEDRPMC (SEQ ID NO: 147 of U.S. Pat. No. 9,475,845; herein SEQ ID NO: 2072), HEWSYLAPYPWF (SEQ ID NO: 148 of U.S. Pat. No. 9,475,845; herein SEQ ID NO: 2073), MCPKHPLGC (SEQ ID NO: 149 of U.S. Pat. No. 9,475,845; herein SEQ ID NO: 2074), RMWPSSTVNLSAGRR (SEQ ID NO: 150 of U.S. Pat. No. 9,475,845; herein SEQ ID NO: 2075), SAKTAVSQRVWLPSHRGGEP (SEQ ID NO: 151 of U.S. Pat. No. 9,475,845; herein SEQ ID NO: 2076), KSREHVNNSACPSKRITAAL (SEQ ID NO: 152 of U.S. Pat. No. 9,475,845; herein SEQ ID NO: 2077), EGFR (SEQ ID NO: 153 of U.S. Pat. No. 9,475,845; herein SEQ ID NO: 2078), AGLGVR (SEQ ID NO: 154 of U.S. Pat. No. 9,475,845; herein SEQ ID NO: 2079), GTRQGHTMRLGVSDG (SEQ ID NO: 155 of U.S. Pat. No. 9,475,845; herein SEQ ID NO: 2080), IAGLATPGWSHWLAL (SEQ ID NO: 156 of U.S. Pat. No. 9,475,845; herein SEQ ID NO: 2081), SMSIARL (SEQ ID NO: 157 of U.S. Pat. No. 9,475,845; herein SEQ ID NO: 2082), HTFEPGV (SEQ ID NO: 158 of U.S. Pat. No. 9,475,845; herein SEQ ID NO: 2083), NTSLKRISNKRIRRK (SEQ ID NO: 159 of U.S. Pat. No. 9,475,845; herein SEQ ID NO: 2084), LRIKRKRRKRKKTRK (SEQ ID NO: 160 of U.S. Pat. No. 9,475,845; herein SEQ ID NO: 2085), GGG, GFS, LWS, EGG, LLV, LSP, LBS, AGG, GRR, GGH and GTV.

[0108] In one embodiment, the AAV serotype may be, or may have a sequence as described in United States Publication No. US 20160369298, the contents of which are herein incorporated by reference in their entirety, such as, but not limited to, site-specific mutated capsid protein of AAV2 (SEQ ID NO: 97 of US 20160369298; herein SEQ ID NO: 2086) or variants thereof, wherein the specific site is at least one site selected from sites R447, G453, S578, N587, N587+1, S662 of VP1 or fragment thereof.

[0109] Further, any of the mutated sequences described in US 20160369298, may be or may have, but not limited to, any of the following sequences SDSGASN (SEQ ID NO: 1 and SEQ ID NO: 231 of US20160369298; herein SEQ ID NO: 2087), SPSGASN (SEQ ID NO: 2 of US20160369298; herein SEQ ID NO: 2088), SHSGASN (SEQ ID NO: 3 of US20160369298; herein SEQ ID NO: 2089), SRSGASN (SEQ ID NO: 4 of US20160369298; herein SEQ ID NO: 2090), SKSGASN (SEQ ID NO: 5 of US20160369298; herein SEQ ID NO: 2091), SNSGASN (SEQ ID NO: 6 of US20160369298; herein SEQ ID NO: 2092), SGSGASN (SEQ ID NO: 7 of US20160369298; herein SEQ ID NO: 2093), SASGASN (SEQ ID NO: 8, 175, and 221 of US20160369298; herein SEQ ID NO: 2094), SESGTSN (SEQ ID NO: 9 of US20160369298; herein SEQ ID NO: 2095), STTGGSN (SEQ ID NO: 10 of US20160369298; herein SEQ ID NO: 2096), SSAGSTN (SEQ ID NO: 11 of US20160369298; herein SEQ ID NO: 2097), NNDSQA (SEQ ID NO: 12 of US20160369298; herein SEQ ID NO: 2098), NNRNQA (SEQ ID NO: 13 of US20160369298; herein SEQ ID NO: 2099), NNNKQA (SEQ ID NO: 14 of US20160369298; herein SEQ ID NO: 2100), NAKRQA (SEQ ID NO: 15 of US20160369298; herein SEQ ID NO: 2101), NDEHQA (SEQ ID NO: 16 of US20160369298; herein SEQ ID NO: 2102), NTSQKA (SEQ ID NO: 17 of US20160369298; herein SEQ ID NO: 2103), YYLSRTNTPSGTDTQSRLVFSQAGA (SEQ ID NO: 18 of US20160369298; herein SEQ ID NO: 2104), YYLSRTNTDSGTETQSGLDFSQAGA (SEQ ID NO: 19 of US20160369298; herein SEQ ID NO: 2105), YYLSRTNTESGTPTQSALEFSQAGA (SEQ ID NO: 20 of US20160369298; herein SEQ ID NO: 2106), YYLSRTNTHSGTHTQSPLHFSQAGA (SEQ ID NO: 21 of US20160369298; herein SEQ ID NO: 2107), YYLSRTNTSSGTITISHLIFSQAGA (SEQ ID NO: 22 of US20160369298; herein SEQ ID NO: 2108), YYLSRTNTRSGIMTKSSLMFSQAGA (SEQ ID NO: 23 of US20160369298; herein SEQ ID NO: 2109), YYLSRTNTKSGRKTLSNLSFSQAGA (SEQ ID NO: 24 of US20160369298; herein SEQ ID NO: 2110), YYLSRTNDGSGPVTPSKLRFSQRGA (SEQ ID NO: 25 of US20160369298; herein SEQ ID NO: 2111), YYLSRTNAASGHATHSDLKFSQPGA (SEQ ID NO: 26 of US20160369298; herein SEQ ID NO: 2112), YYLSRTNGQAGSLTMSELGFSQVGA (SEQ ID NO: 27 of US20160369298; herein SEQ ID NO: 2113), YYLSRTNSTGGNQTTSQLLFSQLSA (SEQ ID NO: 28 of US20160369298; herein SEQ ID NO: 2114), YFLSRTNNNTGLNTNSTLNFSQGRA (SEQ ID NO: 29 of US20160369298; herein SEQ ID NO: 2115), SKTGADNNNSEYSWTG (SEQ ID NO: 30 of US20160369298; herein SEQ ID NO: 2116), SKTDADNNNSEYSWTG (SEQ ID NO: 31 of US20160369298; herein SEQ ID NO: 2117), SKTEADNNNSEYSWTG (SEQ ID NO: 32 of US20160369298; herein SEQ ID NO: 2118), SKTPADNNNSEYSWTG (SEQ ID NO: 33 of US20160369298; herein SEQ ID NO: 2119), SKTHADNNNSEYSWTG (SEQ ID NO: 34 of US20160369298; herein SEQ ID NO: 2120), SKTQADNNNSEYSWTG (SEQ ID NO: 35 of US20160369298; herein SEQ ID NO: 2121), SKTIADNNNSEYSWTG (SEQ ID NO: 36 of US20160369298; herein SEQ ID NO: 2122), SKTMADNNNSEYSWTG (SEQ ID NO: 37 of US20160369298; herein SEQ ID NO: 2123), SKTRADNNNSEYSWTG (SEQ ID NO: 38 of US20160369298; herein SEQ ID NO: 2124), SKTNADNNNSEYSWTG (SEQ ID NO: 39 of US20160369298; herein SEQ ID NO: 2125), SKTVGRNNNSEYSWTG (SEQ ID NO: 40 of US20160369298; herein SEQ ID NO: 2126), SKTADRNNNSEYSWTG (SEQ ID NO: 41 of US20160369298; herein SEQ ID NO: 2127), SKKLSQNNNSKYSWQG (SEQ ID NO: 42 of US20160369298; herein SEQ ID NO: 2128), SKPTTGNNNSDYSWPG (SEQ ID NO: 43 of US20160369298; herein SEQ ID NO: 2129), STQKNENNNSNYSWPG (SEQ ID NO: 44 of US20160369298; herein SEQ ID NO: 2130), HKDDEGKF (SEQ ID NO: 45 of US20160369298; herein SEQ ID NO: 2131), HKDDNRKF (SEQ ID NO: 46 of US20160369298; herein SEQ ID NO: 2132), HKDDTNKF (SEQ ID NO: 47 of US20160369298; herein SEQ ID NO: 2133), HEDSDKNF (SEQ ID NO: 48 of US20160369298; herein SEQ ID NO: 2134), HRDGADSF (SEQ ID NO: 49 of US20160369298; herein SEQ ID NO: 2135), HGDNKSRF (SEQ ID NO: 50 of US20160369298; herein SEQ ID NO: 2136), KQGSEKTNVDFEEV (SEQ ID NO: 51 of US20160369298; herein SEQ ID NO: 2137), KQGSEKTNVDSEEV (SEQ ID NO: 52 of US20160369298; herein SEQ ID NO: 2138), KQGSEKTNVDVEEV (SEQ ID NO: 53 of US20160369298; herein SEQ ID NO: 2139), KQGSDKTNVDDAGV (SEQ ID NO: 54 of US20160369298; herein SEQ ID NO: 2140), KQGSSKTNVDPREV (SEQ ID NO: 55 of US20160369298; herein SEQ ID NO: 2141), KQGSRKTNVDHKQV (SEQ ID NO: 56 of US20160369298; herein SEQ ID NO: 2142), KQGSKGGNVDTNRV (SEQ ID NO: 57 of US20160369298; herein SEQ ID NO: 2143), KQGSGEANVDNGDV (SEQ ID NO: 58 of US20160369298; herein SEQ ID NO: 2144), KQDAAADNIDYDHV (SEQ ID NO: 59 of US20160369298; herein SEQ ID NO: 2145), KQSGTRSNAAASSV (SEQ ID NO: 60 of US20160369298; herein SEQ ID NO: 2146), KENTNTNDTELTNV (SEQ ID NO: 61 of US20160369298; herein SEQ ID NO: 2147), QRGNNVAATADVNT (SEQ ID NO: 62 of US20160369298; herein SEQ ID NO: 2148), QRGNNEAATADVNT (SEQ ID NO: 63 of US20160369298; herein SEQ ID NO: 2149), QRGNNPAATADVNT (SEQ ID NO: 64 of US20160369298; herein SEQ ID NO: 2150), QRGNNHAATADVNT (SEQ ID NO: 65 of US20160369298; herein SEQ ID NO: 2151), QEENNIAATPGVNT (SEQ ID NO: 66 of US20160369298; herein SEQ ID NO: 2152), QPPNNMAATHEVNT (SEQ ID NO: 67 of US20160369298; herein SEQ ID NO: 2153), QHHNNSAATTIVNT (SEQ ID NO: 68 of US20160369298; herein SEQ ID NO: 2154), QTTNNRAAFNMVET (SEQ ID NO: 69 of US20160369298; herein SEQ ID NO: 2155), QKKNNNAASKKVAT (SEQ ID NO: 70 of US20160369298; herein SEQ ID NO: 2156), QGGNNKAADDAVKT (SEQ ID NO: 71 of US20160369298; herein SEQ ID NO: 2157), QAAKGGAADDAVKT (SEQ ID NO: 72 of US20160369298; herein SEQ ID NO: 2158), QDDRAAAANESVDT (SEQ ID NO: 73 of US20160369298; herein SEQ ID NO: 2159), QQQHDDAAYQRVHT (SEQ ID NO: 74 of US20160369298; herein SEQ ID NO: 2160), QSSSSLAAVSTVQT (SEQ ID NO: 75 of US20160369298; herein SEQ ID NO: 2161), QNNQTTAAIRNVTT (SEQ ID NO: 76 of US20160369298; herein SEQ ID NO: 2162), NYNKKSDNVDFT (SEQ ID NO: 77 of US20160369298; herein SEQ ID NO: 2163), NYNKKSENVDFT (SEQ ID NO: 78 of US20160369298; herein SEQ ID NO: 2164), NYNKKSLNVDFT (SEQ ID NO: 79 of US20160369298; herein SEQ ID NO: 2165), NYNKKSPNVDFT (SEQ ID NO: 80 of US20160369298; herein SEQ ID NO: 2166), NYSKKSHCVDFT (SEQ ID NO: 81 of US20160369298; herein SEQ ID NO: 2167), NYRKTIYVDFT (SEQ ID NO: 82 of US20160369298; herein SEQ ID NO: 2168), NYKEKKDVHFT (SEQ ID NO: 83 of US20160369298; herein SEQ ID NO: 2169), NYGHRAIVQFT (SEQ ID NO: 84 of US20160369298; herein SEQ ID NO: 2170), NYANHQFVVCT (SEQ ID NO: 85 of US20160369298; herein SEQ ID NO: 2171), NYDDDPTGVLLT (SEQ ID NO: 86 of US20160369298; herein SEQ ID NO: 2172), NYDDPTGVLLT (SEQ ID NO: 87 of US20160369298; herein SEQ ID NO: 2173), NFEQQNSVEWT (SEQ ID NO: 88 of US20160369298; herein SEQ ID NO: 2174), SQSGASN (SEQ ID NO: 89 and SEQ ID NO: 241 of US20160369298; herein SEQ ID NO: 2175), NNGSQA (SEQ ID NO: 90 of US20160369298; herein SEQ ID NO: 2176), YYLSRTNTPSGTTTWSRLQFSQAGA (SEQ ID NO: 91 of US20160369298; herein SEQ ID NO: 2177), SKTSADNNNSEYSWTG (SEQ ID NO: 92 of US20160369298; herein SEQ ID NO: 2178), HKDDEEKF (SEQ ID NO: 93, 209, 214, 219, 224, 234, 239, and 244 of US20160369298; herein SEQ ID NO: 2179), KQGSEKTNVDIEEV (SEQ ID NO: 94 of US20160369298; herein SEQ ID NO: 2180), QRGNNQAATADVNT (SEQ ID NO: 95 of US20160369298; herein SEQ ID NO: 2181), NYNKKSVNVDFT (SEQ ID NO: 96 of US20160369298; herein SEQ ID NO: 2182), SQSGASNYNTPSGTTTQSRLQFSTSADNNNSEYSWTGATKYH (SEQ ID NO: 106 of US20160369298; herein SEQ ID NO: 2183), SASGASNFNSEGGSLTQSSLGFSTDGENNNSDFSWTGATKYH (SEQ ID NO: 107 of US20160369298; herein SEQ ID NO: 2184), SQSGASNYNTPSGTTTQSRLQFSTDGENNNSDFSWTGATKYH (SEQ ID NO: 108 of US20160369298; herein SEQ ID NO: 2185), SASGASNYNTPSGTTTQSRLQFSTSADNNNSEFSWPGATTYH (SEQ ID NO: 109 of US20160369298; herein SEQ ID NO: 2186), SQSGASNFNSEGGSLTQSSLGFSTDGENNNSDFSWTGATKYH (SEQ ID NO: 110 of US20160369298; herein SEQ ID NO: 2187), SASGASNYNTPSGSLTQSSLGFSTDGENNNSDFSWTGATKYH (SEQ ID NO: 111 of US20160369298; herein SEQ ID NO: 2188), SQSGASNYNTPSGTTTQSRLQFSTSADNNNSDFSWTGATKYH (SEQ ID NO: 112 of US20160369298; herein SEQ ID NO: 2189), SGAGASNFNSEGGSLTQSSLGFSTDGENNNSDFSWTGATKYH (SEQ ID NO: 113 of US20160369298; herein SEQ ID NO: 2190), SGAGASN (SEQ ID NO: 176 of US20160369298; herein SEQ ID NO: 2191), NSEGGSLTQSSLGFS (SEQ ID NO: 177, 185, 193 and 202 of US20160369298; herein SEQ ID NO: 2192), TDGENNNSDFS (SEQ ID NO: 178 of US20160369298; herein SEQ ID NO: 2193), SEFSWPGATT (SEQ ID NO: 179 of US20160369298; herein SEQ ID NO: 2194), TSADNNNSDFSWT (SEQ ID NO: 180 of US20160369298; herein SEQ ID NO: 2195), SQSGASNY (SEQ ID NO: 181, 187, and 198 of US20160369298; herein SEQ ID NO: 2196), NTPSGTTTQSRLQFS (SEQ ID NO: 182, 188, 191, and 199 of US20160369298; herein SEQ ID NO: 2197), TSADNNNSEYSWTGATKYH (SEQ ID NO: 183 of US20160369298; herein SEQ ID NO: 2198), SASGASNF (SEQ ID NO: 184 of US20160369298; herein SEQ ID NO: 2199), TDGENNNSDFSWTGATKYH (SEQ ID NO: 186, 189, 194, 197, and 203 of US20160369298; herein SEQ ID NO: 2200), SASGASNY (SEQ ID NO: 190 and SEQ ID NO: 195 of US20160369298; herein SEQ ID NO: 2201), TSADNNNSEFSWPGATTYH (SEQ ID NO: 192 of US20160369298; herein SEQ ID NO: 2202), NTPSGSLTQSSLGFS (SEQ ID NO: 196 of US20160369298; herein SEQ ID NO: 2203), TSADNNNSDFSWTGATKYH (SEQ ID NO: 200 of US20160369298; herein SEQ ID NO: 2204), SGAGASNF (SEQ ID NO: 201 of US20160369298; herein SEQ ID NO: 2205), CTCCAGVVSVVSMRSRVCVNSGCAGCTDHCVVSRNSGTCVMSACACAA (SEQ ID NO: 204 of US20160369298; herein SEQ ID NO: 2206), CTCCAGAGAGGCAACAGACAAGCAGCTACCGCAGATGTCAACACACAA (SEQ ID NO: 205 of US20160369298; herein SEQ ID NO: 2207), SAAGASN (SEQ ID NO: 206 of US20160369298; herein SEQ ID NO: 2208), YFLSRTNTESGSTTQSTLRFSQAG (SEQ ID NO: 207 of US20160369298; herein SEQ ID NO: 2209), SKTSADNNNSDFS (SEQ ID NO: 208, 228, and 253 of US20160369298; herein SEQ ID NO: 2210), KQGSEKTDVDIDKV (SEQ ID NO: 210 of US20160369298; herein SEQ ID NO: 2211), STAGASN (SEQ ID NO: 211 of US20160369298; herein SEQ ID NO: 2212), YFLSRTNTTSGIETQSTLRFSQAG (SEQ ID NO: 212 and SEQ ID NO: 247 of US20160369298; herein SEQ ID NO: 213), SKTDGENNNSDFS (SEQ ID NO: 213 and SEQ ID NO: 248 of US20160369298; herein SEQ ID NO: 2214), KQGAAADDVEIDGV (SEQ ID NO: 215 and SEQ ID NO: 250 of US20160369298; herein SEQ ID NO: 2215), SEAGASN (SEQ ID NO: 216 of US20160369298; herein SEQ ID NO: 2216), YYLSRTNTPSGTTTQSRLQFSQAG (SEQ ID NO: 217, 232 and 242 of US20160369298; herein SEQ ID NO: 2217), SKTSADNNNSEYS (SEQ ID NO: 218, 233, 238, and 243 of US20160369298; herein SEQ ID NO: 2218), KQGSEKTNVDIEKV (SEQ ID NO: 220, 225 and 245 of US20160369298; herein SEQ ID NO: 2219), YFLSRTNDASGSDTKSTLLFSQAG (SEQ ID NO: 222 of US20160369298; herein SEQ ID NO: 2220), STTPSENNNSEYS (SEQ ID NO: 223 of US20160369298; herein SEQ ID NO: 2221), SAAGATN (SEQ ID NO: 226 and SEQ ID NO: 251 of US20160369298; herein SEQ ID NO: 2222), YFLSRTNGEAGSATLSELRFSQAG (SEQ ID NO: 227 of US20160369298; herein SEQ ID NO: 2223), HGDDADRF (SEQ ID NO: 229 and SEQ ID NO: 254 of US20160369298; herein SEQ ID NO: 2224), KQGAEKSDVEVDRV (SEQ ID NO: 230 and SEQ ID NO: 255 of US20160369298; herein SEQ ID NO: 2225), KQDSGGDNIDIDQV (SEQ ID NO: 235 of US20160369298; herein SEQ ID NO: 2226), SDAGASN (SEQ ID NO: 236 of US20160369298; herein SEQ ID NO: 2227), YFLSRTNTEGGHDTQSTLRFSQAG (SEQ ID NO: 237 of US20160369298; herein SEQ ID NO: 2228), KEDGGGSDVAIDEV (SEQ ID NO: 240 of US20160369298; herein SEQ ID NO: 2229), SNAGASN (SEQ ID NO: 246 of US20160369298; herein SEQ ID NO: 2230), and YFLSRTNGEAGSATLSELRFSQPG (SEQ ID NO: 252 of US20160369298; herein SEQ ID NO: 2231). Non-limiting examples of nucleotide sequences that may encode the amino acid mutated sites include the following, AGCVVMDCAGGARSCASCAAC (SEQ ID NO: 97 of US20160369298; herein SEQ ID NO: 2232), AACRACRRSMRSMAGGCA (SEQ ID NO: 98 of US20160369298; herein SEQ ID NO: 2233), CACRRGGACRRCRMSRRSARSTTT (SEQ ID NO: 99 of US20160369298; herein SEQ ID NO: 2234), TATTTCTTGAGCAGAACAAACRVCVVSRSCGGAMNCVHSACGMHSTCAVVSCTTVDS TTTTCTCAGSBCRGSGCG (SEQ ID NO: 100 of US20160369298; herein SEQ ID NO: 2235), TCAAMAMMAVNSRVCSRSAACAACAACAGTRASTTCTCGTGGMMAGGA (SEQ ID NO: 101 of US20160369298; herein SEQ ID NO: 2236), AAGSAARRCRSCRVSRVARVCRATRYCGMSNHCRVMVRSGTC (SEQ ID NO: 102 of US20160369298; herein SEQ ID NO: 2237), CAGVVSVVSMRSRVCVNSGCAGCTDHCVVSRNSGTCVMSACA (SEQ ID NO: 103 of US20160369298; herein SEQ ID NO: 2238), AACTWCRVSVASMVSVHSDDTGTGSWSTKSACT (SEQ ID NO: 104 of US20160369298; herein SEQ ID NO: 2239), TTGTTGAACATCACCACGTGACGCACGTTC (SEQ ID NO: 256 of US20160369298; herein SEQ ID NO: 2240), TCCCCGTGGTTCTACTACATAATGTGGCCG (SEQ ID NO: 257 of US20160369298; herein SEQ ID NO: 2241), TTCCACACTCCGTTTTGGATAATGTTGAAC (SEQ ID NO: 258 of US20160369298; herein SEQ ID NO: 2242), AGGGACATCCCCAGCTCCATGCTGTGGTCG (SEQ ID NO: 259 of US20160369298; herein SEQ ID NO: 2243), AGGGACAACCCCTCCGACTCGCCCTAATCC (SEQ ID NO: 260 of US20160369298; herein SEQ ID NO: 2244), TCCTAGTAGAAGACACCCTCTCACTGCCCG (SEQ ID NO: 261 of US20160369298; herein SEQ ID NO: 2245), AGTACCATGTACACCCACTCTCCCAGTGCC (SEQ ID NO: 262 of US20160369298; herein SEQ ID NO: 2246), ATATGGACGTTCATGCTGATCACCATACCG (SEQ ID NO: 263 of US20160369298; herein SEQ ID NO: 2247), AGCAGGAGCTCCTTGGCCTCAGCGTGCGAG (SEQ ID NO: 264 of US20160369298; herein SEQ ID NO: 2248), ACAAGCAGCTTCACTATGACAACCACTGAC (SEQ ID NO: 265 of US20160369298; herein SEQ ID NO: 2249), CAGCCTAGGAACTGGCTTCCTGGACCCTGTTACCGCCAGCAGAGAGTCTCAAMAMM AVNSRVCSRSAACAACAACAGTRASTTCTCCTGGMMAGGAGCTACCAAGTACCACC TCAATGGCAGAGACTCTCTGGTGAATCCCGGACCAGCTATGGCAAGCCACRRGGAC RRCRMSRRSARSTTTTTTCCTCAGAGCGGGGTTCTCATCTTTGGGAAGSAARRCRSCR VSRVARVCRATRYCGMSNHCRVMVRSGTCATGATTACAGACGAAGAGGAGATCTGG AC (SEQ ID NO: 266 of US20160369298; herein SEQ ID NO: 2250), TGGGACAATGGCGGTCGTCTCTCAGAGTTKTKKT (SEQ ID NO: 267 of US20160369298; herein SEQ ID NO: 2251), AGAGGACCKKTCCTCGATGGTTCATGGTGGAGTTA (SEQ ID NO: 268 of US20160369298; herein SEQ ID NO: 2252), CCACTTAGGGCCTGGTCGATACCGTTCGGTG (SEQ ID NO: 269 of US20160369298; herein SEQ ID NO: 2253), and TCTCGCCCCAAGAGTAGAAACCCTTCSTTYYG (SEQ ID NO: 270 of US20160369298; herein SEQ ID NO: 2254).

[0110] In some embodiments, the AAV serotype may comprise an ocular cell targeting peptide as described in International Patent Publication WO2016134375, the contents of which are herein incorporated by reference in their entirety, such as, but not limited to SEQ ID NO: 9, and SEQ ID NO:10 of WO2016134375. Further, any of the ocular cell targeting peptides or amino acids described in WO2016134375, may be inserted into any parent AAV serotype, such as, but not limited to, AAV2 (SEQ ID NO:8 of WO2016134375; herein SEQ ID NO: 2255), or AAV9 (SEQ ID NO: 11 of WO2016134375; herein SEQ ID NO: 2256). In some embodiments, modifications, such as insertions are made in AAV2 proteins at P34-A35, T138-A139, A139-P140, G453-T454, N587-R588, and/or R588-Q589. In certain embodiments, insertions are made at D384, G385, 1560, T561, N562, E563, E564, E565, N704, and/or Y705 of AAV9. The ocular cell targeting peptide may be, but is not limited to, any of the following amino acid sequences, GSTPPPM (SEQ ID NO: 1 of WO2016134375; herein SEQ ID NO: 2257), or GETRAPL (SEQ ID NO: 4 of WO2016134375; herein SEQ ID NO: 2258).

[0111] In some embodiments, the AAV serotype may be modified as described in the United States Publication US 20170145405 the contents of which are herein incorporated by reference in their entirety. AAV serotypes may include, modified AAV2 (e.g., modifications at Y444F, Y500F, Y730F and/or S662V), modified AAV3 (e.g., modifications at Y705F, Y731F and/or T492V), and modified AAV6 (e.g., modifications at S663V and/or T492V).

[0112] In some embodiments, the AAV serotype may be modified as described in the International Publication WO2017083722 the contents of which are herein incorporated by reference in their entirety. AAV serotypes may include, AAV1 (Y705+731F+T492V), AAV2 (Y444+500+730F+T491V), AAV3 (Y705+731F), AAV5, AAV 5 (Y436+693+719F), AAV6 (VP3 variant Y705F/Y731F/T492V), AAV8 (Y733F), AAV9, AAV9 (VP3 variant Y731F), and AAV10 (Y733F).

[0113] In some embodiments, the AAV serotype may comprise, as described in International Patent Publication WO2017015102, the contents of which are herein incorporated by reference in their entirety, an engineered epitope comprising the amino acids SPAKFA (SEQ ID NO: 24 of WO2017015102; herein SEQ ID NO: 2259) or NKDKLN (SEQ ID NO:2 of WO2017015102; herein SEQ ID NO: 2260). The epitope may be inserted in the region of amino acids 665 to 670 based on the numbering of the VP1 capsid of AAV8 (SEQ ID NO:3 of WO2017015102) and/or residues 664 to 668 of AAV3B (SEQ ID NO:3).

[0114] In one embodiment, the AAV serotype may be, or may have a sequence as described in International Patent Publication WO2017058892, the contents of which are herein incorporated by reference in their entirety, such as, but not limited to, AAV variants with capsid proteins that may comprise a substitution at one or more (e.g., 2, 3, 4, 5, 6, or 7) of amino acid residues 262-268, 370-379, 451-459, 472-473, 493-500, 528-534, 547-552, 588-597, 709-710, 716-722 of AAV1, in any combination, or the equivalent amino acid residues in AAV2, AAV3, AAV4, AAV5, AAV6, AAV7, AAV8, AAV9, AAV10, AAV11, AAV12, AAVrh8, AAVrh10, AAVrh32.33, bovine AAV or avian AAV. The amino acid substitution may be, but is not limited to, any of the amino acid sequences described in WO2017058892. In one embodiment, the AAV may comprise an amino acid substitution at residues 256L, 258K, 259Q, 261S, 263A, 264S, 265T, 266G, 272H, 385S, 386Q, S472R, V473D, N500E 547S, 709A, 710N, 716D, 717N, 718N, 720L, A456T, Q457T, N458Q, K459S, T492S, K493A, S586R, S587G, S588N, T589R and/or 722T of AAV1 (SEQ ID NO: 1 of WO2017058892) in any combination, 244N, 246Q, 248R, 249E, 2501, 251K, 252S, 253G, 254S, 255V, 256D, 263Y, 377E, 378N, 453L, 456R, 532Q, 533P, 535N, 536P, 537G, 538T, 539T, 540A, 541T, 542Y, 543L, 546N, 653V, 654P, 656S, 697Q, 698F, 704D, 705S, 706T, 707G, 708E, 709Y and/or 710R of AAV5 (SEQ ID NO:5 of WO2017058892) in any combination, 248R, 316V, 317Q, 318D, 319S, 443N, 530N, 531S, 532Q 533P, 534A, 535N, 540A, 541 T, 542Y, 543L, 545G, 546N, 697Q, 704D, 706T, 708E, 709Y and/or 710R of AAV5 (SEQ ID NO: 5 of WO2017058892) in any combination, 264S, 266G, 269N, 272H, 457Q, 588S and/or 5891 of AAV6 (SEQ ID NO:6 WO2017058892) in any combination, 457T, 459N, 496G, 499N, 500N, 589Q, 590N and/or 592A of AAV8 (SEQ ID NO: 8 WO2017058892) in any combination, 4511, 452N, 453G, 454S, 455G, 456Q, 457N and/or 458Q of AAV9 (SEQ ID NO: 9 WO2017058892) in any combination.

[0115] In some embodiments, the AAV may include a sequence of amino acids at positions 155, 156 and 157 of VP1 or at positions 17, 18, 19 and 20 of VP2, as described in International Publication No. WO 2017066764, the contents of which are herein incorporated by reference in their entirety. The sequences of amino acid may be, but not limited to, N-S-S, S-X-S, S-S-Y, N-X-S, N-S-Y, S-X-Y and N-X-Y, where N, X and Y are, but not limited to, independently non-serine, or non-threonine amino acids, wherein the AAV may be, but not limited to AAV1, AAV2, AAV3, AAV4, AAV5, AAV6, AAV7, AAV8, AAV9, AAV10, AAV11 and AAV12. In some embodiments, the AAV may include a deletion of at least one amino acid at positions 156, 157 or 158 of VP1 or at positions 19, 20 or 21 of VP2, wherein the AAV may be, but not limited to AAV1, AAV2, AAV3, AAV4, AAV5, AAV6, AAV7, AAV8, AAV9, AAV10, AAV11 and AAV12.

[0116] In one embodiment, the AAV serotype may be as described in Jackson et al (Frontiers in Molecular Neuroscience 9:154 (2016)), the contents of which are herein incorporated by reference in their entirety. In some embodiments, the AAV serotype is PHP.B or AAV9. In some embodiments, the AAV serotype is paired with a synapsin promoter to enhance neuronal transduction, as compared to when more ubiquitous promoters are used (i.e., CBA or CMV).

[0117] In one embodiment, peptides for inclusion in an AAV serotype may be identified by isolating human splenocytes, restimulating the splenocytes in vitro using individual peptides spanning the amino acid sequence of the AAV capsid protein, IFN-gamma ELISpot with the individual peptides used for the in vitro restimulation, bioinformatics analysis to determine the given allele restriction of 15-mers identified by IFN-gamma ELISpot, identification of candidate reactive 9-mer epitopes for a given allele, synthesis candidate 9-mers, second IFN-gamma ELISpot screening of splenocytes from subjects carrying the specific alleles to which identified AAV epitopes are predicted to bind, determine the AAV capsid-reactive CD8+ T cell epitopes and determine the frequency of subjects reacting to a given AAV epitope.

[0118] AAV particles comprising a modulatory polynucleotide encoding the siRNA molecules may be prepared or derived from various serotypes of AAVs, including, but not limited to, AAV1, AAV2, AAV3, AAV4, AAV5, AAV6, AAV7, AAV8, AAV9, AAV9.47, AAV9 (hu14), AAV10, AAV11, AAV12, AAVrh8, AAVrh10, AAV-DJ8 and AAV-DJ. In some cases, different serotypes of AAVs may be mixed together or with other types of viruses to produce chimeric AAV particles. As a non-limiting example, the AAV particle is derived from the AAV9 serotype.

### Viral Genome

[0119] In one embodiment, as shown in an AAV particle comprises a viral genome with a payload region.

[0120] In one embodiment, the viral genome may comprise the components as shown in FIG. 1. The payload region 110 is located within the viral genome 100. At the 5′ and/or the 3′ end of the viral genome 100 there may be at least one inverted terminal repeat (ITR) 120. Between the 5′ ITR 120 and the payload region 110, there may be a promoter region 130. In one embodiment, the payload region may comprise at least one modulatory polynucleotide.

[0121] In one embodiment, the viral genome 100 may comprise the components as shown in FIG. 2. The payload region 110 is located within the viral genome 100. At the 5′ and/or the 3′ end of the viral genome 100 there may be at least one inverted terminal repeat (ITR) 120. Between the 5′ ITR 120 and the payload region 110, there may be a promoter region 130. Between the promoter region 130 and the payload region 110, there may be an intron region 140. In one embodiment, the payload region may comprise at least one modulatory polynucleotide.

[0122] In one embodiment, the viral genome 100 may comprise the components as shown in FIG. 3. At the 5′ and/or the 3′ end of the viral genome 100 there may be at least one inverted terminal repeat (ITR) 120. Within the viral genome 100, there may be an enhancer region 150, a promoter region 130, an intron region 140, and a payload region 110. In one embodiment, the payload region may comprise at least one modulatory polynucleotide.

[0123] In one embodiment, the viral genome 100 may comprise the components as shown in FIG. 4. At the 5′ and/or the 3′ end of the viral genome 100 there may be at least one inverted terminal repeat (ITR) 120. Within the viral genome 100, there may be an enhancer region 150, a promoter region 130, an intron region 140, a payload region 110, and a polyadenylation signal sequence region 160. In one embodiment, the payload region may comprise at least one modulatory polynucleotide.

[0124] In one embodiment, the viral genome 100 may comprise the components as shown in FIG. 5. At the 5′ and/or the 3′ end of the viral genome 100 there may be at least one inverted terminal repeat (ITR) 120. Within the viral genome 100, there may be at least one MCS region 170, an enhancer region 150, a promoter region 130, an intron region 140, a payload region 110, and a polyadenylation signal sequence region 160. In one embodiment, the payload region may comprise at least one modulatory polynucleotide.

[0125] In one embodiment, the viral genome 100 may comprise the components as shown in FIG. 6. At the 5′ and/or the 3′ end of the viral genome 100 there may be at least one inverted terminal repeat (ITR) 120. Within the viral genome 100, there may be at least one MCS region 170, an enhancer region 150, a promoter region 130, at least one exon region 180, at least one intron region 140, a payload region 110, and a polyadenylation signal sequence region 160. In one embodiment, the payload region may comprise at least one modulatory polynucleotide.

[0126] In one embodiment, the viral genome 100 may comprise the components as shown in FIGS. 7 and 8. Within the viral genome 100, there may be at least one promoter region 130, and a payload region 110. In one embodiment, the payload region may comprise at least one modulatory polynucleotide.

[0127] In one embodiment, the viral genome 100 may comprise the components as shown in FIG. 9. Within the viral genome 100, there may be at least one promoter region 130, a payload region 110, and a polyadenylation signal sequence region 160. In one embodiment, the payload region may comprise at least one modulatory polynucleotide.

### Viral Genome Size

[0128] In one embodiment, the viral genome which comprises a payload described herein, may be single stranded or double stranded viral genome. The size of the viral genome may be small, medium, large or the maximum size. Additionally, the viral genome may comprise a promoter and a polyA tail.

[0129] In one embodiment, the viral genome which comprises a payload described herein, may be a small single stranded viral genome. A small single stranded viral genome may be 2.7 to 3.5 kb in size such as about 2.7, 2.8, 2.9, 3.0, 3.1, 3.2, 3.3, 3.4, and 3.5 kb in size. As a non-limiting example, the small single stranded viral genome may be 3.2 kb in size. Additionally, the viral genome may comprise a promoter and a polyA tail.

[0130] In one embodiment, the viral genome which comprises a payload described herein, may be a small double stranded viral genome. A small double stranded viral genome may be 1.3 to 1.7 kb in size such as about 1.3, 1.4, 1.5, 1.6, and 1.7 kb in size. As a non-limiting example, the small double stranded viral genome may be 1.6 kb in size. Additionally, the viral genome may comprise a promoter and a polyA tail.

[0131] In one embodiment, the viral genome which comprises a payload described herein, may a medium single stranded viral genome. A medium single stranded viral genome may be 3.6 to 4.3 kb in size such as about 3.6, 3.7, 3.8, 3.9, 4.0, 4.1, 4.2 and 4.3 kb in size. As a non-limiting example, the medium single stranded viral genome may be 4.0 kb in size. Additionally, the viral genome may comprise a promoter and a polyA tail.

[0132] In one embodiment, the viral genome which comprises a payload described herein, may be a medium double stranded viral genome. A medium double stranded viral genome may be 1.8 to 2.1 kb in size such as about 1.8, 1.9, 2.0, and 2.1 kb in size. As a non-limiting example, the medium double stranded viral genome may be 2.0 kb in size. Additionally, the viral genome may comprise a promoter and a polyA tail.

[0133] In one embodiment, the viral genome which comprises a payload described herein, may be a large single stranded viral genome. A large single stranded viral genome may be 4.4 to 6.0 kb in size such as about 4.4, 4.5, 4.6, 4.7, 4.8, 4.9, 5.0, 5.1, 5.2, 5.3, 5.4, 5.5, 5.6, 5.7, 5.8, 5.9 and 6.0 kb in size. As a non-limiting example, the large single stranded viral genome may be 4.7 kb in size. As another non-limiting example, the large single stranded viral genome may be 4.8 kb in size. As yet another non-limiting example, the large single stranded viral genome may be 6.0 kb in size. Additionally, the viral genome may comprise a promoter and a polyA tail.

[0134] In one embodiment, the viral genome which comprises a payload described herein, may be a large double stranded viral genome. A large double stranded viral genome may be 2.2 to 3.0 kb in size such as about 2.2, 2.3, 2.4, 2.5, 2.6, 2.7, 2.8, 2.9 and 3.0 kb in size. As a non-limiting example, the large double stranded viral genome may be 2.4 kb in size. Additionally, the viral genome may comprise a promoter and a polyA tail.

### Viral Genome Component: Inverted Terminal Repeats (ITRs)

[0135] The AAV particles of the present invention comprise a viral genome with at least one ITR region and a payload region. In one embodiment the viral genome has two ITRs. These two ITRs flank the payload region at the 5′ and 3′ ends. The ITRs function as origins of replication comprising recognition sites for replication. ITRs comprise sequence regions which can be complementary and symmetrically arranged. ITRs incorporated into viral genomes of the invention may be comprised of naturally occurring polynucleotide sequences or recombinantly derived polynucleotide sequences.

[0136] The ITRs may be derived from the same serotype as the capsid, selected from any of the serotypes listed in Table 1, or a derivative thereof. The ITR may be of a different serotype from the capsid. In one embodiment the AAV particle has more than one ITR. In a non-limiting example, the AAV particle has a viral genome comprising two ITRs. In one embodiment the ITRs are of the same serotype as one another. In another embodiment the ITRs are of different serotypes. Non-limiting examples include zero, one or both of the ITRs having the same serotype as the capsid. In one embodiment both ITRs of the viral genome of the AAV particle are AAV2 ITRs.

[0137] Independently, each ITR may be about 100 to about 150 nucleotides in length. An ITR may be about 100-105 nucleotides in length, 106-110 nucleotides in length, 111-115 nucleotides in length, 116-120 nucleotides in length, 121-125 nucleotides in length, 126-130 nucleotides in length, 131-135 nucleotides in length, 136-140 nucleotides in length, 141-145 nucleotides in length or 146-150 nucleotides in length. In one embodiment the ITRs are 140-142 nucleotides in length. Non limiting examples of ITR length are 102, 140, 141, 142, 145 nucleotides in length, and those having at least 95% identity thereto.

[0138] In one embodiment, the AAV particle comprises a nucleic acid sequence encoding an siRNA molecule which may be located near the 5′ end of the flip ITR in an expression vector. In another embodiment, the AAV particle comprises a nucleic acid sequence encoding an siRNA molecule may be located near the 3′ end of the flip ITR in an expression vector. In yet another embodiment, the AAV particle comprises a nucleic acid sequence encoding an siRNA molecule may be located near the 5′ end of the flop ITR in an expression vector. In yet another embodiment, the AAV particle comprises a nucleic acid sequence encoding an siRNA molecule may be located near the 3′ end of the flop ITR in an expression vector. In one embodiment, the AAV particle comprises a nucleic acid sequence encoding an siRNA molecule may be located between the 5′ end of the flip ITR and the 3′ end of the flop ITR in an expression vector. In one embodiment, the AAV particle comprises a nucleic acid sequence encoding an siRNA molecule may be located between (e.g., half-way between the 5′ end of the flip ITR and 3′ end of the flop ITR or the 3′ end of the flop ITR and the 5′ end of the flip ITR), the 3′ end of the flip ITR and the 5′ end of the flip ITR in an expression vector. As a non-limiting example, the AAV particle comprises a nucleic acid sequence encoding an siRNA molecule may be located within 1, 2, 3, 4, 5, 6, 7, 8, 9, 10, 11, 12, 13, 14, 15, 16, 17, 18, 19, 20, 21, 22, 23, 24, 25, 26, 27, 28, 29, 30 or more than 30 nucleotides downstream from the 5′ or 3′ end of an ITR (e.g., Flip or Flop ITR) in an expression vector. As a non-limiting example, the AAV particle comprises a nucleic acid sequence encoding an siRNA molecule may be located within 1, 2, 3, 4, 5, 6, 7, 8, 9, 10, 11, 12, 13, 14, 15, 16, 17, 18, 19, 20, 21, 22, 23, 24, 25, 26, 27, 28, 29, 30 or more than 30 nucleotides upstream from the 5′ or 3′ end of an ITR (e.g., Flip or Flop ITR) in an expression vector. As another non-limiting example, the AAV particle comprises a nucleic acid sequence encoding an siRNA molecule may be located within 1-5, 1-10, 1-15, 1-20, 1-25, 1-30, 5-10, 5-15, 5-20, 5-25, 5-30, 10-15, 10-20, 10-25, 10-30, 15-20, 15-25, 15-30, 20-25, 20-30 or 25-30 nucleotides downstream from the 5′ or 3′ end of an ITR (e.g., Flip or Flop ITR) in an expression vector. As another non-limiting example, the AAV particle comprises a nucleic acid sequence encoding an siRNA molecule may be located within 1-5, 1-10, 1-15, 1-20, 1-25, 1-30, 5-10, 5-15, 5-20, 5-25, 5-30, 10-15, 10-20, 10-25, 10-30, 15-20, 15-25, 15-30, 20-25, 20-30 or 25-30 upstream from the 5′ or 3′ end of an ITR (e.g., Flip or Flop ITR) in an expression vector. As a non-limiting example, the AAV particle comprises a nucleic acid sequence encoding an siRNA molecule may be located within the first 1%, 2%, 3%, 4%, 5%, 6%, 7%, 8%, 9%, 10%, 15%, 20%, 25% or more than 25% of the nucleotides upstream from the 5′ or 3′ end of an ITR (e.g., Flip or Flop ITR) in an expression vector. As another non-limiting example, the AAV particle comprises a nucleic acid sequence encoding an siRNA molecule may be located with the first 1-5%, 1-10%, 1-15%, 1-20%, 1-25%, 5-10%, 5-15%, 5-20%, 5-25%, 10-15%, 10-20%, 10-25%, 15-20%, 15-25%, or 20-25% downstream from the 5′ or 3′ end of an ITR (e.g., Flip or Flop ITR) in an expression vector.

### Viral Genome Component: Promoters

[0139] In one embodiment, the payload region of the viral genome comprises at least one element to enhance the transgene target specificity and expression (See e.g., Powell et al. Viral Expression Cassette Elements to Enhance Transgene Target Specificity and Expression in Gene Therapy, 2015; the contents of which are herein incorporated by reference in its entirety). Non-limiting examples of elements to enhance the transgene target specificity and expression include promoters, endogenous miRNAs, post-transcriptional regulatory elements (PREs), polyadenylation (PolyA) signal sequences and upstream enhancers (USEs), CMV enhancers and introns.

[0140] A person skilled in the art may recognize that expression of the polypeptides of the invention in a target cell may require a specific promoter, including but not limited to, a promoter that is species specific, inducible, tissue-specific, or cell cycle-specific (Parr et al., Nat. Med. 3:1145-9 (1997); the contents of which are herein incorporated by reference in their entirety).

[0141] In one embodiment, the promoter is deemed to be efficient when it drives expression of the polypeptide(s) encoded in the payload region of the viral genome of the AAV particle.

[0142] In one embodiment, the promoter is a promoter deemed to be efficient to drive the expression of the modulatory polynucleotide.

[0143] In one embodiment, the promoter is a promoter deemed to be efficient when it drives expression in the cell being targeted.

[0144] In one embodiment, the promoter drives expression of the payload for a period of time in targeted tissues. Expression driven by a promoter may be for a period of 1 hour, 2, hours, 3 hours, 4 hours, 5 hours, 6 hours, 7 hours, 8 hours, 9 hours, 10 hours, 11 hours, 12 hours, 13 hours, 14 hours, 15 hours, 16 hours, 17 hours, 18 hours, 19 hours, 20 hours, 21 hours, 22 hours, 23 hours, 1 day, 2 days, 3 days, 4 days, 5 days, 6 days, 1 week, 8 days, 9 days, 10 days, 11 days, 12 days, 13 days, 2 weeks, 15 days, 16 days, 17 days, 18 days, 19 days, 20 days, 3 weeks, 22 days, 23 days, 24 days, 25 days, 26 days, 27 days, 28 days, 29 days, 30 days, 31 days, 1 month, 2 months, 3 months, 4 months, 5 months, 6 months, 7 months, 8 months, 9 months, 10 months, 11 months, 1 year, 13 months, 14 months, 15 months, 16 months, 17 months, 18 months, 19 months, 20 months, 21 months, 22 months, 23 months, 2 years, 3 years, 4 years, 5 years, 6 years, 7 years, 8 years, 9 years, 10 years or more than 10 years. Expression may be for 1-5 hours, 1-12 hours, 1-2 days, 1-5 days, 1-2 weeks, 1-3 weeks, 1-4 weeks, 1-2 months, 1-4 months, 1-6 months, 2-6 months, 3-6 months, 3-9 months, 4-8 months, 6-12 months, 1-2 years, 1-5 years, 2-5 years, 3-6 years, 3-8 years, 4-8 years or 5-10 years.

[0145] In one embodiment, the promoter drives expression of the payload for at least 1 month, 2 months, 3 months, 4 months, 5 months, 6 months, 7 months, 8 months, 9 months, 10 months, 11 months, 1 year, 2 years, 3 years 4 years, 5 years, 6 years, 7 years, 8 years, 9 years, 10 years, 11 years, 12 years, 13 years, 14 years, 15 years, 16 years, 17 years, 18 years, 19 years, 20 years, 21 years, 22 years, 23 years, 24 years, 25 years, 26 years, 27 years, 28 years, 29 years, 30 years, 31 years, 32 years, 33 years, 34 years, 35 years, 36 years, 37 years, 38 years, 39 years, 40 years, 41 years, 42 years, 43 years, 44 years, 45 years, 46 years, 47 years, 48 years, 49 years, 50 years, 55 years, 60 years, 65 years, or more than 65 years.

[0146] Promoters may be naturally occurring or non-naturally occurring. Non-limiting examples of promoters include viral promoters, plant promoters and mammalian promoters. In some embodiments, the promoters may be human promoters. In some embodiments, the promoter may be truncated.

[0147] Promoters which drive or promote expression in most tissues include, but are not limited to, human elongation factor 1α-subunit (EF1α), cytomegalovirus (CMV) immediate-early enhancer and/or promoter, chicken β-actin (CBA) and its derivative CAG, β glucuronidase (GUSB), or ubiquitin C (UBC). Tissue-specific expression elements can be used to restrict expression to certain cell types such as, but not limited to, muscle specific promoters, B cell promoters, monocyte promoters, leukocyte promoters, macrophage promoters, pancreatic acinar cell promoters, endothelial cell promoters, lung tissue promoters, astrocyte promoters, or nervous system promoters which can be used to restrict expression to neurons, astrocytes, or oligodendrocytes.

[0148] Non-limiting examples of muscle-specific promoters include mammalian muscle creatine kinase (MCK) promoter, mammalian desmin (DES) promoter, mammalian troponin I (TNN12) promoter, and mammalian skeletal alpha-actin (ASKA) promoter (see, e.g. U.S. Patent Publication US 20110212529, the contents of which are herein incorporated by reference in their entirety)

[0149] Non-limiting examples of tissue-specific expression elements for neurons include neuron-specific enolase (NSE), platelet-derived growth factor (PDGF), platelet-derived growth factor B-chain (PDGF-0), synapsin (Syn), methyl-CpG binding protein 2 (MeCP2), Ca²⁺/calmodulin-dependent protein kinase II (CaMKII), metabotropic glutamate receptor 2 (mGluR2), neurofilament light (NFL) or heavy (NFH), β-globin minigene nβ2, preproenkephalin (PPE), enkephalin (Enk) and excitatory amino acid transporter 2 (EAAT2) promoters. Non-limiting examples of tissue-specific expression elements for astrocytes include glial fibrillary acidic protein (GFAP) and EAAT2 promoters. A non-limiting example of a tissue-specific expression element for oligodendrocytes includes the myelin basic protein (MBP) promoter.

[0150] In one embodiment, the promoter may be less than 1 kb. The promoter may have a length of 200, 210, 220, 230, 240, 250, 260, 270, 280, 290, 300, 310, 320, 330, 340, 350, 360, 370, 380, 390, 400, 410, 420, 430, 440, 450, 460, 470, 480, 490, 500, 510, 520, 530, 540, 550, 560, 570, 580, 590, 600, 610, 620, 630, 640, 650, 660, 670, 680, 690, 700, 710, 720, 730, 740, 750, 760, 770, 780, 790, 800 or more than 800 nucleotides. The promoter may have a length between 200-300, 200-400, 200-500, 200-600, 200-700, 200-800, 300-400, 300-500, 300-600, 300-700, 300-800, 400-500, 400-600, 400-700, 400-800, 500-600, 500-700, 500-800, 600-700, 600-800 or 700-800.

[0151] In one embodiment, the promoter may be a combination of two or more components of the same or different starting or parental promoters such as, but not limited to, CMV and CBA. Each component may have a length of 200, 210, 220, 230, 240, 250, 260, 270, 280, 290, 300, 310, 320, 330, 340, 350, 360, 370, 380, 381, 382, 383, 384, 385, 386, 387, 388, 389, 390, 400, 410, 420, 430, 440, 450, 460, 470, 480, 490, 500, 510, 520, 530, 540, 550, 560, 570, 580, 590, 600, 610, 620, 630, 640, 650, 660, 670, 680, 690, 700, 710, 720, 730, 740, 750, 760, 770, 780, 790, 800 or more than 800. Each component may have a length between 200-300, 200-400, 200-500, 200-600, 200-700, 200-800, 300-400, 300-500, 300-600, 300-700, 300-800, 400-500, 400-600, 400-700, 400-800, 500-600, 500-700, 500-800, 600-700, 600-800 or 700-800. In one embodiment, the promoter is a combination of a 382 nucleotide CMV-enhancer sequence and a 260 nucleotide CBA-promoter sequence.

[0152] In one embodiment, the viral genome comprises a ubiquitous promoter. Non-limiting examples of ubiquitous promoters include CMV, CBA (including derivatives CAG, CBh, etc.), EF-1α, PGK, UBC, GUSB (hGBp), and UCOE (promoter of HNRPA2B1-CBX3).

[0153] Yu et al. (Molecular Pain 2011, 7:63; the contents of which are herein incorporated by reference in their entirety) evaluated the expression of eGFP under the CAG, EFIα, PGK and UBC promoters in rat DRG cells and primary DRG cells using lentiviral vectors and found that UBC showed weaker expression than the other 3 promoters and only 10-12% glial expression was seen for all promoters. Soderblom et al. (E. Neuro 2015; the contents of which are herein incorporated by reference in its entirety) evaluated the expression of eGFP in AAV8 with CMV and UBC promoters and AAV2 with the CMV promoter after injection in the motor cortex. Intranasal administration of a plasmid containing a UBC or EFIα promoter showed a sustained airway expression greater than the expression with the CMV promoter (See e.g., Gill et al., Gene Therapy 2001, Vol. 8, 1539-1546; the contents of which are herein incorporated by reference in their entirety). Husain et al. (Gene Therapy 2009; the contents of which are herein incorporated by reference in its entirety) evaluated an HOH construct with a hGUSB promoter, a HSV-1LAT promoter and an NSE promoter and found that the HOH construct showed weaker expression than NSE in mouse brain. Passini and Wolfe (J. Virol. 2001, 12382-12392, the contents of which are herein incorporated by reference in its entirety) evaluated the long-term effects of the HOH vector following an intraventricular injection in neonatal mice and found that there was sustained expression for at least 1 year. Low expression in all brain regions was found by Xu et al. (Gene Therapy 2001, 8, 1323-1332; the contents of which are herein incorporated by reference in their entirety) when NFL and NFH promoters were used as compared to the CMV-lacZ, CMV-luc, EF, GFAP, hENK, nAChR, PPE, PPE+wpre, NSE (0.3 kb), NSE (1.8 kb) and NSE (1.8 kb+wpre). Xu et al. found that the promoter activity in descending order was NSE (1.8 kb), EF, NSE (0.3 kb), GFAP, CMV, hENK, PPE, NFL and NFH. NFL is a 650 nucleotide promoter and NFH is a 920 nucleotide promoter which are both absent in the liver but NFH is abundant in the sensory proprioceptive neurons, brain and spinal cord and NFH is present in the heart. Scn8a is a 470 nucleotide promoter which expresses throughout the DRG, spinal cord and brain with particularly high expression seen in the hippocampal neurons and cerebellar Purkinje cells, cortex, thalamus and hypothalamus (See e.g., Drews et al. Identification of evolutionary conserved, functional noncoding elements in the promoter region of the sodium channel gene SCN8A, Mamm Genome (2007) 18:723-731; and Raymond et al. Expression of Alternatively Spliced Sodium Channel α-subunit genes, Journal of Biological Chemistry (2004) 279(44) 46234-46241; the contents of each of which are herein incorporated by reference in their entireties).

[0154] Any of promoters taught by the aforementioned Yu, Soderblom, Gill, Husain, Passini, Xu, Drews or Raymond may be used in the present inventions.

[0155] In one embodiment, the promoter is not cell specific.

[0156] In one embodiment, the promoter is an ubiquitin c (UBC) promoter. The UBC promoter may have a size of 300-350 nucleotides. As a non-limiting example, the UBC promoter is 332 nucleotides.

[0157] In one embodiment, the promoter is a P-glucuronidase (GUSB) promoter. The GUSB promoter may have a size of 350-400 nucleotides. As a non-limiting example, the GUSB promoter is 378 nucleotides.

[0158] In one embodiment, the promoter is a neurofilament light (NFL) promoter. The NFL promoter may have a size of 600-700 nucleotides. As a non-limiting example, the NFL promoter is 650 nucleotides. As a non-limiting example, the construct may be AAV-promoter-CMV/globin intron-modulatory polynucleotide-RBG, where the AAV may be self-complementary and the AAV may be the DJ serotype.

[0159] In one embodiment, the promoter is a neurofilament heavy (NFH) promoter. The NFH promoter may have a size of 900-950 nucleotides. As a non-limiting example, the NFH promoter is 920 nucleotides. As a non-limiting example, the construct may be AAV-promoter-CMV/globin intron-modulatory polynucleotide-RBG, where the AAV may be self-complementary and the AAV may be the DJ serotype.

[0160] In one embodiment, the promoter is a scn8a promoter. The scn8a promoter may have a size of 450-500 nucleotides. As a non-limiting example, the scn8a promoter is 470 nucleotides. As a non-limiting example, the construct may be AAV-promoter-CMV/globin intron-modulatory polynucleotide-RBG, where the AAV may be self-complementary and the AAV may be the DJ serotype

[0161] In one embodiment, the viral genome comprises a Pol III promoter.

[0162] In one embodiment, the viral genome comprises a P1 promoter.

[0163] In one embodiment, the viral genome comprises a FXN promoter.

[0164] In one embodiment, the promoter is a phosphoglycerate kinase 1 (PGK) promoter.

[0165] In one embodiment, the promoter is a chicken β-actin (CBA) promoter.

[0166] In one embodiment, the promoter is a CAG promoter which is a construct comprising the cytomegalovirus (CMV) enhancer fused to the chicken beta-actin (CBA) promoter.

[0167] In one embodiment, the promoter is a cytomegalovirus (CMV) promoter.

[0168] In one embodiment, the viral genome comprises a H1 promoter.

[0169] In one embodiment, the viral genome comprises a U6 promoter.

[0170] In one embodiment, the promoter is a liver or a skeletal muscle promoter. Non-limiting examples of liver promoters include human α-1-antitrypsin (hAAT) and thyroxine binding globulin (TBG). Non-limiting examples of skeletal muscle promoters include Desmin, MCK or synthetic C5-12.

[0171] In one embodiment, the promoter is a RNA pol III promoter. As a non-limiting example, the RNA pol III promoter is U6. As a non-limiting example, the RNA pol III promoter is H1.

[0172] In one embodiment, the viral genome comprises two promoters. As a non-limiting example, the promoters are an EF1α promoter and a CMV promoter.

[0173] In one embodiment, the viral genome comprises an enhancer element, a promoter and/or a 5′UTR intron. The enhancer element, also referred to herein as an “enhancer,” may be, but is not limited to, a CMV enhancer, the promoter may be, but is not limited to, a CMV, CBA, UBC, GUSB, NSE, Synapsin, MeCP2, and GFAP promoter and the 5′UTR/intron may be, but is not limited to, SV40, and CBA-MVM. As a non-limiting example, the enhancer, promoter and/or intron used in combination may be: (1) CMV enhancer, CMV promoter, SV40 5′UTR intron; (2) CMV enhancer, CBA promoter, SV 40 5′UTR intron; (3) CMV enhancer, CBA promoter, CBA-MVM 5′UTR intron; (4) UBC promoter; (5) GUSB promoter; (6) NSE promoter; (7) Synapsin promoter; (8) MeCP2 promoter, (9) GFAP promoter, (10) H1 promoter; and (11) U6 promoter.

[0174] In one embodiment, the viral genome comprises an engineered promoter.

[0175] In another embodiment the viral genome comprises a promoter from a naturally expressed protein.

### Viral Genome Component: Untranslated Regions (UTRs)

[0176] By definition, wild type untranslated regions (UTRs) of a gene are transcribed but not translated. Generally, the 5′ UTR starts at the transcription start site and ends at the start codon and the 3′ UTR starts immediately following the stop codon and continues until the termination signal for transcription.

[0177] Features typically found in abundantly expressed genes of specific target organs may be engineered into UTRs to enhance the stability and protein production. As a non-limiting example, a 5′ UTR from mRNA normally expressed in the liver (e.g., albumin, serum amyloid A, Apolipoprotein A/B/E, transferrin, alpha fetoprotein, erythropoietin, or Factor VIII) may be used in the viral genomes of the AAV particles of the invention to enhance expression in hepatic cell lines or liver.

[0178] While not wishing to be bound by theory, wild-type 5′ untranslated regions (UTRs) include features which play roles in translation initiation. Kozak sequences, which are commonly known to be involved in the process by which the ribosome initiates translation of many genes, are usually included in 5′ UTRs. Kozak sequences have the consensus CCR(A/G)CCAUGG, where R is a purine (adenine or guanine) three bases upstream of the start codon (ATG), which is followed by another ‘G’.

[0179] In one embodiment, the 5′UTR in the viral genome includes a Kozak sequence.

[0180] In one embodiment, the 5′UTR in the viral genome does not include a Kozak sequence.

[0181] While not wishing to be bound by theory, wild-type 3′ UTRs are known to have stretches of Adenosines and Uridines embedded therein. These AU rich signatures are particularly prevalent in genes with high rates of turnover. Based on their sequence features and functional properties, the AU rich elements (AREs) can be separated into three classes (Chen et al, 1995, the contents of which are herein incorporated by reference in its entirety): Class I AREs, such as, but not limited to, c-Myc and MyoD, contain several dispersed copies of an AUUUA motif within U-rich regions. Class II AREs, such as, but not limited to, GM-CSF and TNF-a, possess two or more overlapping UUAUUUA(U/A)(U/A) nonamers. Class III ARES, such as, but not limited to, c-Jun and Myogenin, are less well defined. These U rich regions do not contain an AUUUA motif. Most proteins binding to the AREs are known to destabilize the messenger, whereas members of the ELAV family, most notably HuR, have been documented to increase the stability of mRNA. HuR binds to AREs of all the three classes. Engineering the HuR specific binding sites into the 3′ UTR of nucleic acid molecules will lead to HuR binding and thus, stabilization of the message in vivo.

[0182] Introduction, removal or modification of 3′ UTR AU rich elements (AREs) can be used to modulate the stability of polynucleotides. When engineering specific polynucleotides, e.g., payload regions of viral genomes, one or more copies of an ARE can be introduced to make polynucleotides less stable and thereby curtail translation and decrease production of the resultant protein. Likewise, AREs can be identified and removed or mutated to increase the intracellular stability and thus increase translation and production of the resultant protein.

[0183] In one embodiment, the 3′ UTR of the viral genome may include an oligo(dT) sequence for templated addition of a poly-A tail.

[0184] In one embodiment, the viral genome may include at least one miRNA seed, binding site or full sequence. microRNAs (or miRNA or miR) are 19-25 nucleotide noncoding RNAs that bind to the sites of nucleic acid targets and down-regulate gene expression either by reducing nucleic acid molecule stability or by inhibiting translation. A microRNA sequence comprises a “seed” region, i.e., a sequence in the region of positions 2-8 of the mature microRNA, which sequence has perfect Watson-Crick complementarity to the miRNA target sequence of the nucleic acid.

[0185] In one embodiment, the viral genome may be engineered to include, alter or remove at least one miRNA binding site, sequence or seed region.

[0186] Any UTR from any gene known in the art may be incorporated into the viral genome of the AAV particle. These UTRs, or portions thereof, may be placed in the same orientation as in the gene from which they were selected or they may be altered in orientation or location. In one embodiment, the UTR used in the viral genome of the AAV particle may be inverted, shortened, lengthened, made with one or more other 5′ UTRs or 3′ UTRs known in the art. As used herein, the term “altered” as it relates to a UTR, means that the UTR has been changed in some way in relation to a reference sequence. For example, a 3′ or 5′ UTR may be altered relative to a wild type or native UTR by the change in orientation or location as taught above or may be altered by the inclusion of additional nucleotides, deletion of nucleotides, swapping or transposition of nucleotides.

[0187] In one embodiment, the viral genome of the AAV particle comprises at least one artificial UTRs which is not a variant of a wild type UTR.

[0188] In one embodiment, the viral genome of the AAV particle comprises UTRs which have been selected from a family of transcripts whose proteins share a common function, structure, feature or property.

### Viral Genome Component: Polyadenylation Sequence

[0189] In one embodiment, the viral genome of the AAV particles of the present invention comprise at least one polyadenylation sequence. The viral genome of the AAV particle may comprise a polyadenylation sequence between the 3′ end of the payload coding sequence and the 5′ end of the 3′ITR.

[0190] In one embodiment, the polyadenylation sequence or “polyA sequence” may range from absent to about 500 nucleotides in length. The polyadenylation sequence may be, but is not limited to, 1, 2, 3, 4, 5, 6, 7, 8, 9, 10, 11, 12, 13, 14, 15, 16, 17, 18, 19, 20, 21, 22, 23, 24, 25, 26, 27, 28, 29, 30, 31, 32, 33, 34, 35, 36, 37, 38, 39, 40, 41, 42, 43, 44, 45, 46, 47, 48, 49, 50, 51, 52, 53, 54, 55, 56, 57, 58, 59, 60, 61, 62, 63, 64, 65, 66, 67, 68, 69, 70, 71, 72, 73, 74, 75, 76, 77, 78, 79, 80, 81, 82, 83, 84, 85, 86, 87, 88, 89, 90, 91, 92, 93, 94, 95, 96, 97, 98, 99, 100, 101, 102, 103, 104, 105, 106, 107, 108, 109, 110, 111, 112, 113, 114, 115, 116, 117, 118, 119, 120, 121, 122, 123, 124, 125, 126, 127, 128, 129, 130, 131, 132, 133, 134, 135, 136, 137, 138, 139, 140, 141, 142, 143, 144, 145, 146, 147, 148, 149, 150, 151, 152, 153, 154, 155, 156, 157, 158, 159, 160, 161, 162, 163, 164, 165, 166, 167, 168, 169, 170, 171, 172, 173, 174, 175, 176, 177, 178, 179, 180, 181, 182, 183, 184, 185, 186, 187, 188, 189, 190, 191, 192, 193, 194, 195, 196, 197, 198, 199, 200, 201, 202, 203, 204, 205, 206, 207, 208, 209, 210, 211, 212, 213, 214, 215, 216, 217, 218, 219, 220, 221, 222, 223, 224, 225, 226, 227, 228, 229, 230, 231, 232, 233, 234, 235, 236, 237, 238, 239, 240, 241, 242, 243, 244, 245, 246, 247, 248, 249, 250, 251, 252, 253, 254, 255, 256, 257, 258, 259, 260, 261, 262, 263, 264, 265, 266, 267, 268, 269, 270, 271, 272, 273, 274, 275, 276, 277, 278, 279, 280, 281, 282, 283, 284, 285, 286, 287, 288, 289, 290, 291, 292, 293, 294, 295, 296, 297, 298, 299, 300, 301, 302, 303, 304, 305, 306, 307, 308, 309, 310, 311, 312, 313, 314, 315, 316, 317, 318, 319, 320, 321, 322, 323, 324, 325, 326, 327, 328, 329, 330, 331, 332, 333, 334, 335, 336, 337, 338, 339, 340, 341, 342, 343, 344, 345, 346, 347, 348, 349, 350, 351, 352, 353, 354, 355, 356, 357, 358, 359, 360, 361, 362, 363, 364, 365, 366, 367, 368, 369, 370, 371, 372, 373, 374, 375, 376, 377, 378, 379, 380, 381, 382, 383, 384, 385, 386, 387, 388, 389, 390, 391, 392, 393, 394, 395, 396, 397, 398, 399, 400, 401, 402, 403, 404, 405, 406, 407, 408, 409, 410, 411, 412, 413, 414, 415, 416, 417, 418, 419, 420, 421, 422, 423, 424, 425, 426, 427, 428, 429, 430, 431, 432, 433, 434, 435, 436, 437, 438, 439, 440, 441, 442, 443, 444, 445, 446, 447, 448, 449, 450, 451, 452, 453, 454, 455, 456, 457, 458, 459, 460, 461, 462, 463, 464, 465, 466, 467, 468, 469, 470, 471, 472, 473, 474, 475, 476, 477, 478, 479, 480, 481, 482, 483, 484, 485, 486, 487, 488, 489, 490, 491, 492, 493, 494, 495, 496, 497, 498, 499, and 500 nucleotides in length.

[0191] In one embodiment, the polyadenylation sequence is 50-100 nucleotides in length.

[0192] In one embodiment, the polyadenylation sequence is 50-150 nucleotides in length.

[0193] In one embodiment, the polyadenylation sequence is 50-160 nucleotides in length.

[0194] In one embodiment, the polyadenylation sequence is 50-200 nucleotides in length.

[0195] In one embodiment, the polyadenylation sequence is 60-100 nucleotides in length.

[0196] In one embodiment, the polyadenylation sequence is 60-150 nucleotides in length.

[0197] In one embodiment, the polyadenylation sequence is 60-160 nucleotides in length.

[0198] In one embodiment, the polyadenylation sequence is 60-200 nucleotides in length.

[0199] In one embodiment, the polyadenylation sequence is 70-100 nucleotides in length.

[0200] In one embodiment, the polyadenylation sequence is 70-150 nucleotides in length.

[0201] In one embodiment, the polyadenylation sequence is 70-160 nucleotides in length.

[0202] In one embodiment, the polyadenylation sequence is 70-200 nucleotides in length.

[0203] In one embodiment, the polyadenylation sequence is 80-100 nucleotides in length.

[0204] In one embodiment, the polyadenylation sequence is 80-150 nucleotides in length.

[0205] In one embodiment, the polyadenylation sequence is 80-160 nucleotides in length.

[0206] In one embodiment, the polyadenylation sequence is 80-200 nucleotides in length.

[0207] In one embodiment, the polyadenylation sequence is 90-100 nucleotides in length.

[0208] In one embodiment, the polyadenylation sequence is 90-150 nucleotides in length.

[0209] In one embodiment, the polyadenylation sequence is 90-160 nucleotides in length.

[0210] In one embodiment, the polyadenylation sequence is 90-200 nucleotides in length.

[0211] In one embodiment, the AAV particle comprises a nucleic acid sequence encoding an siRNA molecule may be located upstream of the polyadenylation sequence in an expression vector. Further, the AAV particle comprises a nucleic acid sequence encoding an siRNA molecule may be located downstream of a promoter such as, but not limited to, CMV, U6, CAG, CBA or a CBA promoter with a SV40 intron or a human betaglobin intron in an expression vector. As a non-limiting example, the AAV particle comprises a nucleic acid sequence encoding an siRNA molecule may be located within 1, 2, 3, 4, 5, 6, 7, 8, 9, 10, 11, 12, 13, 14, 15, 16, 17, 18, 19, 20, 21, 22, 23, 24, 25, 26, 27, 28, 29, 30 or more than 30 nucleotides downstream from the promoter and/or upstream of the polyadenylation sequence in an expression vector. As another non-limiting example, the AAV particle comprises a nucleic acid sequence encoding an siRNA molecule may be located within 1-5, 1-10, 1-15, 1-20, 1-25, 1-30, 5-10, 5-15, 5-20, 5-25, 5-30, 10-15, 10-20, 10-25, 10-30, 15-20, 15-25, 15-30, 20-25, 20-30 or 25-30 nucleotides downstream from the promoter and/or upstream of the polyadenylation sequence in an expression vector. As a non-limiting example, the AAV particle comprises a nucleic acid sequence encoding an siRNA molecule may be located within the first 1%, 2%, 3%, 4%, 5%, 6%, 7%, 8%, 9%, 10%, 15%, 20%, 25% or more than 25% of the nucleotides downstream from the promoter and/or upstream of the polyadenylation sequence in an expression vector. As another non-limiting example, the AAV particle comprises a nucleic acid sequence encoding an siRNA molecule may be located with the first 1-5%, 1-10%, 1-15%, 1-20%, 1-25%, 5-10%, 5-15%, 5-20%, 5-25%, 10-15%, 10-20%, 10-25%, 15-20%, 15-25%, or 20-25% downstream from the promoter and/or upstream of the polyadenylation sequence in an expression vector.

[0212] In one embodiment, the AAV particle comprises a rabbit globin polyadenylation (polyA) signal sequence.

[0213] In one embodiment, the AAV particle comprises a human growth hormone polyadenylation (polyA) signal sequence.

### Viral Genome Component: Introns

[0214] In one embodiment, the payload region comprises at least one element to enhance the expression such as one or more introns or portions thereof. Non-limiting examples of introns include, MVM (67-97 bps), F.IX truncated intron 1 (300 bps), β-globin SD/immunoglobulin heavy chain splice acceptor (250 bps), adenovirus splice donor/immunoglobin splice acceptor (500 bps), SV40 late splice donor/splice acceptor (19S/16S) (180 bps) and hybrid adenovirus splice donor/IgG splice acceptor (230 bps).

[0215] In one embodiment, the intron or intron portion may be 100-500 nucleotides in length. The intron may have a length of 80, 90, 100, 110, 120, 130, 140, 150, 160, 170, 171, 172, 173, 174, 175, 176, 177, 178, 179, 180, 190, 200, 210, 220, 230, 240, 250, 260, 270, 280, 290, 300, 310, 320, 330, 340, 350, 360, 370, 380, 390, 400, 410, 420, 430, 440, 450, 460, 470, 480, 490 or 500. The intron may have a length between 80-100, 80-120, 80-140, 80-160, 80-180, 80-200, 80-250, 80-300, 80-350, 80-400, 80-450, 80-500, 200-300, 200-400, 200-500, 300-400, 300-500, or 400-500.

[0216] In one embodiment, the AAV viral genome may comprise a promoter such as, but not limited to, CMV or U6. As a non-limiting example, the promoter for the AAV comprising the nucleic acid sequence for the siRNA molecules of the present invention is a CMV promoter. As another non-limiting example, the promoter for the AAV comprising the nucleic acid sequence for the siRNA molecules of the present invention is a U6 promoter.

[0217] In one embodiment, the AAV viral genome may comprise a CMV promoter.

[0218] In one embodiment, the AAV viral genome may comprise a U6 promoter.

[0219] In one embodiment, the AAV viral genome may comprise a CMV and a U6 promoter.

[0220] In one embodiment, the AAV viral genome may comprise a H1 promoter.

[0221] In one embodiment, the AAV viral genome may comprise a CBA promoter.

[0222] In one embodiment, the encoded siRNA molecule may be located downstream of a promoter in an expression vector such as, but not limited to, CMV, U6, H1, CBA, CAG, or a CBA promoter with an intron such as SV40 or others known in the art. Further, the encoded siRNA molecule may also be located upstream of the polyadenylation sequence in an expression vector. As a non-limiting example, the encoded siRNA molecule may be located within 1, 2, 3, 4, 5, 6, 7, 8, 9, 10, 11, 12, 13, 14, 15, 16, 17, 18, 19, 20, 21, 22, 23, 24, 25, 26, 27, 28, 29, 30 or more than 30 nucleotides downstream from the promoter and/or upstream of the polyadenylation sequence in an expression vector. As another non-limiting example, the encoded siRNA molecule may be located within 1-5, 1-10, 1-15, 1-20, 1-25, 1-30, 5-10, 5-15, 5-20, 5-25, 5-30, 10-15, 10-20, 10-25, 10-30, 15-20, 15-25, 15-30, 20-25, 20-30 or 25-30 nucleotides downstream from the promoter and/or upstream of the polyadenylation sequence in an expression vector. As a non-limiting example, the encoded siRNA molecule may be located within the first 1%, 2%, 3%, 4%, 5%, 6%, 7%, 8%, 9%, 10%, 15%, 20%, 25% or more than 25% of the nucleotides downstream from the promoter and/or upstream of the polyadenylation sequence in an expression vector. As another non-limiting example, the encoded siRNA molecule may be located with the first 1-5%, 1-10%, 1-15%, 1-20%, 1-25%, 5-10%, 5-15%, 5-20%, 5-25%, 10-15%, 10-20%, 10-25%, 15-20%, 15-25%, or 20-25% downstream from the promoter and/or upstream of the polyadenylation sequence in an expression vector.

### Viral Genome Component: Filler Sequence

[0223] In one embodiment, the viral genome comprises one or more filler sequences.

[0224] In one embodiment, the viral genome comprises one or more filler sequences in order to have the length of the viral genome be the optimal size for packaging. As a non-limiting example, the viral genome comprises at least one filler sequence in order to have the length of the viral genome be about 2.3 kb. As a non-limiting example, the viral genome comprises at least one filler sequence in order to have the length of the viral genome be about 4.6 kb.

[0225] In one embodiment, the viral genome comprises one or more filler sequences in order to reduce the likelihood that a hairpin structure of the vector genome (e.g., a modulatory polynucleotide described herein) may be read as an inverted terminal repeat (ITR) during expression and/or packaging. As a non-limiting example, the viral genome comprises at least one filler sequence in order to have the length of the viral genome be about 2.3 kb. As a non-limiting example, the viral genome comprises at least one filler sequence in order to have the length of the viral genome be about 4.6 kb

[0226] In one embodiment, the viral genome is a single stranded (ss) viral genome and comprises one or more filler sequences which have a length about between 0.1 kb-3.8 kb, such as, but not limited to, 0.1 kb, 0.2 kb, 0.3 kb, 0.4 kb, 0.5 kb, 0.6 kb, 0.7 kb, 0.8 kb, 0.9 kb, 1 kb, 1.1 kb, 1.2 kb, 1.3 kb, 1.4 kb, 1.5 kb, 1.6 kb, 1.7 kb, 1.8 kb, 1.9 kb, 2 kb, 2.1 kb, 2.2 kb, 2.3 kb, 2.4 kb, 2.5 kb, 2.6 kb, 2.7 kb, 2.8 kb, 2.9 kb, 3 kb, 3.1 kb, 3.2 kb, 3.3 kb, 3.4 kb, 3.5 kb, 3.6 kb, 3.7 kb, or 3.8 kb. As a non-limiting example, the total length filler sequence in the vector genome is 3.1 kb. As a non-limiting example, the total length filler sequence in the vector genome is 2.7 kb. As a non-limiting example, the total length filler sequence in the vector genome is 0.8 kb. As a non-limiting example, the total length filler sequence in the vector genome is 0.4 kb. As a non-limiting example, the length of each filler sequence in the vector genome is 0.8 kb. As a non-limiting example, the length of each filler sequence in the vector genome is 0.4 kb.

[0227] In one embodiment, the viral genome is a self-complementary (sc) viral genome and comprises one or more filler sequences which have a length about between 0.1 kb-1.5 kb, such as, but not limited to, 0.1 kb, 0.2 kb, 0.3 kb, 0.4 kb, 0.5 kb, 0.6 kb, 0.7 kb, 0.8 kb, 0.9 kb, 1 kb, 1.1 kb, 1.2 kb, 1.3 kb, 1.4 kb, or 1.5 kb. As a non-limiting example, the total length filler sequence in the vector genome is 0.8 kb. As a non-limiting example, the total length filler sequence in the vector genome is 0.4 kb. As a non-limiting example, the length of each filler sequence in the vector genome is 0.8 kb. As a non-limiting example, the length of each filler sequence in the vector genome is 0.4 kb

[0228] In one embodiment, the viral genome comprises any portion of a filler sequence. The viral genome may comprise 1%, 2%, 3%, 4%, 5%, 6%, 7%, 8%, 9%, 10%, 15%, 20%, 25%, 30%, 35%, 40%, 45%, 50%, 55%, 60%, 65%, 70%, 75%, 80%, 85%, 90%, 95%, or 99% of a filler sequence.

[0229] In one embodiment, the viral genome is a single stranded (ss) viral genome and comprises one or more filler sequences in order to have the length of the viral genome be about 4.6 kb. As a non-limiting example, the viral genome comprises at least one filler sequence and the filler sequence is located 3′ to the 5′ ITR sequence. As a non-limiting example, the viral genome comprises at least one filler sequence and the filler sequence is located 5′ to a promoter sequence. As a non-limiting example, the viral genome comprises at least one filler sequence and the filler sequence is located 3′ to the polyadenylation signal sequence. As a non-limiting example, the viral genome comprises at least one filler sequence and the filler sequence is located 5′ to the 3′ ITR sequence. As a non-limiting example, the viral genome comprises at least one filler sequence, and the filler sequence is located between two intron sequences. As a non-limiting example, the viral genome comprises at least one filler sequence, and the filler sequence is located within an intron sequence. As a non-limiting example, the viral genome comprises two filler sequences, and the first filler sequence is located 3′ to the 5′ ITR sequence and the second filler sequence is located 3′ to the polyadenylation signal sequence. As a non-limiting example, the viral genome comprises two filler sequences, and the first filler sequence is located 5′ to a promoter sequence and the second filler sequence is located 3′ to the polyadenylation signal sequence. As a non-limiting example, the viral genome comprises two filler sequences, and the first filler sequence is located 3′ to the 5′ ITR sequence and the second filler sequence is located 5′ to the 5′ ITR sequence.

[0230] In one embodiment, the viral genome is a self-complementary (sc) viral genome and comprises one or more filler sequences in order to have the length of the viral genome be about 2.3 kb. As a non-limiting example, the viral genome comprises at least one filler sequence and the filler sequence is located 3′ to the 5′ ITR sequence. As a non-limiting example, the viral genome comprises at least one filler sequence and the filler sequence is located 5′ to a promoter sequence. As a non-limiting example, the viral genome comprises at least one filler sequence and the filler sequence is located 3′ to the polyadenylation signal sequence. As a non-limiting example, the viral genome comprises at least one filler sequence and the filler sequence is located 5′ to the 3′ ITR sequence. As a non-limiting example, the viral genome comprises at least one filler sequence, and the filler sequence is located between two intron sequences. As a non-limiting example, the viral genome comprises at least one filler sequence, and the filler sequence is located within an intron sequence. As a non-limiting example, the viral genome comprises two filler sequences, and the first filler sequence is located 3′ to the 5′ ITR sequence and the second filler sequence is located 3′ to the polyadenylation signal sequence. As a non-limiting example, the viral genome comprises two filler sequences, and the first filler sequence is located 5′ to a promoter sequence and the second filler sequence is located 3′ to the polyadenylation signal sequence. As a non-limiting example, the viral genome comprises two filler sequences, and the first filler sequence is located 3′ to the 5′ ITR sequence and the second filler sequence is located 5′ to the 5′ ITR sequence.

[0231] In one embodiment, the viral genome may comprise one or more filler sequences between one of more regions of the viral genome. In one embodiment, the filler region may be located before a region such as, but not limited to, a payload region, an inverted terminal repeat (ITR), a promoter region, an intron region, an enhancer region, a polyadenylation signal sequence region, a multiple cloning site (MCS) region, and/or an exon region. In one embodiment, the filler region may be located after a region such as, but not limited to, a payload region, an inverted terminal repeat (ITR), a promoter region, an intron region, an enhancer region, a polyadenylation signal sequence region, a multiple cloning site (MCS) region, and/or an exon region. In one embodiment, the filler region may be located before and after a region such as, but not limited to, a payload region, an inverted terminal repeat (ITR), a promoter region, an intron region, an enhancer region, a polyadenylation signal sequence region, a multiple cloning site (MCS) region, and/or an exon region.

[0232] In one embodiment, the viral genome may comprise one or more filler sequences which bifurcates at least one region of the viral genome. The bifurcated region of the viral genome may comprise 1%, 2%, 3%, 4%, 5%, 6%, 7%, 8%, 9%, 10%, 15%, 20%, 25%, 30%, 35%, 40%, 45%, 50%, 55%, 60%, 65%, 70%, 75%, 80%, 85%, 90%, 95%, or 99% of the of the region to the 5′ of the filler sequence region. As a non-limiting example, the filler sequence may bifurcate at least one region so that 10% of the region is located 5′ to the filler sequence and 90% of the region is located 3′ to the filler sequence. As a non-limiting example, the filler sequence may bifurcate at least one region so that 20% of the region is located 5′ to the filler sequence and 80% of the region is located 3′ to the filler sequence. As a non-limiting example, the filler sequence may bifurcate at least one region so that 30% of the region is located 5′ to the filler sequence and 70% of the region is located 3′ to the filler sequence. As a non-limiting example, the filler sequence may bifurcate at least one region so that 40% of the region is located 5′ to the filler sequence and 60% of the region is located 3′ to the filler sequence. As a non-limiting example, the filler sequence may bifurcate at least one region so that 50% of the region is located 5′ to the filler sequence and 50% of the region is located 3′ to the filler sequence. As a non-limiting example, the filler sequence may bifurcate at least one region so that 60% of the region is located 5′ to the filler sequence and 40% of the region is located 3′ to the filler sequence. As a non-limiting example, the filler sequence may bifurcate at least one region so that 70% of the region is located 5′ to the filler sequence and 30% of the region is located 3′ to the filler sequence. As a non-limiting example, the filler sequence may bifurcate at least one region so that 80% of the region is located 5′ to the filler sequence and 20% of the region is located 3′ to the filler sequence. As a non-limiting example, the filler sequence may bifurcate at least one region so that 90% of the region is located 5′ to the filler sequence and 10% of the region is located 3′ to the filler sequence.

[0233] In one embodiment, the viral genome comprises a filler sequence after the 5′ ITR.

[0234] In one embodiment, the viral genome comprises a filler sequence after the promoter region. In one embodiment, the viral genome comprises a filler sequence after the payload region. In one embodiment, the viral genome comprises a filler sequence after the intron region. In one embodiment, the viral genome comprises a filler sequence after the enhancer region. In one embodiment, the viral genome comprises a filler sequence after the polyadenylation signal sequence region. In one embodiment, the viral genome comprises a filler sequence after the MCS region. In one embodiment, the viral genome comprises a filler sequence after the exon region.

[0235] In one embodiment, the viral genome comprises a filler sequence before the promoter region. In one embodiment, the viral genome comprises a filler sequence before the payload region. In one embodiment, the viral genome comprises a filler sequence before the intron region. In one embodiment, the viral genome comprises a filler sequence before the enhancer region. In one embodiment, the viral genome comprises a filler sequence before the polyadenylation signal sequence region. In one embodiment, the viral genome comprises a filler sequence before the MCS region. In one embodiment, the viral genome comprises a filler sequence before the exon region.

[0236] In one embodiment, the viral genome comprises a filler sequence before the 3′ ITR.

[0237] In one embodiment, a filler sequence may be located between two regions, such as, but not limited to, the 5′ ITR and the promoter region. In one embodiment, a filler sequence may be located between two regions, such as, but not limited to, the 5′ ITR and the payload region. In one embodiment, a filler sequence may be located between two regions, such as, but not limited to, the 5′ ITR and the intron region. In one embodiment, a filler sequence may be located between two regions, such as, but not limited to, the 5′ ITR and the enhancer region. In one embodiment, a filler sequence may be located between two regions, such as, but not limited to, the 5′ ITR and the polyadenylation signal sequence region. In one embodiment, a filler sequence may be located between two regions, such as, but not limited to, the 5′ ITR and the MCS region.

[0238] In one embodiment, a filler sequence may be located between two regions, such as, but not limited to, the 5′ ITR and the exon region.

[0239] In one embodiment, a filler sequence may be located between two regions, such as, but not limited to, the promoter region and the payload region. In one embodiment, a filler sequence may be located between two regions, such as, but not limited to, the promoter region and the intron region. In one embodiment, a filler sequence may be located between two regions, such as, but not limited to, the promoter region and the enhancer region. In one embodiment, a filler sequence may be located between two regions, such as, but not limited to, the promoter region and the polyadenylation signal sequence region. In one embodiment, a filler sequence may be located between two regions, such as, but not limited to, the promoter region and the MCS region. In one embodiment, a filler sequence may be located between two regions, such as, but not limited to, the promoter region and the exon region. In one embodiment, a filler sequence may be located between two regions, such as, but not limited to, the promoter region and the 3′ ITR.

[0240] In one embodiment, a filler sequence may be located between two regions, such as, but not limited to, the payload region and the intron region. In one embodiment, a filler sequence may be located between two regions, such as, but not limited to, the payload region and the enhancer region. In one embodiment, a filler sequence may be located between two regions, such as, but not limited to, the payload region and the polyadenylation signal sequence region. In one embodiment, a filler sequence may be located between two regions, such as, but not limited to, the payload region and the MCS region. In one embodiment, a filler sequence may be located between two regions, such as, but not limited to, the payload region and the exon region.

[0241] In one embodiment, a filler sequence may be located between two regions, such as, but not limited to, the payload region and the 3′ ITR.

[0242] In one embodiment, a filler sequence may be located between two regions, such as, but not limited to, the intron region and the enhancer region. In one embodiment, a filler sequence may be located between two regions, such as, but not limited to, the intron region and the polyadenylation signal sequence region. In one embodiment, a filler sequence may be located between two regions, such as, but not limited to, the intron region and the MCS region. In one embodiment, a filler sequence may be located between two regions, such as, but not limited to, the intron region and the exon region. In one embodiment, a filler sequence may be located between two regions, such as, but not limited to, the intron region and the 3′ ITR. In one embodiment, a filler sequence may be located between two regions, such as, but not limited to, the enhancer region and the polyadenylation signal sequence region. In one embodiment, a filler sequence may be located between two regions, such as, but not limited to, the enhancer region and the MCS region. In one embodiment, a filler sequence may be located between two regions, such as, but not limited to, the enhancer region and the exon region. In one embodiment, a filler sequence may be located between two regions, such as, but not limited to, the enhancer region and the 3′ ITR.

[0243] In one embodiment, a filler sequence may be located between two regions, such as, but not limited to, the polyadenylation signal sequence region and the MCS region. In one embodiment, a filler sequence may be located between two regions, such as, but not limited to, the polyadenylation signal sequence region and the exon region. In one embodiment, a filler sequence may be located between two regions, such as, but not limited to, the polyadenylation signal sequence region and the 3′ ITR.

[0244] In one embodiment, a filler sequence may be located between two regions, such as, but not limited to, the MCS region and the exon region. In one embodiment, a filler sequence may be located between two regions, such as, but not limited to, the MCS region and the 3′ ITR.

[0245] In one embodiment, a filler sequence may be located between two regions, such as, but not limited to, the exon region and the 3′ ITR.

[0246] In one embodiment, a viral genome may comprise two filler sequences, the first filler sequence may be located between the 5′ ITR and promoter region, and the second filler sequence may be located between the promoter region and payload region. In one embodiment, a viral genome may comprise two filler sequences, the first filler sequence may be located between the 5′ ITR and promoter region, and the second filler sequence may be located between the promoter region and intron region. In one embodiment, a viral genome may comprise two filler sequences, the first filler sequence may be located between the 5′ ITR and promoter region, and the second filler sequence may be located between the promoter region and enhancer region. In one embodiment, a viral genome may comprise two filler sequences, the first filler sequence may be located between the 5′ ITR and promoter region, and the second filler sequence may be located between the promoter region and polyadenylation signal sequence region. In one embodiment, a viral genome may comprise two filler sequences, the first filler sequence may be located between the 5′ ITR and promoter region, and the second filler sequence may be located between the promoter region and MCS region. In one embodiment, a viral genome may comprise two filler sequences, the first filler sequence may be located between the 5′ ITR and promoter region, and the second filler sequence may be located between the promoter region and exon region. In one embodiment, a viral genome may comprise two filler sequences, the first filler sequence may be located between the 5′ ITR and promoter region, and the second filler sequence may be located between the promoter region and 3′ ITR. In one embodiment, a viral genome may comprise two filler sequences, the first filler sequence may be located between the 5′ ITR and promoter region, and the second filler sequence may be located between the payload region and intron region. In one embodiment, a viral genome may comprise two filler sequences, the first filler sequence may be located between the 5′ ITR and promoter region, and the second filler sequence may be located between the payload region and enhancer region. In one embodiment, a viral genome may comprise two filler sequences, the first filler sequence may be located between the 5′ ITR and promoter region, and the second filler sequence may be located between the payload region and polyadenylation signal sequence region. In one embodiment, a viral genome may comprise two filler sequences, the first filler sequence may be located between the 5′ ITR and promoter region, and the second filler sequence may be located between the payload region and MCS region. In one embodiment, a viral genome may comprise two filler sequences, the first filler sequence may be located between the 5′ ITR and promoter region, and the second filler sequence may be located between the payload region and exon region. In one embodiment, a viral genome may comprise two filler sequences, the first filler sequence may be located between the 5′ ITR and promoter region, and the second filler sequence may be located between the payload region and 3′ ITR. In one embodiment, a viral genome may comprise two filler sequences, the first filler sequence may be located between the 5′ ITR and promoter region, and the second filler sequence may be located between the intron region and enhancer region. In one embodiment, a viral genome may comprise two filler sequences, the first filler sequence may be located between the 5′ ITR and promoter region, and the second filler sequence may be located between the intron region and polyadenylation signal sequence region. In one embodiment, a viral genome may comprise two filler sequences, the first filler sequence may be located between the 5′ ITR and promoter region, and the second filler sequence may be located between the intron region and MCS region. In one embodiment, a viral genome may comprise two filler sequences, the first filler sequence may be located between the 5′ ITR and promoter region, and the second filler sequence may be located between the intron region and exon region. In one embodiment, a viral genome may comprise two filler sequences, the first filler sequence may be located between the 5′ ITR and promoter region, and the second filler sequence may be located between the intron region and 3′ ITR. In one embodiment, a viral genome may comprise two filler sequences, the first filler sequence may be located between the 5′ ITR and promoter region, and the second filler sequence may be located between the enhancer region and polyadenylation signal sequence region. In one embodiment, a viral genome may comprise two filler sequences, the first filler sequence may be located between the 5′ ITR and promoter region, and the second filler sequence may be located between the enhancer region and MCS region. In one embodiment, a viral genome may comprise two filler sequences, the first filler sequence may be located between the 5′ ITR and promoter region, and the second filler sequence may be located between the enhancer region and exon region. In one embodiment, a viral genome may comprise two filler sequences, the first filler sequence may be located between the 5′ ITR and promoter region, and the second filler sequence may be located between the enhancer region and 3′ ITR. In one embodiment, a viral genome may comprise two filler sequences, the first filler sequence may be located between the 5′ ITR and promoter region, and the second filler sequence may be located between the polyadenylation signal sequence region and MCS region. In one embodiment, a viral genome may comprise two filler sequences, the first filler sequence may be located between the 5′ ITR and promoter region, and the second filler sequence may be located between the polyadenylation signal sequence region and exon region. In one embodiment, a viral genome may comprise two filler sequences, the first filler sequence may be located between the 5′ ITR and promoter region, and the second filler sequence may be located between the polyadenylation signal sequence region and 3′ ITR. In one embodiment, a viral genome may comprise two filler sequences, the first filler sequence may be located between the 5′ ITR and promoter region, and the second filler sequence may be located between the MCS region and exon region. In one embodiment, a viral genome may comprise two filler sequences, the first filler sequence may be located between the 5′ ITR and promoter region, and the second filler sequence may be located between the MCS region and 3′ ITR. In one embodiment, a viral genome may comprise two filler sequences, the first filler sequence may be located between the 5′ ITR and promoter region, and the second filler sequence may be located between the exon region and 3′ ITR.

[0247] In one embodiment, a viral genome may comprise two filler sequences, the first filler sequence may be located between the 5′ ITR and payload region, and the second filler sequence may be located between the promoter region and payload region. In one embodiment, a viral genome may comprise two filler sequences, the first filler sequence may be located between the 5′ ITR and payload region, and the second filler sequence may be located between the promoter region and intron region. In one embodiment, a viral genome may comprise two filler sequences, the first filler sequence may be located between the 5′ ITR and payload region, and the second filler sequence may be located between the promoter region and enhancer region. In one embodiment, a viral genome may comprise two filler sequences, the first filler sequence may be located between the 5′ ITR and payload region, and the second filler sequence may be located between the promoter region and polyadenylation signal sequence region. In one embodiment, a viral genome may comprise two filler sequences, the first filler sequence may be located between the 5′ ITR and payload region, and the second filler sequence may be located between the promoter region and MCS region. In one embodiment, a viral genome may comprise two filler sequences, the first filler sequence may be located between the 5′ ITR and payload region, and the second filler sequence may be located between the promoter region and exon region. In one embodiment, a viral genome may comprise two filler sequences, the first filler sequence may be located between the 5′ ITR and payload region, and the second filler sequence may be located between the promoter region and 3′ ITR. In one embodiment, a viral genome may comprise two filler sequences, the first filler sequence may be located between the 5′ ITR and payload region, and the second filler sequence may be located between the payload region and intron region. In one embodiment, a viral genome may comprise two filler sequences, the first filler sequence may be located between the 5′ ITR and payload region, and the second filler sequence may be located between the payload region and enhancer region. In one embodiment, a viral genome may comprise two filler sequences, the first filler sequence may be located between the 5′ ITR and payload region, and the second filler sequence may be located between the payload region and polyadenylation signal sequence region. In one embodiment, a viral genome may comprise two filler sequences, the first filler sequence may be located between the 5′ ITR and payload region, and the second filler sequence may be located between the payload region and MCS region. In one embodiment, a viral genome may comprise two filler sequences, the first filler sequence may be located between the 5′ ITR and payload region, and the second filler sequence may be located between the payload region and exon region. In one embodiment, a viral genome may comprise two filler sequences, the first filler sequence may be located between the 5′ ITR and payload region, and the second filler sequence may be located between the payload region and 3′ ITR. In one embodiment, a viral genome may comprise two filler sequences, the first filler sequence may be located between the 5′ ITR and payload region, and the second filler sequence may be located between the intron region and enhancer region. In one embodiment, a viral genome may comprise two filler sequences, the first filler sequence may be located between the 5′ ITR and payload region, and the second filler sequence may be located between the intron region and polyadenylation signal sequence region. In one embodiment, a viral genome may comprise two filler sequences, the first filler sequence may be located between the 5′ ITR and payload region, and the second filler sequence may be located between the intron region and MCS region. In one embodiment, a viral genome may comprise two filler sequences, the first filler sequence may be located between the 5′ ITR and payload region, and the second filler sequence may be located between the intron region and exon region. In one embodiment, a viral genome may comprise two filler sequences, the first filler sequence may be located between the 5′ ITR and payload region, and the second filler sequence may be located between the intron region and 3′ ITR. In one embodiment, a viral genome may comprise two filler sequences, the first filler sequence may be located between the 5′ ITR and payload region, and the second filler sequence may be located between the enhancer region and polyadenylation signal sequence region. In one embodiment, a viral genome may comprise two filler sequences, the first filler sequence may be located between the 5′ ITR and payload region, and the second filler sequence may be located between the enhancer region and MCS region. In one embodiment, a viral genome may comprise two filler sequences, the first filler sequence may be located between the 5′ ITR and payload region, and the second filler sequence may be located between the enhancer region and exon region. In one embodiment, a viral genome may comprise two filler sequences, the first filler sequence may be located between the 5′ ITR and payload region, and the second filler sequence may be located between the enhancer region and 3′ ITR. In one embodiment, a viral genome may comprise two filler sequences, the first filler sequence may be located between the 5′ ITR and payload region, and the second filler sequence may be located between the polyadenylation signal sequence region and MCS region. In one embodiment, a viral genome may comprise two filler sequences, the first filler sequence may be located between the 5′ ITR and payload region, and the second filler sequence may be located between the polyadenylation signal sequence region and exon region. In one embodiment, a viral genome may comprise two filler sequences, the first filler sequence may be located between the 5′ ITR and payload region, and the second filler sequence may be located between the polyadenylation signal sequence region and 3′ ITR. In one embodiment, a viral genome may comprise two filler sequences, the first filler sequence may be located between the 5′ ITR and payload region, and the second filler sequence may be located between the MCS region and exon region. In one embodiment, a viral genome may comprise two filler sequences, the first filler sequence may be located between the 5′ ITR and payload region, and the second filler sequence may be located between the MCS region and 3′ ITR. In one embodiment, a viral genome may comprise two filler sequences, the first filler sequence may be located between the 5′ ITR and payload region, and the second filler sequence may be located between the exon region and 3′ ITR.

[0248] In one embodiment, a viral genome may comprise two filler sequences, the first filler sequence may be located between the 5′ ITR and intron region, and the second filler sequence may be located between the promoter region and payload region. In one embodiment, a viral genome may comprise two filler sequences, the first filler sequence may be located between the 5′ ITR and intron region, and the second filler sequence may be located between the promoter region and intron region. In one embodiment, a viral genome may comprise two filler sequences, the first filler sequence may be located between the 5′ ITR and intron region, and the second filler sequence may be located between the promoter region and enhancer region. In one embodiment, a viral genome may comprise two filler sequences, the first filler sequence may be located between the 5′ ITR and intron region, and the second filler sequence may be located between the promoter region and polyadenylation signal sequence region. In one embodiment, a viral genome may comprise two filler sequences, the first filler sequence may be located between the 5′ ITR and intron region, and the second filler sequence may be located between the promoter region and MCS region. In one embodiment, a viral genome may comprise two filler sequences, the first filler sequence may be located between the 5′ ITR and intron region, and the second filler sequence may be located between the promoter region and exon region. In one embodiment, a viral genome may comprise two filler sequences, the first filler sequence may be located between the 5′ ITR and intron region, and the second filler sequence may be located between the promoter region and 3′ ITR. In one embodiment, a viral genome may comprise two filler sequences, the first filler sequence may be located between the 5′ ITR and intron region, and the second filler sequence may be located between the payload region and intron region. In one embodiment, a viral genome may comprise two filler sequences, the first filler sequence may be located between the 5′ ITR and intron region, and the second filler sequence may be located between the payload region and enhancer region. In one embodiment, a viral genome may comprise two filler sequences, the first filler sequence may be located between the 5′ ITR and intron region, and the second filler sequence may be located between the payload region and polyadenylation signal sequence region. In one embodiment, a viral genome may comprise two filler sequences, the first filler sequence may be located between the 5′ ITR and intron region, and the second filler sequence may be located between the payload region and MCS region. In one embodiment, a viral genome may comprise two filler sequences, the first filler sequence may be located between the 5′ ITR and intron region, and the second filler sequence may be located between the payload region and exon region. In one embodiment, a viral genome may comprise two filler sequences, the first filler sequence may be located between the 5′ ITR and intron region, and the second filler sequence may be located between the payload region and 3′ ITR. In one embodiment, a viral genome may comprise two filler sequences, the first filler sequence may be located between the 5′ ITR and intron region, and the second filler sequence may be located between the intron region and enhancer region. In one embodiment, a viral genome may comprise two filler sequences, the first filler sequence may be located between the 5′ ITR and intron region, and the second filler sequence may be located between the intron region and polyadenylation signal sequence region. In one embodiment, a viral genome may comprise two filler sequences, the first filler sequence may be located between the 5′ ITR and intron region, and the second filler sequence may be located between the intron region and MCS region. In one embodiment, a viral genome may comprise two filler sequences, the first filler sequence may be located between the 5′ ITR and intron region, and the second filler sequence may be located between the intron region and exon region. In one embodiment, a viral genome may comprise two filler sequences, the first filler sequence may be located between the 5′ ITR and intron region, and the second filler sequence may be located between the intron region and 3′ ITR. In one embodiment, a viral genome may comprise two filler sequences, the first filler sequence may be located between the 5′ ITR and intron region, and the second filler sequence may be located between the enhancer region and polyadenylation signal sequence region. In one embodiment, a viral genome may comprise two filler sequences, the first filler sequence may be located between the 5′ ITR and intron region, and the second filler sequence may be located between the enhancer region and MCS region. In one embodiment, a viral genome may comprise two filler sequences, the first filler sequence may be located between the 5′ ITR and intron region, and the second filler sequence may be located between the enhancer region and exon region. In one embodiment, a viral genome may comprise two filler sequences, the first filler sequence may be located between the 5′ ITR and intron region, and the second filler sequence may be located between the enhancer region and 3′ ITR. In one embodiment, a viral genome may comprise two filler sequences, the first filler sequence may be located between the 5′ ITR and intron region, and the second filler sequence may be located between the polyadenylation signal sequence region and MCS region. In one embodiment, a viral genome may comprise two filler sequences, the first filler sequence may be located between the 5′ ITR and intron region, and the second filler sequence may be located between the polyadenylation signal sequence region and exon region. In one embodiment, a viral genome may comprise two filler sequences, the first filler sequence may be located between the 5′ ITR and intron region, and the second filler sequence may be located between the polyadenylation signal sequence region and 3′ ITR. In one embodiment, a viral genome may comprise two filler sequences, the first filler sequence may be located between the 5′ ITR and intron region, and the second filler sequence may be located between the MCS region and exon region. In one embodiment, a viral genome may comprise two filler sequences, the first filler sequence may be located between the 5′ ITR and intron region, and the second filler sequence may be located between the MCS region and 3′ ITR. In one embodiment, a viral genome may comprise two filler sequences, the first filler sequence may be located between the 5′ ITR and intron region, and the second filler sequence may be located between the exon region and 3′ ITR.

[0249] In one embodiment, a viral genome may comprise two filler sequences, the first filler sequence may be located between the 5′ ITR and enhancer region, and the second filler sequence may be located between the promoter region and payload region. In one embodiment, a viral genome may comprise two filler sequences, the first filler sequence may be located between the 5′ ITR and enhancer region, and the second filler sequence may be located between the promoter region and intron region. In one embodiment, a viral genome may comprise two filler sequences, the first filler sequence may be located between the 5′ ITR and enhancer region, and the second filler sequence may be located between the promoter region and enhancer region. In one embodiment, a viral genome may comprise two filler sequences, the first filler sequence may be located between the 5′ ITR and enhancer region, and the second filler sequence may be located between the promoter region and polyadenylation signal sequence region. In one embodiment, a viral genome may comprise two filler sequences, the first filler sequence may be located between the 5′ ITR and enhancer region, and the second filler sequence may be located between the promoter region and MCS region. In one embodiment, a viral genome may comprise two filler sequences, the first filler sequence may be located between the 5′ ITR and enhancer region, and the second filler sequence may be located between the promoter region and exon region. In one embodiment, a viral genome may comprise two filler sequences, the first filler sequence may be located between the 5′ ITR and enhancer region, and the second filler sequence may be located between the promoter region and 3′ ITR. In one embodiment, a viral genome may comprise two filler sequences, the first filler sequence may be located between the 5′ ITR and enhancer region, and the second filler sequence may be located between the payload region and intron region. In one embodiment, a viral genome may comprise two filler sequences, the first filler sequence may be located between the 5′ ITR and enhancer region, and the second filler sequence may be located between the payload region and enhancer region. In one embodiment, a viral genome may comprise two filler sequences, the first filler sequence may be located between the 5′ ITR and enhancer region, and the second filler sequence may be located between the payload region and polyadenylation signal sequence region. In one embodiment, a viral genome may comprise two filler sequences, the first filler sequence may be located between the 5′ ITR and enhancer region, and the second filler sequence may be located between the payload region and MCS region. In one embodiment, a viral genome may comprise two filler sequences, the first filler sequence may be located between the 5′ ITR and enhancer region, and the second filler sequence may be located between the payload region and exon region. In one embodiment, a viral genome may comprise two filler sequences, the first filler sequence may be located between the 5′ ITR and enhancer region, and the second filler sequence may be located between the payload region and 3′ ITR. In one embodiment, a viral genome may comprise two filler sequences, the first filler sequence may be located between the 5′ ITR and enhancer region, and the second filler sequence may be located between the intron region and enhancer region. In one embodiment, a viral genome may comprise two filler sequences, the first filler sequence may be located between the 5′ ITR and enhancer region, and the second filler sequence may be located between the intron region and polyadenylation signal sequence region. In one embodiment, a viral genome may comprise two filler sequences, the first filler sequence may be located between the 5′ ITR and enhancer region, and the second filler sequence may be located between the intron region and MCS region. In one embodiment, a viral genome may comprise two filler sequences, the first filler sequence may be located between the 5′ ITR and enhancer region, and the second filler sequence may be located between the intron region and exon region. In one embodiment, a viral genome may comprise two filler sequences, the first filler sequence may be located between the 5′ ITR and enhancer region, and the second filler sequence may be located between the intron region and 3′ ITR. In one embodiment, a viral genome may comprise two filler sequences, the first filler sequence may be located between the 5′ ITR and enhancer region, and the second filler sequence may be located between the enhancer region and polyadenylation signal sequence region. In one embodiment, a viral genome may comprise two filler sequences, the first filler sequence may be located between the 5′ ITR and enhancer region, and the second filler sequence may be located between the enhancer region and MCS region. In one embodiment, a viral genome may comprise two filler sequences, the first filler sequence may be located between the 5′ ITR and enhancer region, and the second filler sequence may be located between the enhancer region and exon region. In one embodiment, a viral genome may comprise two filler sequences, the first filler sequence may be located between the 5′ ITR and enhancer region, and the second filler sequence may be located between the enhancer region and 3′ ITR. In one embodiment, a viral genome may comprise two filler sequences, the first filler sequence may be located between the 5′ ITR and enhancer region, and the second filler sequence may be located between the polyadenylation signal sequence region and MCS region. In one embodiment, a viral genome may comprise two filler sequences, the first filler sequence may be located between the 5′ ITR and enhancer region, and the second filler sequence may be located between the polyadenylation signal sequence region and exon region. In one embodiment, a viral genome may comprise two filler sequences, the first filler sequence may be located between the 5′ ITR and enhancer region, and the second filler sequence may be located between the polyadenylation signal sequence region and 3′ ITR. In one embodiment, a viral genome may comprise two filler sequences, the first filler sequence may be located between the 5′ ITR and enhancer region, and the second filler sequence may be located between the MCS region and exon region. In one embodiment, a viral genome may comprise two filler sequences, the first filler sequence may be located between the 5′ ITR and enhancer region, and the second filler sequence may be located between the MCS region and 3′ ITR. In one embodiment, a viral genome may comprise two filler sequences, the first filler sequence may be located between the 5′ ITR and enhancer region, and the second filler sequence may be located between the exon region and 3′ ITR.

[0250] In one embodiment, a viral genome may comprise two filler sequences, the first filler sequence may be located between the 5′ ITR and polyadenylation signal sequence region, and the second filler sequence may be located between the promoter region and payload region. In one embodiment, a viral genome may comprise two filler sequences, the first filler sequence may be located between the 5′ ITR and polyadenylation signal sequence region, and the second filler sequence may be located between the promoter region and intron region. In one embodiment, a viral genome may comprise two filler sequences, the first filler sequence may be located between the 5′ ITR and polyadenylation signal sequence region, and the second filler sequence may be located between the promoter region and enhancer region. In one embodiment, a viral genome may comprise two filler sequences, the first filler sequence may be located between the 5′ ITR and polyadenylation signal sequence region, and the second filler sequence may be located between the promoter region and polyadenylation signal sequence region. In one embodiment, a viral genome may comprise two filler sequences, the first filler sequence may be located between the 5′ ITR and polyadenylation signal sequence region, and the second filler sequence may be located between the promoter region and MCS region. In one embodiment, a viral genome may comprise two filler sequences, the first filler sequence may be located between the 5′ ITR and polyadenylation signal sequence region, and the second filler sequence may be located between the promoter region and exon region. In one embodiment, a viral genome may comprise two filler sequences, the first filler sequence may be located between the 5′ ITR and polyadenylation signal sequence region, and the second filler sequence may be located between the promoter region and 3′ ITR. In one embodiment, a viral genome may comprise two filler sequences, the first filler sequence may be located between the 5′ ITR and polyadenylation signal sequence region, and the second filler sequence may be located between the payload region and intron region. In one embodiment, a viral genome may comprise two filler sequences, the first filler sequence may be located between the 5′ ITR and polyadenylation signal sequence region, and the second filler sequence may be located between the payload region and enhancer region. In one embodiment, a viral genome may comprise two filler sequences, the first filler sequence may be located between the 5′ ITR and polyadenylation signal sequence region, and the second filler sequence may be located between the payload region and polyadenylation signal sequence region. In one embodiment, a viral genome may comprise two filler sequences, the first filler sequence may be located between the 5′ ITR and polyadenylation signal sequence region, and the second filler sequence may be located between the payload region and MCS region. In one embodiment, a viral genome may comprise two filler sequences, the first filler sequence may be located between the 5′ ITR and polyadenylation signal sequence region, and the second filler sequence may be located between the payload region and exon region. In one embodiment, a viral genome may comprise two filler sequences, the first filler sequence may be located between the 5′ ITR and polyadenylation signal sequence region, and the second filler sequence may be located between the payload region and 3′ ITR. In one embodiment, a viral genome may comprise two filler sequences, the first filler sequence may be located between the 5′ ITR and polyadenylation signal sequence region, and the second filler sequence may be located between the intron region and enhancer region. In one embodiment, a viral genome may comprise two filler sequences, the first filler sequence may be located between the 5′ ITR and polyadenylation signal sequence region, and the second filler sequence may be located between the intron region and polyadenylation signal sequence region. In one embodiment, a viral genome may comprise two filler sequences, the first filler sequence may be located between the 5′ ITR and polyadenylation signal sequence region, and the second filler sequence may be located between the intron region and MCS region. In one embodiment, a viral genome may comprise two filler sequences, the first filler sequence may be located between the 5′ ITR and polyadenylation signal sequence region, and the second filler sequence may be located between the intron region and exon region. In one embodiment, a viral genome may comprise two filler sequences, the first filler sequence may be located between the 5′ ITR and polyadenylation signal sequence region, and the second filler sequence may be located between the intron region and 3′ ITR. In one embodiment, a viral genome may comprise two filler sequences, the first filler sequence may be located between the 5′ ITR and polyadenylation signal sequence region, and the second filler sequence may be located between the enhancer region and polyadenylation signal sequence region. In one embodiment, a viral genome may comprise two filler sequences, the first filler sequence may be located between the 5′ ITR and polyadenylation signal sequence region, and the second filler sequence may be located between the enhancer region and MCS region. In one embodiment, a viral genome may comprise two filler sequences, the first filler sequence may be located between the 5′ ITR and polyadenylation signal sequence region, and the second filler sequence may be located between the enhancer region and exon region. In one embodiment, a viral genome may comprise two filler sequences, the first filler sequence may be located between the 5′ ITR and polyadenylation signal sequence region, and the second filler sequence may be located between the enhancer region and 3′ ITR. In one embodiment, a viral genome may comprise two filler sequences, the first filler sequence may be located between the 5′ ITR and polyadenylation signal sequence region, and the second filler sequence may be located between the polyadenylation signal sequence region and MCS region. In one embodiment, a viral genome may comprise two filler sequences, the first filler sequence may be located between the 5′ ITR and polyadenylation signal sequence region, and the second filler sequence may be located between the polyadenylation signal sequence region and exon region. In one embodiment, a viral genome may comprise two filler sequences, the first filler sequence may be located between the 5′ ITR and polyadenylation signal sequence region, and the second filler sequence may be located between the polyadenylation signal sequence region and 3′ ITR. In one embodiment, a viral genome may comprise two filler sequences, the first filler sequence may be located between the 5′ ITR and polyadenylation signal sequence region, and the second filler sequence may be located between the MCS region and exon region. In one embodiment, a viral genome may comprise two filler sequences, the first filler sequence may be located between the 5′ ITR and polyadenylation signal sequence region, and the second filler sequence may be located between the MCS region and 3′ ITR. In one embodiment, a viral genome may comprise two filler sequences, the first filler sequence may be located between the 5′ ITR and polyadenylation signal sequence region, and the second filler sequence may be located between the exon region and 3′ ITR.

[0251] In one embodiment, a viral genome may comprise two filler sequences, the first filler sequence may be located between the 5′ ITR and MCS region, and the second filler sequence may be located between the promoter region and payload region. In one embodiment, a viral genome may comprise two filler sequences, the first filler sequence may be located between the 5′ ITR and MCS region, and the second filler sequence may be located between the promoter region and intron region. In one embodiment, a viral genome may comprise two filler sequences, the first filler sequence may be located between the 5′ ITR and MCS region, and the second filler sequence may be located between the promoter region and enhancer region. In one embodiment, a viral genome may comprise two filler sequences, the first filler sequence may be located between the 5′ ITR and MCS region, and the second filler sequence may be located between the promoter region and polyadenylation signal sequence region. In one embodiment, a viral genome may comprise two filler sequences, the first filler sequence may be located between the 5′ ITR and MCS region, and the second filler sequence may be located between the promoter region and MCS region. In one embodiment, a viral genome may comprise two filler sequences, the first filler sequence may be located between the 5′ ITR and MCS region, and the second filler sequence may be located between the promoter region and exon region. In one embodiment, a viral genome may comprise two filler sequences, the first filler sequence may be located between the 5′ ITR and MCS region, and the second filler sequence may be located between the promoter region and 3′ ITR. In one embodiment, a viral genome may comprise two filler sequences, the first filler sequence may be located between the 5′ ITR and MCS region, and the second filler sequence may be located between the payload region and intron region. In one embodiment, a viral genome may comprise two filler sequences, the first filler sequence may be located between the 5′ ITR and MCS region, and the second filler sequence may be located between the payload region and enhancer region. In one embodiment, a viral genome may comprise two filler sequences, the first filler sequence may be located between the 5′ ITR and MCS region, and the second filler sequence may be located between the payload region and polyadenylation signal sequence region. In one embodiment, a viral genome may comprise two filler sequences, the first filler sequence may be located between the 5′ ITR and MCS region, and the second filler sequence may be located between the payload region and MCS region. In one embodiment, a viral genome may comprise two filler sequences, the first filler sequence may be located between the 5′ ITR and MCS region, and the second filler sequence may be located between the payload region and exon region. In one embodiment, a viral genome may comprise two filler sequences, the first filler sequence may be located between the 5′ ITR and MCS region, and the second filler sequence may be located between the payload region and 3′ ITR. In one embodiment, a viral genome may comprise two filler sequences, the first filler sequence may be located between the 5′ ITR and MCS region, and the second filler sequence may be located between the intron region and enhancer region. In one embodiment, a viral genome may comprise two filler sequences, the first filler sequence may be located between the 5′ ITR and MCS region, and the second filler sequence may be located between the intron region and polyadenylation signal sequence region. In one embodiment, a viral genome may comprise two filler sequences, the first filler sequence may be located between the 5′ ITR and MCS region, and the second filler sequence may be located between the intron region and MCS region. In one embodiment, a viral genome may comprise two filler sequences, the first filler sequence may be located between the 5′ ITR and MCS region, and the second filler sequence may be located between the intron region and exon region. In one embodiment, a viral genome may comprise two filler sequences, the first filler sequence may be located between the 5′ ITR and MCS region, and the second filler sequence may be located between the intron region and 3′ ITR. In one embodiment, a viral genome may comprise two filler sequences, the first filler sequence may be located between the 5′ ITR and MCS region, and the second filler sequence may be located between the enhancer region and polyadenylation signal sequence region. In one embodiment, a viral genome may comprise two filler sequences, the first filler sequence may be located between the 5′ ITR and MCS region, and the second filler sequence may be located between the enhancer region and MCS region. In one embodiment, a viral genome may comprise two filler sequences, the first filler sequence may be located between the 5′ ITR and MCS region, and the second filler sequence may be located between the enhancer region and exon region. In one embodiment, a viral genome may comprise two filler sequences, the first filler sequence may be located between the 5′ ITR and MCS region, and the second filler sequence may be located between the enhancer region and 3′ ITR. In one embodiment, a viral genome may comprise two filler sequences, the first filler sequence may be located between the 5′ ITR and MCS region, and the second filler sequence may be located between the polyadenylation signal sequence region and MCS region. In one embodiment, a viral genome may comprise two filler sequences, the first filler sequence may be located between the 5′ ITR and MCS region, and the second filler sequence may be located between the polyadenylation signal sequence region and exon region. In one embodiment, a viral genome may comprise two filler sequences, the first filler sequence may be located between the 5′ ITR and MCS region, and the second filler sequence may be located between the polyadenylation signal sequence region and 3′ ITR. In one embodiment, a viral genome may comprise two filler sequences, the first filler sequence may be located between the 5′ ITR and MCS region, and the second filler sequence may be located between the MCS region and exon region. In one embodiment, a viral genome may comprise two filler sequences, the first filler sequence may be located between the 5′ ITR and MCS region, and the second filler sequence may be located between the MCS region and 3′ ITR. In one embodiment, a viral genome may comprise two filler sequences, the first filler sequence may be located between the 5′ ITR and MCS region, and the second filler sequence may be located between the exon region and 3′ ITR.

[0252] In one embodiment, a viral genome may comprise two filler sequences, the first filler sequence may be located between the 5′ ITR and exon region, and the second filler sequence may be located between the promoter region and payload region. In one embodiment, a viral genome may comprise two filler sequences, the first filler sequence may be located between the 5′ ITR and exon region, and the second filler sequence may be located between the promoter region and intron region. In one embodiment, a viral genome may comprise two filler sequences, the first filler sequence may be located between the 5′ ITR and exon region, and the second filler sequence may be located between the promoter region and enhancer region. In one embodiment, a viral genome may comprise two filler sequences, the first filler sequence may be located between the 5′ ITR and exon region, and the second filler sequence may be located between the promoter region and polyadenylation signal sequence region. In one embodiment, a viral genome may comprise two filler sequences, the first filler sequence may be located between the 5′ ITR and exon region, and the second filler sequence may be located between the promoter region and MCS region. In one embodiment, a viral genome may comprise two filler sequences, the first filler sequence may be located between the 5′ ITR and exon region, and the second filler sequence may be located between the promoter region and exon region. In one embodiment, a viral genome may comprise two filler sequences, the first filler sequence may be located between the 5′ ITR and exon region, and the second filler sequence may be located between the promoter region and 3′ ITR. In one embodiment, a viral genome may comprise two filler sequences, the first filler sequence may be located between the 5′ ITR and exon region, and the second filler sequence may be located between the payload region and intron region. In one embodiment, a viral genome may comprise two filler sequences, the first filler sequence may be located between the 5′ ITR and exon region, and the second filler sequence may be located between the payload region and enhancer region. In one embodiment, a viral genome may comprise two filler sequences, the first filler sequence may be located between the 5′ ITR and exon region, and the second filler sequence may be located between the payload region and polyadenylation signal sequence region. In one embodiment, a viral genome may comprise two filler sequences, the first filler sequence may be located between the 5′ ITR and exon region, and the second filler sequence may be located between the payload region and MCS region. In one embodiment, a viral genome may comprise two filler sequences, the first filler sequence may be located between the 5′ ITR and exon region, and the second filler sequence may be located between the payload region and exon region. In one embodiment, a viral genome may comprise two filler sequences, the first filler sequence may be located between the 5′ ITR and exon region, and the second filler sequence may be located between the payload region and 3′ ITR. In one embodiment, a viral genome may comprise two filler sequences, the first filler sequence may be located between the 5′ ITR and exon region, and the second filler sequence may be located between the intron region and enhancer region. In one embodiment, a viral genome may comprise two filler sequences, the first filler sequence may be located between the 5′ ITR and exon region, and the second filler sequence may be located between the intron region and polyadenylation signal sequence region. In one embodiment, a viral genome may comprise two filler sequences, the first filler sequence may be located between the 5′ ITR and exon region, and the second filler sequence may be located between the intron region and MCS region. In one embodiment, a viral genome may comprise two filler sequences, the first filler sequence may be located between the 5′ ITR and exon region, and the second filler sequence may be located between the intron region and exon region. In one embodiment, a viral genome may comprise two filler sequences, the first filler sequence may be located between the 5′ ITR and exon region, and the second filler sequence may be located between the intron region and 3′ ITR. In one embodiment, a viral genome may comprise two filler sequences, the first filler sequence may be located between the 5′ ITR and exon region, and the second filler sequence may be located between the enhancer region and polyadenylation signal sequence region. In one embodiment, a viral genome may comprise two filler sequences, the first filler sequence may be located between the 5′ ITR and exon region, and the second filler sequence may be located between the enhancer region and MCS region. In one embodiment, a viral genome may comprise two filler sequences, the first filler sequence may be located between the 5′ ITR and exon region, and the second filler sequence may be located between the enhancer region and exon region. In one embodiment, a viral genome may comprise two filler sequences, the first filler sequence may be located between the 5′ ITR and exon region, and the second filler sequence may be located between the enhancer region and 3′ ITR. In one embodiment, a viral genome may comprise two filler sequences, the first filler sequence may be located between the 5′ ITR and exon region, and the second filler sequence may be located between the polyadenylation signal sequence region and MCS region. In one embodiment, a viral genome may comprise two filler sequences, the first filler sequence may be located between the 5′ ITR and exon region, and the second filler sequence may be located between the polyadenylation signal sequence region and exon region. In one embodiment, a viral genome may comprise two filler sequences, the first filler sequence may be located between the 5′ ITR and exon region, and the second filler sequence may be located between the polyadenylation signal sequence region and 3′ ITR. In one embodiment, a viral genome may comprise two filler sequences, the first filler sequence may be located between the 5′ ITR and exon region, and the second filler sequence may be located between the MCS region and exon region. In one embodiment, a viral genome may comprise two filler sequences, the first filler sequence may be located between the 5′ ITR and exon region, and the second filler sequence may be located between the MCS region and 3′ ITR. In one embodiment, a viral genome may comprise two filler sequences, the first filler sequence may be located between the 5′ ITR and exon region, and the second filler sequence may be located between the exon region and 3′ ITR.

[0253] In one embodiment, a viral genome may comprise two filler sequences, the first filler sequence may be located between the promoter region and payload region, and the second filler sequence may be located between the payload region and intron region. In one embodiment, a viral genome may comprise two filler sequences, the first filler sequence may be located between the promoter region and payload region, and the second filler sequence may be located between the payload region and enhancer region. In one embodiment, a viral genome may comprise two filler sequences, the first filler sequence may be located between the promoter region and payload region, and the second filler sequence may be located between the payload region and polyadenylation signal sequence region. In one embodiment, a viral genome may comprise two filler sequences, the first filler sequence may be located between the promoter region and payload region, and the second filler sequence may be located between the payload region and MCS region. In one embodiment, a viral genome may comprise two filler sequences, the first filler sequence may be located between the promoter region and payload region, and the second filler sequence may be located between the payload region and exon region. In one embodiment, a viral genome may comprise two filler sequences, the first filler sequence may be located between the promoter region and payload region, and the second filler sequence may be located between the payload region and 3′ ITR. In one embodiment, a viral genome may comprise two filler sequences, the first filler sequence may be located between the promoter region and payload region, and the second filler sequence may be located between the intron region and enhancer region. In one embodiment, a viral genome may comprise two filler sequences, the first filler sequence may be located between the promoter region and payload region, and the second filler sequence may be located between the intron region and polyadenylation signal sequence region. In one embodiment, a viral genome may comprise two filler sequences, the first filler sequence may be located between the promoter region and payload region, and the second filler sequence may be located between the intron region and MCS region. In one embodiment, a viral genome may comprise two filler sequences, the first filler sequence may be located between the promoter region and payload region, and the second filler sequence may be located between the intron region and exon region. In one embodiment, a viral genome may comprise two filler sequences, the first filler sequence may be located between the promoter region and payload region, and the second filler sequence may be located between the intron region and 3′ ITR. In one embodiment, a viral genome may comprise two filler sequences, the first filler sequence may be located between the promoter region and payload region, and the second filler sequence may be located between the enhancer region and polyadenylation signal sequence region. In one embodiment, a viral genome may comprise two filler sequences, the first filler sequence may be located between the promoter region and payload region, and the second filler sequence may be located between the enhancer region and MCS region. In one embodiment, a viral genome may comprise two filler sequences, the first filler sequence may be located between the promoter region and payload region, and the second filler sequence may be located between the enhancer region and exon region. In one embodiment, a viral genome may comprise two filler sequences, the first filler sequence may be located between the promoter region and payload region, and the second filler sequence may be located between the enhancer region and 3′ ITR. In one embodiment, a viral genome may comprise two filler sequences, the first filler sequence may be located between the promoter region and payload region, and the second filler sequence may be located between the polyadenylation signal sequence region and MCS region. In one embodiment, a viral genome may comprise two filler sequences, the first filler sequence may be located between the promoter region and payload region, and the second filler sequence may be located between the polyadenylation signal sequence region and exon region. In one embodiment, a viral genome may comprise two filler sequences, the first filler sequence may be located between the promoter region and payload region, and the second filler sequence may be located between the polyadenylation signal sequence region and 3′ ITR. In one embodiment, a viral genome may comprise two filler sequences, the first filler sequence may be located between the promoter region and payload region, and the second filler sequence may be located between the MCS region and exon region. In one embodiment, a viral genome may comprise two filler sequences, the first filler sequence may be located between the promoter region and payload region, and the second filler sequence may be located between the MCS region and 3′ ITR. In one embodiment, a viral genome may comprise two filler sequences, the first filler sequence may be located between the promoter region and payload region, and the second filler sequence may be located between the exon region and 3′ ITR.

[0254] In one embodiment, a viral genome may comprise two filler sequences, the first filler sequence may be located between the promoter region and intron region, and the second filler sequence may be located between the payload region and intron region. In one embodiment, a viral genome may comprise two filler sequences, the first filler sequence may be located between the promoter region and intron region, and the second filler sequence may be located between the payload region and enhancer region. In one embodiment, a viral genome may comprise two filler sequences, the first filler sequence may be located between the promoter region and intron region, and the second filler sequence may be located between the payload region and polyadenylation signal sequence region. In one embodiment, a viral genome may comprise two filler sequences, the first filler sequence may be located between the promoter region and intron region, and the second filler sequence may be located between the payload region and MCS region. In one embodiment, a viral genome may comprise two filler sequences, the first filler sequence may be located between the promoter region and intron region, and the second filler sequence may be located between the payload region and exon region. In one embodiment, a viral genome may comprise two filler sequences, the first filler sequence may be located between the promoter region and intron region, and the second filler sequence may be located between the payload region and 3′ ITR. In one embodiment, a viral genome may comprise two filler sequences, the first filler sequence may be located between the promoter region and intron region, and the second filler sequence may be located between the intron region and enhancer region. In one embodiment, a viral genome may comprise two filler sequences, the first filler sequence may be located between the promoter region and intron region, and the second filler sequence may be located between the intron region and polyadenylation signal sequence region. In one embodiment, a viral genome may comprise two filler sequences, the first filler sequence may be located between the promoter region and intron region, and the second filler sequence may be located between the intron region and MCS region. In one embodiment, a viral genome may comprise two filler sequences, the first filler sequence may be located between the promoter region and intron region, and the second filler sequence may be located between the intron region and exon region. In one embodiment, a viral genome may comprise two filler sequences, the first filler sequence may be located between the promoter region and intron region, and the second filler sequence may be located between the intron region and 3′ ITR. In one embodiment, a viral genome may comprise two filler sequences, the first filler sequence may be located between the promoter region and intron region, and the second filler sequence may be located between the enhancer region and polyadenylation signal sequence region. In one embodiment, a viral genome may comprise two filler sequences, the first filler sequence may be located between the promoter region and intron region, and the second filler sequence may be located between the enhancer region and MCS region. In one embodiment, a viral genome may comprise two filler sequences, the first filler sequence may be located between the promoter region and intron region, and the second filler sequence may be located between the enhancer region and exon region. In one embodiment, a viral genome may comprise two filler sequences, the first filler sequence may be located between the promoter region and intron region, and the second filler sequence may be located between the enhancer region and 3′ ITR. In one embodiment, a viral genome may comprise two filler sequences, the first filler sequence may be located between the promoter region and intron region, and the second filler sequence may be located between the polyadenylation signal sequence region and MCS region. In one embodiment, a viral genome may comprise two filler sequences, the first filler sequence may be located between the promoter region and intron region, and the second filler sequence may be located between the polyadenylation signal sequence region and exon region. In one embodiment, a viral genome may comprise two filler sequences, the first filler sequence may be located between the promoter region and intron region, and the second filler sequence may be located between the polyadenylation signal sequence region and 3′ ITR. In one embodiment, a viral genome may comprise two filler sequences, the first filler sequence may be located between the promoter region and intron region, and the second filler sequence may be located between the MCS region and exon region. In one embodiment, a viral genome may comprise two filler sequences, the first filler sequence may be located between the promoter region and intron region, and the second filler sequence may be located between the MCS region and 3′ ITR. In one embodiment, a viral genome may comprise two filler sequences, the first filler sequence may be located between the promoter region and intron region, and the second filler sequence may be located between the exon region and 3′ ITR.

[0255] In one embodiment, a viral genome may comprise two filler sequences, the first filler sequence may be located between the promoter region and enhancer region, and the second filler sequence may be located between the payload region and intron region. In one embodiment, a viral genome may comprise two filler sequences, the first filler sequence may be located between the promoter region and enhancer region, and the second filler sequence may be located between the payload region and enhancer region. In one embodiment, a viral genome may comprise two filler sequences, the first filler sequence may be located between the promoter region and enhancer region, and the second filler sequence may be located between the payload region and polyadenylation signal sequence region. In one embodiment, a viral genome may comprise two filler sequences, the first filler sequence may be located between the promoter region and enhancer region, and the second filler sequence may be located between the payload region and MCS region. In one embodiment, a viral genome may comprise two filler sequences, the first filler sequence may be located between the promoter region and enhancer region, and the second filler sequence may be located between the payload region and exon region. In one embodiment, a viral genome may comprise two filler sequences, the first filler sequence may be located between the promoter region and enhancer region, and the second filler sequence may be located between the payload region and 3′ ITR. In one embodiment, a viral genome may comprise two filler sequences, the first filler sequence may be located between the promoter region and enhancer region, and the second filler sequence may be located between the intron region and enhancer region. In one embodiment, a viral genome may comprise two filler sequences, the first filler sequence may be located between the promoter region and enhancer region, and the second filler sequence may be located between the intron region and polyadenylation signal sequence region. In one embodiment, a viral genome may comprise two filler sequences, the first filler sequence may be located between the promoter region and enhancer region, and the second filler sequence may be located between the intron region and MCS region. In one embodiment, a viral genome may comprise two filler sequences, the first filler sequence may be located between the promoter region and enhancer region, and the second filler sequence may be located between the intron region and exon region. In one embodiment, a viral genome may comprise two filler sequences, the first filler sequence may be located between the promoter region and enhancer region, and the second filler sequence may be located between the intron region and 3′ ITR. In one embodiment, a viral genome may comprise two filler sequences, the first filler sequence may be located between the promoter region and enhancer region, and the second filler sequence may be located between the enhancer region and polyadenylation signal sequence region. In one embodiment, a viral genome may comprise two filler sequences, the first filler sequence may be located between the promoter region and enhancer region, and the second filler sequence may be located between the enhancer region and MCS region. In one embodiment, a viral genome may comprise two filler sequences, the first filler sequence may be located between the promoter region and enhancer region, and the second filler sequence may be located between the enhancer region and exon region. In one embodiment, a viral genome may comprise two filler sequences, the first filler sequence may be located between the promoter region and enhancer region, and the second filler sequence may be located between the enhancer region and 3′ ITR. In one embodiment, a viral genome may comprise two filler sequences, the first filler sequence may be located between the promoter region and enhancer region, and the second filler sequence may be located between the polyadenylation signal sequence region and MCS region. In one embodiment, a viral genome may comprise two filler sequences, the first filler sequence may be located between the promoter region and enhancer region, and the second filler sequence may be located between the polyadenylation signal sequence region and exon region. In one embodiment, a viral genome may comprise two filler sequences, the first filler sequence may be located between the promoter region and enhancer region, and the second filler sequence may be located between the polyadenylation signal sequence region and 3′ ITR. In one embodiment, a viral genome may comprise two filler sequences, the first filler sequence may be located between the promoter region and enhancer region, and the second filler sequence may be located between the MCS region and exon region. In one embodiment, a viral genome may comprise two filler sequences, the first filler sequence may be located between the promoter region and enhancer region, and the second filler sequence may be located between the MCS region and 3′ ITR. In one embodiment, a viral genome may comprise two filler sequences, the first filler sequence may be located between the promoter region and enhancer region, and the second filler sequence may be located between the exon region and 3′ ITR.

[0256] In one embodiment, a viral genome may comprise two filler sequences, the first filler sequence may be located between the promoter region and polyadenylation signal sequence region, and the second filler sequence may be located between the payload region and intron region. In one embodiment, a viral genome may comprise two filler sequences, the first filler sequence may be located between the promoter region and polyadenylation signal sequence region, and the second filler sequence may be located between the payload region and enhancer region. In one embodiment, a viral genome may comprise two filler sequences, the first filler sequence may be located between the promoter region and polyadenylation signal sequence region, and the second filler sequence may be located between the payload region and polyadenylation signal sequence region. In one embodiment, a viral genome may comprise two filler sequences, the first filler sequence may be located between the promoter region and polyadenylation signal sequence region, and the second filler sequence may be located between the payload region and MCS region. In one embodiment, a viral genome may comprise two filler sequences, the first filler sequence may be located between the promoter region and polyadenylation signal sequence region, and the second filler sequence may be located between the payload region and exon region. In one embodiment, a viral genome may comprise two filler sequences, the first filler sequence may be located between the promoter region and polyadenylation signal sequence region, and the second filler sequence may be located between the payload region and 3′ ITR. In one embodiment, a viral genome may comprise two filler sequences, the first filler sequence may be located between the promoter region and polyadenylation signal sequence region, and the second filler sequence may be located between the intron region and enhancer region. In one embodiment, a viral genome may comprise two filler sequences, the first filler sequence may be located between the promoter region and polyadenylation signal sequence region, and the second filler sequence may be located between the intron region and polyadenylation signal sequence region. In one embodiment, a viral genome may comprise two filler sequences, the first filler sequence may be located between the promoter region and polyadenylation signal sequence region, and the second filler sequence may be located between the intron region and MCS region. In one embodiment, a viral genome may comprise two filler sequences, the first filler sequence may be located between the promoter region and polyadenylation signal sequence region, and the second filler sequence may be located between the intron region and exon region. In one embodiment, a viral genome may comprise two filler sequences, the first filler sequence may be located between the promoter region and polyadenylation signal sequence region, and the second filler sequence may be located between the intron region and 3′ ITR. In one embodiment, a viral genome may comprise two filler sequences, the first filler sequence may be located between the promoter region and polyadenylation signal sequence region, and the second filler sequence may be located between the enhancer region and polyadenylation signal sequence region. In one embodiment, a viral genome may comprise two filler sequences, the first filler sequence may be located between the promoter region and polyadenylation signal sequence region, and the second filler sequence may be located between the enhancer region and MCS region. In one embodiment, a viral genome may comprise two filler sequences, the first filler sequence may be located between the promoter region and polyadenylation signal sequence region, and the second filler sequence may be located between the enhancer region and exon region. In one embodiment, a viral genome may comprise two filler sequences, the first filler sequence may be located between the promoter region and polyadenylation signal sequence region, and the second filler sequence may be located between the enhancer region and 3′ ITR. In one embodiment, a viral genome may comprise two filler sequences, the first filler sequence may be located between the promoter region and polyadenylation signal sequence region, and the second filler sequence may be located between the polyadenylation signal sequence region and MCS region. In one embodiment, a viral genome may comprise two filler sequences, the first filler sequence may be located between the promoter region and polyadenylation signal sequence region, and the second filler sequence may be located between the polyadenylation signal sequence region and exon region. In one embodiment, a viral genome may comprise two filler sequences, the first filler sequence may be located between the promoter region and polyadenylation signal sequence region, and the second filler sequence may be located between the polyadenylation signal sequence region and 3′ ITR. In one embodiment, a viral genome may comprise two filler sequences, the first filler sequence may be located between the promoter region and polyadenylation signal sequence region, and the second filler sequence may be located between the MCS region and exon region. In one embodiment, a viral genome may comprise two filler sequences, the first filler sequence may be located between the promoter region and polyadenylation signal sequence region, and the second filler sequence may be located between the MCS region and 3′ ITR. In one embodiment, a viral genome may comprise two filler sequences, the first filler sequence may be located between the promoter region and polyadenylation signal sequence region, and the second filler sequence may be located between the exon region and 3′ ITR.

[0257] In one embodiment, a viral genome may comprise two filler sequences, the first filler sequence may be located between the promoter region and exon region, and the second filler sequence may be located between the payload region and intron region. In one embodiment, a viral genome may comprise two filler sequences, the first filler sequence may be located between the promoter region and exon region, and the second filler sequence may be located between the payload region and enhancer region. In one embodiment, a viral genome may comprise two filler sequences, the first filler sequence may be located between the promoter region and exon region, and the second filler sequence may be located between the payload region and polyadenylation signal sequence region. In one embodiment, a viral genome may comprise two filler sequences, the first filler sequence may be located between the promoter region and exon region, and the second filler sequence may be located between the payload region and MCS region. In one embodiment, a viral genome may comprise two filler sequences, the first filler sequence may be located between the promoter region and exon region, and the second filler sequence may be located between the payload region and exon region. In one embodiment, a viral genome may comprise two filler sequences, the first filler sequence may be located between the promoter region and exon region, and the second filler sequence may be located between the payload region and 3′ ITR. In one embodiment, a viral genome may comprise two filler sequences, the first filler sequence may be located between the promoter region and exon region, and the second filler sequence may be located between the intron region and enhancer region. In one embodiment, a viral genome may comprise two filler sequences, the first filler sequence may be located between the promoter region and exon region, and the second filler sequence may be located between the intron region and polyadenylation signal sequence region. In one embodiment, a viral genome may comprise two filler sequences, the first filler sequence may be located between the promoter region and exon region, and the second filler sequence may be located between the intron region and MCS region. In one embodiment, a viral genome may comprise two filler sequences, the first filler sequence may be located between the promoter region and exon region, and the second filler sequence may be located between the intron region and exon region. In one embodiment, a viral genome may comprise two filler sequences, the first filler sequence may be located between the promoter region and exon region, and the second filler sequence may be located between the intron region and 3′ ITR. In one embodiment, a viral genome may comprise two filler sequences, the first filler sequence may be located between the promoter region and exon region, and the second filler sequence may be located between the enhancer region and polyadenylation signal sequence region. In one embodiment, a viral genome may comprise two filler sequences, the first filler sequence may be located between the promoter region and exon region, and the second filler sequence may be located between the enhancer region and MCS region. In one embodiment, a viral genome may comprise two filler sequences, the first filler sequence may be located between the promoter region and exon region, and the second filler sequence may be located between the enhancer region and exon region. In one embodiment, a viral genome may comprise two filler sequences, the first filler sequence may be located between the promoter region and exon region, and the second filler sequence may be located between the enhancer region and 3′ ITR. In one embodiment, a viral genome may comprise two filler sequences, the first filler sequence may be located between the promoter region and exon region, and the second filler sequence may be located between the polyadenylation signal sequence region and MCS region. In one embodiment, a viral genome may comprise two filler sequences, the first filler sequence may be located between the promoter region and exon region, and the second filler sequence may be located between the polyadenylation signal sequence region and exon region. In one embodiment, a viral genome may comprise two filler sequences, the first filler sequence may be located between the promoter region and exon region, and the second filler sequence may be located between the polyadenylation signal sequence region and 3′ ITR. In one embodiment, a viral genome may comprise two filler sequences, the first filler sequence may be located between the promoter region and exon region, and the second filler sequence may be located between the MCS region and exon region. In one embodiment, a viral genome may comprise two filler sequences, the first filler sequence may be located between the promoter region and exon region, and the second filler sequence may be located between the MCS region and 3′ ITR. In one embodiment, a viral genome may comprise two filler sequences, the first filler sequence may be located between the promoter region and exon region, and the second filler sequence may be located between the exon region and 3′ ITR.

[0258] In one embodiment, a viral genome may comprise two filler sequences, the first filler sequence may be located between the promoter region and MCS region, and the second filler sequence may be located between the payload region and intron region. In one embodiment, a viral genome may comprise two filler sequences, the first filler sequence may be located between the promoter region and MCS region, and the second filler sequence may be located between the payload region and enhancer region. In one embodiment, a viral genome may comprise two filler sequences, the first filler sequence may be located between the promoter region and MCS region, and the second filler sequence may be located between the payload region and polyadenylation signal sequence region. In one embodiment, a viral genome may comprise two filler sequences, the first filler sequence may be located between the promoter region and MCS region, and the second filler sequence may be located between the payload region and MCS region. In one embodiment, a viral genome may comprise two filler sequences, the first filler sequence may be located between the promoter region and MCS region, and the second filler sequence may be located between the payload region and exon region. In one embodiment, a viral genome may comprise two filler sequences, the first filler sequence may be located between the promoter region and MCS region, and the second filler sequence may be located between the payload region and 3′ ITR. In one embodiment, a viral genome may comprise two filler sequences, the first filler sequence may be located between the promoter region and MCS region, and the second filler sequence may be located between the intron region and enhancer region. In one embodiment, a viral genome may comprise two filler sequences, the first filler sequence may be located between the promoter region and MCS region, and the second filler sequence may be located between the intron region and polyadenylation signal sequence region. In one embodiment, a viral genome may comprise two filler sequences, the first filler sequence may be located between the promoter region and MCS region, and the second filler sequence may be located between the intron region and MCS region. In one embodiment, a viral genome may comprise two filler sequences, the first filler sequence may be located between the promoter region and MCS region, and the second filler sequence may be located between the intron region and exon region. In one embodiment, a viral genome may comprise two filler sequences, the first filler sequence may be located between the promoter region and MCS region, and the second filler sequence may be located between the intron region and 3′ ITR. In one embodiment, a viral genome may comprise two filler sequences, the first filler sequence may be located between the promoter region and MCS region, and the second filler sequence may be located between the enhancer region and polyadenylation signal sequence region. In one embodiment, a viral genome may comprise two filler sequences, the first filler sequence may be located between the promoter region and MCS region, and the second filler sequence may be located between the enhancer region and MCS region. In one embodiment, a viral genome may comprise two filler sequences, the first filler sequence may be located between the promoter region and MCS region, and the second filler sequence may be located between the enhancer region and exon region. In one embodiment, a viral genome may comprise two filler sequences, the first filler sequence may be located between the promoter region and MCS region, and the second filler sequence may be located between the enhancer region and 3′ ITR. In one embodiment, a viral genome may comprise two filler sequences, the first filler sequence may be located between the promoter region and MCS region, and the second filler sequence may be located between the polyadenylation signal sequence region and MCS region. In one embodiment, a viral genome may comprise two filler sequences, the first filler sequence may be located between the promoter region and MCS region, and the second filler sequence may be located between the polyadenylation signal sequence region and exon region. In one embodiment, a viral genome may comprise two filler sequences, the first filler sequence may be located between the promoter region and MCS region, and the second filler sequence may be located between the polyadenylation signal sequence region and 3′ ITR. In one embodiment, a viral genome may comprise two filler sequences, the first filler sequence may be located between the promoter region and MCS region, and the second filler sequence may be located between the MCS region and exon region. In one embodiment, a viral genome may comprise two filler sequences, the first filler sequence may be located between the promoter region and MCS region, and the second filler sequence may be located between the MCS region and 3′ ITR. In one embodiment, a viral genome may comprise two filler sequences, the first filler sequence may be located between the promoter region and MCS region, and the second filler sequence may be located between the exon region and 3′ ITR.

[0259] In one embodiment, a viral genome may comprise two filler sequences, the first filler sequence may be located between the promoter region and 3′ITR, and the second filler sequence may be located between the payload region and intron region. In one embodiment, a viral genome may comprise two filler sequences, the first filler sequence may be located between the promoter region and 3′ITR, and the second filler sequence may be located between the payload region and enhancer region. In one embodiment, a viral genome may comprise two filler sequences, the first filler sequence may be located between the promoter region and 3′ITR, and the second filler sequence may be located between the payload region and polyadenylation signal sequence region. In one embodiment, a viral genome may comprise two filler sequences, the first filler sequence may be located between the promoter region and 3′ITR, and the second filler sequence may be located between the payload region and MCS region. In one embodiment, a viral genome may comprise two filler sequences, the first filler sequence may be located between the promoter region and 3′ITR, and the second filler sequence may be located between the payload region and exon region. In one embodiment, a viral genome may comprise two filler sequences, the first filler sequence may be located between the promoter region and 3′ITR, and the second filler sequence may be located between the payload region and 3′ ITR. In one embodiment, a viral genome may comprise two filler sequences, the first filler sequence may be located between the promoter region and 3′ITR, and the second filler sequence may be located between the intron region and enhancer region. In one embodiment, a viral genome may comprise two filler sequences, the first filler sequence may be located between the promoter region and 3′ITR, and the second filler sequence may be located between the intron region and polyadenylation signal sequence region. In one embodiment, a viral genome may comprise two filler sequences, the first filler sequence may be located between the promoter region and 3′ITR, and the second filler sequence may be located between the intron region and MCS region. In one embodiment, a viral genome may comprise two filler sequences, the first filler sequence may be located between the promoter region and 3′ITR, and the second filler sequence may be located between the intron region and exon region. In one embodiment, a viral genome may comprise two filler sequences, the first filler sequence may be located between the promoter region and 3′ITR, and the second filler sequence may be located between the intron region and 3′ ITR. In one embodiment, a viral genome may comprise two filler sequences, the first filler sequence may be located between the promoter region and 3′ITR, and the second filler sequence may be located between the enhancer region and polyadenylation signal sequence region. In one embodiment, a viral genome may comprise two filler sequences, the first filler sequence may be located between the promoter region and 3′ITR, and the second filler sequence may be located between the enhancer region and MCS region. In one embodiment, a viral genome may comprise two filler sequences, the first filler sequence may be located between the promoter region and 3′ITR, and the second filler sequence may be located between the enhancer region and exon region. In one embodiment, a viral genome may comprise two filler sequences, the first filler sequence may be located between the promoter region and 3′ITR, and the second filler sequence may be located between the enhancer region and 3′ ITR. In one embodiment, a viral genome may comprise two filler sequences, the first filler sequence may be located between the promoter region and 3′ITR, and the second filler sequence may be located between the polyadenylation signal sequence region and MCS region. In one embodiment, a viral genome may comprise two filler sequences, the first filler sequence may be located between the promoter region and 3′ITR, and the second filler sequence may be located between the polyadenylation signal sequence region and exon region. In one embodiment, a viral genome may comprise two filler sequences, the first filler sequence may be located between the promoter region and 3′ITR, and the second filler sequence may be located between the polyadenylation signal sequence region and 3′ ITR. In one embodiment, a viral genome may comprise two filler sequences, the first filler sequence may be located between the promoter region and 3′ITR, and the second filler sequence may be located between the MCS region and exon region. In one embodiment, a viral genome may comprise two filler sequences, the first filler sequence may be located between the promoter region and 3′ITR, and the second filler sequence may be located between the MCS region and 3′ ITR. In one embodiment, a viral genome may comprise two filler sequences, the first filler sequence may be located between the promoter region and 3′ITR, and the second filler sequence may be located between the exon region and 3′ ITR.

[0260] In one embodiment, a viral genome may comprise two filler sequences, the first filler sequence may be located between the payload region and intron region, and the second filler sequence may be located between the intron region and enhancer region. In one embodiment, a viral genome may comprise two filler sequences, the first filler sequence may be located between the payload region and intron region, and the second filler sequence may be located between the intron region and polyadenylation signal sequence region. In one embodiment, a viral genome may comprise two filler sequences, the first filler sequence may be located between the payload region and intron region, and the second filler sequence may be located between the intron region and MCS region. In one embodiment, a viral genome may comprise two filler sequences, the first filler sequence may be located between the payload region and intron region, and the second filler sequence may be located between the intron region and exon region. In one embodiment, a viral genome may comprise two filler sequences, the first filler sequence may be located between the payload region and intron region, and the second filler sequence may be located between the intron region and 3′ ITR. In one embodiment, a viral genome may comprise two filler sequences, the first filler sequence may be located between the payload region and intron region, and the second filler sequence may be located between the enhancer region and polyadenylation signal sequence region. In one embodiment, a viral genome may comprise two filler sequences, the first filler sequence may be located between the payload region and intron region, and the second filler sequence may be located between the enhancer region and MCS region. In one embodiment, a viral genome may comprise two filler sequences, the first filler sequence may be located between the payload region and intron region, and the second filler sequence may be located between the enhancer region and exon region. In one embodiment, a viral genome may comprise two filler sequences, the first filler sequence may be located between the payload region and intron region, and the second filler sequence may be located between the enhancer region and 3′ ITR. In one embodiment, a viral genome may comprise two filler sequences, the first filler sequence may be located between the payload region and intron region, and the second filler sequence may be located between the polyadenylation signal sequence region and MCS region. In one embodiment, a viral genome may comprise two filler sequences, the first filler sequence may be located between the payload region and intron region, and the second filler sequence may be located between the polyadenylation signal sequence region and exon region. In one embodiment, a viral genome may comprise two filler sequences, the first filler sequence may be located between the payload region and intron region, and the second filler sequence may be located between the polyadenylation signal sequence region and 3′ ITR. In one embodiment, a viral genome may comprise two filler sequences, the first filler sequence may be located between the payload region and intron region, and the second filler sequence may be located between the MCS region and exon region. In one embodiment, a viral genome may comprise two filler sequences, the first filler sequence may be located between the payload region and intron region, and the second filler sequence may be located between the MCS region and 3′ ITR. In one embodiment, a viral genome may comprise two filler sequences, the first filler sequence may be located between the payload region and intron region, and the second filler sequence may be located between the exon region and 3′ ITR.

[0261] In one embodiment, a viral genome may comprise two filler sequences, the first filler sequence may be located between the payload region and enhancer region, and the second filler sequence may be located between the intron region and enhancer region. In one embodiment, a viral genome may comprise two filler sequences, the first filler sequence may be located between the payload region and enhancer region, and the second filler sequence may be located between the intron region and polyadenylation signal sequence region. In one embodiment, a viral genome may comprise two filler sequences, the first filler sequence may be located between the payload region and enhancer region, and the second filler sequence may be located between the intron region and MCS region. In one embodiment, a viral genome may comprise two filler sequences, the first filler sequence may be located between the payload region and enhancer region, and the second filler sequence may be located between the intron region and exon region. In one embodiment, a viral genome may comprise two filler sequences, the first filler sequence may be located between the payload region and enhancer region, and the second filler sequence may be located between the intron region and 3′ ITR. In one embodiment, a viral genome may comprise two filler sequences, the first filler sequence may be located between the payload region and enhancer region, and the second filler sequence may be located between the enhancer region and polyadenylation signal sequence region. In one embodiment, a viral genome may comprise two filler sequences, the first filler sequence may be located between the payload region and enhancer region, and the second filler sequence may be located between the enhancer region and MCS region. In one embodiment, a viral genome may comprise two filler sequences, the first filler sequence may be located between the payload region and enhancer region, and the second filler sequence may be located between the enhancer region and exon region. In one embodiment, a viral genome may comprise two filler sequences, the first filler sequence may be located between the payload region and enhancer region, and the second filler sequence may be located between the enhancer region and 3′ ITR. In one embodiment, a viral genome may comprise two filler sequences, the first filler sequence may be located between the payload region and enhancer region, and the second filler sequence may be located between the polyadenylation signal sequence region and MCS region. In one embodiment, a viral genome may comprise two filler sequences, the first filler sequence may be located between the payload region and enhancer region, and the second filler sequence may be located between the polyadenylation signal sequence region and exon region. In one embodiment, a viral genome may comprise two filler sequences, the first filler sequence may be located between the payload region and enhancer region, and the second filler sequence may be located between the polyadenylation signal sequence region and 3′ ITR. In one embodiment, a viral genome may comprise two filler sequences, the first filler sequence may be located between the payload region and enhancer region, and the second filler sequence may be located between the MCS region and exon region. In one embodiment, a viral genome may comprise two filler sequences, the first filler sequence may be located between the payload region and enhancer region, and the second filler sequence may be located between the MCS region and 3′ ITR. In one embodiment, a viral genome may comprise two filler sequences, the first filler sequence may be located between the payload region and enhancer region, and the second filler sequence may be located between the exon region and 3′ ITR.

[0262] In one embodiment, a viral genome may comprise two filler sequences, the first filler sequence may be located between the payload region and polyadenylation signal sequence region, and the second filler sequence may be located between the intron region and enhancer region. In one embodiment, a viral genome may comprise two filler sequences, the first filler sequence may be located between the payload region and polyadenylation signal sequence region, and the second filler sequence may be located between the intron region and polyadenylation signal sequence region. In one embodiment, a viral genome may comprise two filler sequences, the first filler sequence may be located between the payload region and polyadenylation signal sequence region, and the second filler sequence may be located between the intron region and MCS region. In one embodiment, a viral genome may comprise two filler sequences, the first filler sequence may be located between the payload region and polyadenylation signal sequence region, and the second filler sequence may be located between the intron region and exon region. In one embodiment, a viral genome may comprise two filler sequences, the first filler sequence may be located between the payload region and polyadenylation signal sequence region, and the second filler sequence may be located between the intron region and 3′ ITR. In one embodiment, a viral genome may comprise two filler sequences, the first filler sequence may be located between the payload region and polyadenylation signal sequence region, and the second filler sequence may be located between the enhancer region and polyadenylation signal sequence region. In one embodiment, a viral genome may comprise two filler sequences, the first filler sequence may be located between the payload region and polyadenylation signal sequence region, and the second filler sequence may be located between the enhancer region and MCS region. In one embodiment, a viral genome may comprise two filler sequences, the first filler sequence may be located between the payload region and polyadenylation signal sequence region, and the second filler sequence may be located between the enhancer region and exon region. In one embodiment, a viral genome may comprise two filler sequences, the first filler sequence may be located between the payload region and polyadenylation signal sequence region, and the second filler sequence may be located between the enhancer region and 3′ ITR. In one embodiment, a viral genome may comprise two filler sequences, the first filler sequence may be located between the payload region and polyadenylation signal sequence region, and the second filler sequence may be located between the polyadenylation signal sequence region and MCS region. In one embodiment, a viral genome may comprise two filler sequences, the first filler sequence may be located between the payload region and polyadenylation signal sequence region, and the second filler sequence may be located between the polyadenylation signal sequence region and exon region. In one embodiment, a viral genome may comprise two filler sequences, the first filler sequence may be located between the payload region and polyadenylation signal sequence region, and the second filler sequence may be located between the polyadenylation signal sequence region and 3′ ITR. In one embodiment, a viral genome may comprise two filler sequences, the first filler sequence may be located between the payload region and polyadenylation signal sequence region, and the second filler sequence may be located between the MCS region and exon region. In one embodiment, a viral genome may comprise two filler sequences, the first filler sequence may be located between the payload region and polyadenylation signal sequence region, and the second filler sequence may be located between the MCS region and 3′ ITR. In one embodiment, a viral genome may comprise two filler sequences, the first filler sequence may be located between the payload region and polyadenylation signal sequence region, and the second filler sequence may be located between the exon region and 3′ ITR.

[0263] In one embodiment, a viral genome may comprise two filler sequences, the first filler sequence may be located between the payload region and MCS region, and the second filler sequence may be located between the intron region and enhancer region. In one embodiment, a viral genome may comprise two filler sequences, the first filler sequence may be located between the payload region and MCS region, and the second filler sequence may be located between the intron region and polyadenylation signal sequence region. In one embodiment, a viral genome may comprise two filler sequences, the first filler sequence may be located between the payload region and MCS region, and the second filler sequence may be located between the intron region and MCS region. In one embodiment, a viral genome may comprise two filler sequences, the first filler sequence may be located between the payload region and MCS region, and the second filler sequence may be located between the intron region and exon region. In one embodiment, a viral genome may comprise two filler sequences, the first filler sequence may be located between the payload region and MCS region, and the second filler sequence may be located between the intron region and 3′ ITR. In one embodiment, a viral genome may comprise two filler sequences, the first filler sequence may be located between the payload region and MCS region, and the second filler sequence may be located between the enhancer region and polyadenylation signal sequence region. In one embodiment, a viral genome may comprise two filler sequences, the first filler sequence may be located between the payload region and MCS region, and the second filler sequence may be located between the enhancer region and MCS region. In one embodiment, a viral genome may comprise two filler sequences, the first filler sequence may be located between the payload region and MCS region, and the second filler sequence may be located between the enhancer region and exon region. In one embodiment, a viral genome may comprise two filler sequences, the first filler sequence may be located between the payload region and MCS region, and the second filler sequence may be located between the enhancer region and 3′ ITR. In one embodiment, a viral genome may comprise two filler sequences, the first filler sequence may be located between the payload region and MCS region, and the second filler sequence may be located between the polyadenylation signal sequence region and MCS region. In one embodiment, a viral genome may comprise two filler sequences, the first filler sequence may be located between the payload region and MCS region, and the second filler sequence may be located between the polyadenylation signal sequence region and exon region. In one embodiment, a viral genome may comprise two filler sequences, the first filler sequence may be located between the payload region and MCS region, and the second filler sequence may be located between the polyadenylation signal sequence region and 3′ ITR. In one embodiment, a viral genome may comprise two filler sequences, the first filler sequence may be located between the payload region and MCS region, and the second filler sequence may be located between the MCS region and exon region. In one embodiment, a viral genome may comprise two filler sequences, the first filler sequence may be located between the payload region and MCS region, and the second filler sequence may be located between the MCS region and 3′ ITR. In one embodiment, a viral genome may comprise two filler sequences, the first filler sequence may be located between the payload region and MCS region, and the second filler sequence may be located between the exon region and 3′ ITR.

[0264] In one embodiment, a viral genome may comprise two filler sequences, the first filler sequence may be located between the payload region and exon region, and the second filler sequence may be located between the intron region and enhancer region. In one embodiment, a viral genome may comprise two filler sequences, the first filler sequence may be located between the payload region and exon region, and the second filler sequence may be located between the intron region and polyadenylation signal sequence region. In one embodiment, a viral genome may comprise two filler sequences, the first filler sequence may be located between the payload region and exon region, and the second filler sequence may be located between the intron region and MCS region. In one embodiment, a viral genome may comprise two filler sequences, the first filler sequence may be located between the payload region and exon region, and the second filler sequence may be located between the intron region and exon region. In one embodiment, a viral genome may comprise two filler sequences, the first filler sequence may be located between the payload region and exon region, and the second filler sequence may be located between the intron region and 3′ ITR. In one embodiment, a viral genome may comprise two filler sequences, the first filler sequence may be located between the payload region and exon region, and the second filler sequence may be located between the enhancer region and polyadenylation signal sequence region. In one embodiment, a viral genome may comprise two filler sequences, the first filler sequence may be located between the payload region and exon region, and the second filler sequence may be located between the enhancer region and MCS region. In one embodiment, a viral genome may comprise two filler sequences, the first filler sequence may be located between the payload region and exon region, and the second filler sequence may be located between the enhancer region and exon region. In one embodiment, a viral genome may comprise two filler sequences, the first filler sequence may be located between the payload region and exon region, and the second filler sequence may be located between the enhancer region and 3′ ITR. In one embodiment, a viral genome may comprise two filler sequences, the first filler sequence may be located between the payload region and exon region, and the second filler sequence may be located between the polyadenylation signal sequence region and MCS region. In one embodiment, a viral genome may comprise two filler sequences, the first filler sequence may be located between the payload region and exon region, and the second filler sequence may be located between the polyadenylation signal sequence region and exon region. In one embodiment, a viral genome may comprise two filler sequences, the first filler sequence may be located between the payload region and exon region, and the second filler sequence may be located between the polyadenylation signal sequence region and 3′ ITR. In one embodiment, a viral genome may comprise two filler sequences, the first filler sequence may be located between the payload region and exon region, and the second filler sequence may be located between the MCS region and exon region. In one embodiment, a viral genome may comprise two filler sequences, the first filler sequence may be located between the payload region and exon region, and the second filler sequence may be located between the MCS region and 3′ ITR. In one embodiment, a viral genome may comprise two filler sequences, the first filler sequence may be located between the payload region and exon region, and the second filler sequence may be located between the exon region and 3′ ITR.

[0265] In one embodiment, a viral genome may comprise two filler sequences, the first filler sequence may be located between the payload region and 3′ ITR region, and the second filler sequence may be located between the intron region and enhancer region. In one embodiment, a viral genome may comprise two filler sequences, the first filler sequence may be located between the payload region and 3′ ITR region, and the second filler sequence may be located between the intron region and polyadenylation signal sequence region. In one embodiment, a viral genome may comprise two filler sequences, the first filler sequence may be located between the payload region and 3′ ITR region, and the second filler sequence may be located between the intron region and MCS region. In one embodiment, a viral genome may comprise two filler sequences, the first filler sequence may be located between the payload region and 3′ ITR region, and the second filler sequence may be located between the intron region and exon region. In one embodiment, a viral genome may comprise two filler sequences, the first filler sequence may be located between the payload region and 3′ ITR region, and the second filler sequence may be located between the intron region and 3′ ITR. In one embodiment, a viral genome may comprise two filler sequences, the first filler sequence may be located between the payload region and 3′ ITR region, and the second filler sequence may be located between the enhancer region and polyadenylation signal sequence region. In one embodiment, a viral genome may comprise two filler sequences, the first filler sequence may be located between the payload region and 3′ ITR region, and the second filler sequence may be located between the enhancer region and MCS region. In one embodiment, a viral genome may comprise two filler sequences, the first filler sequence may be located between the payload region and 3′ ITR region, and the second filler sequence may be located between the enhancer region and exon region. In one embodiment, a viral genome may comprise two filler sequences, the first filler sequence may be located between the payload region and 3′ ITR region, and the second filler sequence may be located between the enhancer region and 3′ ITR. In one embodiment, a viral genome may comprise two filler sequences, the first filler sequence may be located between the payload region and 3′ ITR region, and the second filler sequence may be located between the polyadenylation signal sequence region and MCS region. In one embodiment, a viral genome may comprise two filler sequences, the first filler sequence may be located between the payload region and 3′ ITR region, and the second filler sequence may be located between the polyadenylation signal sequence region and exon region. In one embodiment, a viral genome may comprise two filler sequences, the first filler sequence may be located between the payload region and 3′ ITR region, and the second filler sequence may be located between the polyadenylation signal sequence region and 3′ ITR. In one embodiment, a viral genome may comprise two filler sequences, the first filler sequence may be located between the payload region and 3′ ITR region, and the second filler sequence may be located between the MCS region and exon region. In one embodiment, a viral genome may comprise two filler sequences, the first filler sequence may be located between the payload region and 3′ ITR region, and the second filler sequence may be located between the MCS region and 3′ ITR. In one embodiment, a viral genome may comprise two filler sequences, the first filler sequence may be located between the payload region and 3′ ITR region, and the second filler sequence may be located between the exon region and 3′ ITR.

[0266] In one embodiment, a viral genome may comprise two filler sequences, the first filler sequence may be located between the intron region and enhancer region, and the second filler sequence may be located between the enhancer region and polyadenylation signal sequence region. In one embodiment, a viral genome may comprise two filler sequences, the first filler sequence may be located between the intron region and enhancer region, and the second filler sequence may be located between the enhancer region and MCS region. In one embodiment, a viral genome may comprise two filler sequences, the first filler sequence may be located between the intron region and enhancer region, and the second filler sequence may be located between the enhancer region and exon region. In one embodiment, a viral genome may comprise two filler sequences, the first filler sequence may be located between the intron region and enhancer region, and the second filler sequence may be located between the enhancer region and 3′ ITR. In one embodiment, a viral genome may comprise two filler sequences, the first filler sequence may be located between the intron region and enhancer region, and the second filler sequence may be located between the polyadenylation signal sequence region and MCS region. In one embodiment, a viral genome may comprise two filler sequences, the first filler sequence may be located between the intron region and enhancer region, and the second filler sequence may be located between the polyadenylation signal sequence region and exon region. In one embodiment, a viral genome may comprise two filler sequences, the first filler sequence may be located between the intron region and enhancer region, and the second filler sequence may be located between the polyadenylation signal sequence region and 3′ ITR. In one embodiment, a viral genome may comprise two filler sequences, the first filler sequence may be located between the intron region and enhancer region, and the second filler sequence may be located between the MCS region and exon region. In one embodiment, a viral genome may comprise two filler sequences, the first filler sequence may be located between the intron region and enhancer region, and the second filler sequence may be located between the MCS region and 3′ ITR. In one embodiment, a viral genome may comprise two filler sequences, the first filler sequence may be located between the intron region and enhancer region, and the second filler sequence may be located between the exon region and 3′ ITR.

[0267] In one embodiment, a viral genome may comprise two filler sequences, the first filler sequence may be located between the intron region and polyadenylation signal sequence region, and the second filler sequence may be located between the enhancer region and polyadenylation signal sequence region. In one embodiment, a viral genome may comprise two filler sequences, the first filler sequence may be located between the intron region and polyadenylation signal sequence region, and the second filler sequence may be located between the enhancer region and MCS region. In one embodiment, a viral genome may comprise two filler sequences, the first filler sequence may be located between the intron region and polyadenylation signal sequence region, and the second filler sequence may be located between the enhancer region and exon region. In one embodiment, a viral genome may comprise two filler sequences, the first filler sequence may be located between the intron region and polyadenylation signal sequence region, and the second filler sequence may be located between the enhancer region and 3′ ITR. In one embodiment, a viral genome may comprise two filler sequences, the first filler sequence may be located between the intron region and polyadenylation signal sequence region, and the second filler sequence may be located between the polyadenylation signal sequence region and MCS region. In one embodiment, a viral genome may comprise two filler sequences, the first filler sequence may be located between the intron region and polyadenylation signal sequence region, and the second filler sequence may be located between the polyadenylation signal sequence region and exon region. In one embodiment, a viral genome may comprise two filler sequences, the first filler sequence may be located between the intron region and polyadenylation signal sequence region, and the second filler sequence may be located between the polyadenylation signal sequence region and 3′ ITR. In one embodiment, a viral genome may comprise two filler sequences, the first filler sequence may be located between the intron region and polyadenylation signal sequence region, and the second filler sequence may be located between the MCS region and exon region. In one embodiment, a viral genome may comprise two filler sequences, the first filler sequence may be located between the intron region and polyadenylation signal sequence region, and the second filler sequence may be located between the MCS region and 3′ ITR. In one embodiment, a viral genome may comprise two filler sequences, the first filler sequence may be located between the intron region and polyadenylation signal sequence region, and the second filler sequence may be located between the exon region and 3′ ITR.

[0268] In one embodiment, a viral genome may comprise two filler sequences, the first filler sequence may be located between the intron region and MCS region, and the second filler sequence may be located between the enhancer region and polyadenylation signal sequence region. In one embodiment, a viral genome may comprise two filler sequences, the first filler sequence may be located between the intron region and MCS region, and the second filler sequence may be located between the enhancer region and MCS region. In one embodiment, a viral genome may comprise two filler sequences, the first filler sequence may be located between the intron region and MCS region, and the second filler sequence may be located between the enhancer region and exon region. In one embodiment, a viral genome may comprise two filler sequences, the first filler sequence may be located between the intron region and MCS region, and the second filler sequence may be located between the enhancer region and 3′ ITR. In one embodiment, a viral genome may comprise two filler sequences, the first filler sequence may be located between the intron region and MCS region, and the second filler sequence may be located between the polyadenylation signal sequence region and MCS region. In one embodiment, a viral genome may comprise two filler sequences, the first filler sequence may be located between the intron region and MCS region, and the second filler sequence may be located between the polyadenylation signal sequence region and exon region. In one embodiment, a viral genome may comprise two filler sequences, the first filler sequence may be located between the intron region and MCS region, and the second filler sequence may be located between the polyadenylation signal sequence region and 3′ ITR. In one embodiment, a viral genome may comprise two filler sequences, the first filler sequence may be located between the intron region and MCS region, and the second filler sequence may be located between the MCS region and exon region. In one embodiment, a viral genome may comprise two filler sequences, the first filler sequence may be located between the intron region and MCS region, and the second filler sequence may be located between the MCS region and 3′ ITR. In one embodiment, a viral genome may comprise two filler sequences, the first filler sequence may be located between the intron region and MCS region, and the second filler sequence may be located between the exon region and 3′ ITR.

[0269] In one embodiment, a viral genome may comprise two filler sequences, the first filler sequence may be located between the intron region and exon region, and the second filler sequence may be located between the enhancer region and polyadenylation signal sequence region. In one embodiment, a viral genome may comprise two filler sequences, the first filler sequence may be located between the intron region and exon region, and the second filler sequence may be located between the enhancer region and MCS region. In one embodiment, a viral genome may comprise two filler sequences, the first filler sequence may be located between the intron region and exon region, and the second filler sequence may be located between the enhancer region and exon region. In one embodiment, a viral genome may comprise two filler sequences, the first filler sequence may be located between the intron region and exon region, and the second filler sequence may be located between the enhancer region and 3′ ITR. In one embodiment, a viral genome may comprise two filler sequences, the first filler sequence may be located between the intron region and exon region, and the second filler sequence may be located between the polyadenylation signal sequence region and MCS region. In one embodiment, a viral genome may comprise two filler sequences, the first filler sequence may be located between the intron region and exon region, and the second filler sequence may be located between the polyadenylation signal sequence region and exon region. In one embodiment, a viral genome may comprise two filler sequences, the first filler sequence may be located between the intron region and exon region, and the second filler sequence may be located between the polyadenylation signal sequence region and 3′ ITR. In one embodiment, a viral genome may comprise two filler sequences, the first filler sequence may be located between the intron region and exon region, and the second filler sequence may be located between the MCS region and exon region. In one embodiment, a viral genome may comprise two filler sequences, the first filler sequence may be located between the intron region and exon region, and the second filler sequence may be located between the MCS region and 3′ ITR. In one embodiment, a viral genome may comprise two filler sequences, the first filler sequence may be located between the intron region and exon region, and the second filler sequence may be located between the exon region and 3′ ITR.

[0270] In one embodiment, a viral genome may comprise two filler sequences, the first filler sequence may be located between the intron region and 3′ITR, and the second filler sequence may be located between the enhancer region and polyadenylation signal sequence region. In one embodiment, a viral genome may comprise two filler sequences, the first filler sequence may be located between the intron region and 3′ITR, and the second filler sequence may be located between the enhancer region and MCS region. In one embodiment, a viral genome may comprise two filler sequences, the first filler sequence may be located between the intron region and 3′ITR, and the second filler sequence may be located between the enhancer region and exon region. In one embodiment, a viral genome may comprise two filler sequences, the first filler sequence may be located between the intron region and 3′ITR, and the second filler sequence may be located between the enhancer region and 3′ ITR. In one embodiment, a viral genome may comprise two filler sequences, the first filler sequence may be located between the intron region and 3′ITR, and the second filler sequence may be located between the polyadenylation signal sequence region and MCS region. In one embodiment, a viral genome may comprise two filler sequences, the first filler sequence may be located between the intron region and 3′ITR, and the second filler sequence may be located between the polyadenylation signal sequence region and exon region. In one embodiment, a viral genome may comprise two filler sequences, the first filler sequence may be located between the intron region and 3′ITR, and the second filler sequence may be located between the polyadenylation signal sequence region and 3′ ITR. In one embodiment, a viral genome may comprise two filler sequences, the first filler sequence may be located between the intron region and 3′ITR, and the second filler sequence may be located between the MCS region and exon region. In one embodiment, a viral genome may comprise two filler sequences, the first filler sequence may be located between the intron region and 3′ITR, and the second filler sequence may be located between the MCS region and 3′ ITR. In one embodiment, a viral genome may comprise two filler sequences, the first filler sequence may be located between the intron region and 3′ITR, and the second filler sequence may be located between the exon region and 3′ ITR.

[0271] In one embodiment, a viral genome may comprise two filler sequences, the first filler sequence may be located between the enhancer region and polyadenylation signal sequence region, and the second filler sequence may be located between the polyadenylation signal sequence region and MCS region. In one embodiment, a viral genome may comprise two filler sequences, the first filler sequence may be located between the enhancer region and polyadenylation signal sequence region, and the second filler sequence may be located between the polyadenylation signal sequence region and exon region. In one embodiment, a viral genome may comprise two filler sequences, the first filler sequence may be located between the enhancer region and polyadenylation signal sequence region, and the second filler sequence may be located between the polyadenylation signal sequence region and 3′ ITR. In one embodiment, a viral genome may comprise two filler sequences, the first filler sequence may be located between the enhancer region and polyadenylation signal sequence region, and the second filler sequence may be located between the MCS region and exon region. In one embodiment, a viral genome may comprise two filler sequences, the first filler sequence may be located between the enhancer region and polyadenylation signal sequence region, and the second filler sequence may be located between the MCS region and 3′ ITR. In one embodiment, a viral genome may comprise two filler sequences, the first filler sequence may be located between the enhancer region and polyadenylation signal sequence region, and the second filler sequence may be located between the exon region and 3′ ITR.

[0272] In one embodiment, a viral genome may comprise two filler sequences, the first filler sequence may be located between the enhancer region and MCS region, and the second filler sequence may be located between the polyadenylation signal sequence region and MCS region. In one embodiment, a viral genome may comprise two filler sequences, the first filler sequence may be located between the enhancer region and MCS region, and the second filler sequence may be located between the polyadenylation signal sequence region and exon region. In one embodiment, a viral genome may comprise two filler sequences, the first filler sequence may be located between the enhancer region and MCS region, and the second filler sequence may be located between the polyadenylation signal sequence region and 3′ ITR. In one embodiment, a viral genome may comprise two filler sequences, the first filler sequence may be located between the enhancer region and MCS region, and the second filler sequence may be located between the MCS region and exon region. In one embodiment, a viral genome may comprise two filler sequences, the first filler sequence may be located between the enhancer region and MCS region, and the second filler sequence may be located between the MCS region and 3′ ITR. In one embodiment, a viral genome may comprise two filler sequences, the first filler sequence may be located between the enhancer region and MCS region, and the second filler sequence may be located between the exon region and 3′ ITR.

[0273] In one embodiment, a viral genome may comprise two filler sequences, the first filler sequence may be located between the enhancer region and exon region, and the second filler sequence may be located between the polyadenylation signal sequence region and MCS region. In one embodiment, a viral genome may comprise two filler sequences, the first filler sequence may be located between the enhancer region and exon region, and the second filler sequence may be located between the polyadenylation signal sequence region and exon region. In one embodiment, a viral genome may comprise two filler sequences, the first filler sequence may be located between the enhancer region and exon region, and the second filler sequence may be located between the polyadenylation signal sequence region and 3′ ITR. In one embodiment, a viral genome may comprise two filler sequences, the first filler sequence may be located between the enhancer region and exon region, and the second filler sequence may be located between the MCS region and exon region. In one embodiment, a viral genome may comprise two filler sequences, the first filler sequence may be located between the enhancer region and exon region, and the second filler sequence may be located between the MCS region and 3′ ITR. In one embodiment, a viral genome may comprise two filler sequences, the first filler sequence may be located between the enhancer region and exon region, and the second filler sequence may be located between the exon region and 3′ ITR.

[0274] In one embodiment, a viral genome may comprise two filler sequences, the first filler sequence may be located between the enhancer region and 3′ ITR, and the second filler sequence may be located between the polyadenylation signal sequence region and MCS region. In one embodiment, a viral genome may comprise two filler sequences, the first filler sequence may be located between the enhancer region and 3′ ITR, and the second filler sequence may be located between the polyadenylation signal sequence region and exon region. In one embodiment, a viral genome may comprise two filler sequences, the first filler sequence may be located between the enhancer region and 3′ ITR, and the second filler sequence may be located between the polyadenylation signal sequence region and 3′ ITR. In one embodiment, a viral genome may comprise two filler sequences, the first filler sequence may be located between the enhancer region and 3′ ITR, and the second filler sequence may be located between the MCS region and exon region. In one embodiment, a viral genome may comprise two filler sequences, the first filler sequence may be located between the enhancer region and 3′ ITR, and the second filler sequence may be located between the MCS region and 3′ ITR. In one embodiment, a viral genome may comprise two filler sequences, the first filler sequence may be located between the enhancer region and 3′ ITR, and the second filler sequence may be located between the exon region and 3′ ITR.

[0275] In one embodiment, a viral genome may comprise two filler sequences, the first filler sequence may be located between the polyadenylation signal sequence region and MCS region, and the second filler sequence may be located between the MCS region and exon region. In one embodiment, a viral genome may comprise two filler sequences, the first filler sequence may be located between the polyadenylation signal sequence region and MCS region, and the second filler sequence may be located between the MCS region and 3′ ITR. In one embodiment, a viral genome may comprise two filler sequences, the first filler sequence may be located between the polyadenylation signal sequence region and MCS region, and the second filler sequence may be located between the exon region and 3′ ITR.

[0276] In one embodiment, a viral genome may comprise two filler sequences, the first filler sequence may be located between the polyadenylation signal sequence region and exon region, and the second filler sequence may be located between the MCS region and exon region. In one embodiment, a viral genome may comprise two filler sequences, the first filler sequence may be located between the polyadenylation signal sequence region and exon region, and the second filler sequence may be located between the MCS region and 3′ ITR. In one embodiment, a viral genome may comprise two filler sequences, the first filler sequence may be located between the polyadenylation signal sequence region and exon region, and the second filler sequence may be located between the exon region and 3′ ITR.

[0277] In one embodiment, a viral genome may comprise two filler sequences, the first filler sequence may be located between the polyadenylation signal sequence region and 3′ ITR, and the second filler sequence may be located between the MCS region and exon region. In one embodiment, a viral genome may comprise two filler sequences, the first filler sequence may be located between the polyadenylation signal sequence region and 3′ ITR, and the second filler sequence may be located between the MCS region and 3′ ITR. In one embodiment, a viral genome may comprise two filler sequences, the first filler sequence may be located between the polyadenylation signal sequence region and 3′ ITR, and the second filler sequence may be located between the exon region and 3′ ITR.

[0278] In one embodiment, a viral genome may comprise two filler sequences, the first filler sequence may be located between the MCS region and exon region, and the second filler sequence may be located between the exon region and 3′ ITR.

### Payloads of the Invention

[0279] The AAV particles of the present disclosure comprise at least one payload region. As used herein, “payload” or “payload region” refers to one or more polynucleotides or polynucleotide regions encoded by or within a viral genome or an expression product of such polynucleotide or polynucleotide region, e.g., a transgene, a polynucleotide encoding a polypeptide or multi-polypeptide or a modulatory nucleic acid or regulatory nucleic acid. Payloads of the present invention typically encode modulatory polynucleotides or fragments or variants thereof.

[0280] The payload region may be constructed in such a way as to reflect a region similar to or mirroring the natural organization of an mRNA.

[0281] The payload region may comprise a combination of coding and non-coding nucleic acid sequences.

[0282] In some embodiments, the AAV payload region may encode a coding or non-coding RNA.

[0283] In one embodiment, the AAV particle comprises a viral genome with a payload region comprising nucleic acid sequences encoding a siRNA, miRNA or other RNAi agent. In such an embodiment, a viral genome encoding more than one polypeptide may be replicated and packaged into a viral particle. A target cell transduced with a viral particle may express the encoded siRNA, miRNA or other RNAi agent inside a single cell.

### Modulatory Polynucleotides

[0284] In one embodiment, modulatory polynucleotides, e.g., RNA or DNA molecules, may be used to treat neurodegenerative disease, in particular, Huntington's Disease (HD). As used herein, a “modulatory polynucleotide” is any nucleic acid sequence(s) which functions to modulate (either increase or decrease) the level or amount of a target gene, e.g., mRNA or protein levels.

[0285] In one embodiment, the modulatory polynucleotides may comprise at least one nucleic acid sequence encoding at least one siRNA molecule. The nucleic acids may, independently if there is more than one, encode 1, 2, 3, 4, 5, 6, 7, 8, 9, or more than 9 siRNA molecules.

[0286] In one embodiment, the molecular scaffold may be located downstream of a CMV promoter, fragment or variant thereof.

[0287] In one embodiment, the molecular scaffold may be located downstream of a CBA promoter, fragment or variant thereof.

[0288] In one embodiment, the molecular scaffold may be a natural pri-miRNA scaffold located downstream of a CMV promoter. As a non-limiting example, the natural pri-miRNA scaffold is derived from the human miR155 scaffold.

[0289] In one embodiment, the molecular scaffold may be a natural pri-miRNA scaffold located downstream of a CBA promoter.

[0290] In one embodiment, the selection of a molecular scaffold and modulatory polynucleotide is determined by a method of comparing modulatory polynucleotides in pri-miRNA (see e.g., the method described by Miniarikova et al. Design, Characterization, and Lead Selection of Therapeutic miRNAs Targeting Huntingtin for Development of Gene Therapy for Huntington's Disease. Molecular Therapy-Nucleic Acids (2016) 5, e297 and International Publication No. WO2016102664; the contents of each of which are herein incorporated by reference in their entireties). The modulatory polynucleotide may, but it not limited to, targeting exon 1, CAG repeats, SNP rs362331 in exon 50 and/or SNP rs362307 in exon 67. To evaluate the activities of the modulatory polynucleotides, the molecular scaffold used which may be used is a human pri-miRNA scaffold (e.g., miR155 scaffold) and the promoter may be CMV. The activity may be determined in vitro using HEK293T cells and a reporter (e.g., Luciferase). For exon 1 targeting, the modulatory polynucleotide is determined to be efficient at HTT knockdown if the knockdown is 80% or greater. For CAG targeting, the modulatory polynucleotide is determined to be efficient at HTT knockdown if the knockdown is at least 60%. For SNP targeting, the modulatory polynucleotide is determined to be efficient at HTT knockdown if the knockdown is at least 60%. For allele selectivity for CAG repeats or SNP targeting the modulatory polynucleotides may comprise at least 1 substitution in order to improve allele selectivity. As a non-limiting example, substitution may be a G or C replaced with a T or corresponding U and A or T/U replaced by a C.

[0291] In order to evaluate the optimal molecular scaffold for the modulatory polynucleotide, the modulatory polynucleotide is used in pri-miRNA scaffolds with a CAG promoter. The constructs are co-transfected with a reporter (e.g., luciferase reporter) at 50 ng. Constructs with greater than 80% knockdown at 50 ng co-transfection are considered efficient. In one aspect, the constructs with strong guide-strand activity are preferred. The molecular scaffolds can be processed in HEK293T cells by NGS to determine guide-passenger ratios, and processing variability.

[0292] To evaluate the molecular scaffolds and modulatory polynucleotides in vivo the molecular scaffolds comprising the modulatory polynucleotides are packaged in AAV (e.g., the serotype may be AAV5 (see e.g., the method and constructs described in WO2015060722, the contents of which are herein incorporated by reference in their entirety)) and administered to an in vivo model (e.g., Hu128/21 HD mouse) and the guide-passenger ratios, 5′ and 3′ end processing, reversal of guide and passenger strands, and knockdown can be determined in different areas of the model.

[0293] In one embodiment, the selection of a molecular scaffold and modulatory polynucleotide is determined by a method of comparing modulatory polynucleotides in natural pri-miRNA and synthetic pri-miRNA. The modulatory polynucleotide may, but it not limited to, targeting an exon other than exon 1. To evaluate the activities of the modulatory polynucleotides, the molecular scaffold is used with a CBA promoter. In one aspect, the activity may be determined in vitro using HEK293T cells, HeLa cell and a reporter (e.g., Luciferase) and knockdown efficient modulatory polynucleotides showed HTT knockdown of at least 80% in the cell tested. Additionally, the modulatory polynucleotides which are considered most efficient showed low to no significant passenger strand (p-strand) activity. In another aspect, the endogenous HTT knockdown efficacy is evaluated by transfection in vitro using HEK293T cells, HeLa cell and a reporter. Efficient modulatory polynucleotides show greater than 50% endogenous HTT knockdown. In yet another aspect, the endogenous HTT knockdown efficacy is evaluated in different cell types (e.g., HEK293, HeLa, primary astrocytes, U251 astrocytes, SH-SY5Y neuron cells and fibroblasts from HD patients) by infection (e.g., AAV2). Efficient modulatory polynucleotides show greater than 60% endogenous HTT knockdown.

[0294] To evaluate the molecular scaffolds and modulatory polynucleotides in vivo the molecular scaffolds comprising the modulatory polynucleotides are packaged in AAV and administered to an in vivo model (e.g., YAC128 HD mouse) and the guide-passenger ratios, 5′ and 3′ end processing, ratio of guide to passenger strands, and knockdown can be determined in different areas of the model (e.g., tissue regions). The molecular scaffolds can be processed from in vivo samples by NGS to determine guide-passenger ratios, and processing variability.

[0295] In one embodiment, the modulatory polynucleotide is designed using at least one of the following properties: loop variant, seed mismatch/bulge/wobble variant, stem mismatch, loop variant and vassal stem mismatch variant, seed mismatch and basal stem mismatch variant, stem mismatch and basal stem mismatch variant, seed wobble and basal stem wobble variant, or a stem sequence variant.

siRNA Molecules

[0296] The present invention relates to RNA interference (RNAi) induced inhibition of gene expression for treating neurodegenerative disorders. Provided herein are siRNA duplexes or encoded dsRNA that target the HTT gene (referred to herein collectively as “siRNA molecules”). Such siRNA duplexes or encoded dsRNA can reduce or silence HTT gene expression in cells, for example, medium spiny neurons, cortical neurons and/or astrocytes, thereby, ameliorating symptoms of Huntington's Disease (HD).

[0297] RNAi (also known as post-transcriptional gene silencing (PTGS), quelling, or co-suppression) is a post-transcriptional gene silencing process in which RNA molecules, in a sequence specific manner, inhibit gene expression, typically by causing the destruction of specific mRNA molecules. The active components of RNAi are short/small double stranded RNAs (dsRNAs), called small interfering RNAs (siRNAs), that typically contain 15-30 nucleotides (e.g., 19 to 25, 19 to 24 or 19-21 nucleotides) and 2 nucleotide 3′ overhangs and that match the nucleic acid sequence of the target gene. These short RNA species may be naturally produced in vivo by Dicer-mediated cleavage of larger dsRNAs and they are functional in mammalian cells.

[0298] Naturally expressed small RNA molecules, named microRNAs (miRNAs), elicit gene silencing by regulating the expression of mRNAs. The miRNAs containing RNA Induced Silencing Complex (RISC) targets mRNAs presenting a perfect sequence complementarity with nucleotides 2-7 in the 5′ region of the miRNA which is called the seed region, and other base pairs with its 3′ region. miRNA mediated down regulation of gene expression may be caused by cleavage of the target mRNAs, translational inhibition of the target mRNAs, or mRNA decay. miRNA targeting sequences are usually located in the 3′-UTR of the target mRNAs. A single miRNA may target more than 100 transcripts from various genes, and one mRNA may be targeted by different miRNAs.

[0299] siRNA duplexes or dsRNA targeting a specific mRNA may be designed and synthesized in vitro and introduced into cells for activating RNAi processes. Elbashir et al. demonstrated that 21-nucleotide siRNA duplexes (termed small interfering RNAs) were capable of effecting potent and specific gene knockdown without inducing immune response in mammalian cells (Elbashir S M et al., Nature, 2001, 411, 494-498). Since this initial report, post-transcriptional gene silencing by siRNAs quickly emerged as a powerful tool for genetic analysis in mammalian cells and has the potential to produce novel therapeutics.

[0300] RNAi molecules which were designed to target against a nucleic acid sequence that encodes poly-glutamine repeat proteins which cause poly-glutamine expansion diseases such as Huntington's Disease, are described in U.S. Pat. Nos. 9,169,483 and 9,181,544 and International Patent Publication No. WO2015179525, the content of each of which is herein incorporated by reference in their entirety. U.S. Pat. Nos. 9,169,483 and 9,181,544 and International Patent Publication No. WO2015179525 each provide isolated RNA duplexes comprising a first strand of RNA (e.g., 15 contiguous nucleotides) and second strand of RNA (e.g., complementary to at least 12 contiguous nucleotides of the first strand) where the RNA duplex is about 15 to 30 base pairs in length. The first strand of RNA and second strand of RNA may be operably linked by an RNA loop (˜4 to 50 nucleotides) to form a hairpin structure which may be inserted into an expression cassette. Non-limiting examples of loop portions include SEQ ID NO: 9-14 of U.S. Pat. No. 9,169,483, the content of which is herein incorporated by reference in its entirety. Non-limiting examples of strands of RNA which may be used, either full sequence or part of the sequence, to form RNA duplexes include SEQ ID NO: 1-8 of U.S. Pat. No. 9,169,483 and SEQ ID NO: 1-11, 33-59, 208-210, 213-215 and 218-221 of U.S. Pat. No. 9,181,544, the contents of each of which is herein incorporated by reference in its entirety. Non-limiting examples of RNAi molecules include SEQ ID NOs: 1-8 of U.S. Pat. No. 9,169,483, SEQ ID NOs: 1-11, 33-59, 208-210, 213-215 and 218-221 of U.S. Pat. No. 9,181,544 and SEQ ID NOs: 1, 6, 7, and 35-38 of International Patent Publication No. WO2015179525, the contents of each of which is herein incorporated by reference in their entirety.

[0301] In vitro synthetized siRNA molecules may be introduced into cells in order to activate RNAi. An exogenous siRNA duplex, when it is introduced into cells, similar to the endogenous dsRNAs, can be assembled to form the RNA Induced Silencing Complex (RISC), a multiunit complex that interacts with RNA sequences that are complementary to one of the two strands of the siRNA duplex (i.e., the antisense strand). During the process, the sense strand (or passenger strand) of the siRNA is lost from the complex, while the antisense strand (or guide strand) of the siRNA is matched with its complementary RNA. In particular, the targets of siRNA containing RISC complexes are mRNAs presenting a perfect sequence complementarity. Then, siRNA mediated gene silencing occurs by cleaving, releasing and degrading the target.

[0302] The siRNA duplex comprised of a sense strand homologous to the target mRNA and an antisense strand that is complementary to the target mRNA offers much more advantage in terms of efficiency for target RNA destruction compared to the use of the single strand (ss)-siRNAs (e.g. antisense strand RNA or antisense oligonucleotides). In many cases, it requires higher concentration of the ss-siRNA to achieve the effective gene silencing potency of the corresponding duplex.

[0303] Any of the foregoing molecules may be encoded by a viral genome.

Design and Sequences of siRNA Duplexes Targeting HTT Gene

[0304] The present invention provides small interfering RNA (siRNA) duplexes (and modulatory polynucleotides encoding them) that target HTT mRNA to interfere with HTT gene expression and/or HTT protein production.

[0305] The encoded siRNA duplex of the present invention contains an antisense strand and a sense strand hybridized together forming a duplex structure, wherein the antisense strand is complementary to the nucleic acid sequence of the targeted HTT gene, and wherein the sense strand is homologous to the nucleic acid sequence of the targeted HTT gene. In some aspects, the 5′ end of the antisense strand has a 5′ phosphate group and the 3′ end of the sense strand contains a 3′hydroxyl group. In other aspects, there are none, one or 2 nucleotide overhangs at the 3′end of each strand.

[0306] Some guidelines for designing siRNAs have been proposed in the art. These guidelines generally recommend generating a 19-nucleotide duplexed region, symmetric 2-3 nucleotide 3′overhangs, 5′-phosphate and 3′-hydroxyl groups targeting a region in the gene to be silenced. Other rules that may govern siRNA sequence preference include, but are not limited to, (i) A/U at the 5′ end of the antisense strand; (ii) G/C at the 5′ end of the sense strand; (iii) at least five A/U residues in the 5′ terminal one-third of the antisense strand; and (iv) the absence of any GC stretch of more than 9 nucleotides in length. In accordance with such consideration, together with the specific sequence of a target gene, highly effective siRNA molecules essential for suppressing mammalian target gene expression may be readily designed.

[0307] According to the present invention, siRNA molecules (e.g., siRNA duplexes or encoded dsRNA) that target the HTT gene are designed. Such siRNA molecules can specifically, suppress HTT gene expression and protein production. In some aspects, the siRNA molecules are designed and used to selectively “knock out” HTT gene variants in cells, i.e., mutated HTT transcripts that are identified in patients with HD disease. In some aspects, the siRNA molecules are designed and used to selectively “knock down” HTT gene variants in cells. In other aspects, the siRNA molecules are able to inhibit or suppress both the wild type and mutated HTT gene.

[0308] In one embodiment, an siRNA molecule of the present invention comprises a sense strand and a complementary antisense strand in which both strands are hybridized together to form a duplex structure. The antisense strand has sufficient complementarity to the HTT mRNA sequence to direct target-specific RNAi, i.e., the siRNA molecule has a sequence sufficient to trigger the destruction of the target mRNA by the RNAi machinery or process.

[0309] In one embodiment, an siRNA molecule of the present invention comprises a sense strand and a complementary antisense strand in which both strands are hybridized together to form a duplex structure and where the start site of the hybridization to the HTT mRNA is between nucleotide 100 and 7000 on the HTT mRNA sequence. As a non-limiting example, the start site may be between nucleotide 100-150, 150-200, 200-250, 250-300, 300-350, 350-400, 400-450, 450-500, 500-550, 550-600, 600-650, 650-700, 700-70, 750-800, 800-850, 850-900, 900-950, 950-1000, 1000-1050, 1050-1100, 1100-1150, 1150-1200, 1200-1250, 1250-1300, 1300-1350, 1350-1400, 1400-1450, 1450-1500, 1500-1550, 1550-1600, 1600-1650, 1650-1700, 1700-1750, 1750-1800, 1800-1850, 1850-1900, 1900-1950, 1950-2000, 2000-2050, 2050-2100, 2100-2150, 2150-2200, 2200-2250, 2250-2300, 2300-2350, 2350-2400, 2400-2450, 2450-2500, 2500-2550, 2550-2600, 2600-2650, 2650-2700, 2700-2750, 2750-2800, 2800-2850, 2850-2900, 2900-2950, 2950-3000, 3000-3050, 3050-3100, 3100-3150, 3150-3200, 3200-3250, 3250-3300, 3300-3350, 3350-3400, 3400-3450, 3450-3500, 3500-3550, 3550-3600, 3600-3650, 3650-3700, 3700-3750, 3750-3800, 3800-3850, 3850-3900, 3900-3950, 3950-4000, 4000-4050, 4050-4100, 4100-4150, 4150-4200, 4200-4250, 4250-4300, 4300-4350, 4350-4400, 4400-4450, 4450-4500, 4500-4550, 4550-4600, 4600-4650, 4650-4700, 4700-4750, 4750-4800, 4800-4850, 4850-4900, 4900-4950, 4950-5000, 5000-5050, 5050-5100, 5100-5150, 5150-5200, 5200-5250, 5250-5300, 5300-5350, 5350-5400, 5400-5450, 5450-5500, 5500-5550, 5550-5600, 5600-5650, 5650-5700, 5700-5750, 5750-5800, 5800-5850, 5850-5900, 5900-5950, 5950-6000, 6000-6050, 6050-6100, 6100-6150, 6150-6200, 6200-6250, 6250-6300, 6300-6350, 6350-6400, 6400-6450, 6450-6500, 6500-6550, 6550-6600, 6600-6650, 6650-6700, 6700-6750, 6750-6800, 6800-6850, 6850-6900, 6900-6950, 6950-7000, 7000-7050, 7050-7100, 7100-7150, 7150-7200, 7200-7250, 7250-7300, 7300-7350, 7350-7400, 7400-7450, 7450-7500, 7500-7550, 7550-7600, 7600-7650, 7650-7700, 7700-7750, 7750-7800, 7800-7850, 7850-7900, 7900-7950, 7950-8000, 8000-8050, 8050-8100, 8100-8150, 8150-8200, 8200-8250, 8250-8300, 8300-8350, 8350-8400, 8400-8450, 8450-8500, 8500-8550, 8550-8600, 8600-8650, 8650-8700, 8700-8750, 8750-8800, 8800-8850, 8850-8900, 8900-8950, 8950-9000, 9000-9050, 9050-9100, 9100-9150, 9150-9200, 9200-9250, 9250-9300, 9300-9350, 9350-9400, 9400-9450, 9450-9500, 9500-9550, 9550-9600, 9600-9650, 9650-9700, 9700-9750, 9750-9800, 9800-9850, 9850-9900, 9900-9950, 9950-10000, 10000-10050, 10050-10100, 10100-10150, 10150-10200, 10200-10250, 10250-10300, 10300-10350, 10350-10400, 10400-10450, 10450-10500, 10500-10550, 10550-10600, 10600-10650, 10650-10700, 10700-10750, 10750-10800, 10800-10850, 10850-10900, 10900-10950, 10950-11000, 11050-11100, 11100-11150, 11150-11200, 11200-11250, 11250-11300, 11300-11350, 11350-11400, 11400-11450, 11450-11500, 11500-11550, 11550-11600, 11600-11650, 11650-11700, 11700-11750, 11750-11800, 11800-11850, 11850-11900, 11900-11950, 11950-12000, 12000-12050, 12050-12100, 12100-12150, 12150-12200, 12200-12250, 12250-12300, 12300-12350, 12350-12400, 12400-12450, 12450-12500, 12500-12550, 12550-12600, 12600-12650, 12650-12700, 12700-12750, 12750-12800, 12800-12850, 12850-12900, 12900-12950, 12950-13000, 13050-13100, 13100-13150, 13150-13200, 13200-13250, 13250-13300, 13300-13350, 13350-13400, 13400-13450, and 13450-13500 on the HTT mRNA sequence. As yet another non-limiting example, the start site may be nucleotide 315, 316, 317, 318, 319, 320, 321, 322, 323, 324, 325, 326, 327, 328, 329, 330, 331, 332, 333, 334, 335, 336, 337, 338, 339, 340, 341, 342, 343, 344, 345, 346, 347, 348, 349, 350, 595, 596, 597, 598, 599, 600, 601, 602, 603, 604, 605, 606, 607, 608, 609, 610, 611, 612, 613, 614, 615, 616, 617, 618, 619, 620, 621, 622, 623, 624, 625, 715, 716, 717, 718, 719, 720, 721, 722, 723, 724, 725, 875, 876, 877, 878, 879, 880, 881, 882, 883, 884, 885, 886, 887, 888, 889, 890, 891, 892, 893, 894, 895, 896, 897, 898, 899, 900, 1375, 1376, 1377, 1378, 1379, 1380, 1381, 1382, 1383, 1384, 1385, 1386, 1387, 1388, 1389, 1390, 1391, 1392, 1393, 1394, 1395, 1396, 1397, 1398, 1399, 1400, 1401, 1402, 1403, 1404, 1405, 1406, 1407, 1408, 1409, 1410, 1411, 1412, 1413, 1414, 1415, 1416, 1417, 1418, 1419, 1420, 1421, 1422, 1423, 1424, 1425, 1426, 1427, 1428, 1429, 1430, 1431, 1432, 1433, 1434, 1435, 1436, 1437, 1438, 1439, 1440, 1441, 1442, 1443, 1444, 1445, 1446, 1447, 1448, 1449, 1450, 1660, 1661, 1662, 1663, 1664, 1665, 1666, 1667, 1668, 1669, 1670, 1671, 1672, 1673, 1674, 1675, 2050, 2051, 2052, 2053, 2054, 2055, 2056, 2057, 2058, 2059, 2060, 2061, 2062, 2063, 2064, 2065, 2066, 2067, 2068, 2069, 2070, 2071, 2072, 2073, 2074, 2075, 2076, 2077, 2078, 2079, 2080, 2081, 2082, 2083, 2084, 2085, 2086, 2087, 2088, 2089, 2090, 2091, 2092, 2093, 2094, 2095, 2096, 2097, 2098, 2099, 2100, 2580, 2581, 2582, 2583, 2584, 2585, 2586, 2587, 2588, 2589, 2590, 2591, 2592, 2593, 2594, 2595, 2596, 2597, 2598, 2599, 2600, 2601, 2602, 2603, 2604, 2605, 4525, 4526, 4527, 4528, 4529, 4530, 4531, 4532, 4533, 4534, 4535, 4536, 4537, 4538, 4539, 4540, 4541, 4542, 4543, 4544, 4545, 4546, 4547, 4548, 4549, 4550, 4575, 4576, 4577, 4578, 4579, 4580, 4581, 4582, 4583, 4584, 4585, 4586, 4587, 4588, 4589, 4590, 4591, 4592, 4593, 4594, 4595, 4596, 4597, 4598, 4599, 4600, 4850, 4851, 4852, 4853, 4854, 4855, 4856, 4857, 4858, 4859, 4860, 4861, 4862, 4863, 4864, 4865, 4866, 4867, 4868, 4869, 4870, 4871, 4872, 4873, 4874, 4875, 4876, 4877, 4878, 4879, 4880, 4881, 4882, 4883, 4884, 4885, 4886, 4887, 4888, 4889, 4890, 4891, 4892, 4893, 4894, 4895, 4896, 4897, 4898, 4899, 4900, 5460, 5461, 5462, 5463, 5464, 5465, 5466, 5467, 5468, 5469, 5470, 5471, 5472, 5473, 5474, 5475, 5476, 5477, 5478, 5479, 5480, 6175, 6176, 6177, 6178, 6179, 6180, 6181, 6182, 6183, 6184, 6185, 6186, 6187, 6188, 6189, 6190, 6191, 6192, 6193, 6194, 6195, 6196, 6197, 6198, 6199, 6200, 6315, 6316, 6317, 6318, 6319, 6320, 6321, 6322, 6323, 6324, 6325, 6326, 6327, 6328, 6329, 6330, 6331, 6332, 6333, 6334, 6335, 6336, 6337, 6338, 6339, 6340, 6341, 6342, 6343, 6344, 6345, 6600, 6601, 6602, 6603, 6604, 6605, 6606, 6607, 6608, 6609, 6610, 6611, 6612, 6613, 6614, 6615, 6725, 6726, 6727, 6728, 6729, 6730, 6731, 6732, 6733, 6734, 6735, 6736, 6737, 6738, 6739, 6740, 6741, 6742, 6743, 6744, 6745, 6746, 6747, 6748, 6749, 6750, 6751, 6752, 6753, 6754, 6755, 6756, 6757, 6758, 6759, 6760, 6761, 6762, 6763, 6764, 6765, 6766, 6767, 6768, 6769, 6770, 6771, 6772, 6773, 6774, 6775, 7655, 7656, 7657, 7658, 7659, 7660, 7661, 7662, 7663, 7664, 7665, 7666, 7667, 7668, 7669, 7670, 7671, 7672, 8510, 8511, 8512, 8513, 8514, 8515, 8516, 8715, 8716, 8717, 8718, 8719, 8720, 8721, 8722, 8723, 8724, 8725, 8726, 8727, 8728, 8729, 8730, 8731, 8732, 8733, 8734, 8735, 8736, 8737, 8738, 8739, 8740, 8741, 8742, 8743, 8744, 8745, 9250, 9251, 9252, 9253, 9254, 9255, 9256, 9257, 9258, 9259, 9260, 9261, 9262, 9263, 9264, 9265, 9266, 9267, 9268, 9269, 9270, 9480, 9481, 9482, 9483, 9484, 9485, 9486, 9487, 9488, 9489, 9490, 9491, 9492, 9493, 9494, 9495, 9496, 9497, 9498, 9499, 9500, 9575, 9576, 9577, 9578, 9579, 9580, 9581, 9582, 9583, 9584, 9585, 9586, 9587, 9588, 9589, 9590, 10525, 10526, 10527, 10528, 10529, 10530, 10531, 10532, 10533, 10534, 10535, 10536, 10537, 10538, 10539, 10540, 11545, 11546, 11547, 11548, 11549, 11550, 11551, 11552, 11553, 11554, 11555, 11556, 11557, 11558, 11559, 11560, 11875, 11876, 11877, 11878, 11879, 11880, 11881, 11882, 11883, 11884, 11885, 11886, 11887, 11888, 11889, 11890, 11891, 11892, 11893, 11894, 11895, 11896, 11897, 11898, 11899, 11900, 11915, 11916, 11917, 11918, 11919, 11920, 11921, 11922, 11923, 11924, 11925, 11926, 11927, 11928, 11929, 11930, 11931, 11932, 11933, 11934, 11935, 11936, 11937, 11938, 11939, 11940, 13375, 13376, 13377, 13378, 13379, 13380, 13381, 13382, 13383, 13384, 13385, 13386, 13387, 13388, 13389 and 13390 on the HTT mRNA sequence.

[0310] In some embodiments, the antisense strand and target mRNA sequences have 100% complementarity. The antisense strand may be complementary to any part of the target mRNA sequence.

[0311] In other embodiments, the antisense strand and target mRNA sequences comprise at least one mismatch. As a non-limiting example, the antisense strand and the target mRNA sequence have at least 30%, 40%, 50%, 60%, 70%, 80%, 81%, 82%, 83%, 84%, 85%, 86%, 87%, 88%, 89%, 90%, 91%, 92%, 93%, 94%, 95%, 96%, 97%, 98% or 99% or at least 20-30%, 20-40%, 20-50%, 20-60%, 20-70%, 20-80%, 20-90%, 20-95%, 20-99%, 30-40%, 30-50%, 30-60%, 30-70%, 30-80%, 30-90%, 30-95%, 30-99%, 40-50%, 40-60%, 40-70%, 40-80%, 40-90%, 40-95%, 40-99%, 50-60%, 50-70%, 50-80%, 50-90%, 50-95%, 50-99%, 60-70%, 60-80%, 60-90%, 60-95%, 60-99%, 70-80%, 70-90%, 70-95%, 70-99%, 80-90%, 80-95%, 80-99%, 90-95%, 90-99% or 95-99% complementarity.

[0312] In one embodiment, an siRNA or dsRNA includes at least two sequences that are complementary to each other.

[0313] According to the present invention, the siRNA molecule has a length from about 10-50 or more nucleotides, i.e., each strand comprising 10-50 nucleotides (or nucleotide analogs). Preferably, the siRNA molecule has a length from about 15-30, e.g., 15, 16, 17, 18, 19, 20, 21, 22, 23, 24, 25, 26, 27, 28, 29, or 30 nucleotides in each strand, wherein one of the strands is sufficiently complementarity to a target region. In one embodiment, each strand of the siRNA molecule has a length from about 19 to 25, 19 to 24 or 19 to 21 nucleotides. In one embodiment, at least one strand of the siRNA molecule is 19 nucleotides in length. In one embodiment, at least one strand of the siRNA molecule is 20 nucleotides in length. In one embodiment, at least one strand of the siRNA molecule is 21 nucleotides in length. In one embodiment, at least one strand of the siRNA molecule is 22 nucleotides in length. In one embodiment, at least one strand of the siRNA molecule is 23 nucleotides in length. In one embodiment, at least one strand of the siRNA molecule is 24 nucleotides in length. In one embodiment, at least one strand of the siRNA molecule is 25 nucleotides in length.

[0314] In some embodiments, the siRNA molecules of the present invention can be synthetic RNA duplexes comprising about 19 nucleotides to about 25 nucleotides, and two overhanging nucleotides at the 3′-end. In some aspects, the siRNA molecules may be unmodified RNA molecules. In other aspects, the siRNA molecules may contain at least one modified nucleotide, such as base, sugar or backbone modifications.

[0315] In one embodiment, the siRNA molecules of the present invention may comprise a nucleotide sequence such as, but not limited to, the antisense (guide) sequences in Table 2 or a fragment or variant thereof. As a non-limiting example, the antisense sequence used in the siRNA molecule of the present invention is at least 30%, 40%, 50%, 60%, 70%, 80%, 81%, 82%, 83%, 84%, 85%, 86%, 87%, 88%, 89%, 90%, 91%, 92%, 93%, 94%, 95%, 96%, 97%, 98% or 99% or at least 20-30%, 20-40%, 20-50%, 20-60%, 20-70%, 20-80%, 20-90%, 20-95%, 20-99%, 30-40%, 30-50%, 30-60%, 30-70%, 30-80%, 30-90%, 30-95%, 30-99%, 40-50%, 40-60%, 40-70%, 40-80%, 40-90%, 40-95%, 40-99%, 50-60%, 50-70%, 50-80%, 50-90%, 50-95%, 50-99%, 60-70%, 60-80%, 60-90%, 60-95%, 60-99%, 70-80%, 70-90%, 70-95%, 70-99%, 80-90%, 80-95%, 80-99%, 90-95%, 90-99% or 95-99% of a nucleotide sequence in Table 2. As another non-limiting example, the antisense sequence used in the siRNA molecule of the present invention comprises at least 3, 4, 5, 6, 7, 8, 9, 10, 11, 12, 13, 14, 15, 16, 17, 18, 19, 20, 21 or more than 21 consecutive nucleotides of a nucleotide sequence in Table 2. As yet another non-limiting example, the antisense sequence used in the siRNA molecule of the present invention comprises nucleotides 1 to 22, 1 to 21, 1 to 20, 1 to 19, 1 to 18, 1 to 17, 1 to 16, 1 to 15, 1 to 14, 1 to 13, 1 to 12, 1 to 11, 1 to 10, 1 to 9, 1 to 8, 2 to 22, 2 to 21, 2 to 20, 2 to 19, 2 to 18, 2 to 17, 2 to 16, 2 to 15, 2 to 14, 2 to 13, 2 to 12, 2 to 11, 2 to 10, 2 to 9, 2 to 8, 3 to 22, 3 to 21, 3 to 20, 3 to 19, 3 to 18, 3 to 17, 3 to 16, 3 to 15, 3 to 14, 3 to 13, 3 to 12, 3 to 11, 3 to 10, 3 to 9, 3 to 8, 4 to 22, 4 to 21, 4 to 20, 4 to 19, 4 to 18, 4 to 17, 4 to 16, 4 to 15, 4 to 14, 4 to 13, 4 to 12, 4 to 11, 4 to 10, 4 to 9, 4 to 8, 5 to 22, 5 to 21, 5 to 20, 5 to 19, 5 to 18, 5 to 17, 5 to 16, 5 to 15, 5 to 14, 5 to 13, 5 to 12, 5 to 11, 5 to 10, 5 to 9, 5 to 8, 6 to 22, 6 to 21, 6 to 20, 6 to 19, 6 to 18, 6 to 17, 6 to 16, 6 to 15, 6 to 14, 6 to 13, 6 to 12, 6 to 11, 6 to 10, 7 to 22, 7 to 21, 7 to 20, 7 to 19, 7 to 18, 7 to 17, 7 to 16, 7 to 15, 7 to 14, 7 to 13, 7 to 12, 8 to 22, 8 to 21, 8 to 20, 8 to 19, 8 to 18, 8 to 17, 8 to 16, 8 to 15, 8 to 14, 8 to 13, 8 to 12, 9 to 22, 9 to 21, 9 to 20, 9 to 19, 9 to 18, 9 to 17, 9 to 16, 9 to 15, 9 to 14, 10 to 22, 10 to 21, 10 to 20, 10 to 19, 10 to 18, 10 to 17, 10 to 16, 10 to 15, 10 to 14, 11 to 22, 11 to 21, 11 to 20, 11 to 19, 11 to 18, 11 to 17, 11 to 16, 11 to 15, 11 to 14, 12 to 22, 12 to 21, 12 to 20, 12 to 19, 12 to 18, 12 to 17, 12 to 16, 13 to 22, 13 to 21, 13 to 20, 13 to 19, 13 to 18, 13 to 17, 13 to 16, 14 to 22, 14 to 21, 14 to 20, 14 to 19, 14 to 18, 14 to 17, 15 to 22, 15 to 21, 15 to 20, 15 to 19, 15 to 18, 16 to 22, 16 to 21, 16 to 20, 17 to 22, 17 to 21, or 18 to 22 of the sequences in Table 2.

TABLE 2
Antisense Sequences

| | | SEQ |
|---|---|---|
| Antisense | | ID |
| ID | Sequence | NO |
| A-2000 | UUAACGUCAGUUCAUAAACUU | 914 |
| A-2000dt | UUAACGUCAGUUCAUAAACdTdT | 915 |
| A-2001 | UGUCGGUACCGUCUAACACUU | 916 |
| A-2001dt | UGUCGGUACCGUCUAACACdTdT | 917 |
| A-2002 | UAAGCAUGGAGCUAGCAGGUU | 918 |
| A-2002dt | UAAGCAUGGAGCUAGCAGGdTdT | 919 |
| A-2003 | UACAACGAGACUGAAUUGCUU | 920 |
| A-2003dt | UACAACGAGACUGAAUUGCdTdT | 921 |
| A-2004 | UUCAGUUCAUAAACCUGGAUU | 922 |
| A-2004dt | UUCAGUUCAUAAACCUGGAdTdT | 923 |
| A-2005 | UAACGUCAGUUCAUAAACCUU | 924 |
| A-2005dt | UAACGUCAGUUCAUAAACCdTdT | 925 |
| A-2006 | UCCGGUCACAACAUUGUGGUU | 926 |
| A-2006dt | UCCGGUCACAACAUUGUGGdTdT | 927 |
| A-2007 | UUGCACGGUUCUUUGUGACUU | 928 |
| A-2007dt | UUGCACGGUUCUUUGUGACdTdT | 929 |
| A-2008 | UUUUAUAACAAGAGGUUCAUU | 930 |
| A-2008dt | UUUUAUAACAAGAGGUUCAdTdT | 931 |
| A-2009 | UCCAAAUACUGGUUGUCGGUU | 932 |
| A-2009dt | UCCAAAUACUGGUUGUCGGdTdT | 933 |
| A-2010 | UAUUUUAGGAAUUCCAAUGUU | 934 |
| A-2010dt | UAUUUUAGGAAUUCCAAUGdTdT | 935 |
| A-2011 | UUUAGGAAUUCCAAUGAUCUU | 936 |
| A-2011dt | UUUAGGAAUUCCAAUGAUCdTdT | 937 |
| A-2012dt | UUAAUCUCUUUACUGAUAUdTdT | 938 |
| A-2013dt | GAUUUUAGGAAUUCCAAUGdTdT | 939 |
| A-2014 | UAAGCAUGGAGCUAGCAGGCUU | 940 |
| A-2015 | UAAGCAUGGAGCUAGCAGGGU | 941 |
| A-2016 | AAGGACUUGAGGGACUCGAAGU | 942 |
| A-2017 | AAGGACUUGAGGGACUCGAAG | 943 |
| A-2018 | AAGGACUUGAGGGACUCGA | 944 |
| A-2019 | AGGACUUGAGGGACUCGAAGU | 945 |
| A-2020 | GAGGACUUGAGGGACUCGAAGU | 946 |
| A-2021 | AAGGACUUGAGGGACUCGAAGU | 947 |
| A-2022 | AAGGACUUGAGGGACUCGAAGUU | 948 |
| A-2023 | AAGGACUUGAGGGACUCGAAG | 949 |
| A-2024 | AAGGACUUGAGGGACUCGA | 950 |
| A-2025 | AAGGACUUGAGGGACUCGAAGG | 951 |
| A-2026 | AAGGACUUGAGGGACUCGAAU | 952 |
| A-2027 | AAGGACUUGAGGGACUCGAAGA | 953 |
| A-2028 | AAGGACUUGAGGGACUCGAAGG | 954 |
| A-2029 | AAGGACUUGAGGGACUCGAAGGU | 955 |
| A-2030 | AAGGACUUGAGGGACUCGAAGGA | 956 |
| A-2031 | AAGGACUUGAGGGACUCGAAG | 957 |
| A-2032 | AAGGACUUGAGGGACUCGAAGU | 958 |
| A-2033 | AAGGACUUGAGGGACUCGA | 959 |
| A-2034 | AAGGACUUGAGGGACUCGAAGGA | 960 |
| A-2035 | AAGGACUUGAGGGACUCGAAGG | 961 |
| A-2036 | AAGGACUUGAGGGACUCGAAGGAU | 962 |
| A-2037 | AAGGACUUGAGGGACUCGAAGGAUU | 963 |
| A-2038 | AAGGACUUGAGGGACUCGAAG | 964 |
| A-2039 | AAGGACUUGAGGGACUCGAAGGAA | 965 |
| A-2040 | GAUGAAGUGCACACAUUGGAUGA | 966 |
| A-2041 | GAUGAACUGACACAUUGGAUG | 967 |
| A-2042 | GAUGAAUUGCACACAGUAGAUGA | 968 |
| A-2043 | AAGGACUUGAGGGACUCGAAGGUU | 969 |
| A-2044 | AAGGACUUGAGGGACUCGAAGGUUU | 970 |
| A-2045 | AAGGACUUGAGGGACUCGAAGGU | 971 |
| A-2046 | AAGGACUUGAGGGACUCGAAGGUUUU | 972 |
| A-2047 | AAGGACUUGAGGGACUCGAAGGUUUUU | 973 |
| A-2048 | AAGGACUUGAGGGACUCGAAGG | 974 |
| A-2049 | UAAGGACUUGAGGGACUCGAAG | 975 |
| A-2050 | AAGGACUUGAGGGACUCGAAG | 976 |
| A-2051 | AAGGACUUGAGGGACUCGAAGU | 977 |
| A-2052 | AAGGACUUGAGGGACUCGAAGACGAGUCCC | 978 |
| A-2053 | AAGGACUUGAGGGACUCGAAGACGAGUCCCA | 979 |
| A-2054 | AAGGACUUGAGGGACUCGAAGACGAGUCCCU | 980 |
| A-2055 | GAUGAAGUGCACACAUUGGAUAC | 981 |
| A-2056 | GAUGAAGUGCACACAUUGGAUACA | 982 |
| A-2057 | GAUGAAGUGCACACAUUGGAUACAAUGUGU | 983 |
| A-2058 | GAUGAAGUGCACACAUUGGAU | 984 |
| A-2059 | GAUGAAGUGCACACAUUGGAUA | 985 |
| A-2060 | GAUGAAUUGCACACAGUAGAUAU | 986 |
| A-2061 | GAUGAAUUGCACACAGUAGAUAUAC | 987 |
| A-2062 | GAUGAAUUGCACACAGUAGAUAUACUGUGU | 988 |
| A-2063 | GAUGAAUUGCACACAGUAGAUAUA | 989 |
| A-2064 | AUGAAUUGCACACAGUAGAUAUAC | 990 |
| A-2065 | GAUGAAUUGCACACAGUAGAUA | 991 |
| A-2066 | GAUGAAUUGCACACAGUAGAUAUACUGUGU | 992 |
| A-2067 | UACAACGAGACUGAAUUGCU | 993 |
| A-2068 | ACAACGAGACUGAAUUGCUU | 994 |
| A-2069 | UCCGGUCACAACAUUGUGGUUC | 995 |
| A-2070 | UCCGGUCACAACAUUGUGGU | 996 |
| A-2071 | UCCGGUCACAACAUUGUG | 997 |
| A-2072 | CCGGUCACAACAUUGUGGUU | 998 |
| A-2073 | UUUUAUAACAAGAGGUUCAU | 999 |
| A-2074 | UUUAUAACAAGAGGUUCAUU | 1000 |
| A-2075 | UAAGCAUGGAGCUAGCAGGU | 1001 |
| A-2076 | AAGCAUGGAGCUAGCAGGUU | 1002 |
| A-2077 | CCAAAUACUGGUUGUCGGUU | 1003 |
| A-2078 | UACAACGAGACUGAAUUGCUUU | 1004 |
| A-2079 | UAACGUCAGUUCAUAAACCUUU | 1005 |
| A-2080 | GUCCGGUCACAACAUUGUGGUU | 1006 |
| A-2081 | UCCGGUCACAACAUUGUGGUUUG | 1007 |
| A-2082 | UCCGGUCACAACAUUGUGGUUU | 1008 |
| A-2083 | UCCGGUCACAACAUUGUGG | 1009 |
| A-2084 | UAAGCAUGGAGCUAGCAGGUUU | 1010 |
| A-2085 | AAGCAUGGAGCUAGCAGGUUU | 1011 |
| A-2086 | UCCAAAUACUGGUUGUCGGUUU | 1012 |
| A-2087 | CCAAAUACUGGUUGUCGGUUU | 1013 |

[0316] In one embodiment, the siRNA molecules of the present invention may comprise a nucleotide sequence such as, but not limited to, the sense (passenger) sequences in Table 3 or a fragment or variant thereof. As a non-limiting example, the sense sequence used in the siRNA molecule of the present invention is at least 30%, 40%, 50%, 60%, 70%, 80%, 81%, 82%, 83%, 84%, 85%, 86%, 87%, 88%, 89%, 90%, 91%, 92%, 93%, 94%, 95%, 96%, 97%, 98% or 99% or at least 20-30%, 20-40%, 20-50%, 20-60%, 20-70%, 20-80%, 20-90%, 20-95%, 20-99%, 30-40%, 30-50%, 30-60%, 30-70%, 30-80%, 30-90%, 30-95%, 30-99%, 40-50%, 40-60%, 40-70%, 40-80%, 40-90%, 40-95%, 40-99%, 50-60%, 50-70%, 50-80%, 50-90%, 50-95%, 50-99%, 60-70%, 60-80%, 60-90%, 60-95%, 60-99%, 70-80%, 70-90%, 70-95%, 70-99%, 80-90%, 80-95%, 80-99%, 90-95%, 90-99% or 95-99% of a nucleotide sequence in Table 3. As another non-limiting example, the sense sequence used in the siRNA molecule of the present invention comprises at least 3, 4, 5, 6, 7, 8, 9, 10, 11, 12, 13, 14, 15, 16, 17, 18, 19, 20, 21 or more than 21 consecutive nucleotides of a nucleotide sequence in Table 3. As yet another non-limiting example, the sense sequence used in the siRNA molecule of the present invention comprises nucleotides 1 to 22, 1 to 21, 1 to 20, 1 to 19, 1 to 18, 1 to 17, 1 to 16, 1 to 15, 1 to 14, 1 to 13, 1 to 12, 1 to 11, 1 to 10, 1 to 9, 1 to 8, 2 to 22, 2 to 21, 2 to 20, 2 to 19, 2 to 18, 2 to 17, 2 to 6, 2 to 15, 2 to 14, 2 to 13, 2 to 12, 2 to 11, 2 to 10, 2 to 9, 2 to 8, 3 to 22, 3 to 21, 3 to 20, 3 to 19, 3 to 18, 3 to 17, 3 to 16, 3 to 15, 3 to 14, 3 to 13, 3 to 12, 3 to 11, 3 to 10, 3 to 9, 3 to 8, 4 to 22, 4 to 21, 4 to 20, 4 to 19, 4 to 18, 4 to 17, 4 to 16, 4 to 15, 4 to 14, 4 to 13, 4 to 12, 4 to 11, 4 to 10, 4 to 9, 4 to 8, 5 to 22, 5 to 21, 5 to 20, 5 to 19, 5 to 18, 5 to 17, 5 to 16, 5 to 15, 5 to 14, 5 to 13, 5 to 12, 5 to 11, 5 to 10, 5 to 9, 5 to 8, 6 to 22, 6 to 21, 6 to 20, 6 to 19, 6 to 18, 6 to 17, 6 to 16, 6 to 15, 6 to 14, 6 to 13, 6 to 12, 6 to 11, 6 to 10, 7 to 22, 7 to 21, 7 to 20, 7 to 19, 7 to 18, 7 to 17, 7 to 16, 7 to 15, 7 to 14, 7 to 13, 7 to 12, 8 to 22, 8 to 21, 8 to 20, 8 to 19, 8 to 18, 8 to 17, 8 to 16, 8 to 15, 8 to 14, 8 to 13, 8 to 12, 9 to 22, 9 to 21, 9 to 20, 9 to 19, 9 to 18, 9 to 17, 9 to 16, 9 to 15, 9 to 14, 10 to 22, 10 to 21, 10 to 20, 10 to 19, 10 to 18, 10 to 17, 10 to 16, 10 to 15, 10 to 14, 11 to 22, 11 to 21, 11 to 20, 11 to 19, 11 to 18, 11 to 17, 11 to 16, 11 to 15, 11 to 14, 12 to 22, 12 to 21, 12 to 20, 12 to 19, 12 to 18, 12 to 17, 12 to 16, 13 to 22, 13 to 21, 13 to 20, 13 to 19, 13 to 18, 13 to 17, 13 to 16, 14 to 22, 14 to 21, 14 to 20, 14 to 19, 14 to 18, 14 to 17, 15 to 22, 15 to 21, 15 to 20, 15 to 19, 15 to 18, 16 to 22, 16 to 21, 16 to 20, 17 to 22, 17 to 21, or 18 to 22 of the sequences in Table 3.

TABLE 3
Sense Sequences

| | | SEQ |
|---|---|---|
| | | ID |
| Sense ID | Sequence | NO |
| S-1000 | GUUUAUGAACUGAUCUUACCC | 1014 |
| S-1001 | GUGUUAGACGGUACUGAUCCC | 1015 |
| S-1002 | CCUGCUAGCUCCAUGCUUCCC | 1016 |
| S-1003 | GUUUAUGAACUGAUCUUAGCC | 1017 |
| S-1004 | GUGUUAGACGGUACUGAUGCC | 1018 |
| S-1005 | CCUGCUAGCUCCAUGCUUGCC | 1019 |
| S-1006 | GUUUAUGAAGUGAUCUUAACC | 1020 |
| S-1007 | GUGUUAGACCGUACUGAUACC | 1021 |
| S-1008 | CCUGCUAGCACCAUGCUUACC | 1022 |
| S-1009 | GUUUAUGAACUGAUCUUAACC | 1023 |
| S-1010 | GUGUUAGACGGUACUGAUACC | 1024 |
| S-1011 | CCUGCUAGCUCCAUGCUUACC | 1025 |
| S-1011dt | CCUGCUAGCUCCAUGCUUAdTdT | 1026 |
| S-1012 | GUUUAUGAACUGAUCUUGCCC | 1027 |
| S-1013 | GUUUAUGAACUGAUCUUGGCC | 1028 |
| S-1014 | GUUUAUGAACUGAUCUUGACC | 1029 |
| S-1015 | GCAAUUCAGUCUCGUUGUCCC | 1030 |
| S-1016 | UCCAGGUUUAUGAACUGACCC | 1031 |
| S-1017 | GGUUUAUGAACUGACGUUCCC | 1032 |
| S-1018 | CCACAAUGUUGUGACUGGCCC | 1033 |
| S-1019 | GUCACAAAGAACCGUGUACCC | 1034 |
| S-1020 | UGAACCUCUUGUUAUAAACCC | 1035 |
| S-1021 | CCGACAACCAGUAUUUGGCCC | 1036 |
| S-1022 | GCAAUUCAGUCUCGUUGUGCC | 1037 |
| S-1023 | UCCAGGUUUAUGAACUGAGCC | 1038 |
| S-1024 | GGUUUAUGAACUGACGUUGCC | 1039 |
| S-1025 | CCACAAUGUUGUGACUGGGCC | 1040 |
| S-1026 | GUCACAAAGAACCGUGUAGCC | 1041 |
| S-1027 | UGAACCUCUUGUUAUAAAGCC | 1042 |
| S-1028 | CCGACAACCAGUAUUUGGGCC | 1043 |
| S-1029 | GCAAUUCAGUCUCGUUGUACC | 1044 |
| S-1029dt | GCAAUUCAGUCUCGUUGUAdTdT | 1045 |
| S-1030 | UCCAGGUUUAUGAACUGAACC | 1046 |
| S-1030dt | UCCAGGUUUAUGAACUGAAdTdT | 1047 |
| S-1031 | GGUUUAUGAACUGACGUUACC | 1048 |
| S-1032 | CCACAAUGUUGUGACUGGACC | 1049 |
| S-1033 | GUCACAAAGAACCGUGUAACC | 1050 |
| S-1034 | UGAACCUCUUGUUAUAAAACC | 1051 |
| S-1034dt | UGAACCUCUUGUUAUAAAAdTdT | 1052 |
| S-1035 | CCGACAACCAGUAUUUGGACC | 1053 |
| S-1035dt | CCGACAACCAGUAUUUGGAdTdT | 1054 |
| S-1036 | GCAAUUCAGACUCGUUGUACC | 1055 |
| S-1037 | UCCAGGUUUUUGAACUGAACC | 1056 |
| S-1038 | GGUUUAUGAUCUGACGUUACC | 1057 |
| S-1039 | CCACAAUGUAGUGACUGGACC | 1058 |
| S-1040 | GUCACAAAGUACCGUGUAACC | 1059 |
| S-1041 | UGAACCUCUAGUUAUAAAACC | 1060 |
| S-1042 | CCGACAACCUGUAUUUGGACC | 1061 |
| S-1043 | CAUUGGAAUUCCUAAAAUUCC | 1062 |
| S-1044 | GAUCAUUGGAAUUCCUAAUCC | 1063 |
| S-1045 | CAUUGGAAUUCCUAAAAUGCC | 1064 |
| S-1046 | GAUCAUUGGAAUUCCUAAGCC | 1065 |
| S-1047 | CAUUGGAAUUCCUAAAAUACC | 1066 |
| S-1047dt | CAUUGGAAUUCCUAAAAUAdTdT | 1067 |
| S-1048 | GAUCAUUGGAAUUCCUAAACC | 1068 |
| S-1048dt | GAUCAUUGGAAUUCCUAAAdTdT | 1069 |
| S-1049 | CAUUGGAAUACCUAAAAUACC | 1070 |
| S-1050 | GAUCAUUGGUAUUCCUAAACC | 1071 |
| S-1051dt | GUUUAUGAACUGACGUUAAdTdT | 1072 |
| S-1052dt | GUGUUAGACGGUACCGACAdTdT | 1073 |
| S-1053dt | AUAUCAGUAAAGAGAUUAAdTdT | 1074 |
| S-1054dt | GGUUUAUGAACUGACGUUAdTdT | 1075 |
| S-1055dt | CCACAAUGUUGUGACCGGAdTdT | 1076 |
| S-1056dt | GUCACAAAGAACCGUGCAAdTdT | 1077 |
| S-1057dt | CAUUGGAAUUCCUAAAAUCdTdT | 1078 |
| S-1058 | CCUGCUAGCUCCAUGCUUGCU | 1079 |
| S-1059 | CCUGCUAGCUCCAUGCUUGAU | 1080 |
| S-1060 | CCUGCUAGCUCCAUGCUUAUU | 1081 |
| S-1061 | CCUGCUAGCUCCAUGCUUGUU | 1082 |
| S-1062 | UUCGAGUCCCUCAAGUAGCU | 1083 |
| S-1063 | UUCGAGUCCCUCAAGUAGCUUU | 1084 |
| S-1064 | UCGAGUCCCUCAAGUCCAUUCU | 1085 |
| S-1065 | UUCCAGUCCAUCAAGUCAAUU | 1086 |
| S-1066 | UUCCGAGUCUAAAAGUCCUUGG | 1087 |
| S-1067 | UUCCGAGUCUAAAAGUCCUUGGC | 1088 |
| S-1068 | CUUCCGAGUCUAAAAGUCCUUGG | 1089 |
| S-1069 | UUCCGAGUCUAAAAGUCCUUGGU | 1090 |
| S-1070 | UUCCGAGUCUAAAAGUCCUUGGCU | 1091 |
| S-1071 | UCCAAUGUGAAACUUCAUCGGCU | 1092 |
| S-1072 | UCCAAUGUGAAACUUCAUCGGC | 1093 |
| S-1073 | AUCCAAUGUGAAACUUCAUCGU | 1094 |
| S-1074 | AUCCAAUGUGAAACUUCAUCGGU | 1095 |
| S-1075 | UCCAAUGUGAAACUUCAUCGGU | 1096 |
| S-1076 | UCCAAUGUGAAACUUCAUCGGCUU | 1097 |
| S-1077 | AUCUACUGUGAAAAUUCAUCGG | 1098 |
| S-1078 | UCUACUGUGAAAAUUCAUCGG | 1099 |
| S-1079 | UCUACUGUGAAAAUUCAUCGGC | 1100 |
| S-1080 | AUCUACUGUGAAAAUUCAUCGGU | 1101 |
| S-1081 | UCUACUGUGAAAAUUCAUCGGU | 1102 |
| S-1082 | UCUACUGUGAAAAUUCAUCGGCU | 1103 |
| S-1083 | CCUUCGGUCCUCAAGUCCUUCA | 1104 |
| S-1084 | UUCGAGUCCAUCAAAUCCUAUAGU | 1105 |
| S-1085 | UACAAUGUGUGCACUUAUAU | 1106 |
| S-1086 | UAUACUGUGUGCAAUUCAUUUCU | 1107 |
| S-1087 | GCAAUUCAGUCUCGUUGUCC | 1108 |
| S-1088 | GCAAUUCAGUCUCGUUGUC | 1109 |
| S-1089 | CAAUUCAGUCUCGUUGUCCC | 1110 |
| S-1090 | CAAUUCAGUCUCGUUGUCC | 1111 |
| S-1091 | GCAAUUCAGUCUCGUUGUGC | 1112 |
| S-1092 | CAAUUCAGUCUCGUUGUGCC | 1113 |
| S-1093 | CCACAAUGUUGUGACUGGGCCU | 1114 |
| S-1094 | CCACAAUGUUGUGACUGGGC | 1115 |
| S-1095 | CACAAUGUUGUGACUGGGCC | 1116 |
| S-1096 | UGAACCUCUUGUUAUAAAGCCU | 1117 |
| S-1097 | UGAACCUCUUGUUAUAAAGC | 1118 |
| S-1098 | GAACCUCUUGUUAUAAAGCC | 1119 |
| S-1099 | CCUGCUAGCUCCAUGCUUGCCU | 1120 |
| S-1100 | CCUGCUAGCUCCAUGCUUGC | 1121 |
| S-1101 | CCUGCUAGCUCCAUGCUUG | 1122 |
| S-1102 | CUGCUAGCUCCAUGCUUGCC | 1123 |
| S-1103 | CCGACAACCAGUAUUUGGGCCU | 1124 |
| S-1104 | CCGACAACCAGUAUUUGGGC | 1125 |
| S-1105 | CCGACAACCAGUAUUUGGG | 1126 |
| S-1106 | CGACAACCAGUAUUUGGGCC | 1127 |
| S-1107 | CGACAACCAGUAUUUGGGC | 1128 |
| S-1108 | GCAAUUCAGUCUCGUUGUACCU | 1129 |
| S-1109 | GCAAUUCAGUCUCGUUGUAC | 1130 |
| S-1110 | GCAAUUCAGUCUCGUUGUA | 1131 |
| S-1111 | CAAUUCAGUCUCGUUGUACC | 1132 |
| S-1112 | GCAAUUCAGACUCGUUGUACCU | 1133 |
| S-1113 | GCAAUUCAGACUCGUUGUAC | 1134 |
| S-1114 | GCAAUUCAGACUCGUUGUA | 1135 |
| S-1115 | CAAUUCAGACUCGUUGUACC | 1136 |
| S-1116 | AGCAAUUCAGUCUCGUUGUACC | 1137 |
| S-1117 | AGCAAUUCAGUCUCGUUGUAC | 1138 |
| S-1118 | AGGUUUAUGAACUGACGUUAC | 1139 |
| S-1119 | AGGUUUAUGAACUGACGUUACC | 1140 |
| S-1120 | ACCACAAUGUUGUGACUGGAC | 1141 |
| S-1121 | ACCACAAUGUUGUGACUGGACC | 1142 |
| S-1122 | CCACAAUGUUGUGACUGGACCGU | 1143 |
| S-1123 | CCACAAUGUUGUGACUGGACCG | 1144 |
| S-1124 | CCACAAUGUUGUGACUGGAC | 1145 |
| S-1125 | CACAAUGUUGUGACUGGACC | 1146 |
| S-1126 | ACCUGCUAGCUCCAUGCUUCCC | 1147 |
| S-1127 | ACCUGCUAGCUCCAUGCUUCC | 1148 |
| S-1128 | ACCUGCUAGCUCCAUGCUUC | 1149 |
| S-1129 | CCUGCUAGCUCCAUGCUUCC | 1150 |
| S-1130 | CCUGCUAGCUCCAUGCUUC | 1151 |
| S-1131 | CUGCUAGCUCCAUGCUUCCC | 1152 |
| S-1132 | CUGCUAGCUCCAUGCUUCC | 1153 |
| S-1133 | ACCGACAACCAGUAUUUGGACC | 1154 |
| S-1134 | ACCGACAACCAGUAUUUGGAC | 1155 |
| S-1135 | CCGACAACCAGUAUUUGGACCGU | 1156 |
| S-1136 | CCGACAACCAGUAUUUGGACCGU | 1157 |
| S-1137 | CCGACAACCAGUAUUUGGAC | 1158 |
| S-1138 | CGACAACCAGUAUUUGGACC | 1159 |
| S-1139 | CCUGCUAGCACCGUGCUUACC | 1160 |

[0317] In one embodiment, the siRNA molecules of the present invention may comprise an antisense sequence from Table 2 and a sense sequence from Table 3, or a fragment or variant thereof. As a non-limiting example, the antisense sequence and the sense sequence have at least 30%, 40%, 50%, 60%, 70%, 80%, 81%, 82%, 83%, 84%, 85%, 86%, 87%, 88%, 89%, 90%, 91%, 92%, 93%, 94%, 95%, 96%, 97%, 98% or 99% or at least 20-30%, 20-40%, 20-50%, 20-60%, 20-70%, 20-80%, 20-90%, 20-95%, 20-99%, 30-40%, 30-50%, 30-60%, 30-70%, 30-80%, 30-90%, 30-95%, 30-99%, 40-50%, 40-60%, 40-70%, 40-80%, 40-90%, 40-95%, 40-99%, 50-60%, 50-70%, 50-80%, 50-90%, 50-95%, 50-99%, 60-70%, 60-80%, 60-90%, 60-95%, 60-99%, 70-80%, 70-90%, 70-95%, 70-99%, 80-90%, 80-95%, 80-99%, 90-95%, 90-99% or 95-99% complementarity.

[0318] In one embodiment, the siRNA molecules of the present invention may comprise the sense and antisense siRNA duplex as described in Tables 4-6. As a non-limiting example, these siRNA duplexes may be tested for in vitro inhibitory activity on endogenous HTT gene expression. The start site for the sense and antisense sequence is compared to HTT gene sequence known as NM_002111.7 (SEQ ID NO: 1425) from NCBI.

TABLE 4
Sense and antisense strand sequences of HTT dsRNA

| | | | Sense | | | | Antisense | |
|---|---|---|---|---|---|---|---|---|
| siRNA | | | Strand | SS | | | Strand | AS |
| Duplex | | Start | Sequence | SEQ | | Start | Sequence | SEQ |
| ID | SS ID | SS | (5′-3′) | ID | AS ID | AS | (5′-3′) | ID |
| D-3566 | S-1058 | 6751 | CCUGCUAGCUC | 1079 | A-2002 | 6751 | UAACCAUGGAG | 918 |
| | | | CAUGCUUGCU | | | | CUAGCAGGUU | |
| D-3567 | S-1058 | 6751 | CCUGCUAGCUC | 1079 | A-2014 | 6748 | UAAGCAUGGAG | 940 |
| | | | CAUGCUUGCU | | | | CUAGCAGGCUU | |
| D-3568 | S-1059 | 6751 | CCUGCUAGCUC | 1080 | A-2002 | 6751 | UAAGCAUGGAG | 918 |
| | | | CAUGCUUGAU | | | | CUAGCAGGUU | |
| D-3569 | S-1060 | 6751 | CCUGCUAGCUC | 1081 | A-2015 | 6751 | UAAGCAUGGAG | 941 |
| | | | CAUGCUUAUU | | | | CUAGCAGGGU | |
| D-3570 | S-1061 | 6751 | CCUGCUAGCUC | 1082 | A-2002 | 6751 | UAAGCAUGGAG | 918 |
| | | | CAUGCUUGUU | | | | CUAGCAGGUU | |
| D-3500 | S-1016 | 1386 | UCCAGGUUUAU | 1031 | A-2004 | 1386 | UUCAGUUCAUA | 922 |
| | | | GAACUGACCC | | | | AACCUGGAUU | |
| D-3501 | S-1023 | 1386 | UCCAGGUUUAU | 1038 | A-2004 | 1386 | UUCAGUUCAUA | 922 |
| | | | GAACUGAGCC | | | | AACCUGGAUU | |
| D-3502 | S-1030 | 1386 | UCCAGGUUUAU | 1046 | A-2004 | 1386 | UUCAGUUCAUA | 922 |
| | | | GAACUGAACC | | | | AACCUGGAUU | |
| D-3503 | S-1037 | 1386 | UCCAGGUUUUU | 1056 | A-2004 | 1386 | UUCAGUUCAUA | 922 |
| | | | GAACUGAACC | | | | AACCUGGAUU | |
| D-3504 | S-1030 | 1386 | UCCAGGUUUAU | 1046 | A-2001 | 2066 | UGUCGGUACCG | 916 |
| | | | GAACUGAACC | | | | UCUAACACUU | |
| D-3505 | S-1017 | 1390 | GGUUUAUGAAC | 1032 | A-2005 | 1389 | UAACGUCAGUU | 924 |
| | | | UGACGUUCCC | | | | CAUAAACCUU | |
| D-3506 | S-1024 | 1390 | GGUUUAUGAAC | 1039 | A-2005 | 1389 | UAACGUCAGUU | 924 |
| | | | UGACGUUGCC | | | | CAUAAACCUU | |
| D-3507 | S-1031 | 1390 | GGUUUAUGAAC | 1048 | A-2005 | 1389 | UAACGUCAGUU | 924 |
| | | | UGACGUUACC | | | | CAUAAACCUU | |
| D-3508 | S-1038 | 1390 | GGUUUAUGAUC | 1057 | A-2005 | 1389 | UAACGUCAGUU | 924 |
| | | | UGACGUUACC | | | | CAUAAACCUU | |
| D-3509 | S-1000 | 1391 | GUUUAUGAACU | 1014 | A-2000 | 1391 | UUAACGUCAGU | 914 |
| | | | GAUCUUACCC | | | | UCAUAAACUU | |
| D-3510 | S-1003 | 1391 | GUUUAUGAACU | 1017 | A-2000 | 1391 | UUAACGUCAGU | 914 |
| | | | GAUCUUAGCC | | | | UCAUAAACUU | |
| D-3511 | S-1006 | 1391 | GUUUAUGAAG | 1020 | A-2000 | 1391 | UUAACGUCAGU | 914 |
| | | | UGAUCUUAACC | | | | UCAUAAACUU | |
| D-3512 | S-1009 | 1391 | GUUUAUGAACU | 1023 | A-2000 | 1391 | UUAACGUCAGU | 914 |
| | | | GAUCUUAACC | | | | UCAUAAACUU | |
| D-3513 | S-1012 | 1391 | GUUUAUGAACU | 1027 | A-2000 | 1391 | UUAACGUCAGU | 914 |
| | | | GAUCUUGCCC | | | | UCAUAAACUU | |
| D-3514 | S-1013 | 1391 | GUUUAUGAACU | 1028 | A-2000 | 1391 | UUAACGUCAGU | 914 |
| | | | GAUCUUGGCC | | | | UCAUAAACUU | |
| D-3515 | S-1014 | 1391 | GUUUAUGAACU | 1029 | A-2000 | 1391 | UUAACGUCAGU | 914 |
| | | | GAUCUUGACC | | | | UCAUAAACUU | |
| D-3516 | S-1018 | 1429 | CCACAAUGUUG | 1033 | A-2006 | 1428 | UCCGGUCACAA | 926 |
| | | | UGACUGGCCC | | | | CAUUGUGGUU | |
| D-3517 | S-1025 | 1429 | CCACAAUGUUG | 1040 | A-2006 | 1428 | UCCGGUCACAA | 926 |
| | | | UGACUGGGCC | | | | CAUUGUGGUU | |
| D-3518 | S-1032 | 1429 | CCACAAUGUUG | 1049 | A-2006 | 1428 | UCCGGUCACAA | 926 |
| | | | UGACUGGACC | | | | CAUUGUGGUU | |
| D-3519 | S-1039 | 1429 | CCACAAUGUAG | 1058 | A-2006 | 1428 | UCCGGUCACAA | 926 |
| | | | UGACUGGACC | | | | CAUUGUGGUU | |
| D-3520 | S-1001 | 2066 | GUGUUAGACGG | 1015 | A-2001 | 2066 | UGUCGGUACCG | 916 |
| | | | UACUGAUCCC | | | | UCUAACACUU | |
| D-3521 | S-1004 | 2066 | GUGUUAGACGG | 1018 | A-2001 | 2066 | UGUCGGUACCG | 916 |
| | | | UACUGAUGCC | | | | UCUAACACUU | |
| D-3522 | S-1007 | 2066 | GUGUUAGACCG | 1021 | A-2001 | 2066 | UGUCGGUACCG | 916 |
| | | | UACUGAUACC | | | | UCUAACACUU | |
| D-3523 | S-1010 | 2066 | GUGUUAGACGG | 1024 | A-2001 | 2066 | UGUCGGUACCG | 916 |
| | | | UACUGAUACC | | | | UCUAACACUU | |
| D-3524 | S-1021 | 2079 | CCGACAACCAG | 1036 | A-2009 | 2078 | UCCAAAUACUG | 932 |
| | | | UAUUUGGCCC | | | | GUUGUCGGUU | |
| D-3525 | S-1028 | 2079 | CCGACAACCAG | 1043 | A-2009 | 2078 | UCCAAAUACUG | 932 |
| | | | UAUUUGGGCC | | | | GUUGUCGGUU | |
| D-3526 | S-1035 | 2079 | CCGACAACCAG | 1053 | A-2009 | 2078 | UCCAAAUACUG | 932 |
| | | | UAUUUGGACC | | | | GUUGUCGGUU | |
| D-3527 | S-1042 | 2079 | CCGACAACCUG | 1061 | A-2009 | 2078 | UCCAAAUACUG | 932 |
| | | | UAUUUGGACC | | | | GUUGUCGGUU | |
| D-3528 | S-1019 | 4544 | GUCACAAAGAA | 1034 | A-2007 | 4544 | UUGCACGGUUC | 928 |
| | | | CCGUGUACCC | | | | UUUGUGACUU | |
| D-3529 | S-1026 | 4544 | GUCACAAAGAA | 1041 | A-2007 | 4544 | UUGCACGGUUC | 928 |
| | | | CCGUGUAGCC | | | | UUUGUGACUU | |
| D-3530 | S-1033 | 4544 | GUCACAAAGAA | 1050 | A-2007 | 4544 | UUGCACGGUUC | 928 |
| | | | CCGUGUAACC | | | | UUUGUGACUU | |
| D-3531 | S-1040 | 4544 | GUCACAAAGUA | 1059 | A-2007 | 4544 | UUGCACGGUUC | 928 |
| | | | CCGUGUAACC | | | | UUUGUGACUU | |
| D-3532 | S-1020 | 4597 | UGAACCUCUUG | 1035 | A-2008 | 4597 | UUUUAUAACAA | 930 |
| | | | UUAUAAACCC | | | | GAGGUUCAUU | |
| D-3533 | S-1027 | 4597 | UGAACCUCUUG | 1042 | A-2008 | 4597 | UUUUAUAACAA | 930 |
| | | | UUAUAAAGCC | | | | GAGGUUCAUU | |
| D-3534 | S-1034 | 4597 | UGAACCUCUUG | 1051 | A-2008 | 4597 | UUUUAUAACAA | 930 |
| | | | UUAUAAAACC | | | | GAGGUUCAUU | |
| D-3535 | S-1041 | 4597 | UGAACCUCUAG | 1060 | A-2008 | 4597 | UUUUAUAACAA | 930 |
| | | | UUAUAAAACC | | | | GAGGUUCAUU | |
| D-3536 | S-1044 | 4861 | GAUCAUUGGAA | 1063 | A-2011 | 4860 | UUUAGGAAUUC | 936 |
| | | | UUCCUAAUCC | | | | CAAUGAUCUU | |
| D-3537 | S-1046 | 4861 | GAUCAUUGGAA | 1065 | A-2011 | 4860 | UUUAGGAAUUC | 936 |
| | | | UUCCUAAGCC | | | | CAAUGAUCUU | |
| D-3538 | S-1048 | 4861 | GAUCAUUGGAA | 1068 | A-2011 | 4860 | UUUAGGAAUUC | 936 |
| | | | UUCCUAAACC | | | | CAAUGAUCUU | |
| D-3539 | S-1050 | 4861 | GAUCAUUGGUA | 1071 | A-2011 | 4860 | UUUAGGAAUUC | 936 |
| | | | UUCCUAAACC | | | | CAAUGAUCUU | |
| D-3540 | S-1043 | 4864 | CAUUGGAAUUC | 1062 | A-2010 | 4864 | UAUUUUAGGA | 934 |
| | | | CUAAAAUUCC | | | | AUUCCAAUGUU | |
| D-3541 | S-1045 | 4864 | CAUUGGAAUUC | 1064 | A-2010 | 4864 | UAUUUUAGGA | 934 |
| | | | CUAAAAUGCC | | | | AUUCCAAUGUU | |
| D-3542 | S-1047 | 4864 | CAUUGGAAUUC | 1066 | A-2010 | 4864 | UAUUUUAGGA | 934 |
| | | | CUAAAAUACC | | | | AUUCCAAUGUU | |
| D-3543 | S-1049 | 4864 | CAUUGGAAUAC | 1070 | A-2010 | 4864 | UAUUUUAGGA | 934 |
| | | | CUAAAAUACC | | | | AUUCCAAUGUU | |
| D-3544 | S-1015 | 6188 | GCAAUUCAGUC | 1030 | A-2003 | 6188 | UACAACGAGAC | 920 |
| | | | UCGUUGUCCC | | | | UGAAUUGCUU | |
| D-3545 | S-1022 | 6188 | GCAAUUCAGUC | 1037 | A-2003 | 6188 | UACAACGAGAC | 920 |
| | | | UCGUUGUGCC | | | | UGAAUUGCUU | |
| D-3546 | S-1029 | 6188 | GCAAUUCAGUC | 1044 | A-2003 | 6188 | UACAACGAGAC | 920 |
| | | | UCGUUGUACC | | | | UGAAUUGCUU | |
| D-3547 | S-1036 | 6188 | GCAAUUCAGAC | 1055 | A-2003 | 6188 | UACAACGAGAC | 920 |
| | | | UCGUUGUACC | | | | UGAAUUGCUU | |
| D-3548 | S-1002 | 6751 | CCUGCUAGCUC | 1016 | A-2002 | 6751 | UAAGCAUGGAG | 918 |
| | | | CAUGCUUCCC | | | | CUAGCAGGUU | |
| D-3549 | S-1005 | 6751 | CCUGCUAGCUC | 1019 | A-2002 | 6751 | UAAGCAUGGAG | 918 |
| | | | CAUGCUUGCC | | | | CUAGCAGGUU | |
| D-3550 | S-1008 | 6751 | CCUGCUAGCAC | 1022 | A-2002 | 6751 | UAAGCAUGGAG | 918 |
| | | | CAUGCUUACC | | | | CUAGCAGGUU | |
| D-3551 | S-1011 | 6751 | CCUGCUAGCUC | 1025 | A-2002 | 6751 | UAAGCAUGGAG | 918 |
| | | | CAUGCUUACC | | | | CUAGCAGGUU | |

TABLE 5
Sense and antisense strand sequences of HTT dsRNA

| | | | Sense | | | | Antisense | |
|---|---|---|---|---|---|---|---|---|
| siRNA | | | Strand | SS | | | Strand | AS |
| Duplex | | Start | Sequence | SEQ | | Start | Sequence | SEQ |
| ID | SS ID | SS | (5′-3′) | ID | AS ID | AS | (5′-3′) | ID |
| D-3552 | S-1051dt | 1391 | GUUUAUGAACUG | 1072 | A-2000dt | 1391 | UUAACGUCAGUU | 915 |
| | | | ACGUUAAdTdT | | | | CAUAAACdTdT | |
| D-3553 | S-1052dt | 2066 | GUGUUAGACGGU | 1073 | A-2001dt | 2066 | UGUCGGUACCGU | 917 |
| | | | ACCGACAdTdT | | | | CUAACACdTdT | |
| D-3554 | S-1011dt | 6751 | CCUGCUAGCUCC | 1026 | A-2002dt | 6751 | UAAGCAUGGAGC | 919 |
| | | | AUGCUUAdTdT | | | | UAGCAGGdTdT | |
| D-3555 | S-1053dt | 10322 | AUAUCAGUAAAG | 1074 | A-2012dt | 10322 | UUAAUCUCUUUA | 938 |
| | | | AGAUUAAdTdT | | | | CUGAUAUdTdT | |
| D-3556 | S-1030dt | 1386 | UCCAGGUUUAUG | 1047 | A-2004dt | 1386 | UUCAGUUCAUAA | 923 |
| | | | AACUGAAdTdT | | | | ACCUGGAdTdT | |
| D-3557 | S-1054dt | 1390 | GGUUUAUGAACU | 1075 | A-2005dt | 1390 | UAACGUCAGUUC | 925 |
| | | | GACGUUAdTdT | | | | AUAAACCdTdT | |
| D-3558 | S-1055dt | 1429 | CCACAAUGUUGU | 1076 | A-2006dt | 1429 | UCCGGUCACAAC | 927 |
| | | | GACCGGAdTdT | | | | AUUGUGGdTdT | |
| D-3559 | S-1035dt | 2079 | CCGACAACCAGU | 1054 | A-2009dt | 2079 | UCCAAAUACUGG | 933 |
| | | | AUUUGGAdTdT | | | | UUGUCGGdTdT | |
| D-3560 | S-1056dt | 4544 | GUCACAAAGAAC | 1077 | A-2007dt | 4544 | UUGCACGGUUCU | 929 |
| | | | CGUGCAAdTdT | | | | UUGUGACdTdT | |
| D-3561 | S-1034dt | 4597 | UGAACCUCUUGU | 1052 | A-2008dt | 4597 | UUUUAUAACAAG | 931 |
| | | | UAUAAAAdTdT | | | | AGGUUCAdTdT | |
| D-3562 | S-1029dt | 6188 | GCAAUUCAGUCU | 1045 | A-2003dt | 6188 | UACAACGAGACU | 921 |
| | | | CGUUGUAdTdT | | | | GAAUUGCdTdT | |
| D-3563 | S-1047dt | 4864 | CAUUGGAAUUCC | 1067 | A-2010dt | 4864 | UAUUUUAGGAAU | 935 |
| | | | UAAAAUAdTdT | | | | UCCAAUGdTdT | |
| D-3564 | S-1048dt | 4861 | GAUCAUUGGAAU | 1069 | A-2011dt | 4861 | UUUAGGAAUUCC | 937 |
| | | | UCCUAAAdTdT | | | | AAUGAUCdTdT | |
| D-3565 | S-1057dt | 4864 | CAUUGGAAUUCC | 1078 | A-2013dt | 4864 | GAUUUUAGGAAU | 939 |
| | | | UAAAAUCdTdT | | | | UCCAAUGdTdT | |

TABLE 6
Antisense and Sense strand sequences of HTT dsRNA

| | | | Antisense | | | | Sense | |
|---|---|---|---|---|---|---|---|---|
| siRNA | | | Strand | AS | | | Strand | SS |
| Duplex | | Start | Sequence | SEQ | | Start | Sequence | SEQ |
| ID | AS ID | AS | (5′-3′) | ID | SS ID | SS | (5′-3′) | ID |
| D-3569 | S-1060 | 6751 | CCUGCUAGCUC | 1081 | A-2015 | 6751 | UAAGCAUGGAG | 941 |
| | | | CAUGCUUAUU | | | | CUAGCAGGGU | |
| D-3570 | S-1061 | 6751 | CCUGCUAGCUC | 1082 | A-2002 | 6751 | UAAGCAUGGAG | 918 |
| | | | CAUGCUUGUU | | | | CUAGCAGGUU | |

[0319] In other embodiments, the siRNA molecules of the present invention can be encoded in plasmid vectors, AAV particles, viral genome or other nucleic acid expression vectors for delivery to a cell.

[0320] DNA expression plasmids can be used to stably express the siRNA duplexes or dsRNA of the present invention in cells and achieve long-term inhibition of the target gene expression. In one aspect, the sense and antisense strands of a siRNA duplex are typically linked by a short spacer sequence leading to the expression of a stem-loop structure termed short hairpin RNA (shRNA). The hairpin is recognized and cleaved by Dicer, thus generating mature siRNA molecules.

[0321] According to the present invention, AAV particles comprising the nucleic acids encoding the siRNA molecules targeting HTT mRNA are produced, the AAV serotypes may be any of the serotypes listed in Table 1. Non-limiting examples of the AAV serotypes include, AAV1, AAV2, AAV3, AAV4, AAV5, AAV6, AAV7, AAV8, AAV9, AAV9.47, AAV9 (hu14), AAV10, AAV11, AAV12, AAVrh8, AAVrh10, AAV-DJ8, AAV-DJ, AAV-PHP.A, and/or AAV-PHP.B, and variants thereof.

[0322] In some embodiments, the siRNA duplexes or encoded dsRNA of the present invention suppress (or degrade) target mRNA (e.g., HTT). Accordingly, the siRNA duplexes or encoded dsRNA can be used to substantially inhibit HTT gene expression in a cell, for example a neuron. In some aspects, the inhibition of HTT gene expression refers to an inhibition by at least about 20%, preferably by at least about 30%, 40%, 50%, 60%, 70%, 80%, 85%, 90%, 95% and 100%, or at least 20-30%, 20-40%, 20-50%, 20-60%, 20-70%, 20-80%, 20-90%, 20-95%, 20-100%, 30-40%, 30-50%, 30-60%, 30-70%, 30-80%, 30-90%, 30-95%, 30-100%, 40-50%, 40-60%, 40-70%, 40-80%, 40-90%, 40-95%, 40-100%, 50-60%, 50-70%, 50-80%, 50-90%, 50-95%, 50-100%, 60-70%, 60-80%, 60-90%, 60-95%, 60-100%, 70-80%, 70-90%, 70-95%, 70-100%, 80-90%, 80-95%, 80-100%, 90-95%, 90-100% or 95-100%. Accordingly, the protein product of the targeted gene may be inhibited by at least about 20%, preferably by at least about 30%, 40%, 50%, 60%, 70%, 80%, 85%, 90%, 95% and 100%, or at least 20-30%, 20-40%, 20-50%, 20-60%, 20-70%, 20-80%, 20-90%, 20-95%, 20-100%, 30-40%, 30-50%, 30-60%, 30-70%, 30-80%, 30-90%, 30-95%, 30-100%, 40-50%, 40-60%, 40-70%, 40-80%, 40-90%, 40-95%, 40-100%, 50-60%, 50-70%, 50-80%, 50-90%, 50-95%, 50-100%, 60-70%, 60-80%, 60-90%, 60-95%, 60-100%, 70-80%, 70-90%, 70-95%, 70-100%, 80-90%, 80-95%, 80-100%, 90-95%, 90-100% or 95-100%.

[0323] According to the present invention, the siRNA molecules are designed and tested for their ability in reducing HTT mRNA levels in cultured cells. Such siRNA molecules may form a duplex such as, but not limited to, include those listed in Table 4, Table 5 or Table 6. As a non-limiting example, the siRNA duplexes may be siRNA duplex IDs: D-3500 to D-3570.

[0324] In one embodiment, the siRNA molecules comprise a miRNA seed match for the target (e.g., HTT) located in the guide strand. In another embodiment, the siRNA molecules comprise a miRNA seed match for the target (e.g., HTT) located in the passenger strand. In yet another embodiment, the siRNA duplexes or encoded dsRNA targeting HTT gene do not comprise a seed match for the target (e.g., HTT) located in the guide or passenger strand.

[0325] In one embodiment, the siRNA duplexes or encoded dsRNA targeting HTT gene may have almost no significant full-length off target effects for the guide strand. In another embodiment, the siRNA duplexes or encoded dsRNA targeting HTT gene may have almost no significant full-length off target effects for the passenger strand. The siRNA duplexes or encoded dsRNA targeting HTT gene may have less than 1%, 2%, 3%, 4%, 5%, 6%, 7%, 8%, 9%, 10%, 11%, 12%, 13%, 14%, 15%, 20%, 25%, 30%, 35%, 40%, 45%, 50%, 1-5%, 2-6%, 3-7%, 4-8%, 5-9%, 5-10%, 6-10%, 5-15%, 5-20%, 5-25% 5-30%, 10-20%, 10-30%, 10-40%, 10-50%, 15-30%, 15-40%, 15-45%, 20-40%, 20-50%, 25-50%, 30-40%, 30-50%, 35-50%, 40-50%, 45-50% full-length off target effects for the passenger strand. In yet another embodiment, the siRNA duplexes or encoded dsRNA targeting HTT gene may have almost no significant full-length off target effects for the guide strand or the passenger strand. The siRNA duplexes or encoded dsRNA targeting HTT gene may have less than 1%, 2%, 3%, 4%, 5%, 6%, 7%, 8%, 9%, 10%, 11%, 12%, 13%, 14%, 15%, 20%, 25%, 30%, 35%, 40%, 45%, 50%, 1-5%, 2-6%, 3-7%, 4-8%, 5-9%, 5-10%, 6-10%, 5-15%, 5-20%, 5-25% 5-30%, 10-20%, 10-30%, 10-40%, 10-50%, 15-30%, 15-40%, 15-45%, 20-40%, 20-50%, 25-50%, 30-40%, 30-50%, 35-50%, 40-50%, 45-50% full-length off target effects for the guide or passenger strand.

[0326] In one embodiment, the siRNA duplexes or encoded dsRNA targeting HTT gene may have high activity in vitro. In another embodiment, the siRNA molecules may have low activity in vitro. In yet another embodiment, the siRNA duplexes or dsRNA targeting the HTT gene may have high guide strand activity and low passenger strand activity in vitro.

[0327] In one embodiment, the siRNA molecules have a high guide strand activity and low passenger strand activity in vitro. The target knock-down (KD) by the guide strand may be at least 40%, 50%, 60%, 65%, 70%, 75%, 80%, 85%, 90%, 95%, 99%, 99.5% or 100%. The target knock-down by the guide strand may be 40-50%, 45-50%, 50-55%, 50-60%, 60-65%, 60-70%, 60-75%, 60-80%, 60-85%, 60-90%, 60-95%, 60-99%, 60-99.5%, 60-100%, 65-70%, 65-75%, 65-80%, 65-85%, 65-90%, 65-95%, 65-99%, 65-99.5%, 65-100%, 70-75%, 70-80%, 70-85%, 70-90%, 70-95%, 70-99%, 70-99.5%, 70-100%, 75-80%, 75-85%, 75-90%, 75-95%, 75-99%, 75-99.5%, 75-100%, 80-85%, 80-90%, 80-95%, 80-99%, 80-99.5%, 80-100%, 85-90%, 85-95%, 85-99%, 85-99.5%, 85-100%, 90-95%, 90-99%, 90-99.5%, 90-100%, 95-99%, 95-99.5%, 95-100%, 99-99.5%, 99-100% or 99.5-100%. As a non-limiting example, the target knock-down (KD) by the guide strand is greater than 70%. As a non-limiting example, the target knock-down (KD) by the guide strand is greater than 60%.

[0328] In one embodiment, the siRNA duplex is designed so there is no miRNA seed match for the sense or antisense sequence to non-Htt sequence.

[0329] In one embodiment, the IC₅₀ of the guide strand for the nearest off target is greater than 100 multiplied by the IC₅₀ of the guide strand for the on-target gene, Htt. As a non-limiting example, if the IC₅₀ of the guide strand for the nearest off target is greater than 100 multiplied by the IC₅₀ of the guide strand for the target then the siRNA molecule is said to have high guide strand selectivity for inhibiting Htt in vitro.

[0330] In one embodiment, the 5′ processing of the guide strand has a correct start (n) at the 5′ end at least 75%, 80%, 85%, 90%, 95%, 99% or 100% of the time in vitro or in vivo. As a non-limiting example, the 5′ processing of the guide strand is precise and has a correct start (n) at the 5′ end at least 99% of the time in vitro. As a non-limiting example, the 5′ processing of the guide strand is precise and has a correct start (n) at the 5′ end at least 99% of the time in vivo. As a non-limiting example, the 5′ processing of the guide strand is precise and has a correct start (n) at the 5′ end at least 90% of the time in vitro. As a non-limiting example, the 5′ processing of the guide strand is precise and has a correct start (n) at the 5′ end at least 90% of the time in vivo. As a non-limiting example, the 5′ processing of the guide strand is precise and has a correct start (n) at the 5′ end at least 85% of the time in vitro. As a non-limiting example, the 5′ processing of the guide strand is precise and has a correct start (n) at the 5′ end at least 85% of the time in vivo.

[0331] In one embodiment, the guide to passenger (G:P) (also referred to as the antisense to sense) strand ratio expressed is 1:10, 1:9, 1:8, 1:7, 1:6, 1:5, 1:4, 1:3, 1:2, 1; 1, 2:10, 2:9, 2:8, 2:7, 2:6, 2:5, 2:4, 2:3, 2:2, 2:1, 3:10, 3:9, 3:8, 3:7, 3:6, 3:5, 3:4, 3:3, 3:2, 3:1, 4:10, 4:9, 4:8, 4:7, 4:6, 4:5, 4:4, 4:3, 4:2, 4:1, 5:10, 5:9, 5:8, 5:7, 5:6, 5:5, 5:4, 5:3, 5:2, 5:1, 6:10, 6:9, 6:8, 6:7, 6:6, 6:5, 6:4, 6:3, 6:2, 6:1, 7:10, 7:9, 7:8, 7:7, 7:6, 7:5, 7:4, 7:3, 7:2, 7:1, 8:10, 8:9, 8:8, 8:7, 8:6, 8:5, 8:4, 8:3, 8:2, 8:1, 9:10, 9:9, 9:8, 9:7, 9:6, 9:5, 9:4, 9:3, 9:2, 9:1, 10:10, 10:9, 10:8, 10:7, 10:6, 10:5, 10:4, 10:3, 10:2, 10:1, 1:99, 5:95, 10:90, 15:85, 20:80, 25:75, 30:70, 35:65, 40:60, 45:55, 50:50, 55:45, 60:40, 65:35, 70:30, 75:25, 80:20, 85:15, 90:10, 95:5, or 99:1 in vitro or in vivo. The guide to passenger ratio refers to the ratio of the guide strands to the passenger strands after intracellular processing of the pri-microRNA. For example, a 80:20 guide-to-passenger ratio would have 8 guide strands to every 2 passenger strands processed from the precursor. As a non-limiting example, the guide-to-passenger strand ratio is 8:2 in vitro. As a non-limiting example, the guide-to-passenger strand ratio is 8:2 in vivo. As a non-limiting example, the guide-to-passenger strand ratio is 9:1 in vitro. As a non-limiting example, the guide-to-passenger strand ratio is 9:1 in vivo.

[0332] In one embodiment, the guide to passenger (G:P) (also referred to as the antisense to sense) strand ratio expressed is greater than 1.

[0333] In one embodiment, the guide to passenger (G:P) (also referred to as the antisense to sense) strand ratio expressed is greater than 2.

[0334] In one embodiment, the guide to passenger (G:P) (also referred to as the antisense to sense) strand ratio expressed is greater than 5.

[0335] In one embodiment, the guide to passenger (G:P) (also referred to as the antisense to sense) strand ratio expressed is greater than 10.

[0336] In one embodiment, the guide to passenger (G:P) (also referred to as the antisense to sense) strand ratio expressed is greater than 20.

[0337] In one embodiment, the guide to passenger (G:P) (also referred to as the antisense to sense) strand ratio expressed is greater than 50.

[0338] In one embodiment, the guide to passenger (G:P) (also referred to as the antisense to sense) strand ratio expressed is at least 3:1.

[0339] In one embodiment, the guide to passenger (G:P) (also referred to as the antisense to sense) strand ratio expressed is at least 5:1.

[0340] In one embodiment, the guide to passenger (G:P) (also referred to as the antisense to sense) strand ratio expressed is at least 10:1.

[0341] In one embodiment, the guide to passenger (G:P) (also referred to as the antisense to sense) strand ratio expressed is at least 20:1.

[0342] In one embodiment, the guide to passenger (G:P) (also referred to as the antisense to sense) strand ratio expressed is at least 50:1.

[0343] In one embodiment, the passenger to guide (P:G) (also referred to as the sense to antisense) strand ratio expressed is 1:10, 1:9, 1:8, 1:7, 1:6, 1:5, 1:4, 1:3, 1:2, 1; 1, 2:10, 2:9, 2:8, 2:7, 2:6, 2:5, 2:4, 2:3, 2:2, 2:1, 3:10, 3:9, 3:8, 3:7, 3:6, 3:5, 3:4, 3:3, 3:2, 3:1, 4:10, 4:9, 4:8, 4:7, 4:6, 4:5, 4:4, 4:3, 4:2, 4:1, 5:10, 5:9, 5:8, 5:7, 5:6, 5:5, 5:4, 5:3, 5:2, 5:1, 6:10, 6:9, 6:8, 6:7, 6:6, 6:5, 6:4, 6:3, 6:2, 6:1, 7:10, 7:9, 7:8, 7:7, 7:6, 7:5, 7:4, 7:3, 7:2, 7:1, 8:10, 8:9, 8:8, 8:7, 8:6, 8:5, 8:4, 8:3, 8:2, 8:1, 9:10, 9:9, 9:8, 9:7, 9:6, 9:5, 9:4, 9:3, 9:2, 9:1, 10:10, 10:9, 10:8, 10:7, 10:6, 10:5, 10:4, 10:3, 10:2, 10:1, 1:99, 5:95, 10:90, 15:85, 20:80, 25:75, 30:70, 35:65, 40:60, 45:55, 50:50, 55:45, 60:40, 65:35, 70:30, 75:25, 80:20, 85:15, 90:10, 95:5, or 99:1 in vitro or in vivo. The passenger to guide ratio refers to the ratio of the passenger strands to the guide strands after the intracellular processing of the pri-microRNA. For example, a 80:20 of passenger-to-guide ratio would have 8 passenger strands to every 2 guide strands processed from the precursor. As a non-limiting example, the passenger-to-guide strand ratio is 80:20 in vitro. As a non-limiting example, the passenger-to-guide strand ratio is 80:20 in vivo. As a non-limiting example, the passenger-to-guide strand ratio is 8:2 in vitro. As a non-limiting example, the passenger-to-guide strand ratio is 8:2 in vivo. As a non-limiting example, the passenger-to-guide strand ratio is 9:1 in vitro. As a non-limiting example, the passenger-to-guide strand ratio is 9:1 in vivo.

[0344] In one embodiment, the passenger to guide (P:G) (also referred to as the sense to antisense) strand ratio expressed is greater than 1.

[0345] In one embodiment, the passenger to guide (P:G) (also referred to as the sense to antisense) strand ratio expressed is greater than 2.

[0346] In one embodiment, the passenger to guide (P:G) (also referred to as the sense to antisense) strand ratio expressed is greater than 5.

[0347] In one embodiment, the passenger to guide (P:G) (also referred to as the sense to antisense) strand ratio expressed is greater than 10.

[0348] In one embodiment, the passenger to guide (P:G) (also referred to as the sense to antisense) strand ratio expressed is greater than 20.

[0349] In one embodiment, the passenger to guide (P:G) (also referred to as the sense to antisense) strand ratio expressed is greater than 50.

[0350] In one embodiment, the passenger to guide (P:G) (also referred to as the sense to antisense) strand ratio expressed is at least 3:1.

[0351] In one embodiment, the passenger to guide (P:G) (also referred to as the sense to antisense) strand ratio expressed is at least 5:1.

[0352] In one embodiment, the passenger to guide (P:G) (also referred to as the sense to antisense) strand ratio expressed is at least 10:1.

[0353] In one embodiment, the passenger to guide (P:G) (also referred to as the sense to antisense) strand ratio expressed is at least 20:1.

[0354] In one embodiment, the passenger to guide (P:G) (also referred to as the sense to antisense) strand ratio expressed is at least 50:1.

[0355] In one embodiment, a passenger-guide strand duplex is considered effective when the pri- or pre-microRNAs demonstrate, but methods known in the art and described herein, greater than 2-fold guide to passenger strand ratio when processing is measured. As a non-limiting examples, the pri- or pre-microRNAs demonstrate great than 2-fold, 3-fold, 4-fold, 5-fold, 6-fold, 7-fold, 8-fold, 9-fold, 10-fold, 11-fold, 12-fold, 13-fold, 14-fold, 15-fold, or 2 to 5-fold, 2 to 10-fold, 2 to 15-fold, 3 to 5-fold, 3 to 10-fold, 3 to 15-fold, 4 to 5-fold, 4 to 10-fold, 4 to 15-fold, 5 to 10-fold, 5 to 15-fold, 6 to 10-fold, 6 to 15-fold, 7 to 10-fold, 7 to 15-fold, 8 to 10-fold, 8 to 15-fold, 9 to 10-fold, 9 to 15-fold, 10 to 15-fold, 11 to 15-fold, 12 to 15-fold, 13 to 15-fold, or 14 to 15-fold guide to passenger strand ratio when processing is measured.

[0356] In one embodiment, the vector genome encoding the dsRNA comprises a sequence which is at least 60%, 65%, 70%, 75%, 80%, 85%, 90%, 95%, 99% or more than 99% of the full length of the construct. As a non-limiting example, the vector genome comprises a sequence which is at least 80% of the full length sequence of the construct.

[0357] In one embodiment, the siRNA molecules may be used to silence wild type or mutant HTT by targeting at least one exon on the htt sequence. The exon may be exon 1, exon 2, exon 3, exon 4, exon 5, exon 6, exon 7, exon 8, exon 9, exon 10, exon 11, exon 12, exon 13, exon 14, exon 15, exon 16, exon 17, exon 18, exon 19, exon 20, exon 21, exon 22, exon 23, exon 24, exon 25, exon 26, exon 27, exon 28, exon 29, exon 30, exon 31, exon 32, exon 33, exon 34, exon 35, exon 36, exon 37, exon 38, exon 39, exon 40, exon 41, exon 42, exon 43, exon 44, exon 45, exon 46, exon 47, exon 48, exon 49, exon 50, exon 51, exon 52, exon 53, exon 54, exon 55, exon 56, exon 57, exon 58, exon 59, exon 60, exon 61, exon 62, exon 63, exon 64, exon 65, exon 66, and/or exon 67. As a non-limiting example, the siRNA molecules may be used to silence wild type or mutant HTT by targeting exon 1. As another non-limiting example, the siRNA molecules may be used to silence wild type or mutant HTT by targeting an exon other than exon 1. As another non-limiting example, the siRNA molecules may be used to silence wild type or mutant HTT by targeting exon 50. As another non-limiting example, the siRNA molecules may be used to silence wild type or mutant HTT by targeting exon 67.

[0358] In one embodiment, the siRNA molecules may be used to silence wild type and/or mutant HTT by targeting at least one exon on the htt sequence. The exon may be exon 1, exon 2, exon 3, exon 4, exon 5, exon 6, exon 7, exon 8, exon 9, exon 10, exon 11, exon 12, exon 13, exon 14, exon 15, exon 16, exon 17, exon 18, exon 19, exon 20, exon 21, exon 22, exon 23, exon 24, exon 25, exon 26, exon 27, exon 28, exon 29, exon 30, exon 31, exon 32, exon 33, exon 34, exon 35, exon 36, exon 37, exon 38, exon 39, exon 40, exon 41, exon 42, exon 43, exon 44, exon 45, exon 46, exon 47, exon 48, exon 49, exon 50, exon 51, exon 52, exon 53, exon 54, exon 55, exon 56, exon 57, exon 58, exon 59, exon 60, exon 61, exon 62, exon 63, exon 64, exon 65, exon 66, and/or exon 67. As a non-limiting example, the siRNA molecules may be used to silence wild type and/or mutant HTT by targeting exon 1. As another non-limiting example, the siRNA molecules may be used to silence wild type and/or mutant HTT by targeting an exon other than exon 1. As another non-limiting example, the siRNA molecules may be used to silence wild type and/or mutant HTT by targeting exon 50. As another non-limiting example, the siRNA molecules may be used to silence wild type and/or mutant HTT by targeting exon 67.

siRNA Modification

[0359] In some embodiments, the siRNA molecules of the present invention, when not delivered as a precursor or DNA, may be chemically modified to modulate some features of RNA molecules, such as, but not limited to, increasing the stability of siRNAs in vivo. The chemically modified siRNA molecules can be used in human therapeutic applications, and are improved without compromising the RNAi activity of the siRNA molecules. As a non-limiting example, the siRNA molecules modified at both the 3′ and the 5′ end of both the sense strand and the antisense strand.

[0360] In some aspects, the siRNA duplexes of the present invention may contain one or more modified nucleotides such as, but not limited to, sugar modified nucleotides, nucleobase modifications and/or backbone modifications. In some aspects, the siRNA molecule may contain combined modifications, for example, combined nucleobase and backbone modifications.

[0361] In one embodiment, the modified nucleotide may be a sugar-modified nucleotide. Sugar modified nucleotides include, but are not limited to 2′-fluoro, 2′-amino and 2′-thio modified ribonucleotides, e.g. 2′-fluoro modified ribonucleotides. Modified nucleotides may be modified on the sugar moiety, as well as nucleotides having sugars or analogs thereof that are not ribosyl. For example, the sugar moieties may be, or be based on, mannoses, arabinoses, glucopyranoses, galactopyranoses, 4′-thioribose, and other sugars, heterocycles, or carbocycles.

[0362] In one embodiment, the modified nucleotide may be a nucleobase-modified nucleotide.

[0363] In one embodiment, the modified nucleotide may be a backbone-modified nucleotide. In some embodiments, the siRNA duplexes of the present invention may further comprise other modifications on the backbone. A normal “backbone”, as used herein, refers to the repeating alternating sugar-phosphate sequences in a DNA or RNA molecule. The deoxyribose/ribose sugars are joined at both the 3′-hydroxyl and 5′-hydroxyl groups to phosphate groups in ester links, also known as “phosphodiester” bonds/linker (PO linkage). The PO backbones may be modified as “phosphorothioate backbone (PS linkage). In some cases, the natural phosphodiester bonds may be replaced by amide bonds but the four atoms between two sugar units are kept. Such amide modifications can facilitate the solid phase synthesis of oligonucleotides and increase the thermodynamic stability of a duplex formed with siRNA complement. See e.g. Mesmaeker et al., Pure & Appl. Chem., 1997, 3, 437-440; the content of which is incorporated herein by reference in its entirety.

[0364] Modified bases refer to nucleotide bases such as, for example, adenine, guanine, cytosine, thymine, uracil, xanthine, inosine, and queuosine that have been modified by the replacement or addition of one or more atoms or groups. Some examples of modifications on the nucleobase moieties include, but are not limited to, alkylated, halogenated, thiolated, aminated, amidated, or acetylated bases, individually or in combination. More specific examples include, for example, 5-propynyluridine, 5-propynylcytidine, 6-methyladenine, 6-methylguanine, N,N,-dimethyladenine, 2-propyladenine, 2-propylguanine, 2-aminoadenine, 1-methylinosine, 3-methyluridine, 5-methylcytidine, 5-methyluridine and other nucleotides having a modification at the 5 position, 5-(2-amino)propyl uridine, 5-halocytidine, 5-halouridine, 4-acetylcytidine, 1-methyladenosine, 2-methyladenosine, 3-methylcytidine, 6-methyluridine, 2-methylguanosine, 7-methylguanosine, 2,2-dimethylguanosine, 5-methylaminoethyluridine, 5-methyloxyuridine, deazanucleotides such as 7-deaza-adenosine, 6-azouridine, 6-azocytidine, 6-azothymidine, 5-methyl-2-thiouridine, other thio bases such as 2-thiouridine and 4-thiouridine and 2-thiocytidine, dihydrouridine, pseudouridine, queuosine, archaeosine, naphthyl and substituted naphthyl groups, any O- and N-alkylated purines and pyrimidines such as N6-methyladenosine, 5-methylcarbonylmethyluridine, uridine 5-oxyacetic acid, pyridine-4-one, pyridine-2-one, phenyl and modified phenyl groups such as aminophenol or 2,4,6-trimethoxy benzene, modified cytosines that act as G-clamp nucleotides, 8-substituted adenines and guanines, 5-substituted uracils and thymines, azapyrimidines, carboxyhydroxyalkyl nucleotides, carboxyalkylaminoalkyl nucleotides, and alkylcarbonylalkylated nucleotides.

[0365] In one embodiment, the modified nucleotides may be on just the sense strand.

[0366] In another embodiment, the modified nucleotides may be on just the antisense strand.

[0367] In some embodiments, the modified nucleotides may be in both the sense and antisense strands.

[0368] In some embodiments, the chemically modified nucleotide does not affect the ability of the antisense strand to pair with the target mRNA sequence, such as the HTT mRNA sequence.

[0369] In one embodiment, the AAV particle comprising a nucleic acid sequence encoding the siRNA molecules of the present invention may encode siRNA molecules which are polycistronic molecules. The siRNA molecules may additionally comprise one or more linkers between regions of the siRNA molecules.

### Molecular Scaffold

[0370] In one embodiment, the siRNA molecules may be encoded in a modulatory polynucleotide which also comprises a molecular scaffold. As used herein a “molecular scaffold” is a framework or starting molecule that forms the sequence or structural basis against which to design or make a subsequent molecule.

[0371] In one embodiment, the molecular scaffold comprises at least one 5′ flanking region. As a non-limiting example, the 5′ flanking region may comprise a 5′ flanking sequence which may be of any length and may be derived in whole or in part from wild type microRNA sequence or be a completely artificial sequence.

[0372] In one embodiment, the molecular scaffold comprises at least one 3′ flanking region. As a non-limiting example, the 3′ flanking region may comprise a 3′ flanking sequence which may be of any length and may be derived in whole or in part from wild type microRNA sequence or be a completely artificial sequence.

[0373] In one embodiment, the molecular scaffold comprises at least one loop motif region. As a non-limiting example, the loop motif region may comprise a sequence which may be of any length.

[0374] In one embodiment, the molecular scaffold comprises a 5′ flanking region, a loop motif region and/or a 3′ flanking region.

[0375] In one embodiment, at least one siRNA, miRNA or other RNAi agent described herein, may be encoded by a modulatory polynucleotide which may also comprise at least one molecular scaffold. The molecular scaffold may comprise a 5′ flanking sequence which may be of any length and may be derived in whole or in part from wild type microRNA sequence or be completely artificial. The 3′ flanking sequence may mirror the 5′ flanking sequence and/or a 3′ flanking sequence in size and origin. Either flanking sequence may be absent. The 3′ flanking sequence may optionally contain one or more CNNC motifs, where “N” represents any nucleotide.

[0376] Forming the stem of a stem loop structure is a minimum of the modulatory polynucleotide encoding at least one siRNA, miRNA or other RNAi agent described herein. In some embodiments, the siRNA, miRNA or other RNAi agent described herein comprises at least one nucleic acid sequence which is in part complementary or will hybridize to a target sequence. In some embodiments the payload is an siRNA molecule or fragment of an siRNA molecule.

[0377] In some embodiments, the 5′ arm of the stem loop structure of the modulatory polynucleotide comprises a nucleic acid sequence encoding a sense sequence. Non-limiting examples of sense sequences, or fragments or variants thereof, which may be encoded by the modulatory polynucleotide are described in Table 3.

[0378] In some embodiments, the 3′ arm of the stem loop of the modulatory polynucleotide comprises a nucleic acid sequence encoding an antisense sequence. The antisense sequence, in some instances, comprises a “G” nucleotide at the 5′ most end. Non-limiting examples of antisense sequences, or fragments or variants thereof, which may be encoded by the modulatory polynucleotide are described in Table 2.

[0379] In other embodiments, the sense sequence may reside on the 3′ arm while the antisense sequence resides on the 5′ arm of the stem of the stem loop structure of the modulatory polynucleotide. Non-limiting examples of sense and antisense sequences which may be encoded by the modulatory polynucleotide are described in Tables 2 and 3.

[0380] In one embodiment, the sense and antisense sequences may be completely complementary across a substantial portion of their length. In other embodiments the sense sequence and antisense sequence may be at least 70, 80, 90, 95 or 99% complementarity across independently at least 50, 60, 70, 80, 85, 90, 95, or 99% of the length of the strands.

[0381] Neither the identity of the sense sequence nor the homology of the antisense sequence need to be 100% complementarity to the target sequence.

[0382] In one embodiment, separating the sense and antisense sequence of the stem loop structure of the modulatory polynucleotide is a loop sequence (also known as a loop motif, linker or linker motif). The loop sequence may be of any length, between 4-30 nucleotides, between 4-20 nucleotides, between 4-15 nucleotides, between 5-15 nucleotides, between 6-12 nucleotides, 6 nucleotides, 7 nucleotides, 8 nucleotides, 9 nucleotides, 10 nucleotides, 11 nucleotides, 12 nucleotides, 13 nucleotides, 14 nucleotides, and/or 15 nucleotides.

[0383] In some embodiments, the loop sequence comprises a nucleic acid sequence encoding at least one UGUG motif. In some embodiments, the nucleic acid sequence encoding the UGUG motif is located at the 5′ terminus of the loop sequence.

[0384] In one embodiment, spacer regions may be present in the modulatory polynucleotide to separate one or more modules (e.g., 5′ flanking region, loop motif region, 3′ flanking region, sense sequence, antisense sequence) from one another. There may be one or more such spacer regions present.

[0385] In one embodiment, a spacer region of between 8-20, i.e., 8, 9, 10, 11, 12, 13, 14, 15, 16, 17, 18, 19, or 20 nucleotides may be present between the sense sequence and a flanking region sequence.

[0386] In one embodiment, the length of the spacer region is 13 nucleotides and is located between the 5′ terminus of the sense sequence and the 3′ terminus of the flanking sequence. In one embodiment, a spacer is of sufficient length to form approximately one helical turn of the sequence.

[0387] In one embodiment, a spacer region of between 8-20, i.e., 8, 9, 10, 11, 12, 13, 14, 15, 16, 17, 18, 19, or 20 nucleotides may be present between the antisense sequence and a flanking sequence.

[0388] In one embodiment, the spacer sequence is between 10-13, i.e., 10, 11, 12 or 13 nucleotides and is located between the 3′ terminus of the antisense sequence and the 5′ terminus of a flanking sequence. In one embodiment, a spacer is of sufficient length to form approximately one helical turn of the sequence.

[0389] In one embodiment, the molecular scaffold of the modulatory polynucleotide comprises in the 5′ to 3′ direction, a 5′ flanking sequence, a 5′ arm, a loop motif, a 3′ arm and a 3′ flanking sequence. As a non-limiting example, the 5′ arm may comprise a nucleic acid sequence encoding a sense sequence and the 3′ arm comprises a nucleic acid sequence encoding the antisense sequence. In another non-limiting example, the 5′ arm comprises a nucleic acid sequence encoding the antisense sequence and the 3′ arm comprises a nucleic acid sequence encoding the sense sequence.

[0390] In one embodiment, the 5′ arm, sense and/or antisense sequence, loop motif and/or 3′ arm sequence may be altered (e.g., substituting 1 or more nucleotides, adding nucleotides and/or deleting nucleotides). The alteration may cause a beneficial change in the function of the construct (e.g., increase knock-down of the target sequence, reduce degradation of the construct, reduce off target effect, increase efficiency of the payload, and reduce degradation of the payload).

[0391] In one embodiment, the molecular scaffold of the modulatory polynucleotides is aligned in order to have the rate of excision of the guide strand (also referred to herein as the antisense strand) be greater than the rate of excision of the passenger strand (also referred to herein as the sense strand). The rate of excision of the guide or passenger strand may be, independently, 1%, 2%, 3%, 4%, 5%, 10%, 15%, 20%, 25%, 30%, 35%, 40%, 45%, 50%, 55%, 60%, 65%, 70%, 75%, 80%, 85%, 90%, 95%, 99% or more than 99%. As a non-limiting example, the rate of excision of the guide strand is at least 80%. As another non-limiting example, the rate of excision of the guide strand is at least 90%.

[0392] In one embodiment, the rate of excision of the guide strand is greater than the rate of excision of the passenger strand. In one aspect, the rate of excision of the guide strand may be at least 1%, 2%, 3%, 4%, 5%, 1%, 20%, 25%, 30%, 35% 40%, 45%, 50%, 55%, 60%, 65%, 70%, 75%, 80%, 85%, 90%, 95%, 99% or more than 99% greater than the passenger strand.

[0393] In one embodiment, the efficiency of excision of the guide strand is at least 60%, 65%, 70%, 75%, 80%, 85%, 90%, 95%, 99% or more than 99%. As a non-limiting example, the efficiency of the excision of the guide strand is greater than 80%.

[0394] In one embodiment, the efficiency of the excision of the guide strand is greater than the excision of the passenger strand from the molecular scaffold. The excision of the guide strand may be 2, 3, 4, 5, 6, 7, 8, 9, 10 or more than 10 times more efficient than the excision of the passenger strand from the molecular scaffold.

[0395] In one embodiment, the molecular scaffold comprises a dual-function targeting modulatory polynucleotide. As used herein, a “dual-function targeting” modulatory polynucleotide is a polynucleotide where both the guide and passenger strands knock down the same target or the guide and passenger strands knock down different targets.

[0396] In one embodiment, the molecular scaffold of the modulatory polynucleotides described herein may comprise a 5′ flanking region, a loop motif region and a 3′ flanking region. Non-limiting examples of the sequences for the 5′ flanking region, loop motif region (may also be referred to as a linker region) and the 3′ flanking region which may be used, or fragments thereof used, in the modulatory polynucleotides described herein are shown in Tables 7-9.

TABLE 7
5′ Flanking Regions for Molecular Scaffold

| 5′ | | 5′ |
|---|---|---|
| Flanking | | Flanking |
| Region | | Region |
| Name | 5′ Flanking Region Sequence | SEQ ID |
| 5F3 | GTGCTGGGCGGGGGGCGGCGGGCCCTC | 1163 |
| | CCGCAGAACACCATGCGCTCCACGGAA | |
| 5F1 | GTGCTGGGCGGGGGGCGGCGGGCCCTC | 1161 |
| | CCGCAGAACACCATGCGCTCTTCGGAA | |
| 5F2 | GAAGCAAAGAAGGGGCAGAGGGAGCCC | 1162 |
| | GTGAGCTGAGTGGGCCAGGGACTGGGA | |
| | GAAGGAGTGAGGAGGCAGGGCCGGCAT | |
| | GCCTCTGCTGCTGGCCAGA | |
| 5F4 | GGGCCCTCCCGCAGAACACCATGCGCT | 1164 |
| | CCACGGAA | |
| 5F5 | CTCCCGCAGAACACCATGCGCTCCACG | 1165 |
| | GAA | |
| 5F6 | GTGCTGGGCGGGGGGCGGCGGGCCCTC | 1166 |
| | CCGCAGAACACCATGCGCTCCACGGAA | |
| | G | |
| 5F7 | GTGCTGGGCGGGGGGCGGCGGGCCCTC | 1167 |
| | CCGCAGAACACCATGCGCTCCTCGGAA | |

TABLE 8
Loop Motif Regions for Molecular Scaffold

| Loop | | Loop |
|---|---|---|
| Motif | | Motif |
| Region | | Region |
| Name | Loop Motif Region Sequence | SEQ ID |
| L5 | GTGGCCACTGAGAAG | 1172 |
| L1 | TGTGACCTGG | 1168 |
| L2 | TGTGATTTGG | 1169 |
| L3 | GTCTGCACCTGTCACTAG | 1170 |
| L4 | GTGACCCAAG | 1171 |
| L6 | GTGACCCAAT | 1173 |
| L7 | GTGACCCAAC | 1174 |
| L8 | GTGGCCACTGAGAAA | 1175 |

TABLE 9
3′ Flanking Regions for Molecular Scaffold

| 3′ | | 3′ |
|---|---|---|
| Flanking | | Flanking |
| Region | | Region |
| Name | 3′ Flanking Region Sequence | SEQ ID |
| 3F1 | CTGAGGAGCGCCTTGACAGCAGCCAT | 1178 |
| | GGGAGGGCCGCCCCCTACCTCAGTGA | |
| 3F2 | CTGTGGAGCGCCTTGACAGCAGCCAT | 1179 |
| | GGGAGGGCCGCCCCCTACCTCAGTGA | |
| 3F3 | TGGCCGTGTAGTGCTACCCAGCGCTG | 1180 |
| | GCTGCCTCCTCAGCATTGCAATTCCT | |
| | CTCCCATCTGGGCACCAGTCAGCTAC | |
| | CCTGGTGGGAATCTGGGTAGCC | |
| 3F4 | CTGAGGAGCGCCTTGACAGCAGCCAT | 1181 |
| | GGGAGGGCC | |
| 3F5 | CTGCGGAGCGCCTTGACAGCAGCCAT | 1182 |
| | GGGAGGGCCGCCCCCTACCTCAGTGA | |

[0397] In one embodiment, the molecular scaffold may comprise at least one 5′ flanking region, fragment or variant thereof listed in Table 7. As a non-limiting example, the 5′ flanking region may be 5F1, 5F2, 5F3, 5F4, 5F5, 5F6, or 5F7.

[0398] In one embodiment, the molecular scaffold may comprise at least one 5F1 flanking region.

[0399] In one embodiment, the molecular scaffold may comprise at least one 5F2 flanking region.

[0400] In one embodiment, the molecular scaffold may comprise at least one 5F3 flanking region.

[0401] In one embodiment, the molecular scaffold may comprise at least one 5F4 flanking region.

[0402] In one embodiment, the molecular scaffold may comprise at least one 5F5 flanking region.

[0403] In one embodiment, the molecular scaffold may comprise at least one 5F6 flanking region.

[0404] In one embodiment, the molecular scaffold may comprise at least one 5F7 flanking region.

[0405] In one embodiment, the molecular scaffold may comprise at least one loop motif region, fragment or variant thereof listed in Table 8. As a non-limiting example, the loop motif region may be L1, L2, L3, L4, L5, L6, L7, or L8.

[0406] In one embodiment, the molecular scaffold may comprise at least one L1 loop motif region.

[0407] In one embodiment, the molecular scaffold may comprise at least one L2 loop motif region.

[0408] In one embodiment, the molecular scaffold may comprise at least one L3 loop motif region.

[0409] In one embodiment, the molecular scaffold may comprise at least one L4 loop motif region.

[0410] In one embodiment, the molecular scaffold may comprise at least one L5 loop motif region.

[0411] In one embodiment, the molecular scaffold may comprise at least one L6 loop motif region.

[0412] In one embodiment, the molecular scaffold may comprise at least one L7 loop motif region.

[0413] In one embodiment, the molecular scaffold may comprise at least one L8 loop motif region.

[0414] In one embodiment, the molecular scaffold may comprise at least one 3′ flanking region, fragment or variant thereof listed in Table 9. As a non-limiting example, the 3′ flanking region may be 3F1, 3F2, 3F3, 3F4, or 3F5.

[0415] In one embodiment, the molecular scaffold may comprise at least one 3F1 flanking region.

[0416] In one embodiment, the molecular scaffold may comprise at least one 3F2 flanking region.

[0417] In one embodiment, the molecular scaffold may comprise at least one 3F3 flanking region.

[0418] In one embodiment, the molecular scaffold may comprise at least one 3F4 flanking region.

[0419] In one embodiment, the molecular scaffold may comprise at least one 3F5 flanking region.

[0420] In one embodiment, the molecular scaffold may comprise at least one 5′ flanking region, fragment or variant thereof, and at least one loop motif region, fragment or variant thereof, as described in Tables 7 and 8. As a non-limiting example, the 5′ flanking region and the loop motif region may be 5F1 and L1, 5F1 and L2, 5F1 and L3, 5F1 and L4, 5F1 and L5, 5F1 and L6, 5F1 and L7, 5F1 and L8, 5F2 and L1, 5F2 and L2, 5F2 and L3, 5F2 and L4, 5F2 and L5, 5F2 and L6, 5F2 and L7, 5F2 and L8, 5F3 and L1, 5F3 and L2, 5F3 and L3, 5F3 and L4, 5F3 and L5, 5F3 and L6, 5F3 and L7, 5F3 and L8, 5F4 and L1, 5F4 and L2, 5F4 and L3, 5F4 and L4, 5F4 and L5, 5F4 and L6, 5F4 and L7, 5F4 and L8, 5F5 and L1, 5F5 and L2, 5F5 and L3, 5F5 and L4, 5F5 and L5, 5F5 and L6, 5F5 and L7, 5F5 and L8, 5F6 and L1, 5F6 and L2, 5F6 and L3, 5F6 and L4, 5F6 and L5, 5F6 and L6, 5F6 and L7, 5F6 and L8, 5F7 and L1, 5F7 and L2, 5F7 and L3, 5F7 and L4, 5F7 and L5, 5F7 and L6, 5F7 and L7, and 5F7 and L8.

[0421] In one embodiment, the molecular scaffold may comprise at least one 5F2 flanking region and at least one L1 loop motif region.

[0422] In one embodiment, the molecular scaffold may comprise at least one 5F1 flanking region and at least one L4 loop motif region.

[0423] In one embodiment, the molecular scaffold may comprise at least one 5F7 flanking region and at least one L8 loop motif region.

[0424] In one embodiment, the molecular scaffold may comprise at least one 5F3 flanking region and at least one L4 loop motif region.

[0425] In one embodiment, the molecular scaffold may comprise at least one 5F3 flanking region and at least one L5 loop motif region.

[0426] In one embodiment, the molecular scaffold may comprise at least one 5F4 flanking region and at least one L4 loop motif region.

[0427] In one embodiment, the molecular scaffold may comprise at least one 5F3 flanking region and at least one L7 loop motif region.

[0428] In one embodiment, the molecular scaffold may comprise at least one 5F5 flanking region and at least one L4 loop motif region.

[0429] In one embodiment, the molecular scaffold may comprise at least one 5F6 flanking region and at least one L4 loop motif region.

[0430] In one embodiment, the molecular scaffold may comprise at least one 5F3 flanking region and at least one L6 loop motif region.

[0431] In one embodiment, the molecular scaffold may comprise at least one 5F7 flanking region and at least one L4 loop motif region.

[0432] In one embodiment, the molecular scaffold may comprise at least one 5F2 flanking region and at least one L2 loop motif region.

[0433] In one embodiment, the molecular scaffold may comprise at least one 5F1 flanking region and at least one L1 loop motif region.

[0434] In one embodiment, the molecular scaffold may comprise at least one 5F1 flanking region and at least one L2 loop motif region.

[0435] In one embodiment, the molecular scaffold may comprise at least one 3′ flanking region, fragment or variant thereof, and at least one motif region, fragment or variant thereof, as described in Tables 8 and 9. As a non-limiting example, the 3′ flanking region and the loop motif region may be 3F1 and L1, 3F1 and L2, 3F1 and L3, 3F1 and L4, 3F1 and L5, 3F1 and L6, 3F1 and L7, 3F1 and L8, 3F2 and L1, 3F2 and L2, 3F2 and L3, 3F2 and L4, 3F2 and L5, 3F2 and L6, 3F2 and L7, 3F2 and L8, 3F3 and L1, 3F3 and L2, 3F3 and L3, 3F3 and L4, 3F3 and L5, 3F3 and L6, 3F3 and L7, 3F3 and L8, 3F4 and L1, 3F4 and L2, 3F4 and L3, 3F4 and L4, 3F4 and L5, 3F4 and L6, 3F4 and L7, 3F4 and L8, 3F5 and L1, 3F5 and L2, 3F5 and L3, 3F5 and L4, 3F5 and L5, 3F5 and L6, 3F5 and L7, and 3F5 and L8.

[0436] In one embodiment, the molecular scaffold may comprise at least one L1 loop motif region and at least one 3F2 flanking region.

[0437] In one embodiment, the molecular scaffold may comprise at least one L4 loop motif region and at least one 3F1 flanking region.

[0438] In one embodiment, the molecular scaffold may comprise at least one L8 loop motif region and at least one 3F5 flanking region.

[0439] In one embodiment, the molecular scaffold may comprise at least one L5 loop motif region and at least 3F1 flanking region.

[0440] In one embodiment, the molecular scaffold may comprise at least one L4 loop motif region and at least one 3F4 flanking region.

[0441] In one embodiment, the molecular scaffold may comprise at least one L7 loop motif region and at least one 3F1 flanking region.

[0442] In one embodiment, the molecular scaffold may comprise at least one L6 loop motif region and at least one 3F1 flanking region.

[0443] In one embodiment, the molecular scaffold may comprise at least one L4 loop motif region and at least one 3F5 flanking region.

[0444] In one embodiment, the molecular scaffold may comprise at least one L2 loop motif region and at least one 3F2 flanking region.

[0445] In one embodiment, the molecular scaffold may comprise at least one L1 loop motif region and at least one 3F3 flanking region.

[0446] In one embodiment, the molecular scaffold may comprise at least one L5 loop motif region and at least one 3F4 flanking region.

[0447] In one embodiment, the molecular scaffold may comprise at least one L1 loop motif region and at least one 3F1 flanking region.

[0448] In one embodiment, the molecular scaffold may comprise at least one L2 loop motif region and at least one 3F1 flanking region.

[0449] In one embodiment, the molecular scaffold may comprise at least one 5′ flanking region, fragment or variant thereof, and at least one 3′ flanking region, fragment or variant thereof, as described in Tables 7 and 9. As a non-limiting example, the flanking regions may be 5F1 and 3F1, 5F1 and 3F2, 5F1 and 3F3, 5F1 and 3F4, 5F1 and 3F5, 5F2 and 3F1, 5F2 and 3F2, 5F2 and 3F3, 5F2 and 3F4, 5F2 and 3F5, 5F3 and 3F1, 5F3 and 3F2, 5F3 and 3F3, 5F3 and 3F4, 5F3 and 3F5, 5F4 and 3F1, 5F4 and 3F2, 5F4 and 3F3, 5F4 and 3F4, 5F4 and 3F5, 5F5 and 3F1, 5F5 and 3F2, 5F5 and 3F3, 5F5 and 3F4, 5F5 and 3F5, 5F6 and 3F1, 5F6 and 3F2, 5F6 and 3F3, 5F6 and 3F4, 5F6 and 3F5, 5F7 and 3F1, 5F7 and 3F2, 5F7 and 3F3, 5F7 and 3F4, and 5F7 and 3F5.

[0450] In one embodiment, the molecular scaffold may comprise at least one 5F2 5′ flanking region and at least one 3F2 3′ flanking region.

[0451] In one embodiment, the molecular scaffold may comprise at least one 5F1 5′ flanking region and at least one 3F1 3′ flanking region.

[0452] In one embodiment, the molecular scaffold may comprise at least one 5F7 5′ flanking region and at least one 3F5 3′ flanking region.

[0453] In one embodiment, the molecular scaffold may comprise at least one 5F3 5′ flanking region and at least one 3F1 3′ flanking region.

[0454] In one embodiment, the molecular scaffold may comprise at least one 5F4 5′ flanking region and at least one 3F4 3′ flanking region.

[0455] In one embodiment, the molecular scaffold may comprise at least one 5F5 5′ flanking region and at least one 3F4 3′ flanking region.

[0456] In one embodiment, the molecular scaffold may comprise at least one 5F6 5′ flanking region and at least one 3F1 3′ flanking region.

[0457] In one embodiment, the molecular scaffold may comprise at least one 5F2 5′ flanking region and at least one 3F3 3′ flanking region.

[0458] In one embodiment, the molecular scaffold may comprise at least one 5F3 5′ flanking region and at least one 3F4 3′ flanking region.

[0459] In one embodiment, the molecular scaffold may comprise at least one 5F1 5′ flanking region and at least one 3F2 3′ flanking region.

[0460] In one embodiment, the molecular scaffold may comprise at least one 5′ flanking region, fragment or variant thereof, at least one loop motif region, fragment or variant thereof, and at least one 3′ flanking region as described in Tables 7-9. As a non-limiting example, the flanking and loop motif regions may be 5F1, L1 and 3F1; 5F1, L1 and 3F2; 5F1, L1 and 3F3; 5F1, L1 and 3F4; 5F1, L1 and 3F5; 5F2, L1 and 3F1; 5F2, L1 and 3F2; 5F2, L1 and 3F3; 5F2, L1 and 3F4; 5F2, L1 and 3F5; 5F3, L1 and 3F3; 5F3, L1 and 3F2; 5F3, L1 and 3F3; 5F3, L1 and 3F4; 5F3, L1 and 3F5; 5F4, L1 and 3F4; 5F4, L1 and 3F2; 5F4, L1 and 3F3; 5F4, L1 and 3F4; 5F4, L1 and 3F5; 5F5, L1 and 3F1; 5F5, L1 and 3F2; 5F5, L1 and 3F3; 5F5, L1 and 3F4; 5F5, L1 and 3F5; 5F6, L1 and 3F1; 5F6, L1 and 3F2; 5F6, L1 and 3F3; 5F6, L1 and 3F4; 5F6, L1 and 3F5; 5F7, L1 and 3F1; 5F7, L1 and 3F2; 5F7, L1 and 3F3; 5F7, L1 and 3F4; 5F7, L1 and 3F5; 5F1, L2 and 3F1; 5F1, L2 and 3F2; 5F1, L2 and 3F3; 5F1, L2 and 3F4; 5F1, L2 and 3F5; 5F2, L2 and 3F1; 5F2, L2 and 3F2; 5F2, L2 and 3F3; 5F2, L2 and 3F4; 5F2, L2 and 3F5; 5F3, L2 and 3F1; 5F3, L2 and 3F2; 5F3, L2 and 3F3; 5F3, L2 and 3F4; 5F3, L2 and 3F5; 5F4, L2 and 3F1; 5F4, L2 and 3F2; 5F4, L2 and 3F3; 5F4, L2 and 3F4; 5F4, L2 and 3F5; 5F5, L2 and 3F1; 5F5, L2 and 3F2; 5F5, L2 and 3F3; 5F5, L2 and 3F4; 5F5, L2 and 3F5; 5F6, L2 and 3F1; 5F6, L2 and 3F2; 5F6, L2 and 3F3; 5F6, L2 and 3F4; 5F6, L2 and 3F5; 5F7, L2 and 3F1; 5F7, L2 and 3F2; 5F7, L2 and 3F3; 5F7, L2 and 3F4; 5F7, L2 and 3F5; 5F1, L3 and 3F1; 5F1, L3 and 3F2; 5F1, L3 and 3F3; 5F1, L3 and 3F4; 5F1, L3 and 3F5; 5F2, L3 and 3F1; 5F2, L3 and 3F2; 5F2, L3 and 3F3; 5F2, L3 and 3F4; 5F2, L3 and 3F5; 5F3, L3 and 3F1; 5F3, L3 and 3F2; 5F3, L3 and 3F3; 5F3, L3 and 3F4; 5F3, L3 and 3F5; 5F4, L3 and 3F1; 5F4, L3 and 3F2; 5F4, L3 and 3F3; 5F4, L3 and 3F4; 5F4, L3 and 3F5; 5F5, L3 and 3F1; 5F5, L3 and 3F2; 5F5, L3 and 3F3; 5F5, L3 and 3F4; 5F5, L3 and 3F5; 5F6, L3 and 3F1; 5F6, L3 and 3F2; 5F6, L3 and 3F3; 5F6, L3 and 3F4; 5F6, L3 and 3F5; 5F7, L3 and 3F1; 5F7, L3 and 3F2; 5F7, L3 and 3F3; 5F7, L3 and 3F4; 5F7, L3 and 3F5; 5F1, L4 and 3F1; 5F1, L4 and 3F2; 5F1, L4 and 3F3; 5F1, L4 and 3F4; 5F1, L4 and 3F5; 5F2, L4 and 3F1; 5F2, L4 and 3F2; 5F2, L4 and 3F3; 5F2, L4 and 3F4; 5F2, L4 and 3F5; 5F3, L4 and 3F1; 5F3, L4 and 3F2; 5F3, L4 and 3F3; 5F3, L4 and 3F4; 5F3, L4 and 3F5; 5F4, L4 and 3F1; 5F4, L4 and 3F2; 5F4, L4 and 3F3; 5F4, L4 and 3F4; 5F4, L4 and 3F5; 5F5, L4 and 3F1; 5F5, L4 and 3F2; 5F5, L4 and 3F3; 5F5, L4 and 3F4; 5F5, L4 and 3F5; 5F6, L4 and 3F1; 5F6, L4 and 3F2; 5F6, L4 and 3F3; 5F6, L4 and 3F4; 5F6, L4 and 3F5; 5F7, L4 and 3F1; 5F7, L4 and 3F2; 5F7, L4 and 3F3; 5F7, L4 and 3F4; 5F7, L4 and 3F5; 5F1, L5 and 3F1; 5F1, L5 and 3F2; 5F1, L5 and 3F3; 5F1, L5 and 3F4; 5F1, L5 and 3F5; 5F2, L5 and 3F1; 5F2, L5 and 3F2; 5F2, L5 and 3F3; 5F2, L5 and 3F4; 5F2, L5 and 3F5; 5F3, L5 and 3F1; 5F3, L5 and 3F2; 5F3, L5 and 3F3; 5F3, L5 and 3F4; 5F3, L5 and 3F5; 5F4, L5 and 3F1; 5F4, L5 and 3F2; 5F4, L5 and 3F3; 5F4, L5 and 3F4; 5F4, L5 and 3F5; 5F5, L5 and 3F1; 5F5, L5 and 3F2; 5F5, L5 and 3F3; 5F5, L5 and 3F4; 5F5, L5 and 3F5; 5F6, L5 and 3F1; 5F6, L5 and 3F2; 5F6, L5 and 3F3; 5F6, L5 and 3F4; 5F6, L5 and 3F5; 5F7, L5 and 3F1; 5F7, L5 and 3F2; 5F7, L5 and 3F3; 5F7, L5 and 3F4; 5F7, L5 and 3F5; 5F1, L6 and 3F1; 5F1, L6 and 3F2; 5F1, L6 and 3F3; 5F1, L6 and 3F4; 5F1, L6 and 3F5; 5F2, L6 and 3F1; 5F2, L6 and 3F2; 5F2, L6 and 3F3; 5F2, L6 and 3F4; 5F2, L6 and 3F5; 5F3, L6 and 3F1; 5F3, L6 and 3F2; 5F3, L6 and 3F3; 5F3, L6 and 3F4; 5F3, L6 and 3F5; 5F4, L6 and 3F1; 5F4, L6 and 3F2; 5F4, L6 and 3F3; 5F4, L6 and 3F4; 5F4, L6 and 3F5; 5F5, L6 and 3F1; 5F5, L6 and 3F2; 5F5, L6 and 3F3; 5F5, L6 and 3F4; 5F5, L6 and 3F5; 5F6, L6 and 3F1; 5F6, L6 and 3F2; 5F6, L6 and 3F3; 5F6, L6 and 3F4; 5F6, L6 and 3F5; 5F7, L6 and 3F1; 5F7, L6 and 3F2; 5F7, L6 and 3F3; 5F7, L6 and 3F4; 5F7, L6 and 3F5; 5F1, L7 and 3F1; 5F1, L7 and 3F2; 5F1, L7 and 3F3; 5F1, L7 and 3F4; 5F1, L7 and 3F5; 5F2, L7 and 3F1; 5F2, L7 and 3F2; 5F2, L7 and 3F3; 5F2, L7 and 3F4; 5F2, L7 and 3F5; 5F3, L7 and 3F1; 5F3, L7 and 3F2; 5F3, L7 and 3F3; 5F3, L7 and 3F4; 5F3, L7 and 3F5; 5F4, L7 and 3F1; 5F4, L7 and 3F2; 5F4, L7 and 3F3; 5F4, L7 and 3F4; 5F4, L7 and 3F5; 5F5, L7 and 3F1; 5F5, L7 and 3F2; 5F5, L7 and 3F3; 5F5, L7 and 3F4; 5F5, L7 and 3F5; 5F6, L7 and 3F1; 5F6, L7 and 3F2; 5F6, L7 and 3F3; 5F6, L7 and 3F4; 5F6, L7 and 3F5; 5F7, L7 and 3F1; 5F7, L7 and 3F2; 5F7, L7 and 3F3; 5F7, L7 and 3F4; 5F7, L7 and 3F5; 5F1, L8 and 3F1; 5F1, L8 and 3F2; 5F1, L8 and 3F3; 5F1, L8 and 3F4; 5F1, L8 and 3F5; 5F2, L8 and 3F1; 5F2, L8 and 3F2; 5F2, L8 and 3F3; 5F2, L8 and 3F4; 5F2, L8 and 3F5; 5F3, L8 and 3F1; 5F3, L8 and 3F2; 5F3, L8 and 3F3; 5F3, L8 and 3F4; 5F3, L8 and 3F5; 5F4, L8 and 3F1; 5F4, L8 and 3F2; 5F4, L8 and 3F3; 5F4, L8 and 3F4; 5F4, L8 and 3F5; 5F5, L8 and 3F1; 5F5, L8 and 3F2; 5F5, L8 and 3F3; 5F5, L8 and 3F4; 5F5, L8 and 3F5; 5F6, L8 and 3F1; 5F6, L8 and 3F2; 5F6, L8 and 3F3; 5F6, L8 and 3F4; 5F6, L8 and 3F5; 5F7, L8 and 3F1; 5F7, L8 and 3F2; 5F7, L8 and 3F3; 5F7, L8 and 3F4; and 5F7, L8 and 3F5.

[0461] In one embodiment, the molecular scaffold may comprise at least one 5F2 5′ flanking region, at least one L1 loop motif region, and at least one 3F2 3′ flanking region.

[0462] In one embodiment, the molecular scaffold may comprise at least one 5F1 5′ flanking region, at least one L4 loop motif region, and at least one 3F1 3′ flanking region.

[0463] In one embodiment, the molecular scaffold may comprise at least one 5F7 5′ flanking region, at least one L8 loop motif region, and at least one 3F5 3′ flanking region.

[0464] In one embodiment, the molecular scaffold may comprise at least one 5F3 5′ flanking region, at least one L4 loop motif region, and at least one 3F1 3′ flanking region.

[0465] In one embodiment, the molecular scaffold may comprise at least one 5F3 5′ flanking region, at least one L5 loop motif region, and at least one 3F1 3′ flanking region.

[0466] In one embodiment, the molecular scaffold may comprise at least one 5F4 5′ flanking region, at least one L4 loop motif region, and at least one 3F4 3′ flanking region.

[0467] In one embodiment, the molecular scaffold may comprise at least one 5F3 5′ flanking region, at least one L7 loop motif region, and at least one 3F1 3′ flanking region.

[0468] In one embodiment, the molecular scaffold may comprise at least one 5F5 5′ flanking region, at least one L4 loop motif region, and at least one 3F4 3′ flanking region.

[0469] In one embodiment, the molecular scaffold may comprise at least one 5F6 5′ flanking region, at least one L4 loop motif region, and at least one 3F1 3′ flanking region.

[0470] In one embodiment, the molecular scaffold may comprise at least one 5F3 5′ flanking region, at least one L6 loop motif region, and at least one 3F1 3′ flanking region.

[0471] In one embodiment, the molecular scaffold may comprise at least one 5F7 5′ flanking region, at least one L4 loop motif region, and at least one 3F5 3′ flanking region.

[0472] In one embodiment, the molecular scaffold may comprise at least one 5F2 5′ flanking region, at least one L2 loop motif region, and at least one 3F2 3′ flanking region.

[0473] In one embodiment, the molecular scaffold may comprise at least one 5F2 5′ flanking region, at least one L1 loop motif region, and at least one 3F3 3′ flanking region.

[0474] In one embodiment, the molecular scaffold may comprise at least one 5F3 5′ flanking region, at least one L5 loop motif region, and at least one 3F4 3′ flanking region.

[0475] In one embodiment, the molecular scaffold may comprise at least one 5F1 5′ flanking region, at least one L1 loop motif region, and at least one 3F1 3′ flanking region.

[0476] In one embodiment, the molecular scaffold may comprise at least one 5F1 5′ flanking region, at least one L2 loop motif region, and at least one 3F1 3′ flanking region.

[0477] In one embodiment, the molecular scaffold may comprise at least one 5F1 5′ flanking region, at least one L1 loop motif region, and at least one 3F2 3′ flanking region.

[0478] In one embodiment, the molecular scaffold may comprise at least one 5F2 5′ flanking region, at least one L3 loop motif region, and at least one 3F3 3′ flanking region.

[0479] In one embodiment, the molecular scaffold may be a natural pri-miRNA scaffold. As a non-limiting example, the molecular scaffold may be a scaffold derived from the human miR155 scaffold.

[0480] In one embodiment, the molecular scaffold may comprise one or more linkers known in the art. The linkers may separate regions or one molecular scaffold from another. As a non-limiting example, the molecular scaffold may be polycistronic.

Modulatory Polynucleotide Comprising Molecular Scaffold and siRNA Molecule

[0481] In one embodiment, the modulatory polynucleotide may comprise 5′ and 3′ flanking regions, loop motif region, and nucleic acid sequences encoding sense sequence and antisense sequence as described in Tables 10 and 11. In Tables 10 and 11, the DNA sequence identifier for the passenger and guide strands are described as well as the 5′ and 3′ Flanking Regions and the Loop region (also referred to as the linker region). In Tables 10 and 11, the “miR” component of the name of the sequence does not necessarily correspond to the sequence numbering of miRNA genes (e.g., VOYHTmiR-102 is the name of the sequence and does not necessarily mean that miR-102 is part of the sequence).

TABLE 10
Modulatory Polynucleotide Sequence Region (5′ to 3′)

| | 5′ Flanking | | | | | |
|---|---|---|---|---|---|---|
| Modulatory | to 3′ | | Passenger | | Guide | |
| Polynucleotide | Flanking | 5′ Flanking | SEQ ID | Loop SEQ | SEQ | 3′ Flanking |
| Construct Name | SEQ ID NO | SEQ ID NO | NO | ID NO | ID NO | SEQ ID NO |
| VOYHTmiR-102.214 | 1183 | 1161 | 1296 | 1168 | 1337 | 1178 |
| VOYHTmiR-104.214 | 1184 | 1161 | 1303 | 1168 | 1337 | 1178 |
| VOYHTmiR-109.214 | 1185 | 1161 | 1310 | 1169 | 1337 | 1178 |
| VOYHTmiR-114.214 | 1186 | 1161 | 1317 | 1168 | 1337 | 1179 |
| VOYHTmiR-116.214 | 1187 | 1161 | 1310 | 1168 | 1337 | 1179 |
| VOYHTmiR-127.214 | 1188 | 1162 | 1310 | 1170 | 1334 | 1180 |
| VOYHTmiR-102.218 | 1189 | 1161 | 1297 | 1168 | 1338 | 1178 |
| VOYHTmiR-104.218 | 1190 | 1161 | 1304 | 1168 | 1338 | 1178 |
| VOYHTmiR-109.218 | 1191 | 1161 | 1311 | 1169 | 1338 | 1178 |
| VOYHTmiR-114.218 | 1192 | 1161 | 1318 | 1168 | 1338 | 1179 |
| VOYHTmiR-116.218 | 1193 | 1161 | 1311 | 1168 | 1338 | 1179 |
| VOYHTmiR-127.218 | 1194 | 1162 | 1311 | 1170 | 1338 | 1180 |
| VOYHTmiR-102.219.o | 1195 | 1161 | 1280 | 1168 | 1333 | 1178 |
| VOYHTmiR-104.219.o | 1196 | 1161 | 1283 | 1168 | 1333 | 1178 |
| VOYHTmiR-109.219.o | 1197 | 1161 | 1280 | 1169 | 1333 | 1178 |
| VOYHTmiR-114.219 | 1198 | 1161 | 1286 | 1168 | 1333 | 1179 |
| VOYHTmiR-116.219.o | 1199 | 1161 | 1289 | 1168 | 1333 | 1179 |
| VOYHTmiR-127.219.o | 1200 | 1162 | 1280 | 1170 | 1333 | 1180 |
| VOYHTmiR-102.219.n | 1201 | 1161 | 1292 | 1168 | 1333 | 1178 |
| VOYHTmiR-104.219.n | 1202 | 1161 | 1293 | 1168 | 1333 | 1178 |
| VOYHTmiR-109.219.n | 1203 | 1161 | 1292 | 1169 | 1333 | 1178 |
| VOYHTmiR-116.219.n | 1204 | 1161 | 1294 | 1168 | 1333 | 1179 |
| VOYHTmiR-127.219.n | 1205 | 1162 | 1292 | 1170 | 1333 | 1180 |
| VOYHTmiR-102.257 | 1206 | 1161 | 1298 | 1168 | 1339 | 1178 |
| VOYHTmiR-104.257 | 1207 | 1161 | 1305 | 1168 | 1339 | 1178 |
| VOYHTmiR-109.257 | 1208 | 1161 | 1312 | 1169 | 1339 | 1178 |
| VOYHTmiR-114.257 | 1209 | 1161 | 1319 | 1168 | 1339 | 1179 |
| VOYHTmiR-116.257 | 1210 | 1161 | 1312 | 1168 | 1339 | 1179 |
| VOYHTmiR-127.257 | 1211 | 1162 | 1312 | 1170 | 1339 | 1180 |
| VOYHTmiR-102.894 | 1212 | 1161 | 1281 | 1168 | 1334 | 1178 |
| VOYHTmiR-104.894 | 1213 | 1161 | 1284 | 1168 | 1334 | 1178 |
| VOYHTmiR-109.894 | 1214 | 1161 | 1281 | 1169 | 1334 | 1178 |
| VOYHTmiR-114.894 | 1215 | 1161 | 1287 | 1168 | 1334 | 1179 |
| VOYHTmiR-116.894 | 1216 | 1161 | 1290 | 1168 | 1334 | 1179 |
| VOYHTmiR-127,894 | 1217 | 1162 | 1281 | 1170 | 1334 | 1180 |
| VOYHTmiR-102.907 | 1218 | 1161 | 1301 | 1168 | 1342 | 1178 |
| VOYHTmiR-104.907 | 1219 | 1161 | 1308 | 1168 | 1342 | 1178 |
| VOYHTmiR-109.907 | 1220 | 1161 | 1315 | 1169 | 1342 | 1178 |
| VOYHTmiR-114.907 | 1221 | 1161 | 1322 | 1168 | 1342 | 1179 |
| VOYHTmiR-116.907 | 1222 | 1161 | 1315 | 1168 | 1342 | 1179 |
| VOYHTmiR-127.907 | 1223 | 1162 | 1315 | 1170 | 1342 | 1180 |
| VOYHTmiR-102.372 | 1224 | 1161 | 1299 | 1168 | 1340 | 1178 |
| VOYHTmiR-104.372 | 1225 | 1161 | 1306 | 1168 | 1340 | 1178 |
| VOYHTmiR-109.372 | 1226 | 1161 | 1313 | 1169 | 1340 | 1178 |
| VOYHTmiR-114.372 | 1227 | 1161 | 1320 | 1168 | 1340 | 1179 |
| VOYHTmiR-116.372 | 1228 | 1161 | 1313 | 1168 | 1340 | 1179 |
| VOYHTmiR-127.372 | 1229 | 1162 | 1313 | 1170 | 1340 | 1180 |
| VOYHTmiR-102.425 | 1230 | 1161 | 1300 | 1168 | 1341 | 1178 |
| VOYHTmiR-104.425 | 1231 | 1161 | 1307 | 1168 | 1341 | 1178 |
| VOYHTmiR-109.425 | 1232 | 1161 | 1314 | 1169 | 1341 | 1178 |
| VOYHTmiR-114.425 | 1233 | 1161 | 1321 | 1168 | 1341 | 1179 |
| VOYHTmiR-116.425 | 1234 | 1161 | 1314 | 1168 | 1341 | 1179 |
| VOYHTmiR-127.425 | 1235 | 1162 | 1314 | 1170 | 1341 | 1180 |
| VOYHTmiR-102.032 | 1236 | 1161 | 1324 | 1168 | 1344 | 1178 |
| VOYHTmiR-104.032 | 1237 | 1161 | 1326 | 1168 | 1344 | 1178 |
| VOYHTmiR-109.032 | 1238 | 1161 | 1328 | 1169 | 1344 | 1178 |
| VOYHTmiR-114.032 | 1239 | 1161 | 1330 | 1168 | 1344 | 1179 |
| VOYHTmiR-116.032 | 1240 | 1161 | 1328 | 1168 | 1344 | 1179 |
| VOYHTmiR-127.032 | 1241 | 1162 | 1328 | 1170 | 1344 | 1180 |
| VOYHTmiR-102.020 | 1242 | 1161 | 1323 | 1168 | 1343 | 1178 |
| VOYHTmiR-104.020 | 1243 | 1161 | 1325 | 1168 | 1343 | 1178 |
| VOYHTmiR-109.020 | 1244 | 1161 | 1327 | 1169 | 1343 | 1178 |
| VOYHTmiR-114.020 | 1245 | 1161 | 1329 | 1168 | 1343 | 1179 |
| VOYHTmiR-116.020 | 1246 | 1161 | 1327 | 1168 | 1343 | 1179 |
| VOYHTmiR-127.020 | 1247 | 1162 | 1327 | 1170 | 1343 | 1180 |
| VOYHTmiR-102.016 | 1248 | 1161 | 1295 | 1168 | 1336 | 1178 |
| VOYHTmiR-104.016 | 1249 | 1161 | 1302 | 1168 | 1336 | 1178 |
| VOYHTmiR-109.016 | 1250 | 1161 | 1309 | 1169 | 1336 | 1178 |
| VOYHTmiR-114.016 | 1251 | 1161 | 1316 | 1168 | 1336 | 1179 |
| VOYHTmiR-116.016 | 1252 | 1161 | 1309 | 1168 | 1336 | 1179 |
| VOYHTmiR-127.016 | 1253 | 1162 | 1309 | 1170 | 1336 | 1180 |
| VOYHTmiR-102.579 | 1254 | 1161 | 1282 | 1168 | 1335 | 1178 |
| VOYHTmiR-104.579 | 1255 | 1161 | 1285 | 1168 | 1335 | 1178 |
| VOYHTmiR-109.579 | 1256 | 1161 | 1282 | 1169 | 1335 | 1178 |
| VOYHTmiR-114.579 | 1257 | 1161 | 1288 | 1168 | 1335 | 1179 |
| VOYHTmiR-116.579 | 1258 | 1161 | 1291 | 1168 | 1335 | 1179 |
| VOYHTmiR-127.579 | 1259 | 1162 | 1282 | 1170 | 1335 | 1180 |
| VOYHTmiR-104.579.1 | 1260 | 1161 | 1331 | 1171 | 1335 | 1178 |
| VOYHTmiR-104.579.2 | 1261 | 1163 | 1331 | 1171 | 1335 | 1178 |
| VOYHTmiR-104.579.3 | 1262 | 1163 | 1331 | 1172 | 1335 | 1178 |
| VOYHTmiR-104.579.4 | 1263 | 1164 | 1331 | 1171 | 1335 | 1181 |
| VOYHTmiR-104.579.6 | 1264 | 1165 | 1331 | 1171 | 1335 | 1181 |
| VOYHTmiR-104.579.7 | 1265 | 1166 | 1331 | 1171 | 1345 | 1178 |
| VOYHTmiR-104.579.8 | 1266 | 1163 | 1337 | 1173 | 1335 | 1178 |
| VOYHTmiR-104.579.9 | 1267 | 1167 | 1331 | 1171 | 1335 | 1182 |
| VOYHTmiR-102.020 | 1268 | 1161 | 1323 | 1168 | 1343 | 1178 |
| VOYHTmiR-102.032 | 1269 | 1161 | 1324 | 1168 | 1344 | 1178 |
| VOYHTmiR-104.020 | 1270 | 1161 | 1325 | 1168 | 1343 | 1178 |
| VOYHTmiR-104.032 | 1271 | 1161 | 1326 | 1168 | 1344 | 1178 |
| VOYHTmiR-109.020 | 1272 | 1161 | 1327 | 1169 | 1343 | 1178 |
| VOYHTmiR-109.032 | 1273 | 1161 | 1328 | 1169 | 1344 | 1178 |
| VOYHTmiR-114.020 | 1274 | 1161 | 1329 | 1168 | 1343 | 1179 |
| VOYHTmiR-114.032 | 1275 | 1161 | 1330 | 1168 | 1344 | 1179 |
| VOYHTmiR-116.020 | 1276 | 1161 | 1327 | 1168 | 1343 | 1179 |
| VOYHTmiR-116.032 | 1277 | 1161 | 1328 | 1168 | 1344 | 1179 |
| VOYHTmiR-127.020 | 1278 | 1162 | 1327 | 1170 | 1343 | 1180 |
| VOYHTmiR-127.032 | 1279 | 1162 | 1328 | 1170 | 1344 | 1180 |

TABLE 11
Modulatory Polynucleotide Sequence Region (5′ to 3′)

| | 5′ | | | | | |
|---|---|---|---|---|---|---|
| | Flanking | | | | | 3′ |
| | to 3′ | 5′ | | | | Flanking |
| | Flanking | Flanking | Guide | Loop | Passenger | SEQ |
| | SEQ ID | SEQ ID | SEQ | SEQ | SEQ ID | ID |
| Name | NO | NO | ID NO | ID NO | NO | NO |
| VOYHTmiR- | 1346 | 1163 | 1350 | 1174 | 1348 | 1178 |
| 104.579.5 | | | | | | |
| VOYHTmiR- | 1347 | 1167 | 1351 | 1175 | 1349 | 1182 |
| 104.579.10 | | | | | | |

### AAV Particles Comprising Modulatory Polynucleotides

[0482] In one embodiment, the AAV particle comprises a viral genome with a payload region comprising a modulatory polynucleotide sequences. In such an embodiment, a viral genome encoding more than one polypeptide may be replicated and packaged into a viral particle. A target cell transduced with a viral particle comprising a modulatory polynucleotide may express the encoded sense and/or antisense sequences in a single cell.

[0483] In some embodiments, the AAV particles are useful in the field of medicine for the treatment, prophylaxis, palliation or amelioration of neurological diseases and/or disorders.

[0484] Non-limiting examples of ITR to ITR sequences of AAV particles comprising a viral genome with a payload region comprising a modulatory polynucleotide sequence are described in Table 12.

TABLE 12
ITR to ITR Sequences of AAV Particles
comprising Modulatory Polynucleotides

| ITR to ITR | | Modulatory |
|---|---|---|
| Construct | ITR to ITR | Polynucleotide |
| Name | SEQ ID NO | SEQ ID NO |
| VOYHT1 | 1352 | 1262 |
| VOYHT2 | 1353 | 1262 |
| VOYHT3 | 1354 | 1250 |
| VOYHT4 | 1355 | 1347 |
| VOYHT5 | 1356 | 1262 |
| VOYHT6 | 1357 | 1262 |
| VOYHT7 | 1358 | 1250 |
| VOYHT8 | 1359 | 1347 |
| VOYHT9 | 1360 | 1262 |
| VOYHT10 | 1361 | 1262 |
| VOYHT11 | 1362 | 1250 |
| VOYHT12 | 1363 | 1347 |
| VOYHT13 | 1364 | 1262 |
| VOYHT14 | 1365 | 1249 |
| VOYHT15 | 1366 | 1259 |
| VOYHT16 | 1367 | 1249 |
| VOYHT17 | 1368 | 1262 |
| VOYHT18 | 1369 | 1262 |
| VOYHT19 | 1370 | 1262 |
| VOYHT20 | 1371 | 1262 |
| VOYHT21 | 1372 | 1262 |
| VOYHT22 | 1373 | 1262 |
| VOYHT23 | 1374 | 1262 |
| VOYHT24 | 1375 | 1262 |
| VOYHT25 | 1376 | 1249 |
| VOYHT26 | 1377 | 1262 |
| VOYHT27 | 1378 | 1259 |
| VOYHT28 | 1379 | 1249 |
| VOYHT35 | 1388 | 1255 |
| VOYHT36 | 1426 | 1248 |
| VOYHT37 | 1427 | 1231 |
| VOYHT38 | 1428 | 1219 |
| VOYHT39 | 1429 | 1207 |
| VOYHT40 | 1430 | 1250 |
| VOYHT41 | 1431 | 1251 |
| VOYHT42 | 1432 | 1252 |
| VOYHT43 | 1433 | 1253 |
| VOYHT44 | 1434 | 1194 |
| VOYHT45 | 1435 | 1223 |
| VOYHT46 | 1436 | 1211 |
| VOYHT47 | 1437 | 1262 |
| VOYHT48 | 1438 | 1347 |

[0485] In one embodiment, the AAV particle comprises a viral genome which comprises a sequence which has a percent identity to any of SEQ ID NOs: 1352-1379, 1388, and 1426-1438. The viral genome may have 1%, 2%, 3%, 4%, 5%, 6%, 7%, 8%, 9%, 10%, 15%, 20%, 25%, 30%, 35%, 40%, 45%, 50%, 55%, 60%, 65%, 70%, 75%, 80%, 85%, 90%, 95%, 99% or 100% identity to any of SEQ ID NOs: 1352-1379, 1388, and 1426-1438. The viral genome may have 1-10%, 10-20%, 30-40%, 50-60%, 50-70%, 50-80%, 50-90%, 50-99%, 50-100%, 60-70%, 60-80%, 60-90%, 60-99%, 60-100%, 70-80%, 70-90%, 70-99%, 70-100%, 80-85%, 80-90%, 80-95%, 80-99%, 80-100%, 90-95%, 90-99%, or 90-100% to any of SEQ ID NOs: 1352-1379, 1388, and 1426-1438. As anon-limiting example, the viral genome comprises a sequence which as 80% identity to any of SEQ ID NO: 1352-1379, 1388, and 1426-1438. As another non-limiting example, the viral genome comprises a sequence which as 85% identity to any of SEQ ID NO: 1352-1379, 1388, and 1426-1438. As another non-limiting example, the viral genome comprises a sequence which as 90% identity to any of SEQ ID NO: 1352-1379, 1388, and 1426-1438. As another non-limiting example, the viral genome comprises a sequence which as 95% identity to any of SEQ ID NO: 1352-1379, 1388, and 1426-1438. As another non-limiting example, the viral genome comprises a sequence which as 99% identity to any of SEQ ID NO: 1352-1379, 1388, and 1426-1438.

[0486] In one embodiment, the AAV particles comprising modulatory polynucleotide sequence which comprises a nucleic acid sequence encoding at least one siRNA molecule may be introduced into mammalian cells.

[0487] Where the AAV particle payload region comprises a modulatory polynucleotide, the modulatory polynucleotide may comprise sense and/or antisense sequences to knock down a target gene. The AAV viral genomes encoding modulatory polynucleotides described herein may be useful in the fields of human disease, viruses, infections veterinary applications and a variety of in vivo and in vitro settings.

[0488] In one embodiment, the AAV particle viral genome may comprise at least one inverted terminal repeat (ITR) region. The ITR region(s) may, independently, have a length such as, but not limited to, 75, 76, 77, 78, 79, 80, 81, 82, 83, 84, 85, 86, 87, 88, 89, 90, 91, 92, 93, 94, 95, 96, 97, 98, 99, 100, 101, 102, 103, 104, 105, 106, 107, 108, 109, 110, 111, 112, 113, 114, 115, 116, 117, 118, 119, 120, 121, 122, 123, 124, 125, 126, 127, 128, 129, 130, 131, 132, 133, 134, 135, 136, 137, 138, 139, 140, 141, 142, 143, 144, 145, 146, 147, 148, 149, 150, 151, 152, 153, 154, 155, 156, 157, 158, 159, 160, 161, 162, 163, 164, 165, 166, 167, 168, 169, 170, 171, 172, 173, 174, and 175 nucleotides. The length of the ITR region for the viral genome may be 75-80, 75-85, 75-100, 80-85, 80-90, 80-105, 85-90, 85-95, 85-110, 90-95, 90-100, 90-115, 95-100, 95-105, 95-120, 100-105, 100-110, 100-125, 105-110, 105-115, 105-130, 110-115, 110-120, 110-135, 115-120, 115-125, 115-140, 120-125, 120-130, 120-145, 125-130, 125-135, 125-150, 130-135, 130-140, 130-155, 135-140, 135-145, 135-160, 140-145, 140-150, 140-165, 145-150, 145-155, 145-170, 150-155, 150-160, 150-175, 155-160, 155-165, 160-165, 160-170, 165-170, 165-175, and 170-175 nucleotides. As a non-limiting example, the viral genome comprises an ITR that is about 105 nucleotides in length. As a non-limiting example, the viral genome comprises an ITR that is about 141 nucleotides in length. As a non-limiting example, the viral genome comprises an ITR that is about 130 nucleotides in length.

[0489] In one embodiment, the AAV particle viral genome may comprises two inverted terminal repeat (ITR) regions. Each of the ITR regions may independently have a length such as, but not limited to, 75, 76, 77, 78, 79, 80, 81, 82, 83, 84, 85, 86, 87, 88, 89, 90, 91, 92, 93, 94, 95, 96, 97, 98, 99, 100, 101, 102, 103, 104, 105, 106, 107, 108, 109, 110, 111, 112, 113, 114, 115, 116, 117, 118, 119, 120, 121, 122, 123, 124, 125, 126, 127, 128, 129, 130, 131, 132, 133, 134, 135, 136, 137, 138, 139, 140, 141, 142, 143, 144, 145, 146, 147, 148, 149, 150, 151, 152, 153, 154, 155, 156, 157, 158, 159, 160, 161, 162, 163, 164, 165, 166, 167, 168, 169, 170, 171, 172, 173, 174, and 175 nucleotides. The length of the ITR regions for the viral genome may be 75-80, 75-85, 75-100, 80-85, 80-90, 80-105, 85-90, 85-95, 85-110, 90-95, 90-100, 90-115, 95-100, 95-105, 95-120, 100-105, 100-110, 100-125, 105-110, 105-115, 105-130, 110-115, 110-120, 110-135, 115-120, 115-125, 115-140, 120-125, 120-130, 120-145, 125-130, 125-135, 125-150, 130-135, 130-140, 130-155, 135-140, 135-145, 135-160, 140-145, 140-150, 140-165, 145-150, 145-155, 145-170, 150-155, 150-160, 150-175, 155-160, 155-165, 160-165, 160-170, 165-170, 165-175, and 170-175 nucleotides. As a non-limiting example, the viral genome comprises an ITR that is about 105 nucleotides in length and 141 nucleotides in length. As a non-limiting example, the viral genome comprises an ITR that is about 105 nucleotides in length and 130 nucleotides in length. As a non-limiting example, the viral genome comprises an ITR that is about 130 nucleotides in length and 141 nucleotides in length.

[0490] In one embodiment, the AAV particle viral genome may comprise at least one sequence region as described in Tables 13-20. The regions may be located before or after any of the other sequence regions described herein.

[0491] In one embodiment, the AAV particle viral genome comprises at least one inverted terminal repeat (ITR) sequence region. Non-limiting examples of ITR sequence regions are described in Table 13.

TABLE 13
Inverted Terminal Repeat
(ITR) Sequence Regions

| Sequence | |
|---|---|
| Region | |
| Name | SEQ ID NO |
| ITR1 | 1380 |
| ITR2 | 1381 |
| ITR3 | 1382 |
| ITR4 | 1383 |

[0492] In one embodiment, the AAV particle viral genome comprises two ITR sequence regions. In one embodiment, the ITR sequence regions are the ITR1 sequence region and the ITR3 sequence region. In one embodiment, the ITR sequence regions are the ITR1 sequence region and the ITR4 sequence region. In one embodiment, the ITR sequence regions are the ITR2 sequence region and the ITR3 sequence region. In one embodiment, the ITR sequence regions are the ITR2 sequence region and the ITR4 sequence region.

[0493] In one embodiment, the AAV particle viral genome may comprise at least one multiple cloning site (MCS) sequence region. The MCS region(s) may, independently, have a length such as, but not limited to, 2, 3, 4, 5, 6, 7, 8, 9, 10, 11, 12, 13, 14, 15, 16, 17, 18, 19, 20, 21, 22, 23, 24, 25, 26, 27, 28, 29, 30, 31, 32, 33, 34, 35, 36, 37, 38, 39, 40, 41, 42, 43, 44, 45, 46, 47, 48, 49, 50, 51, 52, 53, 54, 55, 56, 57, 58, 59, 60, 61, 62, 63, 64, 65, 66, 67, 68, 69, 70, 71, 72, 73, 74, 75, 76, 77, 78, 79, 80, 81, 82, 83, 84, 85, 86, 87, 88, 89, 90, 91, 92, 93, 94, 95, 96, 97, 98, 99, 100, 101, 102, 103, 104, 105, 106, 107, 108, 109, 110, 111, 112, 113, 114, 115, 116, 117, 118, 119, 120, 121, 122, 123, 124, 125, 126, 127, 128, 129, 130, 131, 132, 133, 134, 135, 136, 137, 138, 139, 140, 141, 142, 143, 144, 145, 146, 147, 148, 149, and 150 nucleotides. The length of the MCS region for the viral genome may be 2-10, 5-10, 5-15, 10-20, 10-30, 10-40, 15-20, 15-25, 20-30, 20-40, 20-50, 25-30, 25-35, 30-40, 30-50, 30-60, 35-40, 35-45, 40-50, 40-60, 40-70, 45-50, 45-55, 50-60, 50-70, 50-80, 55-60, 55-65, 60-70, 60-80, 60-90, 65-70, 65-75, 70-80, 70-90, 70-100, 75-80, 75-85, 80-90, 80-100, 80-110, 85-90, 85-95, 90-100, 90-110, 90-120, 95-100, 95-105, 100-110, 100-120, 100-130, 105-110, 105-115, 110-120, 110-130, 110-140, 115-120, 115-125, 120-130, 120-140, 120-150, 125-130, 125-135, 130-140, 130-150, 135-140, 135-145, 140-150, and 145-150 nucleotides. As a non-limiting example, the viral genome comprises a MCS region that is about 5 nucleotides in length. As a non-limiting example, the viral genome comprises a MCS region that is about 10 nucleotides in length. As anon-limiting example, the viral genome comprises a MCS region that is about 14 nucleotides in length. As a non-limiting example, the viral genome comprises a MCS region that is about 18 nucleotides in length. As a non-limiting example, the viral genome comprises a MCS region that is about 73 nucleotides in length. As a non-limiting example, the viral genome comprises a MCS region that is about 121 nucleotides in length.

[0494] In one embodiment, the AAV particle viral genome comprises at least one multiple cloning site (MCS) sequence regions. Non-limiting examples of MCS sequence regions are described in Table 14.

TABLE 14
Multiple Cloning Site
(MCS) Sequence Regions

| Sequence | SEQ ID |
|---|---|
| Region | NO or |
| Name | Sequence |
| MCS1 | 1384 |
| MCS2 | 1385 |
| MCS3 | 1386 |
| MCS4 | 1387 |
| MCS5 | TCGAG |
| MCS6 | 1389 |

[0495] In one embodiment, the AAV particle viral genome comprises one MCS sequence region. In one embodiment, the MCS sequence region is the MCS1 sequence region. In one embodiment, the MCS sequence region is the MCS2 sequence region. In one embodiment, the MCS sequence region is the MCS3 sequence region. In one embodiment, the MCS sequence region is the MCS4 sequence region. In one embodiment, the MCS sequence region is the MCS5 sequence region. In one embodiment, the MCS sequence region is the MCS6 sequence region.

[0496] In one embodiment, the AAV particle viral genome comprises two MCS sequence regions. In one embodiment, the two MCS sequence regions are the MCS1 sequence region and the MCS2 sequence region. In one embodiment, the two MCS sequence regions are the MCS1 sequence region and the MCS3 sequence region. In one embodiment, the two MCS sequence regions are the MCS1 sequence region and the MCS4 sequence region. In one embodiment, the two MCS sequence regions are the MCS1 sequence region and the MCS5 sequence region. In one embodiment, the two MCS sequence regions are the MCS1 sequence region and the MCS6 sequence region. In one embodiment, the two MCS sequence regions are the MCS2 sequence region and the MCS3 sequence region. In one embodiment, the two MCS sequence regions are the MCS2 sequence region and the MCS4 sequence region. In one embodiment, the two MCS sequence regions are the MCS2 sequence region and the MCS5 sequence region. In one embodiment, the two MCS sequence regions are the MCS2 sequence region and the MCS6 sequence region. In one embodiment, the two MCS sequence regions are the MCS3 sequence region and the MCS4 sequence region. In one embodiment, the two MCS sequence regions are the MCS3 sequence region and the MCS5 sequence region. In one embodiment, the two MCS sequence regions are the MCS3 sequence region and the MCS6 sequence region. In one embodiment, the two MCS sequence regions are the MCS4 sequence region and the MCS5 sequence region. In one embodiment, the two MCS sequence regions are the MCS4 sequence region and the MCS6 sequence region. In one embodiment, the two MCS sequence regions are the MCS5 sequence region and the MCS6 sequence region.

[0497] In one embodiment, the AAV particle viral genome comprises two or more MCS sequence regions.

[0498] In one embodiment, the AAV particle viral genome comprises three MCS sequence regions. In one embodiment, the three MCS sequence regions are the MCS1 sequence region, the MCS2 sequence region, and the MCS3 sequence region. In one embodiment, the three MCS sequence regions are the MCS1 sequence region, the MCS2 sequence region, and the MCS4 sequence region. In one embodiment, the three MCS sequence regions are the MCS1 sequence region, the MCS2 sequence region, and the MCS5 sequence region. In one embodiment, the three MCS sequence regions are the MCS1 sequence region, the MCS2 sequence region, and the MCS6 sequence region. In one embodiment, the three MCS sequence regions are the MCS1 sequence region, the MCS3 sequence region, and the MCS4 sequence region. In one embodiment, the three MCS sequence regions are the MCS1 sequence region, the MCS3 sequence region, and the MCS5 sequence region. In one embodiment, the three MCS sequence regions are the MCS1 sequence region, the MCS3 sequence region, and the MCS6 sequence region. In one embodiment, the three MCS sequence regions are the MCS1 sequence region, the MCS4 sequence region, and the MCS5 sequence region. In one embodiment, the three MCS sequence regions are the MCS1 sequence region, the MCS4 sequence region, and the MCS6 sequence region. In one embodiment, the three MCS sequence regions are the MCS1 sequence region, the MCS5 sequence region, and the MCS6 sequence region. In one embodiment, the three MCS sequence regions are the MCS2 sequence region, the MCS3 sequence region, and the MCS4 sequence region. In one embodiment, the three MCS sequence regions are the MCS2 sequence region, the MCS3 sequence region, and the MCS5 sequence region. In one embodiment, the three MCS sequence regions are the MCS2 sequence region, the MCS3 sequence region, and the MCS6 sequence region. In one embodiment, the three MCS sequence regions are the MCS2 sequence region, the MCS4 sequence region, and the MCS5 sequence region. In one embodiment, the three MCS sequence regions are the MCS2 sequence region, the MCS4 sequence region, and the MCS6 sequence region. In one embodiment, the three MCS sequence regions are the MCS2 sequence region, the MCS5 sequence region, and the MCS6 sequence region. In one embodiment, the three MCS sequence regions are the MCS3 sequence region, the MCS4 sequence region, and the MCS5 sequence region. In one embodiment, the three MCS sequence regions are the MCS3 sequence region, the MCS4 sequence region, and the MCS6 sequence region. In one embodiment, the three MCS sequence regions are the MCS3 sequence region, the MCS5 sequence region, and the MCS6 sequence region. In one embodiment, the three MCS sequence regions are the MCS4 sequence region, the MCS5 sequence region, and the MCS6 sequence region.

[0499] In one embodiment, the AAV particle viral genome may comprise at least one multiple filler sequence region. The filler region(s) may, independently, have a length such as, but not limited to, 50, 51, 52, 53, 54, 55, 56, 57, 58, 59, 60, 61, 62, 63, 64, 65, 66, 67, 68, 69, 70, 71, 72, 73, 74, 75, 76, 77, 78, 79, 80, 81, 82, 83, 84, 85, 86, 87, 88, 89, 90, 91, 92, 93, 94, 95, 96, 97, 98, 99, 100, 101, 102, 103, 104, 105, 106, 107, 108, 109, 110, 111, 112, 113, 114, 115, 116, 117, 118, 119, 120, 121, 122, 123, 124, 125, 126, 127, 128, 129, 130, 131, 132, 133, 134, 135, 136, 137, 138, 139, 140, 141, 142, 143, 144, 145, 146, 147, 148, 149, 150, 151, 152, 153, 154, 155, 156, 157, 158, 159, 160, 161, 162, 163, 164, 165, 166, 167, 168, 169, 170, 171, 172, 173, 174, 175, 176, 177, 178, 179, 180, 181, 182, 183, 184, 185, 186, 187, 188, 189, 190, 191, 192, 193, 194, 195, 196, 197, 198, 199, 200, 201, 202, 203, 204, 205, 206, 207, 208, 209, 210, 211, 212, 213, 214, 215, 216, 217, 218, 219, 220, 221, 222, 223, 224, 225, 226, 227, 228, 229, 230, 231, 232, 233, 234, 235, 236, 237, 238, 239, 240, 241, 242, 243, 244, 245, 246, 247, 248, 249, 250, 251, 252, 253, 254, 255, 256, 257, 258, 259, 260, 261, 262, 263, 264, 265, 266, 267, 268, 269, 270, 271, 272, 273, 274, 275, 276, 277, 278, 279, 280, 281, 282, 283, 284, 285, 286, 287, 288, 289, 290, 291, 292, 293, 294, 295, 296, 297, 298, 299, 300, 301, 302, 303, 304, 305, 306, 307, 308, 309, 310, 311, 312, 313, 314, 315, 316, 317, 318, 319, 320, 321, 322, 323, 324, 325, 326, 327, 328, 329, 330, 331, 332, 333, 334, 335, 336, 337, 338, 339, 340, 341, 342, 343, 344, 345, 346, 347, 348, 349, 350, 351, 352, 353, 354, 355, 356, 357, 358, 359, 360, 361, 362, 363, 364, 365, 366, 367, 368, 369, 370, 371, 372, 373, 374, 375, 376, 377, 378, 379, 380, 381, 382, 383, 384, 385, 386, 387, 388, 389, 390, 391, 392, 393, 394, 395, 396, 397, 398, 399, 400, 401, 402, 403, 404, 405, 406, 407, 408, 409, 410, 411, 412, 413, 414, 415, 416, 417, 418, 419, 420, 421, 422, 423, 424, 425, 426, 427, 428, 429, 430, 431, 432, 433, 434, 435, 436, 437, 438, 439, 440, 441, 442, 443, 444, 445, 446, 447, 448, 449, 450, 451, 452, 453, 454, 455, 456, 457, 458, 459, 460, 461, 462, 463, 464, 465, 466, 467, 468, 469, 470, 471, 472, 473, 474, 475, 476, 477, 478, 479, 480, 481, 482, 483, 484, 485, 486, 487, 488, 489, 490, 491, 492, 493, 494, 495, 496, 497, 498, 499, 500, 501, 502, 503, 504, 505, 506, 507, 508, 509, 510, 511, 512, 513, 514, 515, 516, 517, 518, 519, 520, 521, 522, 523, 524, 525, 526, 527, 528, 529, 530, 531, 532, 533, 534, 535, 536, 537, 538, 539, 540, 541, 542, 543, 544, 545, 546, 547, 548, 549, 550, 551, 552, 553, 554, 555, 556, 557, 558, 559, 560, 561, 562, 563, 564, 565, 566, 567, 568, 569, 570, 571, 572, 573, 574, 575, 576, 577, 578, 579, 580, 581, 582, 583, 584, 585, 586, 587, 588, 589, 590, 591, 592, 593, 594, 595, 596, 597, 598, 599, 600, 601, 602, 603, 604, 605, 606, 607, 608, 609, 610, 611, 612, 613, 614, 615, 616, 617, 618, 619, 620, 621, 622, 623, 624, 625, 626, 627, 628, 629, 630, 631, 632, 633, 634, 635, 636, 637, 638, 639, 640, 641, 642, 643, 644, 645, 646, 647, 648, 649, 650, 651, 652, 653, 654, 655, 656, 657, 658, 659, 660, 661, 662, 663, 664, 665, 666, 667, 668, 669, 670, 671, 672, 673, 674, 675, 676, 677, 678, 679, 680, 681, 682, 683, 684, 685, 686, 687, 688, 689, 690, 691, 692, 693, 694, 695, 696, 697, 698, 699, 700, 701, 702, 703, 704, 705, 706, 707, 708, 709, 710, 711, 712, 713, 714, 715, 716, 717, 718, 719, 720, 721, 722, 723, 724, 725, 726, 727, 728, 729, 730, 731, 732, 733, 734, 735, 736, 737, 738, 739, 740, 741, 742, 743, 744, 745, 746, 747, 748, 749, 750, 751, 752, 753, 754, 755, 756, 757, 758, 759, 760, 761, 762, 763, 764, 765, 766, 767, 768, 769, 770, 771, 772, 773, 774, 775, 776, 777, 778, 779, 780, 781, 782, 783, 784, 785, 786, 787, 788, 789, 790, 791, 792, 793, 794, 795, 796, 797, 798, 799, 800, 801, 802, 803, 804, 805, 806, 807, 808, 809, 810, 811, 812, 813, 814, 815, 816, 817, 818, 819, 820, 821, 822, 823, 824, 825, 826, 827, 828, 829, 830, 831, 832, 833, 834, 835, 836, 837, 838, 839, 840, 841, 842, 843, 844, 845, 846, 847, 848, 849, 850, 851, 852, 853, 854, 855, 856, 857, 858, 859, 860, 861, 862, 863, 864, 865, 866, 867, 868, 869, 870, 871, 872, 873, 874, 875, 876, 877, 878, 879, 880, 881, 882, 883, 884, 885, 886, 887, 888, 889, 890, 891, 892, 893, 894, 895, 896, 897, 898, 899, 900, 901, 902, 903, 904, 905, 906, 907, 908, 909, 910, 911, 912, 913, 914, 915, 916, 917, 918, 919, 920, 921, 922, 923, 924, 925, 926, 927, 928, 929, 930, 931, 932, 933, 934, 935, 936, 937, 938, 939, 940, 941, 942, 943, 944, 945, 946, 947, 948, 949, 950, 951, 952, 953, 954, 955, 956, 957, 958, 959, 960, 961, 962, 963, 964, 965, 966, 967, 968, 969, 970, 971, 972, 973, 974, 975, 976, 977, 978, 979, 980, 981, 982, 983, 984, 985, 986, 987, 988, 989, 990, 991, 992, 993, 994, 995, 996, 997, 998, 999, 1000, 1001, 1002, 1003, 1004, 1005, 1006, 1007, 1008, 1009, 1010, 1011, 1012, 1013, 1014, 1015, 1016, 1017, 1018, 1019, 1020, 1021, 1022, 1023, 1024, 1025, 1026, 1027, 1028, 1029, 1030, 1031, 1032, 1033, 1034, 1035, 1036, 1037, 1038, 1039, 1040, 1041, 1042, 1043, 1044, 1045, 1046, 1047, 1048, 1049, 1050, 1051, 1052, 1053, 1054, 1055, 1056, 1057, 1058, 1059, 1060, 1061, 1062, 1063, 1064, 1065, 1066, 1067, 1068, 1069, 1070, 1071, 1072, 1073, 1074, 1075, 1076, 1077, 1078, 1079, 1080, 1081, 1082, 1083, 1084, 1085, 1086, 1087, 1088, 1089, 1090, 1091, 1092, 1093, 1094, 1095, 1096, 1097, 1098, 1099, 1100, 1101, 1102, 1103, 1104, 1105, 1106, 1107, 1108, 1109, 1110, 1111, 1112, 1113, 1114, 1115, 1116, 1117, 1118, 1119, 1120, 1121, 1122, 1123, 1124, 1125, 1126, 1127, 1128, 1129, 1130, 1131, 1132, 1133, 1134, 1135, 1136, 1137, 1138, 1139, 1140, 1141, 1142, 1143, 1144, 1145, 1146, 1147, 1148, 1149, 1150, 1151, 1152, 1153, 1154, 1155, 1156, 1157, 1158, 1159, 1160, 1161, 1162, 1163, 1164, 1165, 1166, 1167, 1168, 1169, 1170, 1171, 1172, 1173, 1174, 1175, 1176, 1177, 1178, 1179, 1180, 1181, 1182, 1183, 1184, 1185, 1186, 1187, 1188, 1189, 1190, 1191, 1192, 1193, 1194, 1195, 1196, 1197, 1198, 1199, 1200, 1201, 1202, 1203, 1204, 1205, 1206, 1207, 1208, 1209, 1210, 1211, 1212, 1213, 1214, 1215, 1216, 1217, 1218, 1219, 1220, 1221, 1222, 1223, 1224, 1225, 1226, 1227, 1228, 1229, 1230, 1231, 1232, 1233, 1234, 1235, 1236, 1237, 1238, 1239, 1240, 1241, 1242, 1243, 1244, 1245, 1246, 1247, 1248, 1249, 1250, 1251, 1252, 1253, 1254, 1255, 1256, 1257, 1258, 1259, 1260, 1261, 1262, 1263, 1264, 1265, 1266, 1267, 1268, 1269, 1270, 1271, 1272, 1273, 1274, 1275, 1276, 1277, 1278, 1279, 1280, 1281, 1282, 1283, 1284, 1285, 1286, 1287, 1288, 1289, 1290, 1291, 1292, 1293, 1294, 1295, 1296, 1297, 1298, 1299, 1300, 1301, 1302, 1303, 1304, 1305, 1306, 1307, 1308, 1309, 1310, 1311, 1312, 1313, 1314, 1315, 1316, 1317, 1318, 1319, 1320, 1321, 1322, 1323, 1324, 1325, 1326, 1327, 1328, 1329, 1330, 1331, 1332, 1333, 1334, 1335, 1336, 1337, 1338, 1339, 1340, 1341, 1342, 1343, 1344, 1345, 1346, 1347, 1348, 1349, 1350, 1351, 1352, 1353, 1354, 1355, 1356, 1357, 1358, 1359, 1360, 1361, 1362, 1363, 1364, 1365, 1366, 1367, 1368, 1369, 1370, 1371, 1372, 1373, 1374, 1375, 1376, 1377, 1378, 1379, 1380, 1381, 1382, 1383, 1384, 1385, 1386, 1387, 1388, 1389, 1390, 1391, 1392, 1393, 1394, 1395, 1396, 1397, 1398, 1399, 1400, 1401, 1402, 1403, 1404, 1405, 1406, 1407, 1408, 1409, 1410, 1411, 1412, 1413, 1414, 1415, 1416, 1417, 1418, 1419, 1420, 1421, 1422, 1423, 1424, 1425, 1426, 1427, 1428, 1429, 1430, 1431, 1432, 1433, 1434, 1435, 1436, 1437, 1438, 1439, 1440, 1441, 1442, 1443, 1444, 1445, 1446, 1447, 1448, 1449, 1450, 1451, 1452, 1453, 1454, 1455, 1456, 1457, 1458, 1459, 1460, 1461, 1462, 1463, 1464, 1465, 1466, 1467, 1468, 1469, 1470, 1471, 1472, 1473, 1474, 1475, 1476, 1477, 1478, 1479, 1480, 1481, 1482, 1483, 1484, 1485, 1486, 1487, 1488, 1489, 1490, 1491, 1492, 1493, 1494, 1495, 1496, 1497, 1498, 1499, 1500, 1501, 1502, 1503, 1504, 1505, 1506, 1507, 1508, 1509, 1510, 1511, 1512, 1513, 1514, 1515, 1516, 1517, 1518, 1519, 1520, 1521, 1522, 1523, 1524, 1525, 1526, 1527, 1528, 1529, 1530, 1531, 1532, 1533, 1534, 1535, 1536, 1537, 1538, 1539, 1540, 1541, 1542, 1543, 1544, 1545, 1546, 1547, 1548, 1549, 1550, 1551, 1552, 1553, 1554, 1555, 1556, 1557, 1558, 1559, 1560, 1561, 1562, 1563, 1564, 1565, 1566, 1567, 1568, 1569, 1570, 1571, 1572, 1573, 1574, 1575, 1576, 1577, 1578, 1579, 1580, 1581, 1582, 1583, 1584, 1585, 1586, 1587, 1588, 1589, 1590, 1591, 1592, 1593, 1594, 1595, 1596, 1597, 1598, 1599, 1600, 1601, 1602, 1603, 1604, 1605, 1606, 1607, 1608, 1609, 1610, 1611, 1612, 1613, 1614, 1615, 1616, 1617, 1618, 1619, 1620, 1621, 1622, 1623, 1624, 1625, 1626, 1627, 1628, 1629, 1630, 1631, 1632, 1633, 1634, 1635, 1636, 1637, 1638, 1639, 1640, 1641, 1642, 1643, 1644, 1645, 1646, 1647, 1648, 1649, 1650, 1651, 1652, 1653, 1654, 1655, 1656, 1657, 1658, 1659, 1660, 1661, 1662, 1663, 1664, 1665, 1666, 1667, 1668, 1669, 1670, 1671, 1672, 1673, 1674, 1675, 1676, 1677, 1678, 1679, 1680, 1681, 1682, 1683, 1684, 1685, 1686, 1687, 1688, 1689, 1690, 1691, 1692, 1693, 1694, 1695, 1696, 1697, 1698, 1699, 1700, 1701, 1702, 1703, 1704, 1705, 1706, 1707, 1708, 1709, 1710, 1711, 1712, 1713, 1714, 1715, 1716, 1717, 1718, 1719, 1720, 1721, 1722, 1723, 1724, 1725, 1726, 1727, 1728, 1729, 1730, 1731, 1732, 1733, 1734, 1735, 1736, 1737, 1738, 1739, 1740, 1741, 1742, 1743, 1744, 1745, 1746, 1747, 1748, 1749, 1750, 1751, 1752, 1753, 1754, 1755, 1756, 1757, 1758, 1759, 1760, 1761, 1762, 1763, 1764, 1765, 1766, 1767, 1768, 1769, 1770, 1771, 1772, 1773, 1774, 1775, 1776, 1777, 1778, 1779, 1780, 1781, 1782, 1783, 1784, 1785, 1786, 1787, 1788, 1789, 1790, 1791, 1792, 1793, 1794, 1795, 1796, 1797, 1798, 1799, 1800, 1801, 1802, 1803, 1804, 1805, 1806, 1807, 1808, 1809, 1810, 1811, 1812, 1813, 1814, 1815, 1816, 1817, 1818, 1819, 1820, 1821, 1822, 1823, 1824, 1825, 1826, 1827, 1828, 1829, 1830, 1831, 1832, 1833, 1834, 1835, 1836, 1837, 1838, 1839, 1840, 1841, 1842, 1843, 1844, 1845, 1846, 1847, 1848, 1849, 1850, 1851, 1852, 1853, 1854, 1855, 1856, 1857, 1858, 1859, 1860, 1861, 1862, 1863, 1864, 1865, 1866, 1867, 1868, 1869, 1870, 1871, 1872, 1873, 1874, 1875, 1876, 1877, 1878, 1879, 1880, 1881, 1882, 1883, 1884, 1885, 1886, 1887, 1888, 1889, 1890, 1891, 1892, 1893, 1894, 1895, 1896, 1897, 1898, 1899, 1900, 1901, 1902, 1903, 1904, 1905, 1906, 1907, 1908, 1909, 1910, 1911, 1912, 1913, 1914, 1915, 1916, 1917, 1918, 1919, 1920, 1921, 1922, 1923, 1924, 1925, 1926, 1927, 1928, 1929, 1930, 1931, 1932, 1933, 1934, 1935, 1936, 1937, 1938, 1939, 1940, 1941, 1942, 1943, 1944, 1945, 1946, 1947, 1948, 1949, 1950, 1951, 1952, 1953, 1954, 1955, 1956, 1957, 1958, 1959, 1960, 1961, 1962, 1963, 1964, 1965, 1966, 1967, 1968, 1969, 1970, 1971, 1972, 1973, 1974, 1975, 1976, 1977, 1978, 1979, 1980, 1981, 1982, 1983, 1984, 1985, 1986, 1987, 1988, 1989, 1990, 1991, 1992, 1993, 1994, 1995, 1996, 1997, 1998, 1999, 2000, 2001, 2002, 2003, 2004, 2005, 2006, 2007, 2008, 2009, 2010, 2011, 2012, 2013, 2014, 2015, 2016, 2017, 2018, 2019, 2020, 2021, 2022, 2023, 2024, 2025, 2026, 2027, 2028, 2029, 2030, 2031, 2032, 2033, 2034, 2035, 2036, 2037, 2038, 2039, 2040, 2041, 2042, 2043, 2044, 2045, 2046, 2047, 2048, 2049, 2050, 2051, 2052, 2053, 2054, 2055, 2056, 2057, 2058, 2059, 2060, 2061, 2062, 2063, 2064, 2065, 2066, 2067, 2068, 2069, 2070, 2071, 2072, 2073, 2074, 2075, 2076, 2077, 2078, 2079, 2080, 2081, 2082, 2083, 2084, 2085, 2086, 2087, 2088, 2089, 2090, 2091, 2092, 2093, 2094, 2095, 2096, 2097, 2098, 2099, 2100, 2101, 2102, 2103, 2104, 2105, 2106, 2107, 2108, 2109, 2110, 2111, 2112, 2113, 2114, 2115, 2116, 2117, 2118, 2119, 2120, 2121, 2122, 2123, 2124, 2125, 2126, 2127, 2128, 2129, 2130, 2131, 2132, 2133, 2134, 2135, 2136, 2137, 2138, 2139, 2140, 2141, 2142, 2143, 2144, 2145, 2146, 2147, 2148, 2149, 2150, 2151, 2152, 2153, 2154, 2155, 2156, 2157, 2158, 2159, 2160, 2161, 2162, 2163, 2164, 2165, 2166, 2167, 2168, 2169, 2170, 2171, 2172, 2173, 2174, 2175, 2176, 2177, 2178, 2179, 2180, 2181, 2182, 2183, 2184, 2185, 2186, 2187, 2188, 2189, 2190, 2191, 2192, 2193, 2194, 2195, 2196, 2197, 2198, 2199, 2200, 2201, 2202, 2203, 2204, 2205, 2206, 2207, 2208, 2209, 2210, 2211, 2212, 2213, 2214, 2215, 2216, 2217, 2218, 2219, 2220, 2221, 2222, 2223, 2224, 2225, 2226, 2227, 2228, 2229, 2230, 2231, 2232, 2233, 2234, 2235, 2236, 2237, 2238, 2239, 2240, 2241, 2242, 2243, 2244, 2245, 2246, 2247, 2248, 2249, 2250, 2251, 2252, 2253, 2254, 2255, 2256, 2257, 2258, 2259, 2260, 2261, 2262, 2263, 2264, 2265, 2266, 2267, 2268, 2269, 2270, 2271, 2272, 2273, 2274, 2275, 2276, 2277, 2278, 2279, 2280, 2281, 2282, 2283, 2284, 2285, 2286, 2287, 2288, 2289, 2290, 2291, 2292, 2293, 2294, 2295, 2296, 2297, 2298, 2299, 2300, 2301, 2302, 2303, 2304, 2305, 2306, 2307, 2308, 2309, 2310, 2311, 2312, 2313, 2314, 2315, 2316, 2317, 2318, 2319, 2320, 2321, 2322, 2323, 2324, 2325, 2326, 2327, 2328, 2329, 2330, 2331, 2332, 2333, 2334, 2335, 2336, 2337, 2338, 2339, 2340, 2341, 2342, 2343, 2344, 2345, 2346, 2347, 2348, 2349, 2350, 2351, 2352, 2353, 2354, 2355, 2356, 2357, 2358, 2359, 2360, 2361, 2362, 2363, 2364, 2365, 2366, 2367, 2368, 2369, 2370, 2371, 2372, 2373, 2374, 2375, 2376, 2377, 2378, 2379, 2380, 2381, 2382, 2383, 2384, 2385, 2386, 2387, 2388, 2389, 2390, 2391, 2392, 2393, 2394, 2395, 2396, 2397, 2398, 2399, 2400, 2401, 2402, 2403, 2404, 2405, 2406, 2407, 2408, 2409, 2410, 2411, 2412, 2413, 2414, 2415, 2416, 2417, 2418, 2419, 2420, 2421, 2422, 2423, 2424, 2425, 2426, 2427, 2428, 2429, 2430, 2431, 2432, 2433, 2434, 2435, 2436, 2437, 2438, 2439, 2440, 2441, 2442, 2443, 2444, 2445, 2446, 2447, 2448, 2449, 2450, 2451, 2452, 2453, 2454, 2455, 2456, 2457, 2458, 2459, 2460, 2461, 2462, 2463, 2464, 2465, 2466, 2467, 2468, 2469, 2470, 2471, 2472, 2473, 2474, 2475, 2476, 2477, 2478, 2479, 2480, 2481, 2482, 2483, 2484, 2485, 2486, 2487, 2488, 2489, 2490, 2491, 2492, 2493, 2494, 2495, 2496, 2497, 2498, 2499, 2500, 2501, 2502, 2503, 2504, 2505, 2506, 2507, 2508, 2509, 2510, 2511, 2512, 2513, 2514, 2515, 2516, 2517, 2518, 2519, 2520, 2521, 2522, 2523, 2524, 2525, 2526, 2527, 2528, 2529, 2530, 2531, 2532, 2533, 2534, 2535, 2536, 2537, 2538, 2539, 2540, 2541, 2542, 2543, 2544, 2545, 2546, 2547, 2548, 2549, 2550, 2551, 2552, 2553, 2554, 2555, 2556, 2557, 2558, 2559, 2560, 2561, 2562, 2563, 2564, 2565, 2566, 2567, 2568, 2569, 2570, 2571, 2572, 2573, 2574, 2575, 2576, 2577, 2578, 2579, 2580, 2581, 2582, 2583, 2584, 2585, 2586, 2587, 2588, 2589, 2590, 2591, 2592, 2593, 2594, 2595, 2596, 2597, 2598, 2599, 2600, 2601, 2602, 2603, 2604, 2605, 2606, 2607, 2608, 2609, 2610, 2611, 2612, 2613, 2614, 2615, 2616, 2617, 2618, 2619, 2620, 2621, 2622, 2623, 2624, 2625, 2626, 2627, 2628, 2629, 2630, 2631, 2632, 2633, 2634, 2635, 2636, 2637, 2638, 2639, 2640, 2641, 2642, 2643, 2644, 2645, 2646, 2647, 2648, 2649, 2650, 2651, 2652, 2653, 2654, 2655, 2656, 2657, 2658, 2659, 2660, 2661, 2662, 2663, 2664, 2665, 2666, 2667, 2668, 2669, 2670, 2671, 2672, 2673, 2674, 2675, 2676, 2677, 2678, 2679, 2680, 2681, 2682, 2683, 2684, 2685, 2686, 2687, 2688, 2689, 2690, 2691, 2692, 2693, 2694, 2695, 2696, 2697, 2698, 2699, 2700, 2701, 2702, 2703, 2704, 2705, 2706, 2707, 2708, 2709, 2710, 2711, 2712, 2713, 2714, 2715, 2716, 2717, 2718, 2719, 2720, 2721, 2722, 2723, 2724, 2725, 2726, 2727, 2728, 2729, 2730, 2731, 2732, 2733, 2734, 2735, 2736, 2737, 2738, 2739, 2740, 2741, 2742, 2743, 2744, 2745, 2746, 2747, 2748, 2749, 2750, 2751, 2752, 2753, 2754, 2755, 2756, 2757, 2758, 2759, 2760, 2761, 2762, 2763, 2764, 2765, 2766, 2767, 2768, 2769, 2770, 2771, 2772, 2773, 2774, 2775, 2776, 2777, 2778, 2779, 2780, 2781, 2782, 2783, 2784, 2785, 2786, 2787, 2788, 2789, 2790, 2791, 2792, 2793, 2794, 2795, 2796, 2797, 2798, 2799, 2800, 2801, 2802, 2803, 2804, 2805, 2806, 2807, 2808, 2809, 2810, 2811, 2812, 2813, 2814, 2815, 2816, 2817, 2818, 2819, 2820, 2821, 2822, 2823, 2824, 2825, 2826, 2827, 2828, 2829, 2830, 2831, 2832, 2833, 2834, 2835, 2836, 2837, 2838, 2839, 2840, 2841, 2842, 2843, 2844, 2845, 2846, 2847, 2848, 2849, 2850, 2851, 2852, 2853, 2854, 2855, 2856, 2857, 2858, 2859, 2860, 2861, 2862, 2863, 2864, 2865, 2866, 2867, 2868, 2869, 2870, 2871, 2872, 2873, 2874, 2875, 2876, 2877, 2878, 2879, 2880, 2881, 2882, 2883, 2884, 2885, 2886, 2887, 2888, 2889, 2890, 2891, 2892, 2893, 2894, 2895, 2896, 2897, 2898, 2899, 2900, 2901, 2902, 2903, 2904, 2905, 2906, 2907, 2908, 2909, 2910, 2911, 2912, 2913, 2914, 2915, 2916, 2917, 2918, 2919, 2920, 2921, 2922, 2923, 2924, 2925, 2926, 2927, 2928, 2929, 2930, 2931, 2932, 2933, 2934, 2935, 2936, 2937, 2938, 2939, 2940, 2941, 2942, 2943, 2944, 2945, 2946, 2947, 2948, 2949, 2950, 2951, 2952, 2953, 2954, 2955, 2956, 2957, 2958, 2959, 2960, 2961, 2962, 2963, 2964, 2965, 2966, 2967, 2968, 2969, 2970, 2971, 2972, 2973, 2974, 2975, 2976, 2977, 2978, 2979, 2980, 2981, 2982, 2983, 2984, 2985, 2986, 2987, 2988, 2989, 2990, 2991, 2992, 2993, 2994, 2995, 2996, 2997, 2998, 2999, 3000, 3001, 3002, 3003, 3004, 3005, 3006, 3007, 3008, 3009, 3010, 3011, 3012, 3013, 3014, 3015, 3016, 3017, 3018, 3019, 3020, 3021, 3022, 3023, 3024, 3025, 3026, 3027, 3028, 3029, 3030, 3031, 3032, 3033, 3034, 3035, 3036, 3037, 3038, 3039, 3040, 3041, 3042, 3043, 3044, 3045, 3046, 3047, 3048, 3049, 3050, 3051, 3052, 3053, 3054, 3055, 3056, 3057, 3058, 3059, 3060, 3061, 3062, 3063, 3064, 3065, 3066, 3067, 3068, 3069, 3070, 3071, 3072, 3073, 3074, 3075, 3076, 3077, 3078, 3079, 3080, 3081, 3082, 3083, 3084, 3085, 3086, 3087, 3088, 3089, 3090, 3091, 3092, 3093, 3094, 3095, 3096, 3097, 3098, 3099, 3100, 3101, 3102, 3103, 3104, 3105, 3106, 3107, 3108, 3109, 3110, 3111, 3112, 3113, 3114, 3115, 3116, 3117, 3118, 3119, 3120, 3121, 3122, 3123, 3124, 3125, 3126, 3127, 3128, 3129, 3130, 3131, 3132, 3133, 3134, 3135, 3136, 3137, 3138, 3139, 3140, 3141, 3142, 3143, 3144, 3145, 3146, 3147, 3148, 3149, 3150, 3151, 3152, 3153, 3154, 3155, 3156, 3157, 3158, 3159, 3160, 3161, 3162, 3163, 3164, 3165, 3166, 3167, 3168, 3169, 3170, 3171, 3172, 3173, 3174, 3175, 3176, 3177, 3178, 3179, 3180, 3181, 3182, 3183, 3184, 3185, 3186, 3187, 3188, 3189, 3190, 3191, 3192, 3193, 3194, 3195, 3196, 3197, 3198, 3199, 3200, 3201, 3202, 3203, 3204, 3205, 3206, 3207, 3208, 3209, 3210, 3211, 3212, 3213, 3214, 3215, 3216, 3217, 3218, 3219, 3220, 3221, 3222, 3223, 3224, 3225, 3226, 3227, 3228, 3229, 3230, 3231, 3232, 3233, 3234, 3235, 3236, 3237, 3238, 3239, 3240, 3241, 3242, 3243, 3244, 3245, 3246, 3247, 3248, 3249, and 3250 nucleotides. The length of any filler region for the viral genome may be 50-100, 100-150, 150-200, 200-250, 250-300, 300-350, 350-400, 400-450, 450-500, 500-550, 550-600, 600-650, 650-700, 700-750, 750-800, 800-850, 850-900, 900-950, 950-1000, 1000-1050, 1050-1100, 1100-1150, 1150-1200, 1200-1250, 1250-1300, 1300-1350, 1350-1400, 1400-1450, 1450-1500, 1500-1550, 1550-1600, 1600-1650, 1650-1700, 1700-1750, 1750-1800, 1800-1850, 1850-1900, 1900-1950, 1950-2000, 2000-2050, 2050-2100, 2100-2150, 2150-2200, 2200-2250, 2250-2300, 2300-2350, 2350-2400, 2400-2450, 2450-2500, 2500-2550, 2550-2600, 2600-2650, 2650-2700, 2700-2750, 2750-2800, 2800-2850, 2850-2900, 2900-2950, 2950-3000, 3000-3050, 3050-3100, 3100-3150, 3150-3200, and 3200-3250 nucleotides. As a non-limiting example, the viral genome comprises a filler region that is about 55 nucleotides in length. As a non-limiting example, the viral genome comprises a filler region that is about 56 nucleotides in length. As a non-limiting example, the viral genome comprises a filler region that is about 97 nucleotides in length. As a non-limiting example, the viral genome comprises a filler region that is about 103 nucleotides in length. As a non-limiting example, the viral genome comprises a filler region that is about 105 nucleotides in length. As a non-limiting example, the viral genome comprises a filler region that is about 357 nucleotides in length. As a non-limiting example, the viral genome comprises a filler region that is about 363 nucleotides in length. As a non-limiting example, the viral genome comprises a filler region that is about 712 nucleotides in length. As a non-limiting example, the viral genome comprises a filler region that is about 714 nucleotides in length. As a non-limiting example, the viral genome comprises a filler region that is about 1203 nucleotides in length. As a non-limiting example, the viral genome comprises a filler region that is about 1209 nucleotides in length. As a non-limiting example, the viral genome comprises a filler region that is about 1512 nucleotides in length. As a non-limiting example, the viral genome comprises a filler region that is about 1519 nucleotides in length. As a non-limiting example, the viral genome comprises a filler region that is about 2395 nucleotides in length. As a non-limiting example, the viral genome comprises a filler region that is about 2403 nucleotides in length. As a non-limiting example, the viral genome comprises a filler region that is about 2405 nucleotides in length. As a non-limiting example, the viral genome comprises a filler region that is about 3013 nucleotides in length. As a non-limiting example, the viral genome comprises a filler region that is about 3021 nucleotides in length.

[0500] In one embodiment, the AAV particle viral genome comprises at least one filler sequence regions. Non-limiting examples of filler sequence regions are described in Table 15.

TABLE 15
Filler Sequence Regions

| Sequence | |
|---|---|
| Region | SEQ ID |
| Name | NO o |
| FILL1 | 1390 |
| FILL2 | 1391 |
| FILL3 | 1392 |
| FILL4 | 1393 |
| FILL5 | 1394 |
| FILL6 | 1395 |
| FILL7 | 1396 |
| FILL8 | 1397 |
| FILL9 | 1398 |
| FILL10 | 1399 |
| FILL11 | 1400 |
| FILL12 | 1401 |
| FILL13 | 1402 |
| FILL14 | 1403 |
| FILL15 | 1404 |
| FILL16 | 1405 |
| FILL17 | 1406 |
| FILL18 | 1407 |

[0501] In one embodiment, the AAV particle viral genome comprises one filler sequence region. In one embodiment, the filler sequence region is the FILL1 sequence region. In one embodiment, the filler sequence region is the FILL2 sequence region. In one embodiment, the filler sequence region is the FILL3 sequence region. In one embodiment, the filler sequence region is the FILL4 sequence region. In one embodiment, the filler sequence region is the FILL5 sequence region. In one embodiment, the filler sequence region is the FILL6 sequence region. In one embodiment, the filler sequence region is the FILL7 sequence region. In one embodiment, the filler sequence region is the FILL8 sequence region. In one embodiment, the filler sequence region is the FILL9 sequence region. In one embodiment, the filler sequence region is the FILL10 sequence region. In one embodiment, the filler sequence region is the FILL11 sequence region. In one embodiment, the filler sequence region is the FILL12 sequence region. In one embodiment, the filler sequence region is the FILL13 sequence region. In one embodiment, the filler sequence region is the FILL14 sequence region. In one embodiment, the filler sequence region is the FILL15 sequence region. In one embodiment, the filler sequence region is the FILL16 sequence region. In one embodiment, the filler sequence region is the FILL17 sequence region. In one embodiment, the filler sequence region is the FILL18 sequence region.

[0502] In one embodiment, the AAV particle viral genome comprises two filler sequence regions. In one embodiment, the two filler sequence regions are the FILL1 sequence region, and the FILL2 sequence region. In one embodiment, the filler sequence region is the FILL1 sequence region, and the FILL3 sequence region. In one embodiment, the filler sequence region is the FILL1 sequence region, and the FILL4 sequence region. In one embodiment, the filler sequence region is the FILL1 sequence region, and the FILL5 sequence region. In one embodiment, the filler sequence region is the FILL1 sequence region, and the FILL6 sequence region. In one embodiment, the filler sequence region is the FILL1 sequence region, and the FILL7 sequence region. In one embodiment, the filler sequence region is the FILL1 sequence region, and the FILL8 sequence region. In one embodiment, the filler sequence region is the FILL1 sequence region, and the FILL9 sequence region. In one embodiment, the filler sequence region is the FILL1 sequence region, and the FILL10 sequence region. In one embodiment, the filler sequence region is the FILL1 sequence region, and the FILL11 sequence region. In one embodiment, the filler sequence region is the FILL1 sequence region, and the FILL12 sequence region. In one embodiment, the filler sequence region is the FILL1 sequence region, and the FILL13 sequence region. In one embodiment, the filler sequence region is the FILL1 sequence region, and the FILL14 sequence region. In one embodiment, the filler sequence region is the FILL1 sequence region, and the FILL15 sequence region. In one embodiment, the filler sequence region is the FILL1 sequence region, and the FILL16 sequence region. In one embodiment, the filler sequence region is the FILL1 sequence region, and the FILL17 sequence region. In one embodiment, the filler sequence region is the FILL1 sequence region, and the FILL18 sequence region. In one embodiment, the filler sequence region is the FILL2 sequence region, and the FILL3 sequence region. In one embodiment, the filler sequence region is the FILL3 sequence region, and the FILL4 sequence region. In one embodiment, the filler sequence region is the FILL3 sequence region, and the FILL5 sequence region. In one embodiment, the filler sequence region is the FILL3 sequence region, and the FILL6 sequence region. In one embodiment, the filler sequence region is the FILL3 sequence region, and the FILL7 sequence region. In one embodiment, the filler sequence region is the FILL3 sequence region, and the FILL8 sequence region. In one embodiment, the filler sequence region is the FILL3 sequence region, and the FILL9 sequence region. In one embodiment, the filler sequence region is the FILL3 sequence region, and the FILL10 sequence region. In one embodiment, the filler sequence region is the FILL3 sequence region, and the FILL11 sequence region. In one embodiment, the filler sequence region is the FILL3 sequence region, and the FILL12 sequence region. In one embodiment, the filler sequence region is the FILL3 sequence region, and the FILL13 sequence region. In one embodiment, the filler sequence region is the FILL3 sequence region, and the FILL14 sequence region. In one embodiment, the filler sequence region is the FILL3 sequence region, and the FILL15 sequence region. In one embodiment, the filler sequence region is the FILL3 sequence region, and the FILL16 sequence region. In one embodiment, the filler sequence region is the FILL3 sequence region, and the FILL17 sequence region. In one embodiment, the filler sequence region is the FILL3 sequence region, and the FILL18 sequence region. In one embodiment, the filler sequence region is the FILL4 sequence region, and the FILL5 sequence region. In one embodiment, the filler sequence region is the FILL4 sequence region, and the FILL6 sequence region. In one embodiment, the filler sequence region is the FILL4 sequence region, and the FILL7 sequence region. In one embodiment, the filler sequence region is the FILL4 sequence region, and the FILL8 sequence region. In one embodiment, the filler sequence region is the FILL4 sequence region, and the FILL9 sequence region. In one embodiment, the filler sequence region is the FILL4 sequence region, and the FILL10 sequence region. In one embodiment, the filler sequence region is the FILL4 sequence region, and the FILL11 sequence region. In one embodiment, the filler sequence region is the FILL4 sequence region, and the FILL12 sequence region. In one embodiment, the filler sequence region is the FILL4 sequence region, and the FILL13 sequence region. In one embodiment, the filler sequence region is the FILL4 sequence region, and the FILL14 sequence region. In one embodiment, the filler sequence region is the FILL4 sequence region, and the FILL15 sequence region. In one embodiment, the filler sequence region is the FILL4 sequence region, and the FILL16 sequence region. In one embodiment, the filler sequence region is the FILL4 sequence region, and the FILL17 sequence region. In one embodiment, the filler sequence region is the FILL4 sequence region, and the FILL18 sequence region. In one embodiment, the filler sequence region is the FILL5 sequence region, and the FILL6 sequence region. In one embodiment, the filler sequence region is the FILL5 sequence region, and the FILL7 sequence region. In one embodiment, the filler sequence region is the FILL5 sequence region, and the FILL8 sequence region. In one embodiment, the filler sequence region is the FILL5 sequence region, and the FILL9 sequence region. In one embodiment, the filler sequence region is the FILL5 sequence region, and the FILL10 sequence region. In one embodiment, the filler sequence region is the FILL5 sequence region, and the FILL11 sequence region. In one embodiment, the filler sequence region is the FILL5 sequence region, and the FILL12 sequence region. In one embodiment, the filler sequence region is the FILL5 sequence region, and the FILL13 sequence region. In one embodiment, the filler sequence region is the FILL5 sequence region, and the FILL14 sequence region. In one embodiment, the filler sequence region is the FILL5 sequence region, and the FILL15 sequence region. In one embodiment, the filler sequence region is the FILL5 sequence region, and the FILL16 sequence region. In one embodiment, the filler sequence region is the FILL5 sequence region, and the FILL17 sequence region. In one embodiment, the filler sequence region is the FILL5 sequence region, and the FILL18 sequence region. In one embodiment, the filler sequence region is the FILL6 sequence region, and the FILL7 sequence region. In one embodiment, the filler sequence region is the FILL6 sequence region, and the FILL8 sequence region. In one embodiment, the filler sequence region is the FILL6 sequence region, and the FILL9 sequence region. In one embodiment, the filler sequence region is the FILL6 sequence region, and the FILL10 sequence region. In one embodiment, the filler sequence region is the FILL6 sequence region, and the FILL11 sequence region. In one embodiment, the filler sequence region is the FILL6 sequence region, and the FILL12 sequence region. In one embodiment, the filler sequence region is the FILL6 sequence region, and the FILL13 sequence region. In one embodiment, the filler sequence region is the FILL6 sequence region, and the FILL14 sequence region. In one embodiment, the filler sequence region is the FILL6 sequence region, and the FILL15 sequence region. In one embodiment, the filler sequence region is the FILL6 sequence region, and the FILL16 sequence region. In one embodiment, the filler sequence region is the FILL6 sequence region, and the FILL17 sequence region. In one embodiment, the filler sequence region is the FILL6 sequence region, and the FILL18 sequence region. In one embodiment, the filler sequence region is the FILL7 sequence region, and the FILL8 sequence region. In one embodiment, the filler sequence region is the FILL7 sequence region, and the FILL9 sequence region. In one embodiment, the filler sequence region is the FILL7 sequence region, and the FILL10 sequence region. In one embodiment, the filler sequence region is the FILL7 sequence region, and the FILL11 sequence region. In one embodiment, the filler sequence region is the FILL7 sequence region, and the FILL12 sequence region. In one embodiment, the filler sequence region is the FILL7 sequence region, and the FILL13 sequence region. In one embodiment, the filler sequence region is the FILL7 sequence region, and the FILL14 sequence region. In one embodiment, the filler sequence region is the FILL7 sequence region, and the FILL15 sequence region. In one embodiment, the filler sequence region is the FILL7 sequence region, and the FILL16 sequence region. In one embodiment, the filler sequence region is the FILL7 sequence region, and the FILL17 sequence region. In one embodiment, the filler sequence region is the FILL7 sequence region, and the FILL18 sequence region. In one embodiment, the filler sequence region is the FILL8 sequence region, and the FILL9 sequence region. In one embodiment, the filler sequence region is the FILL8 sequence region, and the FILL10 sequence region. In one embodiment, the filler sequence region is the FILL8 sequence region, and the FILL11 sequence region. In one embodiment, the filler sequence region is the FILL8 sequence region, and the FILL12 sequence region. In one embodiment, the filler sequence region is the FILL8 sequence region, and the FILL13 sequence region. In one embodiment, the filler sequence region is the FILL8 sequence region, and the FILL14 sequence region. In one embodiment, the filler sequence region is the FILL8 sequence region, and the FILL15 sequence region. In one embodiment, the filler sequence region is the FILL8 sequence region, and the FILL16 sequence region. In one embodiment, the filler sequence region is the FILL8 sequence region, and the FILL17 sequence region. In one embodiment, the filler sequence region is the FILL8 sequence region, and the FILL18 sequence region. In one embodiment, the filler sequence region is the FILL9 sequence region, and the FILL10 sequence region. In one embodiment, the filler sequence region is the FILL9 sequence region, and the FILL11 sequence region. In one embodiment, the filler sequence region is the FILL9 sequence region, and the FILL12 sequence region. In one embodiment, the filler sequence region is the FILL9 sequence region, and the FILL13 sequence region. In one embodiment, the filler sequence region is the FILL9 sequence region, and the FILL14 sequence region. In one embodiment, the filler sequence region is the FILL9 sequence region, and the FILL15 sequence region. In one embodiment, the filler sequence region is the FILL9 sequence region, and the FILL16 sequence region. In one embodiment, the filler sequence region is the FILL9 sequence region, and the FILL17 sequence region. In one embodiment, the filler sequence region is the FILL9 sequence region, and the FILL18 sequence region. In one embodiment, the filler sequence region is the FILL10 sequence region, and the FILL11 sequence region. In one embodiment, the filler sequence region is the FILL10 sequence region, and the FILL12 sequence region. In one embodiment, the filler sequence region is the FILL10 sequence region, and the FILL13 sequence region. In one embodiment, the filler sequence region is the FILL10 sequence region, and the FILL14 sequence region. In one embodiment, the filler sequence region is the FILL10 sequence region, and the FILL15 sequence region. In one embodiment, the filler sequence region is the FILL10 sequence region, and the FILL16 sequence region. In one embodiment, the filler sequence region is the FILL10 sequence region, and the FILL17 sequence region. In one embodiment, the filler sequence region is the FILL10 sequence region, and the FILL18 sequence region. In one embodiment, the filler sequence region is the FILL11 sequence region, and the FILL12 sequence region. In one embodiment, the filler sequence region is the FILL11 sequence region, and the FILL13 sequence region. In one embodiment, the filler sequence region is the FILL11 sequence region, and the FILL14 sequence region. In one embodiment, the filler sequence region is the FILL11 sequence region, and the FILL15 sequence region. In one embodiment, the filler sequence region is the FILL11 sequence region, and the FILL16 sequence region. In one embodiment, the filler sequence region is the FILL11 sequence region, and the FILL17 sequence region. In one embodiment, the filler sequence region is the FILL11 sequence region, and the FILL18 sequence region. In one embodiment, the filler sequence region is the FILL12 sequence region, and the FILL13 sequence region. In one embodiment, the filler sequence region is the FILL12 sequence region, and the FILL14 sequence region. In one embodiment, the filler sequence region is the FILL12 sequence region, and the FILL15 sequence region. In one embodiment, the filler sequence region is the FILL12 sequence region, and the FILL16 sequence region. In one embodiment, the filler sequence region is the FILL12 sequence region, and the FILL17 sequence region. In one embodiment, the filler sequence region is the FILL12 sequence region, and the FILL18 sequence region. In one embodiment, the filler sequence region is the FILL13 sequence region, and the FILL14 sequence region. In one embodiment, the filler sequence region is the FILL13 sequence region, and the FILL15 sequence region. In one embodiment, the filler sequence region is the FILL13 sequence region, and the FILL16 sequence region. In one embodiment, the filler sequence region is the FILL13 sequence region, and the FILL17 sequence region. In one embodiment, the filler sequence region is the FILL13 sequence region, and the FILL18 sequence region. In one embodiment, the filler sequence region is the FILL14 sequence region, and the FILL15 sequence region. In one embodiment, the filler sequence region is the FILL14 sequence region, and the FILL16 sequence region. In one embodiment, the filler sequence region is the FILL14 sequence region, and the FILL17 sequence region. In one embodiment, the filler sequence region is the FILL14 sequence region, and the FILL18 sequence region. In one embodiment, the filler sequence region is the FILL15 sequence region, and the FILL16 sequence region. In one embodiment, the filler sequence region is the FILL15 sequence region, and the FILL17 sequence region. In one embodiment, the filler sequence region is the FILL15 sequence region, and the FILL18 sequence region. In one embodiment, the filler sequence region is the FILL16 sequence region, and the FILL17 sequence region. In one embodiment, the filler sequence region is the FILL16 sequence region, and the FILL18 sequence region. In one embodiment, the filler sequence region is the FILL17 sequence region, and the FILL18 sequence region.

[0503] In one embodiment, the AAV particle viral genome comprises three filler sequence regions. In one embodiment, the two filler sequence regions are the FILL1 sequence region, the FILL2 sequence region, and the FILL3 sequence region. In one embodiment, the filler sequence region is the FILL1 sequence region, the FILL2 sequence region, and the FILL4 sequence region. In one embodiment, the filler sequence region is the FILL1 sequence region, the FILL2 sequence region, and the FILL5 sequence region. In one embodiment, the filler sequence region is the FILL1 sequence region, the FILL2 sequence region, and the FILL6 sequence region. In one embodiment, the filler sequence region is the FILL1 sequence region, the FILL2 sequence region, and the FILL7 sequence region. In one embodiment, the filler sequence region is the FILL1 sequence region, the FILL2 sequence region, and the FILL8 sequence region. In one embodiment, the filler sequence region is the FILL1 sequence region, the FILL2 sequence region, and the FILL9 sequence region. In one embodiment, the filler sequence region is the FILL1 sequence region, the FILL2 sequence region, and the FILL10 sequence region. In one embodiment, the filler sequence region is the FILL1 sequence region, the FILL2 sequence region, and the FILL11 sequence region. In one embodiment, the filler sequence region is the FILL1 sequence region, the FILL2 sequence region, and the FILL12 sequence region. In one embodiment, the filler sequence region is the FILL1 sequence region, the FILL2 sequence region, and the FILL13 sequence region. In one embodiment, the filler sequence region is the FILL1 sequence region, the FILL2 sequence region, and the FILL14 sequence region. In one embodiment, the filler sequence region is the FILL1 sequence region, the FILL2 sequence region, and the FILL15 sequence region. In one embodiment, the filler sequence region is the FILL1 sequence region, the FILL2 sequence region, and the FILL16 sequence region. In one embodiment, the filler sequence region is the FILL1 sequence region, the FILL2 sequence region, and the FILL17 sequence region. In one embodiment, the filler sequence region is the FILL1 sequence region, the FILL2 sequence region, and the FILL18 sequence region. In one embodiment, the filler sequence region is the FILL1 sequence region, the FILL3 sequence region, and the FILL4 sequence region. In one embodiment, the filler sequence region is the FILL1 sequence region, the FILL3 sequence region, and the FILL5 sequence region. In one embodiment, the filler sequence region is the FILL1 sequence region, the FILL3 sequence region, and the FILL6 sequence region. In one embodiment, the filler sequence region is the FILL1 sequence region, the FILL3 sequence region, and the FILL7 sequence region. In one embodiment, the filler sequence region is the FILL1 sequence region, the FILL3 sequence region, and the FILL8 sequence region. In one embodiment, the filler sequence region is the FILL1 sequence region, the FILL3 sequence region, and the FILL9 sequence region. In one embodiment, the filler sequence region is the FILL1 sequence region, the FILL3 sequence region, and the FILL10 sequence region. In one embodiment, the filler sequence region is the FILL1 sequence region, the FILL3 sequence region, and the FILL11 sequence region. In one embodiment, the filler sequence region is the FILL1 sequence region, the FILL3 sequence region, and the FILL12 sequence region. In one embodiment, the filler sequence region is the FILL1 sequence region, the FILL3 sequence region, and the FILL13 sequence region. In one embodiment, the filler sequence region is the FILL1 sequence region, the FILL3 sequence region, and the FILL14 sequence region. In one embodiment, the filler sequence region is the FILL1 sequence region, the FILL3 sequence region, and the FILL15 sequence region. In one embodiment, the filler sequence region is the FILL1 sequence region, the FILL3 sequence region, and the FILL16 sequence region. In one embodiment, the filler sequence region is the FILL1 sequence region, the FILL3 sequence region, and the FILL17 sequence region. In one embodiment, the filler sequence region is the FILL1 sequence region, the FILL3 sequence region, and the FILL18 sequence region. In one embodiment, the filler sequence region is the FILL1 sequence region, the FILL4 sequence region, and the FILL5 sequence region. In one embodiment, the filler sequence region is the FILL1 sequence region, the FILL4 sequence region, and the FILL6 sequence region. In one embodiment, the filler sequence region is the FILL1 sequence region, the FILL4 sequence region, and the FILL7 sequence region. In one embodiment, the filler sequence region is the FILL1 sequence region, the FILL4 sequence region, and the FILL8 sequence region. In one embodiment, the filler sequence region is the FILL1 sequence region, the FILL4 sequence region, and the FILL9 sequence region. In one embodiment, the filler sequence region is the FILL1 sequence region, the FILL4 sequence region, and the FILL10 sequence region. In one embodiment, the filler sequence region is the FILL1 sequence region, the FILL4 sequence region, and the FILL11 sequence region. In one embodiment, the filler sequence region is the FILL1 sequence region, the FILL4 sequence region, and the FILL12 sequence region. In one embodiment, the filler sequence region is the FILL1 sequence region, the FILL4 sequence region, and the FILL13 sequence region. In one embodiment, the filler sequence region is the FILL1 sequence region, the FILL4 sequence region, and the FILL14 sequence region. In one embodiment, the filler sequence region is the FILL1 sequence region, the FILL4 sequence region, and the FILL15 sequence region. In one embodiment, the filler sequence region is the FILL1 sequence region, the FILL4 sequence region, and the FILL16 sequence region. In one embodiment, the filler sequence region is the FILL1 sequence region, the FILL4 sequence region, and the FILL17 sequence region. In one embodiment, the filler sequence region is the FILL1 sequence region, the FILL4 sequence region, and the FILL18 sequence region. In one embodiment, the filler sequence region is the FILL1 sequence region, the FILL5 sequence region, and the FILL6 sequence region. In one embodiment, the filler sequence region is the FILL1 sequence region, the FILL5 sequence region, and the FILL7 sequence region. In one embodiment, the filler sequence region is the FILL1 sequence region, the FILL5 sequence region, and the FILL8 sequence region. In one embodiment, the filler sequence region is the FILL1 sequence region, the FILL5 sequence region, and the FILL9 sequence region. In one embodiment, the filler sequence region is the FILL1 sequence region, the FILL5 sequence region, and the FILL10 sequence region. In one embodiment, the filler sequence region is the FILL1 sequence region, the FILL5 sequence region, and the FILL11 sequence region. In one embodiment, the filler sequence region is the FILL1 sequence region, the FILL5 sequence region, and the FILL12 sequence region. In one embodiment, the filler sequence region is the FILL1 sequence region, the FILL5 sequence region, and the FILL13 sequence region. In one embodiment, the filler sequence region is the FILL1 sequence region, the FILL5 sequence region, and the FILL14 sequence region. In one embodiment, the filler sequence region is the FILL1 sequence region, the FILL5 sequence region, and the FILL15 sequence region. In one embodiment, the filler sequence region is the FILL1 sequence region, the FILL5 sequence region, and the FILL16 sequence region. In one embodiment, the filler sequence region is the FILL1 sequence region, the FILL5 sequence region, and the FILL17 sequence region. In one embodiment, the filler sequence region is the FILL1 sequence region, the FILL5 sequence region, and the FILL18 sequence region. In one embodiment, the filler sequence region is the FILL1 sequence region, the FILL6 sequence region, and the FILL7 sequence region. In one embodiment, the filler sequence region is the FILL1 sequence region, the FILL6 sequence region, and the FILL8 sequence region. In one embodiment, the filler sequence region is the FILL1 sequence region, the FILL6 sequence region, and the FILL9 sequence region. In one embodiment, the filler sequence region is the FILL1 sequence region, the FILL6 sequence region, and the FILL10 sequence region. In one embodiment, the filler sequence region is the FILL1 sequence region, the FILL6 sequence region, and the FILL11 sequence region. In one embodiment, the filler sequence region is the FILL1 sequence region, the FILL6 sequence region, and the FILL12 sequence region. In one embodiment, the filler sequence region is the FILL1 sequence region, the FILL6 sequence region, and the FILL13 sequence region. In one embodiment, the filler sequence region is the FILL1 sequence region, the FILL6 sequence region, and the FILL14 sequence region. In one embodiment, the filler sequence region is the FILL1 sequence region, the FILL6 sequence region, and the FILL15 sequence region. In one embodiment, the filler sequence region is the FILL1 sequence region, the FILL6 sequence region, and the FILL16 sequence region. In one embodiment, the filler sequence region is the FILL1 sequence region, the FILL6 sequence region, and the FILL17 sequence region. In one embodiment, the filler sequence region is the FILL1 sequence region, the FILL6 sequence region, and the FILL18 sequence region. In one embodiment, the filler sequence region is the FILL1 sequence region, the FILL7 sequence region, and the FILL8 sequence region. In one embodiment, the filler sequence region is the FILL1 sequence region, the FILL7 sequence region, and the FILL9 sequence region. In one embodiment, the filler sequence region is the FILL1 sequence region, the FILL7 sequence region, and the FILL10 sequence region. In one embodiment, the filler sequence region is the FILL1 sequence region, the FILL7 sequence region, and the FILL11 sequence region. In one embodiment, the filler sequence region is the FILL1 sequence region, the FILL7 sequence region, and the FILL12 sequence region. In one embodiment, the filler sequence region is the FILL1 sequence region, the FILL7 sequence region, and the FILL13 sequence region. In one embodiment, the filler sequence region is the FILL1 sequence region, the FILL7 sequence region, and the FILL14 sequence region. In one embodiment, the filler sequence region is the FILL1 sequence region, the FILL7 sequence region, and the FILL15 sequence region. In one embodiment, the filler sequence region is the FILL1 sequence region, the FILL7 sequence region, and the FILL16 sequence region. In one embodiment, the filler sequence region is the FILL1 sequence region, the FILL7 sequence region, and the FILL17 sequence region. In one embodiment, the filler sequence region is the FILL1 sequence region, the FILL7 sequence region, and the FILL18 sequence region. In one embodiment, the filler sequence region is the FILL1 sequence region, the FILL8 sequence region, and the FILL9 sequence region. In one embodiment, the filler sequence region is the FILL1 sequence region, the FILL8 sequence region, and the FILL10 sequence region. In one embodiment, the filler sequence region is the FILL1 sequence region, the FILL8 sequence region, and the FILL11 sequence region. In one embodiment, the filler sequence region is the FILL1 sequence region, the FILL8 sequence region, and the FILL12 sequence region. In one embodiment, the filler sequence region is the FILL1 sequence region, the FILL8 sequence region, and the FILL13 sequence region. In one embodiment, the filler sequence region is the FILL1 sequence region, the FILL8 sequence region, and the FILL14 sequence region. In one embodiment, the filler sequence region is the FILL1 sequence region, the FILL8 sequence region, and the FILL15 sequence region. In one embodiment, the filler sequence region is the FILL1 sequence region, the FILL8 sequence region, and the FILL16 sequence region. In one embodiment, the filler sequence region is the FILL1 sequence region, the FILL8 sequence region, and the FILL17 sequence region. In one embodiment, the filler sequence region is the FILL1 sequence region, the FILL8 sequence region, and the FILL18 sequence region. In one embodiment, the filler sequence region is the FILL1 sequence region, the FILL9 sequence region, and the FILL10 sequence region. In one embodiment, the filler sequence region is the FILL1 sequence region, the FILL9 sequence region, and the FILL11 sequence region. In one embodiment, the filler sequence region is the FILL1 sequence region, the FILL9 sequence region, and the FILL12 sequence region. In one embodiment, the filler sequence region is the FILL1 sequence region, the FILL9 sequence region, and the FILL13 sequence region. In one embodiment, the filler sequence region is the FILL1 sequence region, the FILL9 sequence region, and the FILL14 sequence region. In one embodiment, the filler sequence region is the FILL1 sequence region, the FILL9 sequence region, and the FILL15 sequence region. In one embodiment, the filler sequence region is the FILL1 sequence region, the FILL9 sequence region, and the FILL16 sequence region. In one embodiment, the filler sequence region is the FILL1 sequence region, the FILL9 sequence region, and the FILL17 sequence region. In one embodiment, the filler sequence region is the FILL1 sequence region, the FILL9 sequence region, and the FILL18 sequence region. In one embodiment, the filler sequence region is the FILL1 sequence region, the FILL10 sequence region, and the FILL11 sequence region. In one embodiment, the filler sequence region is the FILL1 sequence region, the FILL10 sequence region, and the FILL12 sequence region. In one embodiment, the filler sequence region is the FILL1 sequence region, the FILL10 sequence region, and the FILL13 sequence region. In one embodiment, the filler sequence region is the FILL1 sequence region, the FILL10 sequence region, and the FILL14 sequence region. In one embodiment, the filler sequence region is the FILL1 sequence region, the FILL10 sequence region, and the FILL15 sequence region. In one embodiment, the filler sequence region is the FILL1 sequence region, the FILL10 sequence region, and the FILL16 sequence region. In one embodiment, the filler sequence region is the FILL1 sequence region, the FILL10 sequence region, and the FILL17 sequence region. In one embodiment, the filler sequence region is the FILL1 sequence region, the FILL10 sequence region, and the FILL18 sequence region. In one embodiment, the filler sequence region is the FILL1 sequence region, the FILL11 sequence region, and the FILL12 sequence region. In one embodiment, the filler sequence region is the FILL1 sequence region, the FILL11 sequence region, and the FILL13 sequence region. In one embodiment, the filler sequence region is the FILL1 sequence region, the FILL11 sequence region, and the FILL14 sequence region. In one embodiment, the filler sequence region is the FILL1 sequence region, the FILL11 sequence region, and the FILL15 sequence region. In one embodiment, the filler sequence region is the FILL1 sequence region, the FILL11 sequence region, and the FILL16 sequence region. In one embodiment, the filler sequence region is the FILL1 sequence region, the FILL11 sequence region, and the FILL17 sequence region. In one embodiment, the filler sequence region is the FILL1 sequence region, the FILL11 sequence region, and the FILL18 sequence region. In one embodiment, the filler sequence region is the FILL1 sequence region, the FILL12 sequence region, and the FILL13 sequence region. In one embodiment, the filler sequence region is the FILL1 sequence region, the FILL12 sequence region, and the FILL14 sequence region. In one embodiment, the filler sequence region is the FILL1 sequence region, the FILL12 sequence region, and the FILL15 sequence region. In one embodiment, the filler sequence region is the FILL1 sequence region, the FILL12 sequence region, and the FILL16 sequence region. In one embodiment, the filler sequence region is the FILL1 sequence region, the FILL12 sequence region, and the FILL17 sequence region. In one embodiment, the filler sequence region is the FILL1 sequence region, the FILL12 sequence region, and the FILL18 sequence region. In one embodiment, the filler sequence region is the FILL1 sequence region, the FILL13 sequence region, and the FILL14 sequence region. In one embodiment, the filler sequence region is the FILL1 sequence region, the FILL13 sequence region, and the FILL15 sequence region. In one embodiment, the filler sequence region is the FILL1 sequence region, the FILL13 sequence region, and the FILL16 sequence region. In one embodiment, the filler sequence region is the FILL1 sequence region, the FILL13 sequence region, and the FILL17 sequence region. In one embodiment, the filler sequence region is the FILL1 sequence region, the FILL13 sequence region, and the FILL18 sequence region. In one embodiment, the filler sequence region is the FILL1 sequence region, the FILL14 sequence region, and the FILL15 sequence region. In one embodiment, the filler sequence region is the FILL1 sequence region, the FILL14 sequence region, and the FILL16 sequence region. In one embodiment, the filler sequence region is the FILL1 sequence region, the FILL14 sequence region, and the FILL17 sequence region. In one embodiment, the filler sequence region is the FILL1 sequence region, the FILL14 sequence region, and the FILL18 sequence region. In one embodiment, the filler sequence region is the FILL1 sequence region, the FILL15 sequence region, and the FILL16 sequence region. In one embodiment, the filler sequence region is the FILL1 sequence region, the FILL15 sequence region, and the FILL17 sequence region. In one embodiment, the filler sequence region is the FILL1 sequence region, the FILL15 sequence region, and the FILL18 sequence region. In one embodiment, the filler sequence region is the FILL1 sequence region, the FILL16 sequence region, and the FILL17 sequence region. In one embodiment, the filler sequence region is the FILL1 sequence region, the FILL16 sequence region, and the FILL18 sequence region. In one embodiment, the filler sequence region is the FILL1 sequence region, the FILL17 sequence region, and the FILL18 sequence region. In one embodiment, the filler sequence region is the FILL2 sequence region, the FILL3 sequence region, and the FILL4 sequence region. In one embodiment, the filler sequence region is the FILL2 sequence region, the FILL3 sequence region, and the FILL5 sequence region. In one embodiment, the filler sequence region is the FILL2 sequence region, the FILL3 sequence region, and the FILL6 sequence region. In one embodiment, the filler sequence region is the FILL2 sequence region, the FILL3 sequence region, and the FILL7 sequence region. In one embodiment, the filler sequence region is the FILL2 sequence region, the FILL3 sequence region, and the FILL8 sequence region. In one embodiment, the filler sequence region is the FILL2 sequence region, the FILL3 sequence region, and the FILL9 sequence region. In one embodiment, the filler sequence region is the FILL2 sequence region, the FILL3 sequence region, and the FILL10 sequence region. In one embodiment, the filler sequence region is the FILL2 sequence region, the FILL3 sequence region, and the FILL11 sequence region. In one embodiment, the filler sequence region is the FILL2 sequence region, the FILL3 sequence region, and the FILL12 sequence region. In one embodiment, the filler sequence region is the FILL2 sequence region, the FILL3 sequence region, and the FILL13 sequence region. In one embodiment, the filler sequence region is the FILL2 sequence region, the FILL3 sequence region, and the FILL14 sequence region. In one embodiment, the filler sequence region is the FILL2 sequence region, the FILL3 sequence region, and the FILL15 sequence region. In one embodiment, the filler sequence region is the FILL2 sequence region, the FILL3 sequence region, and the FILL16 sequence region. In one embodiment, the filler sequence region is the FILL2 sequence region, the FILL3 sequence region, and the FILL17 sequence region. In one embodiment, the filler sequence region is the FILL2 sequence region, the FILL3 sequence region, and the FILL18 sequence region. In one embodiment, the filler sequence region is the FILL2 sequence region, the FILL4 sequence region, and the FILL5 sequence region. In one embodiment, the filler sequence region is the FILL2 sequence region, the FILL4 sequence region, and the FILL6 sequence region. In one embodiment, the filler sequence region is the FILL2 sequence region, the FILL4 sequence region, and the FILL7 sequence region. In one embodiment, the filler sequence region is the FILL2 sequence region, the FILL4 sequence region, and the FILL8 sequence region. In one embodiment, the filler sequence region is the FILL2 sequence region, the FILL4 sequence region, and the FILL9 sequence region. In one embodiment, the filler sequence region is the FILL2 sequence region, the FILL4 sequence region, and the FILL10 sequence region. In one embodiment, the filler sequence region is the FILL2 sequence region, the FILL4 sequence region, and the FILL11 sequence region. In one embodiment, the filler sequence region is the FILL2 sequence region, the FILL4 sequence region, and the FILL12 sequence region. In one embodiment, the filler sequence region is the FILL2 sequence region, the FILL4 sequence region, and the FILL13 sequence region. In one embodiment, the filler sequence region is the FILL2 sequence region, the FILL4 sequence region, and the FILL14 sequence region. In one embodiment, the filler sequence region is the FILL2 sequence region, the FILL4 sequence region, and the FILL15 sequence region. In one embodiment, the filler sequence region is the FILL2 sequence region, the FILL4 sequence region, and the FILL16 sequence region. In one embodiment, the filler sequence region is the FILL2 sequence region, the FILL4 sequence region, and the FILL17 sequence region. In one embodiment, the filler sequence region is the FILL2 sequence region, the FILL4 sequence region, and the FILL18 sequence region. In one embodiment, the filler sequence region is the FILL2 sequence region, the FILL5 sequence region, and the FILL6 sequence region. In one embodiment, the filler sequence region is the FILL2 sequence region, the FILL5 sequence region, and the FILL7 sequence region. In one embodiment, the filler sequence region is the FILL2 sequence region, the FILL5 sequence region, and the FILL8 sequence region. In one embodiment, the filler sequence region is the FILL2 sequence region, the FILL5 sequence region, and the FILL9 sequence region. In one embodiment, the filler sequence region is the FILL2 sequence region, the FILL5 sequence region, and the FILL10 sequence region. In one embodiment, the filler sequence region is the FILL2 sequence region, the FILL5 sequence region, and the FILL11 sequence region. In one embodiment, the filler sequence region is the FILL2 sequence region, the FILL5 sequence region, and the FILL12 sequence region. In one embodiment, the filler sequence region is the FILL2 sequence region, the FILL5 sequence region, and the FILL13 sequence region. In one embodiment, the filler sequence region is the FILL2 sequence region, the FILL5 sequence region, and the FILL14 sequence region. In one embodiment, the filler sequence region is the FILL2 sequence region, the FILL5 sequence region, and the FILL15 sequence region. In one embodiment, the filler sequence region is the FILL2 sequence region, the FILL5 sequence region, and the FILL16 sequence region. In one embodiment, the filler sequence region is the FILL2 sequence region, the FILL5 sequence region, and the FILL17 sequence region. In one embodiment, the filler sequence region is the FILL2 sequence region, the FILL5 sequence region, and the FILL18 sequence region. In one embodiment, the filler sequence region is the FILL2 sequence region, the FILL6 sequence region, and the FILL7 sequence region. In one embodiment, the filler sequence region is the FILL2 sequence region, the FILL6 sequence region, and the FILL8 sequence region. In one embodiment, the filler sequence region is the FILL2 sequence region, the FILL6 sequence region, and the FILL9 sequence region. In one embodiment, the filler sequence region is the FILL2 sequence region, the FILL6 sequence region, and the FILL10 sequence region. In one embodiment, the filler sequence region is the FILL2 sequence region, the FILL6 sequence region, and the FILL11 sequence region. In one embodiment, the filler sequence region is the FILL2 sequence region, the FILL6 sequence region, and the FILL12 sequence region. In one embodiment, the filler sequence region is the FILL2 sequence region, the FILL6 sequence region, and the FILL13 sequence region. In one embodiment, the filler sequence region is the FILL2 sequence region, the FILL6 sequence region, and the FILL14 sequence region. In one embodiment, the filler sequence region is the FILL2 sequence region, the FILL6 sequence region, and the FILL15 sequence region. In one embodiment, the filler sequence region is the FILL2 sequence region, the FILL6 sequence region, and the FILL16 sequence region. In one embodiment, the filler sequence region is the FILL2 sequence region, the FILL6 sequence region, and the FILL17 sequence region. In one embodiment, the filler sequence region is the FILL2 sequence region, the FILL6 sequence region, and the FILL18 sequence region. In one embodiment, the filler sequence region is the FILL2 sequence region, the FILL7 sequence region, and the FILL8 sequence region. In one embodiment, the filler sequence region is the FILL2 sequence region, the FILL7 sequence region, and the FILL9 sequence region. In one embodiment, the filler sequence region is the FILL2 sequence region, the FILL7 sequence region, and the FILL10 sequence region. In one embodiment, the filler sequence region is the FILL2 sequence region, the FILL7 sequence region, and the FILL11 sequence region. In one embodiment, the filler sequence region is the FILL2 sequence region, the FILL7 sequence region, and the FILL12 sequence region. In one embodiment, the filler sequence region is the FILL2 sequence region, the FILL7 sequence region, and the FILL13 sequence region. In one embodiment, the filler sequence region is the FILL2 sequence region, the FILL7 sequence region, and the FILL14 sequence region. In one embodiment, the filler sequence region is the FILL2 sequence region, the FILL7 sequence region, and the FILL15 sequence region. In one embodiment, the filler sequence region is the FILL2 sequence region, the FILL7 sequence region, and the FILL16 sequence region. In one embodiment, the filler sequence region is the FILL2 sequence region, the FILL7 sequence region, and the FILL17 sequence region. In one embodiment, the filler sequence region is the FILL2 sequence region, the FILL7 sequence region, and the FILL18 sequence region. In one embodiment, the filler sequence region is the FILL2 sequence region, the FILL8 sequence region, and the FILL9 sequence region. In one embodiment, the filler sequence region is the FILL2 sequence region, the FILL8 sequence region, and the FILL10 sequence region. In one embodiment, the filler sequence region is the FILL2 sequence region, the FILL8 sequence region, and the FILL11 sequence region. In one embodiment, the filler sequence region is the FILL2 sequence region, the FILL8 sequence region, and the FILL12 sequence region. In one embodiment, the filler sequence region is the FILL2 sequence region, the FILL8 sequence region, and the FILL13 sequence region. In one embodiment, the filler sequence region is the FILL2 sequence region, the FILL8 sequence region, and the FILL14 sequence region. In one embodiment, the filler sequence region is the FILL2 sequence region, the FILL8 sequence region, and the FILL15 sequence region. In one embodiment, the filler sequence region is the FILL2 sequence region, the FILL8 sequence region, and the FILL16 sequence region. In one embodiment, the filler sequence region is the FILL2 sequence region, the FILL8 sequence region, and the FILL17 sequence region. In one embodiment, the filler sequence region is the FILL2 sequence region, the FILL8 sequence region, and the FILL18 sequence region. In one embodiment, the filler sequence region is the FILL2 sequence region, the FILL9 sequence region, and the FILL10 sequence region. In one embodiment, the filler sequence region is the FILL2 sequence region, the FILL9 sequence region, and the FILL11 sequence region. In one embodiment, the filler sequence region is the FILL2 sequence region, the FILL9 sequence region, and the FILL12 sequence region. In one embodiment, the filler sequence region is the FILL2 sequence region, the FILL9 sequence region, and the FILL13 sequence region. In one embodiment, the filler sequence region is the FILL2 sequence region, the FILL9 sequence region, and the FILL14 sequence region. In one embodiment, the filler sequence region is the FILL2 sequence region, the FILL9 sequence region, and the FILL15 sequence region. In one embodiment, the filler sequence region is the FILL2 sequence region, the FILL9 sequence region, and the FILL16 sequence region. In one embodiment, the filler sequence region is the FILL2 sequence region, the FILL9 sequence region, and the FILL17 sequence region. In one embodiment, the filler sequence region is the FILL2 sequence region, the FILL9 sequence region, and the FILL18 sequence region. In one embodiment, the filler sequence region is the FILL2 sequence region, the FILL10 sequence region, and the FILL11 sequence region. In one embodiment, the filler sequence region is the FILL2 sequence region, the FILL10 sequence region, and the FILL12 sequence region. In one embodiment, the filler sequence region is the FILL2 sequence region, the FILL10 sequence region, and the FILL13 sequence region. In one embodiment, the filler sequence region is the FILL2 sequence region, the FILL10 sequence region, and the FILL14 sequence region. In one embodiment, the filler sequence region is the FILL2 sequence region, the FILL10 sequence region, and the FILL15 sequence region. In one embodiment, the filler sequence region is the FILL2 sequence region, the FILL10 sequence region, and the FILL16 sequence region. In one embodiment, the filler sequence region is the FILL2 sequence region, the FILL10 sequence region, and the FILL17 sequence region. In one embodiment, the filler sequence region is the FILL2 sequence region, the FILL10 sequence region, and the FILL18 sequence region. In one embodiment, the filler sequence region is the FILL2 sequence region, the FILL11 sequence region, and the FILL12 sequence region. In one embodiment, the filler sequence region is the FILL2 sequence region, the FILL11 sequence region, and the FILL13 sequence region. In one embodiment, the filler sequence region is the FILL2 sequence region, the FILL11 sequence region, and the FILL14 sequence region. In one embodiment, the filler sequence region is the FILL2 sequence region, the FILL11 sequence region, and the FILL15 sequence region. In one embodiment, the filler sequence region is the FILL2 sequence region, the FILL11 sequence region, and the FILL16 sequence region. In one embodiment, the filler sequence region is the FILL2 sequence region, the FILL11 sequence region, and the FILL17 sequence region. In one embodiment, the filler sequence region is the FILL2 sequence region, the FILL11 sequence region, and the FILL18 sequence region. In one embodiment, the filler sequence region is the FILL2 sequence region, the FILL12 sequence region, and the FILL13 sequence region. In one embodiment, the filler sequence region is the FILL2 sequence region, the FILL12 sequence region, and the FILL14 sequence region. In one embodiment, the filler sequence region is the FILL2 sequence region, the FILL12 sequence region, and the FILL15 sequence region. In one embodiment, the filler sequence region is the FILL2 sequence region, the FILL12 sequence region, and the FILL16 sequence region. In one embodiment, the filler sequence region is the FILL2 sequence region, the FILL12 sequence region, and the FILL17 sequence region. In one embodiment, the filler sequence region is the FILL2 sequence region, the FILL12 sequence region, and the FILL18 sequence region. In one embodiment, the filler sequence region is the FILL2 sequence region, the FILL13 sequence region, and the FILL14 sequence region. In one embodiment, the filler sequence region is the FILL2 sequence region, the FILL13 sequence region, and the FILL15 sequence region. In one embodiment, the filler sequence region is the FILL2 sequence region, the FILL13 sequence region, and the FILL16 sequence region. In one embodiment, the filler sequence region is the FILL2 sequence region, the FILL13 sequence region, and the FILL17 sequence region. In one embodiment, the filler sequence region is the FILL2 sequence region, the FILL13 sequence region, and the FILL18 sequence region. In one embodiment, the filler sequence region is the FILL2 sequence region, the FILL14 sequence region, and the FILL15 sequence region. In one embodiment, the filler sequence region is the FILL2 sequence region, the FILL14 sequence region, and the FILL16 sequence region. In one embodiment, the filler sequence region is the FILL2 sequence region, the FILL14 sequence region, and the FILL17 sequence region. In one embodiment, the filler sequence region is the FILL2 sequence region, the FILL14 sequence region, and the FILL18 sequence region. In one embodiment, the filler sequence region is the FILL2 sequence region, the FILL15 sequence region, and the FILL16 sequence region. In one embodiment, the filler sequence region is the FILL2 sequence region, the FILL15 sequence region, and the FILL17 sequence region. In one embodiment, the filler sequence region is the FILL2 sequence region, the FILL15 sequence region, and the FILL18 sequence region. In one embodiment, the filler sequence region is the FILL2 sequence region, the FILL16 sequence region, and the FILL17 sequence region. In one embodiment, the filler sequence region is the FILL2 sequence region, the FILL16 sequence region, and the FILL18 sequence region. In one embodiment, the filler sequence region is the FILL2 sequence region, the FILL17 sequence region, and the FILL18 sequence region. In one embodiment, the filler sequence region is the FILL3 sequence region, the FILL4 sequence region, and the FILL5 sequence region. In one embodiment, the filler sequence region is the FILL3 sequence region, the FILL4 sequence region, and the FILL6 sequence region. In one embodiment, the filler sequence region is the FILL3 sequence region, the FILL4 sequence region, and the FILL7 sequence region. In one embodiment, the filler sequence region is the FILL3 sequence region, the FILL4 sequence region, and the FILL8 sequence region. In one embodiment, the filler sequence region is the FILL3 sequence region, the FILL4 sequence region, and the FILL9 sequence region. In one embodiment, the filler sequence region is the FILL3 sequence region, the FILL4 sequence region, and the FILL10 sequence region. In one embodiment, the filler sequence region is the FILL3 sequence region, the FILL4 sequence region, and the FILL11 sequence region. In one embodiment, the filler sequence region is the FILL3 sequence region, the FILL4 sequence region, and the FILL12 sequence region. In one embodiment, the filler sequence region is the FILL3 sequence region, the FILL4 sequence region, and the FILL13 sequence region. In one embodiment, the filler sequence region is the FILL3 sequence region, the FILL4 sequence region, and the FILL14 sequence region. In one embodiment, the filler sequence region is the FILL3 sequence region, the FILL4 sequence region, and the FILL15 sequence region. In one embodiment, the filler sequence region is the FILL3 sequence region, the FILL4 sequence region, and the FILL16 sequence region. In one embodiment, the filler sequence region is the FILL3 sequence region, the FILL4 sequence region, and the FILL17 sequence region. In one embodiment, the filler sequence region is the FILL3 sequence region, the FILL4 sequence region, and the FILL18 sequence region. In one embodiment, the filler sequence region is the FILL3 sequence region, the FILL5 sequence region, and the FILL6 sequence region. In one embodiment, the filler sequence region is the FILL3 sequence region, the FILL5 sequence region, and the FILL7 sequence region. In one embodiment, the filler sequence region is the FILL3 sequence region, the FILL5 sequence region, and the FILL8 sequence region. In one embodiment, the filler sequence region is the FILL3 sequence region, the FILL5 sequence region, and the FILL9 sequence region. In one embodiment, the filler sequence region is the FILL3 sequence region, the FILL5 sequence region, and the FILL10 sequence region. In one embodiment, the filler sequence region is the FILL3 sequence region, the FILL5 sequence region, and the FILL11 sequence region. In one embodiment, the filler sequence region is the FILL3 sequence region, the FILL5 sequence region, and the FILL12 sequence region. In one embodiment, the filler sequence region is the FILL3 sequence region, the FILL5 sequence region, and the FILL13 sequence region. In one embodiment, the filler sequence region is the FILL3 sequence region, the FILL5 sequence region, and the FILL14 sequence region. In one embodiment, the filler sequence region is the FILL3 sequence region, the FILL5 sequence region, and the FILL15 sequence region. In one embodiment, the filler sequence region is the FILL3 sequence region, the FILL5 sequence region, and the FILL16 sequence region. In one embodiment, the filler sequence region is the FILL3 sequence region, the FILL5 sequence region, and the FILL17 sequence region. In one embodiment, the filler sequence region is the FILL3 sequence region, the FILL5 sequence region, and the FILL18 sequence region. In one embodiment, the filler sequence region is the FILL3 sequence region, the FILL6 sequence region, and the FILL7 sequence region. In one embodiment, the filler sequence region is the FILL3 sequence region, the FILL6 sequence region, and the FILL8 sequence region. In one embodiment, the filler sequence region is the FILL3 sequence region, the FILL6 sequence region, and the FILL9 sequence region. In one embodiment, the filler sequence region is the FILL3 sequence region, the FILL6 sequence region, and the FILL10 sequence region. In one embodiment, the filler sequence region is the FILL3 sequence region, the FILL6 sequence region, and the FILL11 sequence region. In one embodiment, the filler sequence region is the FILL3 sequence region, the FILL6 sequence region, and the FILL12 sequence region. In one embodiment, the filler sequence region is the FILL3 sequence region, the FILL6 sequence region, and the FILL13 sequence region. In one embodiment, the filler sequence region is the FILL3 sequence region, the FILL6 sequence region, and the FILL14 sequence region. In one embodiment, the filler sequence region is the FILL3 sequence region, the FILL6 sequence region, and the FILL15 sequence region. In one embodiment, the filler sequence region is the FILL3 sequence region, the FILL6 sequence region, and the FILL16 sequence region. In one embodiment, the filler sequence region is the FILL3 sequence region, the FILL6 sequence region, and the FILL17 sequence region. In one embodiment, the filler sequence region is the FILL3 sequence region, the FILL6 sequence region, and the FILL18 sequence region. In one embodiment, the filler sequence region is the FILL3 sequence region, the FILL7 sequence region, and the FILL8 sequence region. In one embodiment, the filler sequence region is the FILL3 sequence region, the FILL7 sequence region, and the FILL9 sequence region. In one embodiment, the filler sequence region is the FILL3 sequence region, the FILL7 sequence region, and the FILL10 sequence region. In one embodiment, the filler sequence region is the FILL3 sequence region, the FILL7 sequence region, and the FILL11 sequence region. In one embodiment, the filler sequence region is the FILL3 sequence region, the FILL7 sequence region, and the FILL12 sequence region. In one embodiment, the filler sequence region is the FILL3 sequence region, the FILL7 sequence region, and the FILL13 sequence region. In one embodiment, the filler sequence region is the FILL3 sequence region, the FILL7 sequence region, and the FILL14 sequence region. In one embodiment, the filler sequence region is the FILL3 sequence region, the FILL7 sequence region, and the FILL15 sequence region. In one embodiment, the filler sequence region is the FILL3 sequence region, the FILL7 sequence region, and the FILL16 sequence region. In one embodiment, the filler sequence region is the FILL3 sequence region, the FILL7 sequence region, and the FILL17 sequence region. In one embodiment, the filler sequence region is the FILL3 sequence region, the FILL7 sequence region, and the FILL18 sequence region. In one embodiment, the filler sequence region is the FILL3 sequence region, the FILL8 sequence region, and the FILL9 sequence region. In one embodiment, the filler sequence region is the FILL3 sequence region, the FILL8 sequence region, and the FILL10 sequence region. In one embodiment, the filler sequence region is the FILL3 sequence region, the FILL8 sequence region, and the FILL11 sequence region. In one embodiment, the filler sequence region is the FILL3 sequence region, the FILL8 sequence region, and the FILL12 sequence region. In one embodiment, the filler sequence region is the FILL3 sequence region, the FILL8 sequence region, and the FILL13 sequence region. In one embodiment, the filler sequence region is the FILL3 sequence region, the FILL8 sequence region, and the FILL14 sequence region. In one embodiment, the filler sequence region is the FILL3 sequence region, the FILL8 sequence region, and the FILL15 sequence region. In one embodiment, the filler sequence region is the FILL3 sequence region, the FILL8 sequence region, and the FILL16 sequence region. In one embodiment, the filler sequence region is the FILL3 sequence region, the FILL8 sequence region, and the FILL17 sequence region. In one embodiment, the filler sequence region is the FILL3 sequence region, the FILL8 sequence region, and the FILL18 sequence region. In one embodiment, the filler sequence region is the FILL3 sequence region, the FILL9 sequence region, and the FILL10 sequence region. In one embodiment, the filler sequence region is the FILL3 sequence region, the FILL9 sequence region, and the FILL11 sequence region. In one embodiment, the filler sequence region is the FILL3 sequence region, the FILL9 sequence region, and the FILL12 sequence region. In one embodiment, the filler sequence region is the FILL3 sequence region, the FILL9 sequence region, and the FILL13 sequence region. In one embodiment, the filler sequence region is the FILL3 sequence region, the FILL9 sequence region, and the FILL14 sequence region. In one embodiment, the filler sequence region is the FILL3 sequence region, the FILL9 sequence region, and the FILL15 sequence region. In one embodiment, the filler sequence region is the FILL3 sequence region, the FILL9 sequence region, and the FILL16 sequence region. In one embodiment, the filler sequence region is the FILL3 sequence region, the FILL9 sequence region, and the FILL17 sequence region. In one embodiment, the filler sequence region is the FILL3 sequence region, the FILL9 sequence region, and the FILL18 sequence region. In one embodiment, the filler sequence region is the FILL3 sequence region, the FILL10 sequence region, and the FILL11 sequence region. In one embodiment, the filler sequence region is the FILL3 sequence region, the FILL10 sequence region, and the FILL12 sequence region. In one embodiment, the filler sequence region is the FILL3 sequence region, the FILL10 sequence region, and the FILL13 sequence region. In one embodiment, the filler sequence region is the FILL3 sequence region, the FILL10 sequence region, and the FILL14 sequence region. In one embodiment, the filler sequence region is the FILL3 sequence region, the FILL10 sequence region, and the FILL15 sequence region. In one embodiment, the filler sequence region is the FILL3 sequence region, the FILL10 sequence region, and the FILL16 sequence region. In one embodiment, the filler sequence region is the FILL3 sequence region, the FILL10 sequence region, and the FILL17 sequence region. In one embodiment, the filler sequence region is the FILL3 sequence region, the FILL10 sequence region, and the FILL18 sequence region. In one embodiment, the filler sequence region is the FILL3 sequence region, the FILL11 sequence region, and the FILL12 sequence region. In one embodiment, the filler sequence region is the FILL3 sequence region, the FILL11 sequence region, and the FILL13 sequence region. In one embodiment, the filler sequence region is the FILL3 sequence region, the FILL11 sequence region, and the FILL14 sequence region. In one embodiment, the filler sequence region is the FILL3 sequence region, the FILL11 sequence region, and the FILL15 sequence region. In one embodiment, the filler sequence region is the FILL3 sequence region, the FILL11 sequence region, and the FILL16 sequence region. In one embodiment, the filler sequence region is the FILL3 sequence region, the FILL11 sequence region, and the FILL17 sequence region. In one embodiment, the filler sequence region is the FILL3 sequence region, the FILL11 sequence region, and the FILL18 sequence region. In one embodiment, the filler sequence region is the FILL3 sequence region, the FILL12 sequence region, and the FILL13 sequence region. In one embodiment, the filler sequence region is the FILL3 sequence region, the FILL12 sequence region, and the FILL14 sequence region. In one embodiment, the filler sequence region is the FILL3 sequence region, the FILL12 sequence region, and the FILL15 sequence region. In one embodiment, the filler sequence region is the FILL3 sequence region, the FILL12 sequence region, and the FILL16 sequence region. In one embodiment, the filler sequence region is the FILL3 sequence region, the FILL12 sequence region, and the FILL17 sequence region. In one embodiment, the filler sequence region is the FILL3 sequence region, the FILL12 sequence region, and the FILL18 sequence region. In one embodiment, the filler sequence region is the FILL3 sequence region, the FILL13 sequence region, and the FILL14 sequence region. In one embodiment, the filler sequence region is the FILL3 sequence region, the FILL13 sequence region, and the FILL15 sequence region. In one embodiment, the filler sequence region is the FILL3 sequence region, the FILL13 sequence region, and the FILL16 sequence region. In one embodiment, the filler sequence region is the FILL3 sequence region, the FILL13 sequence region, and the FILL17 sequence region. In one embodiment, the filler sequence region is the FILL3 sequence region, the FILL13 sequence region, and the FILL18 sequence region. In one embodiment, the filler sequence region is the FILL3 sequence region, the FILL14 sequence region, and the FILL15 sequence region. In one embodiment, the filler sequence region is the FILL3 sequence region, the FILL14 sequence region, and the FILL16 sequence region. In one embodiment, the filler sequence region is the FILL3 sequence region, the FILL14 sequence region, and the FILL17 sequence region. In one embodiment, the filler sequence region is the FILL3 sequence region, the FILL14 sequence region, and the FILL18 sequence region. In one embodiment, the filler sequence region is the FILL3 sequence region, the FILL15 sequence region, and the FILL16 sequence region. In one embodiment, the filler sequence region is the FILL3 sequence region, the FILL15 sequence region, and the FILL17 sequence region. In one embodiment, the filler sequence region is the FILL3 sequence region, the FILL15 sequence region, and the FILL18 sequence region. In one embodiment, the filler sequence region is the FILL3 sequence region, the FILL16 sequence region, and the FILL17 sequence region. In one embodiment, the filler sequence region is the FILL3 sequence region, the FILL16 sequence region, and the FILL18 sequence region. In one embodiment, the filler sequence region is the FILL3 sequence region, the FILL17 sequence region, and the FILL18 sequence region. In one embodiment, the filler sequence region is the FILL4 sequence region, the FILL5 sequence region, and the FILL6 sequence region. In one embodiment, the filler sequence region is the FILL4 sequence region, the FILL5 sequence region, and the FILL7 sequence region. In one embodiment, the filler sequence region is the FILL4 sequence region, the FILL5 sequence region, and the FILL8 sequence region. In one embodiment, the filler sequence region is the FILL4 sequence region, the FILL5 sequence region, and the FILL9 sequence region. In one embodiment, the filler sequence region is the FILL4 sequence region, the FILL5 sequence region, and the FILL10 sequence region. In one embodiment, the filler sequence region is the FILL4 sequence region, the FILL5 sequence region, and the FILL11 sequence region. In one embodiment, the filler sequence region is the FILL4 sequence region, the FILL5 sequence region, and the FILL12 sequence region. In one embodiment, the filler sequence region is the FILL4 sequence region, the FILL5 sequence region, and the FILL13 sequence region. In one embodiment, the filler sequence region is the FILL4 sequence region, the FILL5 sequence region, and the FILL14 sequence region. In one embodiment, the filler sequence region is the FILL4 sequence region, the FILL5 sequence region, and the FILL15 sequence region. In one embodiment, the filler sequence region is the FILL4 sequence region, the FILL5 sequence region, and the FILL16 sequence region. In one embodiment, the filler sequence region is the FILL4 sequence region, the FILL5 sequence region, and the FILL17 sequence region. In one embodiment, the filler sequence region is the FILL4 sequence region, the FILL5 sequence region, and the FILL18 sequence region. In one embodiment, the filler sequence region is the FILL4 sequence region, the FILL6 sequence region, and the FILL7 sequence region. In one embodiment, the filler sequence region is the FILL4 sequence region, the FILL6 sequence region, and the FILL8 sequence region. In one embodiment, the filler sequence region is the FILL4 sequence region, the FILL6 sequence region, and the FILL9 sequence region. In one embodiment, the filler sequence region is the FILL4 sequence region, the FILL6 sequence region, and the FILL10 sequence region. In one embodiment, the filler sequence region is the FILL4 sequence region, the FILL6 sequence region, and the FILL11 sequence region. In one embodiment, the filler sequence region is the FILL4 sequence region, the FILL6 sequence region, and the FILL12 sequence region. In one embodiment, the filler sequence region is the FILL4 sequence region, the FILL6 sequence region, and the FILL13 sequence region. In one embodiment, the filler sequence region is the FILL4 sequence region, the FILL6 sequence region, and the FILL14 sequence region. In one embodiment, the filler sequence region is the FILL4 sequence region, the FILL6 sequence region, and the FILL15 sequence region. In one embodiment, the filler sequence region is the FILL4 sequence region, the FILL6 sequence region, and the FILL16 sequence region. In one embodiment, the filler sequence region is the FILL4 sequence region, the FILL6 sequence region, and the FILL17 sequence region. In one embodiment, the filler sequence region is the FILL4 sequence region, the FILL6 sequence region, and the FILL18 sequence region. In one embodiment, the filler sequence region is the FILL4 sequence region, the FILL7 sequence region, and the FILL8 sequence region. In one embodiment, the filler sequence region is the FILL4 sequence region, the FILL7 sequence region, and the FILL9 sequence region. In one embodiment, the filler sequence region is the FILL4 sequence region, the FILL7 sequence region, and the FILL10 sequence region. In one embodiment, the filler sequence region is the FILL4 sequence region, the FILL7 sequence region, and the FILL11 sequence region. In one embodiment, the filler sequence region is the FILL4 sequence region, the FILL7 sequence region, and the FILL12 sequence region. In one embodiment, the filler sequence region is the FILL4 sequence region, the FILL7 sequence region, and the FILL13 sequence region. In one embodiment, the filler sequence region is the FILL4 sequence region, the FILL7 sequence region, and the FILL14 sequence region. In one embodiment, the filler sequence region is the FILL4 sequence region, the FILL7 sequence region, and the FILL15 sequence region. In one embodiment, the filler sequence region is the FILL4 sequence region, the FILL7 sequence region, and the FILL16 sequence region. In one embodiment, the filler sequence region is the FILL4 sequence region, the FILL7 sequence region, and the FILL17 sequence region. In one embodiment, the filler sequence region is the FILL4 sequence region, the FILL7 sequence region, and the FILL18 sequence region. In one embodiment, the filler sequence region is the FILL4 sequence region, the FILL8 sequence region, and the FILL9 sequence region. In one embodiment, the filler sequence region is the FILL4 sequence region, the FILL8 sequence region, and the FILL10 sequence region. In one embodiment, the filler sequence region is the FILL4 sequence region, the FILL8 sequence region, and the FILL11 sequence region. In one embodiment, the filler sequence region is the FILL4 sequence region, the FILL8 sequence region, and the FILL12 sequence region. In one embodiment, the filler sequence region is the FILL4 sequence region, the FILL8 sequence region, and the FILL13 sequence region. In one embodiment, the filler sequence region is the FILL4 sequence region, the FILL8 sequence region, and the FILL14 sequence region. In one embodiment, the filler sequence region is the FILL4 sequence region, the FILL8 sequence region, and the FILL15 sequence region. In one embodiment, the filler sequence region is the FILL4 sequence region, the FILL8 sequence region, and the FILL16 sequence region. In one embodiment, the filler sequence region is the FILL4 sequence region, the FILL8 sequence region, and the FILL17 sequence region. In one embodiment, the filler sequence region is the FILL4 sequence region, the FILL8 sequence region, and the FILL18 sequence region. In one embodiment, the filler sequence region is the FILL4 sequence region, the FILL9 sequence region, and the FILL10 sequence region. In one embodiment, the filler sequence region is the FILL4 sequence region, the FILL9 sequence region, and the FILL11 sequence region. In one embodiment, the filler sequence region is the FILL4 sequence region, the FILL9 sequence region, and the FILL12 sequence region. In one embodiment, the filler sequence region is the FILL4 sequence region, the FILL9 sequence region, and the FILL13 sequence region. In one embodiment, the filler sequence region is the FILL4 sequence region, the FILL9 sequence region, and the FILL14 sequence region. In one embodiment, the filler sequence region is the FILL4 sequence region, the FILL9 sequence region, and the FILL15 sequence region. In one embodiment, the filler sequence region is the FILL4 sequence region, the FILL9 sequence region, and the FILL16 sequence region. In one embodiment, the filler sequence region is the FILL4 sequence region, the FILL9 sequence region, and the FILL17 sequence region. In one embodiment, the filler sequence region is the FILL4 sequence region, the FILL9 sequence region, and the FILL18 sequence region. In one embodiment, the filler sequence region is the FILL4 sequence region, the FILL10 sequence region, and the FILL11 sequence region. In one embodiment, the filler sequence region is the FILL4 sequence region, the FILL10 sequence region, and the FILL12 sequence region. In one embodiment, the filler sequence region is the FILL4 sequence region, the FILL10 sequence region, and the FILL13 sequence region. In one embodiment, the filler sequence region is the FILL4 sequence region, the FILL10 sequence region, and the FILL14 sequence region. In one embodiment, the filler sequence region is the FILL4 sequence region, the FILL10 sequence region, and the FILL15 sequence region. In one embodiment, the filler sequence region is the FILL4 sequence region, the FILL10 sequence region, and the FILL16 sequence region. In one embodiment, the filler sequence region is the FILL4 sequence region, the FILL10 sequence region, and the FILL17 sequence region. In one embodiment, the filler sequence region is the FILL4 sequence region, the FILL10 sequence region, and the FILL18 sequence region. In one embodiment, the filler sequence region is the FILL4 sequence region, the FILL11 sequence region, and the FILL12 sequence region. In one embodiment, the filler sequence region is the FILL4 sequence region, the FILL11 sequence region, and the FILL13 sequence region. In one embodiment, the filler sequence region is the FILL4 sequence region, the FILL11 sequence region, and the FILL14 sequence region. In one embodiment, the filler sequence region is the FILL4 sequence region, the FILL11 sequence region, and the FILL15 sequence region. In one embodiment, the filler sequence region is the FILL4 sequence region, the FILL11 sequence region, and the FILL16 sequence region. In one embodiment, the filler sequence region is the FILL4 sequence region, the FILL11 sequence region, and the FILL17 sequence region. In one embodiment, the filler sequence region is the FILL4 sequence region, the FILL11 sequence region, and the FILL18 sequence region. In one embodiment, the filler sequence region is the FILL4 sequence region, the FILL12 sequence region, and the FILL13 sequence region. In one embodiment, the filler sequence region is the FILL4 sequence region, the FILL12 sequence region, and the FILL14 sequence region. In one embodiment, the filler sequence region is the FILL4 sequence region, the FILL12 sequence region, and the FILL15 sequence region. In one embodiment, the filler sequence region is the FILL4 sequence region, the FILL12 sequence region, and the FILL16 sequence region. In one embodiment, the filler sequence region is the FILL4 sequence region, the FILL12 sequence region, and the FILL17 sequence region. In one embodiment, the filler sequence region is the FILL4 sequence region, the FILL12 sequence region, and the FILL18 sequence region. In one embodiment, the filler sequence region is the FILL4 sequence region, the FILL13 sequence region, and the FILL14 sequence region. In one embodiment, the filler sequence region is the FILL4 sequence region, the FILL13 sequence region, and the FILL15 sequence region. In one embodiment, the filler sequence region is the FILL4 sequence region, the FILL13 sequence region, and the FILL16 sequence region. In one embodiment, the filler sequence region is the FILL4 sequence region, the FILL13 sequence region, and the FILL17 sequence region. In one embodiment, the filler sequence region is the FILL4 sequence region, the FILL13 sequence region, and the FILL18 sequence region. In one embodiment, the filler sequence region is the FILL4 sequence region, the FILL14 sequence region, and the FILL15 sequence region. In one embodiment, the filler sequence region is the FILL4 sequence region, the FILL14 sequence region, and the FILL16 sequence region. In one embodiment, the filler sequence region is the FILL4 sequence region, the FILL14 sequence region, and the FILL17 sequence region. In one embodiment, the filler sequence region is the FILL4 sequence region, the FILL14 sequence region, and the FILL18 sequence region. In one embodiment, the filler sequence region is the FILL4 sequence region, the FILL15 sequence region, and the FILL16 sequence region. In one embodiment, the filler sequence region is the FILL4 sequence region, the FILL15 sequence region, and the FILL17 sequence region. In one embodiment, the filler sequence region is the FILL4 sequence region, the FILL15 sequence region, and the FILL18 sequence region. In one embodiment, the filler sequence region is the FILL4 sequence region, the FILL16 sequence region, and the FILL17 sequence region. In one embodiment, the filler sequence region is the FILL4 sequence region, the FILL16 sequence region, and the FILL18 sequence region. In one embodiment, the filler sequence region is the FILL4 sequence region, the FILL17 sequence region, and the FILL18 sequence region. In one embodiment, the filler sequence region is the FILL5 sequence region, the FILL6 sequence region, and the FILL7 sequence region. In one embodiment, the filler sequence region is the FILL5 sequence region, the FILL6 sequence region, and the FILL8 sequence region. In one embodiment, the filler sequence region is the FILL5 sequence region, the FILL6 sequence region, and the FILL9 sequence region. In one embodiment, the filler sequence region is the FILL5 sequence region, the FILL6 sequence region, and the FILL10 sequence region. In one embodiment, the filler sequence region is the FILL5 sequence region, the FILL6 sequence region, and the FILL11 sequence region. In one embodiment, the filler sequence region is the FILL5 sequence region, the FILL6 sequence region, and the FILL12 sequence region. In one embodiment, the filler sequence region is the FILL5 sequence region, the FILL6 sequence region, and the FILL13 sequence region. In one embodiment, the filler sequence region is the FILL5 sequence region, the FILL6 sequence region, and the FILL14 sequence region. In one embodiment, the filler sequence region is the FILL5 sequence region, the FILL6 sequence region, and the FILL15 sequence region. In one embodiment, the filler sequence region is the FILL5 sequence region, the FILL6 sequence region, and the FILL16 sequence region. In one embodiment, the filler sequence region is the FILL5 sequence region, the FILL6 sequence region, and the FILL17 sequence region. In one embodiment, the filler sequence region is the FILL5 sequence region, the FILL6 sequence region, and the FILL18 sequence region. In one embodiment, the filler sequence region is the FILL5 sequence region, the FILL7 sequence region, and the FILL8 sequence region. In one embodiment, the filler sequence region is the FILL5 sequence region, the FILL7 sequence region, and the FILL9 sequence region. In one embodiment, the filler sequence region is the FILL5 sequence region, the FILL7 sequence region, and the FILL10 sequence region. In one embodiment, the filler sequence region is the FILL5 sequence region, the FILL7 sequence region, and the FILL11 sequence region. In one embodiment, the filler sequence region is the FILL5 sequence region, the FILL7 sequence region, and the FILL12 sequence region. In one embodiment, the filler sequence region is the FILL5 sequence region, the FILL7 sequence region, and the FILL13 sequence region. In one embodiment, the filler sequence region is the FILL5 sequence region, the FILL7 sequence region, and the FILL14 sequence region. In one embodiment, the filler sequence region is the FILL5 sequence region, the FILL7 sequence region, and the FILL15 sequence region. In one embodiment, the filler sequence region is the FILL5 sequence region, the FILL7 sequence region, and the FILL16 sequence region. In one embodiment, the filler sequence region is the FILL5 sequence region, the FILL7 sequence region, and the FILL17 sequence region. In one embodiment, the filler sequence region is the FILL5 sequence region, the FILL7 sequence region, and the FILL18 sequence region. In one embodiment, the filler sequence region is the FILL5 sequence region, the FILL8 sequence region, and the FILL9 sequence region. In one embodiment, the filler sequence region is the FILL5 sequence region, the FILL8 sequence region, and the FILL10 sequence region. In one embodiment, the filler sequence region is the FILL5 sequence region, the FILL8 sequence region, and the FILL11 sequence region. In one embodiment, the filler sequence region is the FILL5 sequence region, the FILL8 sequence region, and the FILL12 sequence region. In one embodiment, the filler sequence region is the FILL5 sequence region, the FILL8 sequence region, and the FILL13 sequence region. In one embodiment, the filler sequence region is the FILL5 sequence region, the FILL8 sequence region, and the FILL14 sequence region. In one embodiment, the filler sequence region is the FILL5 sequence region, the FILL8 sequence region, and the FILL15 sequence region. In one embodiment, the filler sequence region is the FILL5 sequence region, the FILL8 sequence region, and the FILL16 sequence region. In one embodiment, the filler sequence region is the FILL5 sequence region, the FILL8 sequence region, and the FILL17 sequence region. In one embodiment, the filler sequence region is the FILL5 sequence region, the FILL8 sequence region, and the FILL18 sequence region. In one embodiment, the filler sequence region is the FILL5 sequence region, the FILL9 sequence region, and the FILL10 sequence region. In one embodiment, the filler sequence region is the FILL5 sequence region, the FILL9 sequence region, and the FILL11 sequence region. In one embodiment, the filler sequence region is the FILL5 sequence region, the FILL9 sequence region, and the FILL12 sequence region. In one embodiment, the filler sequence region is the FILL5 sequence region, the FILL9 sequence region, and the FILL13 sequence region. In one embodiment, the filler sequence region is the FILL5 sequence region, the FILL9 sequence region, and the FILL14 sequence region. In one embodiment, the filler sequence region is the FILL5 sequence region, the FILL9 sequence region, and the FILL15 sequence region. In one embodiment, the filler sequence region is the FILL5 sequence region, the FILL9 sequence region, and the FILL16 sequence region. In one embodiment, the filler sequence region is the FILL5 sequence region, the FILL9 sequence region, and the FILL17 sequence region. In one embodiment, the filler sequence region is the FILL5 sequence region, the FILL9 sequence region, and the FILL18 sequence region. In one embodiment, the filler sequence region is the FILL5 sequence region, the FILL10 sequence region, and the FILL11 sequence region. In one embodiment, the filler sequence region is the FILL5 sequence region, the FILL10 sequence region, and the FILL12 sequence region. In one embodiment, the filler sequence region is the FILL5 sequence region, the FILL10 sequence region, and the FILL13 sequence region. In one embodiment, the filler sequence region is the FILL5 sequence region, the FILL10 sequence region, and the FILL14 sequence region. In one embodiment, the filler sequence region is the FILL5 sequence region, the FILL10 sequence region, and the FILL15 sequence region. In one embodiment, the filler sequence region is the FILL5 sequence region, the FILL10 sequence region, and the FILL16 sequence region. In one embodiment, the filler sequence region is the FILL5 sequence region, the FILL10 sequence region, and the FILL17 sequence region. In one embodiment, the filler sequence region is the FILL5 sequence region, the FILL10 sequence region, and the FILL18 sequence region. In one embodiment, the filler sequence region is the FILL5 sequence region, the FILL11 sequence region, and the FILL12 sequence region. In one embodiment, the filler sequence region is the FILL5 sequence region, the FILL11 sequence region, and the FILL13 sequence region. In one embodiment, the filler sequence region is the FILL5 sequence region, the FILL11 sequence region, and the FILL14 sequence region. In one embodiment, the filler sequence region is the FILL5 sequence region, the FILL11 sequence region, and the FILL15 sequence region. In one embodiment, the filler sequence region is the FILL5 sequence region, the FILL11 sequence region, and the FILL16 sequence region. In one embodiment, the filler sequence region is the FILL5 sequence region, the FILL11 sequence region, and the FILL17 sequence region. In one embodiment, the filler sequence region is the FILL5 sequence region, the FILL11 sequence region, and the FILL18 sequence region. In one embodiment, the filler sequence region is the FILL5 sequence region, the FILL12 sequence region, and the FILL13 sequence region. In one embodiment, the filler sequence region is the FILL5 sequence region, the FILL12 sequence region, and the FILL14 sequence region. In one embodiment, the filler sequence region is the FILL5 sequence region, the FILL12 sequence region, and the FILL15 sequence region. In one embodiment, the filler sequence region is the FILL5 sequence region, the FILL12 sequence region, and the FILL16 sequence region. In one embodiment, the filler sequence region is the FILL5 sequence region, the FILL12 sequence region, and the FILL17 sequence region. In one embodiment, the filler sequence region is the FILL5 sequence region, the FILL12 sequence region, and the FILL18 sequence region. In one embodiment, the filler sequence region is the FILL5 sequence region, the FILL13 sequence region, and the FILL14 sequence region. In one embodiment, the filler sequence region is the FILL5 sequence region, the FILL13 sequence region, and the FILL15 sequence region. In one embodiment, the filler sequence region is the FILL5 sequence region, the FILL13 sequence region, and the FILL16 sequence region. In one embodiment, the filler sequence region is the FILL5 sequence region, the FILL13 sequence region, and the FILL17 sequence region. In one embodiment, the filler sequence region is the FILL5 sequence region, the FILL13 sequence region, and the FILL18 sequence region. In one embodiment, the filler sequence region is the FILL5 sequence region, the FILL14 sequence region, and the FILL15 sequence region. In one embodiment, the filler sequence region is the FILL5 sequence region, the FILL14 sequence region, and the FILL16 sequence region. In one embodiment, the filler sequence region is the FILL5 sequence region, the FILL14 sequence region, and the FILL17 sequence region. In one embodiment, the filler sequence region is the FILL5 sequence region, the FILL14 sequence region, and the FILL18 sequence region. In one embodiment, the filler sequence region is the FILL5 sequence region, the FILL15 sequence region, and the FILL16 sequence region. In one embodiment, the filler sequence region is the FILL5 sequence region, the FILL15 sequence region, and the FILL17 sequence region. In one embodiment, the filler sequence region is the FILL5 sequence region, the FILL15 sequence region, and the FILL18 sequence region. In one embodiment, the filler sequence region is the FILL5 sequence region, the FILL16 sequence region, and the FILL17 sequence region. In one embodiment, the filler sequence region is the FILL5 sequence region, the FILL16 sequence region, and the FILL18 sequence region. In one embodiment, the filler sequence region is the FILL5 sequence region, the FILL17 sequence region, and the FILL18 sequence region. In one embodiment, the filler sequence region is the FILL6 sequence region, the FILL7 sequence region, and the FILL8 sequence region. In one embodiment, the filler sequence region is the FILL6 sequence region, the FILL7 sequence region, and the FILL9 sequence region. In one embodiment, the filler sequence region is the FILL6 sequence region, the FILL7 sequence region, and the FILL10 sequence region. In one embodiment, the filler sequence region is the FILL6 sequence region, the FILL7 sequence region, and the FILL11 sequence region. In one embodiment, the filler sequence region is the FILL6 sequence region, the FILL7 sequence region, and the FILL12 sequence region. In one embodiment, the filler sequence region is the FILL6 sequence region, the FILL7 sequence region, and the FILL13 sequence region. In one embodiment, the filler sequence region is the FILL6 sequence region, the FILL7 sequence region, and the FILL14 sequence region. In one embodiment, the filler sequence region is the FILL6 sequence region, the FILL7 sequence region, and the FILL15 sequence region. In one embodiment, the filler sequence region is the FILL6 sequence region, the FILL7 sequence region, and the FILL16 sequence region. In one embodiment, the filler sequence region is the FILL6 sequence region, the FILL7 sequence region, and the FILL17 sequence region. In one embodiment, the filler sequence region is the FILL6 sequence region, the FILL7 sequence region, and the FILL18 sequence region. In one embodiment, the filler sequence region is the FILL6 sequence region, the FILL8 sequence region, and the FILL9 sequence region. In one embodiment, the filler sequence region is the FILL6 sequence region, the FILL8 sequence region, and the FILL10 sequence region. In one embodiment, the filler sequence region is the FILL6 sequence region, the FILL8 sequence region, and the FILL11 sequence region. In one embodiment, the filler sequence region is the FILL6 sequence region, the FILL8 sequence region, and the FILL12 sequence region. In one embodiment, the filler sequence region is the FILL6 sequence region, the FILL8 sequence region, and the FILL13 sequence region. In one embodiment, the filler sequence region is the FILL6 sequence region, the FILL8 sequence region, and the FILL14 sequence region. In one embodiment, the filler sequence region is the FILL6 sequence region, the FILL8 sequence region, and the FILL15 sequence region. In one embodiment, the filler sequence region is the FILL6 sequence region, the FILL8 sequence region, and the FILL16 sequence region. In one embodiment, the filler sequence region is the FILL6 sequence region, the FILL8 sequence region, and the FILL17 sequence region. In one embodiment, the filler sequence region is the FILL6 sequence region, the FILL8 sequence region, and the FILL18 sequence region. In one embodiment, the filler sequence region is the FILL6 sequence region, the FILL9 sequence region, and the FILL10 sequence region. In one embodiment, the filler sequence region is the FILL6 sequence region, the FILL9 sequence region, and the FILL11 sequence region. In one embodiment, the filler sequence region is the FILL6 sequence region, the FILL9 sequence region, and the FILL12 sequence region. In one embodiment, the filler sequence region is the FILL6 sequence region, the FILL9 sequence region, and the FILL13 sequence region. In one embodiment, the filler sequence region is the FILL6 sequence region, the FILL9 sequence region, and the FILL14 sequence region. In one embodiment, the filler sequence region is the FILL6 sequence region, the FILL9 sequence region, and the FILL15 sequence region. In one embodiment, the filler sequence region is the FILL6 sequence region, the FILL9 sequence region, and the FILL16 sequence region. In one embodiment, the filler sequence region is the FILL6 sequence region, the FILL9 sequence region, and the FILL17 sequence region. In one embodiment, the filler sequence region is the FILL6 sequence region, the FILL9 sequence region, and the FILL18 sequence region. In one embodiment, the filler sequence region is the FILL6 sequence region, the FILL10 sequence region, and the FILL11 sequence region. In one embodiment, the filler sequence region is the FILL6 sequence region, the FILL10 sequence region, and the FILL12 sequence region. In one embodiment, the filler sequence region is the FILL6 sequence region, the FILL10 sequence region, and the FILL13 sequence region. In one embodiment, the filler sequence region is the FILL6 sequence region, the FILL10 sequence region, and the FILL14 sequence region. In one embodiment, the filler sequence region is the FILL6 sequence region, the FILL10 sequence region, and the FILL15 sequence region. In one embodiment, the filler sequence region is the FILL6 sequence region, the FILL10 sequence region, and the FILL16 sequence region. In one embodiment, the filler sequence region is the FILL6 sequence region, the FILL10 sequence region, and the FILL17 sequence region. In one embodiment, the filler sequence region is the FILL6 sequence region, the FILL10 sequence region, and the FILL18 sequence region. In one embodiment, the filler sequence region is the FILL6 sequence region, the FILL11 sequence region, and the FILL12 sequence region. In one embodiment, the filler sequence region is the FILL6 sequence region, the FILL11 sequence region, and the FILL13 sequence region. In one embodiment, the filler sequence region is the FILL6 sequence region, the FILL11 sequence region, and the FILL14 sequence region. In one embodiment, the filler sequence region is the FILL6 sequence region, the FILL11 sequence region, and the FILL15 sequence region. In one embodiment, the filler sequence region is the FILL6 sequence region, the FILL11 sequence region, and the FILL16 sequence region. In one embodiment, the filler sequence region is the FILL6 sequence region, the FILL11 sequence region, and the FILL17 sequence region. In one embodiment, the filler sequence region is the FILL6 sequence region, the FILL11 sequence region, and the FILL18 sequence region. In one embodiment, the filler sequence region is the FILL6 sequence region, the FILL12 sequence region, and the FILL13 sequence region. In one embodiment, the filler sequence region is the FILL6 sequence region, the FILL12 sequence region, and the FILL14 sequence region. In one embodiment, the filler sequence region is the FILL6 sequence region, the FILL12 sequence region, and the FILL15 sequence region. In one embodiment, the filler sequence region is the FILL6 sequence region, the FILL12 sequence region, and the FILL16 sequence region. In one embodiment, the filler sequence region is the FILL6 sequence region, the FILL12 sequence region, and the FILL17 sequence region. In one embodiment, the filler sequence region is the FILL6 sequence region, the FILL12 sequence region, and the FILL18 sequence region. In one embodiment, the filler sequence region is the FILL6 sequence region, the FILL13 sequence region, and the FILL14 sequence region. In one embodiment, the filler sequence region is the FILL6 sequence region, the FILL13 sequence region, and the FILL15 sequence region. In one embodiment, the filler sequence region is the FILL6 sequence region, the FILL13 sequence region, and the FILL16 sequence region. In one embodiment, the filler sequence region is the FILL6 sequence region, the FILL13 sequence region, and the FILL17 sequence region. In one embodiment, the filler sequence region is the FILL6 sequence region, the FILL13 sequence region, and the FILL18 sequence region. In one embodiment, the filler sequence region is the FILL6 sequence region, the FILL14 sequence region, and the FILL15 sequence region. In one embodiment, the filler sequence region is the FILL6 sequence region, the FILL14 sequence region, and the FILL16 sequence region. In one embodiment, the filler sequence region is the FILL6 sequence region, the FILL14 sequence region, and the FILL17 sequence region. In one embodiment, the filler sequence region is the FILL6 sequence region, the FILL14 sequence region, and the FILL18 sequence region. In one embodiment, the filler sequence region is the FILL6 sequence region, the FILL15 sequence region, and the FILL16 sequence region. In one embodiment, the filler sequence region is the FILL6 sequence region, the FILL15 sequence region, and the FILL17 sequence region. In one embodiment, the filler sequence region is the FILL6 sequence region, the FILL15 sequence region, and the FILL18 sequence region. In one embodiment, the filler sequence region is the FILL6 sequence region, the FILL16 sequence region, and the FILL17 sequence region. In one embodiment, the filler sequence region is the FILL6 sequence region, the FILL16 sequence region, and the FILL18 sequence region. In one embodiment, the filler sequence region is the FILL6 sequence region, the FILL17 sequence region, and the FILL18 sequence region. In one embodiment, the filler sequence region is the FILL7 sequence region, the FILL8 sequence region, and the FILL9 sequence region. In one embodiment, the filler sequence region is the FILL7 sequence region, the FILL8 sequence region, and the FILL10 sequence region. In one embodiment, the filler sequence region is the FILL7 sequence region, the FILL8 sequence region, and the FILL11 sequence region. In one embodiment, the filler sequence region is the FILL7 sequence region, the FILL8 sequence region, and the FILL12 sequence region. In one embodiment, the filler sequence region is the FILL7 sequence region, the FILL8 sequence region, and the FILL13 sequence region. In one embodiment, the filler sequence region is the FILL7 sequence region, the FILL8 sequence region, and the FILL14 sequence region. In one embodiment, the filler sequence region is the FILL7 sequence region, the FILL8 sequence region, and the FILL15 sequence region. In one embodiment, the filler sequence region is the FILL7 sequence region, the FILL8 sequence region, and the FILL16 sequence region. In one embodiment, the filler sequence region is the FILL7 sequence region, the FILL8 sequence region, and the FILL17 sequence region. In one embodiment, the filler sequence region is the FILL7 sequence region, the FILL8 sequence region, and the FILL18 sequence region. In one embodiment, the filler sequence region is the FILL7 sequence region, the FILL9 sequence region, and the FILL10 sequence region. In one embodiment, the filler sequence region is the FILL7 sequence region, the FILL9 sequence region, and the FILL11 sequence region. In one embodiment, the filler sequence region is the FILL7 sequence region, the FILL9 sequence region, and the FILL12 sequence region. In one embodiment, the filler sequence region is the FILL7 sequence region, the FILL9 sequence region, and the FILL13 sequence region. In one embodiment, the filler sequence region is the FILL7 sequence region, the FILL9 sequence region, and the FILL14 sequence region. In one embodiment, the filler sequence region is the FILL7 sequence region, the FILL9 sequence region, and the FILL15 sequence region. In one embodiment, the filler sequence region is the FILL7 sequence region, the FILL9 sequence region, and the FILL16 sequence region. In one embodiment, the filler sequence region is the FILL7 sequence region, the FILL9 sequence region, and the FILL17 sequence region. In one embodiment, the filler sequence region is the FILL7 sequence region, the FILL9 sequence region, and the FILL18 sequence region. In one embodiment, the filler sequence region is the FILL7 sequence region, the FILL10 sequence region, and the FILL11 sequence region. In one embodiment, the filler sequence region is the FILL7 sequence region, the FILL10 sequence region, and the FILL12 sequence region. In one embodiment, the filler sequence region is the FILL7 sequence region, the FILL10 sequence region, and the FILL13 sequence region. In one embodiment, the filler sequence region is the FILL7 sequence region, the FILL10 sequence region, and the FILL14 sequence region. In one embodiment, the filler sequence region is the FILL7 sequence region, the FILL10 sequence region, and the FILL15 sequence region. In one embodiment, the filler sequence region is the FILL7 sequence region, the FILL10 sequence region, and the FILL16 sequence region. In one embodiment, the filler sequence region is the FILL7 sequence region, the FILL10 sequence region, and the FILL17 sequence region. In one embodiment, the filler sequence region is the FILL7 sequence region, the FILL10 sequence region, and the FILL18 sequence region. In one embodiment, the filler sequence region is the FILL7 sequence region, the FILL11 sequence region, and the FILL12 sequence region. In one embodiment, the filler sequence region is the FILL7 sequence region, the FILL11 sequence region, and the FILL13 sequence region. In one embodiment, the filler sequence region is the FILL7 sequence region, the FILL11 sequence region, and the FILL14 sequence region. In one embodiment, the filler sequence region is the FILL7 sequence region, the FILL11 sequence region, and the FILL15 sequence region. In one embodiment, the filler sequence region is the FILL7 sequence region, the FILL11 sequence region, and the FILL16 sequence region. In one embodiment, the filler sequence region is the FILL7 sequence region, the FILL11 sequence region, and the FILL17 sequence region. In one embodiment, the filler sequence region is the FILL7 sequence region, the FILL11 sequence region, and the FILL18 sequence region. In one embodiment, the filler sequence region is the FILL7 sequence region, the FILL12 sequence region, and the FILL13 sequence region. In one embodiment, the filler sequence region is the FILL7 sequence region, the FILL12 sequence region, and the FILL14 sequence region. In one embodiment, the filler sequence region is the FILL7 sequence region, the FILL12 sequence region, and the FILL15 sequence region. In one embodiment, the filler sequence region is the FILL7 sequence region, the FILL12 sequence region, and the FILL16 sequence region. In one embodiment, the filler sequence region is the FILL7 sequence region, the FILL12 sequence region, and the FILL17 sequence region. In one embodiment, the filler sequence region is the FILL7 sequence region, the FILL12 sequence region, and the FILL18 sequence region. In one embodiment, the filler sequence region is the FILL7 sequence region, the FILL13 sequence region, and the FILL14 sequence region. In one embodiment, the filler sequence region is the FILL7 sequence region, the FILL13 sequence region, and the FILL15 sequence region. In one embodiment, the filler sequence region is the FILL7 sequence region, the FILL13 sequence region, and the FILL16 sequence region. In one embodiment, the filler sequence region is the FILL7 sequence region, the FILL13 sequence region, and the FILL17 sequence region. In one embodiment, the filler sequence region is the FILL7 sequence region, the FILL13 sequence region, and the FILL18 sequence region. In one embodiment, the filler sequence region is the FILL7 sequence region, the FILL14 sequence region, and the FILL15 sequence region. In one embodiment, the filler sequence region is the FILL7 sequence region, the FILL14 sequence region, and the FILL16 sequence region. In one embodiment, the filler sequence region is the FILL7 sequence region, the FILL14 sequence region, and the FILL17 sequence region. In one embodiment, the filler sequence region is the FILL7 sequence region, the FILL14 sequence region, and the FILL18 sequence region. In one embodiment, the filler sequence region is the FILL7 sequence region, the FILL15 sequence region, and the FILL16 sequence region. In one embodiment, the filler sequence region is the FILL7 sequence region, the FILL15 sequence region, and the FILL17 sequence region. In one embodiment, the filler sequence region is the FILL7 sequence region, the FILL15 sequence region, and the FILL18 sequence region. In one embodiment, the filler sequence region is the FILL7 sequence region, the FILL16 sequence region, and the FILL17 sequence region. In one embodiment, the filler sequence region is the FILL7 sequence region, the FILL16 sequence region, and the FILL18 sequence region. In one embodiment, the filler sequence region is the FILL7 sequence region, the FILL17 sequence region, and the FILL18 sequence region. In one embodiment, the filler sequence region is the FILL8 sequence region, the FILL9 sequence region, and the FILL10 sequence region. In one embodiment, the filler sequence region is the FILL8 sequence region, the FILL9 sequence region, and the FILL11 sequence region. In one embodiment, the filler sequence region is the FILL8 sequence region, the FILL9 sequence region, and the FILL12 sequence region. In one embodiment, the filler sequence region is the FILL8 sequence region, the FILL9 sequence region, and the FILL13 sequence region. In one embodiment, the filler sequence region is the FILL8 sequence region, the FILL9 sequence region, and the FILL14 sequence region. In one embodiment, the filler sequence region is the FILL8 sequence region, the FILL9 sequence region, and the FILL15 sequence region. In one embodiment, the filler sequence region is the FILL8 sequence region, the FILL9 sequence region, and the FILL16 sequence region. In one embodiment, the filler sequence region is the FILL8 sequence region, the FILL9 sequence region, and the FILL17 sequence region. In one embodiment, the filler sequence region is the FILL8 sequence region, the FILL9 sequence region, and the FILL18 sequence region. In one embodiment, the filler sequence region is the FILL8 sequence region, the FILL10 sequence region, and the FILL11 sequence region. In one embodiment, the filler sequence region is the FILL8 sequence region, the FILL10 sequence region, and the FILL12 sequence region. In one embodiment, the filler sequence region is the FILL8 sequence region, the FILL10 sequence region, and the FILL13 sequence region. In one embodiment, the filler sequence region is the FILL8 sequence region, the FILL10 sequence region, and the FILL14 sequence region. In one embodiment, the filler sequence region is the FILL8 sequence region, the FILL10 sequence region, and the FILL15 sequence region. In one embodiment, the filler sequence region is the FILL8 sequence region, the FILL10 sequence region, and the FILL16 sequence region. In one embodiment, the filler sequence region is the FILL8 sequence region, the FILL10 sequence region, and the FILL17 sequence region. In one embodiment, the filler sequence region is the FILL8 sequence region, the FILL10 sequence region, and the FILL18 sequence region. In one embodiment, the filler sequence region is the FILL8 sequence region, the FILL11 sequence region, and the FILL12 sequence region. In one embodiment, the filler sequence region is the FILL8 sequence region, the FILL11 sequence region, and the FILL13 sequence region. In one embodiment, the filler sequence region is the FILL8 sequence region, the FILL11 sequence region, and the FILL14 sequence region. In one embodiment, the filler sequence region is the FILL8 sequence region, the FILL11 sequence region, and the FILL15 sequence region. In one embodiment, the filler sequence region is the FILL8 sequence region, the FILL11 sequence region, and the FILL16 sequence region. In one embodiment, the filler sequence region is the FILL8 sequence region, the FILL11 sequence region, and the FILL17 sequence region. In one embodiment, the filler sequence region is the FILL8 sequence region, the FILL11 sequence region, and the FILL18 sequence region. In one embodiment, the filler sequence region is the FILL8 sequence region, the FILL12 sequence region, and the FILL13 sequence region. In one embodiment, the filler sequence region is the FILL8 sequence region, the FILL12 sequence region, and the FILL14 sequence region. In one embodiment, the filler sequence region is the FILL8 sequence region, the FILL12 sequence region, and the FILL15 sequence region. In one embodiment, the filler sequence region is the FILL8 sequence region, the FILL12 sequence region, and the FILL16 sequence region. In one embodiment, the filler sequence region is the FILL8 sequence region, the FILL12 sequence region, and the FILL17 sequence region. In one embodiment, the filler sequence region is the FILL8 sequence region, the FILL12 sequence region, and the FILL18 sequence region. In one embodiment, the filler sequence region is the FILL8 sequence region, the FILL13 sequence region, and the FILL14 sequence region. In one embodiment, the filler sequence region is the FILL8 sequence region, the FILL13 sequence region, and the FILL15 sequence region. In one embodiment, the filler sequence region is the FILL8 sequence region, the FILL13 sequence region, and the FILL16 sequence region. In one embodiment, the filler sequence region is the FILL8 sequence region, the FILL13 sequence region, and the FILL17 sequence region. In one embodiment, the filler sequence region is the FILL8 sequence region, the FILL13 sequence region, and the FILL18 sequence region. In one embodiment, the filler sequence region is the FILL8 sequence region, the FILL14 sequence region, and the FILL15 sequence region. In one embodiment, the filler sequence region is the FILL8 sequence region, the FILL14 sequence region, and the FILL16 sequence region. In one embodiment, the filler sequence region is the FILL8 sequence region, the FILL14 sequence region, and the FILL17 sequence region. In one embodiment, the filler sequence region is the FILL8 sequence region, the FILL14 sequence region, and the FILL18 sequence region. In one embodiment, the filler sequence region is the FILL8 sequence region, the FILL15 sequence region, and the FILL16 sequence region. In one embodiment, the filler sequence region is the FILL8 sequence region, the FILL15 sequence region, and the FILL17 sequence region. In one embodiment, the filler sequence region is the FILL8 sequence region, the FILL15 sequence region, and the FILL18 sequence region. In one embodiment, the filler sequence region is the FILL8 sequence region, the FILL16 sequence region, and the FILL17 sequence region. In one embodiment, the filler sequence region is the FILL8 sequence region, the FILL16 sequence region, and the FILL18 sequence region. In one embodiment, the filler sequence region is the FILL8 sequence region, the FILL17 sequence region, and the FILL18 sequence region. In one embodiment, the filler sequence region is the FILL9 sequence region, the FILL10 sequence region, and the FILL11 sequence region. In one embodiment, the filler sequence region is the FILL9 sequence region, the FILL10 sequence region, and the FILL12 sequence region. In one embodiment, the filler sequence region is the FILL9 sequence region, the FILL10 sequence region, and the FILL13 sequence region. In one embodiment, the filler sequence region is the FILL9 sequence region, the FILL10 sequence region, and the FILL14 sequence region. In one embodiment, the filler sequence region is the FILL9 sequence region, the FILL10 sequence region, and the FILL15 sequence region. In one embodiment, the filler sequence region is the FILL9 sequence region, the FILL10 sequence region, and the FILL16 sequence region. In one embodiment, the filler sequence region is the FILL9 sequence region, the FILL10 sequence region, and the FILL17 sequence region. In one embodiment, the filler sequence region is the FILL9 sequence region, the FILL10 sequence region, and the FILL18 sequence region. In one embodiment, the filler sequence region is the FILL9 sequence region, the FILL11 sequence region, and the FILL12 sequence region. In one embodiment, the filler sequence region is the FILL9 sequence region, the FILL11 sequence region, and the FILL13 sequence region. In one embodiment, the filler sequence region is the FILL9 sequence region, the FILL11 sequence region, and the FILL14 sequence region. In one embodiment, the filler sequence region is the FILL9 sequence region, the FILL11 sequence region, and the FILL15 sequence region. In one embodiment, the filler sequence region is the FILL9 sequence region, the FILL11 sequence region, and the FILL16 sequence region. In one embodiment, the filler sequence region is the FILL9 sequence region, the FILL11 sequence region, and the FILL17 sequence region. In one embodiment, the filler sequence region is the FILL9 sequence region, the FILL11 sequence region, and the FILL18 sequence region. In one embodiment, the filler sequence region is the FILL9 sequence region, the FILL12 sequence region, and the FILL13 sequence region. In one embodiment, the filler sequence region is the FILL9 sequence region, the FILL12 sequence region, and the FILL14 sequence region. In one embodiment, the filler sequence region is the FILL9 sequence region, the FILL12 sequence region, and the FILL15 sequence region. In one embodiment, the filler sequence region is the FILL9 sequence region, the FILL12 sequence region, and the FILL16 sequence region. In one embodiment, the filler sequence region is the FILL9 sequence region, the FILL12 sequence region, and the FILL17 sequence region. In one embodiment, the filler sequence region is the FILL9 sequence region, the FILL12 sequence region, and the FILL18 sequence region. In one embodiment, the filler sequence region is the FILL9 sequence region, the FILL13 sequence region, and the FILL14 sequence region. In one embodiment, the filler sequence region is the FILL9 sequence region, the FILL13 sequence region, and the FILL15 sequence region. In one embodiment, the filler sequence region is the FILL9 sequence region, the FILL13 sequence region, and the FILL16 sequence region. In one embodiment, the filler sequence region is the FILL9 sequence region, the FILL13 sequence region, and the FILL17 sequence region. In one embodiment, the filler sequence region is the FILL9 sequence region, the FILL13 sequence region, and the FILL18 sequence region. In one embodiment, the filler sequence region is the FILL9 sequence region, the FILL14 sequence region, and the FILL15 sequence region. In one embodiment, the filler sequence region is the FILL9 sequence region, the FILL14 sequence region, and the FILL16 sequence region. In one embodiment, the filler sequence region is the FILL9 sequence region, the FILL14 sequence region, and the FILL17 sequence region. In one embodiment, the filler sequence region is the FILL9 sequence region, the FILL14 sequence region, and the FILL18 sequence region. In one embodiment, the filler sequence region is the FILL9 sequence region, the FILL15 sequence region, and the FILL16 sequence region. In one embodiment, the filler sequence region is the FILL9 sequence region, the FILL15 sequence region, and the FILL17 sequence region. In one embodiment, the filler sequence region is the FILL9 sequence region, the FILL15 sequence region, and the FILL18 sequence region. In one embodiment, the filler sequence region is the FILL9 sequence region, the FILL16 sequence region, and the FILL17 sequence region. In one embodiment, the filler sequence region is the FILL9 sequence region, the FILL16 sequence region, and the FILL18 sequence region. In one embodiment, the filler sequence region is the FILL9 sequence region, the FILL17 sequence region, and the FILL18 sequence region. In one embodiment, the filler sequence region is the FILL10 sequence region, the FILL11 sequence region, and the FILL12 sequence region. In one embodiment, the filler sequence region is the FILL10 sequence region, the FILL11 sequence region, and the FILL13 sequence region. In one embodiment, the filler sequence region is the FILL10 sequence region, the FILL11 sequence region, and the FILL14 sequence region. In one embodiment, the filler sequence region is the FILL10 sequence region, the FILL11 sequence region, and the FILL15 sequence region. In one embodiment, the filler sequence region is the FILL10 sequence region, the FILL11 sequence region, and the FILL16 sequence region. In one embodiment, the filler sequence region is the FILL10 sequence region, the FILL11 sequence region, and the FILL17 sequence region. In one embodiment, the filler sequence region is the FILL10 sequence region, the FILL11 sequence region, and the FILL18 sequence region. In one embodiment, the filler sequence region is the FILL10 sequence region, the FILL12 sequence region, and the FILL13 sequence region. In one embodiment, the filler sequence region is the FILL10 sequence region, the FILL12 sequence region, and the FILL14 sequence region. In one embodiment, the filler sequence region is the FILL10 sequence region, the FILL12 sequence region, and the FILL15 sequence region. In one embodiment, the filler sequence region is the FILL10 sequence region, the FILL12 sequence region, and the FILL16 sequence region. In one embodiment, the filler sequence region is the FILL10 sequence region, the FILL12 sequence region, and the FILL17 sequence region. In one embodiment, the filler sequence region is the FILL10 sequence region, the FILL12 sequence region, and the FILL18 sequence region. In one embodiment, the filler sequence region is the FILL10 sequence region, the FILL13 sequence region, and the FILL14 sequence region. In one embodiment, the filler sequence region is the FILL10 sequence region, the FILL13 sequence region, and the FILL15 sequence region. In one embodiment, the filler sequence region is the FILL10 sequence region, the FILL13 sequence region, and the FILL16 sequence region. In one embodiment, the filler sequence region is the FILL10 sequence region, the FILL13 sequence region, and the FILL17 sequence region. In one embodiment, the filler sequence region is the FILL10 sequence region, the FILL13 sequence region, and the FILL18 sequence region. In one embodiment, the filler sequence region is the FILL10 sequence region, the FILL14 sequence region, and the FILL15 sequence region. In one embodiment, the filler sequence region is the FILL10 sequence region, the FILL14 sequence region, and the FILL16 sequence region. In one embodiment, the filler sequence region is the FILL10 sequence region, the FILL14 sequence region, and the FILL17 sequence region. In one embodiment, the filler sequence region is the FILL10 sequence region, the FILL14 sequence region, and the FILL18 sequence region. In one embodiment, the filler sequence region is the FILL10 sequence region, the FILL15 sequence region, and the FILL16 sequence region. In one embodiment, the filler sequence region is the FILL10 sequence region, the FILL15 sequence region, and the FILL17 sequence region. In one embodiment, the filler sequence region is the FILL10 sequence region, the FILL15 sequence region, and the FILL18 sequence region. In one embodiment, the filler sequence region is the FILL10 sequence region, the FILL16 sequence region, and the FILL17 sequence region. In one embodiment, the filler sequence region is the FILL10 sequence region, the FILL16 sequence region, and the FILL18 sequence region. In one embodiment, the filler sequence region is the FILL10 sequence region, the FILL17 sequence region, and the FILL18 sequence region. In one embodiment, the filler sequence region is the FILL11 sequence region, the FILL12 sequence region, and the FILL13 sequence region. In one embodiment, the filler sequence region is the FILL11 sequence region, the FILL12 sequence region, and the FILL14 sequence region. In one embodiment, the filler sequence region is the FILL11 sequence region, the FILL12 sequence region, and the FILL15 sequence region. In one embodiment, the filler sequence region is the FILL11 sequence region, the FILL12 sequence region, and the FILL16 sequence region. In one embodiment, the filler sequence region is the FILL11 sequence region, the FILL12 sequence region, and the FILL17 sequence region. In one embodiment, the filler sequence region is the FILL11 sequence region, the FILL12 sequence region, and the FILL18 sequence region. In one embodiment, the filler sequence region is the FILL11 sequence region, the FILL13 sequence region, and the FILL14 sequence region. In one embodiment, the filler sequence region is the FILL11 sequence region, the FILL13 sequence region, and the FILL15 sequence region. In one embodiment, the filler sequence region is the FILL11 sequence region, the FILL13 sequence region, and the FILL16 sequence region. In one embodiment, the filler sequence region is the FILL11 sequence region, the FILL13 sequence region, and the FILL17 sequence region. In one embodiment, the filler sequence region is the FILL11 sequence region, the FILL13 sequence region, and the FILL18 sequence region. In one embodiment, the filler sequence region is the FILL11 sequence region, the FILL14 sequence region, and the FILL15 sequence region. In one embodiment, the filler sequence region is the FILL11 sequence region, the FILL14 sequence region, and the FILL16 sequence region. In one embodiment, the filler sequence region is the FILL11 sequence region, the FILL14 sequence region, and the FILL17 sequence region. In one embodiment, the filler sequence region is the FILL11 sequence region, the FILL14 sequence region, and the FILL18 sequence region. In one embodiment, the filler sequence region is the FILL11 sequence region, the FILL15 sequence region, and the FILL16 sequence region. In one embodiment, the filler sequence region is the FILL11 sequence region, the FILL15 sequence region, and the FILL17 sequence region. In one embodiment, the filler sequence region is the FILL11 sequence region, the FILL15 sequence region, and the FILL18 sequence region. In one embodiment, the filler sequence region is the FILL11 sequence region, the FILL16 sequence region, and the FILL17 sequence region. In one embodiment, the filler sequence region is the FILL11 sequence region, the FILL16 sequence region, and the FILL18 sequence region. In one embodiment, the filler sequence region is the FILL11 sequence region, the FILL17 sequence region, and the FILL18 sequence region. In one embodiment, the filler sequence region is the FILL12 sequence region, the FILL13 sequence region, and the FILL14 sequence region. In one embodiment, the filler sequence region is the FILL12 sequence region, the FILL13 sequence region, and the FILL15 sequence region. In one embodiment, the filler sequence region is the FILL12 sequence region, the FILL13 sequence region, and the FILL16 sequence region. In one embodiment, the filler sequence region is the FILL12 sequence region, the FILL13 sequence region, and the FILL17 sequence region. In one embodiment, the filler sequence region is the FILL12 sequence region, the FILL13 sequence region, and the FILL18 sequence region. In one embodiment, the filler sequence region is the FILL12 sequence region, the FILL14 sequence region, and the FILL15 sequence region. In one embodiment, the filler sequence region is the FILL12 sequence region, the FILL14 sequence region, and the FILL16 sequence region. In one embodiment, the filler sequence region is the FILL12 sequence region, the FILL14 sequence region, and the FILL17 sequence region. In one embodiment, the filler sequence region is the FILL12 sequence region, the FILL14 sequence region, and the FILL18 sequence region. In one embodiment, the filler sequence region is the FILL12 sequence region, the FILL15 sequence region, and the FILL16 sequence region. In one embodiment, the filler sequence region is the FILL12 sequence region, the FILL15 sequence region, and the FILL17 sequence region. In one embodiment, the filler sequence region is the FILL12 sequence region, the FILL15 sequence region, and the FILL18 sequence region. In one embodiment, the filler sequence region is the FILL12 sequence region, the FILL16 sequence region, and the FILL17 sequence region. In one embodiment, the filler sequence region is the FILL12 sequence region, the FILL16 sequence region, and the FILL18 sequence region. In one embodiment, the filler sequence region is the FILL12 sequence region, the FILL17 sequence region, and the FILL18 sequence region. In one embodiment, the filler sequence region is the FILL13 sequence region, the FILL14 sequence region, and the FILL15 sequence region. In one embodiment, the filler sequence region is the FILL13 sequence region, the FILL14 sequence region, and the FILL16 sequence region. In one embodiment, the filler sequence region is the FILL13 sequence region, the FILL14 sequence region, and the FILL17 sequence region. In one embodiment, the filler sequence region is the FILL13 sequence region, the FILL14 sequence region, and the FILL18 sequence region. In one embodiment, the filler sequence region is the FILL13 sequence region, the FILL15 sequence region, and the FILL16 sequence region. In one embodiment, the filler sequence region is the FILL13 sequence region, the FILL15 sequence region, and the FILL17 sequence region. In one embodiment, the filler sequence region is the FILL13 sequence region, the FILL15 sequence region, and the FILL18 sequence region. In one embodiment, the filler sequence region is the FILL13 sequence region, the FILL16 sequence region, and the FILL17 sequence region. In one embodiment, the filler sequence region is the FILL13 sequence region, the FILL16 sequence region, and the FILL18 sequence region. In one embodiment, the filler sequence region is the FILL13 sequence region, the FILL17 sequence region, and the FILL18 sequence region. In one embodiment, the filler sequence region is the FILL14 sequence region, the FILL15 sequence region, and the FILL16 sequence region. In one embodiment, the filler sequence region is the FILL14 sequence region, the FILL15 sequence region, and the FILL17 sequence region. In one embodiment, the filler sequence region is the FILL14 sequence region, the FILL15 sequence region, and the FILL18 sequence region. In one embodiment, the filler sequence region is the FILL14 sequence region, the FILL16 sequence region, and the FILL17 sequence region. In one embodiment, the filler sequence region is the FILL14 sequence region, the FILL16 sequence region, and the FILL18 sequence region. In one embodiment, the filler sequence region is the FILL14 sequence region, the FILL17 sequence region, and the FILL18 sequence region. In one embodiment, the filler sequence region is the FILL15 sequence region, the FILL16 sequence region, and the FILL17 sequence region. In one embodiment, the filler sequence region is the FILL15 sequence region, the FILL16 sequence region, and the FILL18 sequence region. In one embodiment, the filler sequence region is the FILL15 sequence region, the FILL17 sequence region, and the FILL18 sequence region. In one embodiment, the filler sequence region is the FILL16 sequence region, the FILL17 sequence region, and the FILL18 sequence region.

[0504] In one embodiment, the AAV particle viral genome may comprise at least one enhancer sequence region. The enhancer sequence region(s) may, independently, have a length such as, but not limited to, 300, 301, 302, 303, 304, 305, 306, 307, 308, 309, 310, 311, 312, 313, 314, 315, 316, 317, 318, 319, 320, 321, 322, 323, 324, 325, 326, 327, 328, 329, 330, 331, 332, 333, 334, 335, 336, 337, 338, 339, 340, 341, 342, 343, 344, 345, 346, 347, 348, 349, 350, 351, 352, 353, 354, 355, 356, 357, 358, 359, 360, 361, 362, 363, 364, 365, 366, 367, 368, 369, 370, 371, 372, 373, 374, 375, 376, 377, 378, 379, 380, 381, 382, 383, 384, 385, 386, 387, 388, 389, 390, 391, 392, 393, 394, 395, 396, 397, 398, 399, and 400 nucleotides. The length of the enhancer region for the viral genome may be 300-310, 300-325, 305-315, 310-320, 315-325, 320-330, 325-335, 325-350, 330-340, 335-345, 340-350, 345-355, 350-360, 350-375, 355-365, 360-370, 365-375, 370-380, 375-385, 375-400, 380-390, 385-395, and 390-400 nucleotides. As a non-limiting example, the viral genome comprises an enhancer region that is about 303 nucleotides in length. As a non-limiting example, the viral genome comprises an enhancer region that is about 382 nucleotides in length.

[0505] In one embodiment, the AAV particle viral genome comprises at least one enhancer sequence region. Non-limiting examples of enhancer sequence regions are described in Table 16.

TABLE 16
Enhancer Sequence Regions

| Sequence | |
|---|---|
| Region | |
| Name | SEQ ID NO |
| Enhancer1 | 1408 |
| Enhancer2 | 1409 |

[0506] In one embodiment, the AAV particle viral genome comprises one enhancer sequence region. In one embodiment, the enhancer sequence regions is the Enhancer1 sequence region. In one embodiment, the enhancer sequence regions is the Enhancer2 sequence region.

[0507] In one embodiment, the AAV particle viral genome comprises two enhancer sequence regions. In one embodiment, the enhancer sequence regions are the Enhancer1 sequence region and the Enhancer 2 sequence region.

[0508] In one embodiment, the AAV particle viral genome may comprise at least one promoter sequence region. The promoter sequence region(s) may, independently, have a length such as, but not limited to, 4, 5, 6, 7, 8, 9, 10, 11, 12, 13, 14, 15, 16, 17, 18, 19, 20, 21, 22, 23, 24, 25, 26, 27, 28, 29, 30, 31, 32, 33, 34, 35, 36, 37, 38, 39, 40, 41, 42, 43, 44, 45, 46, 47, 48, 49, 50, 51, 52, 53, 54, 55, 56, 57, 58, 59, 60, 61, 62, 63, 64, 65, 66, 67, 68, 69, 70, 71, 72, 73, 74, 75, 76, 77, 78, 79, 80, 81, 82, 83, 84, 85, 86, 87, 88, 89, 90, 91, 92, 93, 94, 95, 96, 97, 98, 99, 100, 101, 102, 103, 104, 105, 106, 107, 108, 109, 110, 111, 112, 113, 114, 115, 116, 117, 118, 119, 120, 121, 122, 123, 124, 125, 126, 127, 128, 129, 130, 131, 132, 133, 134, 135, 136, 137, 138, 139, 140, 141, 142, 143, 144, 145, 146, 147, 148, 149, 150, 151, 152, 153, 154, 155, 156, 157, 158, 159, 160, 161, 162, 163, 164, 165, 166, 167, 168, 169, 170, 171, 172, 173, 174, 175, 176, 177, 178, 179, 180, 181, 182, 183, 184, 185, 186, 187, 188, 189, 190, 191, 192, 193, 194, 195, 196, 197, 198, 199, 200, 201, 202, 203, 204, 205, 206, 207, 208, 209, 210, 211, 212, 213, 214, 215, 216, 217, 218, 219, 220, 221, 222, 223, 224, 225, 226, 227, 228, 229, 230, 231, 232, 233, 234, 235, 236, 237, 238, 239, 240, 241, 242, 243, 244, 245, 246, 247, 248, 249, 250, 251, 252, 253, 254, 255, 256, 257, 258, 259, 260, 261, 262, 263, 264, 265, 266, 267, 268, 269, 270, 271, 272, 273, 274, 275, 276, 277, 278, 279, 280, 281, 282, 283, 284, 285, 286, 287, 288, 289, 290, 291, 292, 293, 294, 295, 296, 297, 298, 299, 300, 301, 302, 303, 304, 305, 306, 307, 308, 309, 310, 311, 312, 313, 314, 315, 316, 317, 318, 319, 320, 321, 322, 323, 324, 325, 326, 327, 328, 329, 330, 331, 332, 333, 334, 335, 336, 337, 338, 339, 340, 341, 342, 343, 344, 345, 346, 347, 348, 349, 350, 351, 352, 353, 354, 355, 356, 357, 358, 359, 360, 361, 362, 363, 364, 365, 366, 367, 368, 369, 370, 371, 372, 373, 374, 375, 376, 377, 378, 379, 380, 381, 382, 383, 384, 385, 386, 387, 388, 389, 390, 391, 392, 393, 394, 395, 396, 397, 398, 399, 400, 401, 402, 403, 404, 405, 406, 407, 408, 409, 410, 411, 412, 413, 414, 415, 416, 417, 418, 419, 420, 421, 422, 423, 424, 425, 426, 427, 428, 429, 430, 431, 432, 433, 434, 435, 436, 437, 438, 439, 440, 441, 442, 443, 444, 445, 446, 447, 448, 449, 450, 451, 452, 453, 454, 455, 456, 457, 458, 459, 460, 461, 462, 463, 464, 465, 466, 467, 468, 469, 470, 471, 472, 473, 474, 475, 476, 477, 478, 479, 480, 481, 482, 483, 484, 485, 486, 487, 488, 489, 490, 491, 492, 493, 494, 495, 496, 497, 498, 499, 500, 501, 502, 503, 504, 505, 506, 507, 508, 509, 510, 511, 512, 513, 514, 515, 516, 517, 518, 519, 520, 521, 522, 523, 524, 525, 526, 527, 528, 529, 530, 531, 532, 533, 534, 535, 536, 537, 538, 539, 540, 541, 542, 543, 544, 545, 546, 547, 548, 549, 550, 551, 552, 553, 554, 555, 556, 557, 558, 559, 560, 561, 562, 563, 564, 565, 566, 567, 568, 569, 570, 571, 572, 573, 574, 575, 576, 577, 578, 579, 580, 581, 582, 583, 584, 585, 586, 587, 588, 589, 590, 591, 592, 593, 594, 595, 596, 597, 598, 599, and 600 nucleotides. The length of the promoter region for the viral genome may be 4-10, 10-20, 10-50, 20-30, 30-40, 40-50, 50-60, 50-100, 60-70, 70-80, 80-90, 90-100, 100-110, 100-150, 110-120, 120-130, 130-140, 140-150, 150-160, 150-200, 160-170, 170-180, 180-190, 190-200, 200-210, 200-250, 210-220, 220-230, 230-240, 240-250, 250-260, 250-300, 260-270, 270-280, 280-290, 290-300, 300-310, 300-350, 310-320, 320-330, 330-340, 340-350, 350-360, 350-400, 360-370, 370-380, 380-390, 390-400, 400-410, 400-450, 410-420, 420-430, 430-440, 440-450, 450-460, 450-500, 460-470, 470-480, 480-490, 490-500, 500-510, 500-550, 510-520, 520-530, 530-540, 540-550, 550-560, 550-600, 560-570, 570-580, 580-590, and 590-600 nucleotides. As a non-limiting example, the viral genome comprises a promoter region that is about 4 nucleotides in length. As a non-limiting example, the viral genome comprises a promoter region that is about 17 nucleotides in length. As a non-limiting example, the viral genome comprises a promoter region that is about 204 nucleotides in length. As a non-limiting example, the viral genome comprises a promoter region that is about 219 nucleotides in length. As a non-limiting example, the viral genome comprises a promoter region that is about 260 nucleotides in length. As a non-limiting example, the viral genome comprises a promoter region that is about 303 nucleotides in length. As a non-limiting example, the viral genome comprises a promoter region that is about 382 nucleotides in length. As a non-limiting example, the viral genome comprises a promoter region that is about 588 nucleotides in length.

[0509] In one embodiment, the AAV particle viral genome comprises at least one promoter sequence region. Non-limiting examples of promoter sequence regions are described in Table 17.

TABLE 17
Promoter Sequence Regions

| Sequence | SEQ ID |
|---|---|
| Region | NO or |
| Name | Sequence |
| Promoter1 | 1410 |
| Promoter2 | 1411 |
| Promoter3 | GTTG |
| Promoter4 | 1412 |
| Promoter5 | 1413 |
| Promoter6 | 1414 |

[0510] In one embodiment, the AAV particle viral genome comprises one promoter sequence region. In one embodiment, the promoter sequence region is Promoter1. In one embodiment, the promoter sequence region is Promoter2. In one embodiment, the promoter sequence region is Promoter3. In one embodiment, the promoter sequence region is Promoter4. In one embodiment, the promoter sequence region is Promoter5. In one embodiment, the promoter sequence region is Promoter6.

[0511] In one embodiment, the AAV particle viral genome comprises two promoter sequence regions. In one embodiment, the promoter sequence region is Promoter1 sequence region, and the Promoter2 sequence region. In one embodiment, the promoter sequence region is Promoter1 sequence region, and the Promoter3 sequence region. In one embodiment, the promoter sequence region is Promoter1 sequence region, and the Promoter4 sequence region. In one embodiment, the promoter sequence region is Promoter1 sequence region, and the Promoter5 sequence region. In one embodiment, the promoter sequence region is Promoter1 sequence region, and the Promoter6 sequence region. In one embodiment, the promoter sequence region is Promoter2 sequence region, and the Promoter3 sequence region. In one embodiment, the promoter sequence region is Promoter2 sequence region, and the Promoter4 sequence region. In one embodiment, the promoter sequence region is Promoter2 sequence region, and the Promoter5 sequence region. In one embodiment, the promoter sequence region is Promoter2 sequence region, and the Promoter6 sequence region. In one embodiment, the promoter sequence region is Promoter3 sequence region, and the Promoter4 sequence region. In one embodiment, the promoter sequence region is Promoter3 sequence region, and the Promoter5 sequence region. In one embodiment, the promoter sequence region is Promoter3 sequence region, and the Promoter6 sequence region. In one embodiment, the promoter sequence region is Promoter4 sequence region, and the Promoter5 sequence region. In one embodiment, the promoter sequence region is Promoter4 sequence region, and the Promoter6 sequence region. In one embodiment, the promoter sequence region is Promoter5 sequence region, and the Promoter6 sequence region.

[0512] In one embodiment, the AAV particle viral genome may comprise at least one exon sequence region. The exon region(s) may, independently, have a length such as, but not limited to, 2, 3, 4, 5, 6, 7, 8, 9, 10, 11, 12, 13, 14, 15, 16, 17, 18, 19, 20, 21, 22, 23, 24, 25, 26, 27, 28, 29, 30, 31, 32, 33, 34, 35, 36, 37, 38, 39, 40, 41, 42, 43, 44, 45, 46, 47, 48, 49, 50, 51, 52, 53, 54, 55, 56, 57, 58, 59, 60, 61, 62, 63, 64, 65, 66, 67, 68, 69, 70, 71, 72, 73, 74, 75, 76, 77, 78, 79, 80, 81, 82, 83, 84, 85, 86, 87, 88, 89, 90, 91, 92, 93, 94, 95, 96, 97, 98, 99, 100, 101, 102, 103, 104, 105, 106, 107, 108, 109, 110, 111, 112, 113, 114, 115, 116, 117, 118, 119, 120, 121, 122, 123, 124, 125, 126, 127, 128, 129, 130, 131, 132, 133, 134, 135, 136, 137, 138, 139, 140, 141, 142, 143, 144, 145, 146, 147, 148, 149, and 150 nucleotides. The length of the exon region for the viral genome may be 2-10, 5-10, 5-15, 10-20, 10-30, 10-40, 15-20, 15-25, 20-30, 20-40, 20-50, 25-30, 25-35, 30-40, 30-50, 30-60, 35-40, 35-45, 40-50, 40-60, 40-70, 45-50, 45-55, 50-60, 50-70, 50-80, 55-60, 55-65, 60-70, 60-80, 60-90, 65-70, 65-75, 70-80, 70-90, 70-100, 75-80, 75-85, 80-90, 80-100, 80-110, 85-90, 85-95, 90-100, 90-110, 90-120, 95-100, 95-105, 100-110, 100-120, 100-130, 105-110, 105-115, 110-120, 110-130, 110-140, 115-120, 115-125, 120-130, 120-140, 120-150, 125-130, 125-135, 130-140, 130-150, 135-140, 135-145, 140-150, and 145-150 nucleotides. As a non-limiting example, the viral genome comprises an exon region that is about 53 nucleotides in length. As a non-limiting example, the viral genome comprises an exon region that is about 134 nucleotides in length.

[0513] In one embodiment, the AAV particle viral genome comprises at least one Exon sequence region. Non-limiting examples of Exon sequence regions are described in Table 18.

TABLE 18
Exon Sequence Regions

| Sequence | |
|---|---|
| Region | |
| Name | SEQ ID NO |
| Exon1 | 1415 |
| Exon2 | 1416 |

[0514] In one embodiment, the AAV particle viral genome comprises one Exon sequence region. In one embodiment, the Exon sequence regions is the Exon1 sequence region. In one embodiment, the Exon sequence regions is the Exon2 sequence region.

[0515] In one embodiment, the AAV particle viral genome comprises two Exon sequence regions. In one embodiment, the Exon sequence regions are the Exon1 sequence region and the Exon 2 sequence region.

[0516] In one embodiment, the AAV particle viral genome may comprise at least one intron sequence region. The intron region(s) may, independently, have a length such as, but not limited to, 25, 26, 27, 28, 29, 30, 31, 32, 33, 34, 35, 36, 37, 38, 39, 40, 41, 42, 43, 44, 45, 46, 47, 48, 49, 50, 51, 52, 53, 54, 55, 56, 57, 58, 59, 60, 61, 62, 63, 64, 65, 66, 67, 68, 69, 70, 71, 72, 73, 74, 75, 76, 77, 78, 79, 80, 81, 82, 83, 84, 85, 86, 87, 88, 89, 90, 91, 92, 93, 94, 95, 96, 97, 98, 99, 100, 101, 102, 103, 104, 105, 106, 107, 108, 109, 110, 111, 112, 113, 114, 115, 116, 117, 118, 119, 120, 121, 122, 123, 124, 125, 126, 127, 128, 129, 130, 131, 132, 133, 134, 135, 136, 137, 138, 139, 140, 141, 142, 143, 144, 145, 146, 147, 148, 149, 150, 151, 152, 153, 154, 155, 156, 157, 158, 159, 160, 161, 162, 163, 164, 165, 166, 167, 168, 169, 170, 171, 172, 173, 174, 175, 176, 177, 178, 179, 180, 181, 182, 183, 184, 185, 186, 187, 188, 189, 190, 191, 192, 193, 194, 195, 196, 197, 198, 199, 200, 201, 202, 203, 204, 205, 206, 207, 208, 209, 210, 211, 212, 213, 214, 215, 216, 217, 218, 219, 220, 221, 222, 223, 224, 225, 226, 227, 228, 229, 230, 231, 232, 233, 234, 235, 236, 237, 238, 239, 240, 241, 242, 243, 244, 245, 246, 247, 248, 249, 250, 251, 252, 253, 254, 255, 256, 257, 258, 259, 260, 261, 262, 263, 264, 265, 266, 267, 268, 269, 270, 271, 272, 273, 274, 275, 276, 277, 278, 279, 280, 281, 282, 283, 284, 285, 286, 287, 288, 289, 290, 291, 292, 293, 294, 295, 296, 297, 298, 299, 300, 301, 302, 303, 304, 305, 306, 307, 308, 309, 310, 311, 312, 313, 314, 315, 316, 317, 318, 319, 320, 321, 322, 323, 324, 325, 326, 327, 328, 329, 330, 331, 332, 333, 334, 335, 336, 337, 338, 339, 340, 341, 342, 343, 344, 345, 346, 347, 348, 349, and 350 nucleotides. The length of the intron region for the viral genome may be 25-35, 25-50, 35-45, 45-55, 50-75, 55-65, 65-75, 75-85, 75-100, 85-95, 95-105, 100-125, 105-115, 115-125, 125-135, 125-150, 135-145, 145-155, 150-175, 155-165, 165-175, 175-185, 175-200, 185-195, 195-205, 200-225, 205-215, 215-225, 225-235, 225-250, 235-245, 245-255, 250-275, 255-265, 265-275, 275-285, 275-300, 285-295, 295-305, 300-325, 305-315, 315-325, 325-335, 325-350, and 335-345 nucleotides. As a non-limiting example, the viral genome comprises an intron region that is about 32 nucleotides in length. As a non-limiting example, the viral genome comprises an intron region that is about 172 nucleotides in length. As a non-limiting example, the viral genome comprises an intron region that is about 201 nucleotides in length. As a non-limiting example, the viral genome comprises an intron region that is about 347 nucleotides in length.

[0517] In one embodiment, the AAV particle viral genome comprises at least one intron sequence region. Non-limiting examples of intron sequence regions are described in Table 19.

TABLE 19
Intron Sequence Regions

| Sequence | |
|---|---|
| Region | |
| Name | SEQ ID NO |
| Intron1 | 1417 |
| Intron2 | 1418 |
| Intron3 | 1419 |

[0518] In one embodiment, the AAV particle viral genome comprises one intron sequence region. In one embodiment, the intron sequence regions is the Intron1 sequence region. In one embodiment, the intron sequence regions is the Intron2 sequence region. In one embodiment, the intron sequence regions is the Intron3 sequence region.

[0519] In one embodiment, the AAV particle viral genome comprises two intron sequence regions. In one embodiment, the intron sequence regions are the Intron1 sequence region and the Intron2 sequence region. In one embodiment, the intron sequence regions are the Intron2 sequence region and the Intron3 sequence region. In one embodiment, the intron sequence regions are the Intron1 sequence region and the Intron3 sequence region.

[0520] In one embodiment, the AAV particle viral genome comprises three intron sequence regions. In one embodiment, the intron sequence regions are the Intron1 sequence region, the Intron2 sequence region, and the Intron3 sequence region.

[0521] In one embodiment, the AAV particle viral genome may comprise at least one polyadenylation signal sequence region. The polyadenylation signal region sequence region(s) may, independently, have a length such as, but not limited to, 4, 5, 6, 7, 8, 9, 10, 11, 12, 13, 14, 15, 16, 17, 18, 19, 20, 21, 22, 23, 24, 25, 26, 27, 28, 29, 30, 31, 32, 33, 34, 35, 36, 37, 38, 39, 40, 41, 42, 43, 44, 45, 46, 47, 48, 49, 50, 51, 52, 53, 54, 55, 56, 57, 58, 59, 60, 61, 62, 63, 64, 65, 66, 67, 68, 69, 70, 71, 72, 73, 74, 75, 76, 77, 78, 79, 80, 81, 82, 83, 84, 85, 86, 87, 88, 89, 90, 91, 92, 93, 94, 95, 96, 97, 98, 99, 100, 101, 102, 103, 104, 105, 106, 107, 108, 109, 110, 111, 112, 113, 114, 115, 116, 117, 118, 119, 120, 121, 122, 123, 124, 125, 126, 127, 128, 129, 130, 131, 132, 133, 134, 135, 136, 137, 138, 139, 140, 141, 142, 143, 144, 145, 146, 147, 148, 149, 150, 151, 152, 153, 154, 155, 156, 157, 158, 159, 160, 161, 162, 163, 164, 165, 166, 167, 168, 169, 170, 171, 172, 173, 174, 175, 176, 177, 178, 179, 180, 181, 182, 183, 184, 185, 186, 187, 188, 189, 190, 191, 192, 193, 194, 195, 196, 197, 198, 199, 200, 201, 202, 203, 204, 205, 206, 207, 208, 209, 210, 211, 212, 213, 214, 215, 216, 217, 218, 219, 220, 221, 222, 223, 224, 225, 226, 227, 228, 229, 230, 231, 232, 233, 234, 235, 236, 237, 238, 239, 240, 241, 242, 243, 244, 245, 246, 247, 248, 249, 250, 251, 252, 253, 254, 255, 256, 257, 258, 259, 260, 261, 262, 263, 264, 265, 266, 267, 268, 269, 270, 271, 272, 273, 274, 275, 276, 277, 278, 279, 280, 281, 282, 283, 284, 285, 286, 287, 288, 289, 290, 291, 292, 293, 294, 295, 296, 297, 298, 299, 300, 301, 302, 303, 304, 305, 306, 307, 308, 309, 310, 311, 312, 313, 314, 315, 316, 317, 318, 319, 320, 321, 322, 323, 324, 325, 326, 327, 328, 329, 330, 331, 332, 333, 334, 335, 336, 337, 338, 339, 340, 341, 342, 343, 344, 345, 346, 347, 348, 349, 350, 351, 352, 353, 354, 355, 356, 357, 358, 359, 360, 361, 362, 363, 364, 365, 366, 367, 368, 369, 370, 371, 372, 373, 374, 375, 376, 377, 378, 379, 380, 381, 382, 383, 384, 385, 386, 387, 388, 389, 390, 391, 392, 393, 394, 395, 396, 397, 398, 399, 400, 401, 402, 403, 404, 405, 406, 407, 408, 409, 410, 411, 412, 413, 414, 415, 416, 417, 418, 419, 420, 421, 422, 423, 424, 425, 426, 427, 428, 429, 430, 431, 432, 433, 434, 435, 436, 437, 438, 439, 440, 441, 442, 443, 444, 445, 446, 447, 448, 449, 450, 451, 452, 453, 454, 455, 456, 457, 458, 459, 460, 461, 462, 463, 464, 465, 466, 467, 468, 469, 470, 471, 472, 473, 474, 475, 476, 477, 478, 479, 480, 481, 482, 483, 484, 485, 486, 487, 488, 489, 490, 491, 492, 493, 494, 495, 496, 497, 498, 499, 500, 501, 502, 503, 504, 505, 506, 507, 508, 509, 510, 511, 512, 513, 514, 515, 516, 517, 518, 519, 520, 521, 522, 523, 524, 525, 526, 527, 528, 529, 530, 531, 532, 533, 534, 535, 536, 537, 538, 539, 540, 541, 542, 543, 544, 545, 546, 547, 548, 549, 550, 551, 552, 553, 554, 555, 556, 557, 558, 559, 560, 561, 562, 563, 564, 565, 566, 567, 568, 569, 570, 571, 572, 573, 574, 575, 576, 577, 578, 579, 580, 581, 582, 583, 584, 585, 586, 587, 588, 589, 590, 591, 592, 593, 594, 595, 596, 597, 598, 599, and 600 nucleotides. The length of the polyadenylation signal sequence region for the viral genome may be 4-10, 10-20, 10-50, 20-30, 30-40, 40-50, 50-60, 50-100, 60-70, 70-80, 80-90, 90-100, 100-110, 100-150, 110-120, 120-130, 130-140, 140-150, 150-160, 150-200, 160-170, 170-180, 180-190, 190-200, 200-210, 200-250, 210-220, 220-230, 230-240, 240-250, 250-260, 250-300, 260-270, 270-280, 280-290, 290-300, 300-310, 300-350, 310-320, 320-330, 330-340, 340-350, 350-360, 350-400, 360-370, 370-380, 380-390, 390-400, 400-410, 400-450, 410-420, 420-430, 430-440, 440-450, 450-460, 450-500, 460-470, 470-480, 480-490, 490-500, 500-510, 500-550, 510-520, 520-530, 530-540, 540-550, 550-560, 550-600, 560-570, 570-580, 580-590, and 590-600 nucleotides. As a non-limiting example, the viral genome comprises a polyadenylation signal sequence region that is about 127 nucleotides in length. As a non-limiting example, the viral genome comprises a polyadenylation signal sequence region that is about 225 nucleotides in length. As a non-limiting example, the viral genome comprises a polyadenylation signal sequence region that is about 476 nucleotides in length. As a non-limiting example, the viral genome comprises a polyadenylation signal sequence region that is about 477 nucleotides in length.

[0522] In one embodiment, the AAV particle viral genome comprises at least one polyadenylation (polyA) signal sequence region. Non-limiting examples of polyA signal sequence regions are described in Table 20.

TABLE 20
PolyA Signal Sequence Regions

| Sequence | |
|---|---|
| Region | |
| Name | SEQ ID NO |
| PolyA1 | 1420 |
| PolyA2 | 1421 |
| PolyA3 | 1422 |
| PolyA4 | 1423 |

[0523] In one embodiment, the AAV particle viral genome comprises one polyA signal sequence region. In one embodiment, the polyA signal sequence regions is the PolyA1 sequence region. In one embodiment, the polyA signal sequence regions is the PolyA2 sequence region. In one embodiment, the polyA signal sequence regions is the PolyA3 sequence region. In one embodiment, the polyA signal sequence regions is the PolyA4 sequence region.

[0524] In one embodiment, the AAV particle viral genome comprises more than one polyA signal sequence region.

[0525] In one embodiment, the AAV particle viral genome comprises at least one inverted terminal repeat (ITR) sequence region, at least one multiple cloning site (MCS) sequence region, at least one enhancer sequence region, at least one promoter sequence region, at least one exon sequence region, at least one intron sequence region, at least one modulatory polynucleotide region, at least one polyadenylation signal sequence region, and at least one filler sequence region.

[0526] In one embodiment, the AAV particle viral genome comprises a 5′ inverted terminal repeat (ITR) sequence region and a 3′ ITR sequence region, two multiple cloning site (MCS) sequence regions, an enhancer sequence region, a promoter sequence region, an intron sequence region, a modulatory polynucleotide region, a polyadenylation signal sequence region, and a filler sequence region.

[0527] In one embodiment, the AAV particle viral genome comprises a 5′ inverted terminal repeat (ITR) sequence region and a 3′ ITR sequence region, two multiple cloning site (MCS) sequence regions, a CMV enhancer sequence region, a CBA promoter sequence region, an SV40 intron sequence region, a modulatory polynucleotide region, a rabbit globin polyadenylation signal sequence region, and a filler sequence region. Non-limiting examples of ITR to ITR sequences for use in the AAV particles of the present invention having all of the sequence modules above are described in Table 21. In Table 21, the sequence identifier or sequence of the sequence region (Region SEQ ID NO) and the length of the sequence region (Region length) are described as well as the name and sequence identifier of the ITR to ITR sequence (e.g., VOYHT1 (SEQ ID NO: 1352)).

TABLE 21
Sequence Regions in ITR to ITR Sequences

| | VOYHT1 | | VOYHT2 | | VOYHT3 | | VOYHT4 | |
|---|---|---|---|---|---|---|---|---|
| | (SEQ ID NO: 1352) | | (SEQ ID NO: 1353) | | (SEQ ID NO: 1354) | | (SEQ ID NO: 1355) | |
| Sequence | Region | Region | Region | Region | Region | Region | Region | Region |
| Regions | SEQ ID NO | length | SEQ ID NO | length | SEQ ID NO | length | SEQ ID NO | length |
| 5′ ITR | 1380 | 141 | 1380 | 141 | 1380 | 141 | 1380 | 141 |
| MCS | 1384 | 10 | 1384 | 10 | 1384 | 10 | 1384 | 10 |
| CMV enhancer | 1408 | 382 | 1408 | 382 | 1408 | 382 | 1408 | 382 |
| CBA Promoter | 1410 | 260 | 1410 | 260 | 1410 | 260 | 1410 | 260 |
| SV40 Intron | 1417 | 172 | 1417 | 172 | 1417 | 172 | 1417 | 172 |
| Modulatory | 1262 | 163 | 1262 | 163 | 1250 | 158 | 1347 | 163 |
| Polynucleotide | | | | | | | | |
| MCS | TCGAG | 5 | TCGAG | 5 | TCGAG | 5 | TCGAG | 5 |
| Rabbit globin | 1420 | 127 | 1420 | 127 | 1420 | 127 | 1420 | 127 |
| PolyA Signal | | | | | | | | |
| Filler | 1400 | 714 | 1401 | 3021 | 1400 | 714 | 1400 | 714 |
| 3′ ITR | 1382 | 141 | 1382 | 141 | 1382 | 141 | 1382 | 141 |

[0528] In one embodiment, the AAV particle viral genome comprises SEQ ID NO: 1352 (VOYHT1) which comprises a 5′ inverted terminal repeat (ITR) sequence region and a 3′ ITR sequence region, two multiple cloning site (MCS) sequence regions, a CMV enhancer sequence region, a CBA promoter sequence region, an SV40 intron sequence region, a modulatory polynucleotide region, a rabbit globin polyadenylation signal sequence region, and a filler sequence region.

[0529] In one embodiment, the AAV particle viral genome comprises SEQ ID NO: 1353 (VOYHT2) which comprises a 5′ inverted terminal repeat (ITR) sequence region and a 3′ ITR sequence region, two multiple cloning site (MCS) sequence regions, a CMV enhancer sequence region, a CBA promoter sequence region, an SV40 intron sequence region, a modulatory polynucleotide region, a rabbit globin polyadenylation signal sequence region, and a filler sequence region.

[0530] In one embodiment, the AAV particle viral genome comprises SEQ ID NO: 1354 (VOYHT3) which comprises a 5′ inverted terminal repeat (ITR) sequence region and a 3′ ITR sequence region, two multiple cloning site (MCS) sequence regions, a CMV enhancer sequence region, a CBA promoter sequence region, an SV40 intron sequence region, a modulatory polynucleotide region, a rabbit globin polyadenylation signal sequence region, and a filler sequence region.

[0531] In one embodiment, the AAV particle viral genome comprises SEQ ID NO: 1355 (VOYHT4) which comprises a 5′ inverted terminal repeat (ITR) sequence region and a 3′ ITR sequence region, two multiple cloning site (MCS) sequence regions, a CMV enhancer sequence region, a CBA promoter sequence region, an SV40 intron sequence region, a modulatory polynucleotide region, a rabbit globin polyadenylation signal sequence region, and a filler sequence region.

[0532] In one embodiment, the AAV particle viral genome comprises a 5′ inverted terminal repeat (ITR) sequence region and a 3′ ITR sequence region, two multiple cloning site (MCS) sequence regions, a CMV enhancer sequence region, a CBA promoter sequence region, an SV40 intron sequence region, a modulatory polynucleotide region, a rabbit globin polyadenylation signal sequence region, and a filler sequence region. Non-limiting examples of ITR to ITR sequences for use in the AAV particles of the present invention having all of the sequence modules above are described in Table 22. In Table 22, the sequence identifier or sequence of the sequence region (Region SEQ ID NO) and the length of the sequence region (Region length) are described as well as the name and sequence identifier of the ITR to ITR sequence (e.g., VOYHT5 (SEQ ID NO: 1356)).

TABLE 22
Sequence Regions in ITR to ITR Sequences

| | VOYHT5 | | VOYHT6 | | VOYHT7 | | VOYHT8 | |
|---|---|---|---|---|---|---|---|---|
| | (SEQ ID NO: 1356) | | (SEQ ID NO: 1357) | | (SEQ ID NO: 1358) | | (SEQ ID NO: 1359) | |
| Sequence | Region | Region | Region | Region | Region | Region | Region | Region |
| Regions | SEQ ID NO | length | SEQ ID NO | length | SEQ ID NO | length | SEQ ID NO | length |
| 5′ ITR | 1380 | 141 | 1380 | 141 | 1380 | 141 | 1380 | 141 |
| MCS | 1384 | 10 | 1384 | 10 | 1384 | 10 | 1384 | 10 |
| Filler | 1390 | 3013 | 1391 | 712 | 1391 | 717 | 1391 | 712 |
| CMV | 1408 | 382 | 1408 | 382 | 1408 | 382 | 1408 | 382 |
| enhancer | | | | | | | | |
| CBA Promoter | 1410 | 260 | 1410 | 260 | 1410 | 260 | 1410 | 260 |
| SV40 Intron | 1417 | 172 | 1417 | 172 | 1417 | 172 | 1417 | 172 |
| Modulatory | 1262 | 163 | 1262 | 163 | 1250 | 158 | 1347 | 163 |
| Polynucleotide | | | | | | | | |
| MCS | TCGAG | 5 | TCGAG | 5 | TCGAG | 5 | TCGAG | 5 |
| Rabbit globin | 1420 | 127 | 1420 | 127 | 1420 | 127 | 1420 | 127 |
| PolyA Signal | | | | | | | | |
| 3′ ITR | 1382 | 141 | 1382 | 141 | 1382 | 141 | 1382 | 141 |

[0533] In one embodiment, the AAV particle viral genome comprises SEQ ID NO: 1356 (VOYHT5) which comprises a 5′ inverted terminal repeat (ITR) sequence region and a 3′ ITR sequence region, two multiple cloning site (MCS) sequence regions, a CMV enhancer sequence region, a CBA promoter sequence region, an SV40 intron sequence region, a modulatory polynucleotide region, a rabbit globin polyadenylation signal sequence region, and a filler sequence region.

[0534] In one embodiment, the AAV particle viral genome comprises SEQ ID NO: 1357 (VOYHT6) which comprises a 5′ inverted terminal repeat (ITR) sequence region and a 3′ ITR sequence region, two multiple cloning site (MCS) sequence regions, a CMV enhancer sequence region, a CBA promoter sequence region, an SV40 intron sequence region, a modulatory polynucleotide region, a rabbit globin polyadenylation signal sequence region, and a filler sequence region.

[0535] In one embodiment, the AAV particle viral genome comprises SEQ ID NO: 1358 (VOYHT7) which comprises a 5′ inverted terminal repeat (ITR) sequence region and a 3′ ITR sequence region, two multiple cloning site (MCS) sequence regions, a CMV enhancer sequence region, a CBA promoter sequence region, an SV40 intron sequence region, a modulatory polynucleotide region, a rabbit globin polyadenylation signal sequence region, and a filler sequence region.

[0536] In one embodiment, the AAV particle viral genome comprises SEQ ID NO: 1359 (VOYHT8) which comprises a 5′ inverted terminal repeat (ITR) sequence region and a 3′ ITR sequence region, two multiple cloning site (MCS) sequence regions, a CMV enhancer sequence region, a CBA promoter sequence region, an SV40 intron sequence region, a modulatory polynucleotide region, a rabbit globin polyadenylation signal sequence region, and a filler sequence region.

[0537] In one embodiment, the AAV particle viral genome comprises a 5′ inverted terminal repeat (ITR) sequence region and a 3′ ITR sequence region, two multiple cloning site (MCS) sequence regions, an enhancer sequence region, a promoter sequence region, an intron sequence region, a modulatory polynucleotide region, a polyadenylation signal sequence region, and two filler sequence regions.

[0538] In one embodiment, the AAV particle viral genome comprises a 5′ inverted terminal repeat (ITR) sequence region and a 3′ ITR sequence region, two multiple cloning site (MCS) sequence regions, a CMV enhancer sequence region, a CBA promoter sequence region, an SV40 intron sequence region, a modulatory polynucleotide region, a rabbit globin polyadenylation signal sequence region, and two filler sequence regions. Non-limiting examples of ITR to ITR sequences for use in the AAV particles of the present invention having all of the sequence modules above are described in Table 23. In Table 23, the sequence identifier or sequence of the sequence region (Region SEQ ID NO) and the length of the sequence region (Region length) are described as well as the name and sequence identifier of the ITR to ITR sequence (e.g., VOYHT9 (SEQ ID NO: 1360)).

TABLE 23
Sequence Regions in ITR to ITR Sequences

| | VOYHT9 | | VOYHT10 | | VOYHT11 | | VOYHT12 | |
|---|---|---|---|---|---|---|---|---|
| | (SEQ ID NO: 1360) | | (SEQ ID NO: 1361) | | (SEQ ID NO: 1362) | | (SEQ ID NO: 1363) | |
| Sequence | Region | Region | Region | Region | Region | Region | Region | Region |
| Regions | SEQ ID NO | length | SEQ ID NO | length | SEQ ID NO | length | SEQ ID NO | length |
| 5′ ITR | 1380 | 141 | 1380 | 141 | 1380 | 141 | 1380 | 141 |
| MCS | 1384 | 10 | 1384 | 10 | 1384 | 10 | 1384 | 10 |
| Filler | 1396 | 1512 | 1397 | 363 | 1397 | 363 | 1397 | 363 |
| CMV | 1408 | 382 | 1408 | 382 | 1408 | 382 | 1408 | 382 |
| enhancer | | | | | | | | |
| CBA Promoter | 1410 | 260 | 1410 | 260 | 1410 | 260 | 1410 | 260 |
| SV40 Intron | 1417 | 172 | 1417 | 172 | 1417 | 172 | 1417 | 172 |
| Modulatory | 1262 | 163 | 1262 | 163 | 1250 | 158 | 1347 | 163 |
| Polynucleotide | | | | | | | | |
| MCS | TCGAG | 5 | TCGAG | 5 | TCGAG | 5 | TCGAG | 5 |
| Rabbit globin | 1420 | 127 | 1420 | 127 | 1420 | 127 | 1420 | 127 |
| PolyA Signal | | | | | | | | |
| Filler | 1404 | 1519 | 1405 | 357 | 1405 | 357 | 1405 | 357 |
| 3′ ITR | 1382 | 141 | 1382 | 141 | 1382 | 141 | 1382 | 141 |

[0539] In one embodiment, the AAV particle viral genome comprises SEQ ID NO: 1360 (VOYHT9) which comprises a 5′ inverted terminal repeat (ITR) sequence region and a 3′ ITR sequence region, two multiple cloning site (MCS) sequence regions, a CMV enhancer sequence region, a CBA promoter sequence region, an SV40 intron sequence region, a modulatory polynucleotide region, a rabbit globin polyadenylation signal sequence region, and two filler sequence regions.

[0540] In one embodiment, the AAV particle viral genome comprises SEQ ID NO: 1361 (VOYHT10) which comprises a 5′ inverted terminal repeat (ITR) sequence region and a 3′ ITR sequence region, two multiple cloning site (MCS) sequence regions, a CMV enhancer sequence region, a CBA promoter sequence region, an SV40 intron sequence region, a modulatory polynucleotide region, a rabbit globin polyadenylation signal sequence region, and two filler sequence regions.

[0541] In one embodiment, the AAV particle viral genome comprises SEQ ID NO: 1362 (VOYHT11) which comprises a 5′ inverted terminal repeat (ITR) sequence region and a 3′ ITR sequence region, two multiple cloning site (MCS) sequence regions, a CMV enhancer sequence region, a CBA promoter sequence region, an SV40 intron sequence region, a modulatory polynucleotide region, a rabbit globin polyadenylation signal sequence region, and two filler sequence regions.

[0542] In one embodiment, the AAV particle viral genome comprises SEQ ID NO: 1363 (VOYHT12) which comprises a 5′ inverted terminal repeat (ITR) sequence region and a 3′ ITR sequence region, two multiple cloning site (MCS) sequence regions, a CMV enhancer sequence region, a CBA promoter sequence region, an SV40 intron sequence region, a modulatory polynucleotide region, a rabbit globin polyadenylation signal sequence region, and two filler sequence regions.

[0543] In one embodiment, the AAV particle viral genome comprises a 5′ inverted terminal repeat (ITR) sequence region and a 3′ ITR sequence region, two multiple cloning site (MCS) sequence regions, an enhancer sequence region, a promoter sequence region, an intron sequence region, a modulatory polynucleotide region, and a polyadenylation signal sequence region.

[0544] In one embodiment, the AAV particle viral genome comprises a 5′ inverted terminal repeat (ITR) sequence region and a 3′ ITR sequence region, two multiple cloning site (MCS) sequence regions, a CMV enhancer sequence region, a CBA promoter sequence region, an SV40 intron sequence region, a modulatory polynucleotide region, and a rabbit globin polyadenylation signal sequence region. Non-limiting examples of ITR to ITR sequences for use in the AAV particles of the present invention having all of the sequence modules above are described in Table 24. In Table 24, the sequence identifier or sequence of the sequence region (Region SEQ ID NO) and the length of the sequence region (Region length) are described as well as the name and sequence identifier of the ITR to ITR sequence (e.g., VOYHT13 (SEQ ID NO: 1364)).

TABLE 24
Sequence Regions in ITR to ITR Sequences

| | VOYHT13 | | VOYHT14 | |
|---|---|---|---|---|
| | (SEQ ID NO: 1364) | | (SEQ ID NO: 1365) | |
| Sequence | Region | Region | Region | Region |
| Regions | SEQ ID NO | length | SEQ ID NO | length |
| 5′ ITR | 1380 | 141 | 1380 | 141 |
| MCS | 1384 | 10 | 1384 | 10 |
| CMV | 1408 | 382 | 1408 | 382 |
| enhancer | | | | |
| CBA | 1410 | 260 | 1410 | 260 |
| Promoter | | | | |
| SV40 | 1417 | 172 | 1417 | 172 |
| Intron | | | | |
| Modulatory | 1262 | 163 | 1249 | 158 |
| Poly- | | | | |
| nucleotide | | | | |
| MCS | TCGAG | 5 | TCGAG | 5 |
| Rabbit | 1420 | 127 | 1420 | 127 |
| globin | | | | |
| PolyA | | | | |
| Signal | | | | |
| 3′ ITR | 1382 | 141 | 1382 | 141 |

[0545] In one embodiment, the AAV particle viral genome comprises SEQ ID NO: 1364 (VOYHT13) which comprises a 5′ inverted terminal repeat (ITR) sequence region and a 3′ ITR sequence region, two multiple cloning site (MCS) sequence regions, a CMV enhancer sequence region, a CBA promoter sequence region, an SV40 intron sequence region, a modulatory polynucleotide region, and a rabbit globin polyadenylation signal sequence region.

[0546] In one embodiment, the AAV particle viral genome comprises SEQ ID NO: 1365 (VOYHT14) which comprises a 5′ inverted terminal repeat (ITR) sequence region and a 3′ ITR sequence region, two multiple cloning site (MCS) sequence regions, a CMV enhancer sequence region, a CBA promoter sequence region, an SV40 intron sequence region, a modulatory polynucleotide region, and a rabbit globin polyadenylation signal sequence region.

[0547] In one embodiment, the AAV particle viral genome comprises a 5′ inverted terminal repeat (ITR) sequence region and a 3′ ITR sequence region, an enhancer sequence region, a promoter sequence region, an intron sequence region, a modulatory polynucleotide region, and a polyadenylation signal sequence region.

[0548] In one embodiment, the AAV particle viral genome comprises a 5′ inverted terminal repeat (ITR) sequence region and a 3′ ITR sequence region, a CMV enhancer sequence region, a CBA promoter sequence region, an SV40 intron sequence region, a modulatory polynucleotide region, and a rabbit globin polyadenylation signal sequence region. Non-limiting examples of ITR to ITR sequences for use in the AAV particles of the present invention having all of the sequence modules above are described in Tables 25-29. In Tables 25-29, the sequence identifier or sequence of the sequence region (Region SEQ ID NO) and the length of the sequence region (Region length) are described as well as the name and sequence identifier of the ITR to ITR sequence (e.g., VOYHT15 (SEQ ID NO: 1366)).

TABLE 25
Sequence Regions in ITR to ITR Sequences

| | VOYHT15 | | VOYHT16 | |
|---|---|---|---|---|
| | (SEQ ID NO: 1366) | | (SEQ ID NO: 1367) | |
| | Region | Region | Region | Region |
| Sequence Regions | SEQ ID NO | length | SEQ ID NO | length |
| 5′ ITR | 1381 | 105 | 1381 | 105 |
| CMV enhancer | 1408 | 382 | 1408 | 382 |
| CBA Promoter | 1410 | 260 | 1410 | 260 |
| SV40 Intron | 1417 | 172 | 1417 | 172 |
| Modulatory | 1259 | 260 | 1249 | 158 |
| Polynucleotide | | | | |
| Rabbit globin | 1420 | 127 | 1420 | 127 |
| PolyA Signal | | | | |
| 3′ ITR | 1383 | 130 | 1383 | 130 |

TABLE 26
Sequence Regions in ITR to ITR Sequences

| | VOYHT35 | | VOYHT36 | | VOYHT37 | | VOYHT38 | |
|---|---|---|---|---|---|---|---|---|
| | (SEQ ID NO: | | (SEQ ID NO: | | (SEQ ID NO: | | (SEQ ID NO: | |
| | 1388) | | 1426) | | 1427) | | 1428) | |
| | Region | | Region | | Region | | Region | |
| | SEQ | Region | SEQ | Region | SEQ ID | Region | SEQ ID | Region |
| Sequence Regions | ID NO | length | ID NO | length | NO | length | NO | length |
| 5′ ITR | 1381 | 105 | 1381 | 105 | 1381 | 105 | 1381 | 105 |
| CMV enhancer | 1408 | 382 | 1408 | 382 | 1408 | 382 | 1408 | 382 |
| CBA Promoter | 1410 | 260 | 1410 | 260 | 1410 | 260 | 1410 | 260 |
| SV40 Intron | 1417 | 172 | 1417 | 172 | 1417 | 172 | 1417 | 172 |
| Modulatory Polynucleotide | 1255 | 158 | 1248 | 158 | 1231 | 158 | 1219 | 158 |
| Rabbit globin PolyA Signal | 1420 | 127 | 1420 | 127 | 1420 | 127 | 1420 | 127 |
| 3′ ITR | 1383 | 130 | 1383 | 130 | 1383 | 130 | 1383 | 130 |

TABLE 27
Sequence Regions in ITR to ITR Sequences

| | VOYHT39 | | VOYHT40 | | VOYHT41 | | VOYHT42 | |
|---|---|---|---|---|---|---|---|---|
| | (SEQ ID NO: | | (SEQ ID NO: | | (SEQ ID NO: | | (SEQ ID NO: | |
| | 1429) | | 1430) | | 1431) | | 1432) | |
| | Region | | Region | | Region | | Region | |
| | SEQ | Region | SEQ | Region | SEQ ID | Region | SEQ ID | Region |
| Sequence Regions | ID NO | length | ID NO | length | NO | length | NO | length |
| 5′ ITR | 1381 | 105 | 1381 | 105 | 1381 | 105 | 1381 | 105 |
| CMV enhancer | 1408 | 382 | 1408 | 382 | 1408 | 387 | 1408 | 382 |
| CBA Promoter | 1410 | 260 | 1410 | 260 | 1410 | 260 | 1410 | 260 |
| SV40 Intron | 1417 | 172 | 1417 | 172 | 1417 | 172 | 1417 | 172 |
| Modulatory Polynucleotide | 1207 | 158 | 1250 | 158 | 1251 | 158 | 1252 | 158 |
| Rabbit globin PolyA Signal | 1420 | 127 | 1420 | 127 | 1420 | 127 | 1420 | 127 |
| 3′ ITR | 1383 | 130 | 1383 | 130 | 1383 | 130 | 1383 | 130 |

TABLE 28
Sequence Regions in ITR to ITR Sequences

| | VOYHT43 | | VOYHT44 | | VOYHT45 | | VOYHT46 | |
|---|---|---|---|---|---|---|---|---|
| | (SEQ ID NO: | | (SEQ ID NO: | | (SEQ ID NO: | | (SEQ ID NO: | |
| | 1433) | | 1434) | | 1435) | | 1436) | |
| | Region | | Region | | Region | | Region | |
| | SEQ | Region | SEQ | Region | SEQ ID | Region | SEQ ID | Region |
| Sequence Regions | ID NO | length | ID NO | length | NO | length | NO | length |
| 5′ ITR | 1381 | 105 | 1381 | 105 | 1381 | 105 | 1381 | 105 |
| CMV enhancer | 1408 | 382 | 1408 | 382 | 1408 | 387 | 1408 | 382 |
| CBA Promoter | 1410 | 260 | 1410 | 260 | 1410 | 260 | 1410 | 260 |
| SV40 Intron | 1417 | 172 | 1417 | 172 | 1417 | 172 | 1417 | 172 |
| Modulatory Polynucleotide | 1253 | 260 | 1194 | 260 | 1223 | 260 | 1211 | 260 |
| Rabbit globin PolyA Signal | 1420 | 127 | 1420 | 127 | 1420 | 127 | 1420 | 127 |
| 3′ ITR | 1383 | 130 | 1383 | 130 | 1383 | 130 | 1383 | 130 |

TABLE 29
Sequence Regions in ITR to ITR Sequences

| | VOYHT47 | | VOYHT48 | |
|---|---|---|---|---|
| | (SEQ ID NO: 1437) | | (SEQ ID NO: 1438) | |
| | Region | Region | Region | Region |
| Sequence Regions | SEQ ID NO | length | SEQ ID NO | length |
| 5′ ITR | 1381 | 105 | 1381 | 105 |
| CMV enhancer | 1408 | 382 | 1408 | 382 |
| CBA Promoter | 1410 | 260 | 1410 | 260 |
| SV40 Intron | 1417 | 172 | 1417 | 172 |
| Modulatory | 1262 | 163 | 1347 | 163 |
| Polynucleotide | | | | |
| Rabbit globin | 1420 | 127 | 1420 | 127 |
| PolyA Signal | | | | |
| 3′ ITR | 1383 | 130 | 1383 | 130 |

[0549] In one embodiment, the AAV particle viral genome comprises SEQ ID NO: 1366 (VOYHT15) which comprises a 5′ inverted terminal repeat (ITR) sequence region and a 3′ ITR sequence region, a CMV enhancer sequence region, a CBA promoter sequence region, an SV40 intron sequence region, a modulatory polynucleotide region, and a rabbit globin polyadenylation signal sequence region.

[0550] In one embodiment, the AAV particle viral genome comprises SEQ ID NO: 1367 (VOYHT16) which comprises a 5′ inverted terminal repeat (ITR) sequence region and a 3′ ITR sequence region, a CMV enhancer sequence region, a CBA promoter sequence region, an SV40 intron sequence region, a modulatory polynucleotide region, and a rabbit globin polyadenylation signal sequence region.

[0551] In one embodiment, the AAV particle viral genome comprises SEQ ID NO: 1388 (VOYHT35) which comprises a 5′ inverted terminal repeat (ITR) sequence region and a 3′ ITR sequence region, a CMV enhancer sequence region, a CBA promoter sequence region, an SV40 intron sequence region, a modulatory polynucleotide region, and a rabbit globin polyadenylation signal sequence region.

[0552] In one embodiment, the AAV particle viral genome comprises SEQ ID NO: 1426 (VOYHT36) which comprises a 5′ inverted terminal repeat (ITR) sequence region and a 3′ ITR sequence region, a CMV enhancer sequence region, a CBA promoter sequence region, an SV40 intron sequence region, a modulatory polynucleotide region, and a rabbit globin polyadenylation signal sequence region.

[0553] In one embodiment, the AAV particle viral genome comprises SEQ ID NO: 1427 (VOYHT37) which comprises a 5′ inverted terminal repeat (ITR) sequence region and a 3′ ITR sequence region, a CMV enhancer sequence region, a CBA promoter sequence region, an SV40 intron sequence region, a modulatory polynucleotide region, and a rabbit globin polyadenylation signal sequence region.

[0554] In one embodiment, the AAV particle viral genome comprises SEQ ID NO: 1428 (VOYHT38) which comprises a 5′ inverted terminal repeat (ITR) sequence region and a 3′ ITR sequence region, a CMV enhancer sequence region, a CBA promoter sequence region, an SV40 intron sequence region, a modulatory polynucleotide region, and a rabbit globin polyadenylation signal sequence region.

[0555] In one embodiment, the AAV particle viral genome comprises SEQ ID NO: 1429 (VOYHT39) which comprises a 5′ inverted terminal repeat (ITR) sequence region and a 3′ ITR sequence region, a CMV enhancer sequence region, a CBA promoter sequence region, an SV40 intron sequence region, a modulatory polynucleotide region, and a rabbit globin polyadenylation signal sequence region.

[0556] In one embodiment, the AAV particle viral genome comprises SEQ ID NO: 1430 (VOYHT40) which comprises a 5′ inverted terminal repeat (ITR) sequence region and a 3′ ITR sequence region, a CMV enhancer sequence region, a CBA promoter sequence region, an SV40 intron sequence region, a modulatory polynucleotide region, and a rabbit globin polyadenylation signal sequence region.

[0557] In one embodiment, the AAV particle viral genome comprises SEQ ID NO: 1431 (VOYHT41) which comprises a 5′ inverted terminal repeat (ITR) sequence region and a 3′ ITR sequence region, a CMV enhancer sequence region, a CBA promoter sequence region, an SV40 intron sequence region, a modulatory polynucleotide region, and a rabbit globin polyadenylation signal sequence region.

[0558] In one embodiment, the AAV particle viral genome comprises SEQ ID NO: 1432 (VOYHT42) which comprises a 5′ inverted terminal repeat (ITR) sequence region and a 3′ ITR sequence region, a CMV enhancer sequence region, a CBA promoter sequence region, an SV40 intron sequence region, a modulatory polynucleotide region, and a rabbit globin polyadenylation signal sequence region.

[0559] In one embodiment, the AAV particle viral genome comprises SEQ ID NO: 1433 (VOYHT43) which comprises a 5′ inverted terminal repeat (ITR) sequence region and a 3′ ITR sequence region, a CMV enhancer sequence region, a CBA promoter sequence region, an SV40 intron sequence region, a modulatory polynucleotide region, and a rabbit globin polyadenylation signal sequence region.

[0560] In one embodiment, the AAV particle viral genome comprises SEQ ID NO: 1434 (VOYHT44) which comprises a 5′ inverted terminal repeat (ITR) sequence region and a 3′ ITR sequence region, a CMV enhancer sequence region, a CBA promoter sequence region, an SV40 intron sequence region, a modulatory polynucleotide region, and a rabbit globin polyadenylation signal sequence region.

[0561] In one embodiment, the AAV particle viral genome comprises SEQ ID NO: 1435 (VOYHT45) which comprises a 5′ inverted terminal repeat (ITR) sequence region and a 3′ ITR sequence region, a CMV enhancer sequence region, a CBA promoter sequence region, an SV40 intron sequence region, a modulatory polynucleotide region, and a rabbit globin polyadenylation signal sequence region.

[0562] In one embodiment, the AAV particle viral genome comprises SEQ ID NO: 1436 (VOYHT46) which comprises a 5′ inverted terminal repeat (ITR) sequence region and a 3′ ITR sequence region, a CMV enhancer sequence region, a CBA promoter sequence region, an SV40 intron sequence region, a modulatory polynucleotide region, and a rabbit globin polyadenylation signal sequence region.

[0563] In one embodiment, the AAV particle viral genome comprises SEQ ID NO: 1437 (VOYHT47) which comprises a 5′ inverted terminal repeat (ITR) sequence region and a 3′ ITR sequence region, a CMV enhancer sequence region, a CBA promoter sequence region, an SV40 intron sequence region, a modulatory polynucleotide region, and a rabbit globin polyadenylation signal sequence region.

[0564] In one embodiment, the AAV particle viral genome comprises SEQ ID NO: 1438 (VOYHT48) which comprises a 5′ inverted terminal repeat (ITR) sequence region and a 3′ ITR sequence region, a CMV enhancer sequence region, a CBA promoter sequence region, an SV40 intron sequence region, a modulatory polynucleotide region, and a rabbit globin polyadenylation signal sequence region.

[0565] In one embodiment, the AAV particle viral genome comprises a 5′ inverted terminal repeat (ITR) sequence region and a 3′ ITR sequence region, a MCS sequence region, an enhancer sequence region, a promoter sequence region, two exon sequence regions, two intron sequence regions, a modulatory polynucleotide region, a polyadenylation signal sequence region, and a filler sequence region.

[0566] In one embodiment, the AAV particle viral genome comprises a 5′ inverted terminal repeat (ITR) sequence region and a 3′ ITR sequence region, a MCS sequence region, a CMV enhancer sequence region, a CMV promoter sequence region, two exon sequence regions (ie1 exon 1 and human beta globin (hbglobin) exon 3 or fragments thereof), two intron sequence regions (ie1 intron 1 and hbglobin intron 2 or fragments thereof), a modulatory polynucleotide region, a human growth hormone (hGH) polyadenylation signal sequence region, and a filler sequence region. A non-limiting example of an ITR to ITR sequence for use in the AAV particles of the present invention having all of the sequence modules above are described in Table 30. In Table 30, the sequence identifier or sequence of the sequence region (Region SEQ ID NO) and the length of the sequence region (Region length) are described as well as the name and sequence identifier of the ITR to ITR sequence (e.g., VOYHT17 (SEQ ID NO: 1368)).

TABLE 30
Sequence Regions in ITR to ITR Sequences

| | VOYHT17 (SEQ ID NO: 1368) | |
|---|---|---|
| Sequence Regions | Region SEQ ID NO | Region length |
| 5′ ITR | 1380 | 141 |
| MCS | 1387 | 18 |
| CMV enhancer | 1409 | 303 |
| CMV Promoter | 1412 | 204 |
| Ie1 exon1 | 1415 | 134 |
| Ie1 intron1 | 1418 | 32 |
| hbglobin intron2 | 1419 | 347 |
| hbglobin exon3 | 1416 | 53 |
| Modulatory | 1262 | 163 |
| Polynucleotide | | |
| hGH PolyA Signal | 1422 | 477 |
| Filler | 1406 | 2403 |
| 3′ ITR | 1382 | 141 |

[0567] In one embodiment, the AAV particle viral genome comprises SEQ ID NO: 1368 (VOYHT17) which comprises a 5′ inverted terminal repeat (ITR) sequence region and a 3′ ITR sequence region, a MCS sequence region, a CMV enhancer sequence region, a CMV promoter sequence region, two exon sequence regions (ie1 exon 1 and human beta globin (hbglobin) exon 3 or fragments thereof), two intron sequence regions (ie1 intron 1 and hbglobin intron 2 or fragments thereof), a modulatory polynucleotide region, a human growth hormone (hGH) polyadenylation signal sequence region, and a filler sequence region.

[0568] In one embodiment, the AAV particle viral genome comprises a 5′ inverted terminal repeat (ITR) sequence region and a 3′ ITR sequence region, a MCS sequence region, a CMV enhancer sequence region, a CMV promoter sequence region, two exon sequence regions (ie1 exon 1 and human beta globin (hbglobin) exon 3 or fragments thereof), two intron sequence regions (ie1 intron 1 and hbglobin intron 2 or fragments thereof), a modulatory polynucleotide region, a human growth hormone (hGH) polyadenylation signal sequence region, and a filler sequence region. A non-limiting example of an ITR to ITR sequence for use in the AAV particles of the present invention having all of the sequence modules above are described in Table 31. In Table 31, the sequence identifier or sequence of the sequence region (Region SEQ ID NO) and the length of the sequence region (Region length) are described as well as the name and sequence identifier of the ITR to ITR sequence (e.g., VOYHT19 (SEQ ID NO: 1370)).

TABLE 31
Sequence Regions in ITR to ITR Sequences

| | VOYHT19 (SEQ ID NO: 1370) | |
|---|---|---|
| Sequence Regions | Region SEQ ID NO | Region length |
| 5′ ITR | 1380 | 141 |
| Filler | 1392 | 2405 |
| CMV enhancer | 1409 | 303 |
| CMV Promoter | 1412 | 204 |
| Ie1 exon1 | 1415 | 134 |
| Ie1 intron1 | 1418 | 32 |
| hbglobin intron2 | 1419 | 347 |
| hbglobin exon3 | 1416 | 53 |
| Modulatory | 1262 | 163 |
| Polynucleotide | | |
| hGH PolyA Signal | 1389 | 14 |
| MCS | 1422 | 477 |
| 3′ ITR | 1382 | 141 |

[0569] In one embodiment, the AAV particle viral genome comprises SEQ ID NO: 1370 (VOYHT19) which comprises a 5′ inverted terminal repeat (ITR) sequence region and a 3′ ITR sequence region, a MCS sequence region, a CMV enhancer sequence region, a CMV promoter sequence region, two exon sequence regions (ie1 exon 1 and human beta globin (hbglobin) exon 3 or fragments thereof), two intron sequence regions (ie1 intron 1 and hbglobin exon 3 or fragments thereof), a modulatory polynucleotide region, a human growth hormone (hGH) polyadenylation signal sequence region, and a filler sequence region.

[0570] In one embodiment, the AAV particle viral genome comprises a 5′ inverted terminal repeat (ITR) sequence region and a 3′ ITR sequence region, two MCS sequence regions, an enhancer sequence region, a promoter sequence region, two exon sequence regions, two intron sequence regions, a modulatory polynucleotide region, a polyadenylation signal sequence region, and a filler sequence region.

[0571] In one embodiment, the AAV particle viral genome comprises a 5′ inverted terminal repeat (ITR) sequence region and a 3′ ITR sequence region, two MCS sequence regions, a CMV enhancer sequence region, a CMV promoter sequence region, two exon sequence regions (ie1 exon 1 and human beta globin (hbglobin) exon 3 or fragments thereof), two intron sequence regions (ie1 intron 1 and hbglobin exon 3 or fragments thereof), a modulatory polynucleotide region, a human growth hormone (hGH) polyadenylation signal sequence region, and a filler sequence region. A non-limiting example of an ITR to ITR sequence for use in the AAV particles of the present invention having all of the sequence modules above are described in Table 32. In Table 32, the sequence identifier or sequence of the sequence region (Region SEQ ID NO) and the length of the sequence region (Region length) are described as well as the name and sequence identifier of the ITR to ITR sequence (e.g., VOYHT18 (SEQ ID NO: 1369)).

TABLE 32
Sequence Regions in ITR to ITR Sequences

| | VOYHT18 (SEQ ID NO: 1369) | |
|---|---|---|
| Sequence Regions | Region SEQ ID NO | Region length |
| 5′ ITR | 1380 | 141 |
| MCS | 1387 | 18 |
| CMV enhancer | 1409 | 303 |
| CMV Promoter | 1412 | 204 |
| Ie1 exon1 | 1415 | 134 |
| Ie1 intron1 | 1418 | 32 |
| hbglobin intron2 | 1419 | 347 |
| hbglobin exon3 | 1416 | 53 |
| Modulatory | 1262 | 163 |
| Polynucleotide | | |
| MCS | 1389 | 14 |
| hGH PolyA Signal | 1422 | 477 |
| Filler | 1407 | 105 |
| 3′ ITR | 1382 | 141 |

[0572] In one embodiment, the AAV particle viral genome comprises SEQ ID NO: 1369 (VOYHT18) which comprises a 5′ inverted terminal repeat (ITR) sequence region and a 3′ ITR sequence region, two MCS sequence regions, a CMV enhancer sequence region, a CMV promoter sequence region, two exon sequence regions (ie1 exon 1 and human beta globin (hbglobin) exon 3 or fragments thereof), two intron sequence regions (ie1 intron 1 and hbglobin exon 3 or fragments thereof), a modulatory polynucleotide region, a human growth hormone (hGH) polyadenylation signal sequence region, and a filler sequence region.

[0573] In one embodiment, the AAV particle viral genome comprises a 5′ inverted terminal repeat (ITR) sequence region and a 3′ ITR sequence region, two MCS sequence regions, a CMV enhancer sequence region, a CMV promoter sequence region, two exon sequence regions (ie1 exon 1 and human beta globin (hbglobin) exon 3 or fragments thereof), two intron sequence regions (ie1 intron 1 and hbglobin exon 3 or fragments thereof), a modulatory polynucleotide region, a human growth hormone (hGH) polyadenylation signal sequence region, and a filler sequence region. A non-limiting example of an ITR to ITR sequence for use in the AAV particles of the present invention having all of the sequence modules above are described in Table 33. In Table 33, the sequence identifier or sequence of the sequence region (Region SEQ ID NO) and the length of the sequence region (Region length) are described as well as the name and sequence identifier of the ITR to ITR sequence (e.g., VOYHT20 (SEQ ID NO: 1371)).

TABLE 33
Sequence Regions in ITR to ITR Sequences

| | VOYHT20 (SEQ ID NO: 1371) | |
|---|---|---|
| Sequence Regions | Region SEQ ID NO | Region length |
| 5′ ITR | 1380 | 141 |
| MCS | 1385 | 121 |
| Filler | 1394 | 103 |
| CMV enhancer | 1409 | 303 |
| CMV Promoter | 1412 | 204 |
| Ie1 exon1 | 1415 | 134 |
| Ie1 intron1 | 1418 | 32 |
| hbglobin intron2 | 1419 | 347 |
| hbglobin exon3 | 1416 | 53 |
| Modulatory | 1262 | 163 |
| Polynucleotide | | |
| MCS | 1389 | 14 |
| hGH PolyA Signal | 1422 | 477 |
| 3′ ITR | 1382 | 141 |

[0574] In one embodiment, the AAV particle viral genome comprises SEQ ID NO: 1371 (VOYHT20) which comprises a 5′ inverted terminal repeat (ITR) sequence region and a 3′ ITR sequence region, two MCS sequence regions, a CMV enhancer sequence region, a CMV promoter sequence region, two exon sequence regions (ie1 exon 1 and human beta globin (hbglobin) exon 3 or fragments thereof), two intron sequence regions (ie1 intron 1 and hbglobin exon 3 or fragments thereof), a modulatory polynucleotide region, a human growth hormone (hGH) polyadenylation signal sequence region, and a filler sequence region.

[0575] In one embodiment, the AAV particle viral genome comprises a 5′ inverted terminal repeat (ITR) sequence region and a 3′ ITR sequence region, two MCS sequence regions, a CMV enhancer sequence region, a CMV promoter sequence region, two exon sequence regions (ie1 exon 1 and human beta globin (hbglobin) exon 3 or fragments thereof), two intron sequence regions (ie1 intron 1 and hbglobin exon 3 or fragments thereof), a modulatory polynucleotide region, a human growth hormone (hGH) polyadenylation signal sequence region, and a filler sequence region. Non-limiting examples of ITR to ITR sequences for use in the AAV particles of the present invention having all of the sequence modules above are described in Table 34. In Table 34, the sequence identifier or sequence of the sequence region (Region SEQ ID NO) and the length of the sequence region (Region length) are described as well as the name and sequence identifier of the ITR to ITR sequence (e.g., VOYHT21 (SEQ ID NO: 1372)).

TABLE 34
Sequence Regions in ITR to ITR Sequences

| | VOYHT21 | | VOYHT22 | |
|---|---|---|---|---|
| | (SEQ ID NO: 1372) | | (SEQ ID NO: 1373) | |
| | Region | Region | Region | Region |
| Sequence Regions | SEQ ID NO | length | SEQ ID NO | length |
| 5′ ITR | 1380 | 141 | 1380 | 141 |
| MCS | 1387 | 18 | 1387 | 18 |
| CMV enhancer | 1409 | 303 | 1409 | 303 |
| CMV Promoter | 1412 | 204 | 1412 | 204 |
| Ie1 exon1 | 1415 | 134 | 1415 | 134 |
| Ie1 intron1 | 1418 | 32 | 1418 | 32 |
| Filler | 1398 | 2395 | 1399 | 97 |
| hbglobin intron2 | 1419 | 347 | 1419 | 347 |
| hbglobin exon3 | 1416 | 53 | 1416 | 53 |
| Modulatory | 1262 | 163 | 1262 | 163 |
| Polynucleotide | | | | |
| MCS | 1389 | 14 | 1389 | 14 |
| hGH PolyA Signal | 1422 | 477 | 1422 | 477 |
| 3′ ITR | 1382 | 141 | 1382 | 141 |

[0576] In one embodiment, the AAV particle viral genome comprises SEQ ID NO: 1372 (VOYHT21) which comprises a 5′ inverted terminal repeat (ITR) sequence region and a 3′ ITR sequence region, two MCS sequence regions, a CMV enhancer sequence region, a CMV promoter sequence region, two exon sequence regions (ie1 exon 1 and human beta globin (hbglobin) exon 3 or fragments thereof), two intron sequence regions (ie1 intron 1 and hbglobin exon 3 or fragments thereof), a modulatory polynucleotide region, a human growth hormone (hGH) polyadenylation signal sequence region, and a filler sequence region.

[0577] In one embodiment, the AAV particle viral genome comprises SEQ ID NO: 1373 (VOYHT22) which comprises a 5′ inverted terminal repeat (ITR) sequence region and a 3′ ITR sequence region, two MCS sequence regions, a CMV enhancer sequence region, a CMV promoter sequence region, two exon sequence regions (ie1 exon 1 and human beta globin (hbglobin) exon 3 or fragments thereof), two intron sequence regions (ie1 intron 1 and hbglobin exon 3 or fragments thereof), a modulatory polynucleotide region, a human growth hormone (hGH) polyadenylation signal sequence region, and a filler sequence region.

[0578] In one embodiment, the AAV particle viral genome comprises a 5′ inverted terminal repeat (ITR) sequence region and a 3′ ITR sequence region, a MCS sequence region, an enhancer sequence region, a promoter sequence region, two exon sequence regions, two intron sequence regions, a modulatory polynucleotide region, a polyadenylation signal sequence region, and two filler sequence regions.

[0579] In one embodiment, the AAV particle viral genome comprises a 5′ inverted terminal repeat (ITR) sequence region and a 3′ ITR sequence region, a MCS sequence region, a CMV enhancer sequence region, a CMV promoter sequence region, two exon sequence regions (ie1 exon 1 and human beta globin (hbglobin) exon 3 or fragments thereof), two intron sequence regions (ie1 intron 1 and hbglobin exon 3 or fragments thereof), a modulatory polynucleotide region, a human growth hormone (hGH) polyadenylation signal sequence region, and two filler sequence regions. A non-limiting example of an ITR to ITR sequence for use in the AAV particles of the present invention having all of the sequence modules above are described in Table 35. In Table 35, the sequence identifier or sequence of the sequence region (Region SEQ ID NO) and the length of the sequence region (Region length) are described as well as the name and sequence identifier of the ITR to ITR sequence (e.g., VOYHT23 (SEQ ID NO: 1374)).

TABLE 35
Sequence Regions in ITR to ITR Sequences

| | VOYHT23 (SEQ ID NO: 1374) | |
|---|---|---|
| | Region SEQ | Region |
| Sequence Regions | ID NO | length |
| 5′ ITR | 1380 | 141 |
| Filler | 1393 | 1203 |
| CMV enhancer | 1409 | 303 |
| CMV Promoter | 1412 | 204 |
| Ie1 exon1 | 1415 | 134 |
| Ie1 intron1 | 1418 | 32 |
| hbglobin intron2 | 1419 | 347 |
| hbglobin exon3 | 1416 | 53 |
| Modulatory | 1262 | 163 |
| Polynucleotide | | |
| MCS | 1389 | 14 |
| hGH PolyA Signal | 1422 | 477 |
| Filler | 1402 | 1209 |
| 3′ ITR | 1382 | 141 |

[0580] In one embodiment, the AAV particle viral genome comprises SEQ ID NO: 1374 (VOYHT23) which comprises a 5′ inverted terminal repeat (ITR) sequence region and a 3′ ITR sequence region, a MCS sequence region, a CMV enhancer sequence region, a CMV promoter sequence region, two exon sequence regions (ie1 exon 1 and human beta globin (hbglobin) exon 3 or fragments thereof), two intron sequence regions (ie1 intron 1 and hbglobin exon 3 or fragments thereof), a modulatory polynucleotide region, a human growth hormone (hGH) polyadenylation signal sequence region, and two filler sequence regions.

[0581] In one embodiment, the AAV particle viral genome comprises a 5′ inverted terminal repeat (ITR) sequence region and a 3′ ITR sequence region, two MCS sequence regions, an enhancer sequence region, a promoter sequence region, two exon sequence regions, two intron sequence regions, a modulatory polynucleotide region, a polyadenylation signal sequence region, and two filler sequence regions.

[0582] In one embodiment, the AAV particle viral genome comprises a 5′ inverted terminal repeat (ITR) sequence region and a 3′ ITR sequence region, two MCS sequence regions, a CMV enhancer sequence region, a CMV promoter sequence region, two exon sequence regions (ie1 exon 1 and human beta globin (hbglobin) exon 3 or fragments thereof), two intron sequence regions (ie1 intron 1 and hbglobin exon 3 or fragments thereof), a modulatory polynucleotide region, a human growth hormone (hGH) polyadenylation signal sequence region, and two filler sequence regions. A non-limiting example of an ITR to ITR sequence for use in the AAV particles of the present invention having all of the sequence modules above are described in Table 36. In Table 36, the sequence identifier or sequence of the sequence region (Region SEQ ID NO) and the length of the sequence region (Region length) are described as well as the name and sequence identifier of the ITR to ITR sequence (e.g., VOYHT24 (SEQ ID NO: 1375)).

TABLE 36
Sequence Regions in ITR to ITR Sequences

| | VOYHT24 (SEQ ID NO: 1375) | |
|---|---|---|
| | Region SEQ | Region |
| Sequence Regions | ID NO | length |
| 5′ ITR | 1380 | 141 |
| MCS | 1386 | 73 |
| Filler | 1395 | 55 |
| CMV enhancer | 1409 | 303 |
| CMV Promoter | 1412 | 204 |
| Ie1 exon1 | 1415 | 134 |
| Ie1 intron1 | 1418 | 32 |
| hbglobin intron2 | 1419 | 347 |
| hbglobin exon3 | 1416 | 53 |
| Modulatory | 1262 | 163 |
| Polynucleotide | | |
| MCS | 1389 | 14 |
| hGH PolyA Signal | 1423 | 476 |
| Filler | 1403 | 56 |
| 3′ ITR | 1382 | 141 |

[0583] In one embodiment, the AAV particle viral genome comprises SEQ ID NO: 1375 (VOYHT24) which comprises a 5′ inverted terminal repeat (ITR) sequence region and a 3′ ITR sequence region, two MCS sequence regions, a CMV enhancer sequence region, a CMV promoter sequence region, two exon sequence regions (ie1 exon 1 and human beta globin (hbglobin) exon 3 or fragments thereof), two intron sequence regions (ie1 intron 1 and hbglobin exon 3 or fragments thereof), a modulatory polynucleotide region, a human growth hormone (hGH) polyadenylation signal sequence region, and two filler sequence regions.

[0584] In one embodiment, the AAV particle viral genome comprises a 5′ inverted terminal repeat (ITR) sequence region and a 3′ ITR sequence region, two MCS sequence regions, an enhancer sequence region, a promoter sequence region, two exon sequence regions, two intron sequence regions, a modulatory polynucleotide region, and a polyadenylation signal sequence region.

[0585] In one embodiment, the AAV particle viral genome comprises a 5′ inverted terminal repeat (ITR) sequence region and a 3′ ITR sequence region, two MCS sequence regions, a CMV enhancer sequence region, a CMV promoter sequence region, two exon sequence regions (ie1 exon 1 and human beta globin (hbglobin) exon 3 or fragments thereof), two intron sequence regions (ie1 intron 1 and hbglobin exon 3 or fragments thereof), a modulatory polynucleotide region, and a human growth hormone (hGH) polyadenylation signal sequence region. Non-limiting examples of an ITR to ITR sequences for use in the AAV particles of the present invention having all of the sequence modules above are described in Table 37. In Table 37, the sequence identifier or sequence of the sequence region (Region SEQ ID NO) and the length of the sequence region (Region length) are described as well as the name and sequence identifier of the ITR to ITR sequence (e.g., VOYHT25 (SEQ ID NO: 1376)).

TABLE 37
Sequence Regions in ITR to ITR Sequences

| | VOYHT25 | | VOYHT26 | |
|---|---|---|---|---|
| | (SEQ ID NO: 1376) | | (SEQ ID NO: 1377) | |
| | Region | Region | Region | Region |
| Sequence Regions | SEQ ID NO | length | SEQ ID NO | length |
| 5′ ITR | 1380 | 141 | 1380 | 141 |
| MCS | 1387 | 18 | 1387 | 18 |
| CMV enhancer | 1409 | 303 | 1409 | 303 |
| CMV Promoter | 1412 | 204 | 1412 | 204 |
| Ie1 exon1 | 1415 | 134 | 1415 | 134 |
| Ie1 intron1 | 1418 | 32 | 1418 | 32 |
| hbglobin intron2 | 1419 | 347 | 1419 | 347 |
| hbglobin exon3 | 1416 | 53 | 1416 | 53 |
| Modulatory | 1249 | 158 | 1262 | 163 |
| Polynucleotide | | | | |
| MCS | 1389 | 14 | 1389 | 14 |
| hGH PolyA Signal | 1422 | 477 | 1422 | 477 |
| 3′ ITR | 1382 | 141 | 1382 | 141 |

[0586] In one embodiment, the AAV particle viral genome comprises SEQ ID NO: 1376 (VOYHT25) which comprises a 5′ inverted terminal repeat (ITR) sequence region and a 3′ ITR sequence region, two MCS sequence regions, a CMV enhancer sequence region, a CMV promoter sequence region, two exon sequence regions (ie1 exon 1 and human beta globin (hbglobin) exon 3 or fragments thereof), two intron sequence regions (ie1 intron 1 and hbglobin exon 3 or fragments thereof), a modulatory polynucleotide region, and a human growth hormone (hGH) polyadenylation signal sequence region.

[0587] In one embodiment, the AAV particle viral genome comprises SEQ ID NO: 1377 (VOYHT26) which comprises a 5′ inverted terminal repeat (ITR) sequence region and a 3′ ITR sequence region, two MCS sequence regions, a CMV enhancer sequence region, a CMV promoter sequence region, two exon sequence regions (ie1 exon 1 and human beta globin (hbglobin) exon 3 or fragments thereof), two intron sequence regions (ie1 intron 1 and hbglobin exon 3 or fragments thereof), a modulatory polynucleotide region, and a human growth hormone (hGH) polyadenylation signal sequence region.

[0588] In one embodiment, the AAV particle viral genome comprises a 5′ inverted terminal repeat (ITR) sequence region and a 3′ ITR sequence region, a promoter sequence region, and a modulatory polynucleotide region.

[0589] In one embodiment, the AAV particle viral genome comprises a 5′ inverted terminal repeat (ITR) sequence region and a 3′ ITR sequence region, an H1 promoter sequence region, and a modulatory polynucleotide region. Non-limiting examples of an ITR to ITR sequences for use in the AAV particles of the present invention having all of the sequence modules above are described in Table 38. In Table 38, the sequence identifier or sequence of the sequence region (Region SEQ ID NO) and the length of the sequence region (Region length) are described as well as the name and sequence identifier of the ITR to ITR sequence (e.g., VOYHT27 (SEQ ID NO: 1378)).

TABLE 38
Sequence Regions in ITR to ITR Sequences

| | VOYHT27 | | VOYHT28 | |
|---|---|---|---|---|
| | (SEQ ID NO: 1378) | | (SEQ ID NO: 1379) | |
| | Region | Region | Region | Region |
| Sequence Regions | SEQ ID NO | length | SEQ ID NO | length |
| 5′ ITR | 1381 | 105 | 1381 | 105 |
| H1 Promoter | 1413 | 219 | 1413 | 219 |
| Modulatory | 1259 | 260 | 1249 | 158 |
| Polynucleotide | | | | |
| 3′ ITR | 1383 | 130 | 1383 | 130 |

[0590] In one embodiment, the AAV particle viral genome comprises SEQ ID NO: 1378 (VOYHT27) which comprises a 5′ inverted terminal repeat (ITR) sequence region and a 3′ ITR sequence region, an H1 promoter sequence region, and a modulatory polynucleotide region.

[0591] In one embodiment, the AAV particle viral genome comprises SEQ ID NO: 1379 (VOYHT28) which comprises a 5′ inverted terminal repeat (ITR) sequence region and a 3′ ITR sequence region, an H1 promoter sequence region, and a modulatory polynucleotide region.

[0592] In one embodiment, the AAV particle viral genome comprises one or two promoter sequence regions, a modulatory polynucleotide sequence region, and a bovine growth hormone (bGH) polyadenylation signal sequence region.

[0593] In one embodiment, the AAV particle viral genome comprises a two promoter sequence regions, a modulatory polynucleotide region, and a polyadenylation signal sequence region.

[0594] In one embodiment, the AAV particle viral genome comprises a CMV and T7 promoter sequence region, a modulatory polynucleotide region, and a bGH polyadenylation signal sequence region. Non-limiting examples of sequences for use in the AAV particles of the present invention having all of the sequence modules above are described in Table 39. In Table 39, the sequence identifier or sequence of the sequence region (Region SEQ ID NO) and the length of the sequence region (Region length) are described as well as the name of the sequence (e.g., VOYHT29).

TABLE 39
Sequence Regions

| | VOYHT29 | | VOYHT30 | | VOYHT31 | | VOYHT32 | |
|---|---|---|---|---|---|---|---|---|
| | Region | | Region | | Region | | Region | |
| Sequence | SEQ ID | Region | SEQ ID | Region | SEQ ID | Region | SEQ ID | Region |
| Regions | NO | length | NO | length | NO | length | NO | length |
| CMV | 1411 | 588 | 1411 | 588 | 1411 | 588 | 1411 | 588 |
| Promoter | | | | | | | | |
| T7 promoter | 1414 | 17 | 1414 | 17 | 1414 | 17 | 1414 | 17 |
| Modulatory | 1249 | 158 | 1259 | 260 | 1255 | 158 | 1253 | 260 |
| Poly nucleotide | | | | | | | | |
| bGH PolyA | 1421 | 225 | 1421 | 225 | 1421 | 225 | 1421 | 225 |
| Signal | | | | | | | | |

[0595] In one embodiment, the AAV particle viral genome comprises a CMV promoter sequence region (SEQ ID NO: 1411), a T7 promoter sequence region (SEQ ID NO: 1414), a modulatory polynucleotide sequence region (SEQ ID NO: 1249), and a bGH polyadenylation signal sequence region (SEQ ID NO: 1421).

[0596] In one embodiment, the AAV particle viral genome comprises a CMV promoter sequence region (SEQ ID NO: 1411), a T7 promoter sequence region (SEQ ID NO: 1414), a modulatory polynucleotide sequence region (SEQ ID NO: 1259), and a bGH polyadenylation signal sequence region (SEQ ID NO: 1421).

[0597] In one embodiment, the AAV particle viral genome comprises a CMV promoter sequence region (SEQ ID NO: 1411), a T7 promoter sequence region (SEQ ID NO: 1414), a modulatory polynucleotide sequence region (SEQ ID NO: 1255), and a bGH polyadenylation signal sequence region (SEQ ID NO: 1421).

[0598] In one embodiment, the AAV particle viral genome comprises a CMV promoter sequence region (SEQ ID NO: 1411), a T7 promoter sequence region (SEQ ID NO: 1414), a modulatory polynucleotide sequence region (SEQ ID NO: 1253), and a bGH polyadenylation signal sequence region (SEQ ID NO: 1421).

[0599] In one embodiment, the AAV particle viral genome comprises one or two promoter sequence regions, and a modulatory polynucleotide sequence region.

[0600] In one embodiment, the AAV particle viral genome comprises a CMV and T7 promoter sequence region, and a modulatory polynucleotide region. Non-limiting examples of sequences for use in the AAV particles of the present invention having all of the sequence modules above are described in Table 40. In Table 40, the sequence identifier or sequence of the sequence region (Region SEQ ID NO) and the length of the sequence region (Region length) are described as well as the name of the sequence (e.g., VOYHT33).

TABLE 40
Sequence Regions

| | VOYHT33 | | VOYHT34 | |
|---|---|---|---|---|
| | Region | Region | Region | Region |
| Sequence Regions | SEQ ID NO | length | SEQ ID NO | length |
| CMV Promoter | GTTG | 4 | — | — |
| H1 Promoter | 1413 | 219 | 1413 | 219 |
| Modulatory | 1249 | 158 | 1259 | 260 |
| Polynucleotide | | | | |

[0601] In one embodiment, the AAV particle viral genome comprises a CMV promoter sequence region (Sequence: GTTG), a H1 promoter sequence region (SEQ ID NO: 1413), and a modulatory polynucleotide sequence region (SEQ ID NO: 1249).

[0602] In one embodiment, the AAV particle viral genome comprises a H1 promoter sequence region (SEQ ID NO: 1413), and a modulatory polynucleotide sequence region (SEQ ID NO: 1259).

[0603] AAV particles may be modified to enhance the efficiency of delivery. Such modified AAV particles comprising the nucleic acid sequence encoding the siRNA molecules of the present invention can be packaged efficiently and can be used to successfully infect the target cells at high frequency and with minimal toxicity.

[0604] In some embodiments, the AAV particle comprising a nucleic acid sequence encoding the siRNA molecules of the present invention may be a human serotype AAV particle. Such human AAV particle may be derived from any known serotype, e.g., from any one of serotypes AAV1-AAV11. As non-limiting examples, AAV particles may be vectors comprising an AAV1-derived genome in an AAV1-derived capsid; vectors comprising an AAV2-derived genome in an AAV2-derived capsid; vectors comprising an AAV4-derived genome in an AAV4 derived capsid; vectors comprising an AAV6-derived genome in an AAV6 derived capsid or vectors comprising an AAV9-derived genome in an AAV9 derived capsid.

[0605] In other embodiments, the AAV particle comprising a nucleic acid sequence for encoding siRNA molecules of the present invention may be a pseudotyped hybrid or chimeric AAV particle which contains sequences and/or components originating from at least two different AAV serotypes. Pseudotyped AAV particles may be vectors comprising an AAV genome derived from one AAV serotype and a capsid protein derived at least in part from a different AAV serotype. As non-limiting examples, such pseudotyped AAV particles may be vectors comprising an AAV2-derived genome in an AAV1-derived capsid; or vectors comprising an AAV2-derived genome in an AAV6-derived capsid; or vectors comprising an AAV2-derived genome in an AAV4-derived capsid; or an AAV2-derived genome in an AAV9-derived capsid. In like fashion, the present invention contemplates any hybrid or chimeric AAV particle.

[0606] In other embodiments, AAV particles comprising a nucleic acid sequence encoding the siRNA molecules of the present invention may be used to deliver siRNA molecules to the central nervous system (e.g., U.S. Pat. No. 6,180,613; the contents of which is herein incorporated by reference in its entirety).

[0607] In some aspects, the AAV particles comprising a nucleic acid sequence encoding the siRNA molecules of the present invention may further comprise a modified capsid including peptides from non-viral origin. In other aspects, the AAV particle may contain a CNS specific chimeric capsid to facilitate the delivery of encoded siRNA duplexes into the brain and the spinal cord. For example, an alignment of cap nucleotide sequences from AAV variants exhibiting CNS tropism may be constructed to identify variable region (VR) sequence and structure.

### Viral Production

[0608] The present disclosure provides a method for the generation of parvoviral particles, e.g. AAV particles, by viral genome replication in a viral replication cell comprising contacting the viral replication cell with an AAV polynucleotide or AAV genome.

[0609] The present disclosure provides a method for producing an AAV particle having enhanced (increased, improved) transduction efficiency comprising the steps of: 1) co-transfecting competent bacterial cells with a bacmid vector and either a viral construct vector and/or AAV payload construct vector, 2) isolating the resultant viral construct expression vector and AAV payload construct expression vector and separately transfecting viral replication cells, 3) isolating and purifying resultant payload and viral construct particles comprising viral construct expression vector or AAV payload construct expression vector, 4) co-infecting a viral replication cell with both the AAV payload and viral construct particles comprising viral construct expression vector or AAV payload construct expression vector, 5) harvesting and purifying the viral particle comprising a parvoviral genome.

[0610] In one embodiment, the present invention provides a method for producing an AAV particle comprising the steps of 1) simultaneously co-transfecting mammalian cells, such as, but not limited to HEK293 cells, with a payload region, a construct expressing rep and cap genes and a helper construct, 2) harvesting and purifying the AAV particle comprising a viral genome.

### Cells

[0611] The present disclosure provides a cell comprising an AAV polynucleotide and/or AAV genome.

[0612] Viral production disclosed herein describes processes and methods for producing AAV particles that contact a target cell to deliver a payload construct, e.g. a recombinant viral construct, which comprises a polynucleotide sequence encoding a payload molecule.

[0613] In one embodiment, the AAV particles may be produced in a viral replication cell that comprises an insect cell.

[0614] Growing conditions for insect cells in culture, and production of heterologous products in insect cells in culture are well-known in the art, see U.S. Pat. No. 6,204,059, the contents of which are herein incorporated by reference in their entirety.

[0615] Any insect cell which allows for replication of parvovirus and which can be maintained in culture can be used in accordance with the present invention. Cell lines may be used from Spodoptera frugiperda, including, but not limited to the Sf9 or Sf21 cell lines, Drosophila cell lines, or mosquito cell lines, such as Aedes albopictus derived cell lines. Use of insect cells for expression of heterologous proteins is well documented, as are methods of introducing nucleic acids, such as vectors, e.g., insect-cell compatible vectors, into such cells and methods of maintaining such cells in culture. See, for example, Methods in Molecular Biology, ed. Richard, Humana Press, N J (1995); O'Reilly et al., Baculovirus Expression Vectors, A Laboratory Manual, Oxford Univ. Press (1994); Samulski et al., J Vir. 63:3822-8 (1989); Kajigaya et al., Proc. Nat'l. Acad. Sci. USA 88: 4646-50 (1991); Ruffing et al., J. Vir. 66:6922-30 (1992); Kimbauer et al., Vir. 219:37-44 (1996); Zhao et al., Vir. 272:382-93 (2000); and Samulski et al., U.S. Pat. No. 6,204,059, the contents of each of which is herein incorporated by reference in its entirety.

[0616] The viral replication cell may be selected from any biological organism, including prokaryotic (e.g., bacterial) cells, and eukaryotic cells, including, insect cells, yeast cells and mammalian cells. Viral replication cells may comprise mammalian cells such as A549, WEH1, 3T3, 10T1/2, BHK, MDCK, COS 1, COS 7, BSC 1, BSC 40, BMT 10, VERO. W138, HeLa, HEK293, Saos, C2C12, L cells, HT1080, HepG2 and primary fibroblast, hepatocyte and myoblast cells derived from mammals. Viral replication cells comprise cells derived from mammalian species including, but not limited to, human, monkey, mouse, rat, rabbit, and hamster or cell type, including but not limited to fibroblast, hepatocyte, tumor cell, cell line transformed cell, etc.

### Small Scale Production of AAV Particles

[0617] Viral production disclosed herein describes processes and methods for producing AAV particles that contact a target cell to deliver a payload, e.g. a recombinant viral construct, which comprises a polynucleotide sequence encoding a payload.

[0618] In one embodiment, the AAV particles may be produced in a viral replication cell that comprises a mammalian cell.

[0619] Viral replication cells commonly used for production of recombinant AAV particles include, but are not limited to 293 cells, COS cells, HeLa cells, KB cells, and other mammalian cell lines as described in U.S. Pat. Nos. 6,156,303, 5,387,484, 5,741,683, 5,691,176, and 5,688,676; U.S. patent application 2002/0081721, and International Patent Applications WO 00/47757, WO 00/24916, and WO 96/17947, the contents of each of which are herein incorporated by reference in their entireties.

[0620] In one embodiment, AAV particles are produced in mammalian-cells wherein all three VP proteins are expressed at a stoichiometry approaching 1:1:10 (VP1:VP2:VP3). The regulatory mechanisms that allow this controlled level of expression include the production of two mRNAs, one for VP1, and the other for VP2 and VP3, produced by differential splicing.

[0621] In another embodiment, AAV particles are produced in mammalian cells using a triple transfection method wherein a payload construct, parvoviral Rep and parvoviral Cap and a helper construct are comprised within three different constructs. The triple transfection method of the three components of AAV particle production may be utilized to produce small lots of virus for assays including transduction efficiency, target tissue (tropism) evaluation, and stability.

### Baculovirus

[0622] Particle production disclosed herein describes processes and methods for producing AAV particles that contact a target cell to deliver a payload construct which comprises a polynucleotide sequence encoding a payload.

[0623] Briefly, the viral construct vector and the AAV payload construct vector are each incorporated by a transposon donor/acceptor system into a bacmid, also known as a baculovirus plasmid, by standard molecular biology techniques known and performed by a person skilled in the art. Transfection of separate viral replication cell populations produces two baculoviruses, one that comprises the viral construct expression vector, and another that comprises the AAV payload construct expression vector. The two baculoviruses may be used to infect a single viral replication cell population for production of AAV particles.

[0624] Baculovirus expression vectors for producing viral particles in insect cells, including but not limited to Spodoptera frugiperda (Sf9) cells, provide high titers of viral particle product. Recombinant baculovirus encoding the viral construct expression vector and AAV payload construct expression vector initiates a productive infection of viral replicating cells. Infectious baculovirus particles released from the primary infection secondarily infect additional cells in the culture, exponentially infecting the entire cell culture population in a number of infection cycles that is a function of the initial multiplicity of infection, see Urabe, M. et al., J Virol. 2006 February; 80 (4):1874-85, the contents of which are herein incorporated by reference in their entirety.

[0625] Production of AAV particles with baculovirus in an insect cell system may address known baculovirus genetic and physical instability. In one embodiment, the production system addresses baculovirus instability over multiple passages by utilizing a titerless infected-cells preservation and scale-up system. Small scale seed cultures of viral producing cells are transfected with viral expression constructs encoding the structural, non-structural, components of the viral particle. Baculovirus-infected viral producing cells are harvested into aliquots that may be cryopreserved in liquid nitrogen; the aliquots retain viability and infectivity for infection of large scale viral producing cell culture Wasilko D J et al., Protein Expr Purif 2009 June; 65(2):122-32, the contents of which are herein incorporated by reference in their entirety.

[0626] A genetically stable baculovirus may be used to produce source of the one or more of the components for producing AAV particles in invertebrate cells. In one embodiment, defective baculovirus expression vectors may be maintained episomally in insect cells. In such an embodiment the bacmid vector is engineered with replication control elements, including but not limited to promoters, enhancers, and/or cell-cycle regulated replication elements.

[0627] In one embodiment, baculoviruses may be engineered with a (non-) selectable marker for recombination into the chitinase/cathepsin locus. The chia/v-cath locus is non-essential for propagating baculovirus in tissue culture, and the V-cath (EC 3.4.22.50) is a cysteine endoprotease that is most active on Arg-Arg dipeptide containing substrates. The Arg-Arg dipeptide is present in densovirus and parvovirus capsid structural proteins but infrequently occurs in dependovirus VP1.

[0628] In one embodiment, stable viral replication cells permissive for baculovirus infection are engineered with at least one stable integrated copy of any of the elements necessary for AAV replication and viral particle production including, but not limited to, the entire AAV genome, Rep and Cap genes, Rep genes, Cap genes, each Rep protein as a separate transcription cassette, each VP protein as a separate transcription cassette, the AAP (assembly activation protein), or at least one of the baculovirus helper genes with native or non-native promoters.

### Large-Scale Production

[0629] In some embodiments, AAV particle production may be modified to increase the scale of production. Large scale viral production methods according to the present disclosure may include any of those taught in U.S. Pat. Nos. 5,756,283, 6,258,595, 6,261,551, 6,270,996, 6,281,010, 6,365,394, 6,475,769, 6,482,634, 6,485,966, 6,943,019, 6,953,690, 7,022,519, 7,238,526, 7,291,498 and 7,491,508 or International Publication Nos. WO1996039530, WO1998010088, WO1999014354, WO1999015685, WO1999047691, WO2000055342, WO2000075353 and WO2001023597, the contents of each of which are herein incorporated by reference in their entirety. Methods of increasing viral particle production scale typically comprise increasing the number of viral replication cells. In some embodiments, viral replication cells comprise adherent cells. To increase the scale of viral particle production by adherent viral replication cells, larger cell culture surfaces are required. In some cases, large-scale production methods comprise the use of roller bottles to increase cell culture surfaces. Other cell culture substrates with increased surface areas are known in the art. Examples of additional adherent cell culture products with increased surface areas include, but are not limited to CELLSTACK®, CELLCUBE® (Corning Corp., Corning, NY) and NUNC™ CELL FACTORY™ (Thermo Scientific, Waltham, MA.) In some cases, large-scale adherent cell surfaces may comprise from about 1,000 cm² to about 100,000 cm². In some cases, large-scale adherent cell cultures may comprise from about 10⁷ to about 10⁹ cells, from about 10⁸ to about 10¹⁰ cells, from about 10⁹ to about 10¹² cells or at least 10¹² cells. In some cases, large-scale adherent cultures may produce from about 10⁹ to about 10¹², from about 10¹⁰ to about 10¹³, from about 10¹¹ to about 10¹⁴, from about 10¹² to about 10¹⁵ or at least 10¹⁵ viral particles.

[0630] In some embodiments, large-scale viral production methods of the present disclosure may comprise the use of suspension cell cultures. Suspension cell culture allows for significantly increased numbers of cells. Typically, the number of adherent cells that can be grown on about 10-50 cm² of surface area can be grown in about 1 cm³ volume in suspension.

[0631] Transfection of replication cells in large-scale culture formats may be carried out according to any methods known in the art. For large-scale adherent cell cultures, transfection methods may include, but are not limited to the use of inorganic compounds (e.g. calcium phosphate), organic compounds [e.g. polyethyleneimine (PEI)] or the use of non-chemical methods (e.g. electroporation.) With cells grown in suspension, transfection methods may include, but are not limited to the use of calcium phosphate and the use of PEI. In some cases, transfection of large scale suspension cultures may be carried out according to the section entitled “Transfection Procedure” described in Feng, L. et al., 2008. Biotechnol Appl. Biochem. 50:121-32, the contents of which are herein incorporated by reference in their entirety. According to such embodiments, PEI-DNA complexes may be formed for introduction of plasmids to be transfected. In some cases, cells being transfected with PEI-DNA complexes may be ‘shocked’ prior to transfection. This comprises lowering cell culture temperatures to 4° C. for a period of about 1 hour. In some cases, cell cultures may be shocked for a period of from about 10 minutes to about 5 hours. In some cases, cell cultures may be shocked at a temperature of from about 0° C. to about 20° C.

[0632] In some cases, transfections may include one or more vectors for expression of an RNA effector molecule to reduce expression of nucleic acids from one or more AAV payload construct. Such methods may enhance the production of viral particles by reducing cellular resources wasted on expressing payload constructs. In some cases, such methods may be carried according to those taught in US Publication No. US2014/0099666, the contents of which are herein incorporated by reference in their entirety.

### Bioreactors

[0633] In some embodiments, cell culture bioreactors may be used for large scale viral production. In some cases, bioreactors comprise stirred tank reactors. Such reactors generally comprise a vessel, typically cylindrical in shape, with a stirrer (e.g. impeller.) In some embodiments, such bioreactor vessels may be placed within a water jacket to control vessel temperature and/or to minimize effects from ambient temperature changes. Bioreactor vessel volume may range in size from about 500 ml to about 2 L, from about 1 L to about 5 L, from about 2.5 L to about 20 L, from about 10 L to about 50 L, from about 25 L to about 100 L, from about 75 L to about 500 L, from about 250 L to about 2,000 L, from about 1,000 L to about 10,000 L, from about 5,000 L to about 50,000 L or at least 50,000 L. Vessel bottoms may be rounded or flat. In some cases, animal cell cultures may be maintained in bioreactors with rounded vessel bottoms.

[0634] In some cases, bioreactor vessels may be warmed through the use of a thermocirculator. Thermocirculators pump heated water around water jackets. In some cases, heated water may be pumped through pipes (e.g. coiled pipes) that are present within bioreactor vessels. In some cases, warm air may be circulated around bioreactors, including, but not limited to air space directly above culture medium. Additionally, pH and C02 levels may be maintained to optimize cell viability.

[0635] In some cases, bioreactors may comprise hollow-fiber reactors. Hollow-fiber bioreactors may support the culture of both anchorage dependent and anchorage independent cells. Further bioreactors may include, but are not limited to packed-bed or fixed-bed bioreactors. Such bioreactors may comprise vessels with glass beads for adherent cell attachment. Further packed-bed reactors may comprise ceramic beads.

[0636] In some cases, viral particles are produced through the use of a disposable bioreactor. In some embodiments, such bioreactors may include WAVE™ disposable bioreactors.

[0637] In some embodiments, AAV particle production in animal cell bioreactor cultures may be carried out according to the methods taught in U.S. Pat. Nos. 5,064,764, 6,194,191, 6,566,118, 8,137,948 or US Patent Application No. US2011/0229971, the contents of each of which are herein incorporated by reference in their entirety.

### Cell Lysis

[0638] Cells of the invention, including, but not limited to viral production cells, may be subjected to cell lysis according to any methods known in the art. Cell lysis may be carried out to obtain one or more agents (e.g. viral particles) present within any cells of the invention. In some embodiments, cell lysis may be carried out according to any of the methods listed in U.S. Pat. Nos. 7,326,555, 7,579,181, 7,048,920, 6,410,300, 6,436,394, 7,732,129, 7,510,875, 7,445,930, 6,726,907, 6,194,191, 7,125,706, 6,995,006, 6,676,935, 7,968,333, 5,756,283, 6,258,595, 6,261,551, 6,270,996, 6,281,010, 6,365,394, 6,475,769, 6,482,634, 6,485,966, 6,943,019, 6,953,690, 7,022,519, 7,238,526, 7,291,498 and 7,491,508 or International Publication Nos. WO1996039530, WO1998010088, WO1999014354, WO1999015685, WO1999047691, WO2000055342, WO2000075353 and WO2001023597, the contents of each of which are herein incorporated by reference in their entirety. Cell lysis methods may be chemical or mechanical. Chemical cell lysis typically comprises contacting one or more cells with one or more lysis agent. Mechanical lysis typically comprises subjecting one or more cells to one or more lysis condition and/or one or more lysis force.

[0639] In some embodiments, chemical lysis may be used to lyse cells. As used herein, the term “lysis agent” refers to any agent that may aid in the disruption of a cell. In some cases, lysis agents are introduced in solutions, termed lysis solutions or lysis buffers. As used herein, the term “lysis solution” refers to a solution (typically aqueous) comprising one or more lysis agent. In addition to lysis agents, lysis solutions may include one or more buffering agents, solubilizing agents, surfactants, preservatives, cryoprotectants, enzymes, enzyme inhibitors and/or chelators. Lysis buffers are lysis solutions comprising one or more buffering agent. Additional components of lysis solutions may include one or more solubilizing agent. As used herein, the term “solubilizing agent” refers to a compound that enhances the solubility of one or more components of a solution and/or the solubility of one or more entities to which solutions are applied. In some cases, solubilizing agents enhance protein solubility. In some cases, solubilizing agents are selected based on their ability to enhance protein solubility while maintaining protein conformation and/or activity.

[0640] Exemplary lysis agents may include any of those described in U.S. Pat. Nos. 8,685,734, 7,901,921, 7,732,129, 7,223,585, 7,125,706, 8,236,495, 8,110,351, 7,419,956, 7,300,797, 6,699,706 and 6,143,567, the contents of each of which are herein incorporated by reference in their entirety. In some cases, lysis agents may be selected from lysis salts, amphoteric agents, cationic agents, ionic detergents and non-ionic detergents. Lysis salts may include, but are not limited to sodium chloride (NaCl) and potassium chloride (KCl.) Further lysis salts may include any of those described in U.S. Pat. Nos. 8,614,101, 7,326,555, 7,579,181, 7,048,920, 6,410,300, 6,436,394, 7,732,129, 7,510,875, 7,445,930, 6,726,907, 6,194,191, 7,125,706, 6,995,006, 6,676,935 and 7,968,333, the contents of each of which are herein incorporated by reference in their entirety. Concentrations of salts may be increased or decreased to obtain an effective concentration for rupture of cell membranes. Amphoteric agents, as referred to herein, are compounds capable of reacting as an acid or a base. Amphoteric agents may include, but are not limited to lysophosphatidylcholine, 3-((3-Cholamidopropyl) dimethylammonium)-1-propanesulfonate (CHAPS), ZWITTERGENT® and the like. Cationic agents may include, but are not limited to cetyltrimethylammonium bromide (C (16) TAB) and Benzalkonium chloride. Lysis agents comprising detergents may include ionic detergents or non-ionic detergents. Detergents may function to break apart or dissolve cell structures including, but not limited to cell membranes, cell walls, lipids, carbohydrates, lipoproteins and glycoproteins. Exemplary ionic detergents include any of those taught in U.S. Pat. Nos. 7,625,570 and 6,593,123 or US Publication No. US2014/0087361, the contents of each of which are herein incorporated by reference in their entirety. Some ionic detergents may include, but are not limited to sodium dodecyl sulfate (SDS), cholate and deoxycholate. In some cases, ionic detergents may be included in lysis solutions as a solubilizing agent. Non-ionic detergents may include, but are not limited to octylglucoside, digitonin, lubrol, C12E8, TWEEN®-20, TWEEN®-80, Triton X-100 and Noniodet P-40. Non-ionic detergents are typically weaker lysis agents, but may be included as solubilizing agents for solubilizing cellular and/or viral proteins. Further lysis agents may include enzymes and urea. In some cases, one or more lysis agents may be combined in a lysis solution in order to enhance one or more of cell lysis and protein solubility. In some cases, enzyme inhibitors may be included in lysis solutions in order to prevent proteolysis that may be triggered by cell membrane disruption.

[0641] In some embodiments, mechanical cell lysis is carried out. Mechanical cell lysis methods may include the use of one or more lysis condition and/or one or more lysis force. As used herein, the term “lysis condition” refers to a state or circumstance that promotes cellular disruption. Lysis conditions may comprise certain temperatures, pressures, osmotic purity, salinity and the like. In some cases, lysis conditions comprise increased or decreased temperatures. According to some embodiments, lysis conditions comprise changes in temperature to promote cellular disruption. Cell lysis carried out according to such embodiments may include freeze-thaw lysis. As used herein, the term “freeze-thaw lysis” refers to cellular lysis in which a cell solution is subjected to one or more freeze-thaw cycle. According to freeze-thaw lysis methods, cells in solution are frozen to induce a mechanical disruption of cellular membranes caused by the formation and expansion of ice crystals. Cell solutions used according freeze-thaw lysis methods, may further comprise one or more lysis agents, solubilizing agents, buffering agents, cryoprotectants, surfactants, preservatives, enzymes, enzyme inhibitors and/or chelators. Once cell solutions subjected to freezing are thawed, such components may enhance the recovery of desired cellular products. In some cases, one or more cryoprotectants are included in cell solutions undergoing freeze-thaw lysis. As used herein, the term “cryoprotectant” refers to an agent used to protect one or more substance from damage due to freezing. Cryoprotectants may include any of those taught in US Publication No. US2013/0323302 or U.S. Pat. Nos. 6,503,888, 6,180,613, 7,888,096, 7,091,030, the contents of each of which are herein incorporated by reference in their entirety. In some cases, cryoprotectants may include, but are not limited to dimethyl sulfoxide, 1,2-propanediol, 2,3-butanediol, formamide, glycerol, ethylene glycol, 1,3-propanediol and n-dimethyl formamide, polyvinylpyrrolidone, hydroxyethyl starch, agarose, dextrans, inositol, glucose, hydroxyethylstarch, lactose, sorbitol, methyl glucose, sucrose and urea. In some embodiments, freeze-thaw lysis may be carried out according to any of the methods described in U.S. Pat. No. 7,704,721, the contents of which are herein incorporated by reference in their entirety.

[0642] As used herein, the term “lysis force” refers to a physical activity used to disrupt a cell. Lysis forces may include, but are not limited to mechanical forces, sonic forces, gravitational forces, optical forces, electrical forces and the like. Cell lysis carried out by mechanical force is referred to herein as “mechanical lysis.” Mechanical forces that may be used according to mechanical lysis may include high shear fluid forces. According to such methods of mechanical lysis, a microfluidizer may be used. Microfluidizers typically comprise an inlet reservoir where cell solutions may be applied. Cell solutions may then be pumped into an interaction chamber via a pump (e.g. high-pressure pump) at high speed and/or pressure to produce shear fluid forces. Resulting lysates may then be collected in one or more output reservoir. Pump speed and/or pressure may be adjusted to modulate cell lysis and enhance recovery of products (e.g. viral particles.) Other mechanical lysis methods may include physical disruption of cells by scraping.

[0643] Cell lysis methods may be selected based on the cell culture format of cells to be lysed. For example, with adherent cell cultures, some chemical and mechanical lysis methods may be used. Such mechanical lysis methods may include freeze-thaw lysis or scraping. In another example, chemical lysis of adherent cell cultures may be carried out through incubation with lysis solutions comprising surfactant, such as Triton-X-100. In some cases, cell lysates generated from adherent cell cultures may be treated with one more nuclease to lower the viscosity of the lysates caused by liberated DNA.

[0644] In one embodiment, a method for harvesting AAV particles without lysis may be used for efficient and scalable AAV particle production. In a non-limiting example, AAV particles may be produced by culturing an AAV particle lacking a heparin binding site, thereby allowing the AAV particle to pass into the supernatant, in a cell culture, collecting supernatant from the culture; and isolating the AAV particle from the supernatant, as described in US Patent Application 20090275107, the contents of which are incorporated herein by reference in their entirety.

### Clarification

[0645] Cell lysates comprising viral particles may be subjected to clarification. Clarification refers to initial steps taken in purification of viral particles from cell lysates. Clarification serves to prepare lysates for further purification by removing larger, insoluble debris. Clarification steps may include, but are not limited to centrifugation and filtration. During clarification, centrifugation may be carried out at low speeds to remove larger debris only. Similarly, filtration may be carried out using filters with larger pore sizes so that only larger debris is removed. In some cases, tangential flow filtration may be used during clarification. Objectives of viral clarification include high throughput processing of cell lysates and to optimize ultimate viral recovery. Advantages of including a clarification step include scalability for processing of larger volumes of lysate. In some embodiments, clarification may be carried out according to any of the methods presented in U.S. Pat. Nos. 8,524,446, 5,756,283, 6,258,595, 6,261,551, 6,270,996, 6,281,010, 6,365,394, 6,475,769, 6,482,634, 6,485,966, 6,943,019, 6,953,690, 7,022,519, 7,238,526, 7,291,498, 7,491,508, US Publication Nos. US2013/0045186, US2011/0263027, US2011/0151434, US2003/0138772, and International Publication Nos. WO2002012455, WO1996039530, WO1998010088, WO1999014354, WO1999015685, WO1999047691, WO2000055342, WO2000075353 and WO2001023597, the contents of each of which are herein incorporated by reference in their entirety.

[0646] Methods of cell lysate clarification by filtration are well understood in the art and may be carried out according to a variety of available methods including, but not limited to passive filtration and flow filtration. Filters used may comprise a variety of materials and pore sizes. For example, cell lysate filters may comprise pore sizes of from about 1 μM to about 5 μM, from about 0.5 μM to about 2 μM, from about 0.1 μM to about 1 μM, from about 0.05 μM to about 0.05 μM and from about 0.001 μM to about 0.1 μM. Exemplary pore sizes for cell lysate filters may include, but are not limited to, 2.0, 1.9, 1.8, 1.7, 1.6, 1.5, 1.4, 1.3, 1.2, 1.1, 1, 0.9, 0.8, 0.7, 0.6, 0.5, 0.4, 0.3, 0.2, 0.1, 0.95, 0.9, 0.85, 0.8, 0.75, 0.7, 0.65, 0.6, 0.55, 0.5, 0.45, 0.4, 0.35, 0.3, 0.25, 0.2, 0.15, 0.1, 0.05, 0.22, 0.21, 0.20, 0.19, 0.18, 0.17, 0.16, 0.15, 0.14, 0.13, 0.12, 0.11, 0.1, 0.09, 0.08, 0.07, 0.06, 0.05, 0.04, 0.03, 0.02, 0.01, 0.02, 0.019, 0.018, 0.017, 0.016, 0.015, 0.014, 0.013, 0.012, 0.011, 0.01, 0.009, 0.008, 0.007, 0.006, 0.005, 0.004, 0.003, 0.002, 0.001 and 0.001 μM. In one embodiment, clarification may comprise filtration through a filter with 2.0 μM pore size to remove large debris, followed by passage through a filter with 0.45 μM pore size to remove intact cells.

[0647] Filter materials may be composed of a variety of materials. Such materials may include, but are not limited to polymeric materials and metal materials (e.g. sintered metal and pored aluminum.) Exemplary materials may include, but are not limited to nylon, cellulose materials (e.g. cellulose acetate), polyvinylidene fluoride (PVDF), polyethersulfone, polyamide, polysulfone, polypropylene, and polyethylene terephthalate. In some cases, filters useful for clarification of cell lysates may include, but are not limited to ULTIPLEAT PROFILE™ filters (Pall Corporation, Port Washington, NY), SUPOR™ membrane filters (Pall Corporation, Port Washington, NY)

[0648] In some cases, flow filtration may be carried out to increase filtration speed and/or effectiveness. In some cases, flow filtration may comprise vacuum filtration. According to such methods, a vacuum is created on the side of the filter opposite that of cell lysate to be filtered. In some cases, cell lysates may be passed through filters by centrifugal forces. In some cases, a pump is used to force cell lysate through clarification filters. Flow rate of cell lysate through one or more filters may be modulated by adjusting one of channel size and/or fluid pressure.

[0649] According to some embodiments, cell lysates may be clarified by centrifugation. Centrifugation may be used to pellet insoluble particles in the lysate. During clarification, centrifugation strength [expressed in terms of gravitational units (g), which represents multiples of standard gravitational force] may be lower than in subsequent purification steps. In some cases, centrifugation may be carried out on cell lysates at from about 200 g to about 800 g, from about 500 g to about 1500 g, from about 1000 g to about 5000 g, from about 1200 g to about 10000 g or from about 8000 g to about 15000 g. In some embodiments, cell lysate centrifugation is carried out at 8000 g for 15 minutes. In some cases, density gradient centrifugation may be carried out in order to partition particulates in the cell lysate by sedimentation rate. Gradients used according to methods of the present disclosure may include, but are not limited to cesium chloride gradients and iodixanol step gradients.

### Purification: Chromatography

[0650] In some cases, AAV particles may be purified from clarified cell lysates by one or more methods of chromatography. Chromatography refers to any number of methods known in the art for separating out one or more elements from a mixture. Such methods may include, but are not limited to ion exchange chromatography (e.g. cation exchange chromatography and anion exchange chromatography), immunoaffinity chromatography and size-exclusion chromatography. In some embodiments, methods of viral chromatography may include any of those taught in U.S. Pat. Nos. 5,756,283, 6,258,595, 6,261,551, 6,270,996, 6,281,010, 6,365,394, 6,475,769, 6,482,634, 6,485,966, 6,943,019, 6,953,690, 7,022,519, 7,238,526, 7,291,498 and 7,491,508 or International Publication Nos. WO1996039530, WO1998010088, WO1999014354, WO1999015685, WO1999047691, WO2000055342, WO2000075353 and WO2001023597, the contents of each of which are herein incorporated by reference in their entirety.

[0651] In some embodiments, ion exchange chromatography may be used to isolate viral particles. Ion exchange chromatography is used to bind viral particles based on charge-charge interactions between capsid proteins and charged sites present on a stationary phase, typically a column through which viral preparations (e.g. clarified lysates) are passed. After application of viral preparations, bound viral particles may then be eluted by applying an elution solution to disrupt the charge-charge interactions. Elution solutions may be optimized by adjusting salt concentration and/or pH to enhance recovery of bound viral particles. Depending on the charge of viral capsids being isolated, cation or anion exchange chromatography methods may be selected. Methods of ion exchange chromatography may include, but are not limited to any of those taught in U.S. Pat. Nos. 7,419,817, 6,143,548, 7,094,604, 6,593,123, 7,015,026 and 8,137,948, the contents of each of which are herein incorporated by reference in their entirety.

[0652] In some embodiments, immunoaffinity chromatography may be used. Immunoaffinity chromatography is a form of chromatography that utilizes one or more immune compounds (e.g. antibodies or antibody-related structures) to retain viral particles. Immune compounds may bind specifically to one or more structures on viral particle surfaces, including, but not limited to one or more viral coat protein. In some cases, immune compounds may be specific for a particular viral variant. In some cases, immune compounds may bind to multiple viral variants. In some embodiments, immune compounds may include recombinant single-chain antibodies. Such recombinant single chain antibodies may include those described in Smith, R. H. et al., 2009. Mol. Ther. 17(11):1888-96, the contents of which are herein incorporated by reference in their entirety. Such immune compounds are capable of binding to several AAV capsid variants, including, but not limited to AAV1, AAV2, AAV6 and AAV8.

[0653] In some embodiments, size-exclusion chromatography (SEC) may be used. SEC may comprise the use of a gel to separate particles according to size. In viral particle purification, SEC filtration is sometimes referred to as “polishing.” In some cases, SEC may be carried out to generate a final product that is near-homogenous. Such final products may in some cases be used in pre-clinical studies and/or clinical studies (Kotin, R. M. 2011. Human Molecular Genetics. 20(1):R2-R6, the contents of which are herein incorporated by reference in their entirety.) In some cases, SEC may be carried out according to any of the methods taught in U.S. Pat. Nos. 6,143,548, 7,015,026, 8,476,418, 6,410,300, 8,476,418, 7,419,817, 7,094,604, 6,593,123, and 8,137,948, the contents of each of which are herein incorporated by reference in their entirety.

[0654] In one embodiment, the compositions comprising at least one AAV particle may be isolated or purified using the methods described in U.S. Pat. No. 6,146,874, the contents of which are herein incorporated by reference in its entirety.

[0655] In one embodiment, the compositions comprising at least one AAV particle may be isolated or purified using the methods described in U.S. Pat. No. 6,660,514, the contents of which are herein incorporated by reference in its entirety.

[0656] In one embodiment, the compositions comprising at least one AAV particle may be isolated or purified using the methods described in U.S. Pat. No. 8,283,151, the contents of which are herein incorporated by reference in its entirety.

[0657] In one embodiment, the compositions comprising at least one AAV particle may be isolated or purified using the methods described in U.S. Pat. No. 8,524,446, the contents of which are herein incorporated by reference in its entirety.

### II. Formulation and Delivery

### Pharmaceutical Compositions and Formulation

[0658] In addition to the pharmaceutical compositions (AAV particles comprising a modulatory polynucleotide sequence encoding the siRNA molecules), provided herein are pharmaceutical compositions which are suitable for administration to humans, it will be understood by the skilled artisan that such compositions are generally suitable for administration to any other animal, e.g., to non-human animals, e.g. non-human mammals. Modification of pharmaceutical compositions suitable for administration to humans in order to render the compositions suitable for administration to various animals is well understood, and the ordinarily skilled veterinary pharmacologist can design and/or perform such modification with merely ordinary, if any, experimentation. Subjects to which administration of the pharmaceutical compositions is contemplated include, but are not limited to, humans and/or other primates; mammals, including commercially relevant mammals such as cattle, pigs, horses, sheep, cats, dogs, mice, and/or rats; and/or birds, including commercially relevant birds such as poultry, chickens, ducks, geese, and/or turkeys.

[0659] In some embodiments, compositions are administered to humans, human patients or subjects. For the purposes of the present disclosure, the phrase “active ingredient” generally refers either to the synthetic siRNA duplexes, the modulatory polynucleotide encoding the siRNA duplex, or the AAV particle comprising a modulatory polynucleotide encoding the siRNA duplex described herein.

[0660] Formulations of the pharmaceutical compositions described herein may be prepared by any method known or hereafter developed in the art of pharmacology. In general, such preparatory methods include the step of bringing the active ingredient into association with an excipient and/or one or more other accessory ingredients, and then, if necessary and/or desirable, dividing, shaping and/or packaging the product into a desired single- or multi-dose unit.

[0661] Relative amounts of the active ingredient, the pharmaceutically acceptable excipient, and/or any additional ingredients in a pharmaceutical composition in accordance with the invention will vary, depending upon the identity, size, and/or condition of the subject treated and further depending upon the route by which the composition is to be administered.

[0662] The AAV particles comprising the modulatory polynucleotide sequence encoding the siRNA molecules of the present invention can be formulated using one or more excipients to: (1) increase stability; (2) increase cell transfection or transduction; (3) permit the sustained or delayed release; or (4) alter the biodistribution (e.g., target the AAV particle to specific tissues or cell types such as brain and neurons).

[0663] Formulations of the present invention can include, without limitation, saline, lipidoids, liposomes, lipid nanoparticles, polymers, lipoplexes, core-shell nanoparticles, peptides, proteins, cells transfected with AAV particles (e.g., for transplantation into a subject), nanoparticle mimics and combinations thereof. Further, the AAV particles of the present invention may be formulated using self-assembled nucleic acid nanoparticles.

[0664] Formulations of the pharmaceutical compositions described herein may be prepared by any method known or hereafter developed in the art of pharmacology. In general, such preparatory methods include the step of associating the active ingredient with an excipient and/or one or more other accessory ingredients.

[0665] A pharmaceutical composition in accordance with the present disclosure may be prepared, packaged, and/or sold in bulk, as a single unit dose, and/or as a plurality of single unit doses. As used herein, a “unit dose” refers to a discrete amount of the pharmaceutical composition comprising a predetermined amount of the active ingredient. The amount of the active ingredient is generally equal to the dosage of the active ingredient which would be administered to a subject and/or a convenient fraction of such a dosage such as, for example, one-half or one-third of such a dosage.

[0666] Relative amounts of the active ingredient, the pharmaceutically acceptable excipient, and/or any additional ingredients in a pharmaceutical composition in accordance with the present disclosure may vary, depending upon the identity, size, and/or condition of the subject being treated and further depending upon the route by which the composition is to be administered. For example, the composition may comprise between 0.10% and 99% (w/w) of the active ingredient. By way of example, the composition may comprise between 0.1% and 100%, e.g., between 0.5 and 50%, between 1-30%, between 5-80%, at least 80% (w/w) active ingredient.

[0667] In some embodiments, a pharmaceutically acceptable excipient may be at least 95%, at least 96%, at least 97%, at least 98%, at least 99%, or 100% pure. In some embodiments, an excipient is approved for use for humans and for veterinary use. In some embodiments, an excipient may be approved by United States Food and Drug Administration. In some embodiments, an excipient may be of pharmaceutical grade. In some embodiments, an excipient may meet the standards of the United States Pharmacopoeia (USP), the European Pharmacopoeia (EP), the British Pharmacopoeia, and/or the International Pharmacopoeia.

[0668] Excipients, which, as used herein, includes, but is not limited to, any and all solvents, dispersion media, diluents, or other liquid vehicles, dispersion or suspension aids, surface active agents, isotonic agents, thickening or emulsifying agents, preservatives, and the like, as suited to the particular dosage form desired. Various excipients for formulating pharmaceutical compositions and techniques for preparing the composition are known in the art (see Remington: The Science and Practice of Pharmacy, 21^{st} Edition, A. R. Gennaro, Lippincott, Williams & Wilkins, Baltimore, M D, 2006; incorporated herein by reference in its entirety). The use of a conventional excipient medium may be contemplated within the scope of the present disclosure, except insofar as any conventional excipient medium may be incompatible with a substance or its derivatives, such as by producing any undesirable biological effect or otherwise interacting in a deleterious manner with any other component(s) of the pharmaceutical composition.

[0669] Exemplary diluents include, but are not limited to, calcium carbonate, sodium carbonate, calcium phosphate, dicalcium phosphate, calcium sulfate, calcium hydrogen phosphate, sodium phosphate lactose, sucrose, cellulose, microcrystalline cellulose, kaolin, mannitol, sorbitol, inositol, sodium chloride, dry starch, cornstarch, powdered sugar, etc., and/or combinations thereof.

[0670] In some embodiments, the formulations may comprise at least one inactive ingredient. As used herein, the term “inactive ingredient” refers to one or more inactive agents included in formulations. In some embodiments, all, none or some of the inactive ingredients which may be used in the formulations of the present invention may be approved by the US Food and Drug Administration (FDA).

[0671] Formulations of vectors comprising the nucleic acid sequence for the siRNA molecules of the present invention may include cations or anions. In one embodiment, the formulations include metal cations such as, but not limited to, Zn2+, Ca2+, Cu2+, Mg+ and combinations thereof.

[0672] As used herein, “pharmaceutically acceptable salts” refers to derivatives of the disclosed compounds wherein the parent compound is modified by converting an existing acid or base moiety to its salt form (e.g., by reacting the free base group with a suitable organic acid). Examples of pharmaceutically acceptable salts include, but are not limited to, mineral or organic acid salts of basic residues such as amines; alkali or organic salts of acidic residues such as carboxylic acids; and the like. Representative acid addition salts include acetate, acetic acid, adipate, alginate, ascorbate, aspartate, benzenesulfonate, benzene sulfonic acid, benzoate, bisulfate, borate, butyrate, camphorate, camphorsulfonate, citrate, cyclopentanepropionate, digluconate, dodecylsulfate, ethanesulfonate, fumarate, glucoheptonate, glycerophosphate, hemisulfate, heptonate, hexanoate, hydrobromide, hydrochloride, hydroiodide, 2-hydroxy-ethanesulfonate, lactobionate, lactate, laurate, lauryl sulfate, malate, maleate, malonate, methanesulfonate, 2-naphthalenesulfonate, nicotinate, nitrate, oleate, oxalate, palmitate, pamoate, pectinate, persulfate, 3-phenylpropionate, phosphate, picrate, pivalate, propionate, stearate, succinate, sulfate, tartrate, thiocyanate, toluenesulfonate, undecanoate, valerate salts, and the like. Representative alkali or alkaline earth metal salts include sodium, lithium, potassium, calcium, magnesium, and the like, as well as nontoxic ammonium, quaternary ammonium, and amine cations, including, but not limited to ammonium, tetramethylammonium, tetraethylammonium, methylamine, dimethylamine, trimethylamine, triethylamine, ethylamine, and the like. The pharmaceutically acceptable salts of the present disclosure include the conventional non-toxic salts of the parent compound formed, for example, from non-toxic inorganic or organic acids. The pharmaceutically acceptable salts of the present disclosure can be synthesized from the parent compound which contains a basic or acidic moiety by conventional chemical methods. Generally, such salts can be prepared by reacting the free acid or base forms of these compounds with a stoichiometric amount of the appropriate base or acid in water or in an organic solvent, or in a mixture of the two; generally, nonaqueous media like ether, ethyl acetate, ethanol, isopropanol, or acetonitrile are preferred. Lists of suitable salts are found in Remington's Pharmaceutical Sciences, 17^{th} ed., Mack Publishing Company, Easton, Pa., 1985, p. 1418, Pharmaceutical Salts: Properties, Selection, and Use, P. H. Stahl and C. G. Wermuth (eds.), Wiley-VCH, 2008, and Berge et al., Journal of Pharmaceutical Science, 66, 1-19 (1977); the content of each of which is incorporated herein by reference in their entirety.

[0673] The term “pharmaceutically acceptable solvate,” as used herein, means a compound of the invention wherein molecules of a suitable solvent are incorporated in the crystal lattice. A suitable solvent is physiologically tolerable at the dosage administered. For example, solvates may be prepared by crystallization, recrystallization, or precipitation from a solution that includes organic solvents, water, or a mixture thereof. Examples of suitable solvents are ethanol, water (for example, mono-, di-, and ti-hydrates), N-methylpyrrolidinone (NMP), dimethyl sulfoxide (DMSO), N,N′-dimethylformamide (DMF), N,N′-dimethylacetamide (DMAC), 1,3-dimethyl-2-imidazolidinone (DMEU), 1,3-dimethyl-3,4,5,6-tetrahydro-2-(1H)-pyrimidinone (DMPU), acetonitrile (ACN), propylene glycol, ethyl acetate, benzyl alcohol, 2-pyrrolidone, benzyl benzoate, and the like. When water is the solvent, the solvate is referred to as a “hydrate.”

[0674] According to the present invention, the AAV particle comprising the modulatory polynucleotide sequence encoding for the siRNA molecules may be formulated for CNS delivery. Agents that cross the brain blood barrier may be used. For example, some cell penetrating peptides that can target siRNA molecules to the brain blood barrier endothelium may be used to formulate the siRNA duplexes targeting the HTT gene.

### Inactive Ingredients

[0675] In some embodiments, formulations may comprise at least one excipient which is an inactive ingredient. As used herein, the term “inactive ingredient” refers to one or more inactive agents included in formulations. In some embodiments, all, none or some of the inactive ingredients which may be used in the formulations of the present disclosure may be approved by the US Food and Drug Administration (FDA).

[0676] Formulations of AAV particles described herein may include cations or anions. In one embodiment, the formulations include metal cations such as, but not limited to, Zn2+, Ca2+, Cu2+, Mg+ and combinations thereof. As a non-limiting example, formulations may include polymers and compositions described herein complexed with a metal cation (See e.g., U.S. Pat. Nos. 6,265,389 and 6,555,525, each of which is herein incorporated by reference in its entirety).

### Delivery

[0677] In one embodiment, the AAV particles described herein may be administered or delivered using the methods for the delivery of AAV virions described in European Patent Application No. EP1857552, the contents of which are herein incorporated by reference in its entirety.

[0678] In one embodiment, the AAV particles described herein may be administered or delivered using the methods for delivering proteins using AAV vectors described in European Patent Application No. EP2678433, the contents of which are herein incorporated by reference in its entirety.

[0679] In one embodiment, the AAV particle described herein may be administered or delivered using the methods for delivering DNA molecules using AAV vectors described in U.S. Pat. No. 5,858,351, the contents of which are herein incorporated by reference in its entirety.

[0680] In one embodiment, the AAV particle described herein may be administered or delivered using the methods for delivering DNA to the bloodstream described in U.S. Pat. No. 6,211,163, the contents of which are herein incorporated by reference in its entirety.

[0681] In one embodiment, the AAV particle described herein may be administered or delivered using the methods for delivering AAV virions described in U.S. Pat. No. 6,325,998, the contents of which are herein incorporated by reference in its entirety.

[0682] In one embodiment, the AAV particle described herein may be administered or delivered using the methods for delivering a payload to the central nervous system described in U.S. Pat. No. 7,588,757, the contents of which are herein incorporated by reference in its entirety.

[0683] In one embodiment, the AAV particle described herein may be administered or delivered using the methods for delivering a payload described in U.S. Pat. No. 8,283,151, the contents of which are herein incorporated by reference in its entirety.

[0684] In one embodiment, the AAV particle described herein may be administered or delivered using the methods for delivering a payload using a glutamic acid decarboxylase (GAD) delivery vector described in International Patent Publication No. WO2001089583, the contents of which are herein incorporated by reference in its entirety.

[0685] In one embodiment, the AAV particle described herein may be administered or delivered using the methods for delivering a payload to neural cells described in International Patent Publication No. WO2012057363, the contents of which are herein incorporated by reference in its entirety.

### Delivery to Cells

[0686] The present disclosure provides a method of delivering to a cell or tissue any of the above-described AAV polynucleotides or AAV genomes, comprising contacting the cell or tissue with said AAV polynucleotide or AAV genomes or contacting the cell or tissue with a particle comprising said AAV polynucleotide or AAV genome, or contacting the cell or tissue with any of the described compositions, including pharmaceutical compositions. The method of delivering the AAV polynucleotide or AAV genome to a cell or tissue can be accomplished in vitro, ex vivo, or in vivo.

Introduction into Cells—Synthetic dsRNA

[0687] To ensure the chemical and biological stability of siRNA molecules (e.g., siRNA duplexes and dsRNA), it is important to deliver siRNA molecules inside the target cells. In some embodiments, the cells may include, but are not limited to, cells of mammalian origin, cells of human origins, embryonic stem cells, induced pluripotent stem cells, neural stem cells, and neural progenitor cells.

[0688] Nucleic acids, including siRNA, carry a net negative charge on the sugar-phosphate backbone under normal physiological conditions. In order to enter the cell, a siRNA molecule must come into contact with a lipid bilayer of the cell membrane, whose head groups are also negatively charged.

[0689] The siRNA duplexes can be complexed with a carrier that allows them to traverse cell membranes such as package particles to facilitate cellular uptake of the siRNA. The package particles may include, but are not limited to, liposomes, nanoparticles, cationic lipids, polyethylenimine derivatives, dendrimers, carbon nanotubes and the combination of carbon-made nanoparticles with dendrimers. Lipids may be cationic lipids and/or neutral lipids. In addition to well established lipophilic complexes between siRNA molecules and cationic carriers, siRNA molecules can be conjugated to a hydrophobic moiety, such as cholesterol (e.g., U.S. Patent Publication No. 20110110937; the content of which is herein incorporated by reference in its entirety). This delivery method holds a potential of improving in vitro cellular uptake and in vivo pharmacological properties of siRNA molecules. The siRNA molecules of the present invention may also be conjugated to certain cationic cell-penetrating peptides (CPPs), such as MPG, transportan or penetratin covalently or non-covalently (e.g., U.S. Patent Publication No. 20110086425; the content of which is herein incorporated by reference in its entirety).

Introduction into Cells—AAV Particles

[0690] The siRNA molecules (e.g., siRNA duplexes) of the present invention may be introduced into cells using any of a variety of approaches such as, but not limited to, AAV particles. These AAV particles are engineered and optimized to facilitate the entry of siRNA molecule into cells that are not readily amendable to transfection. Also, some synthetic AAV particles possess an ability to integrate the shRNA into the cell genome, thereby leading to stable siRNA expression and long-term knockdown of a target gene. In this manner, AAV particles are engineered as vehicles for specific delivery while lacking the deleterious replication and/or integration features found in wild-type virus.

[0691] In some embodiments, the siRNA molecules of the present invention are introduced into a cell by contacting the cell with an AAV particle comprising a modulatory polynucleotide sequence encoding a siRNA molecule, and a lipophilic carrier. In other embodiments, the siRNA molecule is introduced into a cell by transfecting or infecting the cell with an AAV particle comprising a nucleic acid sequence capable of producing the siRNA molecule when transcribed in the cell. In some embodiments, the siRNA molecule is introduced into a cell by injecting into the cell an AAV particle comprising a nucleic acid sequence capable of producing the siRNA molecule when transcribed in the cell.

[0692] In some embodiments, prior to transfection, an AAV particle comprising a nucleic acid sequence encoding the siRNA molecules of the present invention may be transfected into cells.

[0693] In other embodiments, the AAV particles comprising the nucleic acid sequence encoding the siRNA molecules of the present invention may be delivered into cells by electroporation (e.g. U.S. Patent Publication No. 20050014264; the content of which is herein incorporated by reference in its entirety).

[0694] Other methods for introducing AAV particles comprising the nucleic acid sequence encoding the siRNA molecules described herein may include photochemical internalization as described in U. S. Patent publication No. 20120264807; the content of which is herein incorporated by reference in its entirety.

[0695] In some embodiments, the formulations described herein may contain at least one AAV particle comprising the nucleic acid sequence encoding the siRNA molecules described herein. In one embodiment, the siRNA molecules may target the HTT gene at one target site. In another embodiment, the formulation comprises a plurality of AAV particles, each AAV particle comprising a nucleic acid sequence encoding a siRNA molecule targeting the HTT gene at a different target site. The HTT may be targeted at 2, 3, 4, 5 or more than 5 sites.

[0696] In one embodiment, the AAV particles from any relevant species, such as, but not limited to, human, dog, mouse, rat or monkey may be introduced into cells.

[0697] In one embodiment, the AAV particles may be introduced into cells which are relevant to the disease to be treated. As a non-limiting example, the disease is HD and the target cells are neurons and astrocytes. As another non-limiting example, the disease is HD and the target cells are medium spiny neurons, cortical neurons and astrocytes.

[0698] In one embodiment, the AAV particles may be introduced into cells which have a high level of endogenous expression of the target sequence.

[0699] In another embodiment, the AAV particles may be introduced into cells which have a low level of endogenous expression of the target sequence.

[0700] In one embodiment, the cells may be those which have a high efficiency of AAV transduction.

### Delivery to Subjects

[0701] The present disclosure additionally provides a method of delivering to a subject, including a mammalian subject, any of the above-described AAV polynucleotides or AAV genomes comprising administering to the subject said AAV polynucleotide or AAV genome, or administering to the subject a particle comprising said AAV polynucleotide or AAV genome, or administering to the subject any of the described compositions, including pharmaceutical compositions.

[0702] The pharmaceutical compositions of AAV particles described herein may be characterized by one or more of bioavailability, therapeutic window and/or volume of distribution.

### III. Administration and Dosing

### Administration

[0703] The AAV particles comprising a nucleic acid sequence encoding the siRNA molecules of the present invention may be administered by any route which results in a therapeutically effective outcome. These include, but are not limited to, within the parenchyma of an organ such as, but not limited to, a brain (e.g., intraparenchymal), corpus striatum (intrastriatal), enteral (into the intestine), gastroenteral, epidural, oral (by way of the mouth), transdermal, peridural, intracerebral (into the cerebrum), intracerebroventricular (into the cerebral ventricles), subpial (under the pia), epicutaneous (application onto the skin), intradermal, (into the skin itself), subcutaneous (under the skin), nasal administration (through the nose), intravenous (into a vein), intravenous bolus, intravenous drip, intraarterial (into an artery), intramuscular (into a muscle), intracardiac (into the heart), intraosseous infusion (into the bone marrow), intrathecal (into the spinal canal), intraganglionic (into the ganglion), intraperitoneal, (infusion or injection into the peritoneum), intravesical infusion, intravitreal, (through the eye), intracavernous injection (into a pathologic cavity) intracavitary (into the base of the penis), intravaginal administration, intrauterine, extra-amniotic administration, transdermal (diffusion through the intact skin for systemic distribution), transmucosal (diffusion through a mucous membrane), transvaginal, insufflation (snorting), sublingual, sublabial, enema, eye drops (onto the conjunctiva), in ear drops, auricular (in or by way of the ear), buccal (directed toward the cheek), conjunctival, cutaneous, dental (to a tooth or teeth), electro-osmosis, endocervical, endosinusial, endotracheal, extracorporeal, hemodialysis, infiltration, interstitial, intra-abdominal, intra-amniotic, intra-articular, intrabiliary, intrabronchial, intrabursal, intracartilaginous (within a cartilage), intracaudal (within the cauda equine), intracisternal (within the cistema magna cerebellomedularis), intracomeal (within the comea), dental intracomal, intracoronary (within the coronary arteries), intracorporus cavemosum (within the dilatable spaces of the corporus cavemosa of the penis), intradiscal (within a disc), intraductal (within a duct of a gland), intraduodenal (within the duodenum), intradural (within or beneath the dura), intraepidermal (to the epidermis), intraesophageal (to the esophagus), intragastric (within the stomach), intragingival (within the gingivae), intraileal (within the distal portion of the small intestine), intralesional (within or introduced directly to a localized lesion), intraluminal (within a lumen of a tube), intralymphatic (within the lymph), intramedullary (within the marrow cavity of a bone), intrameningeal (within the meninges), intraocular (within the eye), intraovarian (within the ovary), intrapericardial (within the pericardium), intrapleural (within the pleura), intraprostatic (within the prostate gland), intrapulmonary (within the lungs or its bronchi), intrasinal (within the nasal or periorbital sinuses), intraspinal (within the vertebral column), intrasynovial (within the synovial cavity of a joint), intratendinous (within a tendon), intratesticular (within the testicle), intrathecal (within the cerebrospinal fluid at any level of the cerebrospinal axis), intrathoracic (within the thorax), intratubular (within the tubules of an organ), intratumor (within a tumor), intratympanic (within the aurus media), intravascular (within a vessel or vessels), intraventricular (within a ventricle), iontophoresis (by means of electric current where ions of soluble salts migrate into the tissues of the body), irrigation (to bathe or flush open wounds or body cavities), laryngeal (directly upon the larynx), nasogastric (through the nose and into the stomach), occlusive dressing technique (topical route administration which is then covered by a dressing which occludes the area), ophthalmic (to the external eye), oropharyngeal (directly to the mouth and pharynx), parenteral, percutaneous, periarticular, peridural, perineural, periodontal, rectal, respiratory (within the respiratory tract by inhaling orally or nasally for local or systemic effect), retrobulbar (behind the pons or behind the eyeball), soft tissue, subarachnoid, subconjunctival, submucosal, topical, transplacental (through or across the placenta), transtracheal (through the wall of the trachea), transtympanic (across or through the tympanic cavity), ureteral (to the ureter), urethral (to the urethra), vaginal, caudal block, diagnostic, nerve block, biliary perfusion, cardiac perfusion, photopheresis or spinal.

[0704] In specific embodiments, compositions of AAV particles comprising a nucleic acid sequence encoding the siRNA molecules of the present invention may be administered in a way which facilitates the vectors or siRNA molecule to enter the central nervous system and penetrate into medium spiny and/or cortical neurons and/or astrocytes.

[0705] In some embodiments, the AAV particles comprising a nucleic acid sequence encoding the siRNA molecules of the present invention may be administered by intramuscular injection.

[0706] In one embodiment, the AAV particles comprising a nucleic acid sequence encoding the siRNA molecules of the present invention may be administered via intraparenchymal injection.

[0707] In one embodiment, the AAV particles comprising a nucleic acid sequence encoding the siRNA molecules of the present invention may be administered via intraparenchymal injection and intrathecal injection.

[0708] In one embodiment, the AAV particles comprising a nucleic acid sequence encoding the siRNA molecules of the present invention may be administered via intrastriatal injection.

[0709] In one embodiment, the AAV particles comprising a nucleic acid sequence encoding the siRNA molecules of the present invention may be administered via intrastriatal injection and another route of administration described herein.

[0710] In some embodiments, AAV particles that express siRNA duplexes of the present invention may be administered to a subject by peripheral injections (e.g., intravenous) and/or intranasal delivery. It was disclosed in the art that the peripheral administration of AAV particles for siRNA duplexes can be transported to the central nervous system, for example, to the neurons (e.g., U.S. Patent Publication Nos. 20100240739; and 20100130594; the content of each of which is incorporated herein by reference in their entirety).

[0711] In other embodiments, compositions comprising at least one AAV particle comprising a nucleic acid sequence encoding the siRNA molecules of the present invention may be administered to a subject by intracranial delivery (See, e.g., U.S. Pat. No. 8,119,611; the content of which is incorporated herein by reference in its entirety).

[0712] The AAV particle comprising a nucleic acid sequence encoding the siRNA molecules of the present invention may be administered in any suitable form, either as a liquid solution or suspension, as a solid form suitable for liquid solution or suspension in a liquid solution. The siRNA duplexes may be formulated with any appropriate and pharmaceutically acceptable excipient.

[0713] The AAV particle comprising a nucleic acid sequence encoding the siRNA molecules of the present invention may be administered in a “therapeutically effective” amount, i.e., an amount that is sufficient to alleviate and/or prevent at least one symptom associated with the disease, or provide improvement in the condition of the subject.

[0714] In one embodiment, the AAV particle may be administered to the CNS in a therapeutically effective amount to improve function and/or survival for a subject with Huntington's Disease (HD). As a non-limiting example, the vector may be administered by direct infusion into the striatum.

[0715] In one embodiment, the AAV particle may be administered to a subject (e.g., to the CNS of a subject via intrathecal administration) in a therapeutically effective amount for the siRNA duplexes or dsRNA to target the medium spiny neurons, cortical neurons and/or astrocytes. As a non-limiting example, the siRNA duplexes or dsRNA may reduce the expression of HTT protein or mRNA. As another non-limiting example, the siRNA duplexes or dsRNA can suppress HTT and reduce HTT mediated toxicity. The reduction of HTT protein and/or mRNA as well as HTT mediated toxicity may be accomplished with almost no enhanced inflammation.

[0716] In one embodiment, the AAV particle may be administered to a subject (e.g., to the CNS of a subject) in a therapeutically effective amount to slow the functional decline of a subject (e.g., determined using a known evaluation method such as the unified Huntington's disease rating scale (UHDRS)). As a non-limiting example, the vector may be administered via intraparenchymal injection.

[0717] In one embodiment, the AAV particle may be administered to the cistema magna in a therapeutically effective amount to transduce medium spiny neurons, cortical neurons and/or astrocytes. As a non-limiting example, the vector may be administered intrathecally.

[0718] In one embodiment, the AAV particle may be administered using intrathecal infusion in a therapeutically effective amount to transduce medium spiny neurons, cortical neurons and/or astrocytes. As a non-limiting example, the vector may be administered intrathecally.

[0719] In one embodiment, the AAV particle may be administered to the cistema magna in a therapeutically effective amount to transduce medium spiny neurons, cortical neurons and/or astrocytes. As a non-limiting example, the vector may be administered by intraparenchymal injection.

[0720] In one embodiment, the AAV particle comprising a modulatory polynucleotide may be formulated. As a non-limiting example the baricity and/or osmolality of the formulation may be optimized to ensure optimal drug distribution in the central nervous system or a region or component of the central nervous system.

[0721] In one embodiment, the AAV particle comprising a modulatory polynucleotide may be delivered to a subject via a single route administration.

[0722] In one embodiment, the AAV particle comprising a modulatory polynucleotide may be delivered to a subject via a multi-site route of administration. A subject may be administered the AAV particle comprising a modulatory polynucleotide at 2, 3, 4, 5 or more than 5 sites.

[0723] In one embodiment, a subject may be administered the AAV particle comprising a modulatory polynucleotide described herein using a bolus injection.

[0724] In one embodiment, a subject may be administered the AAV particle comprising a modulatory polynucleotide described herein using sustained delivery over a period of minutes, hours or days. The infusion rate may be changed depending on the subject, distribution, formulation or another delivery parameter.

[0725] In one embodiment, the AAV particle described herein is administered via putamen and caudate infusion. As a non-limiting example, the dual infusion provides a broad striatal distribution as well as a frontal and temporal cortical distribution.

[0726] In one embodiment, the AAV particle is AAV-DJ8 which is administered via unilateral putamen infusion. As a non-limiting example, the distribution of the administered AAV-DJ8 is similar to the distribution of AAV1 delivered via unilateral putamen infusion.

[0727] In one embodiment, the AAV particle described herein is administered via intrathecal (IT) infusion at C1. The infusion may be for 1, 2, 3, 4, 6, 7, 8, 9, 10, 11, 12, 13, 14, 15 or more than 15 hours.

[0728] In one embodiment, the selection of subjects for administration of the AAV particle described herein and/or the effectiveness of the dose, route of administration and/or volume of administration may be evaluated using imaging of the perivascular spaces (PVS) which are also known as Virchow-Robin spaces. PVS surround the arterioles and venules as they perforate brain parenchyma and are filled with cerebrospinal fluid (CSF)/interstitial fluid. PVS are common in the midbrain, basal ganglia, and centrum semiovale. While not wishing to be bound by theory, PVS may play a role in the normal clearance of metabolites and have been associated with worse cognition and several disease states including Parkinson's disease. PVS are usually are normal in size but they can increase in size in a number of disease states. Potter et al. (Cerebrovasc Dis. 2015 January; 39(4): 224-231; the contents of which are herein incorporated by reference in its entirety) developed a grading method where they studied a full range of PVS and rated basal ganglia, centrum semiovale and midbrain PVS. They used the frequency and range of PVS used by Mac and Lullich et al. (J Neurol Neurosurg Psychiatry. 2004 November; 75(11):1519-23; the contents of which are herein incorporated by reference in its entirety) and Potter et al. gave 5 ratings to basal ganglia and centrum semiovale PVS: 0 (none), 1 (1-10), 2 (11-20), 3 (21-40) and 4 (>40) and 2 ratings to midbrain PVS: 0 (non visible) or 1 (visible). The user guide for the rating system by Potter et al. can be found at: www.sbirc.ed.ac.uk/documents/epvs-rating-scale-user-guide.pdf.

### Dosing

[0729] The pharmaceutical compositions of the present invention may be administered to a subject using any amount effective for reducing, preventing and/or treating a HTT associated disorder (e.g., Huntington' Disease (HD)). The exact amount required will vary from subject to subject, depending on the species, age, and general condition of the subject, the severity of the disease, the particular composition, its mode of administration, its mode of activity, and the like.

[0730] The compositions of the present invention are typically formulated in unit dosage form for ease of administration and uniformity of dosage. It will be understood, however, that the total daily usage of the compositions of the present invention may be decided by the attending physician within the scope of sound medical judgment. The specific therapeutic effectiveness for any particular patient will depend upon a variety of factors including the disorder being treated and the severity of the disorder; the activity of the specific compound employed; the specific composition employed; the age, body weight, general health, sex and diet of the patient; the time of administration, route of administration, and rate of excretion of the siRNA duplexes employed; the duration of the treatment; drugs used in combination or coincidental with the specific compound employed; and like factors well known in the medical arts.

[0731] In one embodiment, the age and sex of a subject may be used to determine the dose of the compositions of the present invention. As a non-limiting example, a subject who is older may receive a larger dose (e.g., 5-10%, 10-20%, 15-30%, 20-50%, 25-50% or at least 1%, 2%, 3%, 4%, 5%, 10%, 20%, 30%, 40%, 50%, 60%, 70%, 80%, 90% or more than 90% more) of the composition as compared to a younger subject. As another non-limiting example, a subject who is younger may receive a larger dose (e.g., 5-10%, 10-20%, 15-30%, 20-50%, 25-50% or at least 1%, 2%, 3%, 4%, 5%, 10%, 20%, 30%, 40%, 50%, 60%, 70%, 80%, 90% or more than 90% more) of the composition as compared to an older subject. As yet another non-limiting example, a subject who is female may receive a larger dose (e.g., 5-10%, 10-20%, 15-30%, 20-50%, 25-50% or at least 1%, 2%, 3%, 4%, 5%, 10%, 20%, 30%, 40%, 50%, 60%, 70%, 80%, 90% or more than 90% more) of the composition as compared to a male subject. As yet another non-limiting example, a subject who is male may receive a larger dose (e.g., 5-10%, 10-20%, 15-30%, 20-50%, 25-50% or at least 1%, 2%, 3%, 4%, 5%10%, 20%, 30%, 40%, 50%, 60%, 70%, 80%, 90% or more than 90% more) of the composition as compared to a female subject

[0732] In some specific embodiments, the doses of AAV particles for delivering siRNA duplexes of the present invention may be adapted depending on the disease condition, the subject and the treatment strategy.

[0733] In one embodiment, delivery of the compositions in accordance with the present invention to cells comprises a rate of delivery defined by [VG/hour=mL/hour*VG/mL] wherein VG is viral genomes, VG/mL is composition concentration, and mL/hour is rate of prolonged delivery.

[0734] In one embodiment, delivery of compositions in accordance with the present invention to cells may comprise a total concentration per subject between about 1×10⁶ VG and about 1×10¹⁶ VG. In some embodiments, delivery may comprise a composition concentration of about 1×10⁶, 2×10⁶, 3×10⁶, 4×10⁶, 5×10⁶, 6×10⁶, 7×10⁶, 8×10⁶, 9×10⁶, 1×10⁷, 2×10⁷, 3×10⁷, 4×10⁷, 5×10⁷, 6×10⁷, 7×10⁷, 8×10⁷, 9×10⁷, 1×10⁸, 2×10⁸, 3×10⁸, 4×10⁸, 5×10⁸, 6×10⁸, 7×10⁸, 8×10⁸, 9×10⁸, 1×10⁹, 2×10⁹, 3×10⁹, 4×10⁹, 5×10⁹, 6×10⁹, 7×10⁹, 8×10⁹, 9×10⁹, 1×10¹⁰, 2×10¹⁰, 3×10¹⁰, 4×10¹⁰, 5×10¹⁰, 6×10¹⁰, 7×10¹⁰, 8×10¹⁰, 9×10¹⁰, 1×10¹¹, 1.1×10¹¹, 1.2×10¹¹, 1.3×10¹¹, 1.4×10¹¹, 1.5×10¹¹, 1.6×10¹¹, 1.7×10¹¹, 1.8×10¹¹, 1.9×10¹¹, 2×10¹¹, 2.1×10¹¹, 2.2×10¹¹, 2.3×10¹¹, 2.4×10¹¹, 2.5×10¹¹, 2.6×10¹¹, 2.7×10¹¹, 2.8×10¹¹, 2.9×10¹¹, 3×10¹¹, 4×10¹¹, 5×10¹¹, 6×10¹¹, 7×10¹¹, 7.1×10¹¹, 7.2×10¹¹, 7.3×10¹¹, 7.4×10¹¹, 7.5×10¹¹, 7.6×10¹¹, 7.7×10¹¹, 7.8×10¹¹, 7.9×10¹¹, 8×10¹¹, 9×10¹¹, 1×10¹², 1.1×10¹², 1.2×10¹², 1.3×10¹², 1.4×10¹², 1.5×10¹², 1.6×10¹², 1.7×10¹², 1.8×10¹², 1.9×10¹², 2×10¹², 2.1×10¹², 2.2×10¹², 2.3×10¹², 2.4×10¹², 2.5×10¹², 2.6×10¹², 2.7×10¹², 2.8×10¹², 2.9×10¹², 3×10¹², 3.1×10¹², 3.2×10¹², 3.3×10¹², 3.4×10¹², 3.5×10¹², 3.6×10¹², 3.7×10¹², 3.8×10¹², 3.9×10¹², 4×10¹², 4.1×10¹², 4.2×10¹², 4.3×10¹², 4.4×10¹², 4.5×10¹², 4.6×10¹², 4.7×10¹², 4.8×10¹², 4.9×10¹², 5×10¹², 6×10¹², 6.1×10¹², 6.2×10¹², 6.3×10¹², 6.4×10¹², 6.5×10¹², 6.6×10¹², 6.7×10¹², 6.8×10¹², 6.9×10¹², 7×10¹², 8×10¹², 8.1×10¹², 8.2×10¹², 8.3×10¹², 8.4×10¹², 8.5×10¹², 8.6×10¹², 8.7×10¹², 8.8×10¹², 8.9×10¹², 9×10¹², 1×10¹³, 1.1×10¹³, 1.2×10¹³, 1.3×10¹³, 1.4×10¹³, 1.5×10¹³, 1.6×10¹³, 1.7×10¹³, 1.8×10¹³, 1.9×10¹³, 2×10¹³, 3×10¹³, 4×10¹³, 5×10¹³, 6×10¹³, 6.7×10¹³, 7×10¹³, 8×10¹³, 9×10¹³, 1×10¹⁴, 2×10¹⁴, 3×10¹⁴, 4×10¹⁴, 5×10¹⁴, 6×10¹⁴, 7×10¹⁴, 8×10¹⁴, 9×10¹⁴, 1×10¹⁵, 2×10¹⁵, 3×10¹⁵, 4×10¹⁵, 5×10¹⁵, 6×10¹⁵, 7×10¹⁵, 8×10¹⁵, 9×10¹⁵, or 1×10¹⁶ VG/subject.

[0735] In one embodiment, delivery of compositions in accordance with the present invention to cells may comprise a total concentration per subject between about 1×10⁶ VG/kg and about 1×10¹⁶ VG/kg. In some embodiments, delivery may comprise a composition concentration of about 1×10⁶, 2×10⁶, 3×10⁶, 4×10⁶, 5×10⁶, 6×10⁶, 7×10⁶, 8×10⁶, 9×10⁶, 1×10⁷, 2×10⁷, 3×10⁷, 4×10⁷, 5×10⁷, 6×10⁷, 7×10⁷, 8×10⁷, 9×10⁷, 1×10⁸, 2×10⁸, 3×10⁸, 4×10⁸, 5×10⁸, 6×10⁸, 7×10⁸, 8×10⁸, 9×10⁸, 1×10⁹, 2×10⁹, 3×10⁹, 4×10⁹, 5×10⁹, 6×10⁹, 7×10⁹, 8×10⁹, 9×10⁹, 1×10¹⁰, 2×10¹⁰, 3×10¹⁰, 4×10¹⁰, 5×10¹⁰, 6×10¹¹, 7×10¹¹, 8×10¹⁰, 9×10¹⁰, 1×10¹¹, 1.1×10¹¹, 1.2×10¹¹, 1.3×10¹¹, 1.4×10¹¹, 1.5×10¹¹, 1.6×10¹¹, 1.7×10¹¹, 1.8×10¹¹, 1.9×10¹¹, 2×10¹¹, 2.1×10¹¹, 2.2×10¹¹, 2.3×10¹¹, 2.4×10¹¹, 2.5×10¹¹, 2.6×10¹¹, 2.7×10¹¹, 2.8×10¹¹, 2.9×10¹¹, 3×10¹¹, 4×10¹¹, 5×10¹¹, 6×10¹¹, 7×10¹¹, 7.1×10¹¹, 7.2×10¹¹, 7.3×10¹¹, 7.4×10¹¹, 7.5×10¹¹, 7.6×10¹¹, 7.7×10¹¹, 7.8×10¹¹, 7.9×10¹¹, 8×10¹¹, 9×10¹¹, 1×10¹², 1.1×10¹², 1.2×10¹², 1.3×10¹², 1.4×10¹², 1.5×10¹², 1.6×10¹², 1.7×10¹², 1.8×10¹², 1.9×10¹², 2×10¹², 2.1×10¹², 2.2×10¹², 2.3×10¹², 2.4×10¹², 2.5×10¹², 2.6×10¹², 2.7×10¹², 2.8×10¹², 2.9×10¹², 3×10¹², 3.1×10¹², 3.2×10¹², 3.3×10¹², 3.4×10¹², 3.5×10¹², 3.6×10¹², 3.7×10¹², 3.8×10¹², 3.9×10¹², 4×10¹², 4.1×10¹², 4.2×10¹², 4.3×10¹², 4.4×10¹², 4.5×10¹², 4.6×10¹², 4.7×10¹², 4.8×10¹², 4.9×10¹², 5×10¹², 6×10¹², 6.1×10¹², 6.2×10¹², 6.3×10¹², 6.4×10¹², 6.5×10¹², 6.6×10¹², 6.7×10¹², 6.8×10¹², 6.9×10¹², 7×10¹², 8×10¹², 8.1×10¹², 8.2×10¹², 8.3×10¹², 8.4×10¹², 8.5×10¹², 8.6×10¹², 8.7×10¹², 8.8×10¹², 8.9×10¹², 9×10¹², 1×10¹³, 1.1×10¹³, 1.2×10¹³, 1.3×10¹³, 1.4×10¹³, 1.5×10¹³, 1.6×10¹³, 1.7×10¹³, 1.8×10¹³, 1.9×10¹³, 2×10¹³, 3×10¹³, 4×10¹³, 5×10¹³, 6×10¹³, 6.7×10¹³, 7×10¹³, 8×10¹³, 9×10¹³, 1×10¹⁴, 2×10¹⁴, 3×10¹⁴, 4×10¹⁴, 5×10¹⁴, 6×10¹⁴, 7×10¹⁴, 8×10¹⁴, 9×10¹⁴, 1×10¹⁵, 2×10¹⁵, 3×10¹⁵, 4×10¹⁵, 5×10¹⁵, 6×10¹⁵, 7×10¹⁵, 8×10¹⁵, 9×10¹⁵, or 1×10¹⁶ VG/kg.

[0736] In one embodiment, about 10⁵ to 10⁶ viral genome (unit) may be administered per dose.

[0737] In one embodiment, delivery of the compositions in accordance with the present invention to cells may comprise a total concentration between about 1×10⁶ VG/mL and about 1×10¹⁶ VG/mL. In some embodiments, delivery may comprise a composition concentration of about 1×10⁶, 2×10⁶, 3×10⁶, 4×10⁶, 5×10⁶, 6×10⁶, 7×10⁶, 8×10⁶, 9×10⁶, 1×10⁷, 2×10⁷, 3×10⁷, 4×10⁷, 5×10⁷, 6×10⁷, 7×10⁷, 8×10⁷, 9×10⁷, 1×10⁸, 2×10⁸, 3×10⁸, 4×10⁸, 5×10⁸, 6×10⁸, 7×10⁸, 8×10⁸, 9×10⁸, 1×10⁹, 2×10⁹, 3×10⁹, 4×10⁹, 5×10⁹, 6×10⁹, 7×10⁹, 8×10⁹, 9×10⁹, 1×10¹⁰, 2×10¹⁰, 3×10¹⁰, 4×10¹⁰, 5×10¹⁰, 6×10¹⁰, 7×10¹⁰, 8×10¹⁰, 9×10¹⁰, 1×10¹¹, 1.1×10¹¹, 1.2×10¹¹, 1.3×10¹¹, 1.4×10¹¹, 1.5×10¹¹, 1.6×10¹¹, 1.7×10¹¹, 1.8×10¹¹, 1.9×10¹¹, 2×10¹¹, 3×10¹¹, 4×10¹¹, 5×10¹¹, 6×10¹¹, 7×10¹¹, 8×10¹¹, 9×10¹¹, 1×10¹², 1.1×10¹², 1.2×10¹², 1.3×10¹², 1.4×10¹², 1.5×10¹², 1.6×10¹², 1.7×10¹², 1.8×10¹², 1.9×10¹², 2×10¹², 2.1×10¹², 2.2×10¹², 2.3×10¹², 2.4×10¹², 2.5×10¹², 2.6×10¹², 2.7×10¹², 2.8×10¹², 2.9×10¹², 3×10¹², 3.1×10¹², 3.2×10¹², 3.3×10¹², 3.4×10¹², 3.5×10¹², 3.6×10¹², 3.7×10¹², 3.8×10¹², 3.9×10¹², 4×10¹², 4.1×10¹², 4.2×10¹², 4.3×10¹², 4.4×10¹², 4.5×10¹², 4.6×10¹², 4.7×10¹², 4.8×10¹², 4.9×10¹², 5×10¹², 6×10¹², 6.1×10¹², 6.2×10¹², 6.3×10¹², 6.4×10¹², 6.5×10¹², 6.6×10¹², 6.7×10¹², 6.8×10¹², 6.9×10¹², 7×10¹², 8×10¹², 9×10¹², 1×10¹³, 1.1×10¹³, 1.2×10¹³, 1.3×10¹³, 1.4×10¹³, 1.5×10¹³, 1.6×10¹³, 1.7×10¹³, 1.8×10¹³, 1.9×10¹³, 2×10¹³, 3×10¹³, 4×10¹³, 5×10¹³, 6×10¹³, 6.7×10¹³, 7×10¹³, 8×10¹³, 9×10¹³, 1×10¹⁴, 2×10¹⁴, 3×10¹⁴, 4×10¹⁴, 5×10¹⁴, 6×10¹⁴, 7×10¹⁴, 8×10¹⁴, 9×10¹⁴, 1×10¹⁵, 2×10¹⁵, 3×10¹⁵, 4×10¹⁵, 5×10¹⁵, 6×10¹⁵, 7×10¹⁵, 8×10¹⁵, 9×10¹⁵, or 1×10¹⁶ VG/ML.

[0738] In certain embodiments, the desired siRNA duplex dosage may be delivered using multiple administrations (e.g., two, three, four, five, six, seven, eight, nine, ten, eleven, twelve, thirteen, fourteen, or more administrations). When multiple administrations are employed, split dosing regimens such as those described herein may be used. As used herein, a “split dose” is the division of single unit dose or total daily dose into two or more doses, e.g., two or more administrations of the single unit dose. As used herein, a “single unit dose” is a dose of any modulatory polynucleotide therapeutic administered in one dose/at one time/single route/single point of contact, i.e., single administration event. As used herein, a “total daily dose” is an amount given or prescribed in a 24 hour period. It may be administered as a single unit dose. In one embodiment, the AAV particles comprising the modulatory polynucleotides of the present invention are administered to a subject in split doses. They may be formulated in buffer only or in a formulation described herein.

[0739] In one embodiment, the dose, concentration and/or volume of the composition described herein may be adjusted depending on the contribution of the caudate or putamen to cortical and subcortical distribution after administration. The administration may be intracerebroventricular, intraputamenal, intrathalamic, intraparenchymal, subpial, and/or intrathecal administration.

[0740] In one embodiment, the dose, concentration and/or volume of the composition described herein may be adjusted depending on the cortical and neuraxial distribution following administration by intracerebroventricular, intraputamenal, intrathalamic, intraparenchymal, subpial, and/or intrathecal delivery.

### IV. Methods and Uses of the Compositions of the Invention

### Huntington's Disease (HD)

[0741] Huntington's Disease (HD) is a monogenic fatal neurodegenerative disease characterized by progressive chorea, neuropsychiatric and cognitive dysfunction. Huntington's disease is known to be caused by an autosomal dominant triplet (CAG) repeat expansion in the huntingtin (HTT) gene, which encodes poly-glutamine at the N-terminus of the HTT protein. This repeat expansion results in a toxic gain of function of HTT and ultimately leads to striatal neurodegeneration which progresses to widespread brain atrophy. Medium spiny neurons of the striatum appear to be especially vulnerable in HD with up to 95% loss, whereas interneurons are largely spared.

[0742] Huntington's Disease has a profound impact on quality of life. Symptoms typically appear between the ages of 35-44 and life expectancy subsequent to onset is 10-25 years. In a small percentage of the HD population (˜6%), disease onset occurs prior to the age of 21 with appearance of an akinetic-rigid syndrome. These cases tend to progress faster than those of the later onset variety and have been classified as juvenile or Westphal variant HD. It is estimated that approximately 35,000-70,000 patients are currently suffering from HD in the US and Europe. Currently, only symptomatic relief and supportive therapies are available for treatment of HD, with a cure yet to be identified. Ultimately, individuals with HD succumb to pneumonia, heart failure or other complications such as physical injury from falls.

[0743] While not wishing to be bound by theory, the function of the wild type HTT protein may serve as a scaffold to coordinate complexes of other proteins. HTT is a very large protein (67 exons, 3144 amino acids, ˜350 kDa) that undergoes extensive post-translational modification and has numerous sites for interaction with other proteins, particularly at its N-terminus (coincidently the region that carries the repeats in HD). HTT localizes primarily to the cytoplasm but has been shown to shuttle into the nucleus where it may regulate gene transcription. It has also been suggested that HTT has a role in vesicular transport and regulating RNA trafficking.

[0744] As a non-limiting example, the HTT protein sequence is SEQ ID NO: 1424 (NCBI NP_002102.4) and the HTT nucleic acid sequence is SEQ ID NO: 1425 (NCBI NM_002111.7).

[0745] The mechanisms by which CAG-expanded HTT disrupts normal HTT function and results in neurotoxicity were initially thought to be a disease of haploinsufficiency, this theory was disproven when terminal deletion of the HTT gene in man did not lead to development of HD, suggesting that fully expressed HTT protein is not critical to survival. However, conditional knockout of HTT in mouse led to neurodegeneration, indicating that some amount of HTT is necessary for cell survival. Huntingtin protein is expressed in all cells, though its concentration is highest in the brain where large aggregates of abnormal HTT are found in neuronal nuclei. In the brains of HD patients, HTT aggregates into abnormal nuclear inclusions. It is now believed that it is this process of misfolding and aggregating along with the associated protein intermediates (i.e. the soluble species and toxic N-terminal fragments) that result in neurotoxicity. In fact, HD belongs to a family of nine additional human genetic disorders all of which are characterized by CAG-expanded genes and resultant polyglutamine (poly-Q) protein products with subsequent formation of intraneuronal aggregates. Interestingly, in all of these diseases the length of the expansion correlates with both age of onset and rate of disease progression, with longer expansions linked to greater severity of disease.

[0746] Hypotheses on the molecular mechanisms underlying the neurotoxicity of CAG-expanded HTT and its resultant aggregates have been wide ranging, but include, caspase activation, dysregulation of transcriptional pathways, increased production of reactive oxygen species, mitochondrial dysfunction, disrupted axonal transport and/or inhibition of protein degradation systems within the cell. CAG-expanded HTT may not only have a toxic gain of function, but also exert a dominant negative effect by interfering with the normal function of other cellular proteins and processes. HTT has also been implicated in non-cell autonomous neurotoxicity, whereby a cell hosting HTT spreads the HTT to other neurons nearby.

[0747] In one embodiment, a subject has fully penetrant HD where the HTT gene has 41 or more CAG repeats (e.g., 41, 42, 43, 44, 45, 46, 47, 48, 49, 50, 51, 52, 53, 54, 55, 56, 57, 58, 59, 60, 61, 62, 63, 64, 65, 66, 67, 68, 69, 70, 71, 72, 73, 74, 75, 76, 77, 78, 79, 80, 81, 82, 83, 84, 85, 86, 87, 88, 89, 90 or more than 90 CAG repeats).

[0748] In one embodiment, a subject has incomplete penetrance where the HTT gene has between 36 and 40 CAG repeats (e.g., 36, 37, 38, 39 and 40 CAG repeats).

[0749] Symptoms of HD may include features attributed to CNS degeneration such as, but are not limited to, chorea, dystonia, bradykinesia, incoordination, irritability and depression, problem solving difficulties, reduction in the ability of a person to function in their normal day to day life, diminished speech, and difficulty swallowing, as well as features not attributed to CNS degeneration such as, but not limited to, weight loss, muscle wasting, metabolic dysfunction and endocrine disturbances.

[0750] Model systems for studying Huntington's Disease which may be used with the modulatory polynucleotides and AAV particles described herein include, but are not limited to, cell models (e.g., primary neurons and induced pluripotent stem cells), invertebrate models (e.g., drosophila or Caenorhabditis elegans), mouse models (e.g., YAC128 mouse model; R6/2 mouse model; BAC, YAC and knock-in mouse model), rat models (e.g., BAC) and large mammal models (e.g., pigs, sheep or monkeys).

[0751] Studies in animal models of HD have suggested that phenotypic reversal is feasible, for example, subsequent to gene shut off in regulated-expression models. In a mouse model allowing shut off of expression of a 94-polyglutamine repeat HTT protein, not only was the clinical syndrome reversed but also the intracellular aggregates were resolved. Further, animal models in which silencing of HTT was tested, demonstrated promising results with the therapy being both well tolerated and showing potential therapeutic benefit.

[0752] Such siRNA mediated HTT expression inhibition may be used for treating HD. According to the present invention, methods for treating and/or ameliorating HD in a patient comprises administering to the patient an effective amount of AAV particles comprising a nucleic acid sequence encoding the siRNA molecules of the present invention into cells. The administration of the AAV particles comprising such a nucleic acid sequence will encode the siRNA molecules which cause the inhibition/silence of HTT gene expression.

[0753] In one embodiment, the AAV particles described herein may be used to reduce the amount of HTT in a subject in need thereof and thus provides a therapeutic benefit as described herein.

[0754] In certain aspects, the symptoms of HD include behavioral difficulties and symptoms such as, but not limited to, apathy or lack of initiative, dysphoria, irritability, agitation or anxiety, poor self-care, poor judgment, inflexibility, disinhibition, depression, suicidal ideation euphoria, aggression, delusions, compulsions, hypersexuality, hallucinations, speech deterioration, slurred speech, difficulty swallowing, weight loss, cognitive dysfunction which impairs executive functions (e.g., organizing, planning, checking or adapting alternatives, and delays in the acquisition of new motor skills), unsteady gait and involuntary movements (chorea). In other aspects, the composition of the present invention is applied to one or both of the brain and the spinal cord. In one embodiment, the survival of the subject is prolonged by treating any of the symptoms of HD described herein.

[0755] Disclosed in the present invention are methods for treating Huntington's Disease (HD) associated with HTT protein in a subject in need of treatment. The method optionally comprises administering to the subject a therapeutically effective amount of a composition comprising at least AAV particles comprising a nucleic acid sequence encoding the siRNA molecules of the present invention. As a non-limiting example, the siRNA molecules can silence HTT gene expression, inhibit HTT protein production, and reduce one or more symptoms of HD in the subject such that HD is therapeutically treated.

### Methods of Treatment of Huntington's Disease

[0756] The present invention provides AAV particles comprising modulatory polynucleotides encoding siRNA molecules targeting the HTT gene, and methods for their design and manufacture. While not wishing to be bound by a single theory of operability, the invention provides modulatory polynucleotides, including siRNAs, that interfere with HTT expression, including HTT mutant and/or wild-type HTT gene expression. Particularly, the present invention employs viral genomes such as adeno-associated viral (AAV) viral genomes comprising modulatory polynucleotide sequences encoding the siRNA molecules of the present invention. The AAV vectors comprising the modulatory polynucleotides encoding the siRNA molecules of the present invention may increase the delivery of active agents into neurons of interest such as medium spiny neurons of the striatum and cortical neurons. The siRNA duplexes or encoded dsRNA targeting the HTT gene may be able to inhibit HTT gene expression (e.g., mRNA level) significantly inside cells; therefore, reducing HTT expression induced stress inside the cells such as aggregation of protein and formation of inclusions, increased free radicals, mitochondrial dysfunction and RNA metabolism.

[0757] Provided in the present invention are methods for introducing the AAV particles comprising a modulatory polynucleotide sequence encoding the siRNA molecules of the present invention into cells, the method comprising introducing into said cells any of the AAV particles in an amount sufficient for degradation of target HTT mRNA to occur, thereby activating target-specific RNAi in the cells. In some aspects, the cells may be stem cells, neurons such as medium spiny or cortical neurons, muscle cells and glial cells such as astrocytes.

[0758] In some embodiments, the present invention provides methods for treating or ameliorating Huntington's Disease (HD) by administering to a subject in need thereof a therapeutically effective amount of a plasmid or AAV vector described herein.

[0759] In some embodiments, the AAV particles comprising modulatory polynucleotides encoding the siRNA molecules of the present invention may be used to treat and/or ameliorate for HD.

[0760] In one embodiment, the AAV particles comprising modulatory polynucleotides encoding the siRNA molecules of the present invention may be used to reduce the cognitive and/or motor decline of a subject with HD, where the amount of decline is determined by a standard evaluation system such as, but not limited to, Unified Huntington's Disease Ratings Scale (UHDRS) and subscores, and cognitive testing.

[0761] In one embodiment, the AAV particles comprising modulatory polynucleotides encoding the siRNA molecules of the present invention may be used to reduce the decline of functional capacity and activities of daily living as measured by a standard evaluation system such as, but not limited to, the total functional capacity (TFC) scale.

[0762] In some embodiments, the present invention provides methods for treating, or ameliorating Huntington's Disease associated with HTT gene and/or HTT protein in a subject in need of treatment, the method comprising administering to the subject a pharmaceutically effective amount of AAV particles comprising modulatory polynucleotides encoding at least one siRNA duplex targeting the HTT gene, inhibiting HTT gene expression and protein production, and ameliorating symptoms of HD in the subject.

[0763] In one embodiment, the AAV vectors of the present invention may be used as a method of treating Huntington's disease in a subject in need of treatment. Any method known in the art for defining a subject in need of treatment may be used to identify said subject(s). A subject may have a clinical diagnosis of Huntington's disease, or may be pre-symptomatic. Any known method for diagnosing HD may be utilized, including, but not limited to, cognitive assessments and/or neurological or neuropsychiatric examinations, motor tests, sensory tests, psychiatric evaluations, brain imaging, family history and/or genetic testing.

[0764] In one embodiment, HD subject selection is determined with the use of the Prognostic Index for Huntington's Disease, or a derivative thereof (Long J D et al., Movement Disorders, 2017, 32(2), 256-263, the contents of which are herein incorporated by reference in their entirety). This prognostic index uses four components to predict probability of motor diagnosis, (1) total motor score (TMS) from the Unified Huntington's Disease Rating Scale (UHDRS), (2) Symbol Digit Modality Test (SDMT), (3) base-line age, and (4) cytosine-adenine-guanine (CAG) expansion.

[0765] In one embodiment, the prognostic index for Huntington's Disease is calculated with the following formula: PI_{HD}=51×TMS+(−34)×SDMT+7×Age×(CAG-34), wherein larger values for PI_{HD} indicate greater risk of diagnosis or onset of symptoms.

[0766] In another embodiment, the prognostic index for Huntington's Disease is calculated with the following normalized formula that gives standard deviation units to be interpreted in the context of 50% 10-year survival: PIN_{HD}=(PI_{HD}−883)/1044, wherein PIN_{HD}<0 indicates greater than 50% 10-year survival, and PIN_{HD}>0 suggests less than 50% 10-year survival.

[0767] In one embodiment, the prognostic index may be used to identify subjects whom will develop symptoms of HD within several years, but that do not yet have clinically diagnosable symptoms. Further, these asymptomatic patients may be selected for and receive treatment using the AAV vectors and compositions of the present invention during the asymptomatic period.

[0768] In one embodiment, the AAV particles may be administered to a subject who has undergone biomarker assessment. Potential biomarkers in blood for premanifest and early progression of HD include, but are not limited to, 8-OhdG oxidative stress marker, metabolic markers (e.g., creatine kinase, branched-chain amino acids), cholesterol metabolites (e.g., 24-OH cholesterol), immune and inflammatory proteins (e.g., clusterin, complement components, interleukins 6 and 8), gene expression changes (e.g., transcriptomic markers), endocrine markers (e.g., cortisol, ghrelin and leptin), BDNF, adenosine 2A receptors. Potential biomarkers for brain imaging for premanifest and early progression of HD include, but are not limited to, striatal volume, subcortical white-matter volume, cortical thickness, whole brain and ventricular volumes, functional imaging (e.g., functional MRI), PET (e.g., with fluorodeoxyglucose), and magnetic resonance spectroscopy (e.g., lactate). Potential biomarkers for quantitative clinical tools for premanifest and early progression of HD include, but are not limited to, quantitative motor assessments, motor physiological assessments (e.g., transcranial magnetic stimulation), and quantitative eye movement measurements. Non-limiting examples of quantitative clinical biomarker assessments include tongue force variability, metronome-guided tapping, grip force, oculomotor assessments and cognitive tests. Non-limiting examples of multicenter observational studies include PREDICT-HD and TRACK-HD. A subject may have symptoms of HD, diagnosed with HD or may be asymptomatic for HD.

[0769] In one embodiment, the AAV particles may be administered to a subject who has undergone biomarker assessment using neuroimaging. A subject may have symptoms of HD, diagnosed with HD or may be asymptomatic for HD.

[0770] In one embodiment, the AAV particles may be administered to a subject who is asymptomatic for HD. A subject may be asymptomatic but may have undergone predictive genetic testing or biomarker assessment to determine if they are at risk for HD and/or a subject may have a family member (e.g., mother, father, brother, sister, aunt, uncle, grandparent) who has been diagnosed with HD.

[0771] In one embodiment, the AAV particles may be administered to a subject who is in the early stages of HD. In the early stage a subject has subtle changes in coordination, some involuntary movements (chorea), changes in mood such as irritability and depression, problem solving difficulties, reduction in the ability of a person to function in their normal day to day life.

[0772] In one embodiment, the AAV particles may be administered to a subject who is in the middle stages of HD. In the middle stage a subject has an increase in the movement disorder, diminished speech, difficulty swallowing, and ordinary activities will become harder to do. At this stage a subject may have occupational and physical therapists to help maintain control of voluntary movements and a subject may have a speech language pathologist.

[0773] In one embodiment, the AAV particles may be administered to a subject who is in the late stages of HD. In the late stage, a subject with HD is almost completely or completely dependent on others for care as the subject can no longer walk and is unable to speak. A subject can generally still comprehend language and is aware of family and friends but choking is a major concern.

[0774] In one embodiment, the AAV particles may be used to treat a subject who has the juvenile form of HD which is the onset of HD before the age of 20 years and as early as 2 years.

[0775] In one embodiment, the AAV particles may be used to treat a subject with HD who has fully penetrant HD where the HTT gene has 41 or more CAG repeats (e.g., 41, 42, 43, 44, 45, 46, 47, 48, 49, 50, 51, 52, 53, 54, 55, 56, 57, 58, 59, 60, 61, 62, 63, 64, 65, 66, 67, 68, 69, 70, 71, 72, 73, 74, 75, 76, 77, 78, 79, 80, 81, 82, 83, 84, 85, 86, 87, 88, 89, 90 or more than 90 CAG repeats).

[0776] In one embodiment, the AAV particles may be used to treat a subject with HD who has incomplete penetrance where the HTT gene has between 36 and 40 CAG repeats (e.g., 36, 37, 38, 39 and 40 CAG repeats).

[0777] In some embodiments, the composition comprising the AAV particles comprising modulatory polynucleotides encoding the siRNA molecules of the present invention is administered to the central nervous system of the subject. In other embodiments, the composition comprising the AAV particles comprising modulatory polynucleotides encoding the siRNA molecules of the present invention is administered to a tissue of a subject (e.g., brain of the subject).

[0778] In one embodiment, the AAV particles comprising modulatory polynucleotides encoding the siRNA molecules of the present invention may be delivered into specific types of targeted cells, including, but not limited to, neurons including medium spiny or cortical neurons; glial cells including oligodendrocytes, astrocytes and microglia; and/or other cells surrounding neurons such as T cells.

[0779] In one embodiment, the AAV particles comprising modulatory polynucleotides encoding the siRNA molecules of the present invention may be delivered to neurons in the striatum and/or neurons of the cortex.

[0780] In some embodiments, the composition of the present invention for treating HD is administered to the subject in need intravenously, intramuscularly, subcutaneously, intraperitoneally, intraparenchymally, subpially, intrathecally and/or intraventricularly, allowing the siRNA molecules or vectors comprising the siRNA molecules to pass through one or both the blood-brain barrier and the blood spinal cord barrier, or directly access the brain and/or spinal cord. In some aspects, the method includes administering (e.g., intraparenchymal administration, subpial administration, intraventricular administration and/or intrathecal administration) directly to the central nervous system (CNS) of a subject (using, e.g., an infusion pump and/or a delivery scaffold) a therapeutically effective amount of a composition comprising AAV particles encoding the nucleic acid sequence for the siRNA molecules of the present invention. The vectors may be used to silence or suppress HTT gene expression, and/or reducing one or more symptoms of HD in the subject such that HD is therapeutically treated.

[0781] In some embodiments, the siRNA molecules or the AAV vectors comprising such siRNA molecules may be introduced directly into the central nervous system of the subject, for example, by infusion to the white matter a subject. While not wishing to be bound by theory, distribution via direct white matter infusion may be independent of axonal transport mechanisms which may be impaired in subjects with Huntington's Disease which means white matter infusion may allow for more transport of the AAV vectors.

[0782] In one embodiment, the composition comprising the AAV particles comprising modulatory polynucleotides encoding the siRNA molecules of the present invention is administered to the central nervous system of the subject via intraparenchymal injection.

[0783] In one embodiment, the AAV particle composition comprising modulatory polynucleotides encoding the siRNA molecules of the present invention is administered to the central nervous system of the subject via intraparenchymal injection and intrathecal injection.

[0784] In one embodiment, the AAV particle composition comprising modulatory polynucleotides encoding the siRNA molecules of the present invention is administered to the central nervous system of the subject via intraparenchymal injection and intracerebroventricular injection.

[0785] In some embodiments, the composition of the present invention for treating HD is administered to the subject in need by intraparenchymal administration.

[0786] In some embodiments, the AAV particle composition comprising modulatory polynucleotides encoding the siRNA molecules of the present invention may be introduced directly into the central nervous system of the subject, for example, by infusion into the putamen.

[0787] In some embodiments, the AAV particle composition comprising modulatory polynucleotides encoding the siRNA molecules of the present invention may be introduced directly into the central nervous system of the subject, for example, by infusion into the thalamus of a subject. While not wishing to be bound by theory, the thalamus is an area of the brain which is relatively spared in subjects with Huntington's Disease which means it may allow for more widespread cortical transduction via axonal transport of the AAV vectors.

[0788] In some embodiments, the AAV particle composition comprising modulatory polynucleotides encoding the siRNA molecules of the present invention may be introduced indirectly into the central nervous system of the subject, for example, by intravenous administration.

### Modulate HTT Expression

[0789] In one embodiment, administration of the AAV particles to a subject will reduce the expression of HTT in a subject and the reduction of expression of the HTT will reduce the effects of HD in a subject.

[0790] In one embodiment, the encoded dsRNA once expressed and contacts a cell expressing HTT protein, inhibits the expression of HTT protein by at least 10%, at least 20%, at least 25%, at least 30%, at least 35% or at least 40% or more, such as when assayed by a method as described herein.

[0791] In one embodiment, administration of the AAV particles comprising a modulatory polynucleotide sequence encoding a siRNA of the invention, to a subject may lower HTT (e.g., mutant HTT, wild-type HTT and/or mutant and wild-type HTT) in a subject. In one embodiment, administration of the AAV particles to a subject may lower wild-type HTT in a subject. In yet another embodiment, administration of the AAV particles to a subject may lower both mutant HTT and wild-type HTT in a subject. The mutant and/or wild-type HTT may be lowered by about 20%, 30%, 40%, 50%, 60%, 70%, 80%, 85%, 90%, 95% and 100%, or at least 20-30%, 20-40%, 20-50%, 20-60%, 20-70%, 20-80%, 20-90%, 20-95%, 20-100%, 30-40%, 30-50%, 30-60%, 30-70%, 30-80%, 30-90%, 30-95%, 30-100%, 40-50%, 40-60%, 40-70%, 40-80%, 40-90%, 40-95%, 40-100%, 50-60%, 50-70%, 50-80%, 50-90%, 50-95%, 50-100%, 60-70%, 60-80%, 60-90%, 60-95%, 60-100%, 70-80%, 70-90%, 70-95%, 70-100%, 80-90%, 80-95%, 80-100%, 90-95%, 90-100% or 95-100% in a subject such as, but not limited to, the CNS, a region of the CNS, or a specific cell of the CNS of a subject. The mutant HTT may be lowered by about 20%, 30%, 40%, 50%, 60%, 70%, 80%, 85%, 90%, 95% and 100%, or at least 20-30%, 20-40%, 20-50%, 20-60%, 20-70%, 20-80%, 20-90%, 20-95%, 20-100%, 30-40%, 30-50%, 30-60%, 30-70%, 30-80%, 30-90%, 30-95%, 30-100%, 40-50%, 40-60%, 40-70%, 40-80%, 40-90%, 40-95%, 40-100%, 50-60%, 50-70%, 50-80%, 50-90%, 50-95%, 50-100%, 60-70%, 60-80%, 60-90%, 60-95%, 60-100%, 70-80%, 70-90%, 70-95%, 70-100%, 80-90%, 80-95%, 80-100%, 90-95%, 90-100% or 95-100% in a subject such as, but not limited to, the CNS, a region of the CNS, or a specific cell of the CNS of a subject. The wild-type HTT may be lowered by about 20%, 30%, 40%, 50%, 60%, 70%, 80%, 85%, 90%, 95% and 100%, or at least 20-30%, 20-40%, 20-50%, 20-60%, 20-70%, 20-80%, 20-90%, 20-95%, 20-100%, 30-40%, 30-50%, 30-60%, 30-70%, 30-80%, 30-90%, 30-95%, 30-100%, 40-50%, 40-60%, 40-70%, 40-80%, 40-90%, 40-95%, 40-100%, 50-60%, 50-70%, 50-80%, 50-90%, 50-95%, 50-100%, 60-70%, 60-80%, 60-90%, 60-95%, 60-100%, 70-80%, 70-90%, 70-95%, 70-100%, 80-90%, 80-95%, 80-100%, 90-95%, 90-100% or 95-100% in a subject such as, but not limited to, the CNS, a region of the CNS, or a specific cell of the CNS of a subject. The mutant and wild-type HTT may be lowered by about 20%, 30%, 40%, 50%, 60%, 70%, 80%, 85%, 90%, 95% and 100%, or at least 20-30%, 20-40%, 20-50%, 20-60%, 20-70%, 20-80%, 20-90%, 20-95%, 20-100%, 30-40%, 30-50%, 30-60%, 30-70%, 30-80%, 30-90%, 30-95%, 30-100%, 40-50%, 40-60%, 40-70%, 40-80%, 40-90%, 40-95%, 40-100%, 50-60%, 50-70%, 50-80%, 50-90%, 50-95%, 50-100%, 60-70%, 60-80%, 60-90%, 60-95%, 60-100%, 70-80%, 70-90%, 70-95%, 70-100%, 80-90%, 80-95%, 80-100%, 90-95%, 90-100% or 95-100% in a subject such as, but not limited to, the CNS, a region of the CNS, or a specific cell of the CNS of a subject. As a non-limiting example, the AAV particles may lower the expression of HTT by at least 50% in the medium spiny neurons. As a non-limiting example, the vectors, e.g., AAV vectors may lower the expression of HTT by at least 40% in the medium spiny neurons. As a non-limiting example, the AAV particles may lower the expression of HTT by at least 40% in the medium spiny neurons of the putamen. As a non-limiting example, AAV particles may lower the expression of HTT by at least 30% in the medium spiny neurons of the putamen. As yet another non-limiting example, the AAV particles may lower the expression of HTT in the putamen and cortex by at least 40%. As yet another non-limiting example, the AAV particles may lower the expression of HTT in the putamen and cortex by at least 30%. As yet another non-limiting example, the AAV particles may lower the expression of HTT in the putamen by at least 30%. As yet another non-limiting example, the AAV particles may lower the expression of HTT in the putamen by at least 30% and cortex by at least 15%.

[0792] In one embodiment, the AAV particles may be used to reduce the expression of HTT protein by at least about 30%, 31%, 32%, 33%, 34%, 35%, 36%, 37%, 38%, 39%, 40%, 41%, 42%, 43%, 44%, 45%, 46%, 47%, 48%, 49%, 50%, 51%, 52%, 53%, 54%, 55%, 56%, 57%, 58%, 59%, 60%, 61%, 62%, 63%, 64%, 65%, 66%, 67%, 68%, 69%, 70%, 71%, 72%, 73%, 74%, 75%, 76%, 77%, 78%, 79%, 80%, 85%, 90%, 95% and 100%, or at least 20-30%, 20-40%, 20-50%, 20-60%, 20-70%, 20-80%, 20-90%, 20-95%, 20-100%, 30-40%, 30-50%, 30-60%, 30-70%, 30-80%, 30-90%, 30-95%, 30-100%, 40-50%, 40-60%, 40-70%, 40-80%, 40-90%, 40-95%, 40-100%, 50-60%, 50-70%, 50-80%, 50-90%, 50-95%, 50-100%, 55-60%, 55-70%, 55-80%, 55-90%, 55-95%, 55-100%, 60-70%, 60-80%, 60-90%, 60-95%, 60-100%, 70-80%, 70-90%, 70-95%, 70-100%, 80-90%, 80-95%, 80-100%, 90-95%, 90-100% or 95-100%. As a non-limiting example, the expression of HTT protein expression may be reduced by 50-90%. As a non-limiting example, the expression of HTT protein expression may be reduced by 30-70%.

[0793] In one embodiment, the siRNA duplexes or encoded dsRNA may be used to reduce the expression of HTT mRNA by at least about 30%, 31%, 32%, 33%, 34%, 35%, 36%, 37%, 38%, 39%, 40%, 41%, 42%, 43%, 44%, 45%, 46%, 47%, 48%4, 49%, 50%, 51%, 52%, 53%, 54%, 55%, 56%, 57%, 58%, 59%, 60%, 61%, 62%, 63%, 64%, 65%, 66%, 67%, 68%, 69%, 70%, 71%, 72%, 73%, 74%, 75%, 76%, 77%, 78%, 79%, 80%, 85%, 90%, 95% and 100%, or at least 20-30%, 20-40%, 20-50%, 20-60%, 20-70%, 20-80%, 20-90%, 20-95%, 20-100%, 30-40%, 30-50%, 30-60%, 30-70%, 30-80%, 30-90%, 30-95%, 30-100%, 40-50%, 40-60%, 40-70%, 40-80%, 40-90%, 40-95%, 40-100%, 50-60%, 50-70%, 50-80%, 50-90%, 50-95%, 50-100%, 55-60%, 55-70%, 55-80%, 55-90%, 55-95%, 55-100%, 60-70%, 60-80%, 60-90%, 60-95%, 60-100%, 70-80%, 70-90%, 70-95%, 70-100%, 80-90%, 80-95%, 80-100%, 90-95%, 90-100% or 95-100%. As a non-limiting example, the expression of HTT mRNA may be reduced 50-90%.

[0794] In one embodiment, the AAV particles may be used to decrease HTT protein in a subject. The decrease may independently be 5%, 10%, 15%, 20%, 25%, 30%, 35%, 40%, 45%, 50%, 55%, 60%, 65%, 70%, 75%, 80%, 85%, 90%, 95%, or more than 95%, 5-15%, 5-20%, 5-25%, 5-30%, 5-35%, 5-40%, 5-45%, 5-50%, 5-55%, 5-60%, 5-65%, 5-70%, 5-75%, 5-80%, 5-85%, 5-90%, 5-95%, 10-20%, 10-25%, 10-30%, 10-35%, 10-40%, 10-45%, 10-50%, 10-55%, 10-60%, 10-65%, 10-70%, 10-75%, 10-80%, 10-85%, 10-90%, 10-95%, 15-25%, 15-30%, 15-35%, 15-40%, 15-45%, 15-50%, 15-55%, 15-60%, 15-65%, 15-70%, 15-75%, 15-80%, 15-85%, 15-90%, 15-95%, 20-30%, 20-35%, 20-40%, 20-45%, 20-50%, 20-55%, 20-60%, 20-65%, 20-70%, 20-75%, 20-80%, 20-85%, 20-90%, 20-95%, 25-35%, 25-40%, 25-45%, 25-50%, 25-55%, 25-60%, 25-65%, 25-70%, 25-75%, 25-80%, 25-85%, 25-90%, 25-95%, 30-40%, 30-45%, 30-50%, 30-55%, 30-60%, 30-65%, 30-70%, 30-75%, 30-80%, 30-85%, 30-90%, 30-95%, 35-45%, 35-50%, 35-55%, 35-60%, 35-65%, 35-70%, 35-75%, 35-80%, 35-85%, 35-90%, 35-95%, 40-50%, 40-55%, 40-60%, 40-65%, 40-70%, 40-75%, 40-80%, 40-85%, 40-90%, 40-95%, 45-55%, 45-60%, 45-65%, 45-70%, 45-75%, 45-80%, 45-85%, 45-90%, 45-95%, 50-60%, 50-65%, 50-70%, 50-75%, 50-80%, 50-85%, 50-90%, 50-95%, 55-65%, 55-70%, 55-75%, 55-80%, 55-85%, 55-90%, 55-95%, 60-70%, 60-75%, 60-80%, 60-85%, 60-90%, 60-95%, 65-75%, 65-80%, 65-85%, 65-90%, 65-95%, 70-80%, 70-85%, 70-90%, 70-95%, 75-85%, 75-90%, 75-95%, 80-90%, 80-95%, or 90-95%. As anon-limiting example, a subject may have a 50% decrease of HTT protein. As a non-limiting example, a subject may have a decrease of 70% of HTT protein and a decrease of 10% of wild type HTT protein. As a non-limiting example, the decrease of HTT in the medium spiny neurons of the putamen may be about 40%. As a non-limiting example, the decrease of HTT in the putamen and cortex may be about 40%. As a non-limiting example, the decrease of HTT in the medium spiny neurons of the putamen may be between 40%-70%. As a non-limiting example, the decrease of HTT in the putamen and cortex may be between 40%-70%.

[0795] In one embodiment, the AAV particles may be used to decrease wild type HTT protein in a subject. The decrease may independently be 5%, 10%, 15%, 20%, 25%, 30%, 35%, 40%, 45%, 50%, 55%, 60%, 65%, 70%, 75%, 80%, 85%, 90%, 95%, or more than 95%, 5-15%, 5-20%, 5-25%, 5-30%, 5-35%, 5-40%, 5-45%, 5-50%, 5-55%, 5-60%, 5-65%, 5-70%, 5-75%, 5-80%, 5-85%, 5-90%, 5-95%, 10-20%, 10-25%, 10-30%, 10-35%, 10-40%, 10-45%, 10-50%, 10-55%, 10-60%, 10-65%, 10-70%, 10-75%, 10-80%, 10-85%, 10-90%, 10-95%, 15-25%, 15-30%, 15-35%, 15-40%, 15-45%, 15-50%, 15-55%, 15-60%, 15-65%, 15-70%, 15-75%, 15-80%, 15-85%, 15-90%, 15-95%, 20-30%, 20-35%, 20-40%, 20-45%, 20-50%, 20-55%, 20-60%, 20-65%, 20-70%, 20-75%, 20-80%, 20-85%, 20-90%, 20-95%, 25-35%, 25-40%, 25-45%, 25-50%, 25-55%, 25-60%, 25-65%, 25-70%, 25-75%, 25-80%, 25-85%, 25-90%, 25-95%, 30-40%, 30-45%, 30-50%, 30-55%, 30-60%, 30-65%, 30-70%, 30-75%, 30-80%, 30-85%, 30-90%, 30-95%, 35-45%, 35-50%, 35-55%, 35-60%, 35-65%, 35-70%, 35-75%, 35-80%, 35-85%, 35-90%, 35-95%, 40-50%, 40-55%, 40-60%, 40-65%, 40-70%, 40-75%, 40-80%, 40-85%, 40-90%, 40-95%, 45-55%, 45-60%, 45-65%, 45-70%, 45-75%, 45-80%, 45-85%, 45-90%, 45-95%, 50-60%, 50-65%, 50-70%, 50-75%, 50-80%, 50-85%, 50-90%, 50-95%, 55-65%, 55-70%, 55-75%, 55-80%, 55-85%, 55-90%, 55-95%, 60-70%, 60-75%, 60-80%, 60-85%, 60-90%, 60-95%, 65-75%, 65-80%, 65-85%, 65-90%, 65-95%, 70-80%, 70-85%, 70-90%, 70-95%, 75-85%, 75-90%, 75-95%, 80-90%, 80-95%, or 90-95%. As a non-limiting example, a subject may have a 50% decrease of wild type HTT protein. As a non-limiting example, the decrease of wild type HTT in the medium spiny neurons of the putamen may be about 40%. As a non-limiting example, the decrease of wild type HTT in the putamen and cortex may be about 40%. As a non-limiting example, the decrease of wild type HTT in the medium spiny neurons of the putamen may be between 40%-70%. As a non-limiting example, the decrease of wild type HTT in the putamen and cortex may be between 40%-70%.

[0796] In one embodiment, the AAV particles may be used to decrease mutant HTT protein in a subject. The decrease may independently be 5%, 10%, 15%, 20%, 25%, 30%, 35%, 40%, 45%, 50%, 55%, 60%, 65%, 70%, 75%, 80%, 85%, 90%, 95%, or more than 95%, 5-15%, 5-20%, 5-25%, 5-30%, 5-35%, 5-40%, 5-45%, 5-50%, 5-55%, 5-60%, 5-65%, 5-70%, 5-75%, 5-80%, 5-85%, 5-90%, 5-95%, 10-20%, 10-25%, 10-30%, 10-35%, 10-40%, 10-45%, 10-50%, 10-55%, 10-60%, 10-65%, 10-70%, 10-75%, 10-80%, 10-85%, 10-90%, 10-95%, 15-25%, 15-30%, 15-35%, 15-40%, 15-45%, 15-50%, 15-55%, 15-60%, 15-65%, 15-70%, 15-75%, 15-80%, 15-85%, 15-90%, 15-95%, 20-30%, 20-35%, 20-40%, 20-45%, 20-50%, 20-55%, 20-60%, 20-65%, 20-70%, 20-75%, 20-80%, 20-85%, 20-90%, 20-95%, 25-35%, 25-40%, 25-45%, 25-50%, 25-55%, 25-60%, 25-65%, 25-70%, 25-75%, 25-80%, 25-85%, 25-90%, 25-95%, 30-40%, 30-45%, 30-50%, 30-55%, 30-60%, 30-65%, 30-70%, 30-75%, 30-80%, 30-85%, 30-90%, 30-95%, 35-45%, 35-50%, 35-55%, 35-60%, 35-65%, 35-70%, 35-75%, 35-80%, 35-85%, 35-90%, 35-95%, 40-50%, 40-55%, 40-60%, 40-65%, 40-70%, 40-75%, 40-80%, 40-85%, 40-90%, 40-95%, 45-55%, 45-60%, 45-65%, 45-70%, 45-75%, 45-80%, 45-85%, 45-90%, 45-95%, 50-60%, 50-65%, 50-70%, 50-75%, 50-80%, 50-85%, 50-90%, 50-95%, 55-65%, 55-70%, 55-75%, 55-80%, 55-85%, 55-90%, 55-95%, 60-70%, 60-75%, 60-80%, 60-85%, 60-90%, 60-95%, 65-75%, 65-80%, 65-85%, 65-90%, 65-95%, 70-80%, 70-85%, 70-90%, 70-95%, 75-85%, 75-90%, 75-95%, 80-90%, 80-95%, or 90-95%. As a non-limiting example, a subject may have a 50% decrease of mutant HTT protein. As a non-limiting example, the decrease of mutant HTT in the medium spiny neurons of the putamen may be about 40%. As a non-limiting example, the decrease of mutant HTT in the putamen and cortex may be about 40%. As a non-limiting example, the decrease of mutant HTT in the medium spiny neurons of the putamen may be between 40%-70%. As a non-limiting example, the decrease of mutant HTT in the putamen and cortex may be between 40%-70%.

[0797] In some embodiments, the present invention provides methods for inhibiting/silencing HTT gene expression in a cell. Accordingly, the siRNA duplexes or encoded dsRNA can be used to substantially inhibit HTT gene expression in a cell, in particular in a neuron. In some aspects, the inhibition of HTT gene expression refers to an inhibition by at least about 20%, such as by at least about 30%, 31%, 32%, 33%, 34%, 35%, 36%, 37%, 38%, 39%, 40%, 41%, 42%, 43%, 44%, 45%, 46%, 47%, 48%, 49%, 50%, 51%, 52%, 53%, 54%, 55%, 56%, 57%, 58%, 59%, 60%, 61%, 62%, 63%, 64%, 65%, 66%, 67%, 68%, 69%, 70%, 71%, 72%, 73%, 74%, 75%, 76%, 77%, 78%, 79%, 80%, 85%, 90%, 95% and 100%, or at least 20-30%, 20-40%, 20-50%, 20-60%, 20-70%, 20-80%, 20-90%, 20-95%, 20-100%, 30-40%, 30-50%, 30-60%, 30-70%, 30-80%, 30-90%, 30-95%, 30-100%, 40-50%, 40-60%, 40-70%, 40-80%, 40-90%, 40-95%, 40-100%, 50-60%, 50-70%, 50-80%, 50-90%, 50-95%, 50-100%, 55-60%, 55-70%, 55-80%, 55-90%, 55-95%, 55-100%, 60-70%, 60-80%, 60-90%, 60-95%, 60-100%, 70-80%, 70-90%, 70-95%, 70-100%, 80-90%, 80-95%, 80-100%, 90-95%, 90-100% or 95-100%. Accordingly, the protein product of the targeted gene may be inhibited by at least about 20%, preferably by at least about 30%, 31%, 32%, 33%, 34%, 35%, 36%, 37%, 38%, 39%, 40%, 41%, 42%, 43%, 44%, 45%, 46%, 47%, 48%, 49%, 50%, 51%, 52%, 53%, 54%, 55%, 56%, 57%, 58%, 59%, 60%, 61%, 62%, 63%, 64%, 65%, 66%, 67%, 68%, 69%, 70%, 71%, 72%, 73%, 74%, 75%, 76%, 77%, 78%, 79%, 80%, 85%, 90%, 95% and 100%, or at least 20-30%, 20-40%, 20-50%, 20-60%, 20-70%, 20-80%, 20-90%, 20-95%, 20-100%, 30-40%, 30-50%, 30-60%, 30-70%, 30-80%, 30-90%, 30-95%, 30-100%, 40-50%, 40-60%, 40-70%, 40-80%, 40-90%, 40-95%, 40-100%, 50-60%, 50-70%, 50-80%, 50-90%, 50-95%, 50-100%, 60-70%, 60-80%, 60-90%, 60-95%, 60-100%, 70-80%, 70-90%, 70-95%, 70-100%, 80-90%, 80-95%, 80-100%, 90-95%, 90-100% or 95-100%.

[0798] In some embodiments, the present invention provides methods for inhibiting/silencing HTT gene expression in a cell, in particular in a medium spiny neuron. In some aspects, the inhibition of HTT gene expression refers to an inhibition by at least about 20%, such as by at least about 30%, 31%, 32%, 33%, 34%, 35%, 36%, 37%, 38%, 39%, 40%, 41%, 42%, 43%, 44%, 45%, 46%, 47%, 48%, 49%, 50%, 51%, 52%, 53%, 54%, 55%, 56%, 57%, 58%, 59%, 60%, 61%, 62%, 63%, 64%, 65%, 66%, 67%, 68%, 69%, 70%, 71%, 72%, 73%, 74%, 75%, 76%, 77%, 78%, 79%, 80%, 85%, 90%, 95% and 100%, or at least 20-30%, 20-40%, 20-50%, 20-60%, 20-70%, 20-80%, 20-90%, 20-95%, 20-100%, 30-40%, 30-50%, 30-60%, 30-70%, 30-80%, 30-90%, 30-95%, 30-100%, 40-50%, 40-60%, 40-70%, 40-80%, 40-90%, 40-95%, 40-100%, 50-60%, 50-70%, 50-80%, 50-90%, 50-95%, 50-100%, 55-60%, 55-70%, 55-80%, 55-90%, 55-95%, 55-100%, 60-70%, 60-80%, 60-90%, 60-95%, 60-100%, 70-80%, 70-90%, 70-95%, 70-100%, 80-90%, 80-95%, 80-100%, 90-95%, 90-100% or 95-100%. Accordingly, the protein product of the targeted gene may be inhibited by at least about 20%, preferably by at least about 30%, 31%, 32%, 33%, 34%, 35%, 36%, 37%, 38%, 39%, 40%, 41%, 42%, 43%, 44%, 45%, 46%, 47%, 48%, 49%, 50%, 51%, 52%, 53%, 54%, 55%, 56%, 57%, 58%, 59%, 60%, 61%, 62%, 63%, 64%, 65%, 66%, 67%, 68%, 69%, 70%, 71%, 72%, 73%, 74%, 75%, 76%, 77%, 78%, 79%, 80%, 85%, 90%, 95% and 100%, or at least 20-30%, 20-40%, 20-50%, 20-60%, 20-70%, 20-80%, 20-90%, 20-95%, 20-100%, 30-40%, 30-50%, 30-60%, 30-70%, 30-80%, 30-90%, 30-95%, 30-100%, 40-50%, 40-60%, 40-70%, 40-80%, 40-90%, 40-95%, 40-100%, 50-60%, 50-70%, 50-80%, 50-90%, 50-95%, 50-100%, 55-60%, 55-70%, 55-80%, 55-90%, 55-95%, 55-100%, 60-70%, 60-80%, 60-90%, 60-95%, 60-100%, 70-80%, 70-90%, 70-95%, 70-100%, 80-90%, 80-95%, 80-100%, 90-95%, 90-100% or 95-100%.

[0799] In some embodiments, the present invention provides methods for inhibiting/silencing HTT gene expression in a cell, in particular in an astrocyte. In some aspects, the inhibition of HTT gene expression refers to an inhibition by at least about 20%, such as by at least about 30%, 31%, 32%, 33%, 34%, 35%, 36%3, 37%, 38%, 39%, 40%, 41%, 42%, 43%, 44%, 45%, 46%, 47%, 48%, 49%, 50%, 51%, 52%, 53%, 54%, 55%, 56%, 57%, 58%, 59%, 60%, 61%, 62%, 63%, 64%, 65%, 66%, 67%, 68%, 69%, 70%, 71%, 72%7, 73%, 74%, 75%, 76%, 77%, 78%, 79%, 80%, 85%, 90%, 95% and 100%, or at least 20-30%, 20-40%, 20-50%, 20-60%, 20-70%, 20-80%, 20-90%, 20-95%, 20-100%, 30-40%, 30-50%, 30-60%, 30-70%, 30-80%, 30-90%, 30-95%, 30-100%, 40-50%, 40-60%, 40-70%, 40-80%, 40-90%, 40-95%, 40-100%, 50-60%, 50-70%, 50-80%, 50-90%, 50-95%, 50-100%, 55-60%, 55-70%, 55-80%, 55-90%, 55-95%, 55-100%, 60-70%, 60-80%, 60-90%, 60-95%, 60-100%, 70-80%, 70-90%, 70-95%, 70-100%, 80-90%, 80-95%, 80-100%, 90-95%, 90-100% or 95-100%. Accordingly, the protein product of the targeted gene may be inhibited by at least about 20%, preferably by at least about 30%, 31%, 32%, 33%, 34%, 35%, 36%, 37%, 38%, 39%, 40%, 41%, 42%, 43%, 44%, 45%, 46%, 47%, 48%, 49%, 50%, 51%, 52%, 53%, 54%, 55%, 56%, 57%, 58%, 59%, 60%, 61%, 62%, 63%, 64%, 65%, 66%, 67%, 68%, 69%, 70%, 71%, 72%, 73%, 74%, 75%, 76%, 77%, 78%, 79%, 80%, 85%, 90%, 95% and 100%, or at least 20-30%, 20-40%, 20-50%, 20-60%, 20-70%, 20-80%, 20-90%, 20-95%, 20-100%, 30-40%, 30-50%, 30-60%, 30-70%, 30-80%, 30-90%, 30-95%, 30-100%, 40-50%, 40-60%, 40-70%, 40-80%, 40-90%, 40-95%, 40-100%, 50-60%, 50-70%, 50-80%, 50-90%, 50-95%, 50-100%, 55-60%, 55-70%, 55-80%, 55-90%, 55-95%, 55-100%, 60-70%, 60-80%, 60-90%, 60-95%, 60-100%, 70-80%, 70-90%, 70-95%, 70-100%, 80-90%, 80-95%, 80-100%, 90-95%, 90-100% or 95-100%.

[0800] In one embodiment, the siRNA duplexes or encoded dsRNA may be used to reduce the expression of HTT protein and/or mRNA in at least one region of the CNS such as, but not limited to the midbrain. The expression of HTT protein and/or mRNA is reduced by at least about 30%, 31%, 32%, 33%, 34%, 35%, 36%, 37%, 38%, 39%, 40%, 41%, 42%, 43%, 44%, 45%, 46%, 47%, 48%, 49%, 50%, 51%, 52%, 53%, 54%, 55%, 56%, 57%, 58%, 59%, 60%, 61%, 62%, 63%, 64%, 65%, 66%, 67%, 68%, 69%, 70%, 71%, 72%, 73%, 74%, 75%, 76%, 77%, 78%, 79%, 80%, 85%, 90%, 95% and 100%, or at least 20-30%, 20-40%, 20-50%, 20-60%, 20-70%, 20-80%, 20-90%, 20-95%, 20-100%, 30-40%, 30-50%, 30-60%, 30-70%, 30-80%, 30-90%, 30-95%, 30-100%, 40-50%, 40-60%, 40-70%, 40-80%, 40-90%, 40-95%, 40-100%, 50-60%, 50-70%, 50-80%, 50-90%, 50-95%, 50-100%, 55-60%, 55-70%, 55-80%, 55-90%, 55-95%, 55-100%, 60-70%, 60-80%, 60-90%, 60-95%, 60-100%, 70-80%, 70-90%, 70-95%, 70-100%, 80-90%, 80-95%, 80-100%, 90-95%, 90-100% or 95-100% in at least one region of the CNS. As a non-limiting example, the expression of HTT protein and mRNA in the striatum and/or cortex is reduced by 50-90%. As a non-limiting example, the expression of HTT protein and mRNA in the striatum is reduced by 40-50%. As a non-limiting example, the expression of HTT protein and mRNA in the cortex is reduced by 40-50%. As a non-limiting example, the expression of HTT protein and mRNA in the cortex is reduced by 30-70%. As a non-limiting example, the expression of HTT protein and mRNA in the striatum and/or cortex is reduced by 40-70%. As a non-limiting example, the expression of HTT protein and mRNA in the striatum and/or cortex is reduced by 40-50%. As a non-limiting example, the expression of HTT protein and mRNA in the striatum and/or cortex is reduced by 50-70%. As a non-limiting example, the expression of HTT protein and mRNA in the striatum and/or cortex is reduced by 50-60%. As a non-limiting example, the expression of HTT protein and mRNA in the striatum and/or cortex is reduced by 50%. As a non-limiting example, the expression of HTT protein and mRNA in the striatum and/or cortex is reduced by 51%. As a non-limiting example, the expression of HTT protein and mRNA in the striatum and/or cortex is reduced by 52%. As a non-limiting example, the expression of HTT protein and mRNA in the striatum and/or cortex is reduced by 53%. As a non-limiting example, the expression of HTT protein and mRNA in the striatum and/or cortex is reduced by 54%. As a non-limiting example, the expression of HTT protein and mRNA in the striatum and/or cortex is reduced by 55%. As a non-limiting example, the expression of HTT protein and mRNA in the striatum and/or cortex is reduced by 56%. As a non-limiting example, the expression of HTT protein and mRNA in the striatum and/or cortex is reduced by 57%. As a non-limiting example, the expression of HTT protein and mRNA in the striatum and/or cortex is reduced by 58%. As a non-limiting example, the expression of HTT protein and mRNA in the striatum and/or cortex is reduced by 59%. As a non-limiting example, the expression of HTT protein and mRNA in the striatum and/or cortex is reduced by 60%.

[0801] In one embodiment, the siRNA duplexes or encoded dsRNA may be used to reduce the expression of HTT protein and/or mRNA in at least one region of the CNS such as, but not limited to the forebrain. The expression of HTT protein and/or mRNA is reduced by at least about 30%, 31%, 32%, 33%, 34%, 35%, 36%, 37%, 38%, 39%, 40%, 41%, 42%, 43%, 44%, 45%, 46%, 47%, 48%, 49%, 50%, 51%, 52%, 53%, 54%, 55%, 56%, 57%, 58%5, 59%, 60%, 61%, 62%, 63%, 64%, 65%, 66%6, 67%, 68%, 69%, 70%7, 71%, 72%, 73%, 74%, 75%, 76%, 77%, 78%, 79%, 80%, 85%, 90%, 95% and 100%, or at least 20-30%, 20-40%, 20-50%, 20-60%, 20-70%, 20-80%, 20-90%, 20-95%, 20-100%, 30-40%, 30-50%, 30-60%, 30-70%, 30-80%, 30-90%, 30-95%, 30-100%, 40-50%, 40-60%, 40-70%, 40-80%, 40-90%, 40-95%, 40-100%, 50-60%, 50-70%, 50-80%, 50-90%, 50-95%, 50-100%, 55-60%, 55-70%, 55-80%, 55-90%, 55-95%, 55-100%, 60-70%, 60-80%, 60-90%, 60-95%, 60-100%, 70-80%, 70-90%, 70-95%, 70-100%, 80-90%, 80-95%, 80-100%, 90-95%, 90-100% or 95-100% in at least one region of the CNS. As a non-limiting example, the expression of HTT protein and mRNA in the putamen is reduced by 50-90%. As a non-limiting example, the expression of HTT protein and mRNA in the striatum is reduced by 40-50%. As a non-limiting example, the expression of HTT protein and mRNA in the cortex is reduced by 40-50%. As a non-limiting example, the expression of HTT protein and mRNA in the cortex is reduced by 30-70%. As a non-limiting example, the expression of HTT protein and mRNA in the striatum and/or cortex is reduced by 40-70%. As a non-limiting example, the expression of HTT protein and mRNA in the striatum and/or cortex is reduced by 40-50%. As a non-limiting example, the expression of HTT protein and mRNA in the striatum and/or cortex is reduced by 50-70%. As a non-limiting example, the expression of HTT protein and mRNA in the striatum and/or cortex is reduced by 50-60%. As a non-limiting example, the expression of HTT protein and mRNA in the striatum and/or cortex is reduced by 50%. As a non-limiting example, the expression of HTT protein and mRNA in the striatum and/or cortex is reduced by 51%. As a non-limiting example, the expression of HTT protein and mRNA in the striatum and/or cortex is reduced by 52%. As a non-limiting example, the expression of HTT protein and mRNA in the striatum and/or cortex is reduced by 53%. As a non-limiting example, the expression of HTT protein and mRNA in the striatum and/or cortex is reduced by 54%. As a non-limiting example, the expression of HTT protein and mRNA in the striatum and/or cortex is reduced by 55%. As a non-limiting example, the expression of HTT protein and mRNA in the striatum and/or cortex is reduced by 56%. As a non-limiting example, the expression of HTT protein and mRNA in the striatum and/or cortex is reduced by 57%. As a non-limiting example, the expression of HTT protein and mRNA in the striatum and/or cortex is reduced by 58%. As a non-limiting example, the expression of HTT protein and mRNA in the striatum and/or cortex is reduced by 59%. As a non-limiting example, the expression of HTT protein and mRNA in the striatum and/or cortex is reduced by 60%.

[0802] In one embodiment, the siRNA duplexes or encoded dsRNA may be used to reduce the expression of HTT protein and/or mRNA in the striatum. The expression of HTT protein and/or mRNA is reduced by at least about 30%, 31%, 32%, 33%, 34%, 35%, 36%, 37%, 38%, 39%, 40%, 41%, 42%, 43%, 44%, 45%, 46%, 47%, 48%, 49%, 50%, 51%, 52%, 53%, 54%, 55%, 56%, 57%, 58%, 59%, 60%, 61%, 62%, 63%, 64%, 65%, 66%, 67%, 68%, 69%, 70%, 71%, 72%, 73%, 74%, 75%, 76%, 77%, 78%, 79%, 80%, 85%, 90%, 95% and 100%, or at least 20-30%, 20-40%, 20-50%, 20-60%, 20-70%, 20-80%, 20-90%, 20-95%, 20-100%, 30-40%, 30-50%, 30-60%, 30-70%, 30-80%, 30-90%, 30-95%, 30-100%, 40-50%, 40-60%, 40-70%, 40-80%, 40-90%, 40-95%, 40-100%, 50-60%, 50-70%, 50-80%, 50-90%, 50-95%, 50-100%, 60-70%, 60-80%, 60-90%, 60-95%, 60-100%, 70-80%, 70-90%, 70-95%, 70-100%, 80-90%, 80-95%, 80-100%, 90-95%, 90-100% or 95-100%. As a non-limiting example, the expression of HTT protein and mRNA in the striatum is reduced by 40-50%. As a non-limiting example, the expression of HTT protein and mRNA in the striatum is reduced by 30-70%. As a non-limiting example, the expression of HTT protein and mRNA in the striatum is reduced by at least 30%. As a non-limiting example, the expression of HTT protein and mRNA in the striatum is reduced by 40-70%. As a non-limiting example, the expression of HTT protein and mRNA in the striatum is reduced by 40-50%. As a non-limiting example, the expression of HTT protein and mRNA in the striatum is reduced by 50-70%. As a non-limiting example, the expression of HTT protein and mRNA in the striatum is reduced by 50-60%. As a non-limiting example, the expression of HTT protein and mRNA in the striatum is reduced by 50%. As a non-limiting example, the expression of HTT protein and mRNA in the striatum is reduced by 510%. As a non-limiting example, the expression of HTT protein and mRNA in the striatum is reduced by 52%. As a non-limiting example, the expression of HTT protein and mRNA in the striatum is reduced by 53%. As a non-limiting example, the expression of HTT protein and mRNA in the striatum is reduced by 54%. As a non-limiting example, the expression of HTT protein and mRNA in the striatum is reduced by 55%. As a non-limiting example, the expression of HTT protein and mRNA in the striatum is reduced by 56%. As a non-limiting example, the expression of HTT protein and mRNA in the striatum is reduced by 57%. As a non-limiting example, the expression of HTT protein and mRNA in the striatum is reduced by 58%. As a non-limiting example, the expression of HTT protein and mRNA in the striatum is reduced by 59%. As a non-limiting example, the expression of HTT protein and mRNA in the striatum is reduced by 60%.

[0803] In some embodiments, the AAV particles comprising modulatory polynucleotides encoding the siRNA molecules of the present invention may be used to suppress HTT protein in neurons and/or astrocytes of the striatum and/or the cortex. As a non-limiting example, the suppression of HTT protein is in medium spiny neurons of the striatum and/or neurons of the cortex.

[0804] In some embodiments, the AAV particles comprising modulatory polynucleotides encoding the siRNA molecules of the present invention may be used to suppress HTT protein in neurons and/or astrocytes of the striatum and/or the cortex and reduce associated neuronal toxicity. The suppression of HTT protein in the neurons and/or astrocytes of the striatum and/or the cortex may be, independently, suppressed by 5%, 10%, 15%, 20%, 25%, 30%, 35%, 40%, 45%, 50%, 55%, 60%, 65%, 70%, 75%, 80%, 85%, 90%, 95%, or more than 95%, 5-15%, 5-20%, 5-25%, 5-30%, 5-35%, 5-40%, 5-45%, 5-50%, 5-55%, 5-60%, 5-65%, 5-70%, 5-75%, 5-80%, 5-85%, 5-90%, 5-95%, 10-20%, 10-25%, 10-30%, 10-35%, 10-40%, 10-45%, 10-50%, 10-55%, 10-60%, 10-65%, 10-70%, 10-75%, 10-80%, 10-85%, 10-90%, 10-95%, 15-25%, 15-30%, 15-35%, 15-40%, 15-45%, 15-50%, 15-55%, 15-60%, 15-65%, 15-70%, 15-75%, 15-80%, 15-85%, 15-90%, 15-95%, 20-30%, 20-35%, 20-40%, 20-45%, 20-50%, 20-55%, 20-60%, 20-65%, 20-70%, 20-75%, 20-80%, 20-85%, 20-90%, 20-95%, 25-35%, 25-40%, 25-45%, 25-50%, 25-55%, 25-60%, 25-65%, 25-70%, 25-75%, 25-80%, 25-85%, 25-90%, 25-95%, 30-40%, 30-45%, 30-50%, 30-55%, 30-60%, 30-65%, 30-70%, 30-75%, 30-80%, 30-85%, 30-90%, 30-95%, 35-45%, 35-50%, 35-55%, 35-60%, 35-65%, 35-70%, 35-75%, 35-80%, 35-85%, 35-90%, 35-95%, 40-50%, 40-55%, 40-60%, 40-65%, 40-70%, 40-75%, 40-80%, 40-85%, 40-90%, 40-95%, 45-55%, 45-60%, 45-65%, 45-70%, 45-75%, 45-80%, 45-85%, 45-90%, 45-95%, 50-60%, 50-65%, 50-70%, 50-75%, 50-80%, 50-85%, 50-90%, 50-95%, 55-65%, 55-70%, 55-75%, 55-80%, 55-85%, 55-90%, 55-95%, 60-70%, 60-75%, 60-80%, 60-85%, 60-90%, 60-95%, 65-75%, 65-80%, 65-85%, 65-90%, 65-95%, 70-80%, 70-85%, 70-90%, 70-95%, 75-85%, 75-90%, 75-95%, 80-90%, 80-95%, or 90-95%. The reduction of associated neuronal toxicity may be 5%, 10%, 15%, 20%, 25%, 30%, 35%, 40%, 45%, 50%, 55%, 60%, 65%, 70%, 75%, 80%, 85%, 90%, 95%, or more than 95%, 5-15%, 5-20%, 5-25%, 5-30%, 5-35%, 5-40%, 5-45%, 5-50%, 5-55%, 5-60%, 5-65%, 5-70%, 5-75%, 5-80%, 5-85%, 5-90%, 5-95%, 10-20%, 10-25%, 10-30%, 10-35%, 10-40%, 10-45%, 10-50%, 10-55%, 10-60%, 10-65%, 10-70%, 10-75%, 10-80%, 10-85%, 10-90%, 10-95%, 15-25%, 15-30%, 15-35%, 15-40%, 15-45%, 15-50%, 15-55%, 15-60%, 15-65%, 15-70%, 15-75%, 15-80%, 15-85%, 15-90%, 15-95%, 20-30%, 20-35%, 20-40%, 20-45%, 20-50%, 20-55%, 20-60%, 20-65%, 20-70%, 20-75%, 20-80%, 20-85%, 20-90%, 20-95%, 25-35%, 25-40%, 25-45%, 25-50%, 25-55%, 25-60%, 25-65%, 25-70%, 25-75%, 25-80%, 25-85%, 25-90%, 25-95%, 30-40%, 30-45%, 30-50%, 30-55%, 30-60%, 30-65%, 30-70%, 30-75%, 30-80%, 30-85%, 30-90%, 30-95%, 35-45%, 35-50%, 35-55%, 35-60%, 35-65%, 35-70%, 35-75%, 35-80%, 35-85%, 35-90%, 35-95%, 40-50%, 40-55%, 40-60%, 40-65%, 40-70%, 40-75%, 40-80%, 40-85%, 40-90%, 40-95%, 45-55%, 45-60%, 45-65%, 45-70%, 45-75%, 45-80%, 45-85%, 45-90%, 45-95%, 50-60%, 50-65%, 50-70%, 50-75%, 50-80%, 50-85%, 50-90%, 50-95%, 55-65%, 55-70%, 55-75%, 55-80%, 55-85%, 55-90%, 55-95%, 60-70%, 60-75%, 60-80%, 60-85%, 60-90%, 60-95%, 65-75%, 65-80%, 65-85%, 65-90%, 65-95%, 70-80%, 70-85%, 70-90%, 70-95%, 75-85%, 75-90%, 75-95%, 80-90%, 80-95%, or 90-95%.

[0805] In one embodiment, the siRNA duplexes or encoded dsRNA may be used to reduce the expression of HTT protein and/or mRNA in the cortex. The expression of HTT protein and/or mRNA is reduced by at least about 30%, 31%, 32%, 33%, 34%, 35%, 36%, 37%, 38%, 39%, 40%, 41%, 42%, 43%, 44%, 45%, 46%, 47%, 48%, 49%, 50%, 51%, 52%, 53%, 54%, 55%, 56%, 57%, 58%, 59%, 60%, 61%, 62%, 63%, 64%, 65%, 66%, 67%, 68%, 69%, 70%, 71%, 72%, 73%, 74%, 75%, 76%, 77%, 78%, 79%, 80%, 85%, 90%, 95% and 100%, or at least 20-30%, 20-40%, 20-50%, 20-60%, 20-70%, 20-80%, 20-90%, 20-95%, 20-100%, 30-40%, 30-50%, 30-60%, 30-70%, 30-80%, 30-90%, 30-95%, 30-100%, 40-50%, 40-60%, 40-70%, 40-80%, 40-90%, 40-95%, 40-100%, 50-60%, 50-70%, 50-80%, 50-90%, 50-95%, 50-100%, 60-70%, 60-80%, 60-90%, 60-95%, 60-100%, 70-80%, 70-90%, 70-95%, 70-100%, 80-90%, 80-95%, 80-100%, 90-95%, 90-100% or 95-100%. As a non-limiting example, the expression of HTT protein and mRNA in the cortex is reduced by 40-50%. As a non-limiting example, the expression of HTT protein and mRNA in the cortex is reduced by 30-70%. As a non-limiting example, the expression of HTT protein and mRNA in the cortex is reduced by at least 30%. As a non-limiting example, the expression of HTT protein and mRNA in the cortex is reduced by 40-70%. As a non-limiting example, the expression of HTT protein and mRNA in the cortex is reduced by 40-50%. As a non-limiting example, the expression of HTT protein and mRNA in the cortex is reduced by 50-70%. As a non-limiting example, the expression of HTT protein and mRNA in the cortex is reduced by 50-60%. As a non-limiting example, the expression of HTT protein and mRNA in the cortex is reduced by 50%. As a non-limiting example, the expression of HTT protein and mRNA in the cortex is reduced by 51%. As a non-limiting example, the expression of HTT protein and mRNA in the cortex is reduced by 52%. As a non-limiting example, the expression of HTT protein and mRNA in the cortex is reduced by 53%. As a non-limiting example, the expression of HTT protein and mRNA in the cortex is reduced by 54%. As a non-limiting example, the expression of HTT protein and mRNA in the cortex is reduced by 55%. As a non-limiting example, the expression of HTT protein and mRNA in the cortex is reduced by 56%. As a non-limiting example, the expression of HTT protein and mRNA in the cortex is reduced by 57%. As a non-limiting example, the expression of HTT protein and mRNA in the cortex is reduced by 58%. As a non-limiting example, the expression of HTT protein and mRNA in the cortex is reduced by 59%. As a non-limiting example, the expression of HTT protein and mRNA in the cortex is reduced by 60%.

[0806] In one embodiment, the siRNA duplexes or encoded dsRNA may be used to reduce the expression of HTT protein and/or mRNA in the motor cortex. The expression of HTT protein and/or mRNA is reduced by at least about 30%, 31%, 32%, 33%, 34%, 35%, 36%, 37%, 38%, 39%, 40%, 41%, 42%, 43%, 44%, 45%, 46%, 47%, 48%, 49%, 50%, 51%, 52%, 53%, 54%, 55%, 56%, 57%, 58%, 59%, 60%6, 61%, 62%, 63%, 64%6, 65%, 66%, 67%, 68%, 69%, 70%, 71%, 72%, 73%, 74%, 75%, 76%, 77%, 78%, 79%, 80%, 85%, 90%, 95% and 100%, or at least 20-30%, 20-40%, 20-50%, 20-60%, 20-70%, 20-80%, 20-90%, 20-95%, 20-100%, 30-40%, 30-50%, 30-60%, 30-70%, 30-80%, 30-90%, 30-95%, 30-100%, 40-50%, 40-60%, 40-70%, 40-80%, 40-90%, 40-95%, 40-100%, 50-60%, 50-70%, 50-80%, 50-90%, 50-95%, 50-100%, 60-70%, 60-80%, 60-90%, 60-95%, 60-100%, 70-80%, 70-90%, 70-95%, 70-100%, 80-90%, 80-95%, 80-100%, 90-95%, 90-100% or 95-100%. As a non-limiting example, the expression of HTT protein and mRNA in the motor cortex is reduced by 40-50%. As a non-limiting example, the expression of HTT protein and mRNA in the motor cortex is reduced by 30-70%. As a non-limiting example, the expression of HTT protein and mRNA in the motor cortex is reduced by at least 30%. As a non-limiting example, the expression of HTT protein and mRNA in the motor cortex is reduced by 40-70%. As a non-limiting example, the expression of HTT protein and mRNA in the motor cortex is reduced by 40-50%. As a non-limiting example, the expression of HTT protein and mRNA in the motor cortex is reduced by 50-70%. As a non-limiting example, the expression of HTT protein and mRNA in the motor cortex is reduced by 50-60%. As a non-limiting example, the expression of HTT protein and mRNA in the motor cortex is reduced by 50%. As a non-limiting example, the expression of HTT protein and mRNA in the motor cortex is reduced by 51%. As a non-limiting example, the expression of HTT protein and mRNA in the motor cortex is reduced by 52%. As a non-limiting example, the expression of HTT protein and mRNA in the motor cortex is reduced by 53%. As a non-limiting example, the expression of HTT protein and mRNA in the motor cortex is reduced by 54%. As a non-limiting example, the expression of HTT protein and mRNA in the motor cortex is reduced by 55%. As a non-limiting example, the expression of HTT protein and mRNA in the motor cortex is reduced by 56%. As a non-limiting example, the expression of HTT protein and mRNA in the motor cortex is reduced by 57%. As a non-limiting example, the expression of HTT protein and mRNA in the motor cortex is reduced by 58%. As a non-limiting example, the expression of HTT protein and mRNA in the motor cortex is reduced by 59%. As a non-limiting example, the expression of HTT protein and mRNA in the motor cortex is reduced by 60%.

[0807] In one embodiment, the siRNA duplexes or encoded dsRNA may be used to reduce the expression of HTT protein and/or mRNA in the somatosensory cortex. The expression of HTT protein and/or mRNA is reduced by at least about 30%, 31%, 32%, 33%, 34%, 35%, 36%, 37%, 38%, 39%, 40%, 41%, 42%, 43%, 44%, 45%, 46%, 47%, 48%, 49%, 50%, 51%, 52%, 53%, 54%, 55%, 56%, 57%, 58%, 59%, 60%, 61%, 62%, 63%, 64%, 65%, 66%, 67%, 68%, 69%, 70%, 71%, 72%, 73%, 74%, 75%, 76%, 77%, 78%, 79%, 80%, 85%, 90%, 95% and 100%, or at least 20-30%, 20-40%, 20-50%, 20-60%, 20-70%, 20-80%, 20-90%, 20-95%, 20-100%, 30-40%, 30-50%, 30-60%, 30-70%, 30-80%, 30-90%, 30-95%, 30-100%, 40-50%, 40-60%, 40-70%, 40-80%, 40-90%, 40-95%, 40-100%, 50-60%, 50-70%, 50-80%, 50-90%, 50-95%, 50-100%, 60-70%, 60-80%, 60-90%, 60-95%, 60-100%, 70-80%, 70-90%, 70-95%, 70-100%, 80-90%, 80-95%, 80-100%, 90-95%, 90-100% or 95-100%. As a non-limiting example, the expression of HTT protein and mRNA in the somatosensory cortex is reduced by 40-50%. As a non-limiting example, the expression of HTT protein and mRNA in the somatosensory cortex is reduced by 30-70%. As a non-limiting example, the expression of HTT protein and mRNA in the somatosensory cortex is reduced by at least 30%. As a non-limiting example, the expression of HTT protein and mRNA in the somatosensory cortex is reduced by 40-70%. As a non-limiting example, the expression of HTT protein and mRNA in the somatosensory cortex is reduced by 40-50%. As a non-limiting example, the expression of HTT protein and mRNA in the somatosensory cortex is reduced by 50-70%. As a non-limiting example, the expression of HTT protein and mRNA in the somatosensory cortex is reduced by 50-60%. As a non-limiting example, the expression of HTT protein and mRNA in the somatosensory cortex is reduced by 50%. As a non-limiting example, the expression of HTT protein and mRNA in the somatosensory cortex is reduced by 51%. As a non-limiting example, the expression of HTT protein and mRNA in the somatosensory cortex is reduced by 52%. As a non-limiting example, the expression of HTT protein and mRNA in the somatosensory cortex is reduced by 53%. As a non-limiting example, the expression of HTT protein and mRNA in the somatosensory cortex is reduced by 54%. As a non-limiting example, the expression of HTT protein and mRNA in the somatosensory cortex is reduced by 55%. As a non-limiting example, the expression of HTT protein and mRNA in the somatosensory cortex is reduced by 56%. As a non-limiting example, the expression of HTT protein and mRNA in the somatosensory cortex is reduced by 57%. As a non-limiting example, the expression of HTT protein and mRNA in the somatosensory cortex is reduced by 58%. As a non-limiting example, the expression of HTT protein and mRNA in the somatosensory cortex is reduced by 59%. As a non-limiting example, the expression of HTT protein and mRNA in the somatosensory cortex is reduced by 60%.

[0808] In one embodiment, the siRNA duplexes or encoded dsRNA may be used to reduce the expression of HTT protein and/or mRNA in the temporal cortex. The expression of HTT protein and/or mRNA is reduced by at least about 30%, 31%, 32%, 33%, 34%, 35%, 36%, 37%, 38%, 39%, 40%, 41%, 42%, 43%, 44%, 45%, 46%, 47%, 48%, 49%, 50%, 51%, 52%, 53%, 54%, 55%, 56%, 57%, 58%, 59%, 60%6, 61%, 62%, 63%, 64%6, 65%, 66%, 67%, 68%, 69%, 70%, 71%, 72%, 73%, 74%, 75%, 76%, 77%, 78%, 79%, 80%, 85%, 90%, 95% and 100%, or at least 20-30%, 20-40%, 20-50%, 20-60%, 20-70%, 20-80%, 20-90%, 20-95%, 20-100%, 30-40%, 30-50%, 30-60%, 30-70%, 30-80%, 30-90%, 30-95%, 30-100%, 40-50%, 40-60%, 40-70%, 40-80%, 40-90%, 40-95%, 40-100%, 50-60%, 50-70%, 50-80%, 50-90%, 50-95%, 50-100%, 60-70%, 60-80%, 60-90%, 60-95%, 60-100%, 70-80%, 70-90%, 70-95%, 70-100%, 80-90%, 80-95%, 80-100%, 90-95%, 90-100% or 95-100%. As a non-limiting example, the expression of HTT protein and mRNA in the temporal cortex is reduced by 40-50%. As a non-limiting example, the expression of HTT protein and mRNA in the temporal cortex is reduced by 30-70%. As a non-limiting example, the expression of HTT protein and mRNA in the temporal cortex is reduced by at least 30%. As a non-limiting example, the expression of HTT protein and mRNA in the temporal cortex is reduced by 40-70%. As a non-limiting example, the expression of HTT protein and mRNA in the temporal cortex is reduced by 40-50%. As a non-limiting example, the expression of HTT protein and mRNA in the temporal cortex is reduced by 50-70%. As a non-limiting example, the expression of HTT protein and mRNA in the temporal cortex is reduced by 50-60%. As a non-limiting example, the expression of HTT protein and mRNA in the temporal cortex is reduced by 50%. As a non-limiting example, the expression of HTT protein and mRNA in the temporal cortex is reduced by 51%. As a non-limiting example, the expression of HTT protein and mRNA in the temporal cortex is reduced by 52%. As a non-limiting example, the expression of HTT protein and mRNA in the temporal cortex is reduced by 53%. As a non-limiting example, the expression of HTT protein and mRNA in the temporal cortex is reduced by 54%. As a non-limiting example, the expression of HTT protein and mRNA in the temporal cortex is reduced by 55%. As a non-limiting example, the expression of HTT protein and mRNA in the temporal cortex is reduced by 56%. As a non-limiting example, the expression of HTT protein and mRNA in the temporal cortex is reduced by 57%. As a non-limiting example, the expression of HTT protein and mRNA in the temporal cortex is reduced by 58%. As a non-limiting example, the expression of HTT protein and mRNA in the temporal cortex is reduced by 59%. As a non-limiting example, the expression of HTT protein and mRNA in the temporal cortex is reduced by 60%.

[0809] In one embodiment, the siRNA duplexes or encoded dsRNA may be used to reduce the expression of HTT protein and/or mRNA in the putamen. The expression of HTT protein and/or mRNA is reduced by at least about 30%, 31%, 32%, 33%, 34%, 35%, 36%, 37%, 38%, 39%, 40%, 41%, 42%, 43%, 44%, 45%, 46%, 47%, 48%, 49%, 50%, 51%, 52%, 53%, 54%, 55%, 56%, 57%, 58%, 59%, 60%, 61%, 62%, 63%, 64%, 65%, 66%, 67%, 68%, 69%, 70%, 71%, 72%, 73%, 74%, 75%, 76%, 77%, 78%, 79%, 80%, 85%, 90%, 95% and 100%, or at least 20-30%, 20-40%, 20-50%, 20-60%, 20-70%, 20-80%, 20-90%, 20-95%, 20-100%, 30-40%, 30-50%, 30-60%, 30-70%, 30-80%, 30-90%, 30-95%, 30-100%, 40-50%, 40-60%, 40-70%, 40-80%, 40-90%, 40-95%, 40-100%, 50-60%, 50-70%, 50-80%, 50-90%, 50-95%, 50-100%, 55-60%, 55-70%, 55-80%, 55-90%, 55-95%, 55-100%, 60-70%, 60-80%, 60-90%, 60-95%, 60-100%, 70-80%, 70-90%, 70-95%, 70-100%, 80-90%, 80-95%, 80-100%, 90-95%, 90-100% or 95-100% in at least one region of the CNS. As a non-limiting example, the expression of HTT protein and mRNA in the putamen is reduced by 40-70%. As a non-limiting example, the expression of HTT protein and mRNA in the putamen is reduced by 40-50%. As a non-limiting example, the expression of HTT protein and mRNA in the putamen is reduced by 50-70%. As a non-limiting example, the expression of HTT protein and mRNA in the putamen is reduced by 50-60%. As a non-limiting example, the expression of HTT protein and mRNA in the putamen is reduced by 50%. As a non-limiting example, the expression of HTT protein and mRNA in the putamen is reduced by 51%. As a non-limiting example, the expression of HTT protein and mRNA in the putamen is reduced by 52%. As a non-limiting example, the expression of HTT protein and mRNA in the putamen is reduced by 53%. As a non-limiting example, the expression of HTT protein and mRNA in the putamen is reduced by 54%. As a non-limiting example, the expression of HTT protein and mRNA in the putamen is reduced by 55%. As a non-limiting example, the expression of HTT protein and mRNA in the putamen is reduced by 56%. As a non-limiting example, the expression of HTT protein and mRNA in the putamen is reduced by 57%. As a non-limiting example, the expression of HTT protein and mRNA in the putamen is reduced by 58%. As a non-limiting example, the expression of HTT protein and mRNA in the putamen is reduced by 59%. As a non-limiting example, the expression of HTT protein and mRNA in the putamen is reduced by 60%.

### Solo and Combination Therapy

[0810] In some embodiments, the present composition is administered as a solo therapeutic or combination therapeutics for the treatment of HD.

[0811] In some embodiments, the pharmaceutical composition of the present invention is used as a solo therapy. In other embodiments, the pharmaceutical composition of the present invention is used in combination therapy. The combination therapy may be in combination with one or more neuroprotective agents such as small molecule compounds, growth factors and hormones which have been tested for their neuroprotective effect on neuron degeneration.

[0812] The AAV particles encoding siRNA duplexes targeting the HTT gene may be used in combination with one or more other therapeutic agents. By “in combination with,” it is not intended to imply that the agents must be administered at the same time and/or formulated for delivery together, although these methods of delivery are within the scope of the present disclosure. Compositions can be administered concurrently with, prior to, or subsequent to, one or more other desired therapeutics or medical procedures. In general, each agent will be administered at a dose and/or on a time schedule determined for that agent.

[0813] Therapeutic agents that may be used in combination with the AAV particles encoding the nucleic acid sequence for the siRNA molecules of the present invention can be small molecule compounds which are antioxidants, anti-inflammatory agents, anti-apoptosis agents, calcium regulators, antiglutamatergic agents, structural protein inhibitors, compounds involved in muscle function, and compounds involved in metal ion regulation.

[0814] Compounds tested for treating HD which may be used in combination with the vectors described herein include, but are not limited to, dopamine-depleting agents (e.g., tetrabenazine for chorea), benzodiazepines (e.g., clonazepam for myoclonus, chorea, dystonia, rigidity, and/or spasticity), anticonvulsants (e.g., sodium valproate and levetiracetam for myoclonus), amino acid precursors of dopamine (e.g., levodopa for rigidity which is particularly associate with juvenile HD or young adult-onset parkinsonian phenotype), skeletal muscle relaxants (e.g., baclofen, tizanidine for rigidity and/or spasticity), inhibitors for acetycholine release at the neuromuscular junction to cause muscle paralysis (e.g., botulinum toxin for bruxism and/or dystonia), atypical neuroleptics (e.g., olanzapine and quetiapine for psychosis and/or irritability, risperidone, sulpiride and haloperidol for psychosis, chorea and/or irritability, clozapine for treatment-resistant psychosis, aripiprazole for psychosis with prominent negative symptoms), agents to increase ATP/cellular energetics (e.g., creatine), selective serotonin reuptake inhibitors (SSRIs) (e.g., citalopram, fluoxetine, paroxetine, sertraline, mirtazapine, venlafaxine for depression, anxiety, obsessive compulsive behavior and/or irritability), hypnotics (e.g., xopiclone and/or zolpidem for altered sleep-wake cycle), anticonvulsants (e.g., sodium valproate and carbamazepine for mania or hypomania) and mood stabilizers (e.g., lithium for mania or hypomania).

[0815] Neurotrophic factors may be used in combination therapy with the AAV particles encoding the nucleic acid sequence for the siRNA molecules of the present invention for treating HD. Generally, a neurotrophic factor is defined as a substance that promotes survival, growth, differentiation, proliferation and/or maturation of a neuron, or stimulates increased activity of a neuron. In some embodiments, the present methods further comprise delivery of one or more trophic factors into the subject in need of treatment. Trophic factors may include, but are not limited to, IGF-I, GDNF, BDNF, CTNF, VEGF, Colivelin, Xaliproden, Thyrotrophin-releasing hormone and ADNF, and variants thereof.

[0816] In one aspect, the AAV particles comprising modulatory polynucleotides encoding the siRNA duplex targeting the HTT gene may be co-administered with AAV vectors expressing neurotrophic factors such as AAV-IGF-I (See e.g., Vincent et al., Neuromolecular medicine, 2004, 6, 79-85; the content of which is incorporated herein by reference in its entirety) and AAV-GDNF (See e.g., Wang et al., J Neurosci., 2002, 22, 6920-6928; the content of which is incorporated herein by reference in its entirety).

### V. Definitions

[0817] Unless stated otherwise, the following terms and phrases have the meanings described below. The definitions are not meant to be limiting in nature and serve to provide a clearer understanding of certain aspects of the present invention.

[0818] As used herein, the term “nucleic acid”, “polynucleotide” and ‘oligonucleotide” refer to any nucleic acid polymers composed of either polydeoxyribonucleotides (containing 2-deoxy-D-ribose), or polyribonucleotides (containing D-ribose), or any other type of polynucleotide which is an N glycoside of a purine or pyrimidine base, or modified purine or pyrimidine bases. There is no intended distinction in length between the term “nucleic acid”, “polynucleotide” and “oligonucleotide”, and these terms will be used interchangeably. These terms refer only to the primary structure of the molecule. Thus, these terms include double- and single-stranded DNA, as well as double- and single stranded RNA.

[0819] As used herein, the term “RNA” or “RNA molecule” or “ribonucleic acid molecule” refers to a polymer of ribonucleotides; the term “DNA” or “DNA molecule” or “deoxyribonucleic acid molecule” refers to a polymer of deoxyribonucleotides. DNA and RNA can be synthesized naturally, e.g., by DNA replication and transcription of DNA, respectively; or be chemically synthesized. DNA and RNA can be single-stranded (i.e., ssRNA or ssDNA, respectively) or multi-stranded (e.g., double stranded, i.e., dsRNA and dsDNA, respectively). The term “mRNA” or “messenger RNA”, as used herein, refers to a single stranded RNA that encodes the amino acid sequence of one or more polypeptide chains.

[0820] As used herein, the term “RNA interfering” or “RNAi” refers to a sequence specific regulatory mechanism mediated by RNA molecules which results in the inhibition or interfering or “silencing” of the expression of a corresponding protein-coding gene. RNAi has been observed in many types of organisms, including plants, animals and fungi. RNAi occurs in cells naturally to remove foreign RNAs (e.g., viral RNAs). Natural RNAi proceeds via fragments cleaved from free dsRNA which direct the degradative mechanism to other similar RNA sequences. RNAi is controlled by the RNA-induced silencing complex (RISC) and is initiated by short/small dsRNA molecules in cell cytoplasm, where they interact with the catalytic RISC component argonaute. The dsRNA molecules can be introduced into cells exogenously. Exogenous dsRNA initiates RNAi by activating the ribonuclease protein Dicer, which binds and cleaves dsRNAs to produce double-stranded fragments of 21-25 base pairs with a few unpaired overhang bases on each end. These short double stranded fragments are called small interfering RNAs (siRNAs).

[0821] As used herein, the terms “short interfering RNA,” “small interfering RNA” or “siRNA” refer to an RNA molecule (or RNA analog) comprising between about 5-60 nucleotides (or nucleotide analogs) which is capable of directing or mediating RNAi. Preferably, a siRNA molecule comprises between about 15-30 nucleotides or nucleotide analogs, such as between about 16-25 nucleotides (or nucleotide analogs), between about 18-23 nucleotides (or nucleotide analogs), between about 19-22 nucleotides (or nucleotide analogs) (e.g., 19, 20, 21 or 22 nucleotides or nucleotide analogs), between about 19-25 nucleotides (or nucleotide analogs), and between about 19-24 nucleotides (or nucleotide analogs). The term “short” siRNA refers to a siRNA comprising 5-23 nucleotides, preferably 21 nucleotides (or nucleotide analogs), for example, 19, 20, 21 or 22 nucleotides. The term “long” siRNA refers to a siRNA comprising 24-60 nucleotides, preferably about 24-25 nucleotides, for example, 23, 24, 25 or 26 nucleotides. Short siRNAs may, in some instances, include fewer than 19 nucleotides, e.g., 16, 17 or 18 nucleotides, or as few as 5 nucleotides, provided that the shorter siRNA retains the ability to mediate RNAi. Likewise, long siRNAs may, in some instances, include more than 26 nucleotides, e.g., 27, 28, 29, 30, 35, 40, 45, 50, 55, or even 60 nucleotides, provided that the longer siRNA retains the ability to mediate RNAi or translational repression absent further processing, e.g., enzymatic processing, to a short siRNA. siRNAs can be single stranded RNA molecules (ss-siRNAs) or double stranded RNA molecules (ds-siRNAs) comprising a sense strand and an antisense strand which hybridized to form a duplex structure called siRNA duplex.

[0822] As used herein, the term “the antisense strand” or “the first strand” or “the guide strand” of a siRNA molecule refers to a strand that is substantially complementary to a section of about 10-50 nucleotides, e.g., about 15-30, 16-25, 18-23 or 19-22 nucleotides of the mRNA of the gene targeted for silencing. The antisense strand or first strand has sequence sufficiently complementary to the desired target mRNA sequence to direct target-specific silencing, e.g., complementarity sufficient to trigger the destruction of the desired target mRNA by the RNAi machinery or process.

[0823] As used herein, the term “the sense strand” or “the second strand” or “the passenger strand” of a siRNA molecule refers to a strand that is complementary to the antisense strand or first strand. The antisense and sense strands of a siRNA molecule are hybridized to form a duplex structure. As used herein, a “siRNA duplex” includes a siRNA strand having sufficient complementarity to a section of about 10-50 nucleotides of the mRNA of the gene targeted for silencing and a siRNA strand having sufficient complementarity to form a duplex with the other siRNA strand.

[0824] As used herein, the term “complementary” refers to the ability of polynucleotides to form base pairs with one another. Base pairs are typically formed by hydrogen bonds between nucleotide units in antiparallel polynucleotide strands. Complementary polynucleotide strands can form base pair in the Watson-Crick manner (e.g., A to T, A to U, C to G), or in any other manner that allows for the formation of duplexes. As persons skilled in the art are aware, when using RNA as opposed to DNA, uracil rather than thymine is the base that is considered to be complementary to adenosine. However, when a U is denoted in the context of the present invention, the ability to substitute a T is implied, unless otherwise stated. Perfect complementarity or 100% complementarity refers to the situation in which each nucleotide unit of one polynucleotide strand can form hydrogen bond with a nucleotide unit of a second polynucleotide strand. Less than perfect complementarity refers to the situation in which some, but not all, nucleotide units of two strands can form hydrogen bond with each other. For example, for two 20-mers, if only two base pairs on each strand can form hydrogen bond with each other, the polynucleotide strands exhibit 10% complementarity. In the same example, if 18 base pairs on each strand can form hydrogen bonds with each other, the polynucleotide strands exhibit 90% complementarity.

[0825] As used herein, the term “substantially complementary” means that the siRNA has a sequence (e.g., in the antisense strand) which is sufficient to bind the desired target mRNA, and to trigger the RNA silencing of the target mRNA.

[0826] As used herein, “targeting” means the process of design and selection of nucleic acid sequence that will hybridize to a target nucleic acid and induce a desired effect.

[0827] The term “gene expression” refers to the process by which a nucleic acid sequence undergoes successful transcription and in most instances translation to produce a protein or peptide. For clarity, when reference is made to measurement of “gene expression”, this should be understood to mean that measurements may be of the nucleic acid product of transcription, e.g., RNA or mRNA or of the amino acid product of translation, e.g., polypeptides or peptides. Methods of measuring the amount or levels of RNA, mRNA, polypeptides and peptides are well known in the art.

[0828] As used herein, the term “mutation” refers to any changing of the structure of a gene, resulting in a variant (also called “mutant”) form that may be transmitted to subsequent generations. Mutations in a gene may be caused by the alternation of single base in DNA, or the deletion, insertion, or rearrangement of larger sections of genes or chromosomes.

[0829] As used herein, the term “vector” means any molecule or moiety which transports, transduces or otherwise acts as a carrier of a heterologous molecule such as the siRNA molecule of the invention. A “viral genome” or “vector genome” or “viral vector” refers to a sequence which comprises one or more polynucleotide regions encoding or comprising a molecule of interest, e.g., a transgene, a polynucleotide encoding a polypeptide or multi-polypeptide or a modulatory nucleic acid such as small interfering RNA (siRNA). Viral genomes are commonly used to deliver genetic materials into cells. Viral genomes are often modified for specific applications. Types of viral genome sequence include retroviral viral genome sequences, lentiviral viral genome sequences, adenoviral viral genome sequences and adeno-associated viral genome sequences.

[0830] The term “adeno-associated virus” or “AAV” as used herein refers to any vector which comprises or derives from components of an adeno-associated vector and is suitable to infect mammalian cells, preferably human cells. The term AAV vector typically designates an AAV type viral particle or virion comprising a payload. The AAV vector may be derived from various serotypes, including combinations of serotypes (i.e., “pseudotyped” AAV) or from various genomes (e.g., single stranded or self-complementary). In addition, the AAV vector may be replication defective and/or targeted.

[0831] As used herein, the phrase “inhibit expression of a gene” means to cause a reduction in the amount of an expression product of the gene. The expression product can be a RNA molecule transcribed from the gene (e.g., an mRNA) or a polypeptide translated from an mRNA transcribed from the gene. Typically a reduction in the level of an mRNA results in a reduction in the level of a polypeptide translated therefrom. The level of expression may be determined using standard techniques for measuring mRNA or protein.

[0832] As used herein, the term “in vitro” refers to events that occur in an artificial environment, e.g., in a test tube or reaction vessel, in cell culture, in a Petri dish, etc., rather than within an organism (e.g., animal, plant, or microbe).

[0833] As used herein, the term “in vivo” refers to events that occur within an organism (e.g., animal, plant, or microbe or cell or tissue thereof).

[0834] As used herein, the term “modified” refers to a changed state or structure of a molecule of the invention. Molecules may be modified in many ways including chemically, structurally, and functionally.

[0835] As used herein, the term “synthetic” means produced, prepared, and/or manufactured by the hand of man. Synthesis of polynucleotides or polypeptides or other molecules of the present invention may be chemical or enzymatic.

[0836] As used herein, the term “transfection” refers to methods to introduce exogenous nucleic acids into a cell. Methods of transfection include, but are not limited to, chemical methods, physical treatments and cationic lipids or mixtures. The list of agents that can be transfected into a cell is large and includes, but is not limited to, siRNA, sense and/or anti-sense sequences, DNA encoding one or more genes and organized into an expression plasmid, proteins, protein fragments, and more.

[0837] As used herein, “off target” refers to any unintended effect on any one or more target, gene, or cellular transcript.

[0838] As used herein, the phrase “pharmaceutically acceptable” is employed herein to refer to those compounds, materials, compositions, and/or dosage forms which are, within the scope of sound medical judgment, suitable for use in contact with the tissues of human beings and animals without excessive toxicity, irritation, allergic response, or other problem or complication, commensurate with a reasonable benefit/risk ratio.

[0839] As used herein, the term “effective amount” of an agent is that amount sufficient to effect beneficial or desired results, for example, clinical results, and, as such, an “effective amount” depends upon the context in which it is being applied. For example, in the context of administering an agent that treats HD, an effective amount of an agent is, for example, an amount sufficient to achieve treatment, as defined herein, of HD, as compared to the response obtained without administration of the agent.

[0840] As used herein, the term “therapeutically effective amount” means an amount of an agent to be delivered (e.g., nucleic acid, drug, therapeutic agent, diagnostic agent, prophylactic agent, etc.) that is sufficient, when administered to a subject suffering from or susceptible to an infection, disease, disorder, and/or condition, to treat, improve symptoms of, diagnose, prevent, and/or delay the onset of the infection, disease, disorder, and/or condition.

[0841] As used herein, the term “subject” or “patient” refers to any organism to which a composition in accordance with the invention may be administered, e.g., for experimental, diagnostic, prophylactic, and/or therapeutic purposes. Typical subjects include animals (e.g., mammals such as mice, rats, rabbits, non-human primates such as chimpanzees and other apes and monkey species, and humans) and/or plants.

[0842] As used herein, the term “preventing” or “prevention” refers to delaying or forestalling the onset, development or progression of a condition or disease for a period of time, including weeks, months, or years.

[0843] The term “treatment” or “treating,” as used herein, refers to the application of one or more specific procedures used for the cure or amelioration of a disease. In certain embodiments, the specific procedure is the administration of one or more pharmaceutical agents. In the context of the present invention, the specific procedure is the administration of one or more siRNA molecules.

[0844] As used herein, the term “amelioration” or “ameliorating” refers to a lessening of severity of at least one indicator of a condition or disease. For example, in the context of neurodegeneration disorder, amelioration includes the reduction of neuron loss.

[0845] As used herein, the term “administering” refers to providing a pharmaceutical agent or composition to a subject.

[0846] As used herein, the term “neurodegeneration” refers to a pathologic state which results in neural cell death. A large number of neurological disorders share neurodegeneration as a common pathological state. For example, Alzheimer's disease, Parkinson's disease, Huntington's disease, and amyotrophic lateral sclerosis (ALS) all cause chronic neurodegeneration, which is characterized by a slow, progressive neural cell death over a period of several years, whereas acute neurodegeneration is characterized by a sudden onset of neural cell death as a result of ischemia, such as stroke, or trauma, such as traumatic brain injury, or as a result of axonal transection by demyelination or trauma caused, for example, by spinal cord injury or multiple sclerosis. In some neurological disorders, mainly one type of neuronal cell is degenerative, for example, medium spiny neuron degeneration in early HD.

### VI. Equivalents and Scope

[0847] Those skilled in the art will recognize, or be able to ascertain using no more than routine experimentation, many equivalents to the specific embodiments in accordance with the invention described herein. The scope of the present invention is not intended to be limited to the above Description, but rather is as set forth in the appended claims.

[0848] In the claims, articles such as “a,” “an,” and “the” may mean one or more than one unless indicated to the contrary or otherwise evident from the context. Claims or descriptions that include “or” between one or more members of a group are considered satisfied if one, more than one, or all of the group members are present in, employed in, or otherwise relevant to a given product or process unless indicated to the contrary or otherwise evident from the context. The invention includes embodiments in which exactly one member of the group is present in, employed in, or otherwise relevant to a given product or process. The invention includes embodiments in which more than one, or the entire group members are present in, employed in, or otherwise relevant to a given product or process.

[0849] It is also noted that the term “comprising” is intended to be open and permits but does not require the inclusion of additional elements or steps. When the term “comprising” is used herein, the term “consisting of” is thus also encompassed and disclosed.

[0850] Where ranges are given, endpoints are included. Furthermore, it is to be understood that unless otherwise indicated or otherwise evident from the context and understanding of one of ordinary skill in the art, values that are expressed as ranges can assume any specific value or subrange within the stated ranges in different embodiments of the invention, to the tenth of the unit of the lower limit of the range, unless the context clearly dictates otherwise.

[0851] In addition, it is to be understood that any particular embodiment of the present invention that falls within the prior art may be explicitly excluded from any one or more of the claims. Since such embodiments are deemed to be known to one of ordinary skill in the art, they may be excluded even if the exclusion is not set forth explicitly herein. Any particular embodiment of the compositions of the invention (e.g., any antibiotic, therapeutic or active ingredient; any method of production; any method of use; etc.) can be excluded from any one or more claims, for any reason, whether or not related to the existence of prior art.

[0852] It is to be understood that the words which have been used are words of description rather than limitation, and that changes may be made within the purview of the appended claims without departing from the true scope and spirit of the invention in its broader aspects.

[0853] While the present invention has been described at some length and with some particularity with respect to the several described embodiments, it is not intended that it should be limited to any such particulars or embodiments or any particular embodiment, but it is to be construed with references to the appended claims so as to provide the broadest possible interpretation of such claims in view of the prior art and, therefore, to effectively encompass the intended scope of the invention.

### VI. Examples

### Example 1. In Vivo YAC128 Mouse Study of HTT Suppression, Guide to Passenger Ratio and Precision of 5′ End Processing after Treatment with AAV1-miRNA Vectors Produced in Mammalian Cells

[0854] Based on in vitro suppression of HTT with plasmid transfection and with infection of AAV packaged AAV-miRNA expression vectors, selected AAV-miRNA expression vectors were packaged in AAV1 and evaluated in vivo in YAC128 mice, to quantify HTT mRNA suppression, and to assess guide to passenger strand ratio and the precision of 5′ end processing by deep sequencing. The AAV-miRNA transgene genomes were packaged in AAV1 with a CBA promoter (AAV1.CBA.iHtt), and then, the vectors were produced by triple transfection in HEK293 or HEK293T cells, purified and formulated in phosphate buffered saline (PBS) with 0.001% F-68. The vectors were administered to YAC128 mice 7-12 weeks of age via bilateral intrastriatal infusion at a dose of approximately 1E10 to 3E10 vg in 5 uL over 10 minutes per hemisphere. A control group was treated with vehicle (PBS with 0.001% F-68). Each group comprised 4 females and 4 males. Approximately 28 days following test article administration, striatum tissue punches were collected and snap-frozen for later analysis.

[0855] Striatum tissue samples were then homogenized and total RNAs were purified. The relative expression of HTT was determined by qRT-PCR. Housekeeping genes for normalization included mouse XPNPEP1 (X-Prolyl Aminopeptidase 1) and mouse HPRT (hypoxanthine-guanine phosphoribosyltransferase). HTT mRNA was normalized to housekeeping gene expression, and then further normalized to the vehicle group. The total dose (vg/mouse), and constructs are shown in Table 41. The results are shown in Tables 42 and 43.

TABLE 41
Construct and Total Dose

| ITR to ITR | Modulatory | Modulatory | |
|---|---|---|---|
| Sequence Name | Polynucleotide | Polynucleotide | Total Dose |
| (SEQ ID NO) | Construct Name | SEQ ID NO | (vg/mouse) |
| VOYHT43 | VOYHTmiR- | 1253 | 6E10 |
| (SEQ ID NO: 1433) | 127.016 | | |
| VOYHT15 | VOYHTmiR- | 1259 | 6E10 |
| (SEQ ID NO: 1366) | 127.579 | | |
| VOYHT38 | VOYHTmiR- | 1219 | 4.91E10 |
| (SEQ ID NO: 1428) | 104.907 | | |
| VOYHT37 | VOYHTmiR- | 1231 | 6E10 |
| (SEQ ID NO: 1427) | 104.425 | | |
| VOYHT42 | VOYHTmiR- | 1252 | 3.57E10 |
| (SEQ ID NO: 1432) | 116.016 | | |
| VOYHT46 | VOYHTmiR- | 1211 | 6E10 |
| (SEQ ID NO: 1436) | 127.257 | | |
| VOYHT44 | VOYHTmiR- | 1194 | 6E10 |
| (SEQ ID NO: 1434) | 127.218 | | |
| VOYHT39 | VOYHTmiR- | 1207 | 6E10 |
| (SEQ ID NO: 1429) | 104.257 | | |
| VOYHT36 | VOYHTmiR- | 1248 | 4.89E10 |
| (SEQ ID NO: 1426) | 102.016 | | |
| VOYHT16 | VOYHTmiR- | 1249 | 5.79E10 |
| (SEQ ID NO: 1367) | 104.016 | | |
| VOYHT35 | VOYHTmiR- | 1255 | 5.85E10 |
| (SEQ ID NO: 1388) | 104.579 | | |
| VOYHT48 | VOYHTmiR- | 1347 | 2.65E10 |
| (SEQ ID NO: 1438) | 104.579.10 | | |
| VOYHT40 | VOYHTmiR- | 1250 | 5.91E10 |
| (SEQ ID NO; 1430) | 109.016 | | |
| VOYHT41 | VOYHTmiR- | 1251 | 3.76E10 |
| (SEQ ID NO: 1431) | 114.016 | | |
| VOYHT45 | VOYHTmiR- | 1223 | 4.71E10 |
| (SEQ ID NO: 1435) | 127.907 | | |
| VOYHT47 | VOYHTmiR- | 1262 | 3.15E10 |
| (SEQ ID NO: 1437) | 104.579.3 | | |
| Vehicle | N/A | — | — |

TABLE 42
HTT mRNA Suppression in YAC128
Mouse Striatum after Intrastriatal Infusion

| | | | Relative | Relative |
|---|---|---|---|---|
| | | | HTT | HTT |
| | | | mRNA | mRNA |
| | | | Level (%) | Level (%) |
| | | | (normalized to | (normalized |
| ITR to | Modulatory | Modulatory | XPNPEP1)- | to HPRT)- |
| ITR | Polynucleotide | Poly- | mean ± | mean ± |
| Sequence | Construct | nucleotide | standard | standard |
| Name | Name | SEQ ID NO | deviation | deviation |
| VOYHT43 | VOYHTmiR- | 1253 | 63 ± 8 | 68 ± 9 |
| | 127.016 | | | |
| VOYHT44 | VOYHTmiR- | 1194 | 85 ± 19 | 86 ± 22 |
| | 127.218 | | | |
| VOYHT46 | VOYHTmiR- | 1211 | 76 ± 13 | 78 ± 8 |
| | 127.257 | | | |
| VOYHT42 | VOYHTmiR- | 1252 | 99 ± 11 | 106 ± 18 |
| | 116.016 | | | |
| VOYHT15 | VOYHTmiR- | 1259 | 74 ± 6 | 77 ± 10 |
| | 127.579 | | | |
| VOYHT37 | VOYHTmiR- | 1231 | 83 ± 4 | 86 ± 7 |
| | 104.425 | | | |
| VOYHT39 | VOYHTmiR- | 1207 | 91 ± 7 | 96 ± 10 |
| | 104.257 | | | |
| VOYHT38 | VOYHTmiR- | 1219 | 103 ± 18 | 102 ± 14 |
| | 104.907 | | | |
| Vehicle | N/A | — | 100 ± 15 | 100 ± 14 |

TABLE 43
HTT mRNA Suppression in YAC128
Mouse Striatum after Intrastriatal Infusion

| | | | Relative | Relative |
|---|---|---|---|---|
| | | | HTT | HTT |
| | | | mRNA | mRNA |
| | | | Level (%) | Level (%) |
| | | | (normalized to | (normalized |
| ITR to | Modulatory | Modulatory | XPNPEP1)- | to HPRT)- |
| ITR | Polynucleotide | Poly- | mean ± | mean ± |
| Sequence | Construct | nucleotide | standard | standard |
| Name | Name | SEQ ID NO | deviation | deviation |
| VOYHT47 | VOYHTmiR- | 1262 | 67 ± 19 | 63 ± 18 |
| | 104.579.3 | | | |
| VOYHT48 | VOYHTmiR- | 1347 | 70 ± 10 | 69 ± 10 |
| | 104.579.10 | | | |
| VOYHT36 | VOYHTmiR- | 1248 | 92 ± 12 | 91 ± 12 |
| | 102.016 | | | |
| VOYHT16 | VOYHTmiR- | 1249 | 73 ± 10 | 68 ± 7 |
| | 104.016 | | | |
| VOYHT41 | VOYHTmiR- | 1251 | 93 ± 9 | 88 ± 16 |
| | 114.016 | | | |
| VOYHT45 | VOYHTmiR- | 1223 | 87 ± 14 | 83 ± 10 |
| | 127.907 | | | |
| VOYHT40 | VOYHTmiR- | 1250 | 79 ± 7 | 76 ± 6 |
| | 109.016 | | | |
| VOYHT35 | VOYHTmiR- | 1255 | 94 ± 16 | 96 ± 13 |
| | 104.579 | | | |
| Vehicle | N/A | — | 100 ± 6 | 100 ± 8 |

[0856] In YAC128 mouse striatum, VOYHT43 (VOYHTmR-127.016), VOYHT46 (VOYHTmiR-127.257), VOYHT15 (VOYHTmR-127.579), VOYHT47 (VOYHTmiR-104.579.3), VOYHT48 (VOYHTmiR-104.579.10), VOYHT16 (VOYHTmiR-104.016) and VOYHT40 (VOYHTmiR-109.016) caused about 20 to 40% silencing of HTT mRNA at about 28 days after intrastriatal infusion of 1E10 to 3E10 vg per striatum.

[0857] Striatum tissue samples were also evaluated for pri-miRNA processing by deep sequencing to assess guide:passenger strand ratio, abundance of guide and passenger strands relative to the total endogenous pool of miRNAs, and precision of processing at the 5′-end of the guide strand. The results are shown in Table 44.

TABLE 44
Deep Sequencing of YAC128 Mouse
Striatal Samples after Intrastriatal Infusion

| | | Modul- | | | |
|---|---|---|---|---|---|
| | | atory | | | |
| | | Poly- | Abundance | | |
| ITR to | Modulatory | nucleo- | Relative to | | |
| ITR | Polynucleotide | tide | Endogenous | Guide/ | |
| Sequence | Construct | SEQ | miRNA | Passenger | % N |
| Name | Name | ID NO | Pool (%) | Ratio | (Guide) |
| VOYHT43 | VOYHTmiR- | 1253 | 58.13 | 422.9 | 91.5 |
| | 127.016 | | | | |
| VOYHT44 | VOYHTmiR- | 1194 | 1.49 | 2.44 | 96.2 |
| | 127.218 | | | | |
| VOYHT46 | VOYHTmiR- | 1211 | 9.66 | 0.04 | 85.7 |
| | 127.257 | | | | |
| VOYHT42 | VOYHTmiR- | 1252 | 3.09 | 207.8 | 95.9 |
| | 116.016 | | | | |
| VOYHT15 | VOYHTmiR- | 1259 | 0.05 | 24.28 | 83.2 |
| | 127.579 | | | | |
| VOYHT37 | VOYHTmiR- | 1231 | 0.12 | 0.32 | 92.7 |
| | 104.425 | | | | |
| VOYHT39 | VOYHTmiR- | 1207 | 0.07 | 0.38 | 97.1 |
| | 104.257 | | | | |
| VOYHT38 | VOYHTmiR- | 1219 | 6.45 | 2384 | 96.4 |
| | 104.907 | | | | |
| VOYHT47 | VOYHTmiR- | 1262 | 0.21 | 40 | 86.8 |
| | 104.579.3 | | | | |
| VOYHT48 | VOYHTmiR- | 1347 | 0.76 | 83 | 89.8 |
| | 104.579.10 | | | | |
| VOYHT36 | VOYHTmiR- | 1248 | 3.06 | 494 | 86.4 |
| | 102.016 | | | | |
| VOYHT16 | VOYHTmiR- | 1249 | 5.41 | 629 | 86.8 |
| | 104.016 | | | | |
| VOYEIT41 | VOYHTmiR- | 1251 | 1.7 | 256 | 85.8 |
| | 114.016 | | | | |
| VOYHT45 | VOYHTmiR- | 1223 | 51.29 | 163 | 82.9 |
| | 127.907 | | | | |
| VOYHT40 | VOYHTmiR- | 1250 | 1.75 | 135 | 87.1 |
| | 109.016 | | | | |
| VOYHT35 | VOYHTmiR- | 1255 | 0.01 | 19 | 84.9 |
| | 104.579 | | | | |

[0858] VOYHT43, VOYHT15, VOYHT46, VOYHT48, VOYHT40, and VOYHT47 were shown to have good Htt mRNA knockdown as compared to the other constructs. VOYHT37, VOYHT46, VOYHT44, and VOYHT39 were considered to have a low guide to passenger strand ratio (G:P ratio) as they had a ratio of less than 4. VOYHT43 and VOYHT45 had abundance relative to total miRNA reads which was greater than 10% and considered too high for additional studies. VOYHT48, VOYHT40 and VOYHT47 were selected for additional studies.

### Example 2. AAV-miRNA Expression Vectors

[0859] The constructs comprising the pri-miRNA cassettes containing guide strands targeting HTT and passenger strands were engineered into AAV-miRNA expression vectors (either ss or sc). The AAV-miRNA expression vector construct from ITR to ITR, recited 5′ to 3′, comprises a mutant or wild type ITR, a promoter (either a CMV (which includes an SV40 intron or a human betaglobin intron), U6, H1, CBA (which includes a CMVie enhancer, a CB promoter and an SV40 intron or a human betaglobin intron), or CAG promoter (which includes a CMVie enhancer, a CB promoter, and a rabbit betaglobin intron or a human betaglobin intron), the pri-miRNA cassette containing guide strand sequence targeting HTT and passenger strand sequence, a rabbit globin polyA or human growth hormone polyA and wild type ITR. In vitro and in vivo studies are performed to evaluate the pharmacological activity of the AAV-miRNA expression vectors.

### Example 3. In Vivo YAC128 Mouse Study of HTT Suppression, Guide to Passenger Strand Ratio and Precision of Processing after Treatment with AAV-miRNA Vectors Produced with the Baculo/Sf9 System

[0860] Three constructs comprising the pri-miRNA cassettes containing guide strands targeting HTT and passenger strands were engineered into scAAV-miRNA expression vectors designed for baculo/Sf9 production. The scAAV-miRNA expression construct from ITR to ITR, recited 5′ to 3′, comprised a wild type ITR, a CBA promoter (which includes a CMVie enhancer, a CB promoter and an SV40 intron), the pri-miRNA cassette containing guide strand sequence targeting HTT and passenger strand sequence, a rabbit globin polyA, a stuffer sequence, and wild type ITR. The vectors were produced in the baculo/Sf9 system, purified and formulated in phosphate buffered saline (PBS) with 0.001% F-68, and then administered to YAC128 mice 7-12 weeks of age via bilateral intrastriatal infusion of 5 μL vector at 0.5 μL/min, with a vector concentration of 3.6×10¹² vg/mL; the total dose was 3.6×10¹⁰ vg. A control group was treated with vehicle (PBS with 0.001% F-68). Each group comprised 4 females and 4 males. Approximately 28 days following test article administration, striatum tissue punches were collected and snap-frozen. Striatum tissue samples were homogenized and total RNAs were purified, and the relative expression of HTT mRNA was determined by qRT-PCR. The housekeeping gene for normalization was mouse XPNPEP1 (X-Prolyl Aminopeptidase 1). HTT mRNA was normalized to housekeeping gene expression, and then further normalized to the vehicle group. The HTT mRNA results are shown in Table 45.

TABLE 45
HTT mRNA Suppression in YAC128
Mouse Striatum after Intrastriatal Infusion

| | | | Relative HTT |
|---|---|---|---|
| | | | mRNA Level (%) |
| ITR to | | | (normalized to |
| ITR | Modulatory | Modulatory | XPNPEP1)- |
| Sequence | Polynucleotide | Polynucleotide | mean ± standard |
| Name | Construct Name | SEQ ID NO | deviation |
| VOYHT1 | VOYHTmiR- | 1262 | 56 ± 14 |
| | 104.579.3 | | |
| VOYHT3 | VOYHTmiR- | 1250 | 58 ± 15 |
| | 109.016 | | |
| VOYHT4 | VOYHTmiR- | 1347 | 57 ± 15 |
| | 104.579.10 | | |
| Vehicle | N/A | — | 100 ± 23 |

[0861] In YAC128 mouse striatum, VOYHT1 (VOYHTmiR-104.579.3), VOYHT4 (VOYHTmiR-104.579.10), and VOYHT3 (VOYHTmiR-109.016) caused about 42% to 44% silencing of HTT mRNA at about 28 days after intrastriatal infusion of 1.8×10¹⁰ vg per striatum.

### Example 4. In Vivo Study in Non-Human Primates

### Study Design

[0862] A study in rhesus monkeys was conducted to evaluate HTT suppression, precision, and efficiency of pri-miRNA processing, tolerability, and distribution of vector genomes within the CNS. Selected constructs comprising the pri-miRNA cassettes containing guide strands targeting HTT and passenger strands were engineered into scAAV-miRNA expression vectors designed for baculo/Sf9 production. The scAAV-miRNA expression construct from ITR to ITR, recited 5′ to 3′, comprised a wild type ITR, a CBA promoter (which includes a CMVie enhancer, a CB promoter and an SV40 intron), the pri-miRNA cassette containing guide strand sequence targeting HTT and passenger strand sequence, a rabbit globin polyA, a stuffer sequence, and wild type ITR. The vectors were produced in the baculo/Sf9 system, purified and formulated in phosphate buffered saline (PBS) with 0.001% F-68.

[0863] Four groups of rhesus monkeys received vehicle (n=3) or one of three vectors (n=6 per group) as bilateral intraputamenal infusions of 100 μL/side at 3-5 L/min. Gadoteridol (2 mM; ProHance) was co-infused. For animals receiving a vector, the same vector was infused on both sides, with the right side receiving a concentration of 9×10¹¹ vg/mL and the left side receiving a concentration of 2.7×10¹² vg/mL. The total dose of vector administered was 9×10¹⁰ vg (low dose) or 2.7×10¹¹ vg (high dose) per putamen, or 3.6×10¹¹ vg per animal. All animals were euthanized after five weeks. The study design is shown in Table 46.

TABLE 46
Study Design

| | | ITR to ITR | | | |
|---|---|---|---|---|---|
| | | Sequence | Titer (vg/ml) | | |
| | | Name | Left | Right | Dosing |
| Group | N | (SEQ ID NO) | (High Dose) | (Low Dose) | Sites |
| 1 | 6 | VOYHT1 | 2.7E12 | 0.9E12 | Bilateral |
| | | (SEQ ID | | | putamen |
| | | NO: 1352) | | | infusion via |
| 2 | 6 | VOYHT3 | 2.7E12 | 0.9E12 | posterior |
| | | (SEQ ID | | | trajectory |
| | | NO: 1354) | | | 100 μl |
| 3 | 6 | VOYHT4 | 2.7E12 | 0.9E12 | per side |
| | | (SEQ ID | | | |
| | | NO: 1355) | | | |
| Control | 3 | | — | — | |

HTT mRNA Analysis

[0864] HTT mRNA suppression was evaluated in 2 mm tissue punches from the putamen, using branched DNA (bDNA) for quantifying HTT mRNA levels. For each group receiving vector, a total of 60 punches were evaluated per dose of vector (10 punches per putamen, 6 animals per dose of vector). From the vehicle group, 10 punches per putamen were taken from each of 3 animals. HTT mRNA was normalized to the geometric mean of housekeeping genes TATA-box binding protein (TBP), alanyl-tRNA synthetase (AARS) and X-prolyl aminopeptidase 1 (XPNPEP1), and then further normalized to the vehicle group. The HTT mRNA results are shown in Tables 47 and 48.

TABLE 47
HTT mRNA Suppression in Non-Human Primate
Putamen after Intraputamenal Infusion at the High Dose

| | | | Relative HTT mRNA |
|---|---|---|---|
| | | | Level (%) (normalized |
| | | | to geometric mean |
| | | Titer (vg/ml) | of TBP, AARS and |
| | | Left | XPNPEP1)-mean ± |
| Group | N | (High Dose) | standard deviation |
| 1 | 6 | 2.7E12 | 46 ± 11 |
| 2 | 6 | 2.7E12 | 65 ± 9 |
| 3 | 6 | 2.7E12 | 46 ± 10 |
| Control | 3 | — | 100 ± 5 |

TABLE 48
HTT mRNA Suppression in Non-Human Primate
Putamen after Intraputamenal Infusion at the Low Dose

| | | | Relative HTT mRNA |
|---|---|---|---|
| | | | Level (%) (normalized |
| | | | to geometric mean |
| | | Titer (vg/ml) | of TBP, AARS and |
| | | Right | XPNPEP1)-mean ± |
| Group | N | (Low Dose) | standard deviation |
| 1 | 6 | 0.9E12 | 60 ± 6 |
| 2 | 6 | 0.9E12 | 76 ± 8 |
| 3 | 6 | 0.9E12 | 62 ± 13 |
| Control | 3 | — | 100 ± 5 |

### Vector Genome Quantitation

[0865] From the same 2 mm tissue punches from the putamen (with high and low dose treatments) that were used for quantifying HTT mRNA levels by bDNA, a portion of the tissue lysate was used for vector genome copy (VG) determination by droplet digital PCR. For Group 1 (VOYHT1) and Group 3 (VOYHT4), approximately 50% HTT mRNA suppression was achieved with approximately 10 VG copies per diploid cell. For Group 2 (VOYHT3), approximately 50% HTT mRNA suppression was achieved with approximately 400 VG copies per diploid cell. The results are shown in Table 49 (high dose, 2.7E12 vg/mL) and Table 50 (low dose, 0.9E12 vg/mL).

TABLE 49
Vector Genome Copy Number and HTT mRNA Suppression in Non-Human
Primate Putamen after Intraputamenal Infusion at the High Dose

| | Group 1 | | Group 2 | | Group 3 | |
|---|---|---|---|---|---|---|
| Tissue | Vector Genome | Relative HTT | Vector Genome | Relative HTT | Vector Genome | Relative HTT |
| Punch | Copies/Diploid | mRNA Level | Copies/Diploid | mRNA Level | Copies/Diploid | mRNA Level |
| No. | Cell | (%) | Cell | (%) | Cell | (%) |
| 1 | 7.17 | 50.8 | 22.52 | 73.9 | 2.46 | 91.7 |
| 2 | 13.35 | 53.3 | 5.56 | 93.4 | 1123.54 | 25.7 |
| 3 | 8.4 | 55.5 | 7.85 | 84.8 | 28.28 | 61.3 |
| 4 | 6.19 | 58.7 | 6.89 | 85.7 | 3.06 | 54.2 |
| 5 | 33.58 | 49.3 | 29.35 | 69.7 | 126.02 | 29.4 |
| 6 | 110.19 | 46.6 | 0.38 | 102.9 | 232.98 | 35.1 |
| 7 | 312.01 | 33.5 | 1408.59 | 28.5 | 59.23 | 78.7 |
| 8 | 645.36 | 38.3 | 410.37 | 62.7 | 2101.49 | 29.3 |
| 9 | 112.5 | 41.2 | 188.99 | 64.3 | 652.06 | 32.9 |
| 10 | 210.8 | 47.9 | 413.03 | 56.7 | 297.66 | 33.6 |
| 11 | 697.33 | 31.7 | 1106.15 | 34.7 | 305.33 | 25.9 |
| 12 | 590.33 | 40.1 | 2.51 | 96.5 | 1167.46 | 38.9 |
| 13 | 40.5 | 52.1 | 277.83 | 54.6 | 1.66 | 80.2 |
| 14 | 9.58 | 36.2 | 94.19 | 74 | 304.93 | 47.5 |
| 15 | 476.2 | 27.8 | 2.81 | 80 | 2.56 | 69.1 |
| 16 | 1803.57 | 30.2 | 960.38 | 25.2 | 26.54 | 52.9 |
| 17 | 4.55 | 52 | 7.98 | 83.3 | 72.32 | 27.5 |
| 18 | 1.52 | 74.9 | 0.6 | 94.9 | 593.8 | 30.6 |
| 19 | 977.99 | 24.4 | 1908.77 | 29.5 | 89.84 | 81.8 |
| 20 | 140.01 | 35.6 | 1252.94 | 34.1 | 536.51 | 31.3 |
| 21 | 1340 | 29.9 | 146.95 | 65.8 | 158.23 | 59.9 |
| 22 | 2208.66 | 31.5 | 1672.46 | 25.8 | 282.82 | 38 |
| 23 | 185.63 | 37.7 | 279.26 | 62.2 | 1493.92 | 21.8 |
| 24 | 31.98 | 69.1 | 1.6 | 89.3 | 598.55 | 31.8 |
| 25 | 793.55 | 34.2 | 547.85 | 64.1 | 2.27 | 84.7 |
| 26 | 2.84 | 83.8 | 657.52 | 48.3 | 35.32 | 97.9 |
| 27 | 1377.78 | 26.1 | 23.98 | 86.2 | 0.79 | 101 |
| 28 | 861.05 | 33.2 | 1479.57 | 19.5 | 48.26 | 75.7 |
| 29 | 5.98 | 67.9 | 2.41 | 96.9 | 233.81 | 42.7 |
| 30 | 1.17 | 93.6 | 0.86 | 97.8 | 56.44 | 67.2 |
| 31 | 40.1 | 40.5 | 16.7 | 93.1 | 73.5 | 39.2 |
| 32 | 1216.3 | 27.4 | 3.8 | 97.9 | 1321.9 | 28.6 |
| 33 | 1.8 | 75.9 | 43.5 | 66.3 | 8.3 | 47.8 |
| 34 | 0.9 | 87.7 | 4.6 | 96.7 | 162.7 | 29.4 |
| 35 | 81.3 | 38.7 | 1665.9 | 23.1 | 24.1 | 43.1 |
| 36 | 192.1 | 44.1 | 642.7 | 35.5 | 505.4 | 40.3 |
| 37 | 1142.9 | 23.9 | 43.3 | 88.8 | 1181.3 | 23.1 |
| 38 | 2046.4 | 25.1 | 23.1 | 104.3 | 2.3 | 96.8 |
| 39 | 1.7 | 89.4 | 1854.5 | 25.9 | 957.4 | 27.4 |
| 40 | 0.4 | 89.2 | 1.6 | 100.8 | 1240 | 23.5 |
| 41 | 1082.2 | 26.1 | 437.9 | 48.9 | 85.3 | 71.3 |
| 42 | 291.8 | 47.7 | 833 | 42.7 | 366.2 | 44.4 |
| 43 | 1327.27 | 25.5 | 698.46 | 59.4 | 1378.13 | 24.7 |
| 44 | 1450 | 24.8 | 478.32 | 80.4 | 614.11 | 37.6 |
| 45 | 327.71 | 55.8 | 1610.13 | 24.4 | 1121.75 | 26.3 |
| 46 | 1.29 | 88.7 | 167.05 | 81.2 | 1496.89 | 29.7 |
| 47 | 1455.07 | 24.8 | 1653.33 | 22.7 | 1133.25 | 22.9 |
| 48 | 1029.21 | 37.2 | 1205.39 | 31.3 | 1251.79 | 31.2 |
| 49 | 870.1 | 24.1 | 35.66 | 92.9 | 983.7 | 28.4 |
| 50 | 98.26 | 35.9 | 56.33 | 89.8 | 1869.84 | 24.9 |
| 51 | 422.46 | 39.4 | 192.11 | 54 | 176.41 | 53.9 |
| 52 | 28.19 | 84.4 | 468.19 | 67.6 | 750.01 | 21.9 |
| 53 | 79 | 42.7 | 2196.15 | 20.5 | 639.03 | 25.4 |
| 54 | 629.63 | 29.6 | 1355.84 | 27.3 | 719.08 | 30.3 |
| 55 | 1296.5 | 24.2 | 1.7 | 103.7 | 1076.8 | 38.5 |
| 56 | 336.7 | 43 | 515.7 | 84.1 | 29.8 | 94.8 |
| 57 | 210.7 | 53.7 | 1348.7 | 31 | 155.6 | 67.3 |
| 58 | 1.3 | 93.2 | 78.7 | 87.7 | 1268.3 | 23.1 |
| 59 | 1832.3 | 26.1 | 398.1 | 60 | 1303.2 | 33.4 |
| 60 | 538.5 | 39.5 | 660.2 | 46.2 | 698.2 | 37 |

TABLE 50
Vector Genome Copy Number and HTT mRNA Suppression in Non-Human
Primate Putamen after Intraputamenal Infusion at the Low Dose

| | Group 1 | | Group 2 | | Group 3 | |
|---|---|---|---|---|---|---|
| Tissue | Vector Genome | Relative HTT | Vector Genome | Relative HTT | Vector Genome | Relative HTT |
| Punch | Copies/Diploid | mRNA Level | Copies/Diploid | mRNA Level | Copies/Diploid | mRNA Level |
| No. | Cell | (%) | Cell | (%) | Cell | (%) |
| 61 | 27.8 | 74.5 | 7.5 | 93.4 | 0.3 | 108.2 |
| 62 | 270.4 | 49.2 | 0.8 | 107.1 | 5.8 | 68.3 |
| 63 | 0.5 | 88 | 4.9 | 89.9 | 58.5 | 73.1 |
| 64 | 20.4 | 64 | 2.3 | 99.6 | 73.7 | 47.8 |
| 65 | 1.2 | 78.8 | 1.6 | 98.5 | 9.4 | 72.9 |
| 66 | 3.7 | 90.4 | 1 | 101.8 | 56.6 | 55.1 |
| 67 | 369.6 | 31.2 | 746.5 | 34.2 | 1.1 | 115 |
| 68 | 1082.2 | 34.3 | 0.9 | 116.5 | 890.1 | 26.2 |
| 69 | 420.1 | 34.7 | 420.5 | 45.2 | 384.4 | 40.1 |
| 70 | 702.6 | 29.8 | 138.7 | 65.3 | 431 | 31.4 |
| 71 | 247.6 | 42.3 | 269.6 | 61.3 | 105.2 | 58.9 |
| 72 | 91.7 | 70.3 | 121.9 | 63.7 | 314.3 | 33.5 |
| 73 | 625.3 | 28.1 | 29.2 | 82 | 253.6 | 54.2 |
| 74 | 767.6 | 40.6 | 0.6 | 104.6 | 42.8 | 73.9 |
| 75 | 70 | 60.6 | 0.6 | 94.2 | 0.6 | 103.7 |
| 76 | 1081.7 | 26.4 | 2.5 | 101.8 | 45 | 54.8 |
| 77 | 5 | 67.3 | 7.8 | 88.9 | 0.4 | 91.3 |
| 78 | 0.3 | 91.7 | 0.5 | 103 | 379.2 | 36.7 |
| 79 | 646.9 | 28.4 | 405.4 | 65.9 | 143.7 | 82.5 |
| 80 | 30.5 | 86.9 | 66 | 105.8 | 318.5 | 46.3 |
| 81 | 501.8 | 29.5 | 58.4 | 90.1 | 10.5 | 82 |
| 82 | 811 | 34.1 | 171.2 | 69.4 | 81.3 | 59.8 |
| 83 | 1066.7 | 26.4 | 275.5 | 60.8 | 15.3 | 89.4 |
| 84 | 97.9 | 81.7 | 88.1 | 77 | 899.2 | 26.9 |
| 85 | 405.3 | 42 | 34.4 | 97.7 | 0.3 | 115.8 |
| 86 | 0.5 | 100.2 | 2.4 | 111.6 | 144.9 | 82 |
| 87 | 36.5 | 80.6 | 6.3 | 95.5 | 0.5 | 103.7 |
| 88 | 263.8 | 49.7 | 13.4 | 96.9 | 8.5 | 82.3 |
| 89 | 544.3 | 25.2 | 6.4 | 96.6 | 0.2 | 104.5 |
| 90 | 0.7 | 93.8 | 0.3 | 97 | 229.3 | 49 |
| 91 | 0.2 | 94.3 | 9.1 | 88.9 | 0.4 | 102.1 |
| 92 | 465.1 | 42.5 | 5.4 | 94.8 | 4.3 | 87.6 |
| 93 | 3.6 | 76.6 | 631.9 | 42 | 51.4 | 71.7 |
| 94 | 0.3 | 86.8 | 6.4 | 93.3 | 35.4 | 59.2 |
| 95 | 2 | 90 | 14.5 | 90.9 | 204.1 | 40.6 |
| 96 | 62.4 | 60.5 | 10.7 | 96.1 | 0.7 | 97.2 |
| 97 | 0.2 | 95.3 | 31.7 | 92.9 | 42.1 | 92.4 |
| 98 | 18.2 | 84.6 | 445.6 | 69.1 | 4.3 | 103.2 |
| 99 | 476.8 | 28.1 | 471.3 | 43.3 | 875.3 | 24.5 |
| 100 | 0.1 | 91.9 | 773 | 26.5 | 896.6 | 26.2 |
| 101 | 4.5 | 96.9 | 67.8 | 79.7 | 862.3 | 22.4 |
| 102 | 525.2 | 31.5 | 671 | 39.3 | 311.2 | 45.3 |
| 103 | 64.3 | 80.8 | 1077.2 | 28.3 | 593.2 | 43.7 |
| 104 | 265.4 | 51.1 | 693.7 | 50 | 190.2 | 67.6 |
| 105 | 754.9 | 25.4 | 774.7 | 35.1 | 843.5 | 24.2 |
| 106 | 67.2 | 79.3 | 1063.2 | 28 | 767.5 | 27 |
| 107 | 147.9 | 61 | 520.1 | 54.4 | 899.4 | 23.7 |
| 108 | 545.6 | 32.8 | 478.8 | 48.7 | 686.1 | 27.1 |
| 109 | 130.3 | 66.1 | 676.9 | 29.8 | 626 | 27.2 |
| 110 | 246.8 | 43.4 | 6.3 | 96.9 | 1.6 | 103.1 |
| 111 | 194.5 | 42.1 | 264.6 | 54.8 | 12.1 | 86.4 |
| 112 | 18.7 | 85.4 | 134.3 | 65.3 | 5.1 | 62.9 |
| 113 | 25.7 | 77 | 23.7 | 90.6 | 28.3 | 73.3 |
| 114 | 277.9 | 32.7 | 4.2 | 95.7 | 169.9 | 50.4 |
| 115 | 2.4 | 102.2 | 11.6 | 101.6 | 768.8 | 27.2 |
| 116 | 31.3 | 89.6 | 1062.7 | 44.8 | 14.3 | 99.6 |
| 117 | 666.6 | 27.2 | 145.4 | 71.9 | 311.3 | 49.8 |
| 118 | 0.3 | 93.7 | 213.6 | 80 | 534.6 | 35 |
| 119 | 657.8 | 25 | 463.3 | 46.6 | 414.8 | 33.9 |
| 120 | 471.8 | 30.6 | 170.8 | 69.4 | 785.8 | 24.2 |

### Pri-miRNA Processing

[0866] Precision and efficiency of pri-miRNA processing were evaluated by deep sequencing of 2 mm punches from the putamen, from the high and low dose treatments, to assess guide:passenger strand ratio, abundance of guide and passenger strands relative to the total endogenous pool of miRNAs, and precision of processing at the 5′-end of the guide strand. These results are shown in Table 51.

TABLE 51
Deep Sequencing in Non-Human Primate
Putamen after Intraputamenal Infusion

| | | Abundance | | |
|---|---|---|---|---|
| | | Relative to | | |
| | | Endogenous | Guide/ | |
| | | miRNA | Passenger | % N |
| Group | Titer (vg/ml) | Pool (%) | Ratio | (Guide) |
| 1 | High (2.7E12) | 2.2 | 376 | 98 |
| | Low (0.9E12) | 0.35 | 424 | 97 |
| 2 | High (2.7E12) | 0.23 | 147 | 96 |
| | Low (0.9E12) | 0.21 | 136 | 96 |
| 3 | High (2.7E12) | 3.54 | 44 | 98 |
| | Low (0.9E12) | 1.53 | 46 | 97 |

### Tolerability Results

[0867] Body weight assessments were acquired on Day −8 (i.e., 8 days prior to dosing of the first animal), Day 1, and each week thereafter until termination on Day 36+3. There was no significant change in the average body weights in each group throughout the 5 week in-life period.

[0868] Cage-side observations were performed twice daily (a.m. and p.m.) beginning on Day −8 until scheduled necropsy, to assess abnormalities including neurological signs, and signs of pain or distress, as well as changes in general health, appearance, and behavior. In addition, beginning on Day −8, food consumption was assessed qualitatively once per day. Only decreased appetence was noted in a few animals following surgery; this is considered a common finding post-surgery. Food consumption returned to normal within the first week and remained normal for the remainder of the study.

[0869] Blood was collected on Day −8, Day 15±2, and Day 36±3 for evaluation of hematology, serum chemistry, and coagulation. Hematology assessments comprised WBC, RBC, HGB, HCT, MCV, MCH, MCHC, PLT (qualitative assessment), and absolute and relative values for NEUT, LYMPH, MONO, EOS, and BASO. Serum chemistry comprised TP, ALB, GLOB, A/G ratio, ALP ALT, AST, TBIL (direct and indirect), BUN, CREAT, Ca CHOL, GLU, Phos, TCO2, Na, K and Cl. Coagulation comprised PT, A-PTT and fibrinogen. Although some values fell outside of the normal limits, they were interpreted as physiological variations in the absence of any clinical correlation during in-life.

[0870] At necropsy, no abnormalities in gross pathology were observed.

[0871] Histopathology was conducted on the putamen including the infusion site. For all animals, a 3 mm thick coronal brain slab containing the putamen was fixed by immersion in 4% paraformaldehyde for 72 to 96 hours at room temperature and then transferred to phosphate buffered saline (PBS) for storage at approximately +4deg C. The 3 mm brain slabs were then embedded in paraffin and coronally sectioned. Full coronal sections, 5 um thick, containing the infusion site in the putamen were assessed for pathology by standard hematoxylin and eosin staining. The vehicle control group was consistent with what would be expected to occur with any injection into the putamen, i.e. the reactions were typical for those associated with a needle track. In Groups 1, 2, and 3, each animal treated with one of three vectors exhibited pathology findings comprised of mild focal gliosis from the needle track, minimal to mild perivascular infiltrates and/or occasional edema most likely due to a combination of trauma from the injection and reaction to the AAV. There were no pathology findings that were considered adverse, given the absence of clinical symptoms.

### Example 5. Activity of Vectors with Filler Sequences

[0872] The miRNA expression vectors encoding VOYHTmiR-104.579.3 (SEQ ID NO: 1262) or VOYHTmiR-104.016 (SEQ ID NO: 1249) were packaged in AAV1, and infected into HEK293T cells. For HEK293T, the cells were plated into 96-well plates (2.5E4 cells/well in 100 ul cell culture medium) and infected with the miRNA expression vectors. 48 hours after infection, the cells were harvested for immediate cell lysis, RNA isolation and qRT-PCR. The MOI and the results for the vectors and the description of the vectors tested are shown in Table 52. In Table 52, SC means self-complementary vector and SS means single-stranded.

TABLE 52
Knockdown of HTT naRNA

| | | | | | | | Relative Htt | | |
|---|---|---|---|---|---|---|---|---|---|
| | | | | Length of | | | mRNA Level (%) | | |
| | | | | Construct | SC | Filler | (normalized to | | |
| | Modulatory | Sequence | | (ITR to | or | SEQ | GFP Control) | | |
| No. | Polynucleotide Name | Name | Promoter | ITR) | SS | (Y/N) | 1E3 | 1E4 | 1E5 |
| 13 | VOYHTmiR-104.579.3 | VOYHT1 | CBA | 2301 nt | SC | Y | 51 | 15 | 13 |
| 14 | VOYHTmiR-104.579.3 | VOYHT6 | CBA | 2299 nt | SC | Y | 54 | 17 | 12 |
| 15 | VOYHTmiR-104.579.3 | VOYHT10 | CBA | 2307 nt | SC | Y | 88 | 63 | 30 |
| 16 | VOYHTmiR-104.579.3 | VOYHT13 | CBA | 1587 nt | SC | N | 47 | 30 | 12 |
| 17 | VOYHTmiR-104.016 | VOYHT14 | CBA | 1582 nt | SC | N | 86 | 43 | 30 |
| 18 | VOYHTmiR-104.016 | VOYHT25 | CMV | 2198 nt | SC | N | 49 | 41 | 16 |
| 19 | VOYHTmiR-104.579.3 | VOYHT26 | CMV | 2203 nt | SC | N | 32 | 16 | 9 |
| 20 | VOYHTmiR-104.579.3 | VOYHT22 | CMV | 2300 nt | SC | Y | 74 | 26 | 12 |
| 21 | VOYHTmiR-104.579.3 | VOYHT18 | CMV | 2308 nt | SC | Y | 32 | 17 | 10 |
| 22 | VOYHTmiR-104.579.3 | VOYHT20 | CMV | 2306 nt | SC | Y | 45 | 19 | 7 |
| 23 | VOYHTmiR-104.579.3 | VOYHT24 | CMV | 2314 nt | SC | Y | 65 | 22 | 12 |
| 24 | VOYHTmiR-104.579.3 | VOYHT2 | CBA | 4608 nt | SS | Y | 106 | 58 | 27 |
| 25 | VOYHTmiR-104.579.3 | VOYHT5 | CBA | 4606 nt | SS | Y | 132 | 68 | 41 |
| 26 | VOYHTmiR-104.579.3 | VOYHT9 | CBA | 4616 nt | SS | Y | 93 | 56 | 19 |
| 27 | VOYHTmiR-104.579.3 | VOYHT21 | CMV | 4598 nt | SS | Y | 114 | 85 | 26 |
| 28 | VOYHTmiR-104.579.3 | VOYHT17 | CMV | 4606 nt | SS | V | 128 | 54 | 20 |
| 29 | VOYHTmiR-104.579.3 | VOYHT19 | CMV | 4608 nt | SS | Y | 53 | 72 | 25 |
| 30 | VOYHTmiR-104.579.10 | VOYHT4 | CBA | 2301 nt | SS | Y | 63 | 61 | 14 |
| 31 | VOYHTmiR-104.579.10 | VOYHT48 | CBA | 1352 nt | | N | 49 | 26 | 10 |

[0873] The miRNA expression vectors which were approximately 2300 nucleotides in length had a higher genome quality as compared to the vectors having approximately 1500 nucleotides or 1900 nucleotides. CBA and CMV promoters produced similar levels of knockdown in vitro. PG-4T Self-complementary vectors produced the highest levels of knockdown in vitro.

### Example 6. Quality Control of Vectors Produced with the Baculo/Sf9 System in Large Scale

[0874] The miRNA expression vectors of the present disclosure were produced by using a Baculo/Sf9 system on a TL scale. A cesium chloride (CsCl) gradient analysis was used in addition to standard purification techniques to ensure a high 00 of full vectors. The achieved 00 of full vectors was at least 80%. Titers ranged from 0.9E12 to 4E13 vg/L of culture, and the vectors with a 5′ or 3′ filler sequence vectors presented the highest titers. The quality of the genome packaged in the vectors of the present disclosure was evaluated by using alkaline denaturing gel analysis, showing a high level of genome quality. The gel banding patterns for the TL scale production was similar to the small scale production pattern. The purity of the vectors of the present invention was evaluated by using silver stain PAGE analysis, showing good VP1, VP2, and VP3 ratio and purity.

[0875] The miRNA expression vectors encoding VOYHTmiR-104.579.3, VOYHTmiR-104.579.10, and VOYHTmiR-109.016 were packaged in AAV1, and infected into HEK293T cells. For HEK293T, the cells were plated into 96-well plates (2.5E4 cells/well in 100 ul cell culture medium) and infected with the miRNA expression vectors. 60 hours after infection, the cells were harvested for immediate cell lysis, RNA isolation and qRT-PCR and the levels of HTT were calculated compared to a GFP transduction control. The MOI and the results for the vectors and the description of the vectors tested are shown in Table 53. In Table 53, SC means self-complementary vector.

TABLE 53
Knockdown of HTT naRNA

| | | | | | | | Relative Htt | | |
|---|---|---|---|---|---|---|---|---|---|
| | | | | Length of | | | mRNA Level (%) | | |
| | Modulatory | | | Construct | SC | Filler | (normalized to | | |
| | Polynucleotide | Sequence | | (ITR to | or | SEQ | GFP Control) | | |
| No. | Name | Name | Promoter | ITR) | SS | (Y/N) | 1E3 | 1E4 | 1E5 |
| 14 | VOYHTmiR- | VOYHT6 | CBA | 2.3kb | SC | Y | 81 | 39 | 16 |
| | 104.5793 | | | | | | | | |
| 32 | VOYHTmiR- | VOYHT7 | CBA | 2.3kb | SC | Y | 74 | 59 | 27 |
| | 109.016 | | | | | | | | |
| 33 | VOYHTmiR- | VOYHT8 | CBA | 2.3kb | SC | Y | 66 | 35 | 17 |
| | 104.579.10 | | | | | | | | |
| 13 | VOYHTmiR- | VOYHT1 | CBA | 2.3kb | SC | Y | 81 | 39 | 15 |
| | 104.579.3 | | | | | | | | |
| 34 | VOYHTmiR- | VOYHT3 | CBA | 2.3kb | SC | Y | 75 | 44 | 21 |
| | 109.016 | | | | | | | | |
| 30 | VOYHTmiR- | VOYHT4 | CBA | 2.3kb | SC | Y | 58 | 31 | 14 |
| | 104.579.10 | | | | | | | | |
| 15 | VOYHTmiR- | VOYHT10 | CBA | 2.3kb | SC. | Y | 77 | 83 | 24 |
| | 104.579.3 | | | | | | | | |

[0876] A dose dependent knockdown was observed for most of the constructs. Self-complementary vectors produced highest levels of knockdown in vitro compared to single-stranded vectors. Vectors with 5′ or 3′ filler sequences presented higher levels of knockdown in vitro compared to vectors with split filler sequences.

[0877] While the present invention has been described at some length and with some particularity with respect to the several described embodiments, it is not intended that it should be limited to any such particulars or embodiments or any particular embodiment, but it is to be construed with references to the appended claims so as to provide the broadest possible interpretation of such claims in view of the prior art and, therefore, to effectively encompass the intended scope of the invention.

[0878] All publications, patent applications, patents, and other references mentioned herein are incorporated by reference in their entirety. In case of conflict, the present specification, including definitions, will control. In addition, section headings, the materials, methods, and examples are illustrative only and not intended to be limiting.

The application's sequence listing, which the Patent Office published only in electronic form, follows.

SEQUENCE LISTING (2264 sequences)

SEQ ID NO: 1 - DNA, 2211 bp, Adeno-associated virus 1
  source 1..2211: mol_type = unassigned DNA
atggctgccgatggttatcttccagattggctcgaggacaacctctctgagggcattcgcgagtggtgggacttgaaacctggagccccgaagcccaaagccaaccagcaaaagcaggacgacggccggggtctggtgcttcctggctacaagtacctcggacccttcaacggactcgacaagggggagcccgtcaacgcggcggacgcagcggccctcgagcacgacaaggcctacgaccagcagctcaaagcgggtgacaatccgtacctgcggtataaccacgccgacgccgagtttcaggagcgtctgcaagaagatacgtcttttgggggcaacctcgggcgagcagtcttccaggccaagaagcgggttctcgaacctctcggtctggttgaggaaggcgctaagacggctcctggaaagaaacgtccggtagagcagtcgccacaagagccagactcctcctcgggcatcggcaagacaggccagcagcccgctaaaaagagactcaattttggtcagactggcgactcagagtcagtccccgatccacaacctctcggagaacctccagcaacccccgctgctgtgggacctactacaatggcttcaggcggtggcgcaccaatggcagacaataacgaaggcgccgacggagtgggtaatgcctcaggaaattggcattgcgattccacatggctgggcgacagagtcatcaccaccagcacccgcacctgggccttgcccacctacaataaccacctctacaagcaaatctccagtgcttcaacgggggccagcaacgacaaccactacttcggctacagcaccccctgggggtattttgatttcaacagattccactgccacttttcaccacgtgactggcagcgactcatcaacaacaattggggattccggcccaagagactcaacttcaaactcttcaacatccaagtcaaggaggtcacgacgaatgatggcgtcacaaccatcgctaataaccttaccagcacggttcaagtcttctcggactcggagtaccagcttccgtacgtcctcggctctgcgcaccagggctgcctccctccgttcccggcggacgtgttcatgattccgcaatacggctacctgacgctcaacaatggcagccaagccgtgggacgttcatccttttactgcctggaatatttcccttctcagatgctgagaacgggcaacaactttaccttcagctacacctttgaggaagtgcctttccacagcagctacgcgcacagccagagcctggaccggctgatgaatcctctcatcgaccaatacctgtattacctgaacagaactcaaaatcagtccggaagtgcccaaaacaaggacttgctgtttagccgtgggtctccagctggcatgtctgttcagcccaaaaactggctacctggaccctgttatcggcagcagcgcgtttctaaaacaaaaacagacaacaacaacagcaattttacctggactggtgcttcaaaatataacctcaatgggcgtgaatccatcatcaaccctggcactgctatggcctcacacaaagacgacgaagacaagttctttcccatgagcggtgtcatgatttttggaaaagagagcgccggagcttcaaacactgcattggacaatgtcatgattacagacgaagaggaaattaaagccactaaccctgtggccaccgaaagatttgggaccgtggcagtcaatttccagagcagcagcacagaccctgcgaccggagatgtgcatgctatgggagcattacctggcatggtgtggcaagatagagacgtgtacctgcagggtcccatttgggccaaaattcctcacacagatggacactttcacccgtctcctcttatgggcggctttggactcaagaacccgcctcctcagatcctcatcaaaaacacgcctgttcctgcgaatcctccggcggagttttcagctacaaagtttgcttcattcatcacccaatactccacaggacaagtgagtgtggaaattgaatgggagctgcagaaagaaaacagcaagcgctggaatcccgaagtgcagtacacatccaattatgcaaaatctgccaacgttgattttactgtggacaacaatggactttatactgagcctcgccccattggcacccgttaccttacccgtcccctgtaa

SEQ ID NO: 2 - protein, 736 aa, Adeno-associated virus 1
MAADGYLPDWLEDNLSEGIREWWDLKPGAPKPKANQQKQDDGRGLVLPGYKYLGPFNGLDKGEPVNAADAAALEHDKAYDQQLKAGDNPYLRYNHADAEFQERLQEDTSFGGNLGRAVFQAKKRVLEPLGLVEEGAKTAPGKKRPVEQSPQEPDSSSGIGKTGQQPAKKRLNFGQTGDSESVPDPQPLGEPPATPAAVGPTTMASGGGAPMADNNEGADGVGNASGNWHCDSTWLGDRVITTSTRTWALPTYNNHLYKQISSASTGASNDNHYFGYSTPWGYFDFNRFHCHFSPRDWQRLINNNWGFRPKRLNFKLFNIQVKEVTTNDGVTTIANNLTSTVQVFSDSEYQLPYVLGSAHQGCLPPFPADVFMIPQYGYLTLNNGSQAVGRSSFYCLEYFPSQMLRTGNNFTFSYTFEEVPFHSSYAHSQSLDRLMNPLIDQYLYYLNRTQNQSGSAQNKDLLFSRGSPAGMSVQPKNWLPGPCYRQQRVSKTKTDNNNSNFTWTGASKYNLNGRESIINPGTAMASHKDDEDKFFPMSGVMIFGKESAGASNTALDNVMITDEEEIKATNPVATERFGTVAVNFQSSSTDPATGDVHAMGALPGMVWQDRDVYLQGPIWAKIPHTDGHFHPSPLMGGFGLKNPPPQILIKNTPVPANPPAEFSATKFASFITQYSTGQVSVEIEWELQKENSKRWNPEVQYTSNYAKSANVDFTVDNNGLYTEPRPIGTRYLTRPL

SEQ ID NO: 3 - DNA, 4718 bp, Adeno-associated virus 1
  source 1..4718: mol_type = unassigned DNA
ttgcccactccctctctgcgcgctcgctcgctcggtggggcctgcggaccaaaggtccgcagacggcagagctctgctctgccggccccaccgagcgagcgagcgcgcagagagggagtgggcaactccatcactaggggtaatcgcgaagcgcctcccacgctgccgcgtcagcgctgacgtaaattacgtcataggggagtggtcctgtattagctgtcacgtgagtgcttttgcgacattttgcgacaccacgtggccatttagggtatatatggccgagtgagcgagcaggatctccattttgaccgcgaaatttgaacgagcagcagccatgccgggcttctacgagatcgtgatcaaggtgccgagcgacctggacgagcacctgccgggcatttctgactcgtttgtgagctgggtggccgagaaggaatgggagctgcccccggattctgacatggatctgaatctgattgagcaggcacccctgaccgtggccgagaagctgcagcgcgacttcctggtccaatggcgccgcgtgagtaaggccccggaggccctcttctttgttcagttcgagaagggcgagtcctacttccacctccatattctggtggagaccacgggggtcaaatccatggtgctgggccgcttcctgagtcagattagggacaagctggtgcagaccatctaccgcgggatcgagccgaccctgcccaactggttcgcggtgaccaagacgcgtaatggcgccggaggggggaacaaggtggtggacgagtgctacatccccaactacctcctgcccaagactcagcccgagctgcagtgggcgtggactaacatggaggagtatataagcgcctgtttgaacctggccgagcgcaaacggctcgtggcgcagcacctgacccacgtcagccagacccaggagcagaacaaggagaatctgaaccccaattctgacgcgcctgtcatccggtcaaaaacctccgcgcgctacatggagctggtcgggtggctggtggaccggggcatcacctccgagaagcagtggatccaggaggaccaggcctcgtacatctccttcaacgccgcttccaactcgcggtcccagatcaaggccgctctggacaatgccggcaagatcatggcgctgaccaaatccgcgcccgactacctggtaggccccgctccgcccgcggacattaaaaccaaccgcatctaccgcatcctggagctgaacggctacgaacctgcctacgccggctccgtctttctcggctgggcccagaaaaggttcgggaagcgcaacaccatctggctgtttgggccggccaccacgggcaagaccaacatcgcggaagccatcgcccacgccgtgcccttctacggctgcgtcaactggaccaatgagaactttcccttcaatgattgcgtcgacaagatggtgatctggtgggaggagggcaagatgacggccaaggtcgtggagtccgccaaggccattctcggcggcagcaaggtgcgcgtggaccaaaagtgcaagtcgtccgcccagatcgaccccacccccgtgatcgtcacctccaacaccaacatgtgcgccgtgattgacgggaacagcaccaccttcgagcaccagcagccgttgcaggaccggatgttcaaatttgaactcacccgccgtctggagcatgactttggcaaggtgacaaagcaggaagtcaaagagttcttccgctgggcgcaggatcacgtgaccgaggtggcgcatgagttctacgtcagaaagggtggagccaacaaaagacccgcccccgatgacgcggataaaagcgagcccaagcgggcctgcccctcagtcgcggatccatcgacgtcagacgcggaaggagctccggtggactttgccgacaggtaccaaaacaaatgttctcgtcacgcgggcatgcttcagatgctgtttccctgcaagacatgcgagagaatgaatcagaatttcaacatttgcttcacgcacgggacgagagactgttcagagtgcttccccggcgtgtcagaatctcaaccggtcgtcagaaagaggacgtatcggaaactctgtgccattcatcatctgctggggcgggctcccgagattgcttgctcggcctgcgatctggtcaacgtggacctggatgactgtgtttctgagcaataaatgacttaaaccaggtatggctgccgatggttatcttccagattggctcgaggacaacctctctgagggcattcgcgagtggtgggacttgaaacctggagccccgaagcccaaagccaaccagcaaaagcaggacgacggccggggtctggtgcttcctggctacaagtacctcggacccttcaacggactcgacaagggggagcccgtcaacgcggcggacgcagcggccctcgagcacgacaaggcctacgaccagcagctcaaagcgggtgacaatccgtacctgcggtataaccacgccgacgccgagtttcaggagcgtctgcaagaagatacgtcttttgggggcaacctcgggcgagcagtcttccaggccaagaagcgggttctcgaacctctcggtctggttgaggaaggcgctaagacggctcctggaaagaaacgtccggtagagcagtcgccacaagagccagactcctcctcgggcatcggcaagacaggccagcagcccgctaaaaagagactcaattttggtcagactggcgactcagagtcagtccccgatccacaacctctcggagaacctccagcaacccccgctgctgtgggacctactacaatggcttcaggcggtggcgcaccaatggcagacaataacgaaggcgccgacggagtgggtaatgcctcaggaaattggcattgcgattccacatggctgggcgacagagtcatcaccaccagcacccgcacctgggccttgcccacctacaataaccacctctacaagcaaatctccagtgcttcaacgggggccagcaacgacaaccactacttcggctacagcaccccctgggggtattttgatttcaacagattccactgccacttttcaccacgtgactggcagcgactcatcaacaacaattggggattccggcccaagagactcaacttcaaactcttcaacatccaagtcaaggaggtcacgacgaatgatggcgtcacaaccatcgctaataaccttaccagcacggttcaagtcttctcggactcggagtaccagcttccgtacgtcctcggctctgcgcaccagggctgcctccctccgttcccggcggacgtgttcatgattccgcaatacggctacctgacgctcaacaatggcagccaagccgtgggacgttcatccttttactgcctggaatatttcccttctcagatgctgagaacgggcaacaactttaccttcagctacacctttgaggaagtgcctttccacagcagctacgcgcacagccagagcctggaccggctgatgaatcctctcatcgaccaatacctgtattacctgaacagaactcaaaatcagtccggaagtgcccaaaacaaggacttgctgtttagccgtgggtctccagctggcatgtctgttcagcccaaaaactggctacctggaccctgttatcggcagcagcgcgtttctaaaacaaaaacagacaacaacaacagcaattttacctggactggtgcttcaaaatataacctcaatgggcgtgaatccatcatcaaccctggcactgctatggcctcacacaaagacgacgaagacaagttctttcccatgagcggtgtcatgatttttggaaaagagagcgccggagcttcaaacactgcattggacaatgtcatgattacagacgaagaggaaattaaagccactaaccctgtggccaccgaaagatttgggaccgtggcagtcaatttccagagcagcagcacagaccctgcgaccggagatgtgcatgctatgggagcattacctggcatggtgtggcaagatagagacgtgtacctgcagggtcccatttgggccaaaattcctcacacagatggacactttcacccgtctcctcttatgggcggctttggactcaagaacccgcctcctcagatcctcatcaaaaacacgcctgttcctgcgaatcctccggcggagttttcagctacaaagtttgcttcattcatcacccaatactccacaggacaagtgagtgtggaaattgaatgggagctgcagaaagaaaacagcaagcgctggaatcccgaagtgcagtacacatccaattatgcaaaatctgccaacgttgattttactgtggacaacaatggactttatactgagcctcgccccattggcacccgttaccttacccgtcccctgtaattacgtgttaatcaataaaccggttgattcgtttcagttgaactttggtctcctgtccttcttatcttatcggttaccatggttatagcttacacattaactgcttggttgcgcttcgcgataaaagacttacgtcatcgggttacccctagtgatggagttgcccactccctctctgcgcgctcgctcgctcggtggggcctgcggaccaaaggtccgcagacggcagagctctgctctgccggccccaccgagcgagcgagcgcgcagagagggagtgggcaa

SEQ ID NO: 4 - DNA, 3131 bp, Adeno-associated virus
  source 1..3131: mol_type = unassigned DNA
gcggccgcgaattcgcccttggctgcgtcaactggaccaatgagaactttcccttcaatgattgcgtcgacaagatggtgatctggtgggaggagggcaagatgacggccaaggtcgtggagtccgccaaggccattctcggcggcagcaaggtgcgcgtggaccaaaagtgcaagtcgtccgcccagatcgaccccacccccgtgatcgtcacctccaacaccaacatgtgcgccgtgattgacgggaacagcaccaccttcgagcaccagcagcctctccaggaccggatgtttaagttcgaactcacccgccgtctggagcacgactttggcaaggtgacaaagcaggaagtcaaagagttcttccgctgggccagtgatcacgtgaccgaggtggcgcatgagttttacgtcagaaagggcggagccagcaaaagacccgcccccgatgacgcggataaaagcgagcccaagcgggcctgcccctcagtcgcggatccatcgacgtcagacgcggaaggagctccggtggactttgccgacaggtaccaaaacaaatgttctcgtcacgcgggcatgcttcagatgctgtttccctgcaaaacgtgcgagagaatgaatcggaatttcaacatttgcttcacacacggggtcagagactgctcagagtgtttccccggcgtgtcagaatctcaaccggtcgtcagaaagaggacgtatcggaaactccgtgcgattcatcatctgctggggcgggctcccgagattgcttgctcggcctgcgatctggtcaacgtggacctggatgactgtgtttctgagcaataaatgacttaaaccaggtatggctgccgatggttatcttccagattggctcgaggacaacctctctgagggcattcgcgagtggtgggcgctgaaacctggagccccgaagcccaaagccaaccagcaaaagcaggacgacggccggggtctggtgcttcctggctacaagtacctcggacccttcaacggactcgacaagggggagcccgtcaacgcggcggacgcagcggccctcgagcacgacaaggcttacgaccagcagctgcaggcgggtgacaatccgtacctgcggtataaccacgccgacgccgagtttcaggagcgtctgcaagaagatacgtcttttgggggcaacctcgggcgagcagtcttccaggccaagaagcgggttctcgaacctctcggtctggttgaggaaggcgctaagacggctcctggaaagaagagaccggtagagccatcaccccagcgttctccagactcctctacgggcatcggcaagaaaggccaacagcccgccagaaaaagactcaattttggtcagactggcgactcagagtcagttccagaccctcaacctctcggagaacctccagcagcgccctctggtgtgggacctaatacaatggctgcaggcggtggcgcaccaatggcagacaataacgaaggcgccgacggagtgggtagttcctcgggaaattggcattgcgattccacatggctgggcgacagagtcatcaccaccagcacccgaacctgggccctgcccacctacaacaaccacctctacaagcaaatctccaacgggacatcgggaggagccaccaacgacaacacctacttcggctacagcaccccctgggggtattttgactttaacagattccactgccacctttcaccacgtgactggcagcgactcatcaacaacaactggggattccgacccaagagactcagcttcaagctcttcaacatccaggtcaaggaggtcacgcagaatgaaggcaccaagaccatcgccaataacctcaccagcaccatccaggtgtttacggactcggagtaccagctgccgtacgttctcggctctgtccaccagggctgcctgcctccgttcccggcggacgtgttcatgattccccagtacggctacctaacactcaacaacggtagtcaggccgtgggacgctcctccttctactgcctggaatactttccttcgcagatgctgagaaccggcaacaacttccagtttacttacaccttcgaggacgtgcctttccacagcagctacgcccacagctagagcttggaccggctgatgaatcctctgattgaccagtacctgtactacttgtctcggactcaaacaacaggaggcacggcaaatacgcagactctgggcttcagccaaggtgggcctaatacaatggccaatcaggcaaagaactggctgccaggaccctgttaccgccaacaacgcgtctcaacgacaaccgggcaaaacaacaatagcaactttgcctggactgctgggaccaaataccatctgaatggaagaaattcattggctaatcctggcatcgctatggcaacacacaaagacgacgaggagcgtttttttcccagtaacgggatcctgatttttggcaaacaaaatgctgccagagacaatgcggattacagcgatgtcatgctcaccagcgaggaagaaatcaaaaccactaaccctgtggctacagaggaatacggtatcgtggcagataacttgcagcagcaaaacacggctcctcaaattggaactgtcaacagccagggggccttacccggtatggtctggcagaaccgggacgtgtacctgcagggtcccatctgggccaagattcctcacacggacggcaacttccacccgtctccgctgatgggcggctttggcctgaaacatcctccgcctcagatcctgatcaagaacacgcctgtacctgcggatcctccgaccaccttcaaccagtcaaagctgaactctttcatcacgcaatacagcaccggacaggtcagcgtggaaattgaatgggagctgcagaaggaaaacagcaagcgctggaaccccgagatccagtacacctccaactactacaaatctataagtgtggactttgctgttaatacagaaggcgtgtactctgaaccccgccccattggcacccgttacctcacccgtaatctgtaattgcctgttaatcaataaaccggttgattcgtttcagttgaactttggtctctgcgaagggcgaattc

SEQ ID NO: 5 - DNA, 255 bp, Adeno-associated virus 10
  source 1..255: mol_type = unassigned DNA
ggtaattcctccggaaattggcattgcgattccacatggctgggcgacagagtcatcaccaccagcacccgaacctgggtcctgcccacctacaacaaccacatctacaagcaaatctccagcgagacaggagccaccaacgacaaccactacttcggctacagcaccccctgggggtattttgactttaacagattccactgccacttttcaccacgtgactggcagcgactcatcaacaacaactggggattc

SEQ ID NO: 6 - protein, 738 aa, Adeno-associated virus 10
MAADGYLPDWLEDNLSEGIREWWDLKPGAPKPKANQQKQDDGRGLVLPGYKYLGPFNGLDKGEPVNAADAAALEHDKAYDQQLKAGDNPYLRYNHADAEFQERLQEDTSFGGNLGRAVFQAKKRVLEPLGLVEEAAKTAPGKKRPVEPSPQRSPDSSTGIGKKGQQPAKKRLNFGQTGESESVPDPQPIGEPPAGPSGLGSGTMAAGGGAPMADNNEGADGVGSSSGNWHCDSTWLGDRVITTSTRTWALPTYNNHLYKQISNGTSGGSTNDNTYFGYSTPWGYFDFNRFHCHFSPRDWQRLINNNWGFRPKRLSFKLFNIQVKEVTQNEGTKTIANNLTSTIQVFTDSEYQLPYVLGSAHQGCLPPFPADVFMIPQYGYLTLNNGSQAVGRSSFYCLEYFPSQMLRTGNNFEFSYTFEDVPFHSSYAHSQSLDRLMNPLIDQYLYYLSRTQSTGGTQGTQQLLFSQAGPANMSAQAKNWLPGPCYRQQRVSTTLSQNNNSNFAWTGATKYHLNGRDSLVNPGVAMATHKDDEERFFPSSGVLMFGKQGAGRDNVDYSSVMLTSEEEIKTTNPVATEQYGVVADNLQQANTGPIVGNVNSQGALPGMVWQNRDVYLQGPIWAKIPHTDGNFHPSPLMGGFGLKHPPPQILIKNTPVPADPPTTFSQAKLASFITQYSTGQVSVEIEWELQKENSKRWNPEIQYTSNYYKSTNVDFAVNTEGTYSEPRPIGTRYLTRNL

SEQ ID NO: 7 - protein, 738 aa, Adeno-associated virus 10
MAADGYLPDWLEDNLSEGIREWWDLKPGAPKPKANQQKQDDGRGLVLPGYKYLGPFNGLDKGEPVNAADAAALEHDKAYDQQLKAGDNPYLRYNHADAEFQERLQEDTSFGGNLGRAVFQAKKRVLEPLGLVEEGAKTAPGKKRPVEPSPQRSPDSSTGIGKKGQQPAKKRLNFGQTGDSESVPDPQPIGEPPAGPSGLGSGTMAAGGGAPMADNNEGADGVGSSSGNWHCDSTWLGDRVITTSTRTWALPTYNNHLYKQISNGTSGGSTNDNTYFGYSTPWGYFDFNRFHCHFSPRDWQRLINNNWGFRPKRLNFKLFNIQVKEVTQNEGTKTIANNLTSTIQVFTDSEYQLPYVLGSAHQGCLPPFPADVFMIPQYGYLTLNNGSQAVGRSSFYCLEYFPSQMLRTGNNFEFSYQFEDVPFHSSYAHSQSLDRLMNPLIDQYLYYLSRTQSTGGTAGTQQLLFSQAGPNNMSAQAKNWLPGPCYRQQRVSTTLSQNNNSNFAWTGATKYHLNGRDSLVNPGVAMATHKDDEERFFPSSGVLMFGKQGAGKDNVDYSSVMLTSEEEIKTTNPVATEQYGVVADNLQQQNAAPIVGAVNSQGALPGMVWQNRDVYLQGPIWAKIPHTDGNFHPSPLMGGFGLKHPPPQILIKNTPVPADPPTTFSQAKLASFITQYSTGQVSVEIEWELQKENSKRWNPEIQYTSNYYKSTNVDFAVNTDGTYSEPRPIGTRYLTRNL

SEQ ID NO: 8 - DNA, 258 bp, Adeno-associated virus 11
  source 1..258: mol_type = unassigned DNA
ggtaattcctccggaaattggcattgcgattccacatggctgggcgacagagtcatcaccaccagcacccgaacctgggccctgccaacctacaacaaccacctctacaaacaaatctccagcgcttcaacgggggccagcaacgacaaccactactttggctacagcaccccctgggggtattttgactttaacagattccactgccacttctcaccacgtgactggcagcgactcatcaacaacaactggggattc

SEQ ID NO: 9 - DNA, 255 bp, Adeno-associated virus 12
  source 1..255: mol_type = unassigned DNA
ggtaattcctccggaaattggcattgcgattccacatggctgggcgaccgagtcattaccaccagcacccggacttgggccctgcccacctacaacaaccacctctacaagcaaatctccagccaatcgggtgccaccaacgacaaccactacttcggctacagcaccccttgggggtattttgatttcaacagattccactgccatttctcaccacgtgactggcagcgactcatcaacaacaactggggattc

SEQ ID NO: 10 - DNA, 2208 bp, Adeno-associated virus 2
  source 1..2208: mol_type = unassigned DNA
atggctgccgatggttatcttccagattggctcgaggacactctctctgaaggaataagacagtggtggaagctcaaacctggcccaccaccaccaaagcccgcagagcggcataaggacgacagcaggggtcttgtgcttcctgggtacaagtacctcggacccttcaacggactcgacaagggagagccggtcaacgaggcagacgccgcggccctcgagcacgacaaagcctacgaccggcagctcgacagcggagacaacccgtacctcaagtacaaccacgccgacgcggagtttcaggagcgccttaaagaagatacgtcttttgggggcaacctcggacgagcagtcttccaggcgaaaaagagggttcttgaacctctgggcctggttgaggaacctgttaagacggctccgggaaaaaagaggccggtagagcactctcctgtggagccagactcctcctcgggaaccggaaaggcgggccagcagcctgcaagaaaaagattgaattttggtcagactggagacgcagactcagtacctgacccccagcctctcggacagccaccagcagccccctctggtctgggaactaatacgatggctacaggcagtggcgcaccaatggcagacaataacgagggcgccgacggagtgggtaattcctcgggaaattggcattgcgattccacatggatgggcgacagagtcatcaccaccagcacccgaacctgggccctgcccacctacaacaaccacctctacaaacaaatttccagccaatcaggagcctcgaacgacaatcactactttggctacagcaccccttgggggtattttgacttcaacagattccactgccacttttcaccacgtgactggcaaagactcatcaacaacaactggggattccgacccaagagactcaacttcaagctctttaacattcaagtcaaagaggtcacgcagaatgacggtacgacgacgattgccaataaccttaccagcacggttcaggtgtttactgactcggagtaccagctcccgtacgtcctcggctcggcgcatcaaggatgcctcccgccgttcccagcagacgtcttcatggtgccacagtatggatacctcaccctgaacaacgggagtcaggcagtaggacgctcttcattttactgcctggagtactttccttctcagatgctgcgtaccggaaacaactttaccttcagctacacttttgaggacgttcctttccacagcagctacgctcacagccagagtctggaccgtctcatgaatcctctcatcgaccagtacctgtattacttgagcagaacaaacactccaagtggaaccaccacgcagtcaaggcttcagttttctcaggccggagcgagtgacattcgggaccagtctaggaactggcttcctggaccctgttaccgccagcagcgagtatcaaagacatctgcggataacaacaacagtgaatactcgtggactggagctaccaagtaccacctcaatggcagagactctctggtgaatccgggcccggccatggcaagccacaaggacgatgaagaaaagttttttcctcagagcggggttctcatctttgggaagcaaggctcagagaaaacaaatgtggacattgaaaaggtcatgattacagacgaagaggaaatcaggacaaccaatcccgtggctacggagcagtatggttctgtatctaccaacctccagagaggcaacagacaagcagctaccgcagatgtcaacacacaaggcgttcttccaggcatggtctggcaggacagagatgtgtaccttcaggggcccatctgggcaaagattccacacacggacggacattttcacccctctcccctcatgggtggattcggacttaaacaccctcctccacagattctcatcaagaacaccccggtacctgcgaatccttcgaccaccttcagtgcggcaaagtttgcttccttcatcacacagtactccacgggacaggtcagcgtggagatcgagtgggagctgcagaaggaaaacagcaaacgctggaatcccgaaattcagtacacttccaactacaacaagtctgttaatgtggactttactgtggacactaatggcgtgtattcagagcctcgccccattggcaccagatacctgactcgtaatctgtaa

SEQ ID NO: 11 - protein, 735 aa, Adeno-associated virus 2 [sequence omitted]

SEQ ID NO: 12 - protein, 621 aa, Adeno-associated virus 2
MPGFYEIVIKVPSDLDGHLPGISDSFVNWVAEKEWELPPDSDMDLNLIEQAPLTVAEKLQRDFLTEWRRVSKAPEALFFVQFEKGESYFHMHVLVETTGVKSMVLGRFLSQIREKLIQRIYRGIEPTLPNWFAVTKTRNGAGGGNKVVDECYIPNYLLPKTQPELQWAWTNMEQYLSACLNLTERKRLVAQHLTHVSQTQEQNKENQNPNSDAPVIRSKTSARYMELVGWLVDKGITSEKQWIQEDQASYISFNAASNSRSQIKAALDNAGKIMSLTKTAPDYLVGQQPVEDISSNRIYKILELNGYDPQYAASVFLGWATKKFGKRNTIWLFGPATTGKTNIAEAIAHTVPFYGCVNWTNENFPFNDCVDKMVIWWEEGKMTAKVVESAKAILGGSKVRVDQKCKSSAQIDPTPVIVTSNTNMCAVIDGNSTTFEHQQPLQDRMFKFELTRRLDHDFGKVTKQEVKDFFRWAKDHVVEVEHEFYVKKGGAKKRPAPSDADISEPKRVRESVAQPSTSDAEASINYADRYQNKCSRHVGMNLMLFPCRQCERMNQNSNICFTHGQKDCLECFPVSESQPVSVVKKAYQKLCYIHHIMGKVPDACTACDLVNVDLDDCIFEQ

SEQ ID NO: 13 - DNA, 4675 bp, Adeno-associated virus 2
  source 1..4675: mol_type = unassigned DNA
ttggccactccctctctgcgcgctcgctcgctcactgaggccgggcgaccaaaggtcgcccgacgcccgggctttgcccgggcggcctcagtgagcgagcgagcgcgcagagagggagtggccaactccatcactaggggttcctggaggggtggagtcgtgacgtgaattacgtcatagggttagggaggtcctgtattagaggtcacgtgagtgttttgcgacattttgcgacaccatgtggtcacgctgggtatttaagcccgagtgagcacgcagggtctccattttgaagcgggaggtttgaacgcgcagccgccatgccggggttttacgagattgtgattaaggtccccagcgaccttgacgggcatctgcccggcatttctgacagctttgtgaactgggtggccgagaaggaatgggagttgccgccagattctgacatggatctgaatctgattgagcaggcacccctgaccgtggccgagaagctgcagcgcgactttctgacggaatggcgccgtgtgagtaaggccccggaggcccttttctttgtgcaatttgagaagggagagagctacttccacatgcacgtgctcgtggaaaccaccggggtgaaatccatggttttgggacgtttcctgagtcagattcgcgaaaaactgattcagagaatttaccgcgggatcgagccgactttgccaaactggttcgcggtcacaaagaccagaaatggcgccggaggcgggaacaaggtggtggatgagtgctacatccccaattacttgctccccaaaacccagcctgagctccagtgggcgtggactaatatggaacagtatttaagcgcctgtttgaatctcacggagcgtaaacggttggtggcgcagcatctgacgcacgtgtcgcagacgcaggagcagaacaaagagaatcagaatcccaattctgatgcgccggtgatcagatcaaaaacttcagccaggtacatggagctggtcgggtggctcgtggacaaggggattacctcggagaagcagtggatccaggaggaccaggcctcatacatctccttcaatgcggcctccaactcgcggtcccaaatcaaggctgccttggacaatgcgggaaagattatgagcctgactaaaaccgcccccgactacctggtgggccagcagcccgtggaggacatttccagcaatcggatttataaaattttggaactaaacgggtacgatccccaatatgcggcttccgtctttctgggatgggccacgaaaaagttcggcaagaggaacaccatctggctgtttgggcctgcaactaccgggaagaccaacatcgcggaggccatagcccacactgtgcccttctacgggtgcgtaaactggaccaatgagaactttcccttcaacgactgtgtcgacaagatggtgatctggtgggaggaggggaagatgaccgccaaggtcgtggagtcggccaaagccattctcggaggaagcaaggtgcgcgtggaccagaaatgcaagtcctcggcccagatagacccgactcccgtgatcgtcacctccaacaccaacatgtgcgccgtgattgacgggaactcaacgaccttcgaacaccagcagccgttgcaagaccggatgttcaaatttgaactcacccgccgtctggatcatgactttgggaaggtcaccaagcaggaagtcaaagactttttccggtgggcaaaggatcacgtggttgaggtggagcatgaattctacgtcaaaaagggtggagccaagaaaagacccgcccccagtgacgcagatataagtgagcccaaacgggtgcgcgagtcagttgcgcagccatcgacgtcagacgcggaagcttcgatcaactacgcagacaggtaccaaaacaaatgttctcgtcacgtgggcatgaatctgatgctgtttccctgcagacaatgcgagagaatgaatcagaattcaaatatctgcttcactcacggacagaaagactgtttagagtgctttcccgtgtcagaatctcaacccgtttctgtcgtcaaaaaggcgtatcagaaactgtgctacattcatcatatcatgggaaaggtgccagacgcttgcactgcctgcgatctggtcaatgtggatttggatgactgcatctttgaacaataaatgatttaaatcaggtatggctgccgatggttatcttccagattggctcgaggacactctctctgaaggaataagacagtggtggaagctcaaacctggcccaccaccaccaaagcccgcagagcggcataaggacgacagcaggggtcttgtgcttcctgggtacaagtacctcggacccttcaacggactcgacaagggagagccggtcaacgaggcagacgccgcggccctcgagcacgtacaaagcctacgaccggcagctcgacagcggagacaacccgtacctcaagtacaaccacgccgacgcggagtttcaggagcgccttaaagaagatacgtcttttgggggcaacctcggacgagcagtcttccaggcgaaaaagagggttcttgaacctctgggcctggttgaggaacctgttaagacggctccgggaaaaaagaggccggtagagcactctcctgtggagccagactcctcctcgggaaccggaaaggcgggccagcagcctgcaagaaaaagattgaattttggtcagactggagacgcagactcagtacctgacccccagcctctcggacagccaccagcagccccctctggtctgggaactaatacgatggctacaggcagtggcgcaccaatggcagacaataacgagggcgccgacggagtgggtaattcctccggaaattggcattgcgattccacatggatgggcgacagagtcatcaccaccagcacccgaacctgggccctgcccacctacaacaaccacctctacaaacaaatttccagccaatcaggagcctcgaacgacaatcactactttggctacagcaccccttgggggtattttgacttcaacagattccactgccacttttcaccacgtgactggcaaagactcatcaacaacaactggggattccgacccaagagactcaacttcaagctctttaacattcaagtcaaagaggtcacgcagaatgacggtacgacgacgattgccaataaccttaccagcacggttcaggtgtttactgactcggagtaccagctcccgtacgtcctcggctcggcgcatcaaggatgcctcccgccgttcccagcagacgtcttcatggtgccacagtatggatacctcaccctgaacaacgggagtcaggcagtaggacgctcttcattttactgcctggagtactttccttctcagatgctgcgtaccggaaacaactttaccttcagctacacttttgaggacgttcctttccacagcagctacgctcacagccagagtctggaccgtctcatgaatcctctcatcgaccagtacctgtattacttgagcagaacaaacactccaagtggaaccaccacgcagtcaaggcttcagttttctcaggccggagcgagtgacattcgggaccagtctaggaactggcttcctggaccctgttaccgccagcagcgagtatcaaagacatctgcggataacaacaacagtgaatactcgtggactggagctaccaagtaccacctcaatggcagagactctctggtgaatccggccatggcaagccacaaggacgatgaagaaaagttttttcctcagagcggggttctcatctttgggaagcaaggctcagagaaaacaaatgtgaacattgaaaaggtcatgattacagacgaagaggaaatcggaacaaccaatcccgtggctacggagcagtatggttctgtatctaccaacctccagagaggcaacagacaagcagctaccgcagatgtcaacacacaaggcgttcttccaggcatggtctggcaggacagagatgtgtaccttcaggggcccatctgggcaaagattccacacacggacggacattttcacccctctcccctcatgggtggattcggacttaaacaccctcctccacagattctcatcaagaacaccccggtacctgcgaatccttcgaccaccttcagtgcggcaaagtttgcttccttcatcacacagtactccacgggacacggtcagcgtggagatcgagtgggagctgcagaaggaaaacagcaaacgctggaatcccgaaattcagtacacttccaactacaacaagtctgttaatcgtggacttaccgtggatactaatggcgtgtattcagagcctcgccccattggcaccagatacctgactcgtaatctgtaattgcttgttaatcaataaaccgtttaattcgtttcagttgaactttggtctctgcgtatttctttcttatctagtttccatggctacgtagataagtagcatggcgggttaatcattaactacaaggaacccctagtgatggagttggccactccctctctgcgcgctcgctcgctcactgaggccgggcgaccaaaggtcgcccgacgcccgggctttgcccgggcggcctcagtgagcgagcgagcgcgcagagagggagtggccaa

SEQ ID NO: 14 - DNA, 4679 bp, Adeno-associated virus 2
  source 1..4679: mol_type = unassigned DNA
ttggccactccctctctgcgcgctcgctcgctcactgaggccgggcgaccaaaggtcgcccgacgcccgggctttgcccgggcggcctcagtgagcgagcgagcgcgcagagagggagtggccaactccatcactaggggttcctggaggggtggagtcgtgacgtgaattacgtcatagggttagggaggtcctgtattagaggtcacgtgagtgttttgcgacattttgcgacaccatgtggtcacgctgggtatttaagcccgagtgagcacgcagggtctccattttgaagcgggaggtttgaacgcgcagccgccatgccggggttttacgagattgtgattaaggtccccagcgaccttgacgggcatctgcccggcatttctgacagctttgtgaactgggtggccgagaaggaatgggagttgccgccagattctgacatggatctgaatctgattgagcaggcacccctgaccgtggccgagaagctgcagcgcgactttctgacggaatggcgccgtgtgagtaaggccccggaggcccttttctttgtgcaatttgagaagggagagagctacttccacatgcacgtgctcgtggaaaccaccggggtgaaatccatggttttgggacgtttcctgagtcagattcgcgaaaaactgattcagagaatttaccgcgggatcgagccgactttgccaaactggttcgcggtcacaaagaccagaaatggcgccggaggcgggaacaaggtggtggatgagtgctacatccccaattacttgctccccaaaacccagcctgagctccagtgggcgtggactaatatggaacagtatttaagcgcctgtttgaatctcacggagcgtaaacggttggtggcgcagcatctgacgcacgtgtcgcagacgcaggagcagaacaaagagaatcagaatcccaattctgatgcgccggtgatcagatcaaaaacttcagccaggtacatggagctggtcgggtggctcgtggacaaggggattacctcggagaagcagtggatccaggaggaccaggcctcatacatctccttcaatgcggcctccaactcgcggtcccaaatcaaggctgccttggacaatgcgggaaagattatgagcctgactaaaaccgcccccgactacctggtgggccagcagcccgtggaggacatttccagcaatcggatttataaaattttggaactaaacgggtacgatccccaatatgcggcttccgtctttctgggatgggccacgaaaaagttcggcaagaggaacaccatctggctgtttgggcctgcaactaccgggaagaccaacatcgcggaggccatagcccacactgtgcccttctacgggtgcgtaaactggaccaatgagaactttcccttcaacgactgtgtcgacaagatggtgatctggtgggaggaggggaagatgaccgccaaggtcgtggagtcggccaaagccattctcggaggaagcaaggtgcgcgtggaccagaaatgcaagtcctcggcccagatagacccgactcccgtgatcgtcacctccaacaccaacatgtgcgccgtgattgacgggaactcaacgaccttcgaacaccagcagccgttgcaagaccggatgttcaaatttgaactcacccgccgtctggatcatgactttgggaaggtcaccaagcaggaagtcaaagactttttccggtgggcaaaggatcacgtggttgaggtggagcatgaattctacgtcaaaaagggtggagccaagaaaagacccgcccccagtgacgcagatataagtgagcccaaacgggtgcgcgagtcagttgcgcagccatcgacgtcagacgcggaagcttcgatcaactacgcagacaggtaccaaaacaaatgttctcgtcacgtgggcatgaatctgatgctgtttccctgcagacaatgcgagagaatgaatcagaattcaaatatctgcttcactcacggacagaaagactgtttagagtgctttcccgtgtcagaatctcaacccgtttctgtcgtcaaaaaggcgtatcagaaactgtgctacattcatcatatcatgggaaaggtgccagacgcttgcactgcctgcgatctggtcaatgtggatttggatgactgcatctttgaacaataaatgatttaaatcaggtatggctgccgatggttatcttccagattggctcgaggacactctctctgaaggaataagacagtggtggaagctcaaacctggcccaccaccaccaaagcccgcagagcggcataaggacgacagcaggggtcttgtgcttcctgggtacaagtacctcggacccttcaacggactcgacaagggagagccggtcaacgaggcagacgccgcggccctcgagcacgacaaagcctacgaccggcagctcgacagcggagacaacccgtacctcaagtacaaccacgccgacgcggagtttcaggagcgccttaaagaagatacgtcttttgggggcaacctcggacgagcagtcttccaggcgaaaaagagggttcttgaacctctgggcctggttgaggaacctgttaagacggctccgggaaaaaagaggccggtagagcactctcctgtggagccagactcctcctcgggaaccggaaaggcgggccagcagcctgcaagaaaaagattgaattttggtcagactggagacgcagactcagtacctgacccccagcctctcggacagccaccagcagccccctctggtctgggaactaatacgatggctacaggcagtggcgcaccaatggcagacaataacgagggcgccgacggagtgggtaattcctccggaaattggcattgcgattccacatggatgggcgacagagtcatcaccaccagcacccgaacctgggccctgcccacctacaacaaccacctctacaaacaaatttccagccaatcaggagcctcgaacgacaatcactactttggctacagcaccccttgggggtattttgacttcaacagattccactgccacttttcaccacgtgactggcaaagactcatcaacaacaactggggattccgacccaagagactcaacttcaagctctttaacattcaagtcaaagaggtcacgcagaatgacggtacgacgacgattgccaataaccttaccagcacggttcaggtgtttactgactcggagtaccagctcccgtacgtcctcggctcggcgcatcaaggatgcctcccgccgttcccagcagacgtcttcatggtgccacagtatggatacctcaccctgaacaacgggagtcaggcagtaggacgctcttcattttactgcctggagtactttccttctcagatgctgcgtaccggaaacaactttaccttcagctacacttttgaggacgttcctttccacagcagctacgctcacagccagagtctggaccgtctcatgaatcctctcatcgaccagtacctgtattacttgagcagaacaaacactccaagtggaaccaccacgcagtcaaggcttcagttttctcaggccggagcgagtgacattcgggaccagtctaggaactggcttcctggaccctgttaccgccagcagcgagtatcaaagacatctgcggataacaacaacagtgaatactcgtggactggagctaccaagtaccacctcaatggcagagactctctggtgaatccgggcccggccatggcaagccacaaggacgatgaagaaaagttttttcctcagagcggggttctcatctttgggaagcaaggctcagagaaaacaaatgtggacattgaaaaggtcatgattacagacgaagaggaaatcaggacaaccaatcccgtggctacggagcagtatggttctgtatctaccaacctccagagaggcaacagacaagcagctaccgcagatgtcaacacacaaggcgttcttccaggcatggtctggcaggacagagatgtgtaccttcaggggcccatctgggcaaagattccacacacggacggacattttcacccctctcccctcatgggtggattcggacttaaacaccctcctccacagattctcatcaagaacaccccggtacctgcgaatccttcgaccaccttcagtgcggcaaagtttgcttccttcatcacacagtactccacgggacaggtcagcgtggagatcgagtgggagctgcagaaggaaaacagcaaacgctggaatcccgaaattcagtacacttccaactacaacaagtctgttaatgtggactttactgtggacactaatggcgtgtattcagagcctcgccccattggcaccagatacctgactcgtaatctgtaattgcttgttaatcaataaaccgtttaattcgtttcagttgaactttggtctctgcgtatttctttcttatctagtttccatggctacgtagataagtagcatggcgggttaatcattaactacaaggaacccctagtgatggagttggccactccctctctgcgcgctcgctcgctcactgaggccgggcgaccaaaggtcgcccgacgcccgggctttgcccgggcggcctcagtgagcgagcgagcgcgcagagagggagtggccaa

SEQ ID NO: 15 - protein, 725 aa, Adeno-associated virus 5
MAADGYLPDWLEDTLSEGIRQWWKLKPGPPPPKPAERHKDDSRGLVLPGYKYLGPFNGLDKGEPVNEADAAALEHDKAYDRQLDSGDNPYLKYNHADAEFQERLKEDTSFGGNLGRAVFQAKKRVLEPFGLVEEGAKTAPTGKRIDDHFPKRKKARTEEDSKPSTSSDAEAGPSGSQQLQIPAQPASSLGADTMSAGGGGPLGDNNQGADGVGNASGDWHCDSTWMGDRVVTKSTRTWVLPSYNNHQYREIKSGSVDGSNANAYFGYSTPWGYFDFNRFHSHWSPRDWQRLINNYWGFRPRSLRVKIFNIQVKEVTVQDSTTTIANNLTSTVQVFTDDDYQLPYVVGNGTEGCLPAFPPQVFTLPQYGYATLNRDNTENPTERSSFFCLEYFPSKMLRTGNNFEFTYNFEEVPFHSSFAPSQNLFKLANPLVDQYLYRFVSTNNTGGVQFNKNLAGRYANTYKNWFPGPMGRTQGWNLGSGVNRASVSAFATTNRMELEGASYQVPPQPNGMTNNLQGSNTYALENTMIFNSQPANPGTTATYLEGNMLITSESETQPVNRVAYNVGGQMATNNQSSTTAPTTGTYNLQEIVPGSVWMERDVYLQGPIWAKIPETGAHFHPSPAMGGFGLKHPPPMMLIKNTPVPGNITSFSDVPVSSFITQYSTGQVTVEMEWELKKENSKRWNPEIQYTNNYNDPQFVDFAPDSTGEYRTTRPIGTRYLTRPL

SEQ ID NO: 16 - protein, 644 aa, synthetic construct
  source 1..644: note = Description of Artificial Sequence: Synthetic polypeptide
  VARIANT 434: note = MOD_RES - Xaa = any amino acid
KAYDQQLKAGDNPYLRYNHADAEFQERLQEDTSFGGNLGRAVFQAKKRVLEPLGLVETPAKTAPGKKRPVDSPDSTSGIGKKGQQPAKKRLNFGQTGDSESVPDPQPIGEPPAGPSGLGSGTMAAGGGAPMADNNEGADGVGNASGNWHCDSTWLGDRVITTSTRTWALPTYNNHLYKQISSQSAGSTNDNVYFGYSTPWGYFDFNRFHCHFSPRDWQRLINNNWGFRPKKLNFKLFNIQVKEVTTNDGVTTIANNLTSTVQVFSDSEYQLPYVLGSAHQGCLPPFPADVFMIPQYGYLTLNNGSQSVGRSSFYCLEYFPSQMLRTGNNFTFSYTFEDVPFHSSYAHSQSLDRLMNPLIDQYLYYLARTQSNAGGTAGNRELQFYQGGPTTMAEQAKNWLPGPCFRQQRVSKTLDQNNNSNFAWTGATKYHLNXRNSLVNPGVAMATHKDDEERFFPSSGVLIFGKTGAANKTTLENVLMTNEEEIRPTNPVATEEYGIVSSNLQAASTAAQTQVVNNQGALPGMVWQNRDVYLQGPIWAKIPHTDGNFHPSPLMGGFGLKHPPPQILIKNTPVPANPPEVFTPAKFASFITQYSTGQVSVEIEWELQKENSKRWNPEIQYTSNFDKQTGVDFAVDSQGVYSEP

SEQ ID NO: 17 - DNA, 1933 bp, Adeno-associated virus
  source 1..1933: mol_type = unassigned DNA
caaggcctacgaccagcagctcaaagcgggtgacaatccgtacctgcggtataaccacgccgacgccgagtttcaggagtgtcttcaagaagatacgtcttttgggggcaacctcgggcgagcagtcttccaggccaaaaagcgggttctcgaacctcttggtctggttgagacgccagctaagacggcacctggaaagaagcgaccggtagactcgccagactccacctcgggcatcggcaagaaaggccagcagcccgcgaaaaagagactcaactttgggcagactggcgactcagagtcagtccccgaccctcaaccaatcggagaaccaccagcaggcccctctggtctgggatctggtacaatggttgcaggcggtggcgcaccaatggctgacaataacgagggcgccgacggagtgggtaatgcctcaggaaattggcattgcgattccacatggctgggcgacagagtcatcaccaccagcacccgaacctgggccctgcccacctacaacaaccacctctacaagcaaatctccagtcagtcagcagggagcaccaacgataacgtctatttcggctacagcaccccctgggggtattttgacttcaacagattccattgccacttctcaccacgtgactggcagcgacttatcaacaacaactggggattccggcccaagaagctcaacttcaagctcttcaacatccaggtcaaggaggtcacgacgaatgacggtgtcacaaccatcgctaataaccttaccagcacggttcaggtcttttcggactcggaatatcaactgccgtacgtcctcggctccgcgcaccagggctgcctgcctccgttcccggcagacgtgttcatgattccgcagtacggatacctgactctgaacaatggcagccaatcggtaggccgttcctccttctactgcctggagtactttccttctcagatgctgagaacgggcaacaacttcacctttagctacaccttcgaggacgtgcctttccacagcagctacgcgcacagccagagtctggaccggctgatgaatcccctcatcgaccagtacctgtactacttggccagaacacagagcaacgcaggaggtactgctggcaatcgggaactgcagttttatcagggcggacctaccaccatggccgaacaagcaaagaactggctgcccggaccttgcttccggcaacagagagtatccaagacgctggatcaaaataacaacagcaactttgcctggactggtgccacaaaataccatttaaatggaagaaattcattggttaatcccggtgtcgccatggcaacccacaaggacgacgaggaacgcttctccccttcgagcggagttctaatttttggcaaaactggagcagctaataaaactacattagaaaacgtgctcatgacaaatgaagaagaaattcgtcctaccaacccggtagctaccgaggaatacgggattgtaagcagcaacttgcaggcggctagcaccgcagcccagacacaagttgttaacaaccagggagccttacctggcatggtctggcagaaccgggacgtgtacctgcaaggtcccatttgggccaagattcctcacacggacggcaactttcacccgtctcctctaatgggtggctttggactgaaacacccgcctccccagatcctgatcaaaaacacgccggtacctgctaatcctccagaagtgtttactcctgccaagtttgcttccttcatcacgcagtacagcaccgggcaagtcagcgttgagatcgagtgggagctgcagaaagagaacagcaagcgctggaacccagagattcagtacacctccaactttgacaaacagactggagtggactttgctgttgacagccagggtgtttactctgagcct

SEQ ID NO: 18 - protein, 644 aa, synthetic construct
  source 1..644: note = Description of Artificial Sequence: Synthetic polypeptide
KAYDQQLKAGDNPYLRYNHADAEFQECLQEDTSFGGNLGRAVFQAKKRVLEPLGLVETPAKTAPGKKRPVDSPDSTSGIGKKGQQPAKKRLNFGQTGDSESVPDPQPIGEPPAGPSGLGSGTMVAGGGAPMADNNEGADGVGNASGNWHCDSTWLGDRVITTSTRTWALPTYNNHLYKQISSQSAGSTNDNVYFGYSTPWGYFDFNRFHCHFSPRDWQRLINNNWGFRPKKLNFKLFNIQVKEVTTNDGVTTIANNLTSTVQVFSDSEYQLPYVLGSAHQGCLPPFPADVFMIPQYGYLTLNNGSQSVGRSSFYCLEYFPSQMLRTGNNFTFSYTFEDVPFHSSYAHSQSLDRLMNPLIDQYLYYLARTQSNAGGTAGNRELQFYQGGPTTMAEQAKNWLPGPCFRQQRVSKTLDQNNNSNFAWTGATKYHLNGRNSLVNPGVAMATHKDDEERFSPSSGVLIFGKTGAANKTTLENVLMTNEEEIRPTNPVATEEYGIVSSNLQAASTAAQTQVVNNQGALPGMVWQNRDVYLQGPIWAKIPHTDGNFHPSPLMGGFGLKHPPPQILIKNTPVPANPPEVFTPAKFASFITQYSTGQVSVEIEWELQKENSKRWNPEIQYTSNFDKQTGVDFAVDSQGVYSEP

SEQ ID NO: 19 - DNA, 1933 bp, Adeno-associated virus
  source 1..1933: mol_type = unassigned DNA
caaggcctacgaccagcagctcaaagcgggtgacaatccgtacctgcggtataaccacgccgacgccgagtttcaggagcgtcttcaagaagatacgtcttttgggggcaacctcgggcgagcagtcttccaggccaaaaagcgggttctcgaacctcttggtctggttgagacgccagctaagacggcacctggaaagaagcgaccggtagactcgccagactccacctcgggcatcggcaagaaaggccagcagcccgcgaaaaagagactcaactttgggcagactggcgactcagagccagtccccgaccctcaaccaatcggagaaccaccagcaggcccctctggtctgggatctggtacaatggctgcaggcggtggcgcaccaatggctgacaataacgagggcgccgacggagtgggtaatgcctcaggaaattggcattgcgattccacacggctgggcgacagagtcatcaccaccagcacccgaacctgggccctgcccacctacaacaaccacctctacaagcaaatctccagtcagtcagcagggagcaccaacgataacgtctatttcggctacagcaccccctgggggtattttgacttcaacagattccattgccacttctcaccacgtgactggcagcgacttatcaacaacaactggggattccggcccaagaagctcaacttcaagctcttcaacatccaggtcaaggaggtcacgacgaatgacggcgtcacaaccatcgctaataaccttaccagcacggttcaggtcttttcggactcggaatatcaactgccgtacgtcctcggctccgcgcaccagggctgcctgcctccgttcccggcagacgtgttcatgattccgcagtacggatacctgactctgaacaatggcagccaatcggtaggccgttcctccttctactgcctggagtactttccttctcagatgctgagaacgggcaacaacttcacctttagctacaccttcgaggacgtgcctttccacagcagctacgcgcacagccagagtctgggccggctgatgaatcccctcatcgaccagtacctgtactacttggccagaacacagagcaacgcaggaggtactgctggcaatcgggaactgcagttttatcagggcggacctaccaccatggccgaacaagcaaagaactggctgcccggaccttgcttccggcaacagagagtatccaagacgctggatcaaaataacaacagcaactttgcctggactggtgccacaaaataccatttaaatggaagaaattcattggttaatcccggtgtcgccatggcaacccacaaggacgacgaggaacgcttcttcccttcgagcggagttctaatttttggcaaaactggagcagctaataaaactacattagaaaacgtgctcatgacaaatgaagaagaaattcgtcctaccaacccggtagctaccgaggaatacgggattgtaagcagcaacttgcaggcggctagcaccgcagcccagacacaagttgttaacaaccagggagccttacctggcatggtctggcagaaccgggacgtgtacctgcaaggtcccatttgggccaagattcctcacacggacggcaactttcacccgtctcctctaatgggtggctttggactgaaacacccgcctccccagatcctgatcaaaaacacaccggtacctgctaatcctccagaagtgtttactcctgccaagtttgcttccttcatcacgcagtacagcaccgggcaagtcagcgttgagatcgaatgggagctgcagaaagagaacagcaagcgctggaacccagagattcagtacacctccaactttgacaaacagactggagtggactttgctgttgacagccagggtgtttactctgagcct

SEQ ID NO: 20 - protein, 644 aa, synthetic construct
  source 1..644: note = Description of Artificial Sequence: Synthetic polypeptide
KAYDQQLKAGDNPYLRYNHADAEFQERLQEDTSFGGNLGRAVFQAKKRVLEPLGLVETPAKTAPGKKRPVDSPDSTSGIGKKGQQPAKKRLNFGQTGDSEPVPDPQPIGEPPAGPSGLGSGTMAAGGGAPMADNNEGADGVGNASGNWHCDSTRLGDRVITTSTRTWALPTYNNHLYKQISSQSAGSTNDNVYFGYSTPWGYFDFNRFHCHFSPRDWQRLINNNWGFRPKKLNFKLFNIQVKEVTTNDGVTTIANNLTSTVQVFSDSEYQLPYVLGSAHQGCLPPFPADVFMIPQYGYLTLNNGSQSVGRSSFYCLEYFPSQMLRTGNNFTFSYTFEDVPFHSSYAHSQSLGRLMNPLIDQYLYYLARTQSNAGGTAGNRELQFYQGGPTTMAEQAKNWLPGPCFRQQRVSKTLDQNNNSNFAWTGATKYHLNGRNSLVNPGVAMATHKDDEERFFPSSGVLIFGKTGAANKTTLENVLMTNEEEIRPTNPVATEEYGIVSSNLQAASTAAQTQVVNNQGALPGMVWQNRDVYLQGPIWAKIPHTDGNFHPSPLMGGFGLKHPPPQILIKNTPVPANPPEVFTPAKFASFITQYSTGQVSVEIEWELQKENSKRWNPEIQYTSNFDKQTGVDFAVDSQGVYSEP

SEQ ID NO: 21 - DNA, 1933 bp, Adeno-associated virus; identical to SEQ ID NO: 19
  source 1..1933: mol_type = unassigned DNA

SEQ ID NO: 22 - protein, 644 aa, synthetic construct; identical to SEQ ID NO: 20
  source 1..644: note = Description of Artificial Sequence: Synthetic polypeptide

SEQ ID NO: 23 - DNA, 1933 bp, Adeno-associated virus
  source 1..1933: mol_type = unassigned DNA
caaggcctacgaccagcagctcaaagcgggtgacaatccgtacctgcggtataaccacgccgacgccgagtttcaggagcgtcttcaagaagatacgtcttttgggggcaacctcgggcgagcagtcttccaggccaaaaagcgggttctcgaacctcttggtctggttgagacgccagctaagacggcacctggaaagaagcgaccggtagactcgccagactccacctcgggcatcggcaagaaaggccagcagcccgcgaaaaagagactcaactttgggcagactggcgactcagagtcagtccccgaccctcaaccaatcggagaaccaccagcaggcccctctggtctgggatctggtacaatggctgcaggcggtggcgcaccaatggctgacaatagcgagggcgccgacggagtgggtaatgcctcaggaaattggcattgcgattccacatggctgggcgacagagtcatcaccaccagcacccgaacctgggccctgcccacctacaacaaccacctctacaagcaaatctccagtcagtcagcagggagcaccaacgataacgtctatttcggctacagcaccccctgggggtattttgacttcaacagattccattgccacttctcaccacgtgactggcagcgacttatcaacaacaactggggattccggcccaagaagctcaacttcaagctcttcaacatccaggtcaaggaggtcacgacgaatgacggtgtcacaaccatcgctaataaccttaccagcacggttcaggtcttttcggactcggaatatcaactgccgtacgtcctcggctccgcgcaccagggctgcctgcctccgttcccggcagacgtgttcatgattccgcagtacggatacctgactctgaacaatggcagccaatcggtaggccgttcctccttctactgcctggagtactttccttctcagatgctgagaacgggcaacaacttcacctttagctacaccttcgaggacgtgcctttccacagcagctacgcgcacagccagagtctggaccggctgatgaatcccctcatcgaccagtacctgtactacttggccagaacacagagcaacgcaggaggtactgctggcaatcgggaactgcagttttatcagggcggacctaccaccatggccgaacaagcaaagaactggctgcccggaccttgcttccggcaacagagagtatccaagacgctggatcaaaataacaacagcaactttgcctggactggtgccacaaaataccatttaaatggaagaaattcattggttaatcccggtgtcgccatggcaacccacaaggacgacgaggaacgcttcttcccttcgagcggagttctaatttttggcaaaactggagcagctaataaaactacattagaaaacgtgctcatgacaaatgaagaagaaattcgtcctaccaacccggtagctaccgaggaatacgggattgtaagcagcaacttgcaggcggctagcaccgcagcccagacacaagttgttaacaaccagggagccttacctggcatggtctggcagaaccgggacgtgtacctgcaaggtcccatttgggccaagattcctcacacggacggcaactttcacccgtctcctctaatgggtggctttggactgaaacacccgcctccccagatcctgatcaaaaacacaccggtacctgctaatcctccagaagtgtttactcctgccaagcttgcttccttcatcacgcagtacagcaccgggcaagtcagcgttgagatcgagtgggagctgcagaaagagaacagcaagcgctggaacccagagattcagtacacctccaactttgacaaacagactggagtggactttgctgttgacagccagggtgtttactctgagcct

SEQ ID NO: 24 - protein, 644 aa, synthetic construct
  source 1..644: note = Description of Artificial Sequence: Synthetic polypeptide
KAYDQQLKAGDNPYLRYNHADAEFQERLQEDTSFGGNLGRAVFQAKKRVLEPLGLVETPAKTAPGKKRPVDSPDSTSGIGKKGQQPAKKRLNFGQTGDSESVPDPQPIGEPPAGPSGLGSGTMAAGGGAPMADNSEGADGVGNASGNWHCDSTWLGDRVITTSTRTWALPTYNNHLYKQISSQSAGSTNDNVYFGYSTPWGYFDFNRFHCHFSPRDWQRLINNNWGFRPKKLNFKLFNIQVKEVTTNDGVTTIANNLTSTVQVFSDSEYQLPYVLGSAHQGCLPPFPADVFMIPQYGYLTLNNGSQSVGRSSFYCLEYFPSQMLRTGNNFTFSYTFEDVPFHSSYAHSQSLDRLMNPLIDQYLYYLARTQSNAGGTAGNRELQFYQGGPTTMAEQAKNWLPGPCFRQQRVSKTLDQNNNSNFAWTGATKYHLNGRNSLVNPGVAMATHKDDEERFFPSSGVLIFGKTGAANKTTLENVLMTNEEEIRPTNPVATEEYGIVSSNLQAASTAAQTQVVNNQGALPGMVWQNRDVYLQGPIWAKIPHTDGNFHPSPLMGGFGLKHPPPQILIKNTPVPANPPEVFTPAKLASFITQYSTGQVSVEIEWELQKENSKRWNPEIQYTSNFDKQTGVDFAVDSQGVYSEP

SEQ ID NO: 25 - DNA, 1933 bp, Adeno-associated virus
  source 1..1933: mol_type = unassigned DNA
caaggcctacgaccagcagctcaaagcgggtgacaatccgtacctgcggtataaccacgccgacgccgagtttcaggagcgtcttcaagaagatacgtcttttgggggcaacctcgggcgagcagtcttccaggccaaaaagcgggttctcgaacctcttggtctggttgagacgccagctaagacggcacctggaaagaagcgaccggtagactcgccagactccacctcgggcatcggcaagaaaggccagcagcccgcgaaaaagagactcaactttgggcagactggcgactcagagtcagtccccgaccctcaaccaatcggagaaccaccagcaggcccctctggtctgggatctggtacaatggctgcaggcggtggcgcaccaatggctgacaataacgagggcgccgacggagtgggtaatgcctcaggaaattggcattgcgattccacatggctgggcgacagagtcatcaccaccagcacccgaacctgggccctgcccacctacaacaaccacctctacaagcaaatctccagtcagtcagcagggagcaccaacgataacgtctatttcggctacagcaccccctgggggtattttgacttcaacagattccattgccacttctcaccacgtgactggcagcgacttatcaacaacaactggggattccggcccaagaagctcaacttcaagctcttcaacatccaggtcaaggaggtcacgacgaatgacggcgtcacaaccatcgctaataaccttaccagcacggttcaggtcttttcggacccggaatatcaactgccgtacgtcctcggctccgcgcaccagggctgcctgcctccgttcccggcagacgtgttcatgattccgcagtacggatacctgactctgaacaatggcagccaatcggtaggccgttcctccttctactgcctggagtactttccttctcagatgctgagaacgggcaacaacttcacctttagctacaccttcgaggacgtgcctttccacagcagctacgcgcacagccagagtctggaccggctgatgaatcccctcatcgaccagtacctgtactacttggccagaacacagagcaacgcaggaggtactgctggcaatcgggaactgcagttttatcagggcggacctaccaccatggccgaacaagcaaagaactggctgcccggaccttgcttccggcaacagagagtatccaagacgctggatcaaaataacaacagcaactttgcctggactggtgccacaaaataccatttaaatggaagaaattcattggttaatcccggtgtcgccatggcaacccacaaggacgacgaggaacgcttcttcccttcgagcggagttctaatttttggcaaaactggagcagctaataaaactacattagaaaacgtgctcatgacaaatgaagaagaaattcgtcctaccaacccggtagctaccgaggaatacgggattgtaagcagcaacttgcaggcggctagcaccgcagcccagacacaagttgttaacaaccagggagccttacctggcatggtctggcagaaccgggacgtgtacctgcaaggtcccatttgggccaagattcctcacacggacggcaactttcacccgtctcctctaatgggtggctttggactgaaacacccgcctccccagatcctgatcaaaaacacaccggtacctgctaatcctccagaagtgtttactcctgccaagattgcttccttcatcacgcagtacagcaccgggcaagtcagcgttgagatcgagtgggagctgcagaaagagaacagcaagcgctggaacccagagattcagtacacctccaactttgacaaacagactggagtggactttgctgttgacagccagggtgtttactctgagcct

SEQ ID NO: 26 - protein, 644 aa, synthetic construct
  source 1..644: note = Description of Artificial Sequence: Synthetic polypeptide
KAYDQQLKAGDNPYLRYNHADAEFQERLQEDTSFGGNLGRAVFQAKKRVLEPLGLVETPAKTAPGKKRPVDSPDSTSGIGKKGQQPAKKRLNFGQTGDSESVPDPQPIGEPPAGPSGLGSGTMAAGGGAPMADNNEGADGVGNASGNWHCDSTWLGDRVITTSTRTWALPTYNNHLYKQISSQSAGSTNDNVYFGYSTPWGYFDFNRFHCHFSPRDWQRLINNNWGFRPKKLNFKLFNIQVKEVTTNDGVTTIANNLTSTVQVFSDPEYQLPYVLGSAHQGCLPPFPADVFMIPQYGYLTLNNGSQSVGRSSFYCLEYFPSQMLRTGNNFTFSYTFEDVPFHSSYAHSQSLDRLMNPLIDQYLYYLARTQSNAGGTAGNRELQFYQGGPTTMAEQAKNWLPGPCFRQQRVSKTLDQNNNSNFAWTGATKYHLNGRNSLVNPGVAMATHKDDEERFFPSSGVLIFGKTGAANKTTLENVLMTNEEEIRPTNPVATEEYGIVSSNLQAASTAAQTQVVNNQGALPGMVWQNRDVYLQGPIWAKIPHTDGNFHPSPLMGGFGLKHPPPQILIKNTPVPANPPEVFTPAKIASFITQYSTGQVSVEIEWELQKENSKRWNPEIQYTSNFDKQTGVDFAVDSQGVYSEP

SEQ ID NO: 27 - protein, 738 aa, synthetic construct
  source 1..738: note = Description of Artificial Sequence: Synthetic polypeptide
MAADGYLPDWLEDNLSEGIREWWALKPGAPKPKANQQKQDDGRGLVLPGYKYLGPFNGLDKGEPVNAADAAALEHDKAYDQQLKAGDNPYLRYNHADAEFQERLQEDTSFGGNLGRAVFQAKKRVLEPLGLVEEGAKTAPGKKRPVEPSPQRSPDSTTGIGKKGQQPAKKRLNFGQTGDSESVPDPQPIGEPPAGPSGLGSGTMAAGGGAPMADNNEGADGVGSSSGNWHCDSTWLGDRVITTSTRTWALPTYNNHLYKQISNGTSGGSTNDNTYFGYSTPWGYFDFNRFHCHFSPRDWQRLINNNWGFRPKRLNFKLFNIQVKEVTQNEGTKTIANNLTSTIQVFTDSEYQLPYVLGSARQGCLPPFPADVFMIPQYGYLTLNNGSQAVGRSSFYCLEYFPSQMLRTGNNFEFSYQFEDVPFHSSYAHSQSLDRLMNPLIDQYLYYLSRTQSTGGTAGTQQLLFSQAGPNNMSAQAKNWLPGPCYRQQRVSTTLSQNNNSNFAWTGATKYHLNGRDSLVNPGVAMATHKDDEERFFPSSGVLMFGKQGAGKGNVDYSSVMLTSEEEIKTTNPVATEQYGVVADNLQQQNAAPIVGAVNSQGALPGMVWQNRDVYLQGPIWAKIPHTDGNFHPSPLMGGFGLKHPPPQILIKNTPVPADPPTTFSQAKLASFITQYSTGQVSVEIEWELQKENSKRWNPEIQYTSNYYKSTNVDFAVNTDGTYSEPRPIGTRYLTRNL

SEQ ID NO: 28 - DNA, 3121 bp, Adeno-associated virus
  source 1..3121: mol_type = unassigned DNA
gaattcgcccttctacggctgcgtcaactggaccaatgagaactttcccttcaacgactgtgtcgacaagatggtgatctggtgggaggaggggaagatgaccgccaaggtcgtggagtcggccaaagccattctcggaggaagcaaggtgcgcgtggaccagaaatgcaagtcctcggcccagatagacccgactcccgtgatcgtcacctccaacaccaacatgtgcgccgtgattgacgggaactcaacgaccttcgaacaccagcagccgttgcaagaccggatgttcaaatttgaactcacccgccgtctggatcatgactttgggaaggtcaccaagcaggaagtcaaagactttttccggtgggcaaaggatcacgtggttgaggtggagcacgaattctacgtcaaaaagggtggagccaagaaaagacccgcccccagtgacgcagatataagtgagcccaaacgggtgcgcgagtcagttgcgcagccatcgacgtcagacgcggaagcttcgatcaactacgcagacaggtaccaaaacaaatgttctcgtcacgcgggcatgaatctgatgctgtttccctgcagacaatgcgagagaatgaatcagaattcaaatatctgcttcactcacggacagaaagactgtttagagtgctttcccgtgtcagaatctcaacccgtttctgtcgtcaaaaaggcgtatcagaaactgtgctacattcatcatatcatgggaaaggtgccagacgcttgcactgcctgcgatctggtcgatgtggatttggatgactgcatctttgaacaataaatgatttaaatcaggtatggctgccgatggttatcttccagattggctcgaggacaacctctctgagggcattcgcgagtggtgggcgctgaaacctggagccccgaagcccaaagccaaccagcaaaagcaggacggcggccggggtctggtgcttcctggctacaagtacctcggacccttcaacggactcgacaagggggagcccgtcaacgcggcggacgcagcggccctcgagcacgacaaggcctacgaccagcagctcaaagcgggtgacaatccgtacctgcggtataaccacgccgacgccgagtttcaggagcgtctgcaagaagatacgtcttttgggggcaacctcgggcgagcagtcttccaggccaagaagcgggttctcgaacctctcggtctggttgaggaaggcgctaagacggctcctggaaagaagagaccggtagagccatcaccccagcgttctccagactcctctacgggcatcggcaagaaaggccagcagcccgcgaaaaagagactcaactttgggcagactggcgactcagagtcagtgcccgaccctcaaccaatcggagaaccccccgcaggcccctctggtctgggatctggtacaatggctgcaggcggtggcgctccaatggcagacaataacgaaggcgccgacggagtgggtagttcctcaggaaattggcattgcgattccacatggctgggcgactgagtcatcaccaccagcacccgaacctgggccctccccacctacaacaaccacctctacaagcaaatctccaacgggacttcgggaggaagcaccaacgacaacacctacttcggctacagcaccccctgggggtattttgactttaacagattccactgccacttctcaccacgtgactggcagcgactcatcaacaacaactggggattccggcccaagagactcaacttcaagctcttcaacatccaggtcaaggaggtcacgcagaatgaaggcaccaagaccatcgccaataaccttaccagcacgattcaggtctttacggactcggaataccagctcccgtacgtcctcggctctgcgcaccagggctgcctgcctccgttcccggcggacgtcttcatgattcctcagtacgggtacctgactctgaacaatggcagtcaggccgtgggccgttcctccttctactgcctggagtactttccttctcaaatgctgagaacgggcaacaactttgagttcagctaccagtttgaggacgtgccttttcacagcagctacgcgcacagccaaagcctggaccggctgatgaaccccctcatcgaccagtacctgtactacctgtctcggactcagtccacgggaggtaccgcaggaactcagcagttgctattttctcaggccgggcctaataacatgtcggctcaggccaaaaactggctacccgggccctgctaccggcagtaacgcgtctccacgacactgtcgcaaaataacaacagcaactttgtctggaccggtgccaccaagtatcatctgaatggcagagactctctggtagatcccggtgtcgctatggcaacccacaaggacgacgaagagcgattttttccgtccagcggagtcataatgtttgggaaacagggagctggaaaagacaacgtggactatagcagcgtcatgctaaccagtgaggaagaaattaaaaccaccaacccagtggccacagaacagtacggcgtggtggccgataacctgcaacagcaaaacgccgctcctattgtaggggccgtcaacagtcaaggagccttacctggcatggtctggcagaaccgggacgtgtacctgcagggtcctacctgggccaagattcctcacacggacggaaactttcatccctcgccgctgatgggaggctttggactgaaacacccgcctcctcagatcctgattaagaatacacctgttcccgcggatcctccaactaccttcagtcaagctaagctggcgtcgttcatcacgcagtacagcaccggacaggtcagcgtggaaattgaatgggagctgcaggaagaaaacagcaaacgctggaacccagagattcaatacacttccaactactacaaatctacaaatgtggactttgctgttaacacagatggcacttattctgagcctcgccccatcggcacccgttacctcacccgtaatctgtaattgcttgttaatcaataaaccggttgattcgtttcagttgaactttggtctctgcgaagggcgaattc

SEQ ID NO: 29 - protein, 738 aa, synthetic construct
  source 1..738: note = Description of Artificial Sequence: Synthetic polypeptide
MAADGYLPDWLEDNLSEGIREWWALKPGAPKPKANQQKQDDGRGLVLPGYKYLGPFNGLDKGEPVNAADAAALEHDKAYDQQLKAGDNPYLRYNHADAEFQERLQEDTSFGGNLGRAVFQAKKRVLEPLGLVEEGAKTAPGKKRPVEPSPQRSPDSSTGIGKKGQQPAKKRLNFGQTGDSESVPDPQPIGEPPAGPSGLGSGTMAAGGGAPMADNNEGADGVGSSSGNWHCDSTWLGDGVITTSTRTWALPTYNNHLYKQISNGTSGGSTNDNTYFGYSTPWGYFDFNRFHCHFSPRDWQRLINNNWGFRPKSLNFKLFNIQVKEVTQNEGTKTIANNLTSTIQVFTDSEYQLPYVLGSAHQGCLPPFPADVFMIPQYGYLTLNNGSQAVGRSSFYCLEYFPSQMLRTGNNFEFSYQFEDVPFHSSYAHSQSLDRLMNPLIDQYLYYLSRTQSTGGTAGTQQLLFSQAGPNNMSAQAKNWLPGPCYRQQRVSTTLSQNDNSNFAWTGATKYHLNGRDSLVNPGVAMATHKDDEERFFPSSGVLMFGKQGAGKDNVDYSSVMLTSEEEIKTTNPVATEQYGVVADNLQQQNAAPIVGAVNSQGALPGMVWQNRDVYLQGPIWAKIPHTDGNFHPSPLMGGFGLKHPPPQILIKNTPVPADPPTTFSQAKLASFITQYSTGQVSVEIEWELQKENSKRWNPEIQYTSNYYKSTNVDFAVNTDGTYSEPRPIGTRYLTRNL

SEQ ID NO: 30 - DNA, 3121 bp, Adeno-associated virus
  source 1..3121: mol_type = unassigned DNA
gaattcgcccttcgcgagaccaaagttcaactgaaacgaatcaaccggtttattgattaacaagcaattacagattacgggtgaggtaacgggtgccgatggggcgaggctcagaataagtgccatctgtgttaacagcaaagtccacatttgtagatttgtagtagttggaagtgtattgaatctctgggttccagcgtttgctgttttctttctgcagctcccattcaatttccacgctgacctgtccggtgctgtactgcgtgatgaacgacgccagcttagcttgactgaaggtagttggaggatccgcgggaacaggtgtattcttaatcaggatctgaggaggcgggtgtttcagtccaaagcctcccatcagcggcgagggatgaaagtttccgtccgtgtgaggaatcttggcccagataggaccctgcaggtacacgtcccggttctgccagaccatgccaggtaaggctccttgactgttgacggcccctacaataggagcggcgttttgctgttgcaggttatcggccaccacgccgtactgttctgtggccactgggttggtggttttaatttcttcctcactggttagcataacgctgctatagtccacgttgtcttttccagctccctgtttcccaaacattaagactccgctggacggaaaaaatcgctcttcgtcgtccttgtgggttgccatagcgacaccgggatttaccagagagtctctgccattcagatgatacttggtggcaccggtccaggcaaagttgctgttgtcattttgcgacagtgtcgtggagacgcgttgctgccggtagcagggcccgggtagccagtttttggcctgagccgacatgttattaggcccggcctgagaaaatagcaactgctgagttcctgcggtacctcccgtggactgagtccgagacaggtagtacaggtactggtcgatgagggggttcatcagccggtccaggctttggctgtgcgcgtagctgctgtgaaaaggcacgtcctcaaactggtagctgaactcaaagttgttgcccgttctcagcatttgagaaggaaagtactccaggcagtagaaggaggaacggcccacggcctgactgccattgttcagagtcaggtacccgtactgaggaatcatgaagacgtccgccgggaacggaggcaggcagccctggtgcgcagagccgaggacgtacgggagctggtattccgagtccgtaaagacctgaatcgtgctggtaaggttattggcgatggtcttggtgccttcattctgcgtgacctccttgacctggatgttgaagagcttgaagttgaggctcttgggccggaatccccagttgttgttgatgagtcgctgccagtcacgtggtgagaagtggcagtggaatctgttaaagtcaaaatacccccagggggtgctgtagccgaagtaggtgttgtcgttggtgcttcctcccgaagtcccgttggagatttgcttgtagaggtggttgttgtaggtggggagggcccaggttcgggtgctggtggtgatgactccgtcgcccagccatgtggaatcgcaatgccaatttcctgaggaactacccactccgtcggcgccttcgttattgtctgccattggagcgccaccgcctgcagccattgtaccagatcccagaccagaggggcctgcggggggttctccgattggttgagggtcgggcactgactctgagtcgccagtctgcccaaagttgagtctctttttcgcgggctgctggcctttcttgccgatgcccgtagaggagtctggagaacgctggggtgatggctctaccggtctcttctttccaggagccgtcttagcgccttcctcaaccagaccgagaggttcgagaacccgcttcttggcctggaagactgctcgcccgaggttgcccccaaaagacgtatcttcttgcagacgctcctgaaactcggcgtcggcgtggttataccgcaggtacggattgtcacccgctttgagctgctggtcgtaggccttgtcgtgctcgagggccgctgcgtccgccgcgttgacgggctcccccttgtcgagtccgttgaagggtccgaggtacttgtagccaggaagcaccagaccccggccgtcgtcctgcttttgctggttggctttgggcttcggggctccaggtttcagcgcccaccactcgcgaatgccctcagagaggttgtcctcgagccaatctggaagataaccatcggcagccatacctgatttaaatcatttattgttcaaagatgcagtcatccaaatccacattgaccagatcgcaggcagtgcaagcgtctggcacctttcccatgatatgatgaatgtagcacagtttctgatacgcctttttgacgacagaaacgggttgagattctgacacgggaaagcactctaaacagtctttctgtccgtgagtgaagcagatatttgaattctgattcattctctcgcattgtctgcagggaaacagcatcagattcatgcccacgtgacgagaacatttgttttggtacctgtctgcgtagttgatcgaagcttccgcgtctgacgtcgatggctgcgcaactgactcgcgcacccgtttgggctcacttatatctgcgtcactgggggcgggtcttttcttggctccaccctttttgacgtagaattcatgctccacctcaaccacgtgatcctttgcccaccggaaaaagtctttgacttcctgcttggtgaccttcccaaagtcatgatccagacggcgggtgagttcaaatttgaacatccggtcttgcaacggctgctggtgttcgaaggtcgttgagttcccgtcaatcacggcgcacatgttggtgttggaggtgacgatcacgggagtcgggtctatctgggccgaggacttgcatttctggtccacgcgcaccttgcttcctccgagaatggctttggccgactccacgaccttggcggtcatcttcccctcctcccaccagatcaccatcttgtcgacacagtcgttgaagggaaagttctcattggtccagttgacgcagccgtagaaagggcgaattc

SEQ ID NO: 31 - DNA, 2211 bp, Adeno-associated virus
  source 1..2211: mol_type = unassigned DNA
atggctgctgacggttatcttccagattggctcgaggacaacctttctgaaggcattcgtgagtggtgggctctgaaacctggagtccctcaacccaaagcgaaccaacaacaccaggacaaccgtcggggtcttgtgcttccgggttacaaatacctcggacccggtaacggactcgacaaaggagagccggtcaacgaggcggacgcggcagccctcgaacacgacaaagcttacgaccagcagctcaaggccggtgacaacccgtacctcaagtacaaccacgccgacgccgagtttcaggagcgtcttcaagaagatacgtcttttgggggcaaccttggcagagcagtcttccaggccaaaaagaggatccttgagcctcttggtctggttgaggaagcagctaaaacggctcctggaaagaagggggctgtagatcagtctcctcaggaaccggactcatcatctggtgttggcaaatcgggcaaacagcctgccagaaaaagactaaatttcggtcagactggagactcagagtcagtcccagaccctcaacctctcggagaaccaccagcagcccccacaagtttgggatctaatacaatggcttcaggcggtggcgcaccaatggcagacaataacgagggtgccgatggagtgggtaattcctcaggaaattggcattgcgattcccaatggctgggcgacagagtcatcaccaccagcaccagaacctgggccctgcccacttacaacaaccatctctacaagcaaatctccagccaatcaggagcttcaaacgacaaccactactttggctacagcaccccttgggggtattttgactttaacagattccactgccacttctcaccacgtgactggcagcgactcattaacaacaactggggattccggcccaagaaactcagcttcaagctcttcaacatccaagttagaggggtcacgcagaacgatggcacgacgactattgccaataaccttaccagcacggttcaagtgtttacggactcggagtatcagctcccgtacgtgctcgggtcggcgcaccaaggctgtctcccgccgtttccagcggacgtcttcatggtccctcagtatggatacctcaccctgaacaacggaagtcaagcggtgggacgctcatccttttactgcctggagtacttcccttcgcagatgctaaggactggaaataacttccaattcagctataccttcgaggatgtaccttttcacagcagctacgctcacagccagagtttggatcgcttgatgaatcctcttattgatcagtatctgtactacctgaacagaacgcaaggaacaacctctggaacaaccaaccaatcacggctgctttttagccaggctgggcctcagtctatgtctttgcaggccagaaattggctacctgggccctgctaccggcaacagagactttcaaagactgctaacgacaacaacaacagtaactttccttggacagcggccagcaaatatcatctcaatggccgcgactcgctggtgaatccaggaccagctatggccagtcacaaggacgatgaagaaaaatttttccctatgcacggcaatctaatatttggcaaagaagggacaacggcaagtaacgcagaattagataatgtaatgattacggatgaagaagagattcgtaccaccaatcctgtggcaacagagcagtatggaactgtggcaaataacttgcagagctcaaatacagctcccacgactggaactgtcaatcatcagggggccttacctggcatggtgtggcaagatcgtgacgtgtaccttcaaggacctatctgggcaaagattcctcacacggatggacactttcatccttctcctctgatgggaggctttggactgaaacatccgcctcctcaaatcatgatcaaaaatactccggtaccggcaaatcctccgacgactttcagcccggccaagtttgcttcatttatcactcagtactccactggacaggtcagcgtggaaattgagtgggagctacagaaagaaaacagcaaacgttggaatccagagattcagtacacttccaactacaacaagtctgttaatgtggactttactgtagacactaatggtgtttatagtgaacctcgccctattggaacccggtatctcacacgaaacttgtga

SEQ ID NO: 32 - protein, 736 aa, Adeno-associated virus 3
MAADGYLPDWLEDNLSEGIREWWALKPGVPQPKANQQHQDNRRGLVLPGYKYLGPGNGLDKGEPVNEADAAALEHDKAYDQQLKAGDNPYLKYNHADAEFQERLQEDTSFGGNLGRAVFQAKKRILEPLGLVEEAAKTAPGKKGAVDQSPQEPDSSSGVGKSGKQPARKRLNFGQTGDSESVPDPQPLGEPPAAPTSLGSNTMASGGGAPMADNNEGADGVGNSSGNWHCDSQWLGDRVITTSTRTWALPTYNNHLYKQISSQSGASNDNHYFGYSTPWGYFDFNRFHCHFSPRDWQRLINNNWGFRPKKLSFKLFNIQVRGVTQNDGTTTIANNLTSTVQVFTDSEYQLPYVLGSAHQGCLPPFPADVFMVPQYGYLTLNNGSQAVGRSSFYCLEYFPSQMLRTGNNFQFSYTFEDVPFHSSYAHSQSLDRLMNPLIDQYLYYLNRTQGTTSGTTNQSRLLFSQAGPQSMSLQARNWLPGPCYRQQRLSKTANDNNNSNFPWTAASKYHLNGRDSLVNPGPAMASHKDDEEKFFPMHGNLIFGKEGTTASNAELDNVMITDEEEIRTTNPVATEQYGTVANNLQSSNTAPTTGTVNHQGALPGMVWQDRDVYLQGPIWAKIPHTDGHFHPSPLMGGFGLKHPPPQIMIKNTPVPANPPTTFSPAKFASFITQYSTGQVSVEIEWELQKENSKRWNPEIQYTSNYNKSVNVDFTVDTNGVYSEPRPIGTRYLTRNL

SEQ ID NO: 33 - DNA, 4726 bp, Adeno-associated virus 3
  source 1..4726: mol_type = unassigned DNA
ttggccactccctctatgcgcactcgctcgctcggtggggcctggcgaccaaaggtcgccagacggacgtgctttgcacgtccggccccaccgagcgagcgagtgcgcatagagggagtggccaactccatcactagaggtatggcagtgacgtaacgcgaagcgcgcgaagcgagaccacgcctaccagctgcgtcagcagtcaggtgacccttttgcgacagtttgcgacaccacgtggccgctgagggtatatattctcgagtgagcgaaccaggagctccattttgaccgcgaaatttgaacgagcagcagccatgccggggttctacgagattgtcctgaaggtcccgagtgacctggacgagcgcctgccgggcatttctaactcgtttgttaactgggtggccgagaaggaatgggacgtgccgccggattctgacatggatccgaatctgattgagcaggcacccctgaccgtggccgaaaagcttcagcgcgagttcctggtggagtggcgccgcgtgagtaaggccccggaggccctcttttttgtccagttcgaaaagggggagacctacttccacctgcacgtgctgattgagaccatcggggtcaaatccatggtggtcggccgctacgtgagccagattaaagagaagctggtgacccgcatctaccgcggggtcgagccgcagcttccgaactggttcgcggtgaccaaaacgcgaaatggcgccgggggcgggaacaaggtggtggacgactgctacatccccaactacctgctccccaagacccagcccgagctccagtgggcgtggactaacatggaccagtatttaagcgcctgtttgaatctcgcggagcgtaaacggctggtggcgcagcatctgacgcacgtgtcgcagacgcaggagcagaacaaagagaatcagaaccccaattctgacgcgccggtcatcaggtcaaaaacctcagccaggtacatggagctggtcgggtggctggtggaccgcgggatcacgtcagaaaagcaatggattcaggaggaccaggcctcgtacatctccttcaacgccgcctccaactcgcggtcccagatcaaggccgcgctggacaatgcctccaagatcatgagcctgacaaagacggctccggactacctggtgggcagcaacccgccggaggacattaccaaaaatcggatctaccaaatcctggagctgaacgggtacgatccgcagtacgcggcctccgtcttcctgggctgggcgcaaaagaagttcgggaagaggaacaccatctggctctttgggccggccacgacgggtaaaaccaacatcgcggaagccatcgcccacgccgtgcccttctacggctgcgtaaactggaccaatgagaactttcccttcaacgattgcgtcgacaagatggtgatctggtgggaggagggcaagatgacggccaaggtcgtggagagcgccaaggccattctgggcggaagcaaggtgcgcgtggaccaaaagtgcaagtcatcggcccagatcgaacccactcccgtgatcgtcacctccaacaccaacatgtgcgccgtgattgacgggaacagcaccaccttcgagcatcagcagccgctgcaggaccggatgtttgaatttgaacttacccgccgtttggaccatgactttgggaaggtcaccaaacaggaagtaaaggactttttccggtgggcttccgatcacgtgactgacgtggctcatgagttctacgtcagaaagggtggagctaagaaacgccccgcctccaatgacgcggatgtaagcgagccaaaacgggagtgcacgtcacttgcgcagccgacaacgtcagacgcggaagcaccggcggactacgcggacaggtaccaaaacaaatgttctcgtcacgtgggcatgaatctgatgctttttccctgtaaaacatgcgagagaatgaatcaaatttccaatgtctgttttacgcatggtcaaagagactgtggggaatgcttccctggaatgtcagaatctcaacccgtttctgtcgtcaaaaagaagacttatcagaaactgtgtccaattcatcatatcctgggaagggcacccgagattgcctgttcggcctgcgatttggccaatgtggacttggatgactgtgtttctgagcaataaatgacttaaaccaggtatggctgctgacggttatcttccagattggctcgaggacaacctttctgaaggcattcgtgagtggtgggctctgaaacctggagtccctcaacccaaagcgaaccaacaacaccaggacaaccgtcggggtcttgtgcttccgggttacaaatacctcggacccggtaacggactcgacaaaggagagccggtcaacgaggcggacgcggcagccctcgaacacgacaaagcttacgaccagcagctcaaggccggtgacaacccgtacctcaagtacaaccacgccgacgccgagtttcaggagcgtcttcaagaagatacgtcttttgggggcaaccttggcagagcagtcttccaggccaaaaagaggatccttgagcctcttggtctggttgaggaagcagctaaaacggctcctggaaagaagggggctgtagatcagtctcctcaggaaccggactcatcatctggtgttggcaaatcgggcaaacagcctgccagaaaaagactaaatttcggtcagactggagactcagagtcagtcccagaccctcaacctctcggagaaccaccagcagcccccacaagtttgggatctaatacaatggcttcaggcggtggcgcaccaatggcagacaataacgagggtgccgatggagtgggtaattcctcaggaaattggcattgcgattcccaatggctgggcgacagagtcatcaccaccagcaccagaacctgggccctgcccacttacaacaaccatctctacaagcaaatctccagccaatcaggagcttcaaacgacaaccactactttggctacagcaccccttgggggtattttgactttaacagattccactgccacttctcaccacgtgactggcagcgactcattaacaacaactggggattccggcccaagaaactcagcttcaagctcttcaacatccaagttagaggggtcacgcagaacgatggcacgacgactattgccaataaccttaccagcacggttcaagtgtttacggactcggagtatcagctcccgtacgtgctcgggtcggcgcaccaaggctgtctcccgccgtttccagcggacgtcttcatggtccctcagtatggatacctcaccctgaacaacggaagtcaagcggtgggacgctcatccttttactgcctggagtacttcccttcgcagatgctaaggactggaaataacttccaattcagctataccttcgaggatgtaccttttcacagcagctacgctcacagccagagtttggatcgcttgatgaatcctcttattgatcagtatctgtactacctgaacagaacgcaaggaacaacctctggaacaaccaaccaatcacggctgctttttagccaggctgggcctcagtctatgtctttgcaggccagaaattggctacctgggccctgctaccggcaacagagactttcaaagactgctaacgacaacaacaacagtaactttccttggacagcggccagcaaatatcatctcaatggccgcgactcgctggtgaatccaggaccagctatggccagtcacaaggacgatgaagaaaaatttttccctatgcacggcaatctaatatttggcaaagaagggacaacggcaagtaacgcagaattagataatgtaatgattacggatgaagaagagattcgtaccaccaatcctgtggcaacagagcagtatggaactgtggcaaataacttgcagagctcaaatacagctcccacgactggaactgtcaatcatcagggggccttacctggcatggtgtggcaagatcgtgacgtgtaccttcaaggacctatctgggcaaagattcctcacacggatggacactttcatccttctcctctgatgggaggctttggactgaaacatccgcctcctcaaatcatgatcaaaaatactccggtaccggcaaatcctccgacgactttcagcccggccaagtttgcttcatttatcactcagtactccactggacaggtcagcgtggaaattgagtgggagctacagaaagaaaacagcaaacgttggaatccagagattcagtacacttccaactacaacaagtctgttaatgtggactttactgtagacactaatggtgtttatagtgaacctcgccctattggaacccggtatctcacacgaaacttgtgaatcctggttaatcaataaaccgtttaattcgtttcagttgaactttggctcttgtgcacttctttatctttatcttgtttccatggctactgcgtagataagcagcggcctgcggcgcttgcgcttcgcggtttacaactgctggttaatatttaactctcgccatacctctagtgatggagttggccactccctctatgcgcactcgctcgctcggtggggcctggcgaccaaaggtcgccagacggacgtgctttgcacgtccggccccaccgagcgagcgagtgcgcatagagggagtggccaa

SEQ ID NO: 34 - protein, 737 aa, synthetic construct
  source 1..737: note = Description of Artificial Sequence: Synthetic polypeptide
MAADGYLPDWLEDNLSEGIREWWDLKPGAPKPKANQQKQDNGRGLVLPGYKYLGPFNGLDKGEPVNAADAAALEHDKAYDQQLNAGDNPYLRYNHADAEFQERLQEDTSFGGNLGRAVFQAKKRVLEPLGLVEEGAKTAPAKKRPVEPSPQRSPDSSTGIGKKGQQPARKRLNFGQTGDSESVPDPQPLGEPPAAPSSVGSGTVAAGGGAPMADNNEGADGVGNASGNWHCDSTWLGDRVITTSTRTWALPTYNNHLYEQISSETAGSTNDNTYFGYSTPWGYFDFNRFHCHFSPRDWQRLINNNWGFRPKKLRFKLFNIQVKEVTTNDGVTTIANNLTSTIQVFSDSEYQLPYVLGSAHQGCLPPFPADVFMIPQYGYLTLNNGSQSVGRSSFYCLEYFPSQMLRTGNNFEFSYSFEDVPFHSSYAHSQSLDRLMNPLIDQYLYYLARTQSDPGGTAGNRELQFYQGGPSTMAEQAKNWLPGPCFRQQRVSKTLDQNNNSNFAWTGATKYHLNGRNSLVNPGVAMATHKDDEDRFFPSSGVLIFGKTGATNKTTLENVLMTNEEEIRPTNPVATEEYGIVSSNLQAANTAAQTQVVNNQGALPGMVWQNRDVYLQGPIWAKIPHTDGNFHPSPLMGGFGLKHPPPQILIKNTPVPANPPEVFTPAKFASFITQYSTGQVSVEIEWELQKENSKRWDPEIQYTSNFEKQTGVDFAVDSQGVYSEPRPIGTRYLTRNL

SEQ ID NO: 35 - DNA, 2211 bp, Adeno-associated virus
  source 1..2211: mol_type = unassigned DNA
atggctgctgacggttatcttccagattggctcgaggacaacctttctgaaggcattcgtgagtggtgggctctgaaacctggagtccctcaacccaaagcgaaccaacaacaccaggacaaccgtcggggtcttgtgcttccgggttacaaatacctcggacccggtaacggactcgacaaaggagagccggtcaacgaggcggacgcggcagccctcgaacacgacaaagcttacgaccagcagctcaaggccggtgacaacccgtacctcaagtacaaccacgccgacgccgagtttcaggagcgtcttcaagaagatacgtcttttgggggcaaccttggcagagcagtcttccaggccaaaaagaggatccttgagcctcttggtctggttgaggaagcagctaaaacggctcctggaaagaagggggctgtagatcagtctcctcaggaaccggactcatcatctggtgttggcaaatcgggcaaacagcctgccagaaaaagactaaatttcggtcagactggagactcagagtcagtcccagaccctcaacctctcggagaaccaccagcagcccccacaagtttgggatctaatacaatggcttcaggcggtggcgcaccaatggcagacaataacgagggtgccgatggagtgggtaattcctcaggaaattggcattgcgattcccaatggctgggcgacagagtcatcaccaccagcaccagaacctgggccctgcccacttacaacaaccatctctacaagcaaatctccagccaatcaggagcttcaaacgacaaccactactttggctacagcaccccttgggggtattttgactttaacagattccactgccacttctcaccacgtgactggcagcgactcattaacaacaactggggattccggcccaagaaactcagcttcaagctcttcaacatccaagttagaggggtcacgcagaacgatggcacgacgactattgccaataaccttaccagcacggttcaagtgtttacggactcggagtatcagctcccgtacgtgctcgggtcggcgcaccaaggctgtctcccgccgtttccagcggacgtcttcatggtccctcagtatggatacctcaccctgaacaacggaagtcaagcggtgggacgctcatccttttactgcctggagtacttcccttcgcagatgctaaggactggaaataacttccaattcagctataccttcgaggatgtaccttttcacagcagctacgctcacagccagagtttggatcgcttgatgaatcctcttattgatcagtatctgtactacctgaacagaacgcaaggaacaacctctggaacaaccaaccaatcacggctgctttttagccaggctgggcctcagtctatgtctttgcaggccagaaattggctacctgggccctgctaccggcaacagagactttcaaagactgctaacgacaacaacaacagtaactttccttggacagcggccagcaaatatcatctcaatggccgcgactcgctggtgaatccaggaccagctatggccagtcacaaggacgatgaagaaaaatttttccctatgcacggcaatctaatatttggcaaagaagggacaacggcaagtaacgcagaattagataatgtaatgattacggatgaagaagagattcgtaccaccaatcctgtggcaacagagcagtatggaactgtggcaaataacttgcagagctcaaatacagctcccacgactggaactgtcaatcatcagggggccttacctggcatggtgtggcaagatcgtgacgtgtaccttcaaggacctatctgggcaaagattcctcacacggatggacactttcatccttctcctctgatgggaggctttggactgaaacatccgcctcctcaaatcatgatcaaaaatactccggtaccggcaaatcctccgacgactttcagcccggccaagtttgcttcatttatcactcagtactccactggacaggtcagcgtggaaattgagtgggagctacagaaagaaaacagcaaacgttggaatccagagattcagtacacttccaactacaacaagtctgttaatgtggactttactgtagacactaatggtgtttatagtgaacctcgccctattggaacccggtatctcacacgaaacttgtaa

SEQ ID NO: 36 - protein, 736 aa, Adeno-associated virus; identical to SEQ ID NO: 32

SEQ ID NO: 37 - protein, 736 aa, Adeno-associated virus 3; identical to SEQ ID NO: 32
  source 1..736: note = Adeno-associated virus 3A

SEQ ID NO: 38 - protein, 624 aa, Adeno-associated virus 3
  source 1..624: note = Adeno-associated virus 3A
MPGFYEIVLKVPSDLDERLPGISNSFVNWVAEKEWDVPPDSDMDPNLIEQAPLTVAEKLQREFLVEWRRVSKAPEALFFVQFEKGETYFHLHVLIETIGVKSMVVGRYVSQIKEKLVTRIYRGVEPQLPNWFAVTKTRNGAGGGNKVVDDCYIPNYLLPKTQPELQWAWTNMDQYLSACLNLAERKRLVAQHLTHVSQTQEQNKENQNPNSDAPVIRSKTSARYMELVGWLVDRGITSEKQWIQEDQASYISFNAASNSRSQIKAALDNASKIMSLTKTAPDYLVGSNPPEDITKNRIYQILELNGYDPQYAASVFLGWAQKKFGKRNTIWLFGPATTGKTNIAEAIAHAVPFYGCVNWTNENFPFNDCVDKMVIWWEEGKMTAKVVESAKAILGGSKVRVDQKCKSSAQIEPTPVIVTSNTNMCAVIDGNSTTFEHQQPLQDRMFEFELTRRLDHDFGKVTKQEVKDFFRWASDHVTDVAHEFYVRKGGAKKRPASNDADVSEPKRECTSLAQPTTSDAEAPADYADRYQNKCSRHVGMNLMLFPCKTCERMNQISNVCFTHGQRDCGECFPGMSESQPVSVVKKKTYQKLCPIHHILGRAPEIACSACDLANVDLDDCVSEQ

SEQ ID NO: 39 - protein, 736 aa, Adeno-associated virus 3
  source 1..736: note = Adeno-associated virus 3B
MAADGYLPDWLEDNLSEGIREWWALKPGVPQPKANQQHQDNRRGLVLPGYKYLGPGNGLDKGEPVNEADAAALEHDKAYDQQLKAGDNPYLKYNHADAEFQERLQEDTSFGGNLGRAVFQAKKRILEPLGLVEEAAKTAPGKKRPVDQSPQEPDSSSGVGKSGKQPARKRLNFGQTGDSESVPDPQPLGEPPAAPTSLGSNTMASGGGAPMADNNEGADGVGNSSGNWHCDSQWLGDRVITTSTRTWALPTYNNHLYKQISSQSGASNDNHYFGYSTPWGYFDFNRFHCHFSPRDWQRLINNNWGFRPKKLSFKLFNIQVKEVTQNDGTTTIANNLTSTVQVFTDSEYQLPYVLGSAHQGCLPPFPADVFMVPQYGYLTLNNGSQAVGRSSFYCLEYFPSQMLRTGNNFQFSYTFEDVPFHSSYAHSQSLDRLMNPLIDQYLYYLNRTQGTTSGTTNQSRLLFSQAGPQSMSLQARNWLPGPCYRQQRLSKTANDNNNSNFPWTAASKYHLNGRDSLVNPGPAMASHKDDEEKFFPMHGNLIFGKEGTTASNAELDNVMITDEEEIRTTNPVATEQYGTVANNLQSSNTAPTTRTVNDQGALPGMVWQDRDVYLQGPIWAKIPHTDGHFHPSPLMGGFGLKHPPPQIMIKNTPVPANPPTTFSPAKFASFITQYSTGQVSVEIEWELQKENSKRWNPEIQYTSNYNKSVNVDFTVDTNGVYSEPRPIGTRYLTRNL

SEQ ID NO: 40 - protein, 624 aa, Adeno-associated virus 3
  source 1..624: note = Adeno-associated virus 3B
MPGFYEIVLKVPSDLDEHLPGISNSFVNWVAEKEWELPPDSDMDPNLIEQAPLTVAEKLQREFLVEWRRVSKAPEALFFVQFEKGETYFHLHVLIETIGVKSMVVGRYVSQIKEKLVTRIYRGVEPQLPNWFAVTKTRNGAGGGNKVVDDCYIPNYLLPKTQPELQWAWTNMDQYLSACLNLAERKRLVAQHLTHVSQTQEQNKENQNPNSDAPVIRSKTSARYMELVGWLVDRGITSEKQWIQEDQASYISFNAASNSRSQIKAALDNASKIMSLTKTAPDYLVGSNPPEDITKNRIYQILELNGYDPQYAASVFLGWAQKKFGKRNTIWLFGPATTGKTNIAEAIAHAVPFYGCVNWTNENFPFNDCVDKMVIWWEEGKMTAKVVESAKAILGGSKVRVDQKCKSSAQIEPTPVIVTSNTNMCAVIDGNSTTFEHQQPLQDRMFKFELTRRLDHDFGKVTKQEVKDFFRWASDHVTDVAHEFYVRKGGAKKRPASNDADVSEPKRQCTSLAQPTTSDAEAPADYADRYQNKCSRHVGMNLMLFPCKTCERMNQISNVCFTHGQRDCGECFPGMSESQPVSVVKKKTYQKLCPIHHILGRAPEIACSACDLANVDLDDCVSEQ

SEQ ID NO: 41 - DNA, 4722 bp, Adeno-associated virus 3
  source 1..4722: mol_type = unassigned DNA; note = Adeno-associated virus 3B
tggccactccctctatgcgcactcgctcgctcggtggggcctggcgaccaaaggtcgccagacggacgtgctttgcacgtccggccccaccgagcgagcgagtgcgcatagagggagtggccaactccatcactagaggtatggcagtgacgtaacgcgaagcgcgcgaagcgagaccacgcctaccagctgcgtcagcagtcaggtgacccttttgcgacagtttgcgacaccacgtggccgctgagggtatatattctcgagtgagcgaaccaggagctccattttgaccgcgaaatttgaacgagcagcagccatgccggggttctacgagattgtcctgaaggtcccgagtgacctggacgagcacctgccgggcatttctaactcgtttgttaactgggtggccgagaaggaatgggagctgccgccggattctgacatggatccgaatctgattgagcaggcacccctgaccgtggccgaaaagcttcagcgcgagttcctggtggagtggcgccgcgtgagtaaggccccggaggccctcttttttgtccagttcgaaaagggggagacctacttccacctgcacgtgctgattgagaccatcggggtcaaatccatggtggtcggccgctacgtgagccagattaaagagaagctggtgacccgcatctaccgcggggtcgagccgcagcttccgaactggttcgcggtgaccaaaacgcgaaatggcgccgggggcgggaacaaggtggtggacgactgctacatccccaactacctgctccccaagacccagcccgagctccagtgggcgtggactaacatggaccagtatttaagcgcctgtttgaatctcgcggagcgtaaacggctggtggcgcagcatctgacgcacgtgtcgcagacgcaggagcagaacaaagagaatcagaaccccaattctgacgcgccggtcatcaggtcaaaaacctcagccaggtacatggagctggtcgggtggctggtggaccgcgggatcacgtcagaaaagcaatggattcaggaggaccaggcctcgtacatctccttcaacgccgcctccaactcgcggtcccagatcaaggccgcgctggacaatgcctccaagatcatgagcctgacaaagacggctccggactacctggtgggcagcaacccgccggaggacattaccaaaaatcggatctaccaaatcctggagctgaacgggtacgatccgcagtacgcggcctccgtcttcctgggctgggcgcaaaagaagttcgggaagaggaacaccatctggctctttgggccggccacgacgggtaaaaccaacatcgcggaagccatcgcccacgccgtgcccttctacggctgcgtaaactggaccaatgagaactttcccttcaacgattgcgtcgacaagatggtgatctggtgggaggagggcaagatgacggccaaggtcgtggagagcgccaaggccattctgggcggaagcaaggtgcgcgtggaccaaaagtgcaagtcatcggcccagatcgaacccactcccgtgatcgtcacctccaacaccaacatgtgcgccgtgattgacgggaacagcaccaccttcgagcatcagcagccgctgcaggaccggatgtttaaatttgaacttacccgccgtttggaccatgactttgggaaggtcaccaaacaggaagtaaaggactttttccggtgggcttccgatcacgtgactgacgtggctcatgagttctacgtcagaaagggtggagctaagaaacgccccgcctccaatgacgcggatgtaagcgagccaaaacggcagtgcacgtcacttgcgcagccgacaacgtcagacgcggaagcaccggcggactacgcggacaggtaccaaaacaaatgttctcgtcacgtgggcatgaatctgatgctttttccctgtaaaacatgcgagagaatgaatcaaatttccaatgtctgttttacgcatggtcaaagagactgtggggaatgcttccctggaatgtcagaatctcaacccgtttctgtcgtcaaaaagaagacttatcagaaactgtgtccaattcatcatatcctgggaagggcacccgagattgcctgttcggcctgcgatttggccaatgtggacttggatgactgtgtttctgagcaataaatgacttaaaccaggtatggctgctgacggttatcttccagattggctcgaggacaacctttctgaaggcattcgtgagtggtgggctctgaaacctggagtccctcaacccaaagcgaaccaacaacaccaggacaaccgtcggggtcttgtgcttccgggttacaaatacctcggacccggtaacggactcgacaaaggagagccggtcaacgaggcggacgcggcagccctcgaacacgacaaagcttacgaccagcagctcaaggccggtgacaacccgtacctcaagtacaaccacgccgacgccgagtttcaggagcgtcttcaagaagatacgtcttttgggggcaaccttggcagagcagtcttccaggccaaaaagaggatccttgagcctcttggtctggttgaggaagcagctaaaacggctcctggaaagaagaggcctgtagatcagtctcctcaggaaccggactcatcatctggtgttggcaaatcgggcaaacagcctgccagaaaaagactaaatttcggtcagactggcgactcagagtcagtcccagaccctcaacctctcggagaaccaccagcagcccccacaagtttgggatctaatacaatggcttcaggcggtggcgcaccaatggcagacaataacgagggtgccgatggagtgggtaattcctcaggaaattggcattgcgattcccaatggctgggcgacagagtcatcaccaccagcaccagaacctgggccctgcccacttacaacaaccatctctacaagcaaatctccagccaatcaggagcttcaaacgacaaccactactttggctacagcaccccttgggggtattttgactttaacagattccactgccacttctcaccacgtgactggcagcgactcattaacaacaactggggattccggcccaagaaactcagcttcaagctcttcaacatccaagttaaagaggtcacgcagaacgatggcacgacgactattgccaataaccttaccagcacggttcaagtgtttacggactcggagtatcagctcccgtacgtgctcgggtcggcgcaccaaggctgtctcccgccgtttccagcggacgtcttcatggtccctcagtatggatacctcaccctgaacaacggaagtcaagcggtgggacgctcatccttttactgcctggagtacttcccttcgcagatgctaaggactggaaataacttccaattcagctataccttcgaggatgtaccttttcacagcagctacgctcacagccagagtttggatcgcttgatgaatcctcttattgatcagtatctgtactacctgaacagaacgcaaggaacaacctctggaacaaccaaccaatcacggctgctttttagccaggctgggcctcagtctatgtctttgcaggccagaaattggctacctgggccctgctaccggcaacagagactttcaaagactgctaacgacaacaacaacagtaactttccttggacagcggccagcaaatatcatctcaatggccgcgactcgctggtgaatccaggaccagctatggccagtcacaaggacgatgaagaaaaatttttccctatgcacggcaatctaatatttggcaaagaagggacaacggcaagtaacgcagaattagataatgtaatgattacggatgaagaagagattcgtaccaccaatcctgtggcaacagagcagtatggaactgtggcaaataacttgcagagctcaaatacagctcccacgactagaactgtcaatgatcagggggccttacctggcatggtgtggcaagatcgtgacgtgtaccttcaaggacctatctgggcaaagattcctcacacggatggacactttcatccttctcctctgatgggaggctttggactgaaacatccgcctcctcaaatcatgatcaaaaatactccggtaccggcaaatcctccgacgactttcagcccggccaagtttgcttcatttatcactcagtactccactggacaggtcagcgtggaaattgagtgggagctacagaaagaaaacagcaaacgttggaatccagagattcagtacacttccaactacaacaagtctgttaatgtggactttactgtagacactaatggtgtttatagtgaacctcgccctattggaacccggtatctcacacgaaacttgtaatcctggttaatcaataaaccgtttaattcgtttcagttgaactttggctcttgtgcacttcttatcttatcttgtttccatggctactgcgtagataagcagcggcctgcggcgcttgcgcttcgcggtttacaactgctggttaatatttaactctcgccatacctctagtgatggagttggccactccctctatgcgcactcgctcgctcggtggggccggacgtgcaaagcacgtccgtctggcgacctttggtcgccaggccccaccgagcgagcgagtgcgcatagagggagtggccaa

SEQ ID NO: 42 - DNA, 1800 bp, Adeno-associated virus 4
  source 1..1800: mol_type = unassigned DNA
  misc_difference 342: note = misc_feature - n is a, c, t, or g
acggctcctggaaagaagagaccgttgattgaatccccccagcagcccgactcctccacgggtatcggcaaaaaaggcaagcagccggctaaaaagaagctcgttttcgaagacgaaactggagcaggcgacggaccccctgagggatcaacttccggagccatgtctgatgacagtgagatgcgtgcagcagctggcggagctgcagtcgagggsggacaaggtgccgatggagtgggtaatgcctcgggtgattggcattgcgattccacctggtctgagggccacgtcacgaccaccagcaccagaacctgggtcttgcccacctacaacaaccacctntacaagcgactcggagagagcctgcagtccaacacctacaacggattctccaccccctggggatactttgacttcaaccgcttccactgccacttctcaccacgtgactggcagcgactcatcaacaacaactggggcatgcgacccaaagccatgcgggtcaaaatcttcaacatccaggtcaaggaggtcacgacgtcgaacggcgagacaacggtggctaataaccttaccagcacggttcagatctttgcggactcgtcgtacgaactgccgtacgtgatggatgcgggtcaagagggcagcctgcctccttttcccaacgacgtctttatggtgccccagtacggctactgtggactggtgaccggcaacacttcgcagcaacagactgacagaaatgccttctactgcctggagtactttccttcgcagatgctgcggactggcaacaactttgaaattacgtacagttttgagaaggtgcctttccactcgatgtacgcgcacagccagagcctggaccggctgatgaaccctctcatcgaccagtacctgtggggactgcaatcgaccaccaccggaaccaccctgaatgccgggactgccaccaccaactttaccaagctgcggcctaccaacttttccaactttaaaaagaactggctgcccgggccttcaatcaagcagcagggcttctcaaagactgccaatcaaaactacaagatccctgccaccgggtcagacagtctcatcaaatacgagacgcacagcactctggacggaagatggagtgccctgacccccggacctccaatggccacggctggacctgcggacagcaagttcagcaacagccagctcatctttgcggggcctaaacagaacggcaacacggccaccgtacccgggactctgatcttcacctctgaggaggagctggcagccaccaacgccaccgatacggacatgtggggcaacctacctggcggtgaccagagcaacagcaacctgccgaccgtggacagactgacagccttgggagccgtgcctggaatggtctggcaaaacagagacatttactaccagggtcccatttgggccaagattcctcataccgatggacactttcacccctcaccgctgattggtgggtttgggctgaaacacccgcctcctcaaatttttatcaagaacaccccggtacctgcgaatcctgcaacgaccttcagctctactccggtaaactccttcattactcagtacagcactggccaggtgtcggtgcagattgactgggagatccagaaggagcggtccaaacgctggaaccccgaggtccagtttacctccaactacggacagcaaaactctctgttgtgggctcccgatgcggctgggaaatacactgagcctagggctatcggtacccgctacctcacccaccacctgtaataa

SEQ ID NO: 43 - DNA, 2208 bp, Adeno-associated virus 4
  source 1..2208: mol_type = unassigned DNA
  misc_difference 750: note = misc_feature - n is a, c, t, or g
atgactgacggttaccttccagattggctagaggacaacctctctgaaggcgttcgagagtggtgggcgctgcaacctggagcccctaaacccaaggcaaatcaacaacatcaggacaacgctcggggtcttgtgcttccgggttacaaatacctcggacccggcaacggactcgacaagggggaacccgtcaacgcagcggacgcggcagccctcgagcacgacaaggcctacgaccagcagctcaaggccggtgacaacccctacctcaagtacaaccacgccgacgcggagttccagcagcggcttcagggcgacacatcgtttgggggcaacctcggcagagcagtcttccaggccaaaaagagggttcttgaacctcttggtctggttgagcaagcgggtgagacggctcctggaaagaagagaccgttgattgaatccccccagcagcccgactcctccacgggtatcggcaaaaaaggcaagcagccggctaaaaagaagctcgttttcgaagacgaaactggagcaggcgacggaccccctgagggatcaacttccggagccatgtctgatgacagtgagatgcgtgcagcagctggcggagctgcagtcgagggsggacaaggtgccgatggagtgggtaatgcctcgggtgattggcattgcgattccacctggtctgagggccacgtcacgaccaccagcaccagaacctgggtcttgcccacctacaacaaccacctntacaagcgactcggagagagcctgcagtccaacacctacaacggattctccaccccctggggatactttgacttcaaccgcttccactgccacttctcaccacgtgactggcagcgactcatcaacaacaactggggcatgcgacccaaagccatgcgggtcaaaatcttcaacatccaggtcaaggaggtcacgacgtcgaacggcgagacaacggtggctaataaccttaccagcacggttcagatctttgcggactcgtcgtacgaactgccgtacgtgatggatgcgggtcaagagggcagcctgcctccttttcccaacgacgtctttatggtgccccagtacggctactgtggactggtgaccggcaacacttcgcagcaacagactgacagaaatgccttctactgcctggagtactttccttcgcagatgctgcggactggcaacaactttgaaattacgtacagttttgagaaggtgcctttccactcgatgtacgcgcacagccagagcctggaccggctgatgaaccctctcatcgaccagtacctgtggggactgcaatcgaccaccaccggaaccaccctgaatgccgggactgccaccaccaactttaccaagctgcggcctaccaacttttccaactttaaaaagaactggctgcccgggccttcaatcaagcagcagggcttctcaaagactgccaatcaaaactacaagatccctgccaccgggtcagacagtctcatcaaatacgagacgcacagcactctggacggaagatggagtgccctgacccccggacctccaatggccacggctggacctgcggacagcaagttcagcaacagccagctcatctttgcggggcctaaacagaacggcaacacggccaccgtacccgggactctgatcttcacctctgaggaggagctggcagccaccaacgccaccgatacggacatgtggggcaacctacctggcggtgaccagagcaacagcaacctgccgaccgtggacagactgacagccttgggagccgtgcctggaatggtctggcaaaacagagacatttactaccagggtcccatttgggccaagattcctcataccgatggacactttcacccctcaccgctgattggtgggtttgggctgaaacacccgcctcctcaaatttttatcaagaacaccccggtacctgcgaatcctgcaacgaccttcagctctactccggtaaactccttcattactcagtacagcactggccaggtgtcggtgcagattgactgggagatccagaaggagcggtccaaacgctggaaccccgaggtccagtttacctccaactacggacagcaaaactctctgttgtgggctcccgatgcggctgggaaatacactgagcctagggctatcggtacccgctacctcacccaccacctgtaataa

SEQ ID NO: 44 - DNA, 1872 bp, Adeno-associated virus 4
  source 1..1872: mol_type = unassigned DNA
atgccggggttctacgagatcgtgctgaaggtgcccagcgacctggacgagcacctgcccggcatttctgactcttttgtgagctgggtggccgagaaggaatgggagctgccgccggattctgacatggacttgaatctgattgagcaggcacccctgaccgtggccgaaaagctgcaacgcgagttcctggtcgagtggcgccgcgtgagtaaggccccggaggccctcttctttgtccagttcgagaagggggacagctacttccacctgcacatcctggtggagaccgtgggcgtcaaatccatggtggtgggccgctacgtgagccagattaaagagaagctggtgacccgcatctaccgcggggtcgagccgcagcttccgaactggttcgcggtgaccaagacgcgtaatggcgccggaggcgggaacaaggtggtggacgactgctacatccccaactacctgctccccaagacccagcccgagctccagtgggcgtggactaacatggaccagtatataagcgcctgtttgaatctcgcggagcgtaaacggctggtggcgcagcatctgacgcacgtgtcgcagacgcaggagcagaacaaggaaaaccagaaccccaattctgacgcgccggtcatcaggtcaaaaacctccgccaggtacatggagctggtcgggtggctggtggaccgcgggatcacgtcagaaaagcaatggatccaggaggaccaggcgtcctacatctccttcaacgccgcctccaactcgcggtcacaaatcaaggccgcgctggacaatgcctccaaaatcatgagcctgacaaagacggctccggactacctggtgggccagaacccgccggaggacatttccagcaaccgcatctaccgaatcctcgagatgaacgggtacgatccgcagtacgcggcctccgtcttcctgggctgggcgcaaaagaagttcgggaagaggaacaccatctggctctttgggccggccacgacgggtaaaaccaacatcgcggaagccatcgcccacgccgtgcccttctacggctgcgtgaactggaccaatgagaactttccgttcaacgattgcgtcgacaagatggtgatctggtgggaggagggcaagatgacggccaaggtcgtagagagcgccaaggccatcctgggcggaagcaaggtgcgcgtggaccaaaagtgcaagtcatcggcccagatcgacccaactcccgtgatcgtcacctccaacaccaacatgtgcgcggtcatcgacggaaactcgaccaccttcgagcaccaacaaccactccaggaccggatgttcaagttcgagctcaccaagcgcctggagcacgactttggcaaggtcaccaagcaggaagtcaaagactttttccggtgggcgtcagatcacgtgaccgaggtgactcacgagttttacgtcagaaagggtggagctagaaagaggcccgcccccaatgacgcagatataagtgagcccaagcgggcctgtccgtcagttgcgcagccatcgacgtcagacgcggaagctccggtggactacgcggacaggtaccaaaacaaatgttctcgtcacgtgggtatgaatctgatgctttttccctgccggcaatgcgagagaatgaatcagaatgtggacatttgcttcacgcacggggtcatggactgtgccgagtgcttccccgtgtcagaatctcaacccgtgtctgtcgtcagaaagcggacgtatcagaaactgtgtccgattcatcacatcatggggagggcgcccgaggtggcctgctcggcctgcgaactggccaatgtggacttggatgactgtgacatggaacaataa

SEQ ID NO: 45 - DNA, 1611 bp, Adeno-associated virus 4
  source 1..1611: mol_type = unassigned DNA
atgccggggttctacgagatcgtgctgaaggtgcccagcgacctggacgagcacctgcccggcatttctgactcttttgtgagctgggtggccgagaaggaatgggagctgccgccggattctgacatggacttgaatctgattgagcaggcacccctgaccgtggccgaaaagctgcaacgcgagttcctggtcgagtggcgccgcgtgagtaaggccccggaggccctcttctttgtccagttcgagaagggggacagctacttccacctgcacatcctggtggagaccgtgggcgtcaaatccatggtggtgggccgctacgtgagccagattaaagagaagctggtgacccgcatctaccgcggggtcgagccgcagcttccgaactggttcgcggtgaccaagacgcgtaatggcgccggaggcgggaacaaggtggtggacgactgctacatccccaactacctgctccccaagacccagcccgagctccagtgggcgtggactaacatggaccagtatataagcgcctgtttgaatctcgcggagcgtaaacggctggtggcgcagcatctgacgcacgtgtcgcagacgcaggagcagaacaaggaaaaccagaaccccaattctgacgcgccggtcatcaggtcaaaaacctccgccaggtacatggagctggtcgggtggctggtggaccgcgggatcacgtcagaaaagcaatggatccaggaggaccaggcgtcctacatctccttcaacgccgcctccaactcgcggtcacaaatcaaggccgcgctggacaatgcctccaaaatcatgagcctgacaaagacggctccggactacctggtgggccagaacccgccggaggacatttccagcaaccgcatctaccgaatcctcgagatgaacgggtacgatccgcagtacgcggcctccgtcttcctgggctgggcgcaaaagaagttcgggaagaggaacaccatctggctctttgggccggccacgacgggtaaaaccaacatcgcggaagccatcgcccacgccgtgcccttctacggctgcgtgaactggaccaatgagaactttccgttcaacgattgcgtcgacaagatggtgatctggtgggaggagggcaagatgacggccaaggtcgtagagagcgccaaggccatcctgggcggaagcaaggtgcgcgtggaccaaaagtgcaagtcatcggcccagatcgacccaactcccgtgatcgtcacctccaacaccaacatgtgcgcggtcatcgacggaaactcgaccaccttcgagcaccaacaaccactccaggaccggatgttcaagttcgagctcaccaagcgcctggagcacgactttggcaaggtcaccaagcaggaagtcaaagactttttccggtgggcgtcagatcacgtgaccgaggtgactcacgagttttacgtcagaaagggtggagctagaaagaggcccgcccccaatgacgcagatataagtgagcccaagcgggcctgtccgtcagttgcgcagccatcgacgtcagacgcggaagctccggtggactacgcggacagattggctagaggacaacctctctga

SEQ ID NO: 46 - DNA, 1872 bp, Adeno-associated virus 4; identical to SEQ ID NO: 44
  source 1..1872: mol_type = unassigned DNA

SEQ ID NO: 47 - DNA, 1617 bp, Adeno-associated virus 4
  source 1..1617: mol_type = unassigned DNA
  misc_difference 162: note = misc_feature - n is a, c, t, or g
atgcgtgcagcagctggcggagctgcagtcgagggsggacaaggtgccgatggagtgggtaatgcctcgggtgattggcattgcgattccacctggtctgagggccacgtcacgaccaccagcaccagaacctgggtcttgcccacctacaacaaccacctntacaagcgactcggagagagcctgcagtccaacacctacaacggattctccaccccctggggatactttgacttcaaccgcttccactgccacttctcaccacgtgactggcagcgactcatcaacaacaactggggcatgcgacccaaagccatgcgggtcaaaatcttcaacatccaggtcaaggaggtcacgacgtcgaacggcgagacaacggtggctaataaccttaccagcacggttcagatctttgcggactcgtcgtacgaactgccgtacgtgatggatgcgggtcaagagggcagcctgcctccttttcccaacgacgtctttatggtgccccagtacggctactgtggactggtgaccggcaacacttcgcagcaacagactgacagaaatgccttctactgcctggagtactttccttcgcagatgctgcggactggcaacaactttgaaattacgtacagttttgagaaggtgcctttccactcgatgtacgcgcacagccagagcctggaccggctgatgaaccctctcatcgaccagtacctgtggggactgcaatcgaccaccaccggaaccaccctgaatgccgggactgccaccaccaactttaccaagctgcggcctaccaacttttccaactttaaaaagaactggctgcccgggccttcaatcaagcagcagggcttctcaaagactgccaatcaaaactacaagatccctgccaccgggtcagacagtctcatcaaatacgagacgcacagcactctggacggaagatggagtgccctgacccccggacctccaatggccacggctggacctgcggacagcaagttcagcaacagccagctcatctttgcggggcctaaacagaacggcaacacggccaccgtacccgggactctgatcttcacctctgaggaggagctggcagccaccaacgccaccgatacggacatgtggggcaacctacctggcggtgaccagagcaacagcaacctgccgaccgtggacagactgacagccttgggagccgtgcctggaatggtctggcaaaacagagacatttactaccagggtcccatttgggccaagattcctcataccgatggacactttcacccctcaccgctgattggtgggtttgggctgaaacacccgcctcctcaaatttttatcaagaacaccccggtacctgcgaatcctgcaacgaccttcagctctactccggtaaactccttcattactcagtacagcactggccaggtgtcggtgcagattgactgggagatccagaaggagcggtccaaacgctggaaccccgaggtccagtttacctccaactacggacagcaaaactctctgttgtgggctcccgatgcggctgggaaatacactgagcctagggctatcggtacccgctacctcacccaccacctgtaa

SEQ ID NO: 48 - DNA, 939 bp, Adeno-associated virus 4
  source 1..939: mol_type = unassigned DNA
atggagctggtcgggtggctggtggaccgcgggatcacgtcagaaaagcaatggatccaggaggaccaggcgtcctacatctccttcaacgccgcctccaactcgcggtcacaaatcaaggccgcgctggacaatgcctccaaaatcatgagcctgacaaagacggctccggactacctggtgggccagaacccgccggaggacatttccagcaaccgcatctaccgaatcctcgagatgaacgggtacgatccgcagtacgcggcctccgtcttcctgggctgggcgcaaaagaagttcgggaagaggaacaccatctggctctttgggccggccacgacgggtaaaaccaacatcgcggaagccatcgcccacgccgtgcccttctacggctgcgtgaactggaccaatgagaactttccgttcaacgattgcgtcgacaagatggtgatctggtgggaggagggcaagatgacggccaaggtcgtagagagcgccaaggccatcctgggcggaagcaaggtgcgcgtggaccaaaagtgcaagtcatcggcccagatcgacccaactcccgtgatcgtcacctccaacaccaacatgtgcgcggtcatcgacggaaactcgaccaccttcgagcaccaacaaccactccaggaccggatgttcaagttcgagctcaccaagcgcctggagcacgactttggcaaggtcaccaagcaggaagtcaaagactttttccggtgggcgtcagatcacgtgaccgaggtgactcacgagttttacgtcagaaagggtggagctagaaagaggcccgcccccaatgacgcagatataagtgagcccaagcgggcctgtccgtcagttgcgcagccatcgacgtcagacgcggaagctccggtggactacgcggacagattggctagaggacaacctctctga

SEQ ID NO: 49 - DNA, 1197 bp, Adeno-associated virus 4
  source 1..1197: mol_type = unassigned DNA
atggagctggtcgggtggctggtggaccgcgggatcacgtcagaaaagcaatggatccaggaggaccaggcgtcctacatctccttcaacgccgcctccaactcgcggtcacaaatcaaggccgcgctggacaatgcctccaaaatcatgagcctgacaaagacggctccggactacctggtgggccagaacccgccggaggacatttccagcaaccgcatctaccgaatcctcgagatgaacgggtacgatccgcagtacgcggcctccgtcttcctgggctgggcgcaaaagaagttcgggaagaggaacaccatctggctctttgggccggccacgacgggtaaaaccaacatcgcggaagccatcgcccacgccgtgcccttctacggctgcgtgaactggaccaatgagaactttccgttcaacgattgcgtcgacaagatggtgatctggtgggaggagggcaagatgacggccaaggtcgtagagagcgccaaggccatcctgggcggaagcaaggtgcgcgtggaccaaaagtgcaagtcatcggcccagatcgacccaactcccgtgatcgtcacctccaacaccaacatgtgcgcggtcatcgacggaaactcgaccaccttcgagcaccaacaaccactccaggaccggatgttcaagttcgagctcaccaagcgcctggagcacgactttggcaaggtcaccaagcaggaagtcaaagactttttccggtgggcgtcagatcacgtgaccgaggtgactcacgagttttacgtcagaaagggtggagctagaaagaggcccgcccccaatgacgcagatataagtgagcccaagcgggcctgtccgtcagttgcgcagccatcgacgtcagacgcggaagctccggtggactacgcggacaggtaccaaaacaaatgttctcgtcacgtgggtatgaatctgatgctttttccctgccggcaatgcgagagaatgaatcagaatgtggacatttgcttcacgcacggggtcatggactgtgccgagtgcttccccgtgtcagaatctcaacccgtgtctgtcgtcagaaagcggacgtatcagaaactgtgtccgattcatcacatcatggggagggcgcccgaggtggcctgctcggcctgcgaactggccaatgtggacttggatgactgtgacatggaacaa

SEQ ID NO: 50 - DNA, 245 bp, Adeno-associated virus 4
  source 1..245: mol_type = unassigned DNA
ctccatcatctaggtttgcccactgacgtcaatgtgacgtcctagggttagggaggtccctgtattagcagtcacgtgagtgtcgtatttcgcggagcgtagcggagcgcataccaagctgccacgtcacagccacgtggtccgtttgcgacagtttgcgacaccatgtggtcaggagggtatataaccgcgagtgagccagcgaggagctccattttgcccgcgaattttgaacgagcagcagc

SEQ ID NO: 51 - protein, 313 aa, Adeno-associated virus 4
  VARIANT 313: note = MOD_RES - Xaa = any amino acid
MELVGWLVDRGITSEKQWIQEDQASYISFNAASNSRSQIKAALDNASKIMSLTKTAPDYLVGQNPPEDISSNRIYRILEMNGYDPQYAASVFLGWAQKKFGKRNTIWLFGPATTGKTNIAEAIAHAVPFYGCVNWTNENFPFNDCVDKMVIWWEEGKMTAKVVESAKAILGGSKVRVDQKCKSSAQIDPTPVIVTSNTNMCAVIDGNSTTFEHQQPLQDRMFKFELTKRLEHDFGKVTKQEVKDFFRWASDHVTEVTHEFYVRKGGARKRPAPNDADISEPKRACPSVAQPSTSDAEAPVDYADRLARGQPLX

SEQ ID NO: 52 - protein, 399 aa, Adeno-associated virus 4
MELVGWLVDRGITSEKQWIQEDQASYISFNAASNSRSQIKAALDNASKIMSLTKTAPDYLVGQNPPEDISSNRIYRILEMNGYDPQYAASVFLGWAQKKFGKRNTIWLFGPATTGKTNIAEAIAHAVPFYGCVNWTNENFPFNDCVDKMVIWWEEGKMTAKVVESAKAILGGSKVRVDQKCKSSAQIDPTPVIVTSNTNMCAVIDGNSTTFEHQQPLQDRMFKFELTKRLEHDFGKVTKQEVKDFFRWASDHVTEVTHEFYVRKGGARKRPAPNDADISEPKRACPSVAQPSTSDAEAPVDYADRYQNKCSRHVGMNLMLFPCRQCERMNQNVDICFTHGVMDCAECFPVSESQPVSVVRKRTYQKLCPIHHIMGRAPEVACSACELANVDLDDCDMEQ

SEQ ID NO: 53 - protein, 623 aa, Adeno-associated virus 4
MPGFYEIVLKVPSDLDEHLPGISDSFVSWVAEKEWELPPDSDMDLNLIEQAPLTVAEKLQREFLVEWRRVSKAPEALFFVQFEKGDSYFHLHILVETVGVKSMVVGRYVSQIKEKLVTRIYRGVEPQLPNWFAVTKTRNGAGGGNKVVDDCYIPNYLLPKTQPELQWAWTNMDQYISACLNLAERKRLVAQHLTHVSQTQEQNKENQNPNSDAPVIRSKTSARYMELVGWLVDRGITSEKQWIQEDQASYISFNAASNSRSQIKAALDNASKIMSLTKTAPDYLVGQNPPEDISSNRIYRILEMNGYDPQYAASVFLGWAQKKFGKRNTIWLFGPATTGKTNIAEAIAHAVPFYGCVNWTNENFPFNDCVDKMVIWWEEGKMTAKVVESAKAILGGSKVRVDQKCKSSAQIDPTPVIVTSNTNMCAVIDGNSTTFEHQQPLQDRMFKFELTKRLEHDFGKVTKQEVKDFFRWASDHVTEVTHEFYVRKGGARKRPAPNDADISEPKRACPSVAQPSTSDAEAPVDYADRYQNKCSRHVGMNLMLFPCRQCERMNQNVDICFTHGVMDCAECFPVSESQPVSVVRKRTYQKLCPIHHIMGRAPEVACSACELANVDLDDCDMEQ

SEQ ID NO: 54 - protein, 537 aa, Adeno-associated virus 4
  VARIANT 537: note = MOD_RES - Xaa = any amino acid
MPGFYEIVLKVPSDLDEHLPGISDSFVSWVAEKEWELPPDSDMDLNLIEQAPLTVAEKLQREFLVEWRRVSKAPEALFFVQFEKGDSYFHLHILVETVGVKSMVVGRYVSQIKEKLVTRIYRGVEPQLPNWFAVTKTRNGAGGGNKVVDDCYIPNYLLPKTQPELQWAWTNMDQYISACLNLAERKRLVAQHLTHVSQTQEQNKENQNPNSDAPVIRSKTSARYMELVGWLVDRGITSEKQWIQEDQASYISFNAASNSRSQIKAALDNASKIMSLTKTAPDYLVGQNPPEDISSNRIYRILEMNGYDPQYAASVFLGWAQKKFGKRNTIWLFGPATTGKTNIAEAIAHAVPFYGCVNWTNENFPFNDCVDKMVIWWEEGKMTAKVVESAKAILGGSKVRVDQKCKSSAQIDPTPVIVTSNTNMCAVIDGNSTTFEHQQPLQDRMFKFELTKRLEHDFGKVTKQEVKDFFRWASDHVTEVTHEFYVRKGGARKRPAPNDADISEPKRACPSVAQPSTSDAEAPVDYADRLARGQPLX

SEQ ID NO: 55 - protein, 623 aa, Adeno-associated virus 4; identical to SEQ ID NO: 53

SEQ ID NO: 56 - protein, 544 aa, Adeno-associated virus 4
MSDDSEMRAAAGGAAVEGGQGADGVGNASGDWHCDSTWSEGHVTTTSTRTWVLPTYNNHLYKRLGESLQSNTYNGFSTPWGYFDFNRFHCHFSPRDWQRLINNNWGMRPKAMRVKIFNIQVKEVTTSNGETTVANNLTSTVQIFADSSYELPYVMDAGQEGSLPPFPNDVFMVPQYGYCGLVTGNTSQQQTDRNAFYCLEYFPSQMLRTGNNFEITYSFEKVPFHSMYAHSQSLDRLMNPLIDQYLWGLQSTTTGTTLNAGTATTNFTKLRPTNFSNFKKNWLPGPSIKQQGFSKTANQNYKIPATGSDSLIKYETHSTLDGRWSALTPGPPMATAGPADSKFSNSQLIFAGPKQNGNTATVPGTLIFTSEEELAATNATDTDMWGNLPGGDQSNSNLPTVDRLTALGAVPGMVWQNRDIYYQGPIWAKIPHTDGHFHPSPLIGGFGLKHPPPQIFIKNTPVPANPATTFSSTPVNSFITQYSTGQVSVQIDWEIQKERSKRWNPEVQFTSNYGQQNSLLWAPDAAGKYTEPRAIGTRYLTHHL

SEQ ID NO: 57 - protein, 734 aa, Adeno-associated virus 4
MTDGYLPDWLEDNLSEGVREWWALQPGAPKPKANQQHQDNARGLVLPGYKYLGPGNGLDKGEPVNAADAAALEHDKAYDQQLKAGDNPYLKYNHADAEFQQRLQGDTSFGGNLGRAVFQAKKRVLEPLGLVEQAGETAPGKKRPLIESPQQPDSSTGIGKKGKQPAKKKLVFEDETGAGDGPPEGSTSGAMSDDSEMRAAAGGAAVEGGQGADGVGNASGDWHCDSTWSEGHVTTTSTRTWVLPTYNNHLYKRLGESLQSNTYNGFSTPWGYFDFNRFHCHFSPRDWQRLINNNWGMRPKAMRVKIFNIQVKEVTTSNGETTVANNLTSTVQIFADSSYELPYVMDAGQEGSLPPFPNDVFMVPQYGYCGLVTGNTSQQQTDRNAFYCLEYFPSQMLRTGNNFEITYSFEKVPFHSMYAHSQSLDRLMNPLIDQYLWGLQSTTTGTTLNAGTATTNFTKLRPTNFSNFKKNWLPGPSIKQQGFSKTANQNYKIPATGSDSLIKYETHSTLDGRWSALTPGPPMATAGPADSKFSNSQLIFAGPKQNGNTATVPGTLIFTSEEELAATNATDTDMWGNLPGGDQSNSNLPTVDRLTALGAVPGMVWQNRDIYYQGPIWAKIPHTDGHFHPSPLIGGFGLKHPPPQIFIKNTPVPANPATTFSSTPVNSFITQYSTGQVSVQIDWEIQKERSKRWNPEVQFTSNYGQQNSLLWAPDAAGKYTEPRAIGTRYLTHHL

SEQ ID NO: 58 - protein, 598 aa, Adeno-associated virus 4
TAPGKKRPLIESPQQPDSSTGIGKKGKQPAKKKLVFEDETGAGDGPPEGSTSGAMSDDSEMRAAAGGAAVEGGQGADGVGNASGDWHCDSTWSEGHVTTTSTRTWVLPTYNNHLYKRLGESLQSNTYNGFSTPWGYFDFNRFHCHFSPRDWQRLINNNWGMRPKAMRVKIFNIQVKEVTTSNGETTVANNLTSTVQIFADSSYELPYVMDAGQEGSLPPFPNDVFMVPQYGYCGLVTGNTSQQQTDRNAFYCLEYFPSQMLRTGNNFEITYSFEKVPFHSMYAHSQSLDRLMNPLIDQYLWGLQSTTTGTTLNAGTATTNFTKLRPTNFSNFKKNWLPGPSIKQQGFSKTANQNYKIPATGSDSLIKYETHSTLDGRWSALTPGPPMATAGPADSKFSNSQLIFAGPKQNGNTATVPGTLIFTSEEELAATNATDTDMWGNLPGGDQSNSNLPTVDRLTALGAVPGMVWQNRDIYYQGPIWAKIPHTDGHFHPSPLIGGFGLKHPPPQIFIKNTPVPANPATTFSSTPVNSFITQYSTGQVSVQIDWEIQKERSKRWNPEVQFTSNYGQQNSLLWAPDAAGKYTEPRAIGTRYLTHHL

SEQ ID NO: 59 - DNA, 129 bp, Adeno-associated virus 4
  source 1..129: mol_type = unassigned DNA
ttggccactccctctatgcgcgctcgctcactcactcggccctgcggccagaggccggcagtctggagacctttggtgtccagggcagggccgagtgagtgagcgagcgcgcatagagggagtggccaa

SEQ ID NO: 60 - DNA, 125 bp, Adeno-associated virus 4
  source 1..125: mol_type = unassigned DNA
ttggccactccctctatgcgcgctcgctcactcactcggccctggagaccaaaggtctccagactgccggcctctggccggcagggccgagtgagtgagcgagcgcgcatagagggagtggccaa

SEQ ID NO: 61 - DNA, 4768 bp, Adeno-associated virus 4
  source 1..4768: mol_type = unassigned DNA
  misc_difference 3009: note = misc_feature - n is a, c, t, or g
ttggccactccctctatgcgcgctcgctcactcactcggccctggagaccaaaggtctccagactgccggcctctggccggcagggccgagtgagtgagcgagcgcgcatagagggagtggccaactccatcatctaggtttgcccactgacgtcaatgtgacgtcctagggttagggaggtccctgtattagcagtcacgtgagtgtcgtatttcgcggagcgtagcggagcgcataccaagctgccacgtcacagccacgtggtccgtttgcgacagtttgcgacaccatgtggtcaggagggtatataaccgcgagtgagccagcgaggagctccattttgcccgcgaattttgaacgagcagcagccatgccggggttctacgagatcgtgctgaaggtgcccagcgacctggacgagcacctgcccggcatttctgactcttttgtgagctgggtggccgagaaggaatgggagctgccgccggattctgacatggacttgaatctgattgagcaggcacccctgaccgtggccgaaaagctgcaacgcgagttcctggtcgagtggcgccgcgtgagtaaggccccggaggccctcttctttgtccagttcgagaagggggacagctacttccacctgcacatcctggtggagaccgtgggcgtcaaatccatggtggtgggccgctacgtgagccagattaaagagaagctggtgacccgcatctaccgcggggtcgagccgcagcttccgaactggttcgcggtgaccaagacgcgtaatggcgccggaggcgggaacaaggtggtggacgactgctacatccccaactacctgctccccaagacccagcccgagctccagtgggcgtggactaacatggaccagtatataagcgcctgtttgaatctcgcggagcgtaaacggctggtggcgcagcatctgacgcacgtgtcgcagacgcaggagcagaacaaggaaaaccagaaccccaattctgacgcgccggtcatcaggtcaaaaacctccgccaggtacatggagctggtcgggtggctggtggaccgcgggatcacgtcagaaaagcaatggatccaggaggaccaggcgtcctacatctccttcaacgccgcctccaactcgcggtcacaaatcaaggccgcgctggacaatgcctccaaaatcatgagcctgacaaagacggctccggactacctggtgggccagaacccgccggaggacatttccagcaaccgcatctaccgaatcctcgagatgaacgggtacgatccgcagtacgcggcctccgtcttcctgggctgggcgcaaaagaagttcgggaagaggaacaccatctggctctttgggccggccacgacgggtaaaaccaacatcgcggaagccatcgcccacgccgtgcccttctacggctgcgtgaactggaccaatgagaactttccgttcaacgattgcgtcgacaagatggtgatctggtgggaggagggcaagatgacggccaaggtcgtagagagcgccaaggccatcctgggcggaagcaaggtgcgcgtggaccaaaagtgcaagtcatcggcccagatcgacccaactcccgtgatcgtcacctccaacaccaacatgtgcgcggtcatcgacggaaactcgaccaccttcgagcaccaacaaccactccaggaccggatgttcaagttcgagctcaccaagcgcctggagcacgactttggcaaggtcaccaagcaggaagtcaaagactttttccggtgggcgtcagatcacgtgaccgaggtgactcacgagttttacgtcagaaagggtggagctagaaagaggcccgcccccaatgacgcagatataagtgagcccaagcgggcctgtccgtcagttgcgcagccatcgacgtcagacgcggaagctccggtggactacgcggacaggtaccaaaacaaatgttctcgtcacgtgggtatgaatctgatgctttttccctgccggcaatgcgagagaatgaatcagaatgtggacatttgcttcacgcacggggtcatggactgtgccgagtgcttccccgtgtcagaatctcaacccgtgtctgtcgtcagaaagcggacgtatcagaaactgtgtccgattcatcacatcatggggagggcgcccgaggtggcctgctcggcctgcgaactggccaatgtggacttggatgactgtgacatggaacaataaatgactcaaaccagatatgactgacggttaccttccagattggctagaggacaacctctctgaaggcgttcgagagtggtgggcgctgcaacctggagcccctaaacccaaggcaaatcaacaacatcaggacaacgctcggggtcttgtgcttccgggttacaaatacctcggacccggcaacggactcgacaagggggaacccgtcaacgcagcggacgcggcagccctcgagcacgacaaggcctacgaccagcagctcaaggccggtgacaacccctacctcaagtacaaccacgccgacgcggagttccagcagcggcttcagggcgacacaccgtttgggggcaacctcggcagagcagtcttccaggccaaaaagagggttcttgaacctcttggtctggttgagcaagcgggtgagacggctcctggaaagaagagaccgttgattgaatccccccagcagcccgactcctccacgggtatcggcaaaaaaggcaagcagccggctaaaaagaagctcgttttcgaagacgaaactggagcaggcgacggaccccctgagggatcaacttccggagccatgtctgatgacagtgagatgcgtgcagcagctggcggagctgcagtcgagggsggacaaggtgccgatggagtgggtaatgcctcgggtgattggcattgcgattccacctggtctgagggccacgtcacgaccaccagcaccagaacctgggtcttgcccacctacaacaaccacctntacaagcgactcggagagagcctgcagtccaacacctacaacggattctccaccccctggggatactttgacttcaaccgcttccactgccacttctcaccacgtgactggcagcgactcatcaacaacaactggggcatgcgacccaaagccatgcgggtcaaaatcttcaacatccaggtcaaggaggtcacgacgtcgaacggcgagacaacggtggctaataaccttaccagcacggttcagatctttgcggactcgtcgtacgaactgccgtacgtgatggatgcgggtcaagagggcagcctgcctccttttcccaacgacgtctttatggtgccccagtacggctactgtggactggtgaccggcaacacttcgcagcaacagactgacagaaatgccttctactgcctggagtactttccttcgcagatgctgcggactggcaacaactttgaaattacgtacagttttgagaaggtgcctttccactcgatgtacgcgcacagccagagcctggaccggctgatgaaccctctcatcgaccagtacctgtggggactgcaatcgaccaccaccggaaccaccctgaatgccgggactgccaccaccaactttaccaagctgcggcctaccaacttttccaactttaaaaagaactggctgcccgggccttcaatcaagcagcagggcttctcaaagactgccaatcaaaactacaagatccctgccaccgggtcagacagtctcatcaaatacgagacgcacagcactctggacggaagatggagtgccctgacccccggacctccaatggccacggctggacctgcggacagcaagttcagcaacagccagctcatctttgcggggcctaaacagaacggcaacacggccaccgtacccgggactctgatcttcacctctgaggaggagctggcagccaccaacgccaccgatacggacatgtggggcaacctacctggcggtgaccagagcaacagcaacctgccgaccgtggacagactgacagccttgggagccgtgcctggaatggtctggcaaaacagagacatttactaccagggtcccatttgggccaagattcctcataccgatggacactttcacccctcaccgctgattggtgggtttgggctgaaacacccgcctcctcaaatttttatcaagaacaccccggtacctgcgaatcctgcaacgaccttcagctctactccggtaaactccttcattactcagtacagcactggccaggtgtcggtgcagattgactgggagatccagaaggagcggtccaaacgctggaaccccgaggtccagtttacctccaactacggacagcaaaactctctgttgtgggctcccgatgcggctgggaaatacactgagcctagggctatcggtacccgctacctcacccaccacctgtaataacctgttaatcaataaaccggtttattcgtttcagttgaactttggtctccgtgtccttcttatcttatctcgtttccatggctactgcgtacataagcagcggcctgcggcgcttgcgcttcgcggtttacaactgccggttaatcagtaacttctggcaaaccatgatgatggagttggccactccctctatgcgcgctcgctcactcactcggccctggagaccaaaggtctccagactgccggcctctggccggcagggccgagtgagtgagcgagcgcgcatagagggagtggccaa

SEQ ID NO: 62 - protein, 3098 aa, Adeno-associated virus
GAATTCGCCCTTTCTACGGCTGCGTCAACTGGACCAATGAGAACTTTCCCTTCAACGATTGCGTCGACAAGATGGTGATCTGGTGGGAGGAGGGCAAGATGACGGCCAAGGTCGTGGAGTCCGCCAAGGCCATTCTCGGCGGCAGCAAGGTGCGCGTGGACCAAAAGTGCAAGTCTTCCGCCCAGATCGATCCCACCCCCGTGATCGTCACTTCCAACACCAACATGTGCGCTGTGATTGACGGGAACAGCACCACCTTCGAGCACCAGCAGCCGTTACAAGACCGGATGTTCAAATTTGAACTCACCCGCCGTCTGGAGCACGACTTTGGCAAGGTGACAAAGCAGGAAGTCAAAGAGTTCTTCCGCTGGGCGCAGGATCACGTGACCGAGGTGGCGCATGAGTTCTACGTCAGAAAGGGTGGAGCCAACAAGAGACCCGCCCCCGATGACGCGGATAAAAGCGAGCCCAAGCGGGCCTGCCCCTCAGTCGCGGATCCATCGACGTCAGACGCGGAAGGAGCTCCGGTGGACTTTGCCGACAGGTACCAAAACAAATGTTCTCGTCACGCGGGCATGCTTCAGATGCTGTTTCCCTGCAAGACATGCGAGAGAATGAATCAGAATTTCAACATTTGCTTCACGCACGGGACCAGAGACTGTTCAGAATGTTTCCCCGGCGTGTCAGAATCTCAACCGGTCGTCAGAAAGAGGACGTATCGGAAACTCTGTGCCATTCATCATCTGCTGGGGCGGGCTCCCGAGATTGCTTGCTCGGCCTGCGATCTGGTCAACGTGGACCTGGATGACCGTGTTTCTGAGCAATAAATGACTTAAACCAGGTATGGCTGCCGATGGTTATCTTCCAGATTGGCTCGAGGACAACCTCTCTGAGGGCATTCGCGAGTGGTGGGACTTGAAACCTGGAGCCCCGAAACCCAAAGCCAACCAGCAAAAGCAGGACGACGGCCGGGGTCTGGTGCTTCCTGGCTACAAGTACCTCGGACCCTTCAACGGACTCGACAAGGGAGAGCCGGTCAACGAGGCAGACGCCGCGGCCCTCGAGCACGACAAGGCCTACGACAAGCAGCTCGAGCAGGGGGACAACCCGTACCTCAAGTACAACCACGCCGACGCCGAGTTTCAGGAGCGTCTTCAAGAAGATACGTCTTTTGGGGGCAACCTCGGGCGAGCAGTCTTCCAGGCCAAGAAGCGGGTTCTCGAACCTCTCGGTCTGGTTGAGGAAGGCGCTAAGACGGCTCCTGGAAAGAAGAGACCCATAGAATCCCCCGACTCCTCCACGGGCATCGGCAAGAAAGGCCAGCAGCCCGCTAAAAAGAAGCTCAACTTTGGGCAGACTGGCGACTCAGAGTCAGTGCCCGACCCCCAACCTCTCGGAGAACCTCCCGCCGCGCCCTCAGGTCTGGGATCTGGTACAATGGCTGCAGGCGGTGGCGCACCAATGGCAGACAATAACGAAGGCGCCGACGGAGTGGGTAATGCCTCCGGAAATTGGCATTGCGATTCCACATGGCTGGGCGACAGAGTCATCACCACCAGCACCCGCACCTGGGCCCTGCCCACCTACAACAACCACCTCTACAAGCAGATATCAAGTCAGAGCGGGGCTACCAACGACAACCACTTCTTCGGCTACAGCACCCCCTGGGGCTATTTTGACTTCAACAGATTCCACTGCCACTTCTCACCACGTGACTGGCAGCGACTCATCAACAACAACTGGGGATTCCGGCCCAGAAAGCTGCGGTTCAAGTTGTTCAACATCCAGGTCAAGGAGGTCACGACGAACGACGGCGTTACGACCATCGCTAATAACCTTACCAGCACGATTCAGGTCTTCTCGGACTCGGAGTACCAACTGCCGTACGTCCTCGGCTCTGCGCACCAGGGCTGCCTCCCTCCGTTCCCTGCGGACGTGTTCATGATTCCTCAGTACGGATATCTGACTCTAAACAACGGCAGTCAGTCTGTGGGACGTTCCTCCTTCTACTGCCTGGAGTACTTTCCTTCTCAGATGCTGAGAACGGGCAATAACTTTGAATTCAGCTACACCTTTGAGGAAGTGCCTTTCCACAGCAGCTATGCGCACAGCCAGAGCCTGGACCGGCTGATGAATCCCCTCATCGACCAGTACCTGTACTACCTGGCCCGGACCCAGAGCACTACGGGGTCCACAAGGGAGCTGCAGTTCCATCAGGCTGGGCCCAACACCATGGCCGAGCAATCAAAGAACTGGCTGCCCGGACCCTGTTATCGGCAGCAGAGACTGTCAAAAAACATAGACAGCAACAACAACAGTAACTTTGCCTGGACCGGGGCCACTAAATACCATCTGAATGGTAGAAATTCATTAACCAACCCGGGCGTAGCCATGGCCACCAACAAGGACGACGAGGACCAGTTCTTTCCCATCAACGGAGTGCTGGTTTTTGGCGAAACGGGGGCTGCCAACAAGACAACGCTGGAAAACGTGCTAATGACCAGCGAGGAGGAGATCAAAACCACCAATCCCGTGGCTACAGAAGAATACGGTGTGGTCTCCAGCAACCTGCAATCGTCTACGGCCGGACCCCAGACACAGACTGTCAACAGCCAGGGGGCTCTGCCCGGCATGGTCTGGCAGAACCGGGACGTGTACCTGCAGGGTCCCATCTGGGCCAAAATTCCTCACACGGACGGCAACTTTCACCCGTCTCCCCTGATGGGCGGATTTGGACTCAAACACCCGCCTCCTCAAATTCTCATCAAAAACACCCCGGTACCTGCTAATCCTCCAGAGGTGTTTACTCCTGCCAAGTTTGCCTCATTTATCACGCAGTACAGCACCGGCCAGGTCAGCGTGGAGATCGAGTGGGAACTGCAGAAAGAAAACAGCAAACGCTGGAATCCAGAGATTCAGTACACCTCAAATTATGCCAAGTCTAATAATGTGGAATTTGCTGTCAACAACGAAGGGGTTTATACTGAGCCTCGCCCCATTGGCACCCGTTACCTCACCCGTAACCTGTAATTGCCTGTTAATCAATAAACCGGTTAATTCGTTTCAGTTGAACTTTGGTCTCTGCGAAGGGCGAATTC

SEQ ID NO: 63 - protein, 728 aa, synthetic construct
  source 1..728: note = Description of Artificial Sequence: Synthetic polypeptide
MAADGYLPDWLEDNLSEGIREWWDLKPGAPKPKANQQKQDDGRGLVLPGYKYLGPFNGLDKGEPVNEADAAALEHDKAYDKQLEQGDNPYLKYNHADAEFQERLQEDTSFGGNLGRAVFQAKKRVLEPLGLVEEGAKTAPGKKRPIESPDSSTGIGKKGQQPAKKKLNFGQTGDSESVPDPQPLGEPPAAPSGLGSGTMAAGGGAPMADNNEGADGVGNASGNWHCDSTWLGDRVITTSTRTWALPTYNNHLYKQISSQSGATNDNHFFGYSTPWGYFDFNRFHCHFSPRDWQRLINNNWGFRPRKLRFKLFNIQVKEVTTNDGVTTIANNLTSTIQVFSDSEYQLPYVLGSAHQGCLPPFPADVFMIPQYGYLTLNNGSQSVGRSSFYCLEYFPSQMLRTGNNFEFSYTFEEVPFHSSYAHSQSLDRLMNPLIDQYLYYLARTQSTTGSTRELQFHQAGPNTMAEQSKNWLPGPCYRQQRLSKNIDSNNNSNFAWTGATKYHLNGRNSLTNPGVAMATNKDDEDQFFPINGVLVFGETGAANKTTLENVLMTSEEEIKTTNPVATEEYGVVSSNLQSSTAGPQTQTVNSQGALPGMVWQNRDVYLQGPIWAKIPHTDGNFHPSPLMGGFGLKHPPPQILIKNTPVPANPPEVFTPAKFASFITQYSTGQVSVEIEWELQKENSKRWNPEIQYTSNYAKSNNVEFAVNNEGVYTEPRPIGTRYLTRNL

SEQ ID NO: 64 - DNA, 2495 bp, Adeno-associated virus
  source 1..2495: mol_type = unassigned DNA
gaattcgccctttctacggctgcgtcaactagaccaatgagaactttcccttcaacgattgcgtcgacaagatggtgatctggtgggaggagggcaagatgacggccaaggtcgtggagtccgccaaggccattcatcatctgctggggcgggctcccgagattgcttgctcggcctgcgatctggtcaacgtggacctggatgactgtgtttctgagcaataaatgacttaaaccaggtatggctgccgatggttatcttccagattggctcgaggacaacctctctgagggcattcgcgagtggtgggacttgaaacctggagccccgaaacccaaagccaaccagcaaaagcaggacgacggccggggtctggtgcttcctggctacaagtacctcggacccttcaacggactcgacaagggagagccggtcaacgaggcagacgccgcggccctcgagcacgacaaggcctacgacaagcagctcgagcagggggacaacccgtacctcaagtacaaccacgccgacgccgagtttcaggagcgtcttcaagaagatacgtcttttgggggcaacctcgggcgagcagtcttccaggccaagaagcgggttctcgaacctctcggtctggttgaggaaggcgctaagacggctcctggaaagaagagacccatagaatcccccgactcctccacgggcatcggcaagaaaggccagcagcccgctaaaaagaagctcaactttgggcagactggcgactcagagtcagtgcccgaccctcaaccaatcggagaaccccccgcaggcccctctggtctgggatctggtacaatggctgcaggcggtggcgctccaatggcagacaataacgaaggcgccgacggagtgggtaatgcctccggaaattggcattgcgattccacatggctgggcgacagagtcatcaccaccagcacccgcacctgggccctgcccacctacaacaaccacctctacaagcagatatcaagtcagagcggggctaccaacgacaaccacttcttcggctacagcaccccctggggctattttgacttcaacagattccactgccacttctcaccacgtgactggcagcgactcatcaacaacaactggggattccggcccagaaagctgcggttcaagttgttcaacatccaggtcaaggaggtcacgacgaacgacggcgttacgaccatcgctaataaccttaccagcacgattcaggtcttctcggactcggagtaccaactgccgtacgtcctcggctctgcgcaccagggctgcctccctccgttccctgcggacgtgttcatgattcctcagtacggatatctgactctaaacaacggcagtcagtctgtgggacgttcctccttctactgcctggagtactttccttctcagatgctgagaacgggcaataactttgaattcagctacacctttgaggaagtgcctttccacagcagctatgcgcacagccagagcctggaccggctgatgaatcccctcatcgaccagtacctgtactacctggcccggacccagagcactacggggtccacaagggagctgcagttccatcaggctgggcccaacaccatggccgagcaatcaaagaactggctgcccggaccctgttatcggcagcagagactgtcaaaaaacatagacagcaacaacaccagtaactttgcctggaccggggccactaaataccatctgaatggtagaaattcattaaccaacccgggcgtagccatggccaccaacaaggacgacgaggaccagttctttcccatcaacggagtgctggtttttggcaaaacgggggctgccaacaagacaacgctggaaaacgtgctaatgaccagcgaggaggagatcaaaaccaccaatcccgtggctacagaacagtacggtgtggtctccagcaacctgcaatcgtctacggccggaccccagacacagactgtcaacagccagggggctctgcccggcatggtctggcagaaccgggacgtgtacctgcagggtcccatctgggccaaaattcctcacacggacggcaactttcacccgtctcccctgatgggcggatttggactcaaacacccgcctcctcaaattctcatcaaaaacaccccggtacctgctaatcctccagaggtgtttactcctgccaagtttgcctcatttatcacgcagtacagcaccggccaggtcagcgtggagatcgagtgggaactgcagaaagaaaacagcaaacgctggaatccagagattcagtacacctcaaattatgccaagtctaataatgtggaatttgctgtcaacaacgaaggggtttatactgagcctcgccccattggcacccgttacctcacccgtaacctgtaattgcctgttaatcaataaaccggttaattcgtttcagttgaactttggtctctgcgaagggcgaattc

SEQ ID NO: 65 - protein, 728 aa, synthetic construct
  source 1..728: note = Description of Artificial Sequence: Synthetic polypeptide
MAADGYLPDWLEDNLSEGIREWWDLKPGAPKPKANQQKQDDGRGLVLPGYKYLGPFNGLDKGEPVNEADAAALEHDKAYDKQLEQGDNPYLKYNHADAEFQERLQEDTSFGGNLGRAVFQAKKRVLEPLGLVEEGAKTAPGKKRPIESPDSSTGIGKKGQQPAKKKLNFGQTGDSESVPDPQPIGEPPAGPSGLGSGTMAAGGGAPMADNNEGADGVGNASGNWHCDSTWLGDRVITTSTRTWALPTYNNHLYKQISSQSGATNDNHFFGYSTPWGYFDFNRFHCHFSPRDWQRLINNNWGFRPRKLRFKLFNIQVKEVTTNDGVTTIANNLTSTIQVFSDSEYQLPYVLGSAHQGCLPPFPADVFMIPQYGYLTLNNGSQSVGRSSFYCLEYFPSQMLRTGNNFEFSYTFEEVPFHSSYAHSQSLDRLMNPLIDQYLYYLARTQSTTGSTRELQFHQAGPNTMAEQSKNWLPGPCYRQQRLSKNIDSNNTSNFAWTGATKYHLNGRNSLTNPGVAMATNKDDEDQFFPINGVLVFGKTGAANKTTLENVLMTSEEEIKTTNPVATEQYGVVSSNLQSSTAGPQTQTVNSQGALPGMVWQNRDVYLQGPIWAKIPHTDGNFHPSPLMGGFGLKHPPPQILIKNTPVPANPPEVFTPAKFASFITQYSTGQVSVEIEWELQKENSKRWNPEIQYTSNYAKSNNVEFAVNNEGVYTEPRPIGTRYLTRNL

SEQ ID NO: 66 - DNA, 2504 bp, Adeno-associated virus
  source 1..2504: mol_type = unassigned DNA
gaattcgccctttctacggctgcgtcaactggaccaatgagaactttcccttcaacgattgcgtcgacaagatggtgatctggtgggaggagggcaagatgacggccaaggtcgtggagtccgccaaggccattcatcatctgctggggcgggctcccgagattgcttgctcggcctgcgatctggtcaacgtggacctggatgactgtgtttctgagcaataaatgacttaaaccaggtatggctgccgatggttatcttccagattggctcgaggacaacctctctgagggcattcgcgagtggtgggacttgaaacctggagccccgaaacccaaagccaaccagcaaaagcaggacgacggccggggtctggtgcttcctggctacaagtacctcggacccttcaacggactcgacaagggagagccggtcaacgaggcagacgccgcggccctcgagcacgacaaggcctacgacaagcagctcgagcagggggacaacccgtacctcaagtacaaccacgccgacgccgagtttcaggagcgtcttcaagaagatacgtcttttgggggcaacctcgggcgagcagtcttccaggccaagaagcgggttctcgaacctctcggtctggttgaggaaggcgctaagacggctcctggaaagaagagacccatagaatcccccgactcctccacgggcatcggcaagaaaggccagcagcccgctaaaaagaagctcaactttgggcagactggcgactcagagtcagtgcccgaccctcaaccaatcggagaaccccccgcaggcccctctggtctgggatctggtacaatggctgcaggcggtggcgctccaatggcagacaataacgaaggcgccgacggagtgggtaatgcctccggaaattggcattgcgattccacatggctgggcgacagagtcatcaccaccagcacccgcacctgggccctgcccacctacaacaaccacctctacaagcagatatcaagtcagagcggggctaccaacgacaaccacttcttcggctacagcaccccctggggctattttgacttcaacagattccactgccacttctcatcacgtgactggcagcgactcatcaacaacaactggggattccggcccaagagactcaacttcaagctcttcaacatccaggtcaaggaggtcacgcagaatgaaggcaccaagaccatcgccaataaccttaccagcacgattcaggtctttacggactcggaataccggctcccgtacgtcctcggctctgcgcaccagggctgcctgcctccgttcccggcggacgtcttcatgattcctcagtacgggtacctgactctgaacaacggcagtcaggccgtgggccgttcctccttctactgcctggagtactttccttctcaaatgctgagaacgggcaacaactttgagttcagctaccagtttgaggacgtgccttttcacagcagctacgcgcacagccaaagcctggaccggctgatgaaccccctcatcgaccagtacctgtactacctgtctcggactcagtccacgggaggtaccgcaggaactcagcagttgctattttctcaggccgggcctaataacatgtcggctcaggccaaaaactggctacccgggccctgctaccggcagcaacgcgtctccacgacactgtcgcaaaataacaacagcaactttgcttggaccggtgccaccaagtatcatctgaatggcagagactctctggtaaatcccggtgtcgctatggcaacgcacaaggacgacgaagagcgattttttccatccagcggagtcttgatgtttgggaaacagggagctggaaaagacaacgtggactatagcagcgttatgctaaccagtgaggaagaaatcaaaaccaccaacccagtggccacagaacagtacggcgtggtggccgataacctgcaacagcaaaacgccgctcctattgtaggggccgtcaacagtcaaggagccttacctggcatggtctggcagaaccgggacgtgtacctgcagggtcctatctgggccaagattcctcacacggacggcaactttcatccttcgccgctgatgggaggctttggactgaaacacccgcctcctcagatcctgattaagaatacacctgttcccgcggatcctccaactaccttcagtcaagccaagccggcgtcgttcatcacgcagtacagcaccggacaggtcagcgtggaaattgaatgggagctgcagaaagagaacagcaagcgctggaacccagagattcagtatacttccaactactacaaatctacaaatgtggactttgctgtcaatactgagggtacttattcagagcctcgccccattggcacccgttacctcacccgtaacctgtaattgcctgttaatcaataaaccggttaattcgtttcagttgaactttggtctctgcgaagggcgaattc

SEQ ID NO: 67 - protein, 731 aa, synthetic construct
  source 1..731: note = Description of Artificial Sequence: Synthetic polypeptide
MAADGYLPDWLEDNLSEGIREWWDLKPGAPKPKANQQKQDDGRGLVLPGYKYLGPFNGLDKGEPVNEADAAALEHDKAYDKQLEQGDNPYLKYNHADAEFQERLQEDTSFGGNLGRAVFQAKKRVLEPLGLVEEGAKTAPGKKRPIESPDSSTGIGKKGQQPAKKKLNFGQTGDSESVPDPQPIGEPPAGPSGLGSGTMAAGGGAPMADNNEGADGVGNASGNWHCDSTWLGDRVITTSTRTWALPTYNNHLYKQISSQSGATNDNHFFGYSTPWGYFDFNRFHCHFSSRDWQRLINNNWGFRPKRLNFKLFNIQVKEVTQNEGTKTIANNLTSTIQVFTDSEYRLPYVLGSAHQGCLPPFPADVFMIPQYGYLTLNNGSQAVGRSSFYCLEYFPSQMLRTGNNFEFSYQFEDVPFHSSYAHSQSLDRLMNPLIDQYLYYLSRTQSTGGTAGTQQLLFSQAGPNNMSAQAKNWLPGPCYRQQRVSTTLSQNNNSNFAWTGATKYHLNGRDSLVNPGVAMATHKDDEERFFPSSGVLMFGKQGAGKDNVDYSSVMLTSEEEIKTTNPVATEQYGVVADNLQQQNAAPIVGAVNSQGALPGMVWQNRDVYLQGPIWAKIPHTDGNFHPSPLMGGFGLKHPPPQILIKNTPVPADPPTTFSQAKPASFITQYSTGQVSVEIEWELQKENSKRWNPEIQYTSNYYKSTNVDFAVNTEGTYSEPRPIGTRYLTRNL

SEQ ID NO: 68 - DNA, 3128 bp, Adeno-associated virus
  source 1..3128: mol_type = unassigned DNA
gaattcgccctttctacggctgcgtcaactggaccaatgagaactttcccttcaacgattgcgtcgacaagatggtgatctggtgggaggagggcaagatgacggccaaggtcgtggagtccgccaaggccattctcggcggcagcaaggtgcgcgtggaccaaaagtgcaagtcttccgcccagatcgatcccacccccgtgatcgtcacttccaacaccaacatgtgcgccgtgattgacgggaacagcaccaccttcgagcaccagcagccgttacaagaccggatgttcaaatttgaactcacccgccgtctggagcacgactttggcaaggtgacaaagcaggaagtcaaagagttcttccgctgggcgcaggatcacgtgaccgaggtggcgcatgagttctacgtcagaaagggtggagccaacaagagacccgcccccgatgacgcggataaaagcgagcccaagcgggcctgcccctcagtcgcggatccatcgacgtcagacgcggaaggagctccggtggactttgccgacaggtaccaaaacaaatgttctcgtcacgcgggcatgcttcagatgctgtttccctgcaagacatgcgagagaatgaatcagaatttcaacatttgcttcacgcacgggaccagagactgttcagaatgtttccccggcgtgtcagaatctcaaccggtcgtcagaaagaggacgtatcggaaactctgtgccattcatcatctgctagggcgggctcccgagattgcttgctcggcctgcgatctggtcaacgtggacctggatgactgtgtttctgagcaataaatgacttaaaccaggtatggctgccgatggttatcttccagattggctcgaggacaacctctctgagggcattcgcgagtggtgggacttgaaacctggagccccgaaacccaaagccaaccagcaaaagcaggacgacggccggggtctggtgcttcctggctacaagtacctcggacccttcaacggactcgacaagggggagcccgtcaacgcggcggacgcagcggccctcgagcacgacaaggcctacgaccagcagctcaaagcgggtgacaatccgtacctgcggtataaccacgccgacgccgagtttcaggagcgtctgcaagaagatacgtcttttgggggcaacctcgggcgagcagtcttccaggccaagaagcgggttctcgaacctctcggtctggttgaggaaggcgctaagacggctcctggaaagaagagaccggtagagccatcaccccagcgttctccagactcctctacgggcatcggcaagacaggccagcagcccgcgaaaaagagactcaactttgggcagactggcgactcagagtcagtgcccgaccctcaaccaatcggagaaccccccgcaggcccctctggtctgggatctggtacaatggctgcaggcggtggcgctccaatggcagacaataacgaaggcgccgacggagtgggtagttcctcaggaaattggcattgcgattccacatggctgggcgacagagtcatcaccaccagcacccgaacctgggccctccccacctacaacaaccacctctacaagcaaatctccaacgggacatcgggaggaagcaccaacgacaacacctacttcggctacagcaccccctgggggtattttgactttaacagattccactgccacttctcaccacgtgactggcagcgactcatcaacaacaactggggattccggcccaagagactcaacttcaagctcttcaacatccaggtcaaggaggtcacgcagaatgaaggcaccaagaccatcgccaataaccttaccagcacgattcaggtctttacggactcggaataccagctcccgtacgtcctcggctctgcgcaccagggctgcctgcctccgttcccggcggacgtcttcatgattcctcagtacgggtacctgactctgaacaacggcagtcaggccgtgggccgttcctccttctactgcctggagtactttccttctcaaatgctgagaacgggcaacaactttgagttcagctaccagtttgaggacgtgccttttcacagcagctacgcgcacagccaaagcctggaccggctgatgaaccccctcatcgaccagtacctgtactacctgtctcggactcagtccacgggaggtaccgcaggaactcagcagttgctattttctcaggccgggcctaataacatgtcggctcaggccaaaaactggctacccgggccctgctaccggcagcaacgcgtctccacgacactgtcgcaaaataacaacagcaactttgcttggaccggtgccaccaagtatcatctgaatggcagagactctctggtaaatcccggtgtcgctatggcaacgcacaaggacgacgaagagcgattttttccatccagcggagtcttgatgtttgggaaacagggagctggaaaagacaacgtggactatagcagcgttatgctaaccagtgaggaagaaatcaaaaccaccaacccagtggccacagaacagtacggcgtggtggccgataacctgcaacagcaaaacgccgctcctattgtaggggccgtcaacagtcaaggagccttacctggcatggtctggcagaaccgggacgtgtacctgcagggtcctatctgggccaagattcctcacacggacggcaactttcatccttcgccgctgatgggaggctttggactgaaacacccgcctcctcagatcctgattaagaatacacctgttcccgcggatcctccaactaccttcagtcaagccaagctggcgtcgttcatcacgcagtacagcaccggacaggtcagcgtggaaattgaatgggagctgcagaaagagaacagcaagcgctggaacccagagattcagtatacttccaactactacaaatctacaaatgtggactttgctgtcaatactgagggtacttattcagagcctcgccccattggcacccgttacctcacccgtaacctgtaattgcctgttaatcaataaaccggctaattcgtttcagttgaactttggtctctgcgaagggcgaattc

SEQ ID NO: 69 - protein, 738 aa, synthetic construct
  source 1..738: note = Description of Artificial Sequence: Synthetic polypeptide
MAADGYLPDWLEDNLSEGIREWWDLKPGAPKPKANQQKQDDGRGLVLPGYKYLGPFNGLDKGEPVNAADAAALEHDKAYDQQLKAGDNPYLRYNHADAEFQERLQEDTSFGGNLGRAVFQAKKRVLEPLGLVEEGAKTAPGKKRPVEPSPQRSPDSSTGIGKTGQQPAKKRLNFGQTGDSESVPDPQPIGEPPAGPSGLGSGTMAAGGGAPMADNNEGADGVGSSSGNWHCDSTWLGDRVITTSTRTWALPTYNNHLYKQISNGTSGGSTNDNTYFGYSTPWGYFDFNRFHCHFSPRDWQRLINNNWGFRPKRLNFKLFNIQVKEVTQNEGTKTIANNLTSTIQVFTDSEYQLPYVLGSAHQGCLPPFPADVFMIPQYGYLTLNNGSQAVGRSSFYCLEYFPSQMLRTGNNFEFSYQFEDVPFHSSYAHSQSLDRLMNPLIDQYLYYLSRTQSTGGTAGTQQLLFSQAGPNNMSAQAKNWLPGPCYRQQRVSTTLSQNNNSNFAWTGATKYHLNGRDSLVNPGVAMATHKDDEERFFPSSGVLMFGKQGAGKDNVDYSSVMLTSEEEIKTTNPVATEQYGVVADNLQQQNAAPIVGAVNSQGALPGMVWQNRDVYLQGPIWAKIPHTDGNFHPSPLMGGFGLKHPPPQILIKNTPVPADPPTTFSQAKLASFITQYSTGQVSVEIEWELQKENSKRWNPEIQYTSNYYKSTNVDFAVNTEGTYSEPRPIGTRYLTRNL

SEQ ID NO: 70 - DNA, 3084 bp, Adeno-associated virus
  source 1..3084: mol_type = unassigned DNA
gaattcgccctttctacggctgcatcaactggaccaatgagaactttcccttcaacgattgcgtcgacaagatggtgatctggtgggaggagggcaagatgacggccaaggtcgtggagtccgccaaggccattctcggcggcagcaaggtgcgcgtggaccaaaagtgcaagtcgtccgcccagatcgaccccacccccgtgatcgtcacctccaacaccaacatgtgcgccgtgattgacgggaacagcaccaccttcgagcaccagcagccgttgcaggaccggatgttcaagttcgaactcacccgccgtctggagcacgactttggcaaggtgaccaagcaggaagtcaaagagttcttccgctgggcgcaggatcacgtgaccgaggtggcgcatgagttctacgtcagaaagggcggagccagcaaaagacccgcccccgatgacgcggatataagcgagcccaagcgggcctgcccctcagtcgcggatccatcgacgtcagacgcggaaggagctccggtggactttgccgacaggtaccaaaacaaatgttctcgtcacgcgggcatgcttcagatgctgtttccctgcaaaacgtgcgagaaaatgaatcagaatttcaacatttgcttcacgcacggggtcagagactgctcagaatgtttccccggtgcatcagaatctcaaccggtcgtcagaaaaaaaacgtatcagaaactgtgtgccattcatcatctgctggggcgggcacccgagattgcttgctcggcctgcgatctggtcaacgtggacctggacgactgtgtttctgagcaataaatgacttaaaccaggtatggctgccgatggttatcttccagattggcttgaggacaacctctctgagggcattcgcgagtggtgggacctgaaacctggagccccgaaacccaaagccaaccagcaaaagcaggacgacggccggggtctggtgcttcctggctacaagtacctcggacccttcaacggactcgacaagggggagcccgtcaacgcggcggacgcagcggccctcgagcacgacaaggcctacgaccagcagctcaaagcgggtgacaatccgtacctgcggtataaccacgccgacgccgagtttcaggagcgtctgcaagaagatacgtcttttgggggcaacctcgggcgagcagtcttccaggccaagaagcgggttctcgaacctctcggtctggttgaggaaggcgctaagacggctcctggaaagaagagaccggtagagccatcacctcagcgttcccccgactcctccacgggcatcggcaagaaaggccaccagcccgcgagaaagagactgaactttgggcagactggcgactcggagtcagtccccgaccctcaaccaatcggagaaccaccagcaggcccctctggtctgggatctggtacaatggctgcaggcggtggcgctccaatggcagacaataacgaaggcgccgacggagtgggtagttcctcaggaaattggcattgcgattccacatggctgggcgacagagtcatcaccaccagcacccgaacctgggccctgcccacctacaacaaccatctctacaagcaaatctccaacgggacatcgggaggaagcactaacgacaacacctactttggctacagcaccccctgggggtattttgacttcaacagattccactgccacttctcaccacgtgactggcagcgactcatcaacaataactggggattccggcccaagagactcaacttcaagctcttcaacatccaggtcaaggaggtcacgcagaatgaaggcaccaagaccatcgccaataaccttaccagcacgattcaggtgtttacggactcggaataccagctcccgtacgtccccggctctgcgcaccagggctgcctccctccgttcccggcggacgtcttcatgattcctcagtacgggtatctgaccctaaacaatggcagtcaggctgtgggccgttcctccttctactgcctggaatacttcccttctcaaatgctgaggacgggcaacaactttgaattcagctacaccttcgaggacgtgcctttccacagcagctacgcgcacagccagagcctggaccggctgatgaaccctctcatcgaccagtacctgtattacttatccagaactcagtccacaggaggaactcaaggtactcagcaattgttattttctcaagccgggcccgcaaacatgtcggctcaggccaagaactggctacctggaccgtgttaccgtcagcaacgagtttccacgacactgtcgcaaaacaacaacagcaattttgcttggaccggtgccaccaagtatcacctgaatggcagagactccctggttaatcccggcgttgccatggctacccacaaggacgacgaggagcgcttcttcccgtcaagcggagttctaatgtttggcaagcagggggctggaaaagacaatgtggactacagcagcgtgatgctcaccagcgaagaagaaattaaaactactaacccagtggctacagagcagtatggtgtggtggcagacaacctgcagcagaccaacggagctcccattgtgggaactgtcaacagccagggggccttacctggtatggtctggcaaaaccgggacgtgtacctgcagggccccatctgggccaaaattcctcacacggacggcaactttcatccttcgccgctgatgggaggctttggactgaaacacccgcctcctcagatcctggtgaaaaacactcctgttcctgcggatcctccgaccaccttcagccaggccaagctggcttcttttatcacgcagtacagcaccggacaggtcagcgtggaaatcgaatgggagctgcagaaagaaaacagcaagcgctggaacccagagattcagtatacttccaactactacaaatctacaaatgtggactttgctgtcaatactgagggtacttattcagagcctcgccccattggcactcgttatctcacccgtaatctgtaattgcttgttaatcaataaaccggt

SEQ ID NO: 71 - protein, 738 aa, synthetic construct
  source 1..738: note = Description of Artificial Sequence: Synthetic polypeptide
MAADGYLPDWLEDNLSEGIREWWDLKPGAPKPKANQQKQDDGRGLVLPGYKYLGPFNGLDKGEPVNAADAAALEHDKAYDQQLKAGDNPYLRYNHADAEFQERLQEDTSFGGNLGRAVFQAKKRVLEPLGLVEEGAKTAPGKKRPVEPSPQRSPDSSTGIGKKGHQPARKRLNFGQTGDSESVPDPQPIGEPPAGPSGLGSGTMAAGGGAPMADNNEGADGVGSSSGNWHCDSTWLGDRVITTSTRTWALPTYNNHLYKQISNGTSGGSTNDNTYFGYSTPWGYFDFNRFHCHFSPRDWQRLINNNWGFRPKRLNFKLFNIQVKEVTQNEGTKTIANNLTSTIQVFTDSEYQLPYVPGSAHQGCLPPFPADVFMIPQYGYLTLNNGSQAVGRSSFYCLEYFPSQMLRTGNNFEFSYTFEDVPFHSSYAHSQSLDRLMNPLIDQYLYYLSRTQSTGGTQGTQQLLFSQAGPANMSAQAKNWLPGPCYRQQRVSTTLSQNNNSNFAWTGATKYHLNGRDSLVNPGVAMATHKDDEERFFPSSGVLMFGKQGAGKDNVDYSSVMLTSEEEIKTTNPVATEQYGVVADNLQQTNGAPIVGTVNSQGALPGMVWQNRDVYLQGPIWAKIPHTDGNFHPSPLMGGFGLKHPPPQILVKNTPVPADPPTTFSQAKLASFITQYSTGQVSVEIEWELQKENSKRWNPEIQYTSNYYKSTNVDFAVNTEGTYSEPRPIGTRYLTRNL

SEQ ID NO: 72 - DNA, 3123 bp, Adeno-associated virus
  source 1..3123: mol_type = unassigned DNA
gaattcgcccttggctgcgtcaactggaccaatgagaactttcccttcaacgattgcgtcgacaagatggtgatctggtgggaggagggcaagatgacggccaaggtcgtggagtccgccaaggccattctcggcggcagcaaggtgcgcgtggaccaaaagtgcaagtcgtccgcccagatcgaccccacccccgtgatcgtcacctccaacaccaacatgtgcgccgtgattgacgggaacagcaccaccttcgagcaccagcagccgttgcaggaccggatgttcaagttcgaactcacccgccgtctggagcacgactttggcaaggtgaccaagcaggaagtcaaagagttcttccgctgggcgcaggatcacgtgaccgaggtggcgcatgagttctacgtcagaaagggcggagccagcaaaagacccgcccccgatgacgcggatataagcgagcccaagcgggcctgcccctcagtcgcggatccatcgacgtcagacgcggaaggagctccggtggactttgccgacaggtaccaaaacaaatgttctcgtcacgcgggcatgctccagatgctgtttccctgcaaaacgtgcgagagaatgaatcagaatttcaacatttgcttcacgcacggggtcagagactgctcagaatgtttccccggtgcatcagaatctcaaccggtcgtcagaaaaaaaacgtatcagaaactgtgtgccattcatcatctgctggggcgggcacccgagattgcttgctcggcctgcgatctggtcaacgtggacctggacgactgtgtttctgagcaataaatgacttaaaccaggtatggctgccgatggttatcttccagattggcttgaggacaacctctctgagggcattcgcgagtggtgggacctgaaacctggagccccgaaacccaaagccaaccagcaaaagcaggacgacggccggggtctggtgcttcctggctacaagtacctcggacccttcaacggactcgacaagggggagcccgtcaacgcggcggacgcagcggccctcgagcacgacaaggcctacgaccagcagctcaaagcgggtgacaatccgtacctgcggtataaccacgccgacgccgagtttcaggagcgtctgcaagaagatacgtcttttgggggcaacctcgggcgagcagtcttccaggccaagaagcgggttctcgaacctctcggtctggttgaggaaggcgctaagacggctcctggaaagaagagaccggtagagccatcacctcagcgttcccccgactcctccacgggcatcggcaagaaaggccaccagcccgcgagaaagagactgaactttgggcagactggcgactcggagtcagtccccgaccctcaaccaatcggagaaccaccagcaggcccctctggtctgggatctggtacaatggctgcaggcggtggcgctccaatggcagacaataacgaaggcgccgacggagtgggtagttcctcaggaaattggcattgcgattccacatggctgggcgacagagtcatcaccaccagcacccgaacctgggccctgcccacctacaacaaccatctctacaagcaaatctccaacgggacatcgggaggaagcactaacgacaacacctactttggctacagcaccccctgggggtattttgacttcaacagattccactgccacttctcaccacgtgactggcagcgactcatcaacaataactggggattccggcccaagagactcaacttcaagctcttcaacatccaggtcaaggaggtcacgcagaatgaaggcaccaagaccatcgccaataaccttaccagcacgattcaggtgtttacggactcggaataccagctcccgtacgtcctcggctctgcgcaccagggctgcctccctccgttcccggcggacgtcttcatgattcctcagtacgggtatctgaccctaaacaatggcagtcaggctgtgggccgttcctccttctactgcctggaatacttcccttctcaaatgctgaggacgggcaacaactttgaattcagctacaccttcgaggacgtgcctttccacagcagctacgcgcacagccagagcctggaccggctgatgaaccctctcatcgaccagtacctgtattacttatccagaactcagtccacaggaggaactcaaggtactcagcaattgttattttctcaagccgggcccgcaaacatgtcggctcaggccaagaactggctacctggaccgtgttaccgtcagcaacgagtttccacgacactgtcgcaaaacaacaacagcaattttgcttggaccggtgccaccaagtatcacctgaatggcagagactccctggttaatcccggcgttgccatggctacccacaaggacgacgaggagcgcttcttcccgtcaagcggagttctaatgtttggcaagcagggggctggaaaagacaatgtggactacagcagcgtgatgctcaccagcgaagaagaaattaaaactactaacccagtggctacagagcagtatggtgtggtggcagacaacctgcagcagaccaacggagctcccattgtgggaactgtcaacagccagggggccttacctggtatggtctggcaaaaccgggacgtgtacctgcagggccccatctgggccaaaattcctcacacggacggcaactttcatccttcgccgctgatgggaggctttggactgaaacacccgcctcctcagatcctggtgaaaaacactcctgttcctgcggatcctccgaccaccttcagccaggccaagctggcttcttttatcacgcagtacagcaccggacaggtcagcgtggaaatcgaatgggagctgcagaaagaaaacagcaagcgctggaacccagagattcagtatacttccaactactacaaatctacaaatgtggactttgctgtcaatactgagggtacttattcagagcctcgccccattggcactcgttatctcacccgtaatctgtaattgcttgttaatcaataaaccggttaattcgtttcagttgaactttggtctctgcgaagggcgaattc

SEQ ID NO: 73 - protein, 738 aa, synthetic construct
  source 1..738: note = Description of Artificial Sequence: Synthetic polypeptide
MAADGYLPDWLEDNLSEGIREWWDLKPGAPKPKANQQKQDDGRGLVLPGYKYLGPFNGLDKGEPVNAADAAALEHDKAYDQQLKAGDNPYLRYNHADAEFQERLQEDTSFGGNLGRAVFQAKKRVLEPLGLVEEGAKTAPGKKRPVEPSPQRSPDSSTGIGKKGHQPARKRLNFGQTGDSESVPDPQPIGEPPAGPSGLGSGTMAAGGGAPMADNNEGADGVGSSSGNWHCDSTWLGDRVITTSTRTWALPTYNNHLYKQISNGTSGGSTNDNTYFGYSTPWGYFDFNRFHCHFSPRDWQRLINNNWGFRPKRLNFKLFNIQVKEVTQNEGTKTIANNLTSTIQVFTDSEYQLPYVLGSAHQGCLPPFPADVFMIPQYGYLTLNNGSQAVGRSSFYCLEYFPSQMLRTGNNFEFSYTFEDVPFHSSYAHSQSLDRLMNPLIDQYLYYLSRTQSTGGTQGTQQLLFSQAGPANMSAQAKNWLPGPCYRQQRVSTTLSQNNNSNFAWTGATKYHLNGRDSLVNPGVAMATHKDDEERFFPSSGVLMFGKQGAGKDNVDYSSVMLTSEEEIKTTNPVATEQYGVVADNLQQTNGAPIVGTVNSQGALPGMVWQNRDVYLQGPIWAKIPHTDGNFHPSPLMGGFGLKHPPPQILVKNTPVPADPPTTFSQAKLASFITQYSTGQVSVEIEWELQKENSKRWNPEIQYTSNYYKSTNVDFAVNTEGTYSEPRPIGTRYLTRNL

SEQ ID NO: 74 - DNA, 3122 bp, Adeno-associated virus
  source 1..3122: mol_type = unassigned DNA
gaattcgccctttctacggctgcgtcaactggaccaatgagaactttcccttcaacgattgcgtcgacaagatggtgatctggtgggaggagggcaagatgacggccaaggtcgtggagtccgccaaggccattctcggcggcagcaaggtgcgtgtggaccaaaagtgcaagtcttccgcccagatcgatcccacccccgtgatcgtcacctccaacaccaacatgtgcgccgtgattgacgggaacagcgccaccttcgagcaccagcagccgttgcaggaccggatgttcaaatttgaactcacccgccgtctggagcatgactttggcaaggtgacgaagcaggaagtcaaagagttcttccgctgggcgcaggatcacgtgaccgaggtggcgcatgagttccacgtcagaaagggtggagccaacaagagacccgcccccgatgacgcggatataagcgagcccaagcgggcctgcccctcagtcgcggatccatcgacgtcagacgcggaaggagctccggtggactttgccgacaggtaccaaaacaaatgttctcgtcacgcgggcatgcttcagatgctgtttccctgcaagacatgcgagagaatgaatcagaatttcaacatttgcttcacgcacgggaccagagactgttcagaatgtttccccggcgtgtcagaatctcaaccggtcgtcagaaagaggacgtatcggaaactctgtgcgattcatcatctgctggggcgggctcccgagattgcttgctcggcctgcgatctggtcaacgtggacctggatgactgtgtttctgagcaataaatgacttaaaccaggtatggctgccgatggttatcttccagattggctcgaggacaacctctctgagggcattcgcgagtggtgggacttgaaacctggagccccgaaacccaaagccaaccagcaaaagcaggacgacggccggggtctggtgcttcctggctacaagtacctcggacccttcaacggactcgacaagggggagcccgtcaacgcggcggacgcagcggccctcgagcacgacaaagcctacgaccagcagctcaaagcgggtgacaatccgtacctgcggtataatcacgccgacgccgagtttcaggagcgtctgcaagaagatacgtcttttgggggcaacctcgggcgagcagtcttccaggccaagaagcgggttctcgaacctctcggtctggttgaggaaggcgctaagacggctcctggaaagaagagactggtagagcagtcgccacaagagccagactcctcctcgggcatcggcaagacaggccagcagcccgctaaaaagagactcaattttggtcagactggcgactcagagtcagtccccgacccacaacctctcggagaacctccagcagccccctcaggtctgggacctaatacaatggcttcaggcggtggcgctccaatggcagacaataacgaaggcgccgacggagtgggtaattcctcgggaaattggcattgcgattccacatggctgggggacagagtcatcaccaccagcacccgaacctgggccctgcccacctacaacaaccacctctacaagcaaatctccaacggcacctcgggaggaagcaccaacgacaacacctattttggctacagcaccccctgggggtattttgacttcaacagattccactgtcacttttcaccacgtgactggcaacgactcatcaacaacaattggggattccggcccaaaagactcaacttcaagctgttcaacatccaggtcaaggaagtcacgacgaacgaaggcaccaagaccatcgccaataatctcaccagcaccgtgcaggtctttacggactcggagtaccagttaccgtacgtgctaggatccgctcaccagggatgtctgcctccgttcccggcggacgtcttcacggttcctcagtacggctatttaactttaaacaatggaagccaagccctgggacgttcctccttctactgtctggagtatttcccatcgcagatgctgagaaccggcaacaactttcagttcagctacaccttcgaggacgtgcctttccacagcagctacgcgcacagccagagcctggacaggctgatgaatcccctcatcgaccagtacctgtactacctggtcagaacgcaaacgactggaactggagggacgcagactctggcattcagccaagcgggtcctagctcaatggccaaccaggctagaaattgggtgcccggaccttgctaccggcagcagcgcgtctccacgacaaccaaccagaacaacaacagcaactttgcctggacgggagctgccaagtttaagctgaacggccgagactctctaatgaatccgggcgtggcaatggcttcccacaaggatgacgacgaccgcttcttcccttcgagcggggtcctgatttttggcaagcaaggagccgggaacgatggagtggattacagccaagtgctgattacagatgaggaagaaatcaaggctaccaaccccgtggccacagaagaatatggagcagtggccatcaacaaccaggccgccaatacgcaggcgcagaccggactcgtgcacaaccagggggtgattcccggcatggtgtggcagaatagagacgtgtacctgcagggtcccatctgggccaaaattcctcacacggacggcaactttcacccgtctcccctgatgggcggctttggactgaagcacccgcctcctcaaattctcatcaagaacacaccggttccagcggacccgccgcttaccttcaaccaggccaagctgaactctttcatcacgcagtacagcaccggacaggtcagcgtggaaatcgagtgggagctgcagaaagaaaacagcaaacgctggaatccagagattcaatacacttccaactactacaaatctacaaatgtggactttgctgtcaacacggaaggagtttatagcgagcctcgccccattggcacccgttacctcacccgcaacctgtaattacatgttaatcaataaaccggttaattcgtttcagttgaactttggtctctgcgaagggcgaattc

SEQ ID NO: 75 - protein, 736 aa, synthetic construct
  source 1..736: note = Description of Artificial Sequence: Synthetic polypeptide
MAADGYLPDWLEDNLSEGIREWWDLKPGAPKPKANQQKQDDGRGLVLPGYKYLGPFNGLDKGEPVNAADAAALEHDKAYDQQLKAGDNPYLRYNHADAEFQERLQEDTSFGGNLGRAVFQAKKRVLEPLGLVEEGAKTAPGKKRLVEQSPQEPDSSSGIGKTGQQPAKKRLNFGQTGDSESVPDPQPLGEPPAAPSGLGPNTMASGGGAPMADNNEGADGVGNSSGNWHCDSTWLGDRVITTSTRTWALPTYNNHLYKQISNGTSGGSTNDNTYFGYSTPWGYFDFNRFHCHFSPRDWQRLINNNWGFRPKRLNFKLFNIQVKEVTTNEGTKTIANNLTSTVQVFTDSEYQLPYVLGSAHQGCLPPFPADVFTVPQYGYLTLNNGSQALGRSSFYCLEYFPSQMLRTGNNFQFSYTFEDVPFHSSYAHSQSLDRLMNPLIDQYLYYLVRTQTTGTGGTQTLAFSQAGPSSMANQARNWVPGPCYRQQRVSTTTNQNNNSNFAWTGAAKFKLNGRDSLMNPGVAMASHKDDDDRFFPSSGVLIFGKQGAGNDGVDYSQVLITDEEEIKATNPVATEEYGAVAINNQAANTQAQTGLVHNQGVIPGMVWQNRDVYLQGPIWAKIPHTDGNFHPSPLMGGFGLKHPPPQILIKNTPVPADPPLTFNQAKLNSFITQYSTGQVSVEIEWELQKENSKRWNPEIQYTSNYYKSTNVDFAVNTEGVYSEPRPIGTRYLTRNL

SEQ ID NO: 76 - DNA, 3117 bp, Adeno-associated virus
  source 1..3117: mol_type = unassigned DNA
gaattcgcccttggctgcgtcaactggaccaatgagaactttcccttcaacgattgcgtcgacaagatggtgatctggtgggaggagggcaagatgacggccaaggtcgtggagtccgccaaggccattctcggcggcagcaaggtgcgtgtggaccaaaagtgcaagtcttccgcccagatcgatcccacccccgtgatcgtcacctccaacaccaacatgtgcgccgtgattgacgggaacagcaccaccttcgagcaccagcagccgttgcaggaccggatgttcaaatttgaactcacccgccgtctggagcatgactttggcaaggtgacgaagcaggaagtcaaagagttcttccgctgggcgcaggatcacgtgaccgaggtggcgcatgagttccacgtcagaaagggtggagccaacaagagacccgcccccgatgacgcggatataagcgagcccaagcgggcctgcccctcagtcgcggatccatcgacgtcagacgcggaaggagctccggtggactttgccgacaggtaccaaaacaaatgttctcgtcacgcgggcatgcttcagatgctgtttccctgcaagacatgcgagagaatgaatcagaatttcaacatttgcttcacgcacgggaccagagactgttcagaatgtttccccggcgtgtcagaatctcaaccggtcgtcagaaagaggacgtatcggaaactctgtgcgattcatcatctgctggggcgggctcccgagattgcttgctcggcctgcgatctggtcaacgtggacctggatgactgtgtttctgagcaataaatgacttaaaccaggtatggctgccgatggttatcttccagattggctcgaggacaacctctctgagggcattcgcgagtggtgggacttgaaacctggagccccgaaacccaaagccaaccagcaaaagcaggacgacggccggggtctggtgcttcctggctacaagtacctcggacccttcaacggactcgacaagggggagcccgtcaacgcggcggacgcagcggccctcgagcacgacaaagcctacgaccagcagctcaaagcgggtgacaatccgtacctgcggtataatcacgccgacgccgagtttcaggagcgtctgcaagaagatacgtcttttgggggcaacctcgggcgagcagtcttccaggccaagaagcgggttctcgaacctctcggtctggttgaggaaggcgctaagacggctcctggaaagaagagaccggtagagcagtcgccacaagagccagactcctcctcgggcatcggcaagacaggccagcagcccgctaaaaagagactcaattttggtcagactggcgactcagagtcagtccccgacccacaacctctcggagaacctccagcagccccctcaggtctgggacctaatacaatggcttcaggcggtggcgctccaatggcagacaataacgaaggcgccgacggagtgggtaattcctcgggaaattggcattgcgattccacatggctgggggacagagtcatcaccaccagcacccgaacctgggccctgcccacctacaacaaccacctctacaagcaaatctccaacggcacctcgggaggaagcaccaacgacaacacctattttggctacagcaccccctgggggtattttgacttcaacagattccactgtcacttttcaccacgtgactggcaacgactcatcaacaacaattggggattccggcccaaaagactcaacttcaagctgttcaacatccaggtcaaggaagtcacgacgaacgaaggcaccaagaccatcgccaataatctcaccagcaccgtgcgggtctttacggactcggagtaccagttaccgtacgtgctaggatccgctcaccagggatgtctgcctccgttcccggcggacgtcttcatggttcctcagtacggctatttaactttaaacaatggaagccaagccctgggacgttcctccttctactgtctggagtatttcccatcgcagatgctgagaaccggcaacaactttcagttcagctacaccttcgaggacgtgcctttccacagcagctacgcgcacagccagagcctggacaggctgatgaatcccctcatcgaccagtacctgtactacctggtcagaacgcaaacgactggaactggagggacgcagactctggcattcagccaagcgggtcctagctcaatggccaaccaggctagaaattgggtgcccggaccttgctaccggcagcagcgcgtctccacgacaaccaaccagagcaacaacagcaactttgcctggacgggagctgccaagtttaagctgaacggccgagactctctaatgaatccgggcgtggcaatggcttcccacaaggatgacgacgaccgcttcttcccttcgagcggggtcctgatttttggcaagcaaggagccgggaacgatggagtggattacagccaagtgctgattacagatgaggaagaaatcaaggctaccaaccccgtggccacagaagaatatggagcagtggccatcaacaaccaggccgccaatacgcaggcgcagaccggactcgtgcacaaccagggggtgattcccggcatggtgtggcagaatagagacgtgtacctgcagggtcccatctgggccaaaattcctcacacggacggcaactttcacccgtctcccctgatgggcggctttggactgaagcacccgcctcctcaaattctcatcaagaacacaccggttccagcggacccgccgcttaccttcaaccaggccaagctgaactctttcatcacgcagtacagcaccggacaggtcagcgtggaaatcgagtgggagctgcagaaagaaaacagcaaacgctggaatccagagattcaatacacttccaactactacaaatctacaaatgtggactttgctgtcaacacggaaggagtttatagcgagcctcgccccattggcacccgttacctcacccgcaacctgtaattacatgttaatcaataaaccggttaattcgtttcagttgaactttggtctctgcgaagggcgaattc

SEQ ID NO: 77 - protein, 736 aa, synthetic construct
  source 1..736: note = Description of Artificial Sequence: Synthetic polypeptide
MAADGYLPDWLEDNLSEGIREWWDLKPGAPKPKANQQKQDDGRGLVLPGYKYLGPFNGLDKGEPVNAADAAALEHDKAYDQQLKAGDNPYLRYNHADAEFQERLQEDTSFGGNLGRAVFQAKKRVLEPLGLVEEGAKTAPGKKRPVEQSPQEPDSSSGIGKTGQQPAKKRLNFGQTGDSESVPDPQPLGEPPAAPSGLGPNTMASGGGAPMADNNEGADGVGNSSGNWHCDSTWLGDRVITTSTRTWALPTYNNHLYKQISNGTSGGSTNDNTYFGYSTPWGYFDFNRFHCHFSPRDWQRLINNNWGFRPKRLNFKLFNIQVKEVTTNEGTKTIANNLTSTVRVFTDSEYQLPYVLGSAHQGCLPPFPADVFMVPQYGYLTLNNGSQALGRSSFYCLEYFPSQMLRTGNNFQFSYTFEDVPFHSSYAHSQSLDRLMNPLIDQYLYYLVRTQTTGTGGTQTLAFSQAGPSSMANQARNWVPGPCYRQQRVSTTTNQSNNSNFAWTGAAKFKLNGRDSLMNPGVAMASHKDDDDRFFPSSGVLIFGKQGAGNDGVDYSQVLITDEEEIKATNPVATEEYGAVAINNQAANTQAQTGLVHNQGVIPGMVWQNRDVYLQGPIWAKIPHTDGNFHPSPLMGGFGLKHPPPQILIKNTPVPADPPLTFNQAKLNSFITQYSTGQVSVEIEWELQKENSKRWNPEIQYTSNYYKSTNVDFAVNTEGVYSEPRPIGTRYLTRNL

SEQ ID NO: 78 - DNA, 3121 bp, Adeno-associated virus
  source 1..3121: mol_type = unassigned DNA
gaattcgcccttctacggctgcgtcaactggaccaatgagaactttcccttcaacgattgcgtcgacaagatggtgatctggtgggaggagggcaagatgacggccaaggtcgtggagtccgccaaggccattctcggcggcagcaaggtgcgtgtggaccaaaagtgcaagtcttccgcccagatcgatcccacccccgtgatcgtcacctccaacaccaacatgtgcgccgtgattgacgggaacagcaccaccttcgagcaccagcagccgttgcaggaccggatgttcaaatttgaactcacccgccgtctggagcatgactttggcaaggtgacgaagcaggaagtcaaagagttcttccgctgggcgcaggatcacgtgaccgaggtggcgcatgagttccacgtcagaaagggtggcgccaacaagagacccgcccccgatgacgcggatataagcgagcccaagcgggcctgcccctcagtcgcggatccatcgacgtcagacgcggaaggagctccggtggactttgccgacaggtaccaaaacaaatgttctcgtcacgcgggcatgcttcagatgctgtttccctgcaagacatgcgagagaatgaatcagaatttcaacatttgcttcacgcacgggaccagagactgttcagaatgtttccccggcgtgtcagaatctcaaccggtcgtcagaaagaggacgtatcggaaactctgtgcgattcatcatctgctggggcgggctcccgagattgcttgctcggcctgcgatctggtcaacgtggacctggatgactgtgtttctgagcaataaatgacttaaaccaggtatggctgccgatggttatcttccagattggctcgaggacaacctctctgagggcattcgcgagtggtgggacttgaaacctggagccccgaaacccaaagccaaccagcaaaagcaggacgacggccggggtctggtgcttcctggctacaagtacctcggacccttcaacggactcgacaagggggagcccgtcaacgcggcggacgcagcggccctcgagcacgacaaagcctacgaccagcagctcaaagcgggtgacaatccgtacctgcggtataatcacgccgacgccgagtttcaggagcgtctgcaagaagatacgtcctttgggggcaacctcgggcgagcagtcttccaggccaagaagcgggttctcgaacctctcggtctggttgaggaaggcgctaagacggctcctggaaagaagagaccggtagagcagtcgccacaagagccagactcctcctcgggcatcggcaagacaggccagcagcccgctaaaaagagactcaattttggtcagactggcgactcagagtcagtccccgacccacaacctctcggagaacctccagcagccccctcaggtctgggacctaatacaatggcttcaggcggtggcgctccaatggcagacaataacgaaggcgccgacggagtgggtaattcctcgggaaattggcattgcgattccacatggctgggggacagagtcatcaccaccagcacccgaacctgggccctgcccacctacaacaaccacctctacaagcaaatctccaacggcacctcgggaggaagcaccaacgacaacacctattttggctacagcaccccctgggggtattttgacttcaacagattccactgtcacttttcaccacgtgactggcaacgactcatcaacaacaattggggattccggcccaaaagactcaacttcaagctgttcaacatccaggtcaaggaagtcacgacgaacgaaggcaccaagaccatcgccaataatctcaccagcaccgtgcaggtctttacggacttggagtaccagttaccgtacgtgctaggatccgctcaccagggatgtctgcctccgttcccggcggacgtcttcatggttcctcagtacggctatttaactttaaacaatggaagccaagccctgggacgttcctccttctactgtctggagtatttcccatcgcagatgccgagaaccggcaacaactttcagttcagctacaccttcgaggacgtgcctttccacagcagctacgcgcacagccagagcctggacaggctgatgaatcccctcatcgaccagtacctgtactacctggtcagaacgcaaacgactggaactggagggacgcagactctggcattcagccaagcgggtcctagctcaatggccaaccaggctagaaattgggtgcccggaccttgctaccggcagcagcgcgtctccacgacaaccaaccagaacaacaacagcaactttgcctggacgggagctgccaagtttaagctgaacggccgagactctctaatgaatccgggcgtggcaatggcttcccacaaggatgacgacgaccgcttcttcccttcgagcggggtcctgatttttggcaagcaaggagccgggaacgatggagtggattacagccaagtgctgattacagatgaggaagaaatcaaggctaccaaccccgtggccacagaagaatatggagcagtggccatcaacaaccaggccgccaatacgcaggcgcagaccggactcgtgcacaaccagggggtgattcccggcatggtgtggcagaatagagacgtgtacctgcagggtcccatctgggccaaaattcctcacacggacggcaactttcacccgtctcccctgatgggcggctttggactgaagcacccgcctcctcaaattctcatcaagaacacaccggttccagcggacccgccgcttaccttcaaccaggccaagctgaactctttcatcacgcagtacagcaccggacaggtcagcgtggaaatcgagtgggagctgcagaaagaaaacagcaaacgctggaatccagagattcaatacacttccaactactacaaatctacaaatgtggactttgctgtcaacacggaaggagtttatagcgagcctcgccccattggcacccgttacctcacccgcaacctgtaattacatgttaatcaataaaccggttaattcgtttcagttgaactttggtctctgcgaagggcgaattc

SEQ ID NO: 79 - protein, 736 aa, synthetic construct
  source 1..736: note = Description of Artificial Sequence: Synthetic polypeptide
MAADGYLPDWLEDNLSEGIREWWDLKPGAPKPKANQQKQDDGRGLVLPGYKYLGPFNGLDKGEPVNAADAAALEHDKAYDQQLKAGDNPYLRYNHADAEFQERLQEDTSFGGNLGRAVFQAKKRVLEPLGLVEEGAKTAPGKKRPVEQSPQEPDSSSGIGKTGQQPAKKRLNFGQTGDSESVPDPQPLGEPPAAPSGLGPNTMASGGGAPMADNNEGADGVGNSSGNWHCDSTWLGDRVITTSTRTWALPTYNNHLYKQISNGTSGGSTNDNTYFGYSTPWGYFDFNRFHCHFSPRDWQRLINNNWGFRPKRLNFKLFNIQVKEVTTNEGTKTIANNLTSTVQVFTDLEYQLPYVLGSAHQGCLPPFPADVFMVPQYGYLTLNNGSQALGRSSFYCLEYFPSQMPRTGNNFQFSYTFEDVPFHSSYAHSQSLDRLMNPLIDQYLYYLVRTQTTGTGGTQTLAFSQAGPSSMANQARNWVPGPCYRQQRVSTTTNQNNNSNFAWTGAAKFKLNGRDSLMNPGVAMASHKDDDDRFFPSSGVLIFGKQGAGNDGVDYSQVLITDEEEIKATNPVATEEYGAVAINNQAANTQAQTGLVHNQGVIPGMVWQNRDVYLQGPIWAKIPHTDGNFHPSPLMGGFGLKHPPPQILIKNTPVPADPPLTFNQAKLNSFITQYSTGQVSVEIEWELQKENSKRWNPEIQYTSNYYKSTNVDFAVNTEGVYSEPRPIGTRYLTRNL

SEQ ID NO: 80 - DNA, 3122 bp, Adeno-associated virus
  source 1..3122: mol_type = unassigned DNA
gaattcgccctttctacggctgcgtcaactggaccaatgagaactttcccttcaacgattgcgtcgacaagatggtgatctggtgggaggagggcaagatgacggccaaggtcgtggagtccgccaaggccattctcggcggcagcaaggtgcgtgtggaccaaaagtgcaagtcttccgcccagatcgatcccacccccgtgatcgtcacctccaacaccaacatgtgcgccgtgattgacgggaacagcaccaccttcgagcaccagcagccgttgcaggaccggatgttcaaatttgaactcacccgccgtctggagcatgactttggcaaggtgacgaagcaggaagtcaaagggttcttccgctgggcgcaggatcacgtgaccgaggtggcgcatgagttccacgtgcgagcccaagcgggcctgcccctcagtcgcggatccatcgacgtcagaccagaaagggtggagccaacaagagacccgcccccgatgacgcggatataagcggaaggagctccggtggactttgccgacaggtaccaaaacaaatgttctcgtcacgcgggcatgcttcagatgctgtttccctgcaagacatgcgagagaatgaatcagaatttcaacatttgcttcacgcacgggaccagagactgttcagaatgtttccccggcgtgtcagaatctcaaccggtcgtcagaaagaggacgtatcggaaactctgtgcgattcatcatctgctggggcgggctcccgagattgcttgctcggcctgcgatctggtcaacgtggacctggatgactgtgtttctgagcaataaatgacttaaaccaggtatggctgccgatggttatcttccagattggctcgaggacaacctctctgagggcattcgcgagtggtgggacttgaaacctggagccccgaaacccaaagccaaccagcaaaagcaggacgacggccggggtctggtgcttcctggctacaagtacctcggacccttcaacggactcgacaagggggagcccgtcaacgcggcggacgcagcggccctcgagcacgacaaagcctacgaccagcagctcaaagcgggtgacaatccgtacctgcggtataatcacgccgacgccgagtttcaggagcgtctgcaagaagatacgtcttttgggggcaacctcgggcgagcagtcttccaggccaagaagcgggttctcgaacctctcggtctggttgaggaaggcgctaagacggctcctggaaagaagagaccggtagagcagtcgccacaagagccagactcctcctcgggcatcggcaagacaggccagcagcccgctaaaaagagactcaattttggtcagactggcgactcagagtcagtccccgacccacaacctctcggagaacctccagcagccccctcaggtctgggacctaatacaatggcttcaggcggtggcgctccaatggcagacaataacgaaggcgccgacggagtgggtaattcctcgggaaattggcattgcgattccacatggctgggggacagagtcatcaccaccagcacccgaacctgggccctgcccacctacaacaaccacctctacaagcaaatctccaacggcacctcgggaggaagcaccaacgacaacacctattttggctacagcaccccctgggggtattttgacttcaacagattccactgtcacttttcaccacgtgactggcaacgactcatcaacaacaattggggattccggcccaaaagactcaacttcaagctgttcaacatccaggtcaaggaagtcacgacgaacgaaggcaccaagaccatcgccaataatctcaccagcaccgtgcaggtctttacggactcggagtaccagttaccgtacgtgctaggatccgctcaccagggatgtctgcctccgttcccggcggacgtcttcatggttcctcagtacggctatttaactttaaacaatggaagccaagccctgggacgttcctccttctactgtctggagtatttcccatcgcagatgctgagaaccggcaacaactttcagttcagctacaccttcgaggacgtgcctttccacagcagctacgcgcacagccagagcctggacaggctgatgaatcccctcatcgaccagtacctgtactacctggtcagaacgcaaacgactggaactggagggacgcagactctggcattcagccaagcgggtcctagctcaatggccaaccaggctagaaattgggtgcccggaccttgctaccggcagcagcgcgtctccacgacaaccaaccagaacaacaacagcaactttgcctggacgggagctgccaagtttaagctgaacggccgagactctctaatgaatccgggcgtggcaatggcttcccacaaggatgacgacgaccgcttcttcccttcgagcggggtcctgatttttggcaagcaaggagccgggaacgatggagtggattacagccaagtgctgattacagatgaggaagaaatcaaggctaccaaccccgtggccacagaagaatatggagcagtggccatcaacaaccaggccgccaatacgcaggcgcagaccggactcgtgcacaaccagggggtgattcccggcatggtgtggcagaatagagacgtgtacctgcagggtcccatctgggccaaaattcctcacacggacggcaactttcacccgtctcccctgatgggcggctttggactgaagcacccgcctcctcaaattctcatcaagaacacaccggttccagcggacccgccgcttaccttcaaccaggccaagctgaactctttcatcacgcagtacagcaccggacaggtcagcgtggaaatcgagtgggagctgcagaaagaaaacagcaaacgctggaatccagagattcaatacacttccaactactacaaatctacaaatgtggactttgctgtcaacacggagggggtttatagcgagcctcgccccattggcacccgttacctcacccgcaacctgtaattacatgttaatcaataaaccggttaattcgtttcagttgaactttggtctctgcgaagggcgaattc

SEQ ID NO: 81 - protein, 736 aa, synthetic construct
  source 1..736: note = Description of Artificial Sequence: Synthetic polypeptide
MAADGYLPDWLEDNLSEGIREWWDLKPGAPKPKANQQKQDDGRGLVLPGYKYLGPFNGLDKGEPVNAADAAALEHDKAYDQQLKAGDNPYLRYNHADAEFQERLQEDTSFGGNLGRAVFQAKKRVLEPLGLVEEGAKTAPGKKRPVEQSPQEPDSSSGIGKTGQQPAKKRLNFGQTGDSESVPDPQPLGEPPAAPSGLGPNTMASGGGAPMADNNEGADGVGNSSGNWHCDSTWLGDRVITTSTRTWALPTYNNHLYKQISNGTSGGSTNDNTYFGYSTPWGYFDFNRFHCHFSPRDWQRLINNNWGFRPKRLNFKLFNIQVKEVTTNEGTKTIANNLTSTVQVFTDSEYQLPYVLGSAHQGCLPPFPADVFMVPQYGYLTLNNGSQALGRSSFYCLEYFPSQMLRTGNNFQFSYTFEDVPFHSSYAHSQSLDRLMNPLIDQYLYYLVRTQTTGTGGTQTLAFSQAGPSSMANQARNWVPGPCYRQQRVSTTTNQNNNSNFAWTGAAKFKLNGRDSLMNPGVAMASHKDDDDRFFPSSGVLIFGKQGAGNDGVDYSQVLITDEEEIKATNPVATEEYGAVAINNQAANTQAQTGLVHNQGVIPGMVWQNRDVYLQGPIWAKIPHTDGNFHPSPLMGGFGLKHPPPQILIKNTPVPADPPLTFNQAKLNSFITQYSTGQVSVEIEWELQKENSKRWNPEIQYTSNYYKSTNVDFAVNTEGVYSEPRPIGTRYLTRNL

SEQ ID NO: 82 - DNA, 2370 bp, Adeno-associated virus
  source 1..2370: mol_type = unassigned DNA
gaattcgccctttctacggctgcgtcaactggaccaatgagaactttcccttcaacgattgcgtcgacaagatggtgatctggtgggaggagggcaagatgacggccaaggtcgtggagtccgccaaggccattctcggcggcagcaaggtgcgcgtggaccaaaagtgcaagtcgtccgcccagatcgaccccacccccgtgatcgtcacctccaacaccaacatgtgcgccgtgattgacgggaacagcaccaccttcgagcaccagcagccgttgcaggaccggatgttcaagttcgaactcacccgccgtctggagcacgactttggcaaggtgaccaagcaggaagtcaaagagttcttccgctgggcgcaggatcacgtgaccgaggtggcgcatgagttctacgtcagaaagggcggagccagcaaaagacccgcccccgatgacgcggatataagcgagcccaagcgggcctgcccctcagtcgcggatccatcgacgtcagacgcggaaggagctccggtggactttgccgacaggtaccaaaacaaatgttctcgtcacgcgggcatgcttcagacgctgtttccctgcaaaacgtgcgagagaatgaatcagaatttcaacatttgcttcacgcacggggtcagagactgctcagaatgtttccccggtgcatcagaatctcaaccggtcgtcagaaaaaaaacgtatcagaaactgtgtgccattcatcatctgctggggcgggcacccgagattgcttgctcggcctgcgatctggtcaacgtggacctggacgactgtgtttctgagcaataaatgacttaaaccaggtatggctgccgatggttatcttccagattggcttgaggacaacctctctgagggcattcgcgagtggtgggacctgaaacctggagccccgaaacccaaagccaaccagcaaaagcaggacgacggccggggtctggtgcttcctggctacaagtacctcggacccttcaacggactcgacaagggggagcccgtcaacgcggcggacgcagcggccctcgagcacgacaaggcctacgaccagcagctcaaagcgggtgacaatccgtacctgcggtataaccacgccgacgccgagtttcaggagcgtctgcaagaagatacgtcttttgggggcaacctcgggcgagcagtcttccaggccaagaagcgggttctcgaacctctcggtctggttgaggaaggcgctaagacggctcctggaaagaagagaccggtagagccatcacctcagcgttcccccgactcctccacgggcatcggcaagaaaggccaccagcccgcgagaaagagactgaactttgggcagactggcgactcggagtcagtccccgaccctcaaccaatcggagaaccaccagcaggcccctctggtctgggatctggtacaatggctgcaggcggtggcgctccaatggcagacaataacgaaggcgccgacggagtgggtagttcctcaggaaattggcattgcgattccacatggctgggcgacagagtcatcaccaccagcacccgaacctgggccctgcccacctacaacaaccatctctacaagcaaatctccaacgggacatcgggaggaagcactaacgacaacacctactttggctacagcaccccctgggggtattttgacttcaacagattccactgccacttctcaccacgtgactggcagcgactcatcaacaataactggggattccggcccaagagactcaacttcaagctcttcaacatccaggtcaaggaggtcacgcagaatgaaggcaccaagaccatcgccaataaccttaccagcacgattcaggtgtttacggactcggaataccagctcccgtacgtcctcggctctgcgcaccagggctgcctccctccgttcccggcggacgtcttcatgattcctcagtacgggtatctgaccctaaacaatggcagtcaggctgtgggccgttcctccttctactgcctggaatacttcccttctcaaatgctgaggacgggcaacaactttgaattcagctacaccttcgaggacgtgcctttccacagcagctacgcgcacagccagagcctggaccggctgatgaaccctctcatcgaccagtacctgtattacttatccagaactcagtccacaggaggaactcaaggtactcagcaattgttattttctcaagccgggcccgcaaacatgtyggctcaggccaagaactggctacctggaccgtgttaccgtcagcaacgagtttccacgacactgtcgcaaaacaacaacagcaattttgctggaccggtgccacca

SEQ ID NO: 83 - protein, 738 aa, synthetic construct; identical to SEQ ID NO: 73
  source 1..738: note = Description of Artificial Sequence: Synthetic polypeptide

SEQ ID NO: 84 - DNA, 2205 bp, Adeno-associated virus
  source 1..2205: mol_type = unassigned DNA
atgactgacggttaccttccagattggctagaggacaacctctctgaaggcgttcgagagtggtgggcgctgcaacctggagcccctaaacccaaggcaaatcaacaacatcaggacaacgctcggggtcttgtgcttccgggttacaaatacctcggacccggcaacggactcgacaagggggaacccgtcaacgcagcggacgcggcagccctcgagcacgacaaggcctacgaccagcagctcaaggccggtgacaacccctacctcaagtacaaccacgccgacgcggagttccagcagcggcttcagggcgacacatcgtttgggggcaacctcggcagagcagtcttccaggccaaaaagagggttcttgaacctcttggtctggttgagcaagcgggtgagacggctcctggaaagaagagaccgttgattgaatccccccagcagcccgactcctccacgggtatcggcaaaaaaggcaagcagccggctaaaaagaagctcgttttcgaagacgaaactggagcaggcgacggaccccctgagggatcaacttccggagccatgtctgatgacagtgagatgcgtgcagcagctggcggagctgcagtcgagggcggacaaggtgccgatggagtgggtaatgcctcgggtgattggcattgcgattccacctggtctgagggccacgtcacgaccaccagcaccagaacctgggtcttgcccacctacaacaaccacctctacaagcgactcggagagagcctgcagtccaacacctacaacggattctccaccccctggggatactttgacttcaaccgcttccactgccacttctcaccacgtgactggcagcgactcatcaacaacaactggggcatgcgacccaaagccatgcgggtcaaaatcttcaacatccaggtcaaggaggtcacgacgtcgaacggcgagacaacggtggctaataaccttaccagcacggttcagatctttgcggactcgtcgtacgaactgccgtacgtgatggatgcgggtcaagagggcagcctgcctccttttcccaacgacgtctttatggtgccccagtacggctactgtggactggtgaccggcaacacttcgcagcaacagactgacagaaatgccttctactgcctggagtactttccttcgcagatgctgcggactggcaacaactttgaaattacgtacagttttgagaaggtgcctttccactcgatgtacgcgcacagccagagcctggaccggctgatgaaccctctcatcgaccagtacctgtggggactgcaatcgaccaccaccggaaccaccctgaatgccgggactgccaccaccaactttaccaagctgcggcctaccaacttttccaactttaaaaagaactggctgcccgggccttcaatcaagcagcagggcttctcaaagactgccaatcaaaactacaagatccctgccaccgggtcagacagtctcatcaaatacgagacgcacagcactctggacggaagatggagtgccctgacccccggacctccaatggccacggctggacctgcggacagcaagttcagcaacagccagctcatctttgcggggcctaaacagaacggcaacacggccaccgtacccgggactctgatcttcacctctgaggaggagctggcagccaccaacgccaccgatacggacatgtggggcaacctacctggcggtgaccagagcaacagcaacctgccgaccgtggacagactgacagccttgggagccgtgcctggaatggtctggcaaaacagagacatttactaccagggtcccatttgggccaagattcctcataccgatggacactttcacccctcaccgctgattggtgggtttgggctgaaacacccgcctcctcaaatttttatcaagaacaccccggtacctgcgaatcctgcaacgaccttcagctctactccggtaaactccttcattactcagtacagcactggccaggtgtcggtgcagattgactgggagatccagaaggagcggtccaaacgctggaaccccgaggtccagtttacctccaactacggacagcaaaactctctgttgtgggctcccgatgcggctgggaaatacactgagcctagggctatcggtacccgctacctcacccaccacctgtaa

SEQ ID NO: 85 - protein, 734 aa, Adeno-associated virus; identical to SEQ ID NO: 57

SEQ ID NO: 86 - DNA, 3128 bp, Adeno-associated virus
  source 1..3128: mol_type = unassigned DNA
gaattcgccctttctacggctgcgtcaactggaccaatgagaactttcccttcaacgattgcgtcgacaagatgttgatctggtgggaggagggcaagatgacggccaaggtcgtggagtccgccaaggccattctcggcggcagcaaagtgcgcgtggaccaaaagtgcaagccgtccgcccagatcgaccccacccccgtgatcgtcacctccaacaccaacatgtgcgccgtgattgacgggaacagcaccaccttcgagcaccagcagccgttgcgggaccggatgttcaagtttgaactcacccgccgtctggagcacgactttggcaaggtgacaaagcaggaagtcagagagttcttccgctgggcgcaggatcacgtgaccgaggtggcgcacgagttctacgtcagaaagggtggagccaacaagagacccgcccccgatgacgcggataaaagcgagcccaagcgggcctgcccctcagtcgcggatccatcgacgtcagacgcggaaggagctccggtggactttgccgacaggtaccaaaacaaatgttctcgtcacgcgggcatgcttcagatgctgtttccctgcaaaacatgcgagagaatgaatcagaatttcaacatttgcttcacgcacgggaccagagactgttcagaatgtttccccggcgtgtcagaatctcaaccggtcgtcagaaaaaagacgtatcggaaactctgtgcgattcatcatctgctggggcgggcacccgagattgcttgctcggcctgcgatctggtcaacgtggacctagatgactgtgtttctgagcaataaatgacttaaaccaggtatggctgccgatggttatcttccagattggctcgaggacaacctctctgagggcattcgcgagtggtgggacttgaaacctggagccccgaaacccaaagccaaccagcaaaagcaggacgacggccggggtctggtgcttcctggctacaagtacctcggacccttcaacggactcgacaagggggagcccgtcaacgcggcggacgcagcggccctcgagcacgacaaggcctacgaccagcagctcaaagcgggtgacaatccgtacctgcggtataaccacgccgacgccgagtttcaggagcgtctgcaagaagatacgtcttttgggggcaacctcgggcgagcagtcttccaggccaagaagcgggttctcgaacctctcggtctggttgaggaaggcgctaagacggctcctggaaagaagagaccggtagagccatcaccccagcgttctccagactcctctacgggcatcggcaagaaaggccagcagcccgcgaaaaagagactcaactttgggcagactggcgactcagagtcagtgcccgaccctcaaccaatcggagaaccccccgcaggcccctctggtctgggatctggtacaatggctgcaggcggtggcgctccaatggcagacaataacgaaggcgccgacggagtgggtagttcctcaggaaattggcattgcgattccacatggctgggcgacagagtcatcaccaccagcacccgaacctgggccctccccacctacaacaaccacctctacaagcaaatctccaacgggacttcgggaggaagcaccaacgacaacacctacttcggctacagcaccccctgggggtattttgactttaacagattccactgccacttctcaccacgtgactggcagcgactcatcaacaacaactggggattccggcccaagagactcaacttcaagctcttcaacatccaggtcaaggaggtcacgcagaatgaaggcaccaagaccatcgccaataaccttaccagcacgattcaggtctttacggactcggaataccagctcccgtacgtcctcggctctgcgcaccagggctgcctgcctccgttcccggcggacgtcttcatgattcctcagtacgggtacctgactctgaacaatggcagtcaggccgtgggccgttcctccttctactgcctggagtactttccttctcaaatgctgagaacgggcaacaactttgagttcagctaccagtttgaggacgtgccttttcacagcagctacgcgcacagccaaagcctggaccggctgatgaaccccctcatcgaccagtacctgtactacctgtctcggactcagtccacgggaggtaccgcaggaactcagcagttgctattttctcaggccgggcctaataacatgtcggctcaggccaaaaactggctacccgggccctgctaccggcagcaacgcgtctccacgacactgtcgcaaaataacaacagcaactgtaaatcccggtgtcgctatggcaacccacaaggacgacgaagagcgattttgcctggaccggtgccaccaagtatcatctgaatggcagagactctctgttttccgtccagcggagtcttaatgtttgggaaacagggagctggaaaagacaacgtggactatagcagcgttatgctaaccagtgaggaagaaattaaaaccaccaacccagtggccacggaacagtacggcgtggtggccgataacctgcaacagcaaaacgccgctcctattgtaggggccgtcaacagtcaaggagccttacctggcatggtctggcagaaccgggacgtgtacctgcagggtcctatctgggccaagattcctcacacggacggaaactttcatccctcgccgctgatgggaggctttggactgaaacacccgcctcctcagatcctgattaagaatacacctgttcccgcggatcctccaactaccttcagtcaagctaagctggcgtcgttcatcacgcagtacagcaccggacaggtcagcgtggaaattgaatgggagctgcagaaagaaaacagcaaacgctggaacccagagattcaatacacttccaactactacaaatctacaaatgtggacttcgctgttaacacagatggcacttattctgagcctcgccccattggcacccgttacctcacccgtaatctgtaattgctcgttaatcaataaaccggttgattcgtttcagttgaactttggtctctgcgaagggcgaattc

SEQ ID NO: 87 - protein, 738 aa, synthetic construct; identical to SEQ ID NO: 7
  source 1..738: note = Description of Artificial Sequence: Synthetic polypeptide

SEQ ID NO: 88 - DNA, 3128 bp, Adeno-associated virus
  source 1..3128: mol_type = unassigned DNA
gaattcgccctttctacggctgcgtcaactggaccaatgagaactttcccttcaacgattgcgtcgacaagatggtgatctggtgggaggagggcaagatgacggccaaggtcgtggagtccgccaaggccattctcggcggcagcaaagtgcgcgtggaccaaaagtgcaagtcgtccgcccagatcgaccccacccccgtgatcgtcacctccaacaccaacatgtgcgccgtgattgacgggaacagcaccaccttcgagcaccagcagccgttgcaggaccggatgttcaagtttgaactcacccgccgtctggagcacgactttggcaaggtgacaaagcaggaagtcagagagttcttccgctgggcgcaggatcacgtgaccgaggtggcgcacgagttctacgtcagaaagggtggagccaacaagagacccgcccccgatgacgcggataaaagcgagcccaagcgggcctgcccctcagtcgcggatccatcgacgtcagacgcggaaggagctccggtggactttgccgacaggtaccaaaacaaatgttctcgtcacgcgggcatgcttcagatgctgtttccctgcaaaacatgcgagagaatgaatcagaatttcaacatttgcttcacgcacgggaccagagactgttcagaatgtttccccggcgtgtcagaatctcaaccggttgtcagaaaaaagacgtatcggaaactctgtgcgattcatcatctgctggggcgggcacccgagattgcttgctcggcctgcgatctggtcaacgtggacctagatgactgtgtttctgagcaataaatgacttaaaccaggtatggctgccgatggttatcttccagattggctcgaggacaacctctctgagggcattcgcgagtggtgggacttgaaacctggagccccgaaacccaaagccaaccagcaaaagcaggacgacggccggggtctggtgcttcctggctacaagtacctcggacccttcaacggactcgacaagggggagcccgtcaacgcggcggacgcagcggccctcgagcacgacaaggcctacgaccagcagctcaaagcgggtgacaatccgtacctgcggtataaccacgccgacgccgagtttcaggagcgtctgcaagaagatacgtcttttgggggcaacctcgggcgagcagtcttccaggccaagaagcgggttctcgaacctctcggtctggttgaggaaggcgctaagacggctcctggaaagaagagaccggtagagccatcaccccagcgttctccagactcctctacgggcatcggcaagaaaggccagcagcccgcgaaaaagagactcaactttgggcagactggcgactcagagtcagtgcccgaccctcaaccaatcggagaaccccccgcaggcccctctggtctgggatctggtacaatggctgcaggcggtggcgctccaatggcagacaataacgaaggcgccgacggagtgggtagttcctcaggaaattggcattgcgattccacatggctgggcgacagagtcatcaccaccagcacccgaacctgggccctccccacctacaacaaccacctctacaagcaaatctccaacgggacttcgggaggaagcaccaacgacaacacctacttcggctacagcaccccctgggggtattttgactttaacagattccactgccacttctcaccacgtgactggcagcgactcatcaacaacaactggggattccggcccaagagacccaacttcaagctcttcaacatccaggtcaaggaggtcacgcagaatgaaggcaccaagaccatcgccaataaccttaccagcacgattcaggtctttacggactcggaataccagctcccgtacgtcctcggctctgcgcaccagggctgcctgcctccgttcccggcggacgtcttcatgattcctcagtacgggtacctgactctgaacaatggcagtcaggccgtgggccgttcctccttctactgcctggagtactttccttctcaaatgctgagaacgggcaacaactttgagttcagctaccagtttgaggacgtgccttttcacagcagctacgcgcacagccaaagcctggaccggctgatgaaccccctcatcgaccagtacctgtactacctgtctcggactcagtccacgggaggtaccgcaggaactcagcagttgctattttctcaggccgggcctaataacatgtcggctcaggccaaaaactggctacccgggccctgctaccggcagcaacgcgtctccacgacactgtcgcaaaataacaacagcaactttgcctggaccggtgccaccaagtatcatctgaatggcagagactctctggtaaatcccggtgtcgctatggcaacccacaaggacgacgaagagcgattttttccgtccagcggagtcttaatgtttgggaaacagggagctggaaaagacaacgtggactatagcagcgttatgctaaccagtgaggaagaaattaaaaccaccaacccagtggccacagaacagtacggcgtggtggccgataacctgcaacagcaaaacgccgctcctattgtaggggccgtcaacagtcaaggagccttacctggcatggtctggcagaaccgggacgtgtacctgcagggtcctatctgggccaagattcctcacacggacggaaactttcatccctcgccgctgatgggaggctttggactgaaacacccgcctcctcagatcctgattaagaatacacctgttcccgcggatcctccaactaccttcagtcaagctaagctggcgtcgttcatcacgcagtacagcaccggacaggtcagcgtggaaattgaatgggagctgcagaaagaaaacagcaaacgctggaacccagagattcaatacacttccaactactacaaatctacaaatgtggactttgctgttaacacagatggcacttattctgagcctcgccccattggcacccgttacctcacccgtaatctgtaattgcttgttaatcaataaaccggttgattcgtttcagttgaactttggtctctgcgaagggcgaattc

SEQ ID NO: 89 - protein, 738 aa, synthetic construct
  source 1..738: note = Description of Artificial Sequence: Synthetic polypeptide
MAADGYLPDWLEDNLSEGIREWWDLKPGAPKPKANQQKQDDGRGLVLPGYKYLGPFNGLDKGEPVNAADAAALEHDKAYDQQLKAGDNPYLRYNHADAEFQERLQEDTSFGGNLGRAVFQAKKRVLEPLGLVEEGAKTAPGKKRPVEPSPQRSPDSSTGIGKKGQQPAKKRLNFGQTGDSESVPDPQPIGEPPAGPSGLGSGTMAAGGGAPMADNNEGADGVGSSSGNWHCDSTWLGDRVITTSTRTWALPTYNNHLYKQISNGTSGGSTNDNTYFGYSTPWGYFDFNRFHCHFSPRDWQRLINNNWGFRPKRPNFKLFNIQVKEVTQNEGTKTIANNLTSTIQVFTDSEYQLPYVLGSAHQGCLPPFPADVFMIPQYGYLTLNNGSQAVGRSSFYCLEYFPSQMLRTGNNFEFSYQFEDVPFHSSYAHSQSLDRLMNPLIDQYLYYLSRTQSTGGTAGTQQLLFSQAGPNNMSAQAKNWLPGPCYRQQRVSTTLSQNNNSNFAWTGATKYHLNGRDSLVNPGVAMATHKDDEERFFPSSGVLMFGKQGAGKDNVDYSSVMLTSEEEIKTTNPVATEQYGVVADNLQQQNAAPIVGAVNSQGALPGMVWQNRDVYLQGPIWAKIPHTDGNFHPSPLMGGFGLKHPPPQILIKNTPVPADPPTTFSQAKLASFITQYSTGQVSVEIEWELQKENSKRWNPEIQYTSNYYKSTNVDFAVNTDGTYSEPRPIGTRYLTRNL

SEQ ID NO: 90 - protein, 738 aa, Adeno-associated virus
MAADGYLPDWLEDNLSEGIREWWDLKPGAPKPKANQQKQDDGRGLVLPGYKYLGPFNGLDKGEPVNAADAAALEHDKAYDQQLKAGDNPYLRYNHADAEFQERLQEDTSFGGNLGRAVFQAKKRVLEPLGLVEEAAKTAPGKKRPVEPSPQRSPDSSTGIGKKGQQPAKKRLNFGQTGDSESVPDPQPIGEPPAGPSGLGSGTMAAGGGAPMADNNEGADGVGSSSGNWHCDSTWLGDRVITTSTRTWALPTYNNHLYKQISNGTSGGSTNDNTYFGYSTPWGYFDFNRFHCHFSPRDWQRLINNNWGFRPKRLSFKLFNIQVKEVTQNEGTKTIANNLTSTIQVFTDSEYQLPYVLGSAHQGCLPPFPADVFMIPQYGYLTLNNGSQAVGRSSFYCLEYFPSQMLRTGNNFEFSYTFEDVPFHSSYAHSQSLDRLMNPLIDQYLYYLSRTQSTGGTQGTQQLLFSQAGPANMSAQAKNWLPGPCYRQQRVSTTLSQNNNSNFAWTGATKYHLNGRDSLVNPGVAMATHKDDEERFFPSSGVLMFGKQGAGRDNVDYSSVMLTSEEEIKTTNPVATEQYGVVADNLQQTNTGPIVGNVNSQGALPGMVWQNRDVYLQGPIWAKIPHTDGNFHPSPLMGGFGLKHPPPQILIKNTPVPADPPTTFSQAKLASFITQYSTGQVSVEIEWELQKENSKRWNPEIQYTSNYYKSTNVDFAVNTEGTYSEPRPIGTRYLTRNL

SEQ ID NO: 91 - DNA, 2172 bp, synthetic construct
  source 1..2172: mol_type = other DNA; note = Description of Artificial Sequence: Synthetic polynucleotide
atgtcttttgttgatcaccctccagattggttggaagaagttggtgaaggtcttcgcgagtttttgggccttgaagcgggcccaccgaaaccaaaacccaatcagcagcatcaagatcaagcccgtggtcttgtgctgcctggttataactatctcggacccggaaacggtctcgatcgaggagagcctgtcaacagggcagacgaggtcgcgcgagagcacgacatctcgtacaacgagcagcttgaggcgggagacaacccctacctcaagtacaaccacgcggacgccgagtttcaggagaagctcgccgacgacacatccttcgggggaaacctcggaaaggcagtctttcaggccaagaaaagggttctcgaaccttttggcctggttgaagagggtgctaagacggcccctaccggaaagcggatagacgaccactttccaaaaagaaagaaggctcggaccgaagaggactccaagccttccacctcgtcagacgccgaagctggacccagcggatcccagcagctgcaaatcccagcccaaccagcctcaagtttgggagctgatacaatgtctgcgggaggtggcggcccattgggcgacaataaccaaggtgccgatggagtgggcaatgcctcgggagattggcattgcgattccacgtggatgggggacagagtcgtcaccaagtccacccgaacctgggtgctgcccagctacaacaaccaccagtaccgagagatcaaaagcggctccgtcgacggaagcaacgccaacgcctactttggatacagcaccccctgggggtactttgactttaaccgcttccacagccactggagcccccgagactggcaaagactcatcaacaactactggggcttcagaccccggtccctcagagtcaaaatcttcaacattcaagtcaaagaggtcacggtgcaggactccaccaccaccatcgccaacaacctcacctccaccgtccaagtgtttacggacgacgactaccagctgccctacgtcgtcggcaacgggaccgagggatgcctgccggccttccctccgcaggtctttacgctgccgcagtacggttacgcgacgctgaaccgcgacaacacagaaaatcccaccgagaggagcagcttcttctgcctagagtactttcccagcaagatgctgagaacgggcaacaactttgagtttacctacaactttgaggaggtgcccttccactccagcttcgctcccagtcagaacctgttcaagctggccaacccgctggtggaccagtacttgtaccgcttcgtgagcacaaataacactggcggagtccagttcaacaagaacctggccgggagatacgccaacacctacaaaaactggttcccggggcccatgggccgaacccagggctggaacctgggctccggggtcaaccgcgccagtgtcagcgccttcgccacgaccaataggatggagctcgagggcgcgagttaccaggtgcccccgcagccgaacggcatgaccaacaacctccagggcagcaacacctatgccctggagaacactatgatcttcaacagccagccggcgaacccgggcaccaccgccacgtacctcgagggcaacatgctcatcaccagcgagagcgagacgcagccggtgaaccgcgtggcgtacaacgtcggcgggcagatggccaccaacaaccagagctccaccactgcccccgcgaccggcacgtacaacctccaggaaatcgtgcccggcagcgtgtggatggagagggacgtgtacctccaaggacccatctgggccaagatcccagagacgggggcgcactttcacccctctccggccatgggcggattcggactcaaacacccaccgcccatgatgctcatcaagaacacgcctgtgcccggaaatatcaccagcttctcggacgtgcccgtcagcagcttcatcacccagtacagcaccgggcaggtcaccgtggagatggagtgggagctcaagaaggaaaactccaagaggtggaacccagagatccagtacacaaacaactacaacgacccccagtttgtggactttgccccggacagcaccggggaatacagaaccaccagacctatcggaacccgataccttacccgacccctt

SEQ ID NO: 92 - protein, 720 aa, synthetic construct
  source 1..720: note = Description of Artificial Sequence: Synthetic polypeptide
MSFVDHPPDWLEEVGEGLREFLGLEAGPPKPKPNQQHQDQARGLVLPGYNYLGPGNGLDRGEPVNRADEVAREHDISYNEQLEAGDNPYLKYNHADAEFQEKLADDTSFGGNLGKAVFQAKKRVLEPFGLVEEGAKTAPTGKRIDDHFPKRKKARTEEDSKPSTSSDAEAGPSGSQQLQIPAQPASSLGADTMSAGGGGPLGDNNQGADGVGNASGDWHCDSTWMGDRVVTKSTRTWVLPSYNNHQYREIKSGSVDGSNANAYFGYSTPWGYFDFNRFHSHWSPRDWQRLINNYWGFRPRSLRVKIFNIQVKEVTVQDSTTTIANNLTSTVQVFTDDDYQLPYVVGNGTEGCLPAFPPQVFTLPQYGYATLNRDNTENPTERSSFFCLEYFPSKMLRTGNNFEFTYNFEEVPFHSSFAPSQNLFKLANPLVDQYLYRFVSTNNTGGVQFNKNLAGRYANTYKNWFPGPMGRTQGWNLGSGVNRASVSAFATTNRMELEGASYQVPPQPNGMTNNLQGSNTYALENTMIFNSQPANPGTTATYLEGNMLITSESETQPVNRVAYNVGGQMATNNQSSTTAPATGTYNLQEIVPGSVWMERDVYLQGPIWAKIPETGAHFHPSPAMGGFGLKHPPPMMLIKNTPVPGNITSFSDVPVSSFITQYSTGQVTVEMEWELKKENSKRWNPEIQYTNNYNDPQFVDFAPDSTGEYRTTRPIGTRYL

SEQ ID NO: 93 - protein, 724 aa, Adeno-associated virus 5
MSFVDHPPDWLEEVGEGLREFLGLEAGPPKPKPNQQHQDQARGLVLPGYNYLGPGNGLDRGEPVNRADEVAREHDISYNEQLEAGDNPYLKYNHADAEFQEKLADDTSFGGNLGKAVFQAKKRVLEPFGLVEEGAKTAPTGKRIDDHFPKRKKARTEEDSKPSTSSDAEAGPSGSQQLQIPAQPASSLGADTMSAGGGGPLGDNNQGADGVGNASGDWHCDSTWMGDRVVTKSTRTWVLPSYNNHQYREIKSGSVDGSNANAYFGYSTPWGYFDFNRFHSHWSPRDWQRLINNYWGFRPRSLRVKIFNIQVKEVTVQDSTTTIANNLTSTVQVFTDDDYQLPYVVGNGTEGCLPAFPPQVFTLPQYGYATLNRDNTENPTERSSFFCLEYFPSKMLRTGNNFEFTYNFEEVPFHSSFAPSQNLFKLANPLVDQYLYRFVSTNNTGGVQFNKNLAGRYANTYKNWFPGPMGRTQGWNLGSGVNRASVSAFATTNRMELEGASYQVPPQPNGMTNNLQGSNTYALENTMIFNSQPANPGTTATYLEGNMLITSESETQPVNRVAYNVGGQMATNNQSSTTAPATGTYNLQEIVPGSVWMERDVYLQGPIWAKIPETGAHFHPSPAMGGFGLKHPPPMMLIKNTPVPGNITSFSDVPVSSFITQYSTGQVTVEMEWELKKENSKRWNPEIQYTNNYNDPQFVDFAPDSTGEYRTTRPIGTRYLTRPL

SEQ ID NO: 94 - protein, 2175 aa, Adeno-associated virus
ATGTCTTTTGTTGATCACCCTCCAGATTGGTTGGAAGAAGTTGGTGAAGGTCTTCGCGAGTTTTTGGGCCTTGAAGCGGGCCCACCGAAACCAAAACCCAATCAGCAGCATCAAGATCAAGCCCGTGGTCTTGTGCTGCCTGGTTATAACTATCTCGGACCCGGAAACGGTCTCGATCGAGGAGAGCCTGTCAACAGGGCAGACGAGGTCGCGCGAGAGCACGACATCTCGTACAACGAGCAGCTTGAGGCGGGAGACAACCCCTACCTCAAGTACAACCACGCGGACGCCGAGTTTCAGGAGAAGCTCGCCGACGACACATCCTTCGGGGGAAACCTCGGAAAGGCAGTCTTTCAGGCCAAGAAAAGGGTTCTCGAACCTTTTGGCCTGGTTGAAGAGGGTGCTAAGACGGCCCCTACCGGAAAGCGGATAGACGACCACTTTCCAAAAAGAAAGAAGGCTCGGACCGAAGAGGACTCCAAGCCTTCCACCTCGTCAGACGCCGAAGCTGGACCCAGCGGATCCCAGCAGCTGCAAATCCCAGCCCAACCAGCCTCAAGTTTGGGAGCTGATACAATGTCTGCGGGAGGTGGCGGCCCATTGGGCGACAATAACCAAGGTGCCGATGGAGTGGGCAATGCCTCGGGAGATTGGCATTGCGATTCCACGTGGATGGGGGACAGAGTCGTCACCAAGTCCACCCGAACCTGGGTGCTGCCCAGCTACAACAACCACCAGTACCGAGAGATCAAAAGCGGCTCCGTCGACGGAAGCAACGCCAACGCCTACTTTGGATACAGCACCCCCTGGGGGTACTTTGACTTTAACCGCTTCCACAGCCACTGGAGCCCCCGAGACTGGCAAAGACTCATCAACAACTACTGGGGCTTCAGACCCCGGTCCCTCAGAGTCAAAATCTTCAACATTCAAGTCAAAGAGGTCACGGTGCAGGACTCCACCACCACCATCGCCAACAACCTCACCTCCACCGTCCAAGTGTTTACGGACGACGACTACCAGCTGCCCTACGTCGTCGGCAACGGGACCGAGGGATGCCTGCCGGCCTTCCCTCCGCAGGTCTTTACGCTGCCGCAGTACGGTTACGCGACGCTGAACCGCGACAACACAGAAAATCCCACCGAGAGGAGCAGCTTCTTCTGCCTAGAGTACTTTCCCAGCAAGATGCTGAGAACGGGCAACAACTTTGAGTTTACCTACAACTTTGAGGAGGTGCCCTTCCACTCCAGCTTCGCTCCCAGTCAGAACCTGTTCAAGCTGGCCAACCCGCTGGTGGACCAGTACTTGTACCGCTTCGTGAGCACAAATAACACTGGCGGAGTCCAGTTCAACAAGAACCTGGCCGGGAGATACGCCAACACCTACAAAAACTGGTTCCCGGGGCCCATGGGCCGAACCCAGGGCTGGAACCTGGGCTCCGGGGTCAACCGCGCCAGTGTCAGCGCCTTCGCCACGACCAATAGGATGGAGCTCGAGGGCGCGAGTTACCAGGTGCCCCCGCAGCCGAACGGCATGACCAACAACCTCCAGGGCAGCAACACCTATGCCCTGGAGAACACTATGATCTTCAACAGCCAGCCGGCGAACCCGGGCACCACCGCCACGTACCTCGAGGGCAACATGCTCATCACCAGCGAGAGCGAGACGCAGCCGGTGAACCGCGTGGCGTACAACGTCGGCGGGCAGATGGCCACCAACAACCAGAGCTCCACCACTGCCCCCGCGACCGGCACGTACAACCTCCAGGAAATCGTGCCCGGCAGCGTGTGGATGGAGAGGGACGTGTACCTCCAAGGACCCATCTGGGCCAAGATCCCAGAGACGGGGGCGCACTTTCACCCCTCTCCGGCCATGGGCGGATTCGGACTCAAACACCCACCGCCCATGATGCTCATCAAGAACACGCCTGTGCCCGGAAATATCACCAGCTTCTCGGACGTGCCCGTCAGCAGCTTCATCACCCAGTACAGCACCGGGCAGGTCACCGTGGAGATGGAGTGGGAGCTCAAGAAGGAAAACTCCAAGAGGTGGAACCCAGAGATCCAGTACACAAACAACTACAACGACCCCCAGTTTGTGGACTTTGCCCCGGACAGCACCGGGGAATACAGAACCACCAGACCTATCGGAACCCGATACCTTACCCGACCCCTTTAA

SEQ ID NO: 95 - DNA, 2208 bp, Adeno-associated virus
  source 1..2208: mol_type = unassigned DNA
atggctgccgatggttatcttccagattggctcgaggacaacctctctgagggcattcgcgagtggtgggacttgaaacctggagccccgaaacccaaagccaaccagcaaaagcaggacgacggccggggtctggtgcttcctggctacaagtacctcggacccttcaacggactcgacaagggggagcccgtcaacgcggcggatgcagcggccctcgagcacgacaaggcctacgaccagcagctcaaagcgggtgacaatccgtacctgcggtataaccacgccgacgccgagtttcaggagcgtctgcaagaagatacgtcttttgggggcaacctcgggcgagcagtcttccaggccaagaagagggttctcgaaccttttggtctggttgaggaaggtgctaagacggctcctggaaagaaacgtccggtagagcagtcgccacaagagccagactcctcctcgggcattggcaagacaggccagcagcccgctaaaaagagactcaattttggtcagactggcgactcagagtcagtccccgacccacaacctctcggagaacctccagcaacccccgctgctgtgggacctactacaatggcttcaggcggtggcgcaccaatggcagacaataacgaaggcgccgacggagtgggtaatgcctcaggaaattggcattgcgattccacatggctgggcgacagagtcatcaccaccagcacccgaacatgggccttgcccacctataacaaccacctctacaagcaaatctccagtgcttcaacgggggccagcaacgacaaccactacttcggctacagcaccccctgggggtattttgatttcaacagattccactgccatttctcaccacgtgactggcagcgactcatcaacaacaattggggattccggcccaagagactcaacttcaagctcttcaacatccaagtcaaggaggtcacgacgaatgatggcgtcacgaccatcgctaataaccttaccagcacggttcaagtcttctcggactcggagtaccagttgccgtacgtcctcggctctgcgcaccagggctgcctccctccgttcccggcggacgtgttcatgattccgcagtacggctacctaacgctcaacaatggcagccaggcagtgggacggtcatccttttactgcctggaatatttcccatcgcagatgctgagaacgggcaataactttaccttcagctacaccttcgaggacgtgcctttccacagcagctacgcgcacagccagagcctggaccggctgatgaatcctctcatcgaccagtacctgtattacctgaacagaactcagaatcagtccggaagtgcccaaaacaaggacttgctgtttagccgggggtctccagctggcatgtctgttcagcccaaaaactggctacctggaccctgttaccggcagcagcgcgtttctaaaacaaaaacagacaacaacaacagcaactttacctggactggtgcttcaaaatataaccttaatgggcgtgaatctataatcaaccctggcactgctatggcctcacacaaagacgacaaagacaagttctttcccatgagcggtgtcatgatttttggaaaggagagcgccggagcttcaaacactgcattggacaatgtcatgatcacagacgaagaggaaatcaaagccactaaccccgtggccaccgaaagatttgggactgtggcagtcaatctccagagcagcagcacagaccctgcgaccggagatgtgcatgttatgggagccttacctggaatggtgtggcaagacagagacgtatacctgcagggtcctatttgggccaaaattcctcacacggatggacactttcacccgtctcctctcatgggcggctttggacttaagcacccgcctcctcagatcctcatcaaaaacacgcctgttcctgcgaatcctccggcagagttttcggctacaaagtttgcttcattcatcacccagtattccacaggacaagtgagcgtggagattgaatgggagctgcagaaagaaaacagcaaacgctggaatcccgaagtgcagtatacatctaactatgcaaaatctgccaacgttgatttcactgtggacaacaatggactttatactgagcctcgccccattggcacccgttacctcacccgtcccctg

SEQ ID NO: 96 - protein, 736 aa, Adeno-associated virus 6
MAADGYLPDWLEDNLSEGIREWWDLKPGAPKPKANQQKQDDGRGLVLPGYKYLGPFNGLDKGEPVNAADAAALEHDKAYDQQLKAGDNPYLRYNHADAEFQERLQEDTSFGGNLGRAVFQAKKRVLEPFGLVEEGAKTAPGKKRPVEQSPQEPDSSSGIGKTGQQPAKKRLNFGQTGDSESVPDPQPLGEPPATPAAVGPTTMASGGGAPMADNNEGADGVGNASGNWHCDSTWLGDRVITTSTRTWALPTYNNHLYKQISSASTGASNDNHYFGYSTPWGYFDFNRFHCHFSPRDWQRLINNNWGFRPKRLNFKLFNIQVKEVTTNDGVTTIANNLTSTVQVFSDSEYQLPYVLGSAHQGCLPPFPADVFMIPQYGYLTLNNGSQAVGRSSFYCLEYFPSQMLRTGNNFTFSYTFEDVPFHSSYAHSQSLDRLMNPLIDQYLYYLNRTQNQSGSAQNKDLLFSRGSPAGMSVQPKNWLPGPCYRQQRVSKTKTDNNNSNFTWTGASKYNLNGRESIINPGTAMASHKDDKDKFFPMSGVMIFGKESAGASNTALDNVMITDEEEIKATNPVATERFGTVAVNLQSSSTDPATGDVHVMGALPGMVWQDRDVYLQGPIWAKIPHTDGHFHPSPLMGGFGLKHPPPQILIKNTPVPANPPAEFSATKFASFITQYSTGQVSVEIEWELQKENSKRWNPEVQYTSNYAKSANVDFTVDNNGLYTEPRPIGTRYLTRPL

SEQ ID NO: 97 - protein, 623 aa, Adeno-associated virus 6
MPGFYEIVIKVPSDLDEHLPGISDSFVNWVAEKEWELPPDSDMDLNLIEQAPLTVAEKLQRDFLVQWRRVSKAPEALFFVQFEKGESYFHLHILVETTGVKSMVLGRFLSQIRDKLVQTIYRGIEPTLPNWFAVTKTRNGAGGGNKVVDECYIPNYLLPKTQPELQWAWTNMEEYISACLNLAERKRLVAHDLTHVSQTQEQNKENLNPNSDAPVIRSKTSARYMELVGWLVDRGITSEKQWIQEDQASYISFNAASNSRSQIKAALDNAGKIMALTKSAPDYLVGPAPPADIKTNRIYRILELNGYDPAYAGSVFLGWAQKRFGKRNTIWLFGPATTGKTNIAEAIAHAVPFYGCVNWTNENFPFNDCVDKMVIWWEEGKMTAKVVESAKAILGGSKVRVDQKCKSSAQIDPTPVIVTSNTNMCAVIDGNSTTFEHQQPLQDRMFKFELTRRLEHDFGKVTKQEVKEFFRWAQDHVTEVAHEFYVRKGGANKRPAPDDADKSEPKRACPSVADPSTSDAEGAPVDFADRYQNKCSRHAGMLQMLFPCKTCERMNQNFNICFTHGTRDCSECFPGVSESQPVVRKRTYRKLCAIHHLLGRAPEIACSACDLVNVDLDDCVSEQ

SEQ ID NO: 98 - DNA, 4683 bp, Adeno-associated virus 6
  source 1..4683: mol_type = unassigned DNA
ttggccactccctctctgcgcgctcgctcgctcactgaggccgggcgaccaaaggtcgcccgacgcccgggctttgcccgggcggcctcagtgagcgagcgagcgcgcagagagggagtggccaactccatcactaggggttcctggaggggtggagtcgtgacgtgaattacgtcatagggttagggaggtcctgtattagaggtcacgtgagtgttttgcgacattttgcgacaccatgtggtcacgctgggtatttaagcccgagtgagcacgcagggtctccattttgaagcgggaggtttgaacgcgcagcgccatgccggggttttacgagattgtgattaaggtccccagcgaccttgacgagcatctgcccggcatttctgacagctttgtgaactgggtggccgagaaggaatgggagttgccgccagattctgacatggatctgaatctgattgagcaggcacccctgaccgtggccgagaagctgcagcgcgacttcctggtccagtggcgccgcgtgagtaaggccccggaggccctcttctttgttcagttcgagaagggcgagtcctacttccacctccatattctggtggagaccacgggggtcaaatccatggtgctgggccgcttcctgagtcagattagggacaagctggtgcagaccatctaccgcgggatcgagccgaccctgcccaactggttcgcggtgaccaagacgcgtaatggcgccggaggggggaacaaggtggtggacgagtgctacatccccaactacctcctgcccaagactcagcccgagctgcagtgggcgtggactaacatggaggagtatataagcgcgtgtttaaacctggccgagcgcaaacggctcgtggcgcacgacctgacccacgtcagccagacccaggagcagaacaaggagaatctgaaccccaattctgacgcgcctgtcatccggtcaaaaacctccgcacgctacatggagctggtcgggtggctggtggaccggggcatcacctccgagaagcagtggatccaggaggaccaggcctcgtacatctccttcaacgccgcctccaactcgcggtcccagatcaaggccgctctggacaatgccggcaagatcatggcgctgaccaaatccgcgcccgactacctggtaggccccgctccgcccgccgacattaaaaccaaccgcatttaccgcatcctggagctgaacggctacgaccctgcctacgccggctccgtctttctcggctgggcccagaaaaggttcggaaaacgcaacaccatctggctgtttgggccggccaccacgggcaagaccaacatcgcggaagccatcgcccacgccgtgcccttctacggctgcgtcaactggaccaatgagaactttcccttcaacgattgcgtcgacaagatggtgatctggtgggaggagggcaagatgacggccaaggtcgtggagtccgccaaggccattctcggcggcagcaaggtgcgcgtggaccaaaagtgcaagtcgtccgcccagatcgatcccacccccgtgatcgtcacctccaacaccaacatgtgcgccgtgattgacgggaacagcaccaccttcgagcaccagcagccgttgcaggaccggatgttcaaatttgaactcacccgccgtctggagcatgactttggcaaggtgacaaagcaggaagtcaaagagttcttccgctgggcgcaggatcacgtgaccgaggtggcgcatgagttctacgtcagaaagggtggagccaacaagagacccgcccccgatgacgcggataaaagcgagcccaagcgggcctgcccctcagtcgcggatccatcgacgtcagacgcggaaggagctccggtggactttgccgacaggtaccaaaacaaatgttctcgtcacgcgggcatgcttcagatgctgtttccctgcaaaacatgcgagagaatgaatcagaatttcaacatttgcttcacgcacgggaccagagactgttcagaatgtttccccggcgtgtcagaatctcaaccggtcgtcagaaagaggacgtatcggaaactctgtgccattcatcatctgctggggcgggctcccgagattgcttgctcggcctgcgatctggtcaacgtggatctggatgactgtgtttctgagcaataaatgacttaaaccaggtatggctgccgatggttatcttccagattggctcgaggacaacctctctgagggcattcgcgagtggtgggacttgaaacctggagccccgaaacccaaagccaaccagcaaaagcaggacgacggccggggtctggtgcttcctggctacaagtacctcggacccttcaacggactcgacaagggggagcccgtcaacgcggcggatgcagcggccctcgagcacgacaaggcctacgaccagcagctcaaagcgggtgacaatccgtacctgcggtataaccacgccgacgccgagtttcaggagcgtctgcaagaagatacgtcttttgggggcaacctcgggcgagcagtcttccaggccaagaagagggttctcgaaccttttggtctggttgaggaaggtgctaagacggctcctggaaagaaacgtccggtagagcagtcgccacaagagccagactcctcctcgggcattggcaagacaggccagcagcccgctaaaaagagactcaattttggtcagactggcgactcagagtcagtccccgacccacaacctctcggagaacctccagcaacccccgctgctgtgggacctactacaatggcttcaggcggtggcgcaccaatggcagacaataacgaaggcgccgacggagtgggtaatgcctcaggaaattggcattgcgattccacatggctgggcgacagagtcatcaccaccagcacccgaacatgggccttgcccacctataacaaccacctctacaagcaaatctccagtgcttcaacgggggccagcaacgacaaccactacttcggctacagcaccccctgggggtattttgatttcaacagattccactgccatttctcaccacgtgactggcagcgactcatcaacaacaattggggattccggcccaagagactcaacttcaagctcttcaacatccaagtcaaggaggtcacgacgaatgatggcgtcacgaccatcgctaataaccttaccagcacggttcaagtcttctcggactcggagtaccagttgccgtacgtcctcggctctgcgcaccagggctgcctccctccgttcccggcggacgtgttcatgattccgcagtacggctacctaacgctcaacaatggcagccaggcagtgggacggtcatccttttactgcctggaatatttcccatcgcagatgctgagaacgggcaataactttaccttcagctacaccttcgaggacgtgcctttccacagcagctacgcgcacagccagagcctggaccggctgatgaatcctctcatcgaccagtacctgtattacctgaacagaactcagaatcagtccggaagtgcccaaaacaaggacttgctgtttagccgggggtctccagctggcatgtctgttcagcccaaaaactggctacctggaccctgttaccggcagcagcgcgtttctaaaacaaaaacagacaacaacaacagcaactttacctggactggtgcttcaaaatataaccttaatgggcgtgaatctataatcaaccctggcactgctatggcctcacacaaagacgacaaagacaagttctttcccatgagcggtgtcatgatttttggaaaggagagcgccggagcttcaaacactgcattggacaatgtcatgatcacagacgaagaggaaatcaaagccactaaccccgtggccaccgaaagatttgggactgtggcagtcaatctccagagcagcagcacagaccctgcgaccggagatgtgcatgttatgggagccttacctggaatggtgtggcaagacagagacgtatacctgcagggtcctatttgggccaaaattcctcacacggatggacactttcacccgtctcctctcatgggcggctttggacttaagcacccgcctcctcagatcctcatcaaaaacacgcctgttcctgcgaatcctccggcagagttttcggctacaaagtttgcttcattcatcacccagtattccacaggacaagtgagcgtggagattgaatgggagctgcagaaagaaaacagcaaacgctggaatcccgaagtgcagtatacatctaactatgcaaaatctgccaacgttgatttcactgtggacaacaatggactttatactgagcctcgccccattggcacccgttacctcacccgtcccctgtaattgtgtgttaatcaataaaccggttaattcgtgtcagttgaactttggtctcatgtcgttattatcttatctggtcaccatagcaaccggttacacattaactgcttagttgcgcttcgcgaatacccctagtgatggagttgcccactccctctatgcgcgctcgctcgctcggtggggccggcagagcagagctctgccgtctgcggacctttggtccgcaggccccaccgagcgagcgagcgcgcatagagggagtgggcaa

SEQ ID NO: 99 - DNA, 2211 bp, Adeno-associated virus
  source 1..2211: mol_type = unassigned DNA
atggctgccgatggttatcttccagattggctcgaggacaacctctctgagggcattcgcgagtggtgggacttgaaacctggagccccgaaacccaaagccaaccagcaaaagcaggacgacggccggggtctggtgcttcctggctacaagtacctcggacccttcaacggactcgacaagggggagcccgtcaacgcggcggatgcagcggccctcgagcacgacaaggcctacgaccagcagctcaaagcgggtgacaatccgtacctgcggtataaccacgccgacgccgagtttcaggagcgtctgcaagaagatacgtcttttgggggcaacctcgggcgagcagtcttccaggccaagaagagggttctcgaaccttttggtctggttgaggaaggtgctaagacggctcctggaaagaaacgtccggtagagcagtcgccacaagagccagactcctcctcgggcattggcaagacaggccagcagcccgctaaaaagagactcaattttggtcagactggcgactcagagtcagtccccgacccacaacctctcggagaacctccagcaacccccgctgctgtgggacctactacaatggcttcaggcggtggcgcaccaatggcagacaataacgaaggcgccgacggagtgggtaatgcctcaggaaattggcattgcgattccacatggctgggcgacagagtcatcaccaccagcacccgaacatgggccttgcccacctataacaaccacctctacaagcaaatctccagtgcttcaacgggggccagcaacgacaaccactacttcggctacagcaccccctgggggtattttgatttcaacagattccactgccatttctcaccacgtgactggcagcgactcatcaacaacaattggggattccggcccaagagactcaacttcaagctcttcaacatccaagtcaaggaggtcacgacgaatgatggcgtcacgaccatcgctaataaccttaccagcacggttcaagtcttctcggactcggagtaccagttgccgtacgtcctcggctctgcgcaccagggctgcctccctccgttcccggcggacgtgttcatgattccgcagtacggctacctaacgctcaacaatggcagccaggcagtgggacggtcatccttttactgcctggaatatttcccatcgcagatgctgagaacgggcaataactttaccttcagctacaccttcgaggacgtgcctttccacagcagctacgcgcacagccagagcctggaccggctgatgaatcctctcatcgaccagtacctgtattacctgaacagaactcagaatcagtccggaagtgcccaaaacaaggacttgctgtttagccgggggtctccagctggcatgtctgttcagcccaaaaactggctacctggaccctgttaccggcagcagcgcgtttctaaaacaaaaacagacaacaacaacagcaactttacctggactggtgcttcaaaatataaccttaatgggcgtgaatctataatcaaccctggcactgctatggcctcacacaaagacgacaaagacaagttctttcccatgagcggtgtcatgatttttggaaaggagagcgccggagcttcaaacactgcattggacaatgtcatgatcacagacgaagaggaaatcaaagccactaaccccgtggccaccgaaagatttgggactgtggcagtcaatctccagagcagcagcacagaccctgcgaccggagatgtgcatgttatgggagccttacctggaatggtgtggcaagacagagacgtatacctgcagggtcctatttgggccaaaattcctcacacggatggacactttcacccgtctcctctcatgggcggctttggacttaagcacccgcctcctcagatcctcatcaaaaacacgcctgttcctgcgaatcctccggcagagttttcggctacaaagtttgcttcattcatcacccagtattccacaggacaagtgagcgtggagattgaatgggagctgcagaaagaaaacagcaaacgctggaatcccgaagtgcagtatacatctaactatgcaaaatctgccaacgttgatttcactgtggacaacaatggactttatactgagcctcgccccattggcacccgttacctcacccgtcccctgtaa

SEQ ID NO: 100 - protein, 736 aa, Adeno-associated virus; identical to SEQ ID NO: 96

SEQ ID NO: 101 - protein, 736 aa, Adeno-associated virus
MAADGYLPDWLEDNLSEGIREWWDLKPGAPKPKANQQKQDDGRGLVLPGYKYLGPFNGLDKGEPVNAADAAALEHDKAYDQQLKAGDNPYLRYNHADAEFQERLQEDTSFGGNLGRAVFQAKKRVLEPFGLVEEGAKTAPGKKRPVEQSPQEPDSSSGIGKTGQQPAKKRLNFGQTGDSESVPDPQPLGEPPATPAAVGPTTMASGGGAPMADNNEGADGVGNASGNWHCDSTWLGDRVITTSTRTWALPTYNNHLYKQISSASTGASNDNHYFGYSTPWGYFDFNRFHCHFSPRDWQRLINNNWGFRPKRLNFKLFNIQVKEVTTNDGVTTIANNLTSTVQVFSDSEYQLPYVLGSAHQGCLPPFPADVFMIPQYGYLTLNNGSQAVGRSSFYCLEYFPSQMLRTGNNFTFSYTFEDVPFHSSYAHSQSLDRLMNPLIDQYLYYLNRTQNQSGSAQNKDLLFSRGSPAGMSVQPKNWLPGPCYRQQRVSKTKTDNNNSNFTWTGASKYNLNGRESIINPGTAMASHKDDEDKFFPMSGVMIFGKESAGASNTALDNVMITDEEEIKATNPVATERFGTVAVNLQSSSTDPATGDVHVMGALPGMVWQDRDVYLQGPIWAKIPHTDGHFHPSPLMGGFGLKHPPPQILIKNTPVPANPPAEFSATKFASFITQYSTGQVSVEIEWELQKENSKRWNPEVQYTSNYAKSANVDFTVDNNGLYTEPRPIGTRYLTRPL

SEQ ID NO: 102 - protein, 736 aa, Adeno-associated virus
MAADGYLPDWLEDNLSEGIREWWDLKPGAPKPKANQQKQDDGRGLVLPGYKYLGPFNGLDKGEPVNAADAAALEHDKAYDQQLKAGDNPYLRYNHADAEFQERLQEDTSFGGNLGRAVFQAKKRVLEPLGLVEEGAKTAPGKKRPVEQSPQEPDSSSGIGKTGQQPAKKRLNFGQTGDSESVPDPQPLGEPPATPAAVGPTTMASGGGAPMADNNEGADGVGNASGNWHCDSTWLGDRVITTSTRTWALPTYNNHLYKQISSASTGASNDNHYFGYSTPWGYFDFNRFHCHFSPRDWQRLINNNWGFRPKRLNFKLFNIQVKEVTTNDGVTTIANNLTSTVQVFSDSEYQLPYVLGSAHQGCLPPFPADVFMIPQYGYLTLNNGSQAVGRSSFYCLEYFPSQMLRTGNNFTFSYTFEDVPFHSSYAHSQSLDRLMNPLIDQYLYYLNRTQNQSGSAQNKDLLFSRGSPAGMSVQPKNWLPGPCYRQQRVSKTKTDNNNSNFTWTGASKYNLNGRESIINPGTAMASHKDDEDKFFPMSGVMIFGKESAGASNTALDNVMITDEEEIKATNPVATERFGTVAVNLQSSSTDPATGDVHVMGALPGMVWQDRDVYLQGPIWAKIPHTDGHFHPSPLMGGFGLKHPPPQILIKNTPVPANPPAEFSATKFASFITQYSTGQVSVEIEWELQKENSKRWNPEVQYTSNYAKSANVDFTVDNNGLYTEPRPIGTRYLTRPL

SEQ ID NO: 103 - protein, 736 aa, Adeno-associated virus
MAADGYLPDWLEDNLSEGIREWWDLKPGAPKPKANQQKQDDGRGLVLPGYKYLGPFNGLDKGEPVNAADAAALEHDKAYDQQLKAGDNPYLRYNHADAEFQERLQEDTSFGGNLGRAVFQAKKRVLEPLGLVEEGAKTAPGKKRPVEQSPQEPDSSSGIGKTGQQPAKKRLNFGQTGDSESVPDPQPLGEPPATPAAVGPTTMASGGGAPMADNNEGADGVGNASGNWHCDSTWLGDRVITTSTRTWALPTYNNHLYKQISSASTGASNDNHYFGYSTPWGYFDFNRFHCHFSPRDWQRLINNNWGFRPKRLNFKLFNIQVKEVTTNDGVTTIANNLTSTVQVFSDSEYQLPYVLGSAHQGCLPPFPADVFMIPQYGYLTLNNGSQAVGRSSFYCLEYFPSQMLRTGNNFTFSYTFEDVPFHSSYAHSQSLDRLMNPLIDQYLYYLNRTQNQSGSAQNKDLLFSRGSPAGMSVQPKNWLPGPCYRQQRVSKTKTDNNNSNFTWTGASKYNLNGRESIINPGTAMASHKDDKDKFFPMSGVMIFGKESAGASNTALDNVMITDEEEIKATNPVATERFGTVAVNLQSSSTDPATGDVHVMGALPGMVWQDRDVYLQGPIWAKIPHTDGHFHPSPLMGGFGLKHPPPQILIKNTPVPANPPAEFSATKFASFITQYSTGQVSVEIEWELQKENSKRWNPEVQYTSNYAKSANVDFTVDNNGLYTEPRPIGTRYLTRPL

SEQ ID NO: 104 - DNA, 2214 bp, Adeno-associated virus
  source 1..2214: mol_type = unassigned DNA
atggctgccgatggttatcttccagattggctcgaggacaacctctctgagggcattcgcgagtggtgggacctgaaacctggagccccgaaacccaaagccaaccagcaaaagcaggacaacggccggggtctggtgcttcctggctacaagtacctcggacccttcaacggactcgacaagggggagcccgtcaacgcggcggacgcagcggccctcgagcacgacaaggcctacgaccagcagctcaaagcgggtgacaatccgtacctgcggtataaccacgccgacgccgagtttcaggagcgtctgcaagaagatacgtcatttgggggcaacctcgggcgagcagtcttccaggccaagaagcgggttctcgaacctctcggtctggttgaggaaggcgctaagacggctcctgcaaagaagagaccggtagagccgtcacctcagcgttcccccgactcctccacgggcatcggcaagaaaggccagcagcccgccagaaagagactcaatttcggtcagactggcgactcagagtcagtccccgaccctcaacctctcggagaacctccagcagcgccctctagtgtgggatctggtacagtggctgcaggcggtggcgcaccaatggcagacaataacgaaggtgccgacggagtgggtaatgcctcaggaaattggcattgcgattccacatggctgggcgacagagtcattaccaccagcacccgaacctgggccctgcccacctacaacaaccacctctacaagcaaatctccagtgaaactgcaggtagtaccaacgacaacacctacttcggctacagcaccccctgggggtattttgactttaacagattccactgccacttctcaccacgtgactggcagcgactcatcaacaacaactggggattccggcccaagaagctgcggttcaagctcttcaacatccaggtcaaggaggtcacgacgaatgacggcgttacgaccatcgctaataaccttaccagcacgattcaggtattctcggactcggaataccagctgccgtacgtcctcggctctgcgcaccagggctgcctgcctccgttcccggcggacgtcttcatgattcctcagtacggctacctgactctcaacaatggcagtcagtctgtgggacgttcctccttctactgcctggagtacttcccctctcagatgctgagaacgggcaacaactttgagttcagctacagcttcgaggacgtgcctttccacagcagctacgcacacagccagagcctggaccggctgatgaatcccctcatcgaccagtacttgtactacctggccagaacacagagtaacccaggaggcacagctggcaatcgggaactgcagttttaccagggcgggccttcaactatggccgaacaagccaagaattggttacctggaccttgcttccggcaacaaagagtctccaaaacgctggatcaaaacaacaacagcaactttgcttggactggtgccaccaaatatcacctgaacggcagaaactcgttggttaatcccggcgtcgccatggcaactcacaaggacgacgaggaccgctttttcccatccagcggagtcctgatttttggaaaaactggagcaactaacaaaactacattggaaaatgtgttaatgacaaatgaagaagaaattcgtcctactaatcctgtagccacggaagaatacgggatagtcagcagcaacttacaagcggctaatactgcagcccagacacaagttgtcaacaaccagggagccttacctggcatggtctggcagaaccgggacgtgtacctgcagggtcccatctgggccaagattcctcacacggatggcaactttcacccgtctcctttgatgggcggctttggacttaaacatccgcctcctcagatcctgatcaagaacactcccgttcccgctaatcctccggaggtgtttactcctgccaagtttgcttcgttcatcacacagtacagcaccggacaagtcagcgtggaaatcgagtgggagctgcagaaggaaaacagcaagcgctggaacccggagattcagtacacctccaactttgaaaagcagactggtgtggactttgccgttgacagccagggtgtttactctgagcctcgccctattggcactcgttacctcacccgtaatctgtaa

SEQ ID NO: 105 - protein, 738 aa, Adeno-associated virus
MAADGYLPDWLEDNLSEGIREWWALKPGAPKPKANQQKQDDGRGLVLPGYKYLGPFNGLDKGEPVNAADAAALEHDKAYDQQLQAGDNPYLRYNHADAEFQERLQEDTSFGGNLGRAVFQAKKRVLEPLGLVEEGAKTAPGKKRPVEPSPQRSPDSSTGIGKKGQQPARKRLNFGQTGDSESVPDPQPLGEPPAAPSGVGPNTMAAGGGAPMADNNEGADGVGSSSGNWHCDSTWLGDRVITTSTRTWALPTYNNHLYKQISNGTSGGATNDNTYFGYSTPWGYFDFNRFHCHFSPRDWQRLINNNWGFRPKRLSFKLFNIQVKEVTQNEGTKTIANNLTSTIQVFTDSEYQLPYVLGSAHQGCLPPFPADVFMIPQYGYLTLNNGSQAVGRSSFYCLEYFPSQMLRTGNNFQFTYTFEDVPFHSSYAHSQSLDRLMNPLIDQYLYYLSRTQTTGGTANTQTLGFSQGGPNTMANQAKNWLPGPCYRQQRVSTTTGQNNNSNFAWTAGTKYHLNGRNSLANPGIAMATHKDDEERFFPSNGILIFGKQNAARDNADYSDVMLTSEEEIKTTNPVATEEYGIVADNLQQQNTAPQIGTVNSQGALPGMVWQNRDVYLQGPIWAKIPHTDGNFHPSPLMGGFGLKHPPPQILIKNTPVPADPPTTFNQSKLNSFITQYSTGQVSVEIEWELQKENSKRWNPEIQYTSNYYKSTSVDFAVNTEGVYSEPRPIGTRYLTRNL

SEQ ID NO: 106 - protein, 737 aa, Adeno-associated virus 7
MAADGYLPDWLEDNLSEGIREWWDLKPGAPKPKANQQKQDNGRGLVLPGYKYLGPFNGLDKGEPVNAADAAALEHDKAYDQQLKAGDNPYLRYNHADAEFQERLQEDTSFGGNLGRAVFQAKKRVLEPLGLVEEGAKTAPAKKRPVEPSPQRSPDSSTGIGKKGQQPARKRLNFGQTGDSESVPDPQPLGEPPAAPSSVGSGTVAAGGGAPMADNNEGADGVGNASGNWHCDSTWLGDRVITTSTRTWALPTYNNHLYKQISSETAGSTNDNTYFGYSTPWGYFDFNRFHCHFSPRDWQRLINNNWGFRPKKLRFKLFNIQVKEVTTNDGVTTIANNLTSTIQVFSDSEYQLPYVLGSAHQGCLPPFPADVFMIPQYGYLTLNNGSQSVGRSSFYCLEYFPSQMLRTGNNFEFSYSFEDVPFHSSYAHSQSLDRLMNPLIDQYLYYLARTQSNPGGTAGNRELQFYQGGPSTMAEQAKNWLPGPCFRQQRVSKTLDQNNNSNFAWTGATKYHLNGRNSLVNPGVAMATHKDDEDRFFPSSGVLIFGKTGATNKTTLENVLMTNEEEIRPTNPVATEEYGIVSSNLQAANTAAQTQVVNNQGALPGMVWQNRDVYLQGPIWAKIPHTDGNFHPSPLMGGFGLKHPPPQILIKNTPVPANPPEVFTPAKFASFITQYSTGQVSVEIEWELQKENSKRWNPEIQYTSNFEKQTGVDFAVDSQGVYSEPRPIGTRYLTRNL

SEQ ID NO: 107 - protein, 623 aa, synthetic construct
  source 1..623: note = Description of Artificial Sequence: Synthetic polypeptide
MPGFYEIVIKVPSDLDEHLPGISDSFVNWVAEKEWELPPDSDMDLNLIEQAPLTVAEKLQRDFLVQWRRVSKAPEALFFVQFEKGESYFHLHVLVETTGVKSMVLGRFLSQIREKLVQTIYRGVEPTLPNWFAVTKTRNGAGGGNKVVDECYIPNYLLPKTQPELQWAWTNMEEYISACLNLAERKRLVAQHLTHVSQTQEQNKENLNPNSDAPVIRSKTSARYMELVGWLVDRGITSEKQWIQEDQASYISFNAASNSRSQIKAALDNAGKIMALTKSAPDYLVGPSLPADIKTNRIYRILELNGYDPAYAGSVFLGWAQKKFGKRNTIWLFGPATTGKTNIAEAIAHAVPFYGCVNWTNENFPFNDCVDKMVIWWEEGKMTAKVVESAKAILGGSKVRVDQKCKSSAQIDPTPVIVTSNTNMCAVIDGNSTTFEHQQPLQDRMFKFELTRRLEHDFGKVTKQEVKEFFRWASDHVTEVAHEFYVRKGGASKRPAPDDADISEPKRACPSVADPSTSDAEGAPVDFADRYQNKCSRHAGMIQMLFPCKTCERMNQNFNICFTHGVRDCLECFPGVSESQPVVRKKTYRKLCAIHHLLGRAPEIACSACDLVNVDLDDCVSEQ

SEQ ID NO: 108 - DNA, 4721 bp, Adeno-associated virus 7
  source 1..4721: mol_type = unassigned DNA
ttggccactccctctatgcgcgctcgctcgctcggtggggcctgcggaccaaaggtccgcagacggcagagctctgctctgccggccccaccgagcgagcgagcgcgcatagagggagtggccaactccatcactaggggtaccgcgaagcgcctcccacgctgccgcgtcagcgctgacgtaaatcacgtcataggggagtggtcctgtattagctgtcacgtgagtgcttttgcgacattttgcgacaccacgtggccatttgaggtatatatggccgagtgagcgagcaggatctccattttgaccgcgaaatttgaacgagcagcagccatgccgggtttctacgagatcgtgatcaaggtgccgagcgacctggacgagcacctgccgggcatttctgactcgtttgtgaactgggtggccgagaaggaatgggagctgcccccggattctgacatggatctgaatctgatcgagcaggcacccctgaccgtggccgagaagctgcagcgcgacttcctggtccaatggcgccgcgtgagtaaggccccggaggccctgttctttgttcagttcgagaagggcgagagctacttccaccttcacgttctggtggagaccacgggggtcaagtccatggtgctaggccgcttcctgagtcagattcgggagaagctggtccagaccatctaccgcggggtcgagcccacgctgcccaactggttcgcggtgaccaagacgcgtaatggcgccggcggggggaacaaggtggtggacgagtgctacatccccaactacctcctgcccaagacccagcccgagctgcagtgggcgtggactaacatggaggagtatataagcgcgtgtttgaacctggccgaacgcaaacggctcgtggcgcagcacctgacccacgtcagccagacgcaggagcagaacaaggagaatctgaaccccaattctgacgcgcccgtgatcaggtcaaaaacctccgcgcgctacatggagctggtcgggtggctggtggaccggggcatcacctccgagaagcagtggatccaggaggaccaggcctcgtacatctccttcaacgccgcctccaactcgcggtcccagatcaaggccgcgctggacaatgccggcaagatcatggcgctgaccaaatccgcgcccgactacctggtggggccctcgctgcccgcggacattaaaaccaaccgcatctaccgcatcctggagctgaacgggtacgatcctgcctacgccggctccgtctttctcggctgggcccagaaaaagttcgggaagcgcaacaccatctggctgtttgggcccgccaccaccggcaagaccaacattgcggaagccatcgcccacgccgtgcccttctacggctgcgtcaactggaccaatgagaactttcccttcaacgattgcgtcgacaagatggtgatctggtgggaggagggcaagatgacggccaaggtcgtggagtccgccaaggccattctcggcggcagcaaggtgcgcgtggaccaaaagtgcaagtcgtccgcccagatcgaccccacccccgtgatcgtcacctccaacaccaacatgtgcgccgtgattgacgggaacagcaccaccttcgagcaccagcagccgttgcaggaccggatgttcaaatttgaactcacccgccgtctggagcacgactttggcaaggtgacgaagcaggaagtcaaagagttcttccgctgggccagtgatcacgtgaccgaggtggcgcatgagttctacgtcagaaagggcggagccagcaaaagacccgcccccgatgacgcggatataagcgagcccaagcgggcctgcccctcagtcgcggatccatcgacgtcagacgcggaaggagctccggtggactttgccgacaggtaccaaaacaaatgttctcgtcacgcgggcatgattcagatgctgtttccctgcaaaacgtgcgagagaatgaatcagaatttcaacatttgcttcacacacggggtcagagactgtttagagtgtttccccggcgtgtcagaatctcaaccggtcgtcagaaaaaagacgtatcggaaactctgcgcgattcatcatctgctggggcgggcgcccgagattgcttgctcggcctgcgacctggtcaacgtggacctggacgactgcgtttctgagcaataaatgacttaaaccaggtatggctgccgatggttatcttccagattggctcgaggacaacctctctgagggcattcgcgagtggtgggacctgaaacctggagccccgaaacccaaagccaaccagcaaaagcaggacaacggccggggtctggtgcttcctggctacaagtacctcggacccttcaacggactcgacaagggggagcccgtcaacgcggcggacgcagcggccctcgagcacgacaaggcctacgaccagcagctcaaagcgggtgacaatccgtacctgcggtataaccacgccgacgccgagtttcaggagcgtctgcaagaagatacgtcatttgggggcaacctcgggcgagcagtcttccaggccaagaagcgggttctcgaacctctcggtctggttgaggaaggcgctaagacggctcctgcaaagaagagaccggtagagccgtcacctcagcgttcccccgactcctccacgggcatcggcaagaaaggccagcagcccgccagaaagagactcaatttcggtcagactggcgactcagagtcagtccccgaccctcaacctctcggagaacctccagcagcgccctctagtgtgggatctggtacagtggctgcaggcggtggcgcaccaatggcagacaataacgaaggtgccgacggagtgggtaatgcctcaggaaattggcattgcgattccacatggctgggcgacagagtcattaccaccagcacccgaacctgggccctgcccacctacaacaaccacctctacaagcaaatctccagtgaaactgcaggtagtaccaacgacaacacctacttcggctacagcaccccctgggggtattttgactttaacagattccactgccacttctcaccacgtgactggcagcgactcatcaacaacaactggggattccggcccaagaagctgcggttcaagctcttcaacatccaggtcaaggaggtcacgacgaatgacggcgttacgaccatcgctaataaccttaccagcacgattcaggtattctcggactcggaataccagctgccgtacgtcctcggctctgcgcaccagggctgcctgcctccgttcccggcggacgtcttcatgattcctcagtacggctacctgactctcaacaatggcagtcagtctgtgggacgttcctccttctactgcctggagtacttcccctctcagatgctgagaacgggcaacaactttgagttcagctacagcttcgaggacgtgcctttccacagcagctacgcacacagccagagcctggaccggctgatgaatcccctcatcgaccagtacttgtactacctggccagaacacagagtaacccaggaggcacagctggcaatcgggaactgcagttttaccagggcgggccttcaactatggccgaacaagccaagaattggttacctggaccttgcttccggcaacaaagagtctccaaaacgctggatcaaaacaacaacagcaactttgcttggactggtgccaccaaatatcacctgaacggcagaaactcgttggttaatcccggcgtcgccatggcaactcacaaggacgacgaggaccgctttttcccatccagcggagtcctgatttttggaaaaactggagcaactaacaaaactacattggaaaatgtgttaatgacaaatgaagaagaaattcgtcctactaatcctgtagccacggaagaatacgggatagtcagcagcaacttacaagcggctaatactgcagcccagacacaagttgtcaacaaccagggagccttacctggcatggtctggcagaaccgggacgtgtacctgcagggtcccatctgggccaagattcctcacacggatggcaactttcacccgtctcctttgatgggcggctttggacttaaacatccgcctcctcagatcctgatcaagaacactcccgttcccgctaatcctccggaggtgtttactcctgccaagtttgcttcgttcatcacacagtacagcaccggacaagtcagcgtggaaatcgagtgggagctgcagaaggaaaacagcaagcgctggaacccggagattcagtacacctccaactttgaaaagcagactggtgtggactttgccgttgacagccagggtgtttactctgagcctcgccctattggcactcgttacctcacccgtaatctgtaattgcatgttaatcaataaaccggttgattcgtttcagttgaactttggtctcctgtgcttcttatcttatcggtttccatagcaactggttacacattaactgcttgggtgcgcttcacgataagaacactgacgtcaccgcggtacccctagtgatggagttggccactccctctatgcgcgctcgctcgctcggtggggcctgcggaccaaaggtccgcagacggcagagctctgctctgccggccccaccgagcgagcgagcgcgcatagagggagtggccaa

SEQ ID NO: 109 - DNA, 2214 bp, Adeno-associated virus; identical to SEQ ID NO: 104
  source 1..2214: mol_type = unassigned DNA

SEQ ID NO: 110 - protein, 737 aa, Adeno-associated virus; identical to SEQ ID NO: 106

SEQ ID NO: 111 - DNA, 2217 bp, Adeno-associated virus
  source 1..2217: mol_type = unassigned DNA
atggctgccgatggttatcttccagattggctcgaggacaacctctctgagggcattcgcgagtggtgggcgctgaaacctggagccccgaagcccaaagccaaccagcaaaagcaggacgacggccggggtctggtgcttcctggctacaagtacctcggacccttcaacggactcgacaagggggagcccgtcaacgcggcggacgcagcggccctcgagcacgacaaggcctacgaccagcagctgcaggcgggtgacaatccgtacctgcggtataaccacgccgacgccgagtttcaggagcgtctgcaagaagatacgtcttttgggggcaacctcgggcgagcagtcttccaggccaagaagcgggttctcgaacctctcggtctggttgaggaaggcgctaagacggctcctggaaagaagagaccggtagagccatcaccccagcgttctccagactcctctacgggcatcggcaagaaaggccaacagcccgccagaaaaagactcaattttggtcagactggcgactcagagtcagttccagaccctcaacctctcggagaacctccagcagcgccctctggtgtgggacctaatacaatggctgcaggcggtggcgcaccaatggcagacaataacgaaggcgccgacggagtgggtagttcctcgggaaattggcattgcgattccacatggctgggcgacagagtcatcaccaccagcacccgaacctgggccctgcccacctacaacaaccacctctacaagcaaatctccaacgggacatcgggaggagccaccaacgacaacacctacttcggctacagcaccccctgggggtattttgactttaacagattccactgccacttttcaccacgtgactggcagcgactcatcaacaacaactggggattccggcccaagagactcagcttcaagctcttcaacatccaggtcaaggaggtcacgcagaatgaaggcaccaagaccatcgccaataacctcaccagcaccatccaggtgtttacggactcggagtaccagctgccgtacgttctcggctctgcccaccagggctgcctgcctccgttcccggcggacgtgttcatgattccccagtacggctacctaacactcaacaacggtagtcaggccgtgggacgctcctccttctactgcctggaatactttccttcgcagatgctgagaaccggcaacaacttccagtttacttacaccttcgaggacgtgcctttccacagcagctacgcccacagccagagcttggaccggctgatgaatcctctgattgaccagtacctgtactacttgtctcggactcaaacaacaggaggcacggcaaatacgcagactctgggcttcagccaaggtgggcctaatacaatggccaatcaggcaaagaactggctgccaggaccctgttaccgccaacaacgcgtctcaacgacaaccgggcaaaacaacaatagcaactttgcctggactgctgggaccaaataccatctgaatggaagaaattcattggctaatcctggcatcgctatggcaacacacaaagacgacgaggagcgtttttttcccagtaacgggatcctgatttttggcaaacaaaatgctgccagagacaatgcggattacagcgatgtcatgctcaccagcgaggaagaaatcaaaaccactaaccctgtggctacagaggaatacggtatcgtggcagataacttgcagcagcaaaacacggctcctcaaattggaactgtcaacagccagggggccttacccggtatggtctggcagaaccgggacgtgtacctgcagggtcccatctgggccaagattcctcacacggacggcaacttccacccgtctccgctgatgggcggctttggcctgaaacatcctccgcctcagatcctgatcaagaacacgcctgtacctgcggatcctccgaccaccttcaaccagtcaaagctgaactctttcatcacgcaatacagcaccggacaggtcagcgtggaaattgaatgggagctgcagaaggaaaacagcaagcgctggaaccccgagatccagtacacctccaactactacaaatctacaagtgtggactttgctgttaatacagaaggcgtgtactctgaaccccgccccattggcacccgttacctcacccgtaatctgtaa

SEQ ID NO: 112 - DNA, 2213 bp, Adeno-associated virus 8
  source 1..2213: mol_type = unassigned DNA
atggctgccgatggttatcttccagattggctcgaggacaacctctctgagggcattcgcgagtggtgggcgctgaaacctggagccccgaagcccaaagccaaccagcaaaagcaggacgacggccggggtctggtgcttcctggctacaagtacctcggacccttcaacggactcgacaagggggagcccgtcaacgcggcggacgcagcggccctcgagcacgacaaggcctacgaccagcagctgcaggcgggtgacaatccgtacctgcggtataaccacgccgacgccgagtttcaggagcgtctgcaagaagatacgtcttttgggggcaacctcgggcgagcagtcttccaggccaagaagcgggttctcgaacctctcggtctggttgaggaaggcgctaagacggctcctggaaagaagagaccggtagagccatcaccccagcgttctccagactcctctacgggcatcggcaagaaaggccaacagcccgccagaaaaagactcaattttggtcagactggcgactcagagtcagttccagaccctcaacctctcggagaacctccagcagcgccctctggtgtgggacctaatacaatggctgcaggcggtggcgcaccaatggcagacaataacgaaggcgccgacggagtgggtagttcctcgggaaattggcattgcgattccacatggctgggcgacagagtcatcaccaccagcacccgaacctgggccctgcccacctacaacaaccacctctacaagcaaatctccaacgggacatcgggaggagccaccaacgacaacacctacttcggctacagcaccccctgggggtattttgactttaacagattccactgccacttttcaccacgtgactggcagcgactcatcaacaacaactggggattccggcccaagagactcagcttcaagctcttcaacatccaggtcaaggaggtcacgcagaatgaaggcaccaagaccatcgccaataacctcaccagcaccatccaggtgtttacggactcggagtaccagctgccgtacgttctcggctctgcccaccagggctgcctgcctccgttcccggcggacgtgttcatgattccccagtacggctacctaacactcaacaacggtagtcaggccgtgggacgctcctccttctactgcctggaatactttccttcgcagatgctgagaaccggcaacaacttccagtttacttacaccttcgaggacgtgcctttccacagcagctacgcccacagccagagcttggaccggctgatgaatcctctgattgaccagtacctgtactacttgtctcggactcaaacaacaggaggcacggcaaatacgcagactctgggcttcagccaaggtgggcctaatacaatggccaatcaggcaaagaactggctgccaggaccctgttaccgccaacaacgcgtctcaacgacaaccgggcaaaacaacaatagcaactttgcctggactgctgggaccaaataccatctgaatggaagaaattcattggctaatcctggcatcgctatggcaacacacaaagacgacgaggagcgtttttttcccagtaacgggatcctgatttttggcaaacaaaatgctgccagagacaatgcggattacagcgatgtcatgctcaccagcgaggaagaaatcaaaaccactaaccctgtggctacagaggaatacggtatcgtggcagataacttgcagcagcaaaacacggctcctcaaattggaactgtcaacagccagggggccttacccggtatggtctggcagaaccgggacgtgtacctgcagggtcccatctgggccaagattcctcacacggacggcaacttccacccgtctccgctgatgggcggctttggcctgaaacatcctccgcctcagatcctgatcaagaacacgcctgtacctgcggatcctccgaccaccttcaaccagtcaaagctgaactctttcatcacgcaatacagcaccggacaggtcagcgtggaaattgaatgggagctgcagaaggaaaacagcaagcgctggaaccccgagatccagtacacctccaactactacaaatctacaagtgtggactttgctgtaatacagaaggcgtgtactctgaaccccgccccattggcacccgttacctcacccgtaatctg

SEQ ID NO: 113 - DNA, 4393 bp, Adeno-associated virus 8
  source 1..4393: mol_type = unassigned DNA
cagagagggagtggccaactccatcactaggggtagcgcgaagcgcctcccacgctgccgcgtcagcgctgacgtaaattacgtcataggggagtggtcctgtattagctgtcacgtgagtgcttttgcggcattttgcgacaccacgtggccatttgaggtatatatggccgagtgagcgagcaggatctccattttgaccgcgaaatttgaacgagcagcagccatgccgggcttctacgagatcgtgatcaaggtgccgagcgacctggacgagcacctgccgggcatttctgactcgtttgtgaactgggtggccgagaaggaatgggagctgcccccggattctgacatggatcggaatctgatcgagcaggcacccctgaccgtggccgagaagctgcagcgcgacttcctggtccaatggcgccgcgtgagtaaggccccggaggccctcttctttgttcagttcgagaagggcgagagctactttcacctgcacgttctggtcgagaccacgggggtcaagtccatggtgctaggccgcttcctgagtcagattcgggaaaagcttggtccagaccatctacccgcggggtcgagccccaccttgcccaactggttcgcggtgaccaaagacgcggtaatggcgccggcgggggggaacaaggtggtggacgagtgctacatccccaactacctcctgcccaagactcagcccgagctgcagtgggcgtggactaacatggaggagtatataagcgcgtgcttgaacctggccgagcgcaaacggctcgtggcgcagcacctgacccacgtcagccagacgcaggagcagaacaaggagaatctgaaccccaattctgacgcgcccgtgatcaggtcaaaaacctccgcgcgctatatggagctggtcgggtggctggtggaccggggcatcacctccgagaagcagtggatccaggaggaccaggcctcgtacatctccttcaacgccgcctccaactcgcggtcccagatcaaggccgcgctggacaatgccggcaagatcatggcgctgaccaaatccgcgcccgactacctggtggggccctcgctgcccgcggacattacccagaaccgcatctaccgcatcctcgctctcaacggctacgaccctgcctacgccggctccgtctttctcggctgggctcagaaaaagttcgggaaacgcaacaccatctggctgtttggacccgccaccaccggcaagaccaacattgcggaagccatcgcccacgccgtgcccttctacggctgcgtcaactggaccaatgagaactttcccttcaatgattgcgtcgacaagatggtgatctggtgggaggagggcaagatgacggccaaggtcgtggagtccgccaaggccattctcggcggcagcaaggtgcgcgtggaccaaaagtgcaagtcgtccgcccagatcgaccccacccccgtgatcgtcacctccaacaccaacatgtgcgccgtgattgacgggaacagcaccaccttcgagcaccagcagcctctccaggaccggatgtttaagttcgaactcacccgccgtctggagcacgactttggcaaggtgacaaagcaggaagtcaaagagttcttccgctgggccagtgatcacgtgaccgaggtggcgcatgagttttacgtcagaaagggcggagccagcaaaagacccgcccccgatgacgcggataaaagcgagcccaagcgggcctgcccctcagtcgcggatccatcgacgtcagacgcggaaggagctccggtggactttgccgacaggtaccaaaacaaatgttctcgtcacgcgggcatgcttcagatgctgtttccctgcaaaacgtgcgagagaatgaatcagaatttcaacatttgcttcacacacggggtcagagactgctcagagtgtttccccggcgtgtcagaatctcaaccggtcgtcagaaagaggacgtatcggaaactctgtgcgattcatcatctgctggggcgggctcccgagattgcttgctcggcctgcgatctggtcaacgtggacctggatgactgtgtttctgagcaataaatgacttaaaccaggtatggctgccgatggttatcttccagattggctcgaggacaacctctctgagggcattcgcgagtggtgggcgctgaaacctggagccccgaagcccaaagccaaccagcaaaagcaggacgacggccggggtctggtgcttcctggctacaagtacctcggacccttcaacggactcgacaagggggagcccgtcaacgcggcggacgcagcggccctcgagcacgacaaggcctacgaccagcagctgcaggcgggtgacaatccgtacctgcggtataaccacgccgacgccgagtttcaggagcgtctgcaagaagatacgtcttttgggggcaacctcgggcgagcagtcttccaggccaagaagcgggttctcgaacctctcggtctggttgaggaaggcgctaagacggctcctggaaagaagagaccggtagagccatcaccccagcgttctccagactcctctacgggcatcggcaagaaaggccaacagcccgccagaaaaagactcaattttggtcagactggcgactcagagtcagttccagaccctcaacctctcggagaacctccagcagcgccctctggtgtgggacctaatacaatggctgcaggcggtggcgcaccaatggcagacaataacgaaggcgccgacggagtgggtagttcctcgggaaattggcattgcgattccacatggctgggcgacagagtcatcaccaccagcacccgaacctgggccctgcccacctacaacaaccacctctacaagcaaatctccaacgggacatcgggaggagccaccaacgacaacacctacttcggctacagcaccccctgggggtattttgactttaacagattccactgccacttttcaccacgtgactggcagcgactcatcaacaacaactggggattccggcccaagagactcagcttcaagctcttcaacatccaggtcaaggaggtcacgcagaatgaaggcaccaagaccatcgccaataacctcaccagcaccatccaggtgtttacggactcggagtaccagctgccgtacgttctcggctctgcccaccagggctgcctgcctccgttcccggcggacgtgttcatgattccccagtacggctacctaacactcaacaacggtagtcaggccgtgggacgctcctccttctactgcctggaatactttccttcgcagatgctgagaaccggcaacaacttccagtttacttacaccttcgaggacgtgcctttccacagcagctacgcccacagccagagcttggaccggctgatgaatcctctgattgaccagtacctgtactacttgtctcggactcaaacaacaggaggcacggcaaatacgcagactctgggcttcagccaaggtgggcctaatacaatggccaatcaggcaaagaactggctgccaggaccctgttaccgccaacaacgcgtctcaacgacaaccgggcaaaacaacaatagcaactttgcctggactgctgggaccaaataccatctgaatggaagaaattcattggctaatcctggcatcgctatggcaacacacaaagacgacgaggagcgtttttttcccagtaacgggatcctgatttttggcaaacaaaatgctgccagagacaatgcggattacagcgatgtcatgctcaccagcgaggaagaaatcaaaaccactaaccctgtggctacagaggaatacggtatcgtggcagataacttgcagcagcaaaacacggctcctcaaattggaactgtcaacagccagggggccttacccggtatggtctggcagaaccgggacgtgtacctgcagggtcccatctgggccaagattcctcacacggacggcaacttccacccgtctccgctgatgggcggctttggcctgaaacatcctccgcctcagatcctgatcaagaacacgcctgtacctgcggatcctccgaccaccttcaaccagtcaaagctgaactctttcatcacgcaatacagcaccggacaggtcagcgtggaaattgaatgggagctgcagaaggaaaacagcaagcgctggaaccccgagatccagtacacctccaactactacaaatctacaagtgtggactttgctgttaatacagaaggcgtgtactctgaaccccgccccattggcacccgttacctcacccgtaatctgtaattgcctgttaatcaataaaccggttgattcgtttcagttgaactttggtctctgcg

SEQ ID NO: 114 - protein, 738 aa, Adeno-associated virus 8; identical to SEQ ID NO: 105

SEQ ID NO: 115 - protein, 737 aa, Adeno-associated virus 8
MAADGYLPDWLEDNLSEGIREWWALKPGAPKPKANQQKQDDGRGLVLPGYKYLGPFNGLDKGEPVNAADAAALEHDKAYDQQLQAGDNPYLRYNHADAEFQERLQEDTSFGGNLGRAVFQAKKRVLEPLGLVEEGAKTAPGKKRPVEPSPQRSPDSSTGIGKKGQQPARKRLNFGQTGDSESVPDPQPLGEPPAAPSGVGPNTMAAGGGAPMADNNEGADGVGSSSGNWHCDSTWLGDRVITTSTRTWALPTYNNHLYKQISNGTSGGATNDNTYFGYSTPWGYFDFNRFHCHFSPRDWQRLINNNWGFRPKRLSFKLFNIQVKEVTQNEGTKTIANNLTSTIQVFTDSEYQLPYVLGSAHQGCLPPFPADVFMIPQYGYLTLNNGSQAVGRSSFYCLEYFPSQMLRTGNNFQFTYTFEDVPFHSSYAHSQSLDRLMNPLIDQYLYYLSRTQTTGGTANTQTLGFSQGGPNTMANQAKNWLPGPCYRQQRVSTTTGQNNNSNFAWTAGTKYHLNGRNSLANPGIAMATHKDDEERFFPSNGILIFGKQNAARDNADYSDVMLTSEEEIKTTNPVATEEYGIVADNLQQQNTAPQIGTVNSQGALPGMVWQNRDVYLQGPIWAKIPHTDGNFHPSPLMGGFGLKHPPPQILIKNTPVPADPPTTFNQSKLNSFITQYSTGQVSVEIEWELQKENSKRWNPEIQYTSNYYKSTSVDFAVIQKACTLNPAPLAPVTSPVI

SEQ ID NO: 116 - DNA, 2217 bp, Adeno-associated virus; identical to SEQ ID NO: 111
  source 1..2217: mol_type = unassigned DNA

SEQ ID NO: 117 - DNA, 2214 bp, synthetic construct
  source 1..2214: mol_type = other DNA; note = Description of Artificial Sequence: Synthetic polynucleotide
atggctgccgatggttatcttccagattggctcgaggacaacctctctgagggcattcgcgagtggtgggcgctgaaacctggagccccgaagcccaaagccaaccagcaaaagcaggacgacggccggggtctggtgcttcctggctacaagtacctcggacccttcaacggactcgacaagggggagcccgtcaacgcggcggacgcagcggccctcgagcacgacaaggcctacgaccagcagctgcaggcgggtgacaatccgtacctgcggtataaccacgccgacgccgagtttcaggagcgtctgcaagaagatacgtcttttgggggcaacctcgggcgagcagtcttccaggccaagaagcgggttctcgaacctctcggtctggttgaggaaggcgctaagacggctcctggaaagaagagaccggtagagccatcaccccagcgttctccagactcctctacgggcatcggcaagaaaggccaacagcccgccagaaaaagactcaattttggtcagactggcgactcagagtcagttccagaccctcaacctctcggagaacctccagcagcgccctctggtgtgggacctaatacaatggctgcaggcggtggcgcaccaatggcagacaataacgaaggcgccgacggagtgggtagttcctcgggaaattggcattgcgattccacatggctgggcgacagagtcatcaccaccagcacccgaacctgggccctgcccacctacaacaaccacctctacaagcaaatctccaacgggacatcgggaggagccaccaacgacaacacctacttcggctacagcaccccctgggggtattttgactttaacagattccactgccacttttcaccacgtgactggcagcgactcatcaacaacaactggggattccggcccaagagactcagcttcaagctcttcaacatccaggtcaaggaggtcacgcagaatgaaggcaccaagaccatcgccaataacctcaccagcaccatccaggtgtttacggactcggagtaccagctgccgtacgttctcggctctgcccaccagggctgcctgcctccgttcccggcggacgtgttcatgattccccagtacggctacctaacactcaacaacggtagtcaggccgtgggacgctcctccttctactgcctggaatactttccttcgcagatgctgagaaccggcaacaacttccagtttacttacaccttcgaggacgtgcctttccacagcagctacgcccacagccagagcttggaccggctgatgaatcctctgattgaccagtacctgtactacttgtctcggactcaaacaacaggaggcacggcaaatacgcagactctgggcttcagccaaggtgggcctaatacaatggccaatcaggcaaagaactggctgccaggaccctgttaccgccaacaacgcgtctcaacgacaaccgggcaaaacaacaatagcaactttgcctggactgctgggaccaaataccatctgaatggaagaaattcattggctaatcctggcatcgctatggcaacacacaaagacgacgaggagcgtttttttcccagtaacgggatcctgatttttggcaaacaaaatgctgccagagacaatgcggattacagcgatgtcatgctcaccagcgaggaagaaatcaaaaccactaaccctgtggctacagaggaatacggtatcgtggcagataacttgcctgagcggacggcgatgagtcttccgggaactgtcaacagccagggggccttacccggtatggtctggcagaaccgggacgtgtacctgcagggtcccatctgggccaagattcctcacacggacggcaacttccacccgtctccgctgatgggcggctttggcctgaaacatcctccgcctcagatcctgatcaagaacacgcctgtacctgcggatcctccgaccaccttcaaccagtcaaagctgaactctttcatcacgcaatacagcaccggacaggtcagcgtggaaattgaatgggagctgcagaaggaaaacagcaagcgctggaaccccgagatccagtacacctccaactactacaaatctacaagtgtggactttgctgttaatacagaaggcgtgtactctgaaccccgccccattggcacccgttacctcacccgtaatctg

SEQ ID NO: 118 - protein, 738 aa, synthetic construct
  source 1..738: note = Description of Artificial Sequence: Synthetic polypeptide
MAADGYLPDWLEDNLSEGIREWWALKPGAPKPKANQQKQDDGRGLVLPGYKYLGPFNGLDKGEPVNAADAAALEHDKAYDQQLQAGDNPYLRYNHADAEFQERLQEDTSFGGNLGRAVFQAKKRVLEPLGLVEEGAKTAPGKKRPVEPSPQRSPDSSTGIGKKGQQPARKRLNFGQTGDSESVPDPQPLGEPPAAPSGVGPNTMAAGGGAPMADNNEGADGVGSSSGNWHCDSTWLGDRVITTSTRTWALPTYNNHLYKQISNGTSGGATNDNTYFGYSTPWGYFDFNRFHCHFSPRDWQRLINNNWGFRPKRLSFKLFNIQVKEVTQNEGTKTIANNLTSTIQVFTDSEYQLPYVLGSAHQGCLPPFPADVFMIPQYGYLTLNNGSQAVGRSSFYCLEYFPSQMLRTGNNFQFTYTFEDVPFHSSYAHSQSLDRLMNPLIDQYLYYLSRTQTTGGTANTQTLGFSQGGPNTMANQAKNWLPGPCYRQQRVSTTTGQNNNSNFAWTAGTKYHLNGRNSLANPGIAMATHKDDEERFFPSNGILIFGKQNAARDNADYSDVMLTSEEEIKTTNPVATEEYGIVADNLPERTAMSLPGTVNSQGALPGMVWQNRDVYLQGPIWAKIPHTDGNFHPSPLMGGFGLKHPPPQILIKNTPVPADPPTTFNQSKLNSFITQYSTGQVSVEIEWELQKENSKRWNPEIQYTSNYYKSTSVDFAVNTEGVYSEPRPIGTRYLTRNL

SEQ ID NO: 119 - DNA, 2214 bp, synthetic construct
  source 1..2214: mol_type = other DNA; note = Description of Artificial Sequence: Synthetic polynucleotide
atggctgccgatggttatcttccagattggctcgaggacaacctctctgagggcattcgcgagtggtgggcgctgaaacctggagccccgaagcccaaagccaaccagcaaaagcaggacgacggccggggtctggtgcttcctggctacaagtacctcggacccttcaacggactcgacaagggggagcccgtcaacgcggcggacgcagcggccctcgagcacgacaaggcctacgaccagcagctgcaggcgggtgacaatccgtacctgcggtataaccacgccgacgccgagtttcaggagcgtctgcaagaagatacgtcttttgggggcaacctcgggcgagcagtcttccaggccaagaagcgggttctcgaacctctcggtctggttgaggaaggcgctaagacggctcctggaaagaagagaccggtagagccatcaccccagcgttctccagactcctctacgggcatcggcaagaaaggccaacagcccgccagaaaaagactcaattttggtcagactggcgactcagagtcagttccagaccctcaacctctcggagaacctccagcagcgccctctggtgtgggacctaatacaatggctgcaggcggtggcgcaccaatggcagacaataacgaaggcgccgacggagtgggtagttcctcgggaaattggcattgcgattccacatggctgggcgacagagtcatcaccaccagcacccgaacctgggccctgcccacctacaacaaccacctctacaagcaaatctccaacgggacatcgggaggagccaccaacgacaacacctacttcggctacagcaccccctgggggtattttgactttaacagattccactgccacttttcaccacgtgactggcagcgactcatcaacaacaactggggattccggcccaagagactcagcttcaagctcttcaacatccaggtcaaggaggtcacgcagaatgaaggcaccaagaccatcgccaataacctcaccagcaccatccaggtgtttacggactcggagtaccagctgccgtacgttctcggctctgcccaccagggctgcctgcctccgttcccggcggacgtgttcatgattccccagtacggctacctaacactcaacaacggtagtcaggccgtgggacgctcctccttctactgcctggaatactttccttcgcagatgctgagaaccggcaacaacttccagtttacttacaccttcgaggacgtgcctttccacagcagctacgcccacagccagagcttggaccggctgatgaatcctctgattgaccagtacctgtactacttgtctcggactcaaacaacaggaggcacggcaaatacgcagactctgggcttcagccaaggtgggcctaatacaatggccaatcaggcaaagaactggctgccaggaccctgttaccgccaacaacgcgtctcaacgacaaccgggcaaaacaacaatagcaactttgcctggactgctgggaccaaataccatctgaatggaagaaattcattggctaatcctggcatcgctatggcaacacacaaagacgacgaggagcgtttttttcccagtaacgggatcctgatttttggcaaacaaaatgctgccagagacaatgcggattacagcgatgtcatgctcaccagcgaggaagaaatcaaaaccactaaccctgtggctacagaggaatacggtatcgtggcagataacttgagttttagtcgtgcggttctttgtgatggaactgtcaacagccagggggccttacccggtatggtctggcagaaccgggacgtgtacctgcagggtcccatctgggccaagattcctcacacggacggcaacttccacccgtctccgctgatgggcggctttggcctgaaacatcctccgcctcagatcctgatcaagaacacgcctgtacctgcggatcctccgaccaccttcaaccagtcaaagctgaactctttcatcacgcaatacagcaccggacaggtcagcgtggaaattgaatgggagctgcagaaggaaaacagcaagcgctggaaccccgagatccagtacacctccaactactacaaatctacaagtgtggactttgctgttaatacagaaggcgtgtactctgaaccccgccccattggcacccgttacctcacccgtaatctg

SEQ ID NO: 120 - protein, 738 aa, synthetic construct
  source 1..738: note = Description of Artificial Sequence: Synthetic polypeptide
MAADGYLPDWLEDNLSEGIREWWALKPGAPKPKANQQKQDDGRGLVLPGYKYLGPFNGLDKGEPVNAADAAALEHDKAYDQQLQAGDNPYLRYNHADAEFQERLQEDTSFGGNLGRAVFQAKKRVLEPLGLVEEGAKTAPGKKRPVEPSPQRSPDSSTGIGKKGQQPARKRLNFGQTGDSESVPDPQPLGEPPAAPSGVGPNTMAAGGGAPMADNNEGADGVGSSSGNWHCDSTWLGDRVITTSTRTWALPTYNNHLYKQISNGTSGGATNDNTYFGYSTPWGYFDFNRFHCHFSPRDWQRLINNNWGFRPKRLSFKLFNIQVKEVTQNEGTKTIANNLTSTIQVFTDSEYQLPYVLGSAHQGCLPPFPADVFMIPQYGYLTLNNGSQAVGRSSFYCLEYFPSQMLRTGNNFQFTYTFEDVPFHSSYAHSQSLDRLMNPLIDQYLYYLSRTQTTGGTANTQTLGFSQGGPNTMANQAKNWLPGPCYRQQRVSTTTGQNNNSNFAWTAGTKYHLNGRNSLANPGIAMATHKDDEERFFPSNGILIFGKQNAARDNADYSDVMLTSEEEIKTTNPVATEEYGIVADNLSFSRAVLCDGTVNSQGALPGMVWQNRDVYLQGPIWAKIPHTDGNFHPSPLMGGFGLKHPPPQILIKNTPVPADPPTTFNQSKLNSFITQYSTGQVSVEIEWELQKENSKRWNPEIQYTSNYYKSTSVDFAVNTEGVYSEPRPIGTRYLTRNL

SEQ ID NO: 121 - DNA, 4385 bp, Adeno-associated virus 9
  source 1..4385: mol_type = unassigned DNA
cagagagggagtggccaactccatcactaggggtaatcgcgaagcgcctcccacgctgccgcgtcagcgctgacgtagattacgtcataggggagtggtcctgtattagctgtcacgtgagtgcttttgcgacattttgcgacaccacatggccatttgaggtatatatggccgagtgagcgagcaggatctccattttgaccgcgaaatttgaacgagcagcagccatgccgggcttctacgagattgtgatcaaggtgccgagcgacctggacgagcacctgccgggcatttctgactcttttgtgaactgggtggccgagaaggaatgggagctgcccccggattctgacatggatcggaatctgatcgagcaggcacccctgaccgtggccgagaagctgcagcgcgacttcctggtccaatggcgccgcgtgagtaaggccccggaggccctcttctttgttcagttcgagaagggcgagagctactttcacctgcacgttctggtcgagaccacgggggtcaagtccatggtgctaggccgcttcctgagtcagattcgggagaagctggtccagaccatctaccgcgggatcgagccgaccctgcccaactggttcgcggtgaccaagacgcgtaatggcgccggcggggggaacaaggtggtggacgagtgctacatccccaactacctcctgcccaagactcagcccgagctgcagtgggcgtggactaacatggaggagtatataagcgcgtgcttgaacctggccgagcgcaaacggctcgtggcgcagcacctgacccacgtcagccagacgcaggagcagaacaaggagaatctgaaccccaattctgacgcgcccgtgatcaggtcaaaaacctccgcgcgctacatggagctggtcgggtggctggtggaccggggcatcacctccgagaagcagtggatccaggaggaccaggcctcgtacatctccttcaacgccgcctccaactcgcggtcccagatcaaggccgcgctggacaatgccggcaagatcatggcgctgaccaaatccgcgcccgactacctggtaggcccttcacttccggtggacattacgcagaaccgcatctaccgcatcctgcagctcaacggctacgaccctgcctacgccggctccgtctttctcggctgggcacaaaagaagttcgggaaacgcaacaccatctggctgtttgggccggccaccacgggaaagaccaacatcgcagaagccattgcccacgccgtgcccttctacggctgcgtcaactggaccaatgagaactttcccttcaacgattgcgtcgacaagatggtgatctggtgggaggagggcaagatgacggccaaggtcgtggagtccgccaaggccattctcggcggcagcaaggtgcgcgtggaccaaaagtgcaagtcgtccgcccagatcgaccccactcccgtgatcgtcacctccaacaccaacatgtgcgccgtgattgacgggaacagcaccaccttcgagcaccagcagcctctccaggaccggatgtttaagttcgaactcacccgccgtctggagcacgactttggcaaggtgacaaagcaggaagtcaaagagttcttccgctgggccagtgatcacgtgaccgaggtggcgcatgagttttacgtcagaaagggcggagccagcaaaagacccgcccccgatgacgcggataaaagcgagcccaagcgggcctgcccctcagtcgcggatccatcgacgtcagacgcggaaggagctccggtggactttgccgacaggtaccaaaacaaatgttctcgtcacgcgggcatgcttcagatgctgcttccctgcaaaacgtgcgagagaatgaatcagaatttcaacatttgcttcacacacggggtcagagactgctcagagtgtttccccggcgtgtcagaatctcaaccggtcgtcagaaagaggacgtatcggaaactctgtgcgattcatcatctgctggggcgggctcccgagattgcttgctcggcctgcgatctggtcaacgtggacctggatgactgtgtttctgagcaataaatgacttaaaccaggtatggctgccgatggttatcttccagattggctcgaggacaacctctctgagggcattcgcgagtggtgggcgctgaaacctggagccccgaagcccaaagccaaccagcaaaagcaggacgacggccggggtctggtgcttcctggctacaagtacctcggacccttcaacggactcgacaagggggagcccgtcaacgcggcggacgcagcggccctcgagcacggcaaggcctacgaccagcagctgcaggcgggtgacaatccgtacctgcggtataaccacgccgacgccgagtttcaggagcgtctgcaagaagatacgtcttttgggggcaacctcgggcgagcagtcttccaggccaagaagcgggttctcgaacctctcggtctggttgaggaaggcgctaagacggctcctggaaagaagagaccggtagagccatcaccccagcgttctccagactcctctacgggcatcggcaagaaaggccaacagcccgccagaaaaagactcaattttggtcagactggcgactcagagtcagttccagaccctcaacctctcggagaacctccagcagcgccctctggtgtgggacctaatacaatggctgcaggcggtggcgcaccaatggcagacaataacgaaggcgccgacggagtgggtaattcctcgggaaattggcattgcgattccacatggctgggggacagagtcatcaccaccagcacccgaacctgggcattgcccacctacaacaaccacctctacaagcaaatctccaatggaacatcgggaggaagcaccaacgacaacacctactttggctacagcaccccctgggggtattttgacttcaacagattccactgccacttctcaccacgtgactggcagcgactcatcaacaacaactggggattccggccaaagagactcaacttcaagctgttcaacatccaggtcaaggaggttacgacgaacgaaggcaccaagaccatcgccaataaccttaccagcaccgtccaggtctttacggactcggagtaccagctaccgtacgtcctaggctctgcccaccaaggatgcctgccaccgtttcctgcagacgtcttcatggttcctcagtacggctacctgacgctcaacaatggaagtcaagcgttaggacgttcttctttctactgtctggaatacttcccttctcagatgctgagaaccggcaacaactttcagttcagctacactttcgaggacgtgcctttccacagcagctacgcacacagccagagtctagatcgactgatgaaccccctcatcgaccagtacctatactacctggtcagaacacagacaactggaactgggggaactcaaactttggcattcagccaagcaggccctagctcaatggccaatcaggctagaaactgggtacccgggccttgctaccgtcagcagcgcgtctccacaaccaccaaccaaaataacaacagcaactttgcgtggacgggagctgctaaattcaagctgaacgggagagactcgctaatgaatcctggcgtggctatggcatcgcacaaagacgacgaggaccgcttctttccatcaagtggcgttctcatatttggcaagcaaggagccgggaacgatggagtcgactacagccaggtgctgattacagatgaggaagaaattaaagccaccaaccctgtagccacagaggaatacggagcagtggccatcaacaaccaggccgctaacacgcaggcgcaaactggacttgtgcataaccagggagttattcctggtatggtctggcagaaccgggacgtgtacctgcagggccctatttgggctaaaatacctcacacagatggcaactttcacccgtctcctctgatgggtggatttggactgaaacacccacctccacagattctaattaaaaatacaccagtgccggcagatcctcctcttaccttcaatcaagccaagctgaactctttcatcacgcagtacagcacgggacaagtcagcgtggaaatcgagtgggagctgcagaaagaaaacagcaagcgctggaatccagagatccagtatacttcaaactactacaaatctacaaatgtggactttgctgtcaataccaaaggtgtttactctgagcctcgccccattggtactcgttacctcacccgtaatttgtaattgcctgttaatcaataaaccggttaattcgtttcagttgaactttggtctctgcg

SEQ ID NO: 122 - DNA, 4382 bp, Adeno-associated virus 9
  source 1..4382: mol_type = unassigned DNA
cagagagggagtggccaactccatcactaggggtaatcgcgaagcgcctcccacgctgccgcgtcagcgctgacgtagattacgtcataggggagtggtcctgtattagctgtcacgtgagtgcttttgcgacattttgcgacaccacatggccatttgaggtatatatggccgagtgagcgagcaggatctccattttgaccgcgaaatttgaacgagcagcagccatgccgggcttctacgagattgtgatcaaggtgccgagcgacctggacgagcacctgccgggcatttctgactcttttgtgaactgggtggccgagaaggaatgggagctgcccccggattctgacatggatcggaatctgatcgagcaggcacccctgaccgtggccgagaagctgtagcgcgacttcctggtccaatggcgccgcgtgagtaaggccccggaggccctcttctttgttcagttcgagaagggcgagagctactttcacctgcacgttctggtcgagaccacgggggtcaagtccatggtgctaggccgcttcctgagtcagattcgggagaagctggtccagaccatctaccgcgggatcgagccgaccctgcccaactggttcgcggtgaccaagacgcgtaatggcgccggcggggggaacaaggtggtggacgagtgctacatccccaactacctcctgcccaagactcagcccgagctgcagtgggcgtggactaacatggaggagtatataagcgcgtgcttgaacctggccgagcgcaaacggctcgtggcgcagcacctgacccacgtcagccagacgcaggagcagaacaaggagaatctgaaccccaattctgacgcgcccgtgatcaggtcaaaaacctccgcgcgctacatggagctggtcgggtggctggtggaccggggcatcacctccgagaagcagtggatccaggaggaccaggcctcgtacatctccttcaacgccgcctccaactcgcggtcccagatcaaggccgcgctggacaatgccggcaagatcatggcgctgaccaaatccgcgcccgactacctggtaggcccttcacttccggtggacattacgcagaaccgcatctaccgcatcctgcagctcaacggctacgaccctgcctacgccggctccgtctttctcggctgggcacaaaagaagttcgggaaacgcaacaccatctggctgtttgggccggccaccacgggaaagaccaacatcgcagaagccattgcccacgccgtgcccttctacggctgcgtcaactggaccaatgagaactttcccttcaacgattgcgtcgacaagatggtgatctggtgggaggagggcaagatgacggccaaggtcgtggagtccgccaaggccattctcggcggcagcaaggtgcgcgtggaccaaaagtgcaagtcgtccgcccagatcgaccccactcccgtgatcgtcacctccaacaccaacatgtgcgccgtgattgacgggaacagcaccaccttcgagcaccagcagcctctccaggaccggatgtttaagttcgaactcacccgccgtctggagcacgactttggcaaggtgacaaagcaggaagtcaaagagttcttccgctgggccagtgatcacgtgaccgaggtggcgcatgagttttacgtcagaaagggcggagccagcaaaagacccgcccccgatgacgcggataaaagcgagcccaagcgggcctgcccctcagtcgcggatccatcgacgtcagacgcggaaggagctccggtggactttgccgacaggtaccaaaacaaatgttctcgtcacgcgggcatgcttcagatgctgcttccctgcaaaacgtgcgagagaatgaatcagaatttcaacatttgcttcacacacggggtcagagactgctcagagtgtttccccggcgtgtcagaatctcaaccggtcgtcagaaagaggacgtatcggaaactctgtgcgattcatcatctgctggggcgggctcccgagattgcttgctcggcctgcgatctggtcaacgtggacctggatgactgtgtttctgagcaataaatgacttaaaccaggtatggctgccgatggttatcttccagattggctcgaggacaacctctctgagggcattcgcgagtggtgggacctgaaacctggagccccgaaacccaaagccaaccagcaaaagcaggacgacggccggggtctggtgcttcctggctacaagtacctcggacccttcaacggactcgacaagggggagcccgtcaacgcggcggacgcagcggccctcgagcacgacaaggcctacgaccagcagctcaaagcgggtgacaatccgtacctgcggtataaccacgccgacgccgagtttcaggagcgtctgcaagaagatacgtcttttgggggcaacctcgggcgagcagtcttccaggccaagaagcgggttctcgaacctctcggtctggttgaggaaggcgctaagacggctcctggaaagaagagaccggtagagcagtcaccccaagaaccagactcatcctcgggcatcggcaaatcaggccagcagcccgctaaaaagagactcaattttggtcagactggcgactcagagtcagtccccgacccacaacctctcggagaacctccagaagccccctcaggtctgggacctaatacaatggcttcaggcggtggcgctccaatggcagacaataacgaaggcgccgacggagtgggtaattcctcgggaaattggcattgcgattccacatggctgggggacagagtcatcaccaccagcacccgaacctgggcattgcccacctacaacaaccacctctacaagcaaatctccaatggaacatcgggaggaagcaccaacgacaacacctactttggctacagcaccccctgggggtattttgacttcaacagattccactgccacttctcaccacgtgactggcagcgactcatcaacaacaactggggattccggccaaagagactcaacttcaagctgttcaacatccaggtcaaggaggttacgacgaacgaaggcaccaagaccatcgccaataaccttaccagcaccgtccaggtctttacggactcggagtaccagctaccgtacgtcctaggctctgcccaccaaggatgcctgccaccgtttcctgcagacgtcttcatggttcctcagtacggctacctgacgctcaacaatggaagtcaagcgttaggacgttcttctttctactgtctggaatacttcccttctcagatgctgagaaccggcaacaactttcagttcagctacactttcgaggacgtgcctttccacagcagctacgcacacagccagagtctagatcgactgatgaaccccctcatcgaccagtacctatactacctggtcagaacacagacaactggaactgggggaactcaaactttggcattcagccaagcaggccctagctcaatggccaatcaggctagaaactgggtacccgggccttgctaccgtcagcagcgcgtctccacaaccaccaaccaaaataacaacagcaactttgcgtggacgggagctgctaaattcaagctgaacgggagagactcgctaatgaatcctggcgtggctatggcatcgcacaaagacgacgaggaccgcttctttccatcaagtggcgttctcatatttggcaagcaaggagccgggaacgatggagtcgactacagccaggtgctgattacagatgaggaagaaattaaagccaccaaccctgtagccacagaggaatacggagcagtggccatcaacaaccaggccgctaacacgcaggcgcaaactggacttgtgcataaccagggagttattcctggtatggtctggcagaaccgggacgtgtacctgcagggccctatttgggctaaaatacctcacacagatggcaactttcacccgtctcctctgatgggtggatttggactgaaacacccacctccacagattctaattaaaaatacaccagtgccggcagatcctcctcttaccttcaatcaagccaagctgaactctttcatcacgcagtacagcacgggacaagtcagcgtggaaatcgagtgggagctgcagaaagaaaacagcaagcgctggaatccagagatccagtatacttcaaactactacaaatctacaaatgtggactttgctgtcaataccgaaggtgtttactctgagcctcgccccattggtactcgttacctcacccgtaatttgtaattgcctgttaatcaataaaccggttaattcgtttcagttgaactttggtctctgcg

SEQ ID NO: 123 - protein, 736 aa, Adeno-associated virus 9
MAADGYLPDWLEDNLSEGIREWWALKPGAPQPKANQQHQDNARGLVLPGYKYLGPGNGLDKGEPVNAADAAALEHDKAYDQQLKAGDNPYLKYNHADAEFQERLKEDTSFGGNLGRAVFQAKKRLLEPLGLVEEAAKTAPGKKRPVEQSPQEPDSSAGIGKSGAQPAKKRLNFGQTGDTESVPDPQPIGEPPAAPSGVGSLTMASGGGAPVADNNEGADGVGSSSGNWHCDSQWLGDRVITTSTRTWALPTYNNHLYKQISNSTSGGSSNDNAYFGYSTPWGYFDFNRFHCHFSPRDWQRLINNNWGFRPKRLNFKLFNIQVKEVTDNNGVKTIANNLTSTVQVFTDSDYQLPYVLGSAHEGCLPPFPADVFMIPQYGYLTLNDGSQAVGRSSFYCLEYFPSQMLRTGNNFQFSYEFENVPFHSSYAHSQSLDRLMNPLIDQYLYYLSKTINGSGQNQQTLKFSVAGPSNMAVQGRNYIPGPSYRQQRVSTTVTQNNNSEFAWPGASSWALNGRNSLMNPGPAMASHKEGEDRFFPLSGSLIFGKQGTGRDNVDADKVMITNEEEIKTTNPVATESYGQVATNHQSAQAQAQTGWVQNQGILPGMVWQDRDVYLQGPIWAKIPHTDGNFHPSPLMGGFGMKHPPPQILIKNTPVPADPPTAFNKDKLNSFITQYSTGQVSVEIEWELQKENSKRWNPEIQYTSNYYKSNNVEFAVNTEGVYSEPRPIGTRYLTRNL

SEQ ID NO: 124 - protein, 736 aa, synthetic construct
  source 1..736: note = Description of Artificial Sequence: Synthetic polypeptide
MAADGYLPDWLEDNLSEGIREWWDLKPGAPKPKANQQKQDDGRGLVLPGYKYLGPFNGLDKGEPVNAADAAALEHDKAYDQQLKAGDNPYLRYNHADAEFQERLQEDTSFGGNLGRAVFQAKKRVLEPLGLVEEGAKTAPGKKRPVEQSPQEPDSSSGIGKSGQQPAKKRLNFGQTGDSESVPDPQPLGEPPEAPSGLGPNTMASGGGAPMADNNEGADGVGNSSGNWHCDSTWLGDRVITTSTRTWALPTYNNHLYKQISNGTSGGSTNDNTYFGYSTPWGYFDFNRFHCHFSPRDWQRLINNNWGFRPKRLNFKLFNIQVKEVTTNEGTKTIANNLTSTVQVFTDSEYQLPYVLGSAHQGCLPPFPADVFMVPQYGYLTLNNGSQALGRSSFYCLEYFPSQMLRTGNNFQFSYTFEDVPFHSSYAHSQSLDRLMNPLIDQYLYYLVRTQTTGTGGTQTLAFSQAGPSSMANQARNWVPGPCYRQQRVSTTTNQNNNSNFAWTGAAKFKLNGRDSLMNPGVAMASHKDDEDRFFPSSGVLIFGKQGAGNDGVDYSQVLITDEEEIKATNPVATEEYGAVAINNQAANTQAQTGLVHNQGVIPGMVWQNRDVYLQGPIWAKIPHTDGNFHPSPLMGGFGLKHPPPQILIKNTPVPADPPLTFNQAKLNSFITQYSTGQVSVEIEWELQKENSKRWNPEIQYTSNYYKSTNVDFAVNTEGVYSEPRPIGTRYLTRNL

SEQ ID NO: 125 - protein, 623 aa, synthetic construct
  source 1..623: note = Description of Artificial Sequence: Synthetic polypeptide
MPGFYEIVIKVPSDLDEHLPGISDSFVNWVAEKEWELPPDSDMDRNLIEQAPLTVAEKLQRDFLVQWRRVSKAPEALFFVQFEKGESYFHLHVLVETTGVKSMVLGRFLSQIREKLVQTIYRGIEPTLPNWFAVTKTRNGAGGGNKVVDECYIPNYLLPKTQPELQWAWTNMEEYISACLNLAERKRLVAQHLTHVSQTQEQNKENLNPNSDAPVIRSKTSARYMELVGWLVDRGITSEKQWIQEDQASYISFNAASNSRSQIKAALDNAGKIMALTKSAPDYLVGPSLPVDITQNRIYRILQLNGYDPAYAGSVFLGWAQKKFGKRNTIWLFGPATTGKTNIAEAIAHAVPFYGCVNWTNENFPFNDCVDKMVIWWEEGKMTAKVVESAKAILGGSKVRVDQKCKSSAQIDPTPVIVTSNTNMCAVIDGNSTTFEHQQPLQDRMFKFELTRRLEHDFGKVTKQEVKEFFRWASDHVTEVAHEFYVRKGGASKRPAPDDADKSEPKRACPSVADPSTSDAEGAPVDFADRYQNKCSRHAGMLQMLLPCKTCERMNQNFNICFTHGVRDCSECFPGVSESQPVVRKRTYRKLCAIHHLLGRAPEIACSACDLVNVDLDDCVSEQ

SEQ ID NO: 126 - DNA, 2211 bp, Adeno-associated virus
  source 1..2211: mol_type = unassigned DNA
atggctgccgatggttatcttccagattggctcgaggacaaccttagtgaaggaattcgcgagtggtgggctttgaaacctggagcccctcaacccaaggcaaatcaacaacatcaagacaacgctcgaggtcttgtgcttccgggttacaaataccttggacccggcaacggactcgacaagggggagccggtcaacgcagcagacgcggcggccctcgagcacgacaaggcctacgaccagcagctcaaggccggagacaacccgtacctcaagtacaaccacgccgacgccgagttccaggagcggctcaaagaagatacgtcttttgggggcaacctcgggcgagcagtcttccaggccaaaaagaggcttcttgaacctcttggtctggttgaggaagcggctaagacggctcctggaaagaagaggcctgtagagcagtctcctcaggaaccggactcctccgcgggtattggcaaatcgggtgcacagcccgctaaaaagagactcaatttcggtcagactggcgacacagagtcagtcccagaccctcaaccaatcggagaacctcccgcagccccctcaggtgtgggatctcttacaatggcttcaggtggtggcgcaccagtggcagacaataacgaaggtgccgatggagtgggtagttcctcgggaaattggcattgcgattcccaatggctgggggacagagtcatcaccaccagcacccgaacctgggccctgcccacctacaacaatcacctctacaagcaaatctccaacagcacatctggaggatcttcaaatgacaacgcctacttcggctacagcaccccctgggggtattttgacttcaacagattccactgccacttctcaccacgtgactggcagcgactcatcaacaacaactggggattccggcctaagcgactcaacttcaagctcttcaacattcaggtcaaagaggttacggacaacaatggagtcaagaccatcgccaataaccttaccagcacggtccaggtcttcacggactcagactatcagctcccgtacgtgctcgggtcggctcacgagggctgcctcccgccgttcccagcggacgttttcatgattcctcagtacgggtatctgacgcttaatgatggaagccaggccgtgggtcgttcgtccttttactgcctggaatatttcccgtcgcaaatgctaagaacgggtaacaacttccagttcagctacgagtttgagaacgtacctttccatagcagctacgctcacagccaaagcctggaccgactaatgaatccactcatcgaccaatacttgtactatctctcaaagactattaacggttctggacagaatcaacaaacgctaaaattcagtgtggccggacccagcaacatggctgtccagggaagaaactacatacctggacccagctaccgacaacaacgtgtctcaaccactgtgactcaaaacaacaacagcgaatttgcttggcctggagcttcttcttgggctctcaatggacgtaatagcttgatgaatcctggacctgctatggccagccacaaagaaggagaggaccgtttctttcctttgtctggatctttaatttttggcaaacaaggaactggaagagacaacgtggatgcggacaaagtcatgataaccaacgaagaagaaattaaaactactaacccggtagcaacggagtcctatggacaagtggccacaaaccaccagagtgcccaagcacaggcgcagaccggctgggttcaaaaccaaggaatacttccgggtatggtttggcaggacagagatgtgtacctgcaaggacccatttgggccaaaattcctcacacggacggcaactttcacccttctccgctgatgggagggtttggaatgaagcacccgcctcctcagatcctcatcaaaaacacacctgtacctgcggatcctccaacggccttcaacaaggacaagctgaactctttcatcacccagtattctactggccaagtcagcgtggagatcgagtgggagctgcagaaggaaaacagcaagcgctggaacccggagatccagtacacttccaactattacaagtctaataatgttgaatttgctgttaatactgaaggtgtatatagtgaaccccgccccattggcaccagatacctgactcgtaatctgtaa

SEQ ID NO: 127 - protein, 736 aa, Adeno-associated virus; identical to SEQ ID NO: 123

SEQ ID NO: 128 - DNA, 2460 bp, Adeno-associated virus
  source 1..2460: mol_type = unassigned DNA
ggtaattcctccggaaattggcattgcgattccacatggctgggcgaccgagtcattaccaccagcacccggacttgggccctgcccacctacaacaaccacctctacaagcaaatctccagccaatcgggtgccaccaacgacaaccactacttcggctacagcaccccttgggggtattttgatttcaacagattccactgccatttctcaccacgtgactggcagcgactcatcaacaacaactggggattcatggctgccgatggttatcttccagattggctcgaggacactctctctgaaggaatcagacagtggtggaagctcaaacctggcccaccaccgccgaaacctaaccaacaacaccgggacgacagtaggggtcttgtgcttcctgggtacaagtacctcggacccttcaacggactcgacaaaggagagccggtcaacgaggcagacgccgcggccctcgagcacgacaaagcctacgaccaccagctcaagcaaggggacaacccgtacctcaaatacaaccacgcggacgctgaatttcaggagcgtcttcaagaagatacgtctttcgggggcaacctcgggcgagcagtcttccaggccaaaaagagggtactcgagcctcttggtctggttgaggaagctgttaagacggctcctggaaaaaagagacctatagagcagtctcctgcagaaccggactcttcctcgggcatcggcaaatcaggccagcagcccgctaagaaaagactcaattttggtcagactggcgacacagagtcagtcccagaccctcaaccaatcggagaaccccccgcagccccctctggtgtgggatctaatacaatggcttcaggcggtggggcaccaatggcagacaataacgaaggcgccgacggagtgggtaattcctcgggaaattggcattgcgattccacatggatgggcgacagagttatcaccaccagcacaagaacctgggccctccccacctacaataatcacctctacaagcaaatctccagcgaatcgggagccaccaacgacaaccactacttcggctacagcaccccctgggggtattttgactttaacagattccactgtcacttctcaccacgtgactggcagcgactcatcaacaacaactggggatttagacccaagaaactcaatttcaagctcttcaacatccaagtcaaggaggtcacgcagaatgatggaaccacgaccatcgccaataaccttaccagcacggtgcaggtcttcacagactctgagtaccagctgccctacgtcctcggttcggctcaccagggctgccttccgccgttcccagcagacgtcttcatgattcctcagtacggctacttgactctgaacaatggcagccaagcggtaggacgttcttcattctactgtctagagtattttccctctcagatgctgaggacgggaaacaacttcaccttcagctacacttttgaagacgtgcctttccacagcagctacgcgcacagccagagtctggatcggctgatgaatcctctcattgaccagtacctgtattacctgagcaaaactcagggtacaagtggaacaacgcagcaatcgagactgcagttcagccaagctgggcctagctccatggctcagcaggccaaaaactggctaccgggacccagctaccgacagcagcgaatgtctaagacggctaatgacaacaacaacagtgaatttgcttggactgcagccaccaaatattacctgaatggaagaaattctctggtcaatcccgggcccccaatggccagtcacaaggacgatgaggaaaagtatttccccatgcacggaaatctcatctttggaaaacaaggcacaggaactaccaatgtggacattgaatcagtgcttattacagacgaagaagaaatcagaacaactaatcctgtggctacagaacaatacggacaggttgccaccaaccatcagagtcagaacaccacagcttcctatggaagtgtggacagccagggaatcttacctggaatggtgtggcaggaccgcgatgtctatcttcaaggtcccatttgggccaaaactcctcacacggacggacactttcatccttctccgctcatgggaggctttggactgaaacaccctcctccccagatcctgatcaaaaacacacctgtgccagcgaatcccgcgaccactttcactcctggaaagtttgcttcgttcattacccagtattccaccggacaggtcagcgtggaaatagagtgggagctgcagaaagaaaacagcaaacgctggaacccagaaattcagtacacctccaactacaacaagtcggtgaatgtggagtttaccgtggacgcaaacggtgtttattctgaaccccgccctattggcactcgttaccttacccggaacttg

SEQ ID NO: 129 - DNA, 3123 bp, Adeno-associated virus
  source 1..3123: mol_type = unassigned DNA
gaattcgccctttctacggctgcgtcaactggaccaatgaaaactttcccttcaacgattgcgtcgacaagatggtgatctggtgggaggagggaaagatgaccgccaaggtcgtggaatctgccaaagccattctgggtggaggcaaggttcgtgtggaccagaaatgcaagtcttcggcccagatcgacccgactccggtgattgtcacctctaacaccaacatgtgcgccgtgattgacggaaactcgaccaccttcgagcaccagcagccgttgcaagaccggatgttcaaatttgaacttacccgccgtttggatcatgactttgggaaggtcaccaagcaggaagtcaaagactttttccggtgggctcaagatcacgtgactgaggtggagcatgagttctacgtcaaaaagggtggagccaagaaaaggcccgcccccgatgatgtatatataaatgagcccaagcgggcgcgcgagtcagttgcgcagccatcgacgtcagacgcggaagcttcgataaactacgcggacaggtaccaaaacaaatgttctcgtcacgtgggcatgaatctgatgctgtttccctgtcgacaatgcgaaagaatgaatcagaattcaaatatctgcttcacacacgggcaaaaagactgtttggaatgctttcccgtgtcagaatctcaacccgtttctgtcgtcagaaaaacgtatcagaaactttgttacattcatcatatcatgggaaaagtaccagacgcctgcactgcctgcgacctggtaaatgtggacttggatgactgtatttctgagcaataaatgacttaaatcaggtatggctgctgacggttatcttccagattggctcgaggacactctctctgaaggaatcagacagtggtggaagctcaaacctggcccaccaccgccgaaacctaaccaacaacaccgggacgacagtaggggtcttgtgcttcctgggtacaagtacctcggacccttcaacggactcgacaaaggagagccggtcaacgaggcagacgccgcggccctcgagcacgacaaagcctacgaccaccagctcaagcaaggggacaacccgtacctcaaatacaaccacgcggacgctgaatttcaggagcgtcttcaagaagatacgtctttcgggggcaacctcgggcgagcagtcttccaggccaaaaagagggtactcgagcctcttggtctggttgaggaagctgttaagacggctcctggaaaaaagagacctatagagcagtctcctgcagaaccggactcttcctcgggcatcggcaaatcaggccagcagcccgctaagaaaagactcaattttggtcagactggcgacacagagtcagtcccaggccctcaaccaatcggagaaccccccgcagccccctctggtgtgggatctaatacaatggcttcaggcggtggggcaccaatggcagacaataacgaaggcgccgacggagtgggtaattcctcgggaaattggcattgcgattccacatggatgggcgacagagttatcaccaccagcacaagaacctgggccctccccacctacaataatcacctctacaagcaaatctccagcgaatcgggagccaccaacgacaaccactacttcggctacagcaccccctgggggtattttgactttaacagattccactgtcacttctcaccacgtgactggcagcgactcatcaacaacaactggggatttagacccaagaaactcaatttcaagctcttcaacatccaagtcaaggaggtcacgcagaatgatggaaccacgaccatcgccaataaccttaccagcgcggtgcaggtcttcacagactctgagtaccagctgccctacgtcctcggttcggctcaccagggctgccttccgccgttcccagcagacgtcttcatgattcctcagtacggctacttgactctgaacaatggcagccaagcggtaggacgttcttcattctactgtctagagtattttccctctcagatgctgaggacgggaaacaacttcaccttcagctacacttttgaagacgtgcctttccacagcagctacgcgcacagccagagtctggatcggctgatgaatcctctcattgaccagtacctgtattacctgagcaaaactcagggtacaagtggaacaacgcagcaatcgagactgcagttcagccaagctgggcctagctccatggctcagcaggccaaaaactggctaccgggacccagctaccgacagcagcgaatgtctaagacggctaatgacaacaacaacagtgaatttgcttggactgcagccaccaaatattacctgaatggaagaaattctctggtcaatcccgggcccccagtggccagtcacaaggacgatgaggaaaagtatttccccatgcacggaaatctcatctttggaaaacaaggcacaggaactaccaatgtggacattgaatcagtgcttattacagacgaagaagaaatcagaacaactaatcctgtggctacagaacaatacggacaggttgccaccaaccatcagagtcagaacaccacagcttcctatggaagtgtggacagccagggaatcttacctggaatggtgtggcaggaccgcgatgtctatcttcaaggtcccatttgggccaaaactcctcacacggacggacactttcatccttctccgctcatgggaggctttggactgaaacaccctcctccccagatcctgatcaaaaacacacctgtgccagcgaatcccgcgaccactttcactcctggaaagtttgcttcgttcattacccagtattccacctgacaggtcagcgtggaaatagagtgggagctgcagaaagaaaacagcaaacgctggaacccagaaattcagtacacctccaactacaacaagtcggtgaatgtggagtttaccgtggacgcaaacggtgtttattctgaaccccgccctattggcactcgttaccttacccggaacttgtaatttcctgttaatgaataagccgatttatgcgtttcagttgaactttggtctctgcgaagggcgaattcgtttaaacct

SEQ ID NO: 130 - protein, 735 aa, synthetic construct
  source 1..735: note = Description of Artificial Sequence: Synthetic polypeptide
MAADGYLPDWLEDTLSEGIRQWWKLKPGPPPPKPNQQHRDDSRGLVLPGYKYLGPFNGLDKGEPVNEADAAALEHDKAYDHQLKQGDNPYLKYNHADAEFQERLQEDTSFGGNLGRAVFQAKKRVLEPLGLVEEAVKTAPGKKRPIEQSPAEPDSSSGIGKSGQQPAKKRLNFGQTGDTESVPGPQPIGEPPAAPSGVGSNTMASGGGAPMADNNEGADGVGNSSGNWHCDSTWMGDRVITTSTRTWALPTYNNHLYKQISSESGATNDNHYFGYSTPWGYFDFNRFHCHFSPRDWQRLINNNWGFRPKKLNFKLFNIQVKEVTQNDGTTTIANNLTSAVQVFTDSEYQLPYVLGSAHQGCLPPFPADVFMIPQYGYLTLNNGSQAVGRSSFYCLEYFPSQMLRTGNNFTFSYTFEDVPFHSSYAHSQSLDRLMNPLIDQYLYYLSKTQGTSGTTQQSRLQFSQAGPSSMAQQAKNWLPGPSYRQQRMSKTANDNNNSEFAWTAATKYYLNGRNSLVNPGPPVASHKDDEEKYFPMHGNLIFGKQGTGTTNVDIESVLITDEEEIRTTNPVATEQYGQVATNHQSQNTTASYGSVDSQGILPGMVWQDRDVYLQGPIWAKTPHTDGHFHPSPLMGGFGLKHPPPQILIKNTPVPANPATTFTPGKFASFITQYSTGQVSVEIEWELQKENSKRWNPEIQYTSNYNKSVNVEFTVDANGVYSEPRPIGTRYLTRNL

SEQ ID NO: 131 - DNA, 3123 bp, Adeno-associated virus
  source 1..3123: mol_type = unassigned DNA
gaattcgccctttctacggctgcgtcaactggaccaatgaaaactttcccttcaacgattgcgtcgacaagatggtgatctggtgggaggagggaaagatgaccgccaaggtcgtggaatctgccaaagccattctgggtggaagcaaggttcgtgtggaccagaaatgcaagtcttcggcccagatcgacccgactccggtgattgtcacctctaacaccaacatgtgcgccgtgattgacggaaactcgaccaccttcgagcaccagcagccgttgcaagaccggatgttcaaatttgaacttacccgccgtttggatcatgactttgggaaggtcaccaagcaggaagtcaaagactttttccggtgggctcaagatcacgtgactgaggtggagcatgagttctacgtcaaaaagggtggagccaagaaaaggcccgcccccgatgatgtatatataaatgagcccaagcgggcgcgcgagtcagttgcgcagccatcgacgtcagacgcggaagcttcgataaactacgcgggcaggtaccaaaacaaatgttctcgtcacgtgggcatgaatctgatgctgtttccctgtcgacaatgcgaaagaatgaatcagaattcaaatatctgcttcacacacgggcaaaaagactgtttggaatgctttcccgtgtcagaatctcaacccgtttctgtcgtcagaaaaacgtatcagaaactttgttacattcatcatatcatgggaaaagaaccagacgcctgcactgcctgcgacctggtaaatgtggacttggatgactgtatttctgagcaataaatgacttaaatcaggtatggctgctgacggttatcttccagattggctcgaggacactctctctgaaggaatcagacagtggtggaagctcaaacctggcccaccaccgccgaaacctaaccaacaacaccgggacgacagtaggggtcttgtgcttcctgggtacaagtacctcggacccttcaacggactcgacaaaggagagccggtcaacgaggcagacgccgcggccctcgagcacgacaaagcctacgaccaccagctcaagcaaggggacaacccgtacctcaaatacaaccacgcggacgctgaatttcaggagcgtcttcaagaagatacgtctttcgggggcaacctcgggcgagcagtcttccaggccaaaaagagggtactcgagcctcttggtctggttgaggaagctgttaagacggctcctggaaaaaagagacctatagagcagtctcctgcagaaccggactcttcctcgggcatcggcgaatcaggccagcagcccgctaagaaaagactcaattttggtcagactggcgacacagagtcagtcccagaccctcaaccaatcggagaaccccccgcagccccctctggtgtgggatctaatacaatggcttcaggcggtggggcaccaatggcagacgataacgaaggcgccgacggagtgggtaattcctcgggaaattggcattgcgattccacatggatgggcgacagagttatcaccaccagcacaagaacctgggccctccccacctacaataatcacctctacaagcaaatctccagcgaatcgggagccaccaacgacaaccactacttcggctacagcaccccctgggggtattttgactttaacagattccactgtcacttctcaccacgtgactggcagcgactcatcaacaacaactggggatttagacccaagaaactcaatttcaagctcttcaacatccaagtcaaggaggtcacgcagaatgatggaaccacgaccatcgccaataaccttaccagcacggtgcaggtcttcacagactctgagtaccagctgccctacgtcctcggttcggctcaccagggctgccttccgccgttcccagcagacgtcttcatgattcctcagtacggctacttgactctgaacaatggcagccaagcggtaggacgttcttcattctactgtctagagtattttccctctcagatgctgaggacgggaaacaacttcaccttcagctacacttttgaagacgtgcctttccacagcagctacgcgcacagccagagtctggatcggctgatgaatcctctcattgaccagtacctgtattacctgagcaaaactcagggtacaagtggaacaacgcagcaatcgagactgcagttcagccaagctgggcctagctccatggctcagcaggccaaaaactggctaccgggacccagctaccgacagcagcgaatgtctaagacggctaatgacaacaacaacagtgaatttgcttggactgcagccaccaaatattacctgaatggaagaaattctctggtcaatcccgggcccccaatggccagtcacaaggacgatgaggaaaagtatttccccatgcacggaaatctcatctttggaaaacaaggcacaggaactaccaatgtggacattgaatcagtgcttattacagacgaagaagaaatcagaacaactaatcctgtggctacagaacaatacggacaggttgccaccaaccatcagagtcaggacaccacagcttcctatggaagtgtggacagccagggaatcttacctggaatggtgtggcaggaccgcgatgtctatcttcaaggtcccatttgggccaaaactcctcacacggacggacactttcatccttctccgctcatgggaggctttggactgaaacaccctcctccccagatcctgatcaaaaacacacctgtgccagcgaatcccgcgaccactttcactcctggaaagtttgcttcgttcattacccagtattccaccggacaggtcagcgtggaaatagagtgggagctgcagaaagaaaacagcaaacgctggaacccagaaattcagtacacctccaactacaacaagtcggtgaatgtggagtttaccgtggacgcaaacggtgtttattctgaaccccgccctattggcactcgttaccttacccggaacttgtaatttcctgttaatgaataaaccgatttatgcgtttcagttgaactttggtctctgcgaagggcgaattcgcggccgcta

SEQ ID NO: 132 - protein, 735 aa, synthetic construct
  source 1..735: note = Description of Artificial Sequence: Synthetic polypeptide
MAADGYLPDWLEDTLSEGIRQWWKLKPGPPPPKPNQQHRDDSRGLVLPGYKYLGPFNGLDKGEPVNEADAAALEHDKAYDHQLKQGDNPYLKYNHADAEFQERLQEDTSFGGNLGRAVFQAKKRVLEPLGLVEEAVKTAPGKKRPIEQSPAEPDSSSGIGESGQQPAKKRLNFGQTGDTESVPDPQPIGEPPAAPSGVGSNTMASGGGAPMADDNEGADGVGNSSGNWHCDSTWMGDRVITTSTRTWALPTYNNHLYKQISSESGATNDNHYFGYSTPWGYFDFNRFHCHFSPRDWQRLINNNWGFRPKKLNFKLFNIQVKEVTQNDGTTTIANNLTSTVQVFTDSEYQLPYVLGSAHQGCLPPFPADVFMIPQYGYLTLNNGSQAVGRSSFYCLEYFPSQMLRTGNNFTFSYTFEDVPFHSSYAHSQSLDRLMNPLIDQYLYYLSKTQGTSGTTQQSRLQFSQAGPSSMAQQAKNWLPGPSYRQQRMSKTANDNNNSEFAWTAATKYYLNGRNSLVNPGPPMASHKDDEEKYFPMHGNLIFGKQGTGTTNVDIESVLITDEEEIRTTNPVATEQYGQVATNHQSQDTTASYGSVDSQGILPGMVWQDRDVYLQGPIWAKTPHTDGHFHPSPLMGGFGLKHPPPQILIKNTPVPANPATTFTPGKFASFITQYSTGQVSVEIEWELQKENSKRWNPEIQYTSNYNKSVNVEFTVDANGVYSEPRPIGTRYLTRNL

SEQ ID NO: 133 - DNA, 3113 bp, Adeno-associated virus
  source 1..3113: mol_type = unassigned DNA
gaattcgccctttctacggctgcgtcaactggaccaatgaaaactttcccttcaacgattgcgtcgacaagatggtgatctggtgggaggagggaaagatgaccgccaaggtcgtggaatctgccaaagccattctgggtggaagcaaggttcgtgtggaccagaaatgcaagtcttcggcccagatcgacccgactccggtgattgtcacctctaacaccaacatgtgcgccgtgattgacggaaactcgaccaccttcgagcaccagcagccgttgcaagaccggatgttcaaatttgaacttacccgccgtttggatcatgactttgggaaggtcaccaagcaggaagtcaaagactttttccggtgggctcaagatcacgtgactgaggtggagcatgagttctacgtcaaaaagggtggagccaagaaaaggcccgcccccgatgatgtatatataaatgagcccaagcgggcgcgcgagtcagttgcgcagccatcgacgtcagacgcggaagcttcgataaactacgcggacaggtaccaaaacaaatgttctcgtcacgtgggcatgaatctgatgctgtttccctgtcgacaatgcgaaagaatgaatcagaattcaaatatctgcttcacacacgggcaaaaagactgtttggaatgctttcccgtgtcagaatctcaacccgttcctgtcgtcagaaaaacgtatcagaaactttgttacattcatcatatcatgggaaaagtaccagacgcctgcactgcctgcgacctggtaaatgtggacttggatgactgtatttctgagcaataaatgacttaaatcaggtatggctgctgacggttatcttccagattggctcgaggacactctctctgaaggaatcagacagtggtggaagctcaaacctggcccaccaccgccgaaacctaaccaacaacaccgggacgacagtaggggtcttgtgcttcctgggtacaagtacctcggacccttcaacggactcgacaaaggagagccggtcaacgaggcagacgccgcggccctcgagcacgacaaagcctacgaccaccagctcaagcaaggggacaacccgtacctcaaatacaaccacgcggacgctgaatttcaggagcgtcttcaagaagatacgtctttcgggggcaacctcgggcgagcagtcttccaggccaaaaagagggtactcgagcctcttggtctggttgaggaagctgttaagacggctcctggaaaaaagagacctatagagcagtctcctgcagaaccggactcttcctcgggcatcggcaaatcaggccagcagcccgctaagaaaagactcaattttggtcagactggcgacacagagtcagtcccagaccctcaaccaatcggagaaccccccgcagccccctctggtgtgggatctaatacaatggcttcaggcggtggggcaccaatggcagacaataacgaaggcgccgacggagtgggtaattcctcgggaaattggcattgcgattccacatggatgggcgacagagttatcaccaccagcacaagaacctgggccctccccacctacaataatcacctctacaagcaaatctccagcgaatcgggagccaccaacgacaaccactacttcggctacagcaccccctgggggtattttgactttaacagattccactgtcacttctcaccacgtgactggcagcgactcatcaataacaactggggatttagacccaagaaactcaatttcaagctcttcaacatccaagtcaaggaggtcacgcagaatgatggaaccacgaccatcgccaataaccttaccagcacggtgcaggtcttcacagactctgagtaccagctgccctacgtcctcggttcggctcaccagggctgccttccgccgttcccagcagacgtcttcatgattcctcagtacggctacttgactctgaacaatggcagccaagcggtaggacgttcttcattctactgtctagagtattttccctctcagatgctgaggacgggaaacaacttcaccttcagctacacttttgaagacgtgcctttccacagcagctacgcgcacagccagagtctggatcggctgatgaatcctctcattgaccagtacctgtattacctgagcaaaactcagggtacaagtggaacaacgcagcaatcgagactgcagttcaaccaagctgggcctagctccatggctcagcaggccaaaaactggctaccgggacccagctaccgacagcagcgaatgtctaagacggctaatgacaacaacaacagtgaatttgcttggactgcagccaccaaatattacccgaatggaagaaattctctggtcaatcccgggcccccaatggccagtcacaaggacgatgaggaaaagtatttccccatgcacggaaatctcatctttggaaaacaaggcacaggaactaccaatgtggacattgaatcagtgcttattacagacgaagaagaaatcagaacgactaatcctgtggctacagaacaatacggacaggttgccaccaaccgtcagagtcagaacaccacagcttcctatggaagtgtggacagccagggaatcttacctggaatggtgtggcaggaccgcgatgtctatcttcaaggtcccatttgggccaaaactcctcacacggacggacactttcatccttctccgctcatgggaggctttggactgaaacaccctcctccccagatcctgatcaaaaacacacctgtgccagcgaatcccgcgaccactttcactcctggaaagtttgcttcgttcattacccagtattccaccggacaggtcagcgtggaaatagagtgggagctgcagaaagaaaacagcaaacgctggaacccggaaattcagtacacctccaactacaacaagtcggtgaatgtggagtttaccgtggacgcaaacggtgtttattctgaaccccgccctattggcactcgttaccttacccggaacttgtaatttcctgttaatgaataaaccgatttatgcgtttcagttgaactttggtctctgcgaagggcgaattc

SEQ ID NO: 134 - protein, 735 aa, synthetic construct
  source 1..735: note = Description of Artificial Sequence: Synthetic polypeptide
MAADGYLPDWLEDTLSEGIRQWWKLKPGPPPPKPNQQHRDDSRGLVLPGYKYLGPFNGLDKGEPVNEADAAALEHDKAYDHQLKQGDNPYLKYNHADAEFQERLQEDTSFGGNLGRAVFQAKKRVLEPLGLVEEAVKTAPGKKRPIEQSPAEPDSSSGIGKSGQQPAKKRLNFGQTGDTESVPDPQPIGEPPAAPSGVGSNTMASGGGAPMADNNEGADGVGNSSGNWHCDSTWMGDRVITTSTRTWALPTYNNHLYKQISSESGATNDNHYFGYSTPWGYFDFNRFHCHFSPRDWQRLINNNWGFRPKKLNFKLFNIQVKEVTQNDGTTTIANNLTSTVQVFTDSEYQLPYVLGSAHQGCLPPFPADVFMIPQYGYLTLNNGSQAVGRSSFYCLEYFPSQMLRTGNNFTFSYTFEDVPFHSSYAHSQSLDRLMNPLIDQYLYYLSKTQGTSGTTQQSRLQFNQAGPSSMAQQAKNWLPGPSYRQQRMSKTANDNNNSEFAWTAATKYYPNGRNSLVNPGPPMASHKDDEEKYFPMHGNLIFGKQGTGTTNVDIESVLITDEEEIRTTNPVATEQYGQVATNRQSQNTTASYGSVDSQGILPGMVWQDRDVYLQGPIWAKTPHTDGHFHPSPLMGGFGLKHPPPQILIKNTPVPANPATTFTPGKFASFITQYSTGQVSVEIEWELQKENSKRWNPEIQYTSNYNKSVNVEFTVDANGVYSEPRPIGTRYLTRNL

SEQ ID NO: 135 - DNA, 3122 bp, Adeno-associated virus
  source 1..3122: mol_type = unassigned DNA
agcggccgcgaattcgccctttctacggctgcgtcaactggaccaatgaaaactttcccttcaacgattgcgtcgacaagatggtgatctggtgggaggagggaaagatgaccgccaaggtcgtggaatctgccaaagccattctgggtggaagcaaggttcgtgtggaccagaaatgcaggtcttcggcccagatcgacccgactccggtgattgtcacctctaacaccaacatgtgcgccgtgattgacggaaactcgaccaccttcgagcaccagcagccgttgcaagaccggatgttcaaatttgaacttacccgccgtttggatcatgactttgggaaggtcaccaagcaggaagtcaaagactttttccggtgggctcaagatcacgtgactgaggtggagcatgagttctacgtcaaaaagggtggagccaagaaaaggcccgcccccgatgatgtatatataaatgagcccaagcgggcgcgcgagtcagttgcgcagccatcgacgtcagacgcggaagcttcgataaactacgcggacaggtaccaaaacaaatgttctcgtcacgtgggcatgaatctgatgctgtttccctgtcgacaatgcgaaagaatgaatcagaattcaaatatctgcttcacacacgggcaaaaagactgtttggaatgctttcccgtgtcagaatctcaacccgtttctgtcgtcagaaaaacgtatcagaaactttgttacattcatcatatcatgggaaaagtaccagacgcctgcactgcctgcgacctggtaaatgtggacttggatgactgtatttctgagcaataaatgacttaaatcaggtatggctgctgacggttatcttccagattggctcgaggacactctctctgaaggaatcagacagtggtggaagctcaaacctggcccaccaccgccgaaacctaaccaacaacaccgggacgacagtaggggtcttgtgcttcctgggtacaagtacctcggacccttcaacggactcgacaaaggagagccggtcaacgaggcagacgccgcggccctcgagcacgacaaagcctacgaccaccagctcaagcaaggggacaacccgtacctcaaatacaaccacgcggacgctgaatttcaggagcgtcttcaagaagatacgtctttcgggggcaacctcgggcgagcagtcttccaggccaaaaagagggtactcgagcctcttggtctggttgaggaagctgttaagacggctcctggaaaaaagagacctatagagcagtctcctgcagaaccggactcttcctcgggcatcggcaaatcaggccagcagcccgctaagaaaagactcaattttggtcagactggcgacacagagtcagtcccagaccctcaaccaatcggagaaccccccgcagccccctctggtgtgggatctaatacaatggcttcaggcggtggggcaccaatggcagacaataacgaaggcgccgacggagtgggtaattcctcgggaaattggcattgcgattccacatggatgggcgacagagttatcaccaccagcacaagaacctgggccctccccacctacaataatcgcctctacaagcaaatctccagcgaatcgggagccaccaacgacaaccactacttcggctacagcaccccctgggggtattttgactttaacagattccactgtcacttctcaccacgtgactggcagcgactcatcaacaacaactggggatttagacccaagaaactcaatttcaagctcttcaacatccaagtcaaggaggtcacgcagaatgatggaaccacgaccatcgccaataaccttaccagcacggtgcaggtcttcacagactctgagtaccagctgccctacgtcctcggttcggctcaccagggctgccttccgccgttcccagcagacgtcttcatgattcctcagtacggctacttgactctgaacaatggcagccaagcggtaggacgttcttcattctactgtctagagtattttccctctcagatgctgaggacgggaaacaacttcaccttcagctacacttttgaagacgtgcctttccacagcagctacgcgcacagccagagtctggatcggctgatgaatcctctcattgaccagtacctgtattacctgagcaaaactcagggtacaagtggaacaacgcagcaatcgagactgcagttcagccaagctgggcctagctccatggctcagcaggccaaaaactggctaccgggacccagctaccgacagcagcgaatgtctaagacggctaatgacaacaacaacagtgaatttgcttggactgcagccaccaaatattacctgaatggaagaaattctctggtcaatcccgggcccccaatggccagtcacaaggacgatgaggaaaagtatttccccatgcacggaaatctcatctttggaaaacaaggcacaggaactaccaatgtggacattgaatcagtgcttattacagacgaagaagaaatcagaacaactaatcctgtggctacagaacaatacggacaggttgccaccaaccatcagagtcagaacaccacagcttcctatggaagtgtggacagccagggaatcttacctggaatggtgtggcaggaccgcgatgtctatcttcaaggtcccatttgggccaaaactcctcacacggacggacactttcatccttctccgctcatgggaggctttggactgaaacaccctcctccccagatcctgatcaaaaacacacctgtgccagcgaatcccgcgaccactttcactcctggaaagtttgcttcgttcattacccagtattccaccggacaggtcagcgtggaaatagagtgggagctgcagaaagaaaacagcaaacgctggaacccagaaattcagtacacctccaactacaacaagtcggtgaatgtggagtttaccgtggacgcaaacggtgtttattctgaaccccgccctattggcactcgttaccttacccggaacttgtaatttcctgttaatgaataaaccgatttatgcgtttcagttgaactttggtctctgcgaagggcgaattc

SEQ ID NO: 136 - protein, 735 aa, synthetic construct
  source 1..735: note = Description of Artificial Sequence: Synthetic polypeptide
MAADGYLPDWLEDTLSEGIRQWWKLKPGPPPPKPNQQHRDDSRGLVLPGYKYLGPFNGLDKGEPVNEADAAALEHDKAYDHQLKQGDNPYLKYNHADAEFQERLQEDTSFGGNLGRAVFQAKKRVLEPLGLVEEAVKTAPGKKRPIEQSPAEPDSSSGIGKSGQQPAKKRLNFGQTGDTESVPDPQPIGEPPAAPSGVGSNTMASGGGAPMADNNEGADGVGNSSGNWHCDSTWMGDRVITTSTRTWALPTYNNRLYKQISSESGATNDNHYFGYSTPWGYFDFNRFHCHFSPRDWQRLINNNWGFRPKKLNFKLFNIQVKEVTQNDGTTTIANNLTSTVQVFTDSEYQLPYVLGSAHQGCLPPFPADVFMIPQYGYLTLNNGSQAVGRSSFYCLEYFPSQMLRTGNNFTFSYTFEDVPFHSSYAHSQSLDRLMNPLIDQYLYYLSKTQGTSGTTQQSRLQFSQAGPSSMAQQAKNWLPGPSYRQQRMSKTANDNNNSEFAWTAATKYYLNGRNSLVNPGPPMASHKDDEEKYFPMHGNLIFGKQGTGTTNVDIESVLITDEEEIRTTNPVATEQYGQVATNHQSQNTTASYGSVDSQGILPGMVWQDRDVYLQGPIWAKTPHTDGHFHPSPLMGGFGLKHPPPQILIKNTPVPANPATTFTPGKFASFITQYSTGQVSVEIEWELQKENSKRWNPEIQYTSNYNKSVNVEFTVDANGVYSEPRPIGTRYLTRNL

SEQ ID NO: 137 - DNA, 3121 bp, Adeno-associated virus
  source 1..3121: mol_type = unassigned DNA
gaattcgcccttcgcagagaccaaagttcaactgaaacgaatcaaccggtttattgattaacaagcaattacagattacgggtgaggtaacgggtgccgatggggcgaggctcagaataagtgccatctgtgttaacagcaaagtccacatttgtagatttgtagtagttggaagtgtattgaatctctgggttccagcgtttgctgttttctttctgcagctcccattcaatttccacgctgacctgtccggtgctgtactgcgtgatgaacgacgccagcttagcttgactgaaggtagttggaggatccgcgggaacaggtgtattcttaatcaggatctgaggaggcgggtgtttcagtccaaagccccccatcagcggcgagggatgaaagtttccgtccgtgtgaggaatcttggcccagataggaccctgcaggtacacgtcccggttctgccagaccatgccaggtaaggctccttgactgttgacggcccctacaataggagcggcgttttgctgttgcaggttatcggccaccacgccgtactgttctgtggccactgggttggtggttttaatttcttcctcactggttagcataacgctgctatagtccacgttgccttttccagctccctgtttcccaaacattaagactccgctggacggaaaaaatcgctcttcgtcgtccttgtgggttgccatagcgacaccgggatttaccagagagtctctgccattcagatgatacttggtggcaccggtccaggcaaagttgctgttgttattttgcgacagtgtcgtggagacgcgttgctgccggtagcagggcccgggtagccagtttttggcctgagccgacatgttattaggcccggcctgagaaaatagcaactgctgagttcctgcggtacctcccgtggactgagtccgagacaggtagtacaggtactggtcgatgagggggttcatcagccggtccaggctttggctgtgcgcgtagctgctgtgaaaaggcacgtcctcaaactggtagctgaactcaaagttgttgcccgttctcagcatttgagaaggaaagtactccaggcagtagaaggaggaacggcccacggcctgactgccattgttcagagtcaggtacccgtactgaggaatcatgaagacgtccgccgggaacggaggcaggcagccctggcgcgcagagccgaggacgtacgggagctggtattccgagtccgtaaagacctgaatcgtgctggtaaggttattggcgatggtcttggtgccttcattctgcgtgacctccttgacctggatgttgaagagcttgaagttgagtctcttgggccggaatccccagttgttgttgatgagtcgctgccagtcacgtggtgagaagtggcagtggaatctgttaaagtcaaaatacccccagggggtgctgtagccgaagtaggtgttgtcgttggtgcttcctcccgaagtcccgttggagatttgcttgtagaggtggttgttgtaggtggggagggcccaggttcgggtgctggtggtgatgactctgtcgcccagccatgtggaatcgcaatgccaatttcctgaggaactacccactccgtcggcgccttcgttattgtctgccattggagcgccaccgcctgcagccattgtaccagatcccagaccagaggggcctgcggggggttctccgattggttgagggtcgggcactgactctgagtcgccagtctgcccaaagttgagtctctttttcgcgggctgctggcctttcttgccgatgcccgtagtggagtctggagaacgctggggtgatggctctaccggtctcttctttccaggagccgtcttagcgccttcctcaaccagaccgagaggttcgagaacccgcttcttggcctggaagactgctcgtccgaggttgcccccaaaagacgtatcttcttgcagacgctcctgaaactcggcgtcggcgtggttataccgcaggtacggattgtcacccgctttgagctgctggtcgtaggccttgtcgtgctcgagggccgctgcgtccgccgcgttgacgggctcccccttgtcgagtccgttgaagggtccgaggtacttgtagccaggaagcaccagaccccggccgtcgtcctgcttttgctggttggctttgggcttcggggctccaggtttcagcgcccaccactcgcgaatgccctcagagaggttgtcctcgagccaatctggaagataaccatcggcagccatacctgatctaaatcatttattgttcaaagatgcagtcatccaaatccacattgaccagatcgcaggcagtgcaagcgtctggcacctttcccatgatatgatgaatgtagcacagtttctgatacgcctttttgacgacagaaacgggttgagattctgacacgggaaagcactctaaacagtctttctgtccgtgagtgaagcagatatttgaattctgattcattctctcgcattgtctgcagggaaacagcatcagattcatgcccacgtgacgagaacatttgttttggtacctgtccgcgtagttgatcgaagcttccgcgtctgacgtcgatggctgcgcaactgactcgcgcacccgtttgggctcacttatatctgcgtcactgggggcgggtcttttcttggctccaccctttttgacgtagaattcatgctccacctcaaccacgtgatcctttgcccaccggaaaaagtctttgacttcctgcttggtgaccttcccaaagtcatgatccagacggcgggtgagttcaaatttgaacatccggtcttgcaacggctgctggtgttcgaaggtcgttgagttcccgtcaatcacggcgcacatgttggtgttggaggtgacgatcacgggagtcgggtctatctgggccgaggacttgcatttctggtccacgcgcaccttgcttcctccgagaatggctttggccgactccacgaccttggcggtcatcttcccctcctcccaccagatcaccatcttgtcgacacagtcgttgaagggaaagttctcattggtccagttgacgcagccgtagaagggcgaattc

SEQ ID NO: 138 - protein, 733 aa, synthetic construct
  source 1..733: note = Description of Artificial Sequence: Synthetic polypeptide
MAADGYLPDWLEDNLSEGIREWWDLKPGAPKLKANQQKQDDGRGLVLPGYKYLGPFHGLDKGEPVNAADAAALEHDKAYDQQLKAGDNPYLRYNHADAEFQERLQEDTSFGGNLGRAVFQAKKRVLEPLGLVEEGAKTAPGKKRPLESPQEPDSSSGIGKKGKQPAKKRLNFEEDTGAGDGPPEGSDTSAMSSDIEMRAAPGGNAVDAGQGSDGVGNASGDWHCDSTWSEGKVTTTSTRTWVLPTYNNHLYLRLGTTSNSNTYNGFSTPWGYFDFNRFHCHFSPRDWQRLINNNWGLRPKAMRVKIFNIQVKEVTTSNGETTVANNLTSTVQIFADSSYELPYVMDAGQEGSLPPFPNDVFMVPQYGYCGIVTGENQNQTDRNAFYCLEYFPSQMLRTGNNFEMAYNFEKVPFHSMYAHSQSLDRLMNPLLDQYLWHLQSTTSGETLNQGNAATTFGKIRSGDFAFYRKNWLPGPCVKQQRFSKTASQNYKIPASGGNALLKYDTHYTLNNRWSNIAPGPPMATAGPSDGDFSNAQLIFPGPSVTGNTTTSANNLLFTSEGEIAATNPRDTDMFGQIADNNQNATTAPITGNVTAMGVLPGMVWQNRDIYYQGPIWAKIPHADGHFHPSPLIGGFGLKHPPPQIFIKNTPVPANPATTFTAARVDSFITQYSTGQVAVQIEWEIEKERSKRRNPEVQFTSNYGNQSSMLWAPDTTGKYTEPRVIGSRYLTNHL

SEQ ID NO: 139 - protein, 735 aa, Adeno-associated virus
MAADGYLPDWLEDTLSEGIRQWWKLKPGPPPPKPNQQHRDDSRGLVLPGYKYLGPFNGLDKGEPVNEADAAALEHDKAYDHQLKQGDNPYLKYNHADAEFQERLQEDTSFGGNLGRAVFQAKKRVLEPLGLVEEAVKTAPGKKRPIEQSPAEPDSSSGIGKSGQQPAKKRLNFGQTGDTESVPDPQPIGEPPAAPSGVGSNTMASGGGAPMADNNEGADGVGNSSGNWHCDSTWMGDRVITTSTRTWALPTYNNHLYKQISSESGATNDNHYFGYSTPWGYFDFNRFHCHFSPRDWQRLINNNWGFRPKKLNFKLFNIQVKEVTQNDGTTTIANNLTSTVQVFTDSEYQLPYVLGSAHQGCLPPFPADVFMIPQYGYLTLNNGSQAVGRSSFYCLEYFPSQMLRTGNNFTFSYTFEDVPFHSSYAHSQSLDRLMNPLIDQYLYYLSKTQGTSGTTQQSRLQFSQAGPSSMAQQAKNWLPGPSYRQQRMSKTANDNNNSEFAWTAATKYYLNGRNSLVNPGPPMASHKDDEEKYFPMHGNLIFGKQGTGTTNVDIESVLITDEEEIRTTNPVATEQYGQVATNHQSQNTTASYGSVDSQGILPGMVWQDRDVYLQGPIWAKIPHTDGHFHPSPLMGGFGLKHPPPQILIKNTPVPANPATTFTPGKFASFITQYSTGQVSVEIEWELQKENSKRWNPEIQYTSNYNKSVNVEFTVDANGVYSEPRPIGTRYLTRNL

SEQ ID NO: 140 - DNA, 3127 bp, Adeno-associated virus
  source 1..3127: mol_type = unassigned DNA
gcggccgcgaattcgcccttcgcagagaccaaagttcaactgaaacgaatcaaccggtttattgattaacatgcaattacagattacgggtgaggtaacgagtgccaatagggcgaggctcagagtaaacaccctggctgtcaacggcaaagtccacaccagtctgcttttcaaagttggaggtgtactgaatctccgggtcccagcgcttgctgttttccttctgcagctcccactcgatttccacgctgacttgtccggtgctgtactgtgtgatgaacgaagcaaacttggcaggagtaaacacctccggaggattagcgggaacgggagtgttcttgatcaggatctgaggaggcggatgtttaagtccaaagccgcccatcaaaggagacgggtgaaagttgccatccgtgtgaggaatcttggcccagatgggaccctgcaggtacacgtcccggttctgccagaccatgccaggtaaggctccctggttgttgacaacttgtgtctgggctgcagtattagccgcttgtaagttgctgctgactatcccgtattcttccgtggctacaggattagtaggacgaatttcttcttcatttgtcattaacacattttccaatgtagttttgttagttgctccagtttttccaaaaatcaggactccgctggatgggaaaaagcggtcctcgtcgtccttgtgagttgccatggcgacgccgggattaaccaacgagtttctgccgttcaggtgatatttggtggcaccagtccaagcaaagttgctgttgttgttttgatccagcgttttggagaccctttgttgccggaagcagggtccaggtaaccaattcttggcttgttcggccatagttgaaggcccgccctggtaaaactgcagttcccgattgccagctgtgcctcctgggtcactctgtgttctggccaggtagtacaagtactggtcgatgaggggattcatcagccggtccaggctctggctgtgtgcgtagctgctgtggaaaggcacgtcctcgaagctgtagctgaactcaaagttgttgcccgttctcagcatctgagaggggaagtactccaggcagtagaaggaggaacgtcccacagactgactgccattgttgagagtcaggtagccgtactgaggaatcatgaagacgtccgccgggaacggaggcaggcagccctggtgcgcagagccgaggacgtacggcagctggtattccgagtccgagaatacctgaatcgtgctggtaaggttattagcgatggtcgtaacgccgtcattcgtcgtgacctccttgacctggatgttgaagagcttgaaccgcagcttcttgggccggaatccccagttgttgttgatgagtcgctgccagtcacgtggtgagaagtggcagtggaatctgttaaagtcaaaatacccccagggggtgctgtagccgaagtaggtgttgtcgttggtactacctgcagtttcactggagatttgctcgtagaggtggttgttgtaggtgggcagggcccaggttcgggtgctggtggtaatgactctgtcgcccagccatgtggaatcgcaatgccaatttcctgaggcattacccactccgtcggcaccttcgttattgtctgccattggtgcgccaccgcctgcagccactgtaccagatcccacactagagggcgctgctggaggttctccgagaggttgagggtcggggactgactctgagtcgccagtctgaccgaaattgagtctctttctggcgggctgctggcccttcttgccgatgcccgtggaggagtcgggggaacgctgaggtgacggctctaccggtctcttctttgcaggagccgtcttagcgccttcctcaaccagaccgagaggttcgagaacccgcttcttggcctggaagactgctcgcccgaggttgcccccaaatgacgtatcttcttgcagacgctcctgaaactcggcgtcggcgtggttataccgcaggtacgggttgtcacccgcattgagctgctggtcgtaggccttgtcgtgctcgagggccgctgcgtccgccgcgttgacgggctcccccttgtcgagtccgttgaagggtccgaggtacttgtagccaggaagcaccagaccccggccgttgtcctgcttttgctggttggctttgggtttcggggctccaggtttcaggtcccaccactcgcgaatgccctcagagaggttgtcctcgagccaatctggaagataaccatcggcagccatacctgatttaaatcatttattgttcaaagatgcagtcatccaaatccacattgaccagatcgcaggcagtgcaagcgtctggcacctttcccatgatatgatgaatgtagcacagtttctgatacgcctttttgacgacagaaacgggtttagattctgacacgggaaagcactctaaacagtctttctgtccgtgagtgaagcagatatttgaattctgattcattctctcgcattgtctgcagggaaacagcatcagattcatgcccacgtgacgagaacatttgttttggtacctgtctgcgtagttgatcgaagcttccgcgtctgacgtcgatggctgcgcaactgactcgcgcacccgtttgggctcacttatatctgcgtcactgggggcgggtcttttcttggctccaccctttttgacgtagaattcatgctccacctcaaccacgtaatcctttgcccaccggaaaaagtctttgacttcctgcttggtgaccttcccaaagtcatgatccagacggcgggtgagttcaaatttgaacatccggtcttgcaacggctgctggtgttcgaaggtcgttgagttcccgtcgatcacggcgcacatgttggtgttggagatgacgatcgcgggagtcgggtctatctgggccgaggacttgcatttctggtccacgcgcaccttgcttcctccgagaatggctttggccgactccacgaccttggcggtcatcttcccctcctcccaccagatcaccatcttgtcgacacagtcgttgaagggaaagttctcattggtccagttgacgcagccgtagaaagggcgaattc

SEQ ID NO: 141 - protein, 728 aa, synthetic construct
  source 1..728: note = Description of Artificial Sequence: Synthetic polypeptide
MAADGYLPDWLEDNLSEGIREWWDLKPGAPKPKANQQKQDDGRGLVLPGYKYLRPFNGLDKGEPVNEADAAALEHDKAYDKQLEQGDNPYLKYNHADAEFQERLQEDTSFGGNLGRAVFQAKKRVLEPLGLVEEVAKTAPGKKRPIESPDSSTGIGKKGQQPAKKKLNFGQTGDSESVPDPQPLGEPPAAPSGLGSGTMAAGGGAPMADNNEGADGVGNASGNWHCDSTWLGDRVITTSTRTWALPTYNNHLYKQISSQSGATNDNHFFSYSTPWGYFDFNRFHCHFSPRDWQRLINNNWGFRPRKLRFKLFNIQVKEVTTNDGVTTIANNLTSTIQVFSDSEYQLPYVLGSAHQGCLPPFPADVFMIPQYGYLTLNNGSQSVGRSSFYCLEYFPSQMLRTGNNFEFSYTFEEVPFHSSYVHSQSLDRLMNPLIDQYLYYLARTQSTTGSTRELQFHQAGPNTMAEQSKNWLPGPCYRQQRLSKNIDSNNNSNFAWTGATKYHLNGRNSLTNPGVAMATNKDDEDQFFPINGVLVFGKTGAANKTTLENVLMTSEEEIKTTNPVATEEYGVVSSNLQSSTAGPQTQTVNSQGALPGMVWQNRDVCLQGPIWAKIPHTDGNFHPSPLMGGFGLKHPPPQILIKNTPVPANPPEVFTPAKFASFITQYSTGQVSVEIEWELQKENSKRWNPEIQYTSNYAKSNNVEFAVNNEGVYTEPRPIGTRYLTRNL

SEQ ID NO: 142 - DNA, 3106 bp, Adeno-associated virus
  source 1..3106: mol_type = unassigned DNA
gcggccgcgaattcgcccttcgcagagaccaaagttcaactgaaacgaatcaaccggtttattgattaacaagtaattacaggttacgggtgaggtaacgggtgccaatggggcgaggctcagtataaaccccttcgttgttgacagcaaattccacattattagacttggcataatttgaggtgtactgaatctctggattccagcgtttgctgttttctttctgcagttcccactcgatctccacgctgacctggccggtgctgtactgcgtgataaatgaggcaaacttggcaggagtaaacacctctggaggattagcaggtaccggggtgtttttgatgagaatttgaggaggcgggtgtttgagtccaaatccgcccatcaggggagacgggtgaaagttgccgtccgtgtgaggaattttggcccagatgggaccctgcaggcacacgtcccggttctgccagaccatgccgggcagagccccctggctgttgacagtctgtgtctggggtccggccgtagacgattgcaggttgctggagaccacaccgtattcttctgtagccacgggattggtggttttgatctcctcctcgctggtcattagcacgttttccagcgttgtcttgttggcagcccccgttttgccaaaaaccagcactccgttgatgggaaagaactggtcctcgtcgtccttgttggtggccatggctacgcccgggttggttaatgaatttctaccattcagatggtatttagtggccccggtccaggcaaagttactgttgttgttgctgtctatgttttttgacagtctctgctgccgataacagggtccgggcagccagttctttgattgctcggccatggtgttgggcccagcctgatggaactgcagctcccttgtggaccccgtagtgctctgggtccgggccaggtagtacaggtactggtcgatgaggggattcatcagccggtctaggctctggctgtgcacatagctgctgtggaaaggcacttcctcaaaggtgtagctgaattcaaagttattgcccgttctcagcatctgagaaggaaagtactccaggcagtagaaggaggaacgtcccacagactgactgccgttgtttagagtcagatatccgtactgaggaatcatgaacacgtccgcagggaacggagggaggcagccctggtgcgcagagccgaggacgtacggcagttggtactccgagtccgagaagacctgaatcgtgctggtaaggttattagcgatggtcgtaacgccgtcgttcgtcgtgacctccttgacctggatgttgaacaacttgaaccgcagctttctgggccggaatccccagttgttgttgatgagtcgctgccagtcacgtggtgagaagtggcagtggaatctgttgaagtcaaaatagccccagggggtgctgtagctgaagaagtggttgtcgttggtagccccgctctgacttgatatctgcttgtagaggtggttgttgtaggtgggcagggcccaggtgcgggtgctggtggtgatgactctgtcgcccagccatgtggaatcgcaatgccaatttccggaggcattacccactccgtcggcgccttcgttattgtctgccattggtgcgccaccgcctgcagccattgtaccagatcccagacctgagggcgcggcgggaggttctccgagaggttgggggtcgggcactgactctgagtcgccagtctgcccaaagttgagcttctttttagcgggctgctggcctttcttgccgatgcccgtggaggagtcgggggattctatgggtctcttctttccaggagccgtcttagcgacttcctcaaccagaccgagaggttcgagaacccgcttcttggcctggaagactgctcgcccgaggttgcccccaaaagacgtatcttcttgaagacgctcctgaaactcggcgtcggcgtggttgtacttgaggtacgggttgtccccctgctcgagctgcttgtcgtaggccttgtcgtgctcgagggccgcggcgtctgcctcgttgaccggctctcccttgtcgagtccgttgaagggtctgaggtacttgtagccaggaagcaccagaccccggccgtcgtcctgcttttgctggttggctttgggtttcggggctccaggtttcaagtcccaccactcgcgaatgccctcagagaggttgtcctcgagccaatctggaagataaccatcggcagccatacctggtttaagtcatttattgctcagaaacacagtcatccaggtccacgttgaccagatcgcaggccgagcaagcaatctcgggagcccgccccagcagatgatgaatggcacagagtttccgatacgtcctctttctgacgaccggttgagattctgacacgccggggaaacattctgaacagtctctggtcccgtgcgtgaagcaaatgttgaaattctgattcactctctcgcatgtcttgcagggaaacagcatctgaagcatgcccgcgtgacgagaacatttgttttggtacctgtcggcaaagtccaccggagctccttccgcgtctgacgtcgatggattcgcgactgaggggcaggcccgcttgggctcgcttttatccgcgtcatcgggggcgggtctcttgttggccccaccctttctgacgtagaacccatgcgccacctcggtcacgtgatcctgcgcccagcggaagaaccttttgacttcctgctttgtcaccttgccaaagttatgctccagacggcgggtgggttcaaatttgaacatccggtcctgcaacggctgctggtgctcgaaggtggcgctgttcccgtcaatcacggcgcacatgttggtgttggaggtgacggtcacgggggtggggtcgatctgggcggacgacttgcacttttggtccacgcgcaccttgctgccgccgagaatggccttggcggactccacgaccttggccgtcatcttgccctcctcccaccagatcaccatcttgtcggcgcaatcgttgaagggaaagttctcattggtccagttgacgcagccgtagaaagggcgaattc

SEQ ID NO: 143 - protein, 728 aa, synthetic construct
  source 1..728: note = Description of Artificial Sequence: Synthetic polypeptide
MAADGYLPDWLEDNLSEGIREWWDLKPGAPKPKANQQKQDDGRGLVLPGYKYLGPFNGLDKGEPVNEADAAALEHDKAYDKQLEQGDNPYLKYNHADAEFQERLQEDTSFGGNLGRAVFQAKKRVLEPLGLVEEGAKTASGKKRPIESPDSSTGIGKKGQQPAKKKLNFGQTGDSESVPDPQPLGEPPAAPSGLGSGTMAAGGGAPMADNNEGADGVGNASGNWHCDSTWLGDRVITTSTRTWALPTYNNHLYKQISSQSGATNDNHFFGYSTPWGYFDFNRFHCHFSPRDWQRLINNNWGFRPRKLRFKLFNIQVKEVTTNDGVTTIANNLTSTIQVFSDSEYQLPYVLGSAHQGCLPPFPADVFMIPQYGYLTLNNGSQSVGRSSFCCLEYFPSQMLRTGNNFEFSYTFEEVPFHSSYAHSQSLDRLMNPLIDQYLYYLARTQSTTGSTRELQFHQAGPNTVAEQSKNWLPGPCYRQQRLSKNIDSNNNSNFAWTGATKYHLNGRNSLTNPGVAMATNKDDEDQFLPINGVLVFGKTGAANKTTLENVLMTSEEEIKTTNPVATEEYGVVSSNLQSSTAGPRTQTVNSQGALPGMVWQNRDVYLQGPIWAEIPHTDGNFHPSPLMGGFGLKHPPPQILIKNTPVPANPPEVFTPAKFASFITQYSTGQVSVEIEWELQKENSKRWNPEIQYTSNYAKSNNVEFAVNNEGVYTEPRPIGTRYLTRNL

SEQ ID NO: 144 - DNA, 3102 bp, Adeno-associated virus
  source 1..3102: mol_type = unassigned DNA
gcggccgcgaattcgcccttcgcagagaccaaagttcaactgaaacgaatcaaccggtttattgattaacaagtaattacaggttacgggtgaggtaacgggtgccaatggggcgaggctcagtataaaccccttcgttgttgacagcaaattccacattattagacttggcataatttgaggtgtactgaatctctggattccagcgtttgctgttttctttctgcagttcccactcgatctccacgctgacctggccggtgctgtactgcgtgataaatgaggcaaacttggcaggagtaaacacctctggaggattagcaggtaccggggtgtttttgatgagaatttgaggaggcgggtgtttgagtccaaatccgcccatcaggggagacgggtgaaagttgccgtccgtgtgaggaatttcggcccagatgggaccctgcaggtacacgtcccggttctgccagaccatgccgggcagagccccctggctgttgacagtctgtgtccggggtccggccgtagacgattgcaggttgctggagaccacaccgtattcttctgtagccacgggattggtggttttgatctcctcctcgctggtcattagcacgttttccagcgttgtcttgttggcagcccccgttttgccaaaaaccagcactccgttgatgggaaggaactggtcctcgtcgtccttgttggtggccatggctacgcccgggttggttaatgaatttctaccattcagatggtatttagtggccccggtccaggcaaagttactgttgttgttgctgtctatgttttttgacagtctctgctgccgataacagggtccgggcagccagttctttgattgctcggccacggtgttgggcccagcctgatggaactgcagctcccttgtggaccccgtagtgctctgggtccgggccaggtagtacaggtactggtcgatgaggggattcatcagccggtccaggctctggctgtgcgcatagctgctgtggaaaggcacttcctcaaaggtgtagctgaattcaaagttattgcccgttctcagcatctgagaaggaaagtactccaggcagcagaaggaggaacgtcccacagactgactgccgttgtttagagtcagatatccgtactgaggaatcatgaacacgtccgcagggaacggagggaggcagccctggtgcgcagagccgaggacgtacggcagttggtactccgagtccgagaagacctgaatcgtgctggtaaggttattagcgatggtcgtaacgccgtcgttcgtcgtgacctccttgacctggatgttgaacaacttgaaccgcagctttctgggccggaatccccagttgttgttgatgagtcgctgccagtcacgtggtgagaagtggcagtggaatctgttgaagtcaaaatagccccagggggtgctgtagccgaagaagtggttgtcgttggtagccccgctctgacttgatatctgcttgtagaggtggttgttgtaggtgggcagggcccaggtgcgggtgctggtggtgatgactctgtcgcccagccatgtggaatcgcaatgccaatttccggaggcattacccactccgtcggcgccttcgttattgtctgccattggtgcgccaccgcctgcagccattgtaccagatcccagacctgagggcgcggcgggaggttctccgagaggttgggggtcgggcactgactctgagtcgccagtctgcccaaagttgagcttctttttagcgggctgctggcctttcttgccgatgcccgtggaggagtcgggggattctatgggtctcttctttccggaagccgtcttagcgccttcctcaaccagaccgagaggttcgagaacccgcttcttggcctggaagactgctcgcccgaggttgcccccaaaagacgtatcttcttgaagacgctcctgaaactcggcgtcggcgtggttgtacttgaggtacgggttgtccccctgctcgagctgcttgtcgtaggccttgtcgtgctcgagggccgcggcgtctgcctcgttgaccggctctcccttgtcgagtccgttgaagggtccgaggtacttgtagccaggaagcaccagaccccggccgtcgtcctgcttttgctggttggctttgggtttcggggctccaggtttcaagtcccaccactcgcgaatgccctcagagaggttgtcctcgagccaatctggaagataaccatcggcagccatacctggtttaagtcatttattgctcagaaacacagtcatccaggtccacgttgaccagatcgcaggccgagcaagcaatctcgggagcccgccccagcagatgatgaatggcacagagtttccgatacgtcctctttctgacgaccggttgagattctgacacgccggggaaacattctgaacagtctctggtcccgtgcgtgaagcaaatgttgaaattctgattcattctctcgcatgtcttgcagggaaacagcatctgaagcatgcccgcgtgacgagaacatttgttttggtacctgtcggcaaagtccaccggagctccttccgcgtctgacgtcgatggatccgcgactgaggggcaagcccgcttgggctcgcttttatccgcgtcatcgggggcgggtctcttgttggctccaccctttctgacgtagaactcatgcgccacctcggtcacgtgatcctgcgcccagcggaagaactctttgacttcctgctttgtcaccttgccaaagtcatgctccagacggcgggtgagttcaaatttgaacatccggtcttgtaacggctgctggtgctcgaaggtggtgctgttcccgtcaatcacggcgcacatgttggtgttggaagtgacgatcacgggggtgggatcgatctgggcggacgacttgcacttttggtccacgcgcaccttgctgccgccgagaatggccttggcggactccacgaccttggccgtcatcttgccctcctcccaccagatcaccatcttgtcgacgcaatcgttgaagggaaagttctcattggtccagttgacgcagccgaagggcgaattc

SEQ ID NO: 145 - protein, 728 aa, Adeno-associated virus
MAADGYLPDWLEDNLSEGIREWWDLKPGAPKPKANQQKQDDGRGLVLPGYRYLGPFNGLDKGEPVNEADAAALEHDKAYDKQLEQGDNPYLKYNHADAEFQERLQEDTSFGGNLGRAVFQAKKRVLEPLGLVEEGAKTAPGKKRPIESPDSSTGIGKNGQPPAKKKLNFGQTGDSESVPDPQPLGEPPAAPSGLGSGTMAAGGGAPMADNNEGADGVGNASGNWHCDSTWLGDRVITTSTRTWALPTYNNHLYKQISSQSGATNDNHFFGYSTPWGYFDFNRFHCHFSPRDWQRLINNNWGFRPRKLRFKLFNIQVKEVTTNDGVTTIANNLTSTIQVFSDSEYQLPYVLGSAHQGCLPPFPADVFMIPQYGYLTLNNGSQSVGRSSFYCLEYFPSQMLRTGNNFEFSYTFEEVPFHSSYAHSQSLDRLMNPLIDQYLYYLARTQSTTGSTRELQFHQAGPNTMAEQSKNWLPGPCYRQQRLSKNIDSNNNSNFAWTGATKYHLNGRNSLTNPGVAMATNKDDEDQFFPINGVLVFGKTGAANKTTLENVLMTSEEEIKTTNPVATEEYGVVSSNLQSSTAGPQTQTVNSQGALPGMVWQNRDVYLQGPIWAKIPHTDGNFHPSPLMGGFGLKHPPPQILIKNTPVPANPPEVFTPAKFASFITQYSTGQVSVEIEWELQKENSKRWNPEIQYTSNYAKSNNVEFAVNNEGVYTEPRPIGTRYLTRNL

SEQ ID NO: 146 - protein, 728 aa, synthetic construct
  source 1..728: note = Description of Artificial Sequence: Synthetic polypeptide
MAADGYLPDWLEGNLSEGIREWWDLKPGAPKPKANQQKQDDGRGLVLPGYRYLGPFNGLDKGEPVNEADAAALEHDKAYDKQLEQGDNPYLKYNHADAEFQERLQEDTSFGGNLGRAVFQAKKRVLEPLGLVEEGAKTAPGKKRPIESPDSSTGIGKNGQPPAKKKLNFGQTGDSESVPDPQPLGEPPAAPSGLGSGTMAAGGGAPMADNNEGADGVGNASGNWHCDSTWLGDRVITTSTRTWALPTYNNHLYKQISSQSGATNDNHFFGYSTPWGYFDFNRFHCHFSPRDWQRLINNNWGFRPRKLRFKLFNIQVKEVTTNDGVTTIANNLTSTIQVFSDSEYQLPYVLGSAHQGCLPPFPADVFMIPQYGYLTLNNGSQSVGRSSFYCLEYFPSQMLRTGDNFEFSYTFEEVPFHSSYAHSQSLDRLMNPLIDQYLYYLARTQSTTGSTRELQFHQAGPNTMAEQSKNWLPGPCYRQQRLSKNIDSNNNSNFAWTGATKYHLNGRNSLTNPGVAMATNKDDEDQFFPINGVLVFGKTGAANKTTLENVLMTSEEEIKTTNPVATEEYGVVSSNLQSSTAGPQTQTVNSQGALPGMVWQNRDVYLQGPIWAKIPHTDGNFHPSPLMGGFGLKHPPPQILIKNTPVPANPPEVFTPAKFASFITQYSTGQVSVEIEWELQKENSKRWNPEIQYTSNYAKSNNVEFAVNNEGVYTEPRPIGTRYLTRNL

SEQ ID NO: 147 - DNA, 3106 bp, Adeno-associated virus
  source 1..3106: mol_type = unassigned DNA
gcggccgcgaattcgcccttcgcagagaccaaagttcaactgaaacgaatcagccggtttattgattaacaagtaattacaggttacgggtgaggtaacgggtgccaatggggcgaggctcagtataaaccccttcgttgttgacagcaaattccacattattagacttggcataatttgaggtgtactgaatctctggattccagcgtttgctgttttctttctgcagttcccactcgatctccacgctgacctggccggtgctgtactgcgtgataaatgaggcaaacttggcaggagtaaacacctctggaggattagcaggtaccggggtgtttttgatgagaatttgaggaggcgggtgtttgagtccaaatccgcccatcaggggagacgggtgaaagttgccgtccgtgtgaggaattttggcccagatgggaccctgcaggtacacgtcccggttctgccagaccatgccgggcagagccccctggctgttgacagtctgtgtctggggtccggccgtagacgattgcaggttgctggagaccacaccgtattcttctgtagccacgggattggtggttttgatctcctcctcgctggtcattagcacgttttccagcgttgtcttgttggcagcccccgttttgccaaaaaccagcactccgttgatgggaaagaactggtcctcgtcgtccttgttggtggccatggctacgcccgggttggttaatgaatttctaccattcagatggtatttagtggccccggtccaggcaaagttactgttgttgttgctgtctatgttttttgacagtctctgctgccgataacagggtccgggcagccagttctttgattgctcggccatggtgttgggcccagcctgatggaactgcagctcccttgtggaccccgtagtgctctgggtccgggccaggtagtacaggtactggtcgatgaggggattcatcagccggtccaggctctggctgtgcgcatagctgctgtggaaaggcacttcctcaaaggtgtagctgaattcaaagttatcgcccgttctcagcatctgagaaggaaagtactccaggcagtagaaggaggaacgtcccacagactgactgccgttgtttagagtcagatatccgtactgaggaatcatgaacacgtccgcagggaacggagggaggcagccctggtgcgcagagccgaggacgtacggcagttggtactccgagtccgagaagacctgaatcgtgctggtaaggttattagcgatggtcgtaacgccgtcgttcgtcgtgacctccttgacctggatgttgaacaacttgaaccgcagctttctgggccggaatccccagttgttgttgatgagtcgctgccagtcacgtggtgagaagtggcagtggaatctgttgaagtcaaaatagccccagggggtgctgtagccgaagaagtggttgtcgttggtagccccgctctgacttgatatctgcttgtagaggtggttgttgtaggtgggcagggcccaggtgcgggtgctggtggtgatgactctgtcgcccagccatgtggaatcgcaatgccaatttccggaggcattacccactccgtcggcgccttcgttattgtctgccattggtgcgccaccgcctgcagccattgtaccagatcccagacctgagggcgcggcgggaggttctccgagaggttgggggtcgggcactgactctgagtcgccagtctgcccaaagttgagcttctttttagcgggcggctggccgttcttgccgatgcccgtggaggagtcgggggattctatgggtctcttctttccaggagccgtcttagcgccttcctcaaccagaccgagaggttcgagaacccgcttcttggcctggaagactgctcgcccgaggttgcccccaaaagacgtatcttcttgaagacgctcctgaaactcggcgtcggcgtggttgtacttgaggtacgggttgtccccctgctcgagctgcttgtcgtaggccttgtcgtgctcgagggccgcggcgtctgcctcgttgaccggctctcccttgtcgagtccgttgaagggtccgaggtacctgtagccaggaagcaccagaccccggccgtcgtcctgcttttgctggttggctttgggtttcggggctccaggtttcaagtcccaccactcgcgaatgccctcagagaggttgccctcgagccaatctggaagataaccatcggcagccatacctggtttaagtcatttattgctcagaaacacagtcatccaggtccacgttggccagatcgcaggccgagcaagcaatctcgggagcccgccccagcagatgatgaatggcacagagtttccgatacgtcctctttctgacgaccggttgagattctgacacgccggggaaacattctgaacagtctctggtcccgtgcgtgaagcaaatgttgaaattctgattcattctctcgcatgtcttgcaggggaacagcatctgaagcatgcccgcgtgacgagaacatttgttttggtacctgtcggcaaagtccaccggagctccttccgcgtctgacgtcgatggatccgcgactgaggggcaggcccgcttgggctcgcttttatccgcgtcatcgggggcgggtctcttgttggctccaccctttctgacgtagaactcatacgccacctcggtcacgtgatcctgcgcccagcggaagaactctttgacttcctgctttgtcaccttgccaaagtcatgctccagacggcgggtgagttcaaatttgaacatccggtcttgtaacggctgctggtgctcgaaggtggtgctgttcccgtcaatcacggcgcacatgttggtgttggaagtgacgatcacgggggtgggatcgatctgggcggacgacttgcacttttggtccacgcgcaccttgctgccgccgagaatggccttggcggactccacgaccttggccgtcatcctgccctcctcccaccagatcaccatcttgtcgacgcaatcgttgaagggaaagttctcattggtccagttgacgcagccgtagaaagggcgaattc

SEQ ID NO: 148 - protein, 728 aa, synthetic construct
  source 1..728: note = Description of Artificial Sequence: Synthetic polypeptide
MAADGYLPDWLEDNLSEGIREWWDLKPGAPKPKANQQKQDDGRGLVLPGYKYLGPFNGLDKGEPVNEADAAALEHDKAYDKQLEQGDNPYLKYNHADAEFQERLQEDTSFGGNLGRAVFQAKKRVLEPLGLVEEGAKTAPGKKRPIESPDSSTGIGKKGQQPAKKKLNFGQTGDSESVPDPQPLGEPPAAPSGLGSGTMAAGGGAPMADNNEGADGVGNASGNWHCDSTWLGDRVITTSTRTWALPTYNNHLYKQISSQSGATNDNHFFGYSTPWGYFDFNRFHCHFSPRDWQRLINNNWGFRPRKLRFKLFNIQVKEVTTNDGVTTIANNLTSTIQVFSDSEYQLPYVLGSAHQGCLPPFPADVFMIPQYGYLTLNNGSQSMGRSSFYCLEYFPSQMLRTGNNFEFSYTFEEVPFHSSYAHSQSLDRLMNPLIDQYLYYLARTQSTTGSTRELQFHQAGPNTMAEQSKNWLPGPCYRQQRLSKNIDSNNNSNFAWTGATKYHLNGRNSLTNPGVAMATNKDDEGQFFPINGVLVFGKTGAANKTTLENVLMTSEEEIKTTNPVATEEYGVVSSNLQSSTAGPQTQTVNSQGALPGMVWQNRDVYLQGPIWAKIPHTDGNFHPSPLMGGFGLKHPPPQILIKNTPVPANPPGVFTPALFASFITQYSTGQVSVEIEWELQKENSKRWNPEIQYTSNYAKSNNVEFAVNNEGVYTEPRPIGTRYLTRNL

SEQ ID NO: 149 - DNA, 3098 bp, Adeno-associated virus
  source 1..3098: mol_type = unassigned DNA
gaattcgcccttcgcagagaccaaagttcaactgaaacgaatcaaccggtttattgattaacaagtaattacaggttacgggtgaggtaacgggtgccaatggggcgaggctcagtataaaccccttcgttgttgacagcaaattccacattattagacttggcataatttgaggtgtactgaatctctggattccagcgtttgctgttttctttctgcagttcccactcgatctccacgctgacctggccggtgctgtactgcgtgataaatgaggcaaactaggcaggagtaaacacccctggaggattagcaggtaccggggtgtttttgatgagaatttgaggaggcgggtgtttgagtccaaatccgcccatcaggggagacgggtgaaagttgccgtccgtgtgaggaattttggcccagatgggaccctgcaggtacacgtcccggttctgccagaccatgccgggcagagccccctggctgttgacagtctgtgtctggggtccggccgtagacgattgcaggttgctggagaccacaccgtattcttctgtagccacgggattggtggttttgatctcctcctcgctggtcattagcacgttttccagcgttgtcttgttggcagcccccgttttgccaaaaaccagcactccgttgatgggaaagaactggccctcgtcgtccttgttggtggccatggctacgcccgggttggttaatgaatttctaccattcagatggtatttagtggccccggtccaggcaaagttactgttgttgttgctgtctatgttttttgacagtctctgctgccgataacagggtccgggcagccagttctttgattgctcggccatggtgttgggcccagcctgatggaactgcagctcccttgtggaccccgtagtgctctgggtccgggccaggtagtacaggtactggtcgatgaggggattcatcagccggtccaggctctggctgtgcgcatagctgctgtggaaaggcacttcctcaaaggtgtagctgaattcaaagttattgcccgttctcagcatctgagaaggaaagtactccaggcagtagaaggaggaacgtcccatagactgactgccgttgtttagagtcagatatccgtactgaggaatcatgaacacgtccgcagggaacggagggaggcagccctggtgcgcagagccgaggacgtacggcagttggtactccgagtccgagaagacctgaatcgtgctggtaaggttattagcgatggtcgtaacgccgtcgttcgtcgtgacctccttgacctggatgttgaacaacttgaaccgcagctttctgggccggaatccccagttgttgttgatgagtcgctgccagtcacgtggtgagaagtggcagtggaatctgttgaagtcaaaatagccccagggggtgctgtagccgaagaagtggttgtcgttggtagccccgctctgacttgatatctgcttgtagaggtggttgttgtaggtgggcagggcccaggtgcgggtgctggtggtgatgactctgtcgcccagccatgtggaatcgcaatgccaatttccggaggcattacccactccgtcggcgccttcgttattgtctgccattggtgcgccaccgcctgcagccattgtaccagatcccagacctgagggcgcggcgggaggttctccgagaggttgggggtcgggcactgactctgagtcgccagtctgcccaaagttgagcttctttttagcgggctgctggcctttcttgccgatgcccgtggaggagtcgggggattctatgggtctcttctttccaggagccgtcttagcgccttcctcaaccagaccgagaggttcgagaacccgcttcttggcctggaagactgctcgcccgaggttgcccccaaaagacgtatcttcttgaagacgctcctgaaactcagcgtcggcgtggttgtacttgaggtacgggttgtccccctgctcgagctgcttgtcgtaggccttgtcgtgctcgagggccgcggcgtctgcctcgttgaccggctctcccttgtcgagtccgttgaagggtccgaggtacttgtagccaggaagcaccagaccccggccgtcgtcctgcttttgctggttggctttgggtttcggggctccaggtttcaagtcccaccactcgcgaatgccctcagagaggttgtcctcgagccaatctggaagataaccatcggcagccatacctggtttaagtcatttattgctcagaaacacagtcatccaggtccacgttgaccagatcgcaggccgagcaagcaatctcgggagcccgccccagcagatgatgaatggcacagagtttccgatacgtcctctttctgacgaccggttgagattctgacacgccggggaaacattctgaacagtctctggtcccgtgcgtgaagcaaatgttgaaattctgattcattctctcgcatgtcttgcagggaaacagcatctgaagcatgcccgcgtgacgagaacatttgttttggtacctgtcggcaaagtccaccggagctccttccgcgtctgacgtcgatggatccgcgactgaggggcaggcccgcttgggctcgcttttatccgcgtcatcgggggcgggcctcttgttggctccaccctttctgacgtagaactcatgcgccacctcggtcacgtgatcctgcgcccagcggaagaactctttgacttcctgctttgtcaccttgccaaagtcctgctccagacggcgggtgagttcaaatttgaacatccggtcttgtaacggctgctggtgctcgaaggtggtgctgttcccgtcaatcacggcgcacatgttggtgttggaagtgacgatcacgggggtgggatcgatctgggcggacgacttgcacttttggtccacgcgcaccttgctgccgccgagaatggccttggcggactccacgaccttggccgtcatcttgccctcctcccaccagatcaccatcttgtcgacgcaatcgttgaagggaaagttctcattggtccagttgacgcagccgtagaaagggcgaattc

SEQ ID NO: 150 - DNA, 2187 bp, Adeno-associated virus
  source 1..2187: mol_type = unassigned DNA
atggctgccgatggttatcttccagattggctcgagggcaacctctctgagggcattcgcgagtggtgggacttgaaacctggagccccgaaacccaaagccaaccagcaaaagcaggacgacggccggggtctggtgcttcctggctacaggtacctcggacccttcaacggactcgacaagggagagccggtcaacgaggcagacgccgcggccctcgagcacgacaaggcctacgacaagcagctcgagcagggggacaacccgtacctcaagtacaaccacgccgacgccgagtttcaggagcgtcttcaagaagatacgtcttttgggggcaacctcgggcgagcagtcttccaggccaagaagcgggttctcgaacctctcggtctggttgaggaaggcgctaagacggctcctggaaagaagagacccatagaatcccccgactcctccacgggcatcggcaagaacggccagccgcccgctaaaaagaagctcaactttgggcagactggcgactcagagtcagtgcccgacccccaacctctcggagaacctcccgccgcgccctcaggtctgggatctggtacaatggctgcaggcggtggcgcaccaatggcagacaataacgaaggcgccgacggagtgggtaatgcctccggaaattggcattgcgattccacatggctgggcgacagagtcatcaccaccagcacccgcacctgggccctgcccacctacaacaaccacctctacaagcagatatcaagtcagagcggggctaccaacgacaaccacttcttcggctacagcaccccctggggctattttgacttcaacagattccactgccacttctcaccacgtgactggcagcgactcatcaacaacaactggggattccggcccagaaagctgcggttcaagttgttcaacatccaggtcaaggaggtcacgacgaacgacggcgttacgaccatcgctaataaccttaccagcacgattcaggtcttctcggactcggagtaccaactgccgtacgtcctcggctctgcgcaccagggctgcctccctccgttccctgcggacgtgttcatgattcctcagtacggatatctgactctaaacaacggcagtcagtctgtgggacgttcctccttctactgcctggagtactttccttctcagatgctgagaacgggcgataactttgaattcagctacacctttgaggaagtgcctttccacagcagctatgcgcacagccagagcctggaccggctgatgaatcccctcatcgaccagtacctgtactacctggcccggacccagagcactacggggtccacaagggagctgcagttccatcaggctgggcccaacaccatggccgagcaatcaaagaactggctgcccggaccctgttatcggcagcagagactgtcaaaaaacatagacagcaacaacaacagtaactttgcctggaccggggccactaaataccatctgaatggtagaaattcattaaccaacccgggcgtagccatggccaccaacaaggacgacgaggaccagttctttcccatcaacggagtgctggtttttggcaaaacgggggctgccaacaagacaacgctggaaaacgtgctaatgaccagcgaggaggagatcaaaaccaccaatcccgtggctacagaagaatacggtgtggtctccagcaacctgcaatcgtctacggccggaccccagacacagactgtcaacagccagggggctctgcccggcatggtctggcagaaccgggacgtgtacctgcagggtcccatctgggccaaaattcctcacacggacggcaactttcacccgtctcccctgatgggcggatttggactcaaacacccgcctcctcaaattctcatcaaaaacaccccggtacctgctaatcctccagaggtgtttactcctgccaagtttgcctcatttatcacgcagtacagcaccggccaggtcagcgtggagatcgagtgggaactgcagaaagaaaacagcaaacgctggaatccagagattcagtacacctcaaattatgccaagtctaataatgtggaatttgctgtcaacaacgaaggggtttatactgagcctcgccccattggcacccgttacctcacccgtaacctgtaa

SEQ ID NO: 151 - protein, 728 aa, Adeno-associated virus; identical to SEQ ID NO: 146

SEQ ID NO: 152 - protein, 728 aa, Adeno-associated virus
MAADGYLPDWLEDNLSEGIREWWDLKPGAPKPKANQQKQDDGRGLVLPGYRYLGPFNGLDKGEPVNEADAAALEHDKAYDKQLEQGDNPYLKYNHADAEFQERLQEDTSFGGNLGRAVFQAKKRVLEPLGLVEEGAKTAPGKKRPIESPDSSTGIGKNGQPPAKKKLNFGQTGDSESVPDPQPLGEPPAAPSGLGSGTMAAGGGAPMADNNEGADGVGNASGNWHCDSTWLGDRVITTSTRTWALPTYNNHLYKQISSQSGATNDNHFFGYSTPWGYFDFNRFHCHFSPRDWQRLINNNWGFRPRKLRFKLFNIQVKEVTTNDGVTTIANNLTSTIQVFSDSEYQLPYVLGSAHQGCLPPFPADVFMIPQYGYLTLNNGSQSVGRSSFYCLEYFPSQMLRTGDNFEFSYTFEEVPFHSSYAHSQSLDRLMNPLIDQYLYYLARTQSTTGSTRELQFHQAGPNTMAEQSKNWLPGPCYRQQRLSKNIDSNNNSNFAWTGATKYHLNGRNSLTNPGVAMATNKDDEDQFFPINGVLVFGKTGAANKTTLENVLMTSEEEIKTTNPVATEEYGVVSSNLQSSTAGPQTQTVNSQGALPGMVWQNRDVYLQGPIWAKIPHTDGNFHPSPLMGGFGLKHPPPQILIKNTPVPANPPEVFTPAKFASFITQYSTGQVSVEIEWELQKENSKRWNPEIQYTSNYAKSNNVEFAVNNEGVYTEPRPIGTRYLTRNL

SEQ ID NO: 153 - protein, 728 aa, Adeno-associated virus; identical to SEQ ID NO: 145

SEQ ID NO: 154 - protein, 728 aa, Adeno-associated virus
MAADGYLPDWLEDNLSEGIREWWDLKPGAPKPKANQQKQDDGRGLVLPGYKYLGPFNGLDKGEPVNEADAAALEHDKAYDKQLEQGDNPYLKYNHADAEFQERLQEDTSFGGNLGRAVFQAKKRVLEPLGLVEEGAKTAPGKKRPIESPDSSTGIGKNGQPPAKKKLNFGQTGDSESVPDPQPLGEPPAAPSGLGSGTMAAGGGAPMADNNEGADGVGNASGNWHCDSTWLGDRVITTSTRTWALPTYNNHLYKQISSQSGATNDNHFFGYSTPWGYFDFNRFHCHFSPRDWQRLINNNWGFRPRKLRFKLFNIQVKEVTTNDGVTTIANNLTSTIQVFSDSEYQLPYVLGSAHQGCLPPFPADVFMIPQYGYLTLNNGSQSVGRSSFYCLEYFPSQMLRTGNNFEFSYTFEEVPFHSSYAHSQSLDRLMNPLIDQYLYYLARTQSTTGSTRELQFHQAGPNTMAEQSKNWLPGPCYRQQRLSKNIDSNNNSNFAWTGATKYHLNGRNSLTNPGVAMATNKDDEDQFFPINGVLVFGKTGAANKTTLENVLMTSEEEIKTTNPVATEEYGVVSSNLQSSTAGPQTQTVNSQGALPGMVWQNRDVYLQGPIWAKIPHTDGNFHPSPLMGGFGLKHPPPQILIKNTPVPANPPEVFTPAKFASFITQYSTGQVSVEIEWELQKENSKRWNPEIQYTSNYAKSNNVEFAVNNEGVYTEPRPIGTRYLTRNL

SEQ ID NO: 155 - protein, 728 aa, Adeno-associated virus
MAADGYLPDWLEDNLSEGIREWWDLKPGAPKPKANQQKQDDGRGLVLPGYKYLGPFNGLDKGEPVNEADAAALEHDKAYDKQLEQGDNPYLKYNHADAEFQERLQEDTSFGGNLGRAVFQAKKRVLEPLGLVEEGAKTAPGKKRPIESPDSSTGIGKKGQQPAKKKLNFGQTGDSESVPDPQPLGEPPAAPSGLGSGTMAAGGGAPMADNNEGADGVGNASGNWHCDSTWLGDRVITTSTRTWALPTYNNHLYKQISSQSGATNDNHFFGYSTPWGYFDFNRFHCHFSPRDWQRLINNNWGFRPRKLRFKLFNIQVKEVTTNDGVTTIANNLTSTIQVFSDSEYQLPYVLGSAHQGCLPPFPADVFMIPQYGYLTLNNGSQSVGRSSFYCLEYFPSQMLRTGNNFEFSYTFEEVPFHSSYAHSQSLDRLMNPLIDQYLYYLARTQSTTGSTRELQFHQAGPNTMAEQSKNWLPGPCYRQQRLSKNIDSNNNSNFAWTGATKYHLNGRNSLTNPGVAMATNKDDEDQFFPINGVLVFGKTGAANKTTLENVLMTSEEEIKTTNPVATEEYGVVSSNLQSSTAGPQTQTVNSQGALPGMVWQNRDVYLQGPIWAKIPHTDGNFHPSPLMGGFGLKHPPPQILIKNTPVPANPPEVFTPAKFASFITQYSTGQVSVEIEWELQKENSKRWNPEIQYTSNYAKSNNVEFAVNNEGVYTEPRPIGTRYLTRNL

SEQ ID NO: 156 - DNA, 2215 bp, synthetic construct
  source 1..2215: mol_type = other DNA; note = Description of Artificial Sequence: Synthetic polynucleotide
atggctgccgatggttatcttccagattggctcgaggacactctctctgaaggaataagacagtggtggaagctcaaacctggcccaccaccaccaaagcccgcagagcggcataaggacgacagcaggggtcttgtgcttcctgggtacaagtacctcggacccttcaacggactcgacaagggagagccggtcaacgaggcagacgccgcggccctcgagcacgacaaagcctacgaccggcagctcgacagcggagacaacccgtacctcaagtacaaccacgccgacgccgagttccaggagcggctcaaagaagatacgtcttttgggggcaacctcgggcgagcagtcttccaggccaaaaagaggcttcttgaacctcttggtctggttgaggaagcggctaagacggctcctggaaagaagaggcctgtagagcactctcctgtggagccagactcctcctcgggaaccggaaaggcgggccagcagcctgcaagaaaaagattgaattttggtcagactggagacgcagactcagtcccagaccctcaaccaatcggagaacctcccgcagccccctcaggtgtgggatctcttacaatggctgcaggcggtggcgcaccaatggcagacaataacgagggcgccgacggagtgggtaattcctcgggaaattggcattgcgattccacatggatgggcgacagagtcatcaccaccagcacccgaacctgggccctgcccacctacaacaaccacctctacaagcaaatctccaacagcacatctggaggatcttcaaatgacaacgcctacttcggctacagcaccccctgggggtattttgactttaacagattccactgccacttttcaccacgtgactggcagcgactcatcaacaacaactggggattccggcccaagagactcagcttcaagctcttcaacatccaggtcaaggaggtcacgcagaatgaaggcaccaagaccatcgccaataacctcaccagcaccatccaggtgtttacggactcggagtaccagctgccgtacgttctcggctctgcccaccagggctgcctgcctccgttcccggcggacgtgttcatgattccccagtacggctacctaacactcaacaacggtagtcaggccgtgggacgctcctccttctactgcctggaatactttccttcgcagatgctgagaaccggcaacaacttccagtttacttacaccttcgaggacgtgcctttccacagcagctacgcccacagccagagcttggaccggctgatgaatcctctgattgaccagtacctgtactacttgtctcggactcaaacaacaggaggcacgacaaatacgcagactctgggcttcagccaaggtgggcctaatacaatggccaatcaggcaaagaactggctgccaggaccctgttaccgccagcagcgagtatcaaagacatctgcggataacaacaacagtgaatactcgtggactggagctaccaagtaccacctcaatggcagagactctctggtgaatccgggcccggccatggcaagccacaaggacgatgaagaaaagtttttttcctcagagcggggttctcatctttgggaagcaaggctcagagaaaacaaatgtggacattgaaaaggtcatgattacagacgaagaggaaatcaggacaaccaatcccgtggctacggagcagtatggttctgtatctaccaacctccagagaggcaacagacaagcagctaccgcagatgtcaacacacaaggcgttcttccaggcatggtctggcaggacagagatgtgtaccttcaggggcccatctgggcaaagattccacacacggacggacattttcacccctctcccctcatgggtggattcggacttaaacaccctccgcctcagatcctgatcaagaacacgcctgtacctgcggatcctccgaccaccttcaaccagtcaaagctgaactctttcatcacccagtattctactggccaagtcagcgtggagatcgagtgggagctgcagaaggaaaacagcaagcgctggaaccccgagatccagtacacctccaactactacaaatctacaagtgtggactttgctgttaatacagaaggcgtgtactctgaaccccgccccattggcacccgttacctcacccgtaatctgtaa

SEQ ID NO: 157 - protein, 737 aa, synthetic construct
  source 1..737: note = Description of Artificial Sequence: Synthetic polypeptide
MAADGYLPDWLEDTLSEGIRQWWKLKPGPPPPKPAERHKDDSRGLVLPGYKYLGPFNGLDKGEPVNEADAAALEHDKAYDRQLDSGDNPYLKYNHADAEFQERLKEDTSFGGNLGRAVFQAKKRLLEPLGLVEEAAKTAPGKKRPVEHSPVEPDSSSGTGKAGQQPARKRLNFGQTGDADSVPDPQPIGEPPAAPSGVGSLTMAAGGGAPMADNNEGADGVGNSSGNWHCDSTWMGDRVITTSTRTWALPTYNNHLYKQISNSTSGGSSNDNAYFGYSTPWGYFDFNRFHCHFSPRDWQRLINNNWGFRPKRLSFKLFNIQVKEVTQNEGTKTIANNLTSTIQVFTDSEYQLPYVLGSAHQGCLPPFPADVFMIPQYGYLTLNNGSQAVGRSSFYCLEYFPSQMLKTGNNFQFTYTFEDVPFHSSYAHSQSLDRLMNPLIDQYLYYLSRTQTTGGTTNTQTLGFSQGGPNTMANQAKNWLPGPCYRQQRVSKTSADNNNSEYSWTGATKYHLNGRDSLVNPGPAMASHKDDEEKFFPQSGVLIFGKQGSEKTNVDIEKVMITDEEEIRTTNPVATEQYGSVSTNLQRGNRQAATADVNTQGVLPGMVWQDRDVYLQGPIWAKIPHTDGHFHPSPLMGGFGLKHPPPQILIKNTPVPADPPTTFNQSKLNSFITQYSTGQVSVEIEWELQKENSKRWNPEIQYTSNYYKSTSVDFAVNTEGVYSEPRPIGTRYLTRNL

SEQ ID NO: 158 - protein, 737 aa, synthetic construct
  source 1..737: note = Description of Artificial Sequence: Synthetic polypeptide
MAADGYLPDWLEDTLSEGIRQWWKLKPGPPPPKPAERHKDDSRGLVLPGYKYLGPFNGLDKGEPVNEADAAALEHDKAYDRQLDSGDNPYLKYNHADAEFQERLKEDTSFGGNLGRAVFQAKKRLLEPLGLVEEAAKTAPGKKRPVEHSPVEPDSSSGTGKAGQQPARKRLNFGQTGDADSVPDPQPIGEPPAAPSGVGSLTMAAGGGAPMADNNEGADGVGNSSGNWHCDSTWMGDRVITTSTRTWALPTYNNHLYKQISNSTSGGSSNDNAYFGYSTPWGYFDFNRFHCHFSPRDWQRLINNNWGFRPKRLSFKLFNIQVKEVTQNEGTKTIANNLTSTIQVFTDSEYQLPYVLGSAHQGCLPPFPADVFMIPQYGYLTLNNGSQAVGRSSFYCLEYFPSQMLKTGNNFQFTYTFEDVPFHSSYAHSQSLDRLMNPLIDQYLYYLSRTQTTGGTTNTQTLGFSQGGPNTMANQAKNWLPGPCYRQQRVSKTSADNNNSEYSWTGATKYHLNGRDSLVNPGPAMASHKDDEEKFFPQSGVLIFGKQGSEKTNVDIEKVMITDEEEIRTTNPVATEQYGSVSTNLQQGNTQAATADVNTQGVLPGMVWQDRDVYLQGPIWAKIPHTDGHFHPSPLMGGFGLKHPPPQILIKNTPVPADPPTTFNQSKLNSFITQYSTGQVSVEIEWELQKENSKRWNPEIQYTSNYYKSTSVDFAVNTEGVYSEPRPIGTRYLTRNL

SEQ ID NO: 159 - protein, 737 aa, synthetic construct
  source 1..737: note = Description of Artificial Sequence: Synthetic polypeptide
MAADGYLPDWLEDTLSEGIRQWWKLKPGPPPPKPAERHKDDSRGLVLPGYKYLGPFNGLDKGEPVNEADAAALEHDKAYDRQLDSGDNPYLKYNHADAEFQERLKEDTSFGGNLGRAVFQAKKRLLEPLGLVEEAAKTAPGKKRPVEHSPVEPDSSSGTGKAGQQPARKRLNFGQTGDADSVPDPQPIGEPPAAPSGVGSLTMAAGGGAPMADNNEGADGVGNSSGNWHCDSTWMGDRVITTSTRTWALPTYNNHLYKQISNSTSGGSSNDNAYFGYSTPWGYFDFNRFHCHFSPRDWQRLINNNWGFRPKRLSFKLFNIQVKEVTQNEGTKTIANNLTSTIQVFTDSEYQLPYVLGSAHQGCLPPFPADVFMIPQYGYLTLNNGSQAVGRSSFYCLEYFPSQMLRTGNNFQFTYTFEDVPFHSSYAHSQSLDRLMNPLIDQYLYYLSRTQTTGGTTNTQTLGFSQGGPNTMANQAKNWLPGPCYRQQRVSKTSADNNNSEYSWTGATKYHLNGRDSLVNPGPAMASHKDDEEKFFPQSGVLIFGKQGSEKTNVDIEKVMITDEEEIRTTNPVATEQYGSVSTNLQQGNTQAATADVNTQGVLPGMVWQDRDVYLQGPIWAKIPHTDGHFHPSPLMGGFGLKHPPPQILIKNTPVPADPPTTFNQSKLNSFITQYSTGQVSVEIEWELQKENSKRWNPEIQYTSNYYKSTSVDFAVNTEGVYSEPRPIGTRYLTRNL

SEQ ID NO: 160 - protein, 729 aa, synthetic construct
  source 1..729: note = Description of Artificial Sequence: Synthetic polypeptide
MAADGYLPDWLEDNLSEGIREWWDLKPGAPKPKANQQKQDDGRGLVLPGYKYLGPFNGLDKGEPVNAADAAALEHDKAYDQQLKAGDNPYLRYNHADAEFQERLQEDTSFGGNLGRAVFQAKKRVLEPLGLVEEGAKTAPGKKRPIDSPDSSTGIGKKGQQPAKKKLNFGQTGDSESVPDPQPLGEPPAAPSSVGSGTMAAGGGAPTADNNEGADGVGNASGNWHCDSTWLGDRVITTSTRTWALPTYNNHLYKQISSSSSGATNDNHYFGYSTPWGYFDFNRFHCHFSPRDWQRLINNNWGFRPKKLRFKLFNIQVKEVTTNDGVTTIANNLTSTVQVFSDSEYQLPYVLGSAHQGCLPPFPADVFMIPQYGYLTLNNGSQSVGRSSFYCLEYFPSQMLRTGNNFEFSYSFEDVPFHSSYAHSQSLDRLMNPLIDQYLYYLARTQSTTGSTRELQFHQAGPNTMAEQSKNWLPGPCYRQQRLSKNLDFNNNSNFAWTAATKYHLNGRNSLTNPGIPMATNKDDEDQFFPINGVLVFGKTGAANKTTLENVLMTSEEEIKTTNPVATEEYGVVSSNLQSSTAGPQSQTINSQGALPGMVWQNRDVYLQGPIWAKIPHTDGNFHPSPLMGGFGLEHPPPQILIKNTPVPANPPEVFTPAKFASFITQYSTGQVSVEIEWELQKENSKRWNPEIQYTSNYAKSNNVEFAVNPDGVYTEPRPIGTRYLTRNL

SEQ ID NO: 161 - DNA, 3075 bp, Adeno-associated virus
  source 1..3075: mol_type = unassigned DNA
tgagaactttcctttcaacgattgcgtcggacaagatggtgatctggtgggaggaggggaagatgaccgccaaggtcgtggagtcggccaaagccattcttggaggaagcaaggtgcgtgtggaccagaaatgcaagtcctcggcccagatagacccgactcccgtgatcgtcacctccaacaccaacatgtgcgccgtgattgacgggaactcaacgaccttcgagcaccagcagccgttgcaagaccggatgttcaaatttgaacttacccgccgtctggatcatgactttggaaaggtcaccaagcaggaagtgaaagactttttccggtgggcaaaggatcacgtggttgaggtggagcatgaattctacgtcaaaaagggtggagctaagaaaagacccgcccccagtgacgcagatataagtgagcccaaacgggcgcgcgagtcagttgcgcagccatcaacgtcagacgcggaagcttcgatcaactacgcggacaggtaccaaaaacaaatgttctcgtcacgtgggcatgaatctgatgctgtttccctgcagacaatgcgagagaatgaatcagaattcaaatatctgcttcactcacggacagaaagactgtttagagtgctttcccgtgtcagaatctcaacccgtttctgtcgtcaaaaaggcgtatcagaaactgtgctacattcatcatatcatgggaaaggtgccagacgcttgcactgcctgcgatctggtcaatgtggatttggatgactgcatctctgaacaataaatgatttaaatcaggtatggctgccgatggttatcctccagattggctcgaggacactctctctgaagggataagacagtggtggaagctcaaacctggcccaccaccaccaaagcccgcagagcggcataaggacgacagcaggggtcttgtgcttcctgggtacaagtacctcggacccttcaacggactcgacaagggggagccggtcaacgaggcagacgccgcggccctcgagcacgacaaggcctacgaccggcagctcgacagcggagacaacccgtacctcaagtacaaccacgccgacgcagagtttcaggagcgccttaaagaagatacgtcttttgggggcaacctcggacgagcagtcttccaggcgaaaaagagggttcttgaacctctgggcctggttgaggaacctgttaagacggctccgggaaaaaagaggccggtagagcactctcctgtggagccagactcctcctcgggaaccggaaaagcgggccagcggcctgcaagaaaaagattaaattttggtcagactggagacgcagactccgtacctgacccccagcctctcggacagccaccagcagccccctctggtctgggatctactacaatggctacaggcagtggcgcaccaatggcagacaataacgagggtgccgatggagtgggtaattcctcaggaaattggcattgcgattcccaatggctgggcgacagagtcatcaccaccagcacccgaacctgggccctgcccacatacaacaaccacctctacaagcaaatctccagccaatcaggagccagcaacgacaaccactactttggctacagcaccccctgggggtattttgacttcaacagattccactgccacttttcaccacgtgactggcaaagactcatcaacaacaactggggattccggcccaaaagactcaacttcaagctctttaatattcaagtcaaagaggtcacgcagaatgacggtacgacgacgattgccaataaccttaccagcacggttcaggtgtttactgactcggagtaccagctcccgtacgtcctgggctcggcgcatcaaggatgcctcccgccgtttccagcggacgtcttcatggtcccacagtatggatacctcaccctgaacaacgggagtcaggcggtaggacgctcttccttttactgcctggagtactttccttctcagatgctgcgtactggaaacaactttcagttcagctacacttttgaagacgtgcctttccacagcagctacgctcacagccagagtctggatcggctgatgaatcctctgatcgaccagtacctgtattatctgaacaagacacaaacaaatagtggaactcttcagcagtctcggctactgtttagccaagctggaccaaccaacatgtctcttcaagctaaaaactggctgcctggaccttgctacagacagcagcgtctgtcaaaacaggcaaacgacaacaacaacagcaactttccctggactgcagctacaaagtatcatctaaatggccgggactcgttggttaatccaggaccagctatggccagtcacaaggatgacgaagaaaagtttttccccatgcatggaaccctgatatttggtaaacaaggaacaaatgccaacgacgcggatttggaaaatgtcatgattacagatgaagaagaaatcagggccaccaatcccgtggctacggagcagtacgggactgtgtcaaataatttgcaaaactcaaacactggtccaactactggaactgtcaatcgccaaggagcgttacctggtatggtgtggcaggatcgagacgtgtacctgcagggacccatttgggccaagattcctcacaccgatggacactttcatccttctccactgatgggaggttttggactcaaacacccgcctcctcagatcatgatcaaaaacactcccgttccagccaatcctcccacaaacttcagttctgccaagtttgcttctttcatcacacagtattccacgggacaggtcagcgtggagatcgagtgggagctgcagaaggagaacagcaaacgctggaatcccgaaattcagtacacttccaactacaacaagtctgttaatgtggactttactgtggacactaatggtgtgtattcagagcctcgccccattggcaccagatacctgactcgtaatctgtaattgcttgttaatcaataaaccgtttaattcgtttcagttgaactttggtctctgcgaagggcgaa

SEQ ID NO: 162 - DNA, 3142 bp, Adeno-associated virus
  source 1..3142: mol_type = unassigned DNA
aaaacgacgggccagtgattgtaatacgactcactatagggcgaaattgaaattagcggccgcgaattcgcctttcgcagagaccaaagttcaactgaaacgaattaaacggtttattgattaacaagcaattacagattacgagtcaggtatctggtgccaatggggcgaggctctgaatacacaccattagtgtccacagtaaagtccacattaacagacttgttgtagttggaagtgtactgaatttcgggattccagcgtttgctgttctccttctgcagctcccactcgatctccacgctgacctgtcccgtggaatactgtgtgatgaaagaagcaaacttggcagaactgaagtttgtgggaggattggctggaacgggagtgtttttgatcatgatctgaggaggcgggtgtttgagtccaaaacctcccatcagtggagaaggatgaaagtgtccatcggtgtgaggaatcttggcccaaatgggtccctgcaggtacacgtctcgatcctgccacaccataccaggtaacgctccttggtgattgacagttccagtagttggaccagtgtttgagttttgcaaattatttgacacagtcccgtactgctccgtagccacgggattggtggccctgatttcttcttcatctgtaatcatgacattttccaaatccgcgtcgttggcatttgttccttgtttaccaaatatcagggttccatgcatggggaaaaacttttcttcgtcatccttgtgactggccatagctggtcctggattaaccaacgagtcccggccatttagatgatactttgtagctgcagtccagggaaagttgctgttgttgttgtcgtttgcctgttttgacagacgctgctgtctgtagcaaggtccaggcagccagtttttagcttgaagagacatgttggttggtccagcttggctaaacagtagccgagactgctgaagagttccactatttgtttgtgtcttgttcagataatacaggtactggtcgatcagaggattcatcagccgatccagactctggctgtgagcgtagctgctgtggaaaggcacgtcttcaaaagtgtagctgaactgaaagttgtttccagtacgcagcatctgagaaggaaagtactccaggcagtaaaaggaagagcgtcctaccgcctgactcccgttgttcagggtgaggtatccatactgtgggaccatgaagacgtccgctggaaacggcgggaggcatccttgatgcgccgagcccaggacgtacgggagctggtactccgagtcagtaaacacctgaaccgtgctggtaaggttattggcaatcgtcgtcgtaccgtcattctgcgtgacctctttgacttgaatattaaagagcttgaagttgagtcttttgggccggaatccccggttgttgttgacgagtctttgccagtcacgtggtgaaaagtggcagtggaatctgttgaagtcaaaatacccccagggggtgctgtagccaaagtagtggttgtcgttgctggctcctgattggctggagatttgcttgtagaggtggttgttgtatgtgggcagggcccaggttcgggtgctggtggtgatgactctgtcgcccagccattgggaatcgcaatgccaatttcctgaggaattacccactccatcggcaccctcgttattgtctgccattggtgcgccactgcctgtagccattgtagtagatcccagaccagagggggctgctggtggctgtccgagaggctgggggtcaggtacggagtctgcgtctccagtctgaccaaaatttaatctttttcttgcaggctgctggcccgcttttccggttcccgaggaggagtctggctccacaggagagtgctctaccggcctcttttttcccggagccgtcttaacaggctcctcaaccaggcccagaggttcaagaaccctctttttcgcctggaagactgctcgtccgaggttgcccccaaaagacgtatcttctttaaggcgctcctgaaactctgcgtcggcgtggttgtacttgaggtacgggttgtctccgctgtcgagctgccggtcgtaggccttgtcgtgctcgagggccgcggcgtctgcctcgttgaccggctcccccttgtcgagtccgttgaagggtccgaggtacttgtacccaggaagcacaagacccctgctgtcgtccttatgccgctctgcgggctttggtggtggtgggccaggtttgagcttccaccactgtcttattccttcagagagagtgtcctcgagccaatctggaagataaccatcggcagccatacctgatttaaatcatttattgttcagagatgcagtcatccaaatccacattgaccagatcgcaggcagtgcaagcgtctggcacctttcccatgatatgatgaatgtagcacagtttctgatacgcctttttgacgacagaaacgggttgagattctgacacgggaaagcactctaaacagtctttctgtccgtgagtgaagcagatatttgaattctgattcattctctcgcattgtctgcagggaaacagcatcagattcatgcccacgtgacgagaacatttgttttggtacctgtccgcgtagttgatcgaagcttccgcgtctgacgtcgatggctgcgcaactgactcgcgcgcccgtttgggctcacttatatctgcgtcactgggggcgggtcttttcttagctccaccctttttgacgtagaattcatgctccacctcaaccacgtgatcctttgcccaccggaaaaagtctttcacttcctgcttggtgacctttccaaagtcatgatccagacggcgggtaagttcaaatttgaacatccggtcttgcaacggctgctggtgctcgaaggtcgttgagttcccgtcaatcacggcgcacatgttggtgttggaggtgacgatcacgggagtcgggtctatctgggccgaggacttgcatttctggtccacacgcaccttgcttcctccaagaatggctttggccgactccacgaccttggcggtcatcttcccctcctcccaccagatcaccatcttgtcgacgcaatggtaaaaggaaagttctcattgg

SEQ ID NO: 163 - protein, 735 aa, Adeno-associated virus 2
MAADGYLPDWLEDTLSEGIRQWWKLKPGPPPPKPAERHKDDSRGLVLPGYKYLGPFNGLDKGEPVNEADAAALEHDKAYDRQLDSGDNPYLKYNHADAEFQERLKEDTSFGGNLGRAVFQAKKRVLEPLGLVEEPVKTAPGKKRPVEHSPVEPDSSSGTGKAGQQPARKRLNFGQTGDADSVPDPQPLGEPPATPAAVGPTTMASGGGAPMADNNEGADGVGNASGNWHCDSTWLGDRVITTSTRTWALPTYNNHLYKQISSASTGASNDNHYFGYSTPWGYFDFNRFHCHFSPRDWQRLINNNWGFRPKRLNFKLFNIQVKEVTQNDGTTTIANNLTSTVQVFTDSEYQLPYVLGSAHQGCLPPFPADVFMIPQYGYLTLNNGSQAVGRSSFYCLEYFPSQMLRTGNNFTFSYTFEDVPFHSSYAHSQSLDRLMNPLIDQYLYYLNRTQNQSGSAQDKALLFSRGSPAGMSVQPKNWLPGPCYRQQRVSKTKTDNNNSNFTWTGASKYNLNGRESIINPGTAMASHKDDKDKFFPMSGVMIFGKESAGASNTALDNVMITDEEEIKATNPVATERFGTVAVNFQSSSTDPATGDVHVMGALPGMVWQDRDVYLQGPIWAKIPHTDGHFHPSPLMGGFGLKHPPPQILIKNTPVPANPPAEFSATKFASFITQYSTGQVSVEIEWELQKENSKRWNPEVQYTSNYAKSANVDFTVDNNGLYTEPRPIGTRYLTRP

SEQ ID NO: 164 - protein, 740 aa, Adeno-associated virus 2
MAADGYLPDWLEDTLSEGIRQWWKLKPGPPPPKPAERHKDDSRGLVLPGYKYLGPFNGLDKGEPVNAADAAALEHDKAYDRQLDSGDNPYLKYNHADAEFQERLKEDTSFGGNLGRAVFQAKKRVLEPLGLVEEPVKTAPGKKRPVEHSPVEPDSSSGTGKAGQQPARKRLNFGQTGDADSVPDPQPLGQPPAAPSGLGTNTMATGSGAPMADNNEGADGVGNSSGNWHCDSTWMGDRVITTSTRTWALPTYNNHLYKQISSQSGASNDNHYFGYSTPWGYFDFNRFHCHFSPRDWQRLINNNWGFRPKRLNFKLFNIQVKEVTQNDGTTTIANNLTSTVQVFTDSEYQLPYVLGSAHQGCLPPFPADVFMVPQYGYLTLNNGSQAVGRSSFYCLEYFPSQMLRTGNNFTFSYTFEDVPFHSSYAHSQSLDRLMNPLIDQYLYYLSRTNTPSGTTTQSGLQFSQAGASDIRDQSRNWLPGPCYRQQRVSKTSADNNNSEYSWTGATKYHLNGRDSLVNPGPAMASHKDDEEKFFPQSGVLIFGKQGSEKTNVDIEKVMITDEEEIRTTNPVATEQYGSVSTNLQRGNRQAATADVNTQGVLPGMVWQDRDVYLQGPIWAKIPHTDGHFHPSPLMGGFGLKHPPPQILIKNTPVPANPSTTFSAAKFASFITQYSTGQVSVEIEWELQKENSKRWNPEIQYTSNYNKSVNVDFTVDTNGVYSEPRPIGTRYLTRNLLLAAA

SEQ ID NO: 165 - protein, 734 aa, Adeno-associated virus 2
MAADGYLPDWLEDTLSEGIRQWWKLKPGPPPPKPAERHKDDSRGLVLPGYKYLGPFNGLDKGEPVNEADAAALEHDKAYDRQLDSGDNPYLKYNHADAEFQERLKEDTSFGGNLGRAVFQAKKRVLEPLGLVEEPVKTAPGKKRPVEHSPVEPDSSSGTGKAGQQPARKRLNFGQTGDADSVPDPQPLGQPPAAPSGLGTNTMATGSGAPMADNNEGADGVGNSSGNWHCDSTWMGDRVITTSTRTWALPTYNNHLYKQISSQSGASNDNHYFGYSTPWGYFDFNRFHCHFSPRDWQRLINNNWGFRPKRLNFKLFNIQVKEVTQNDGTTTIANNLTSTVQVFTDSEYQLPYVLGSAHQGCLPPFPADVFMVPQYGYLTLNNGSQAVGRSSFYCLEYFPSQMLRTGNNFTFSYTFEDVPFHSSYAHSQSLDRLMNPLIDQYLYYLSRTNTPSGTTTQSGLQFSQAGASDIRDQSRNWLPGPCYRQQRVSKTSADNNNSEYSWTGATMYHLNGRDSLVNPGPAMASHKDDEEKFFPQSGVLIFGKQGSEKTNVDIEKVMITDEEEIRTTNPVATEQYGSVSTNLQRGNRQAATADVNTQGVLPGMVWQDRDVYLQGPIWAKIPHTDGHFHPSPLMGGFGLKHPPPQILIKNTPVPANPSTTFSAAKFASFITQYSTGQVSVEIEWELQKENSKRWNPEIQYTSNYNKSINVDFTVDTNGVYSEPRPIGTRYLTRN

SEQ ID NO: 166 - protein, 734 aa, Adeno-associated virus 2
MAADGYLPDWLEDTLSEGIRQWWKLKPGPPPPKPAERHKDDSRGLVLPGYKYLGPFNGLDKGEPVNEADAAALEHDKAYDRQLDSGDNPYLKYNHADAEFQERLKEDTSFGGNLGRAVFQAKKRVLEPLGLVEEPVKTAPGKKRPVEHSPVEPDSSSGTGKAGQQPARKRLNFGQTGDADSVPDPQPLGQPPAAPSGLGTNTMATGSGAPMADNNEGADGVGNSSGNWHCDSTWMGDRVITTSTRTWALPTYNNHLYKQISSQSGASNDNHYFGYSTPWGYFDFNRFHCHFSPRDWQRLINNNWGFRPKRLNFKLFNIQVKEVTQNDGTTTIANNLTSTVQVFTDSEYQLPYVLGSAHQGCLPPFPADVFMVPQYGYLTLNNGSQAVGRSSFYCLEYFPSQMLRTGNNFTFSYTFEDVPFHSSYAHSQSLDRLMNPLIDQYLYYLSRTNTPSGTTTQSGLQFSQAGASDIRDQSRNWLPGPCYRQQRVSKTSADNNNSEYSWTGATKYHLNGRDSLVNPGPAMASHKDDEEKFFPQSGVLIFGKQGSEKTNVDIEKVMITDEEEIRTTNPVATEQYGSVSTNLQRGNRQAATADVNTQGVLPGMVWQDRDVYLQGPIWAKIPHTDGHFHPSPLMGGFGLKHPPPQILIKNTPVPANPSTTFSEAKFASFITQYSTGQVSVEIEWELQKENSKRWNPEIQYTSNYNKSVNVDFTVDTNGVYSEPRPIGTRYLTRN

SEQ ID NO: 167 - protein, 739 aa, Adeno-associated virus 2
MAADGYLPDWLEDTLSEGIRQWWKLKPGPPPPKPAERHKDDSRGLVLPGYKYLGPFNGLDKGEPVNEADAAALEHDKAYDRQLDSGDNPYLKYNHADAEFQERLKEDTSFGGNLGRAVFQAKKRVLEPLGLVEEPVKTAPGKKRPVEHSPVEPDSSSGTGKAGQQPARKRLNFGQTGDADSVPDPQPLGQPPAAPSGLGTNTMATGSGAPMADNNEGADGVGNSSGNWHCDSTWMGDRVITTSTRTWALPTYNNHLYKQISSQSGASNDNHYFGYSTPWGYFDFNRFHCHFSPRDWQRLINNNWGFRPKRLNFKLFNIQVKEVTQNDGTTTIANNLTSTVQVFTDSEYQLPYVLGSAHQGCLPPFPADVFMVPQYGYLTLNNGSQAVGRSSFYCLEYFPSQMLRTGNNFTFSYTFEDVPFHSSYAHSQSLDRLMNPLIDQYLYYLSRTNTPSGTTTQSGLQFSQAGASDIRDQSRNWLPGPCYRQQRVSKTSADNNNSEYSWTGATKYHLNGRDSLVNPGPAMASHKDDEEKFFPQSGVLIFGKQGSEKTNVDIEKVMITDEEEIRTTNPVATEQYGSVSTNLQRGNRQAATADVNTQGVLPGMVWQDRDVYLQGPIWAKIPHTDGHFHPSPLMGGFGLKHPPPQILIKNTPVPANPSTTFSAAKFASFITQYSTGQVSVEIEWELQKENSKRWNPEIQYTSNYNKSVNVDFTVDTNGVYSEPRPIGTRYLTRNLLLAA

SEQ ID NO: 168 - protein, 725 aa, Adeno-associated virus 2
MAADGYLPDWLEDTLSEGIRQWWKLKPGPPPPKPAERHKDDSRGLVLPGYKYLGPFNGLDKGEPVNEADAAALEHDKAYDRQLDSGDNPYLKYNHADAEFQERLKEDTSFGGNLGRAVFQAKKRVLEPLGLVEEPVKTAPGKKRPVEHSPVEPDSSSGTGKAGQQPARKRLNFGQTGDADSVPDPQPLGQPPAAPSGLGTNTMATGSGAPMADNNEGADGVGNSSGNWHCDSTWMGDRVITTSTRTWALPTYNNHLYKQISSQSGASNDNHYFGYSTPWGYFDFNRFHCHFSPRDWQRLINNNWGFRPKRLNFKLFNIQVKEVTQNDGTTTIANNLTSTVQVFTDSEYQLPYVLGSAHQGCLPPFPADVFMVPQYGYLTLNNGSQAVGRSSFYCLEYFPSQMLRTGNNFTFSYTFEDVPFHSSYAHSQSLDRLMNPLIDQYLYYLSRTNTPSGTTTQSGLQFSQAGASDIRDQSRNWLPGPCYRQQRVSKTSADNNNSEYSWTGATKYHLNGRDSLVNPGPAMASHKDDEEKFFPQSGVLIFGKQGSEKTNVDIEKVMITDEEEIRTTNPVATEQYGSVSTNLQRGNRQAATADVNTQGVLPGMVWQDRDVYLQGPIWAKIPHTDGHFHPSPLMGGFGLKHPPPQILIKNTPVPANPSTTFSAAKFASFITQYSTGQVSVEIEWELQKENSKRWNPEIQYTSNYNKSVNVDFTVDTNGVYSEPRP

SEQ ID NO: 169 - protein, 707 aa, Adeno-associated virus 2
MAADGYLPDWLEDTLSEGIRQWWKLKPGPPPPKPAERHKDDSRGLVLPGYKYLGPFNGLDKGEPVNEADAAALEHDKAYDRQLDSGDNPYLKYNHADAEFQERLKEDTSFGGNLGRAVFQAKKRVLEPLGLVEEPVKTAPGKKRPVEHSPVEPDSSSGTGKAGQQPARKRLNFGQTGDADSVPDPQPLGQPPAAPSGLGTNTMATGSGAPMADNNEGADGVGNSSGNWHCDSTWMGDRVITTSTRTWALPTYNNHLYKQISSQSGASNDNHYFGYSTPWGYFDFNRFHCHFSPRDWQRLINNNWGFRPKRLNFKLFNIQVKEVTQNDGTTTIANNLTSTVQVFTDSEYQLPYVLGSAHQGCLPPFPADVFMVPQYGYLTLNNGSQAVGRSSFYCLEYFPSQMLRTGNNFTFSYTFEDVPFHSSYAHSQSLDRLMNPLIDQYLYYLSRTNTPSGTTTQSGLQFSQAGASDIRDQSRNWLPGPCYRQQRVSKTSADNNNSEYSWTGATKYHLNGRDSLVNPGPAMASHKDDEEKFFPQSGVLIFGKQGSEKTNVDIEKVMITDEEEIRTTNPVATEQYGSCIYQPPERQQTSSYRRCQHTRRSSRHGLAGQRCVPSGAHLGKDSTHGRTFSPLSPHGWIRTTPSSTDSHQEHPGTCESFDHLQCGKVCFLHHTVLHGTGQRGDRVRAAEGKQQTLESRNSVHFQLQQVC

SEQ ID NO: 170 - protein, 739 aa, Adeno-associated virus 2; identical to SEQ ID NO: 167

SEQ ID NO: 171 - protein, 737 aa, Adeno-associated virus 2
MASDGYLPDWLEDNLSEGIREWWDLKPGAPKPKANQQKQDDGRGLVLPGYKYLGPFNGLDKGEPVNAADAAALEHDKAYDQQLKAGDNPYLRYNHADAEFQERLQEDTSFGGNLGRAVFQAKKRVLEPFGLVEEGAKTAPGKKRPVEQSPQEPDSSSGIGKTGQQPAKKRLNFGQTGDSESVPDPQPLGEPPATPAAVGPTTMASGGGAPMADNNEGADGVGNASGNWHCDSTWLGDRVITTSTRTWALPTYNNHLYKQISSASTGASNDNHYFGYSTPWGYFDFNRFHCHFSPRDWQRLINNNWGFRPKRLNFKLFNIQVKEVTTNDGTTTIANNLTSTVQVFTDSEYQLPYVLGSAHQGCLPPFPADVFMVPQYGYLTLNNGSQAVGRSSFYCLEYFPSQMLRTGNNFTFSYTFEDVPFHSSYAHSQSLDRLMNPLIDQYLYYLSRTNTPSGTTTQSGLQFSQAGASDIRDQSRNWLPGPCYRQQRVSKTSADNNNSEYSWTGATKYHLNGRDSLVNPGPAMASHKDDEEKFFPQSGVLIFGKQGSEKTNVDIEKVMITDEEEIRTTNPVATEQYGSVSTNLQRGNRQAATADVNTQGVLPGMVWQDRDVYLQGPIWAKIPHTDGHFHPSPLMGGFGLKHHPPQILIKNTPVPANPSTTFSAAKFASFITQYSTGQVSVEIEWELQKENSKRWNPEIQYTSNYNKSVNVDFTVDTNGVYSEPRPIGTRYLTRNLL

SEQ ID NO: 172 - protein, 741 aa, Adeno-associated virus 2
MAADGYLPDWLEDTLSEGIREWWALKPGAPKPKANQQKQDDGRGLVLPGYKYLGPFNGLDKGEPVNEADAAALEHDKAYDQQLQAGDNPYLRYNHADAEFQERLQEDTSFGGNLGRAVFQAKKRVLEPLGLVEEPVKTAPGKKRPVEHSPVEPDSSSGTGKSGQQPARKRLNFGQTGDADSVPDPQPLGQPPAAPSGLGTNTMATGSGAPMADNNEGADGVGNSSGNWHCDSTWMGDRVITTSTRTWALPTYNNHLYKQISSQSGASNDNHYFGYSTPWGYFDFNRFHCHFSPRDWQRLINNNWGFRPKRLNFKLFNIQVKEVTQNDGTTTIANNLTSTVQVFTDSEYQLPYVLGSAHQGCLPPFPADVFMVPQYGYLTLNNGSQAVGRSSFYCLEYFPSQMLRTGNNFTFSYTFEDVPFHSSYAHSQSLDRLMNPLIDQYLYYLSRTNTPSGTTTQSGLQFSQAGASDIRDQSRNWLPGPCYRQQRVSKTSADNNNSEYSWTGATKYHLNGRDSLVNPGPAMASHKDDEEKFFPQSGVLIFGKQGSEKTNVDIEKVMITDEEEIRTTNPVATEQYGSVSTNLQRGNLANHNNTTNARQAATADVNTQGVLPGMVWQDRDVYLQGPIWAKIPHTDGHFHPSPLMGGFGLKHPPPQILIKNTPVPANPSTTFSAAKFASFITQYSTGQVSVEIEWELQKENSKRWNPEIQYTSNYNKSINVDFTVDTNGVYSEPRPIGTRYL

SEQ ID NO: 173 - protein, 730 aa, Adeno-associated virus 2
MASDGYLPDWLEDNLSEGIREWWDLKPGAPKPKANQQKQDDGRGLVLPGYKYLGPFNGLDKGEPVNAADAAALEHDKAYDQQLKAGDNPYLRYNHADAEFQERLQEDTSFGGNLGRAVFQAKKRVLEPFGLVEEGAKTAPGKKRPVEQSPQEPDSSSGIGKTGQQPAKKRLNFGQTGDSESVPDPQPLGEPPATPAAVGPTTMASGGGAPMADNNEGADGVGNASGNWHCDSTWLGDRVITTSTRTWALPTYNNHLYKQISSASTGASNDNHYFGYSTPWGYFDFNRFHCHFSPRDWQRLINNNWGFRPKRLNFKLFNIQVKEVTTNDGVTTIANNLTSTVQVFSDSEYQLPYVLGSAHQGCLPPFPADVFMIPQYGYLTLNNGSQAVGRSSFYCLEYFPSQMLRTGNNFTFSYTFEDVPFHSSYAHSQSLDRLMNPLIDQYLYYLNRTQNQSGSAQNNDLLFSRGSPAGMSVQPKNWLPGPCYRQQRVSKTKTDNNNSNFTWTGASKYNLNGRESIINPGTAMASHKDDKDKFFPMSGVMIFGKESAGASNTALDNVMITDEEEIKATNPVATERFGTVAVNLQSSSTDPATGDVHVMGALPGMVWQDRDVYLQGPIWAKIPHTDGHFHPSPLMGGFGLKNPPPQILIKNTPVPANPPAEFSATKFASFITQYSTGQVSVEIEWELQKENSKRWNPEVQYTSNYAKSANVDFTVDNNGLYTEPRPIGTR

SEQ ID NO: 174 - protein, 735 aa, Adeno-associated virus 2
  VARIANT 239: note = MOD_RES - Xaa = any amino acid
MASDGYLPDWLEDNLSEGIREWWDLKPGAPKPKANQQKQDDGRGLVLPGYKYLGPFNGLDKGEPVNAADAAALEHDKAYDQQLKAGDNPYLRYNHADAEFQERLQEDTSFGGNLGRAVFQAKKRVLEPFGLVEEGAKTAPGKKRPVEQSPQEPDSSSGIGKTGQQPAKKRLNFGQTGDSESVPDPQPLGEPPATPAAVGPTTMASGGGAPMADNNEGADGVGNASGNWHCDSTWLGDRXITTSTRTWALPTYNNHLYKQISSASTGASNDNHYFGYSTPWGYFDFNRFHCHFSPRDWQRLINNNWGFRPKRLNFKLFNIQVKEVTTNDGVTTIANNLTSTVQVFSDSEYQLPYVLGSAHQGCLPPFPADVFMIPQYGYLTLNNGSQAVGRSSFYCLEYFPSQMLRTGNNFTFSYTFEDVPFHSSYAHSQSLDRLMNPLIDQYLYYLNRTQNQSGSAQNNDLLFSRGSPAGMSVQPKNWLPGPCYRQQRVSKTKTDNNNSNFTWTGASKYNLNGRESIINPGTAMASHKDDKDKFFPMSGVMIFGKESAGASNTALDNVMITDEEEIKATNPVATERFGTVAVNLQSSSTDPATGDVHVMGALPGMVWQDRDVYLQGPIWAKIPHTDGHFHPSPLMGGFGLKNPPPQILIKNTPVPANPPAEFSATKFASFITQYSTGQVSVEIEWELQKENSKRWNPEVQYTSNYAKSANVDFTVDNNGLYTEPRPIGTRYLTRP

SEQ ID NO: 175 - protein, 733 aa, Adeno-associated virus 2
MASDGYLPDWLEDNLSEGIREWWDLKPGAPKPKANQQKQDDGRGLVLPGYKYLGPFNGLDKGEPVNAADAAALEHDKAYDQQLKAGDNPYLRYNHADAEFQERLQEDTSFGGNLGRAVFLAKKRVLEPFGLVEEGAKTAPGKKRPVEQSPQEPDSSSGIGKTGQQPAKKRLNFGQTGDSESVPDPQPLGEPPATPAAVGPTTMASGGGAPMADNNEGADGVGNASGNWHCDSTWLGDRVITTSTRTWALPTYNNHLYKQISSASTGASNDNHYFGYSTPWGYFDFNRFHCHFSPRDWQRLINNNWGFRPKRLNFKLFNIQVKEVTTNDGVTTIANNLTSTVQVFSDSEYQLPYVLGSAHQGCLPPFPADVFMIPQYGYLTLNNGSQAVGRSSFYCLEYFPSQMLRTGNNFTFSYTFEDVPFHSSYAHSQSLDRLMNPLIDQYLYYLNRTQNQSGSAQNNDLLFSRGSPAGMSVQPKNWLPGPCYRQQRVSKTKTDNNNSNFTWTGASKYNLNGRESIINPGTAMASHKDDKDKFFPMSGVMIFGKESAGASNTALDNVMITDEEEIKATNPVATERFGTVAVNLQSSSTDPATGDVHVMGALPGMVWQDRDVYLQGPIWAKIPHTDGHFHPSPLMGGFGLKNPPPQILIKNTPVPANPPAEFSATKFASFITQYSTGQVSVEIEWELQKENSKRWNPEVQYTSNYAKSANVDFTVDNNGLYTEPRPIGTRYLT

SEQ ID NO: 176 - protein, 734 aa, Adeno-associated virus 2
MAADGYLPDWLEDTLSEGIRQWWKLKPGPPPPKPAERHKDDSRGLVLPGCKYLGPFNGLDKGEPVNEADAAALEHDKAYDRQLDSGDNPYLKYNHADAEFQERLKEDTSFGGNLGRAVFQAKKRVLEPLGLVEEPVKTAPGKKRPVEHSPVEPDSSSGTGKAGQQPARKRLNFGQTGDADSVPDPQPLGQPPAAPSGLGTNTMATGSGAPMADNNEGADGVGNSSGNWHCDSTWMGDRVITTSTRTWALPTYNNHLYKQISSQSGASNDNHYFGYSTPWGYFDFNRFHCHFSPRDWQRLINNNWGFRPKRLNFKLFNIQVKEVTQNDGTTTIANNLTSTVQVFSDSEYQLPYVLGSAHQGCLPPFPADVFMIPQYGYLTLNNGSQAVGRSSFYCLEYFPSQMLRTGNNFTFNYTFEDVPFHSSYAHSQSLDRLMNPLIDQYLYYLNRTQNQSGSAQNNDLLFSRGSPAGMSVQPKNWLPGPCYRQQRVSKTKTDNNNSNFTWTGASKYNLNGRESIINPGTAMASHKDDKDKFFPMSGVMIFGKESAGASNTALDNVMITDEEEIKATNPVATERFGTVAVNLQSSSTDPATGDVHVMGALPGMVWQDRDVYLQGPIWAKIPHTDGHFHPSPLMGGFGLKNPPPQILIKNTPVPANPPAEFSATKFASFITQYSTGQVSVEIEWELQKENSKRWNPEVQYTSNYAKSANVDFTVDNNGLYTEPRPIGTRYLTRP

SEQ ID NO: 177 - protein, 734 aa, Adeno-associated virus 2
MAADGYLPDWLEDTLSEGIRQWWKLKPGPPPPKPAERHKDDSRGLVLPGYKYLGPFNGLDKGEPVNEADAAALEHDKAYDRQLDSGDNPYLKYNHADAEFQERLKEDTSFGGNLGRAVFQAKKRVLEPLGLVEEPVKTAPGKKRPVEHSPVEPDSSSGTGKAGQQPARKRLNFGQTGDADSVPDPQPLGQPPAAPSGLGTNTMATGSGAPMADNNEGADGVGNSSGNWHCDSTWMGDRVITTSTRTWALSTYNNHLYKQISSQSGASNDNHYFGYSTPWGYFDFNRFHCHFSPRDWQRLINNNWGFRPKRLNFKLFNIQVKEVTQNDGTTTIANNLTSTVQVFTDSEYQLPYVLGSAHQGCLPPFPADVFMVPQYGYLTLNNGSQAVGRSSFYCLEYFPSQMLRTGNNFTFSYTFEDVPFHSSYAHSQSLDRLMNPLIDQYLYYLSRTNTPSGTTTQSRLQFSQAGASDIRDQSRNWLPGPCYRQQRVSKTSADNNNSEYSWTGATKYHLNGRDSLVNPGPAMASHKDDEEKFFPQSGVLIFGKQGSEKTNVDIEKVMITDEEEIRTTNPVATEQYGSVSTNLQRGNRQAATADVNTQGVLPGMVWQDRDVYLQGPIWAKIPHTDGHFHPSPLMGGFGLKHPPPQILIKNTPVPANPSTTFSAAKFASFITQYSTGQVSVEIEWELQKENSKRWNPEIQYTSNYNKSINVDFTVDTNGVYSEPRPIGTRYLTRN

SEQ ID NO: 178 - protein, 738 aa, Adeno-associated virus 2
MAADGYLPDWLEDTLSEGIRQWWKLKPGPPPPKPAERHKDDSRGLVLPGYKYLGPFNGLDKGEPVNEADAAALEHDKAYDRQLDGGDNPYLKYNHADAEFQERLKEDTSFGGNLGRAVFQAKKRVLEPLGLVEEPVKTAPGKKRPVEHSPVEPDSSSGTGKAGQQPARKRLNFGQTGDADSVPDPQPLGQPPAAPSGLGTNTMATGSGAPMADNNEGADGVGNSSGNWHCDSTWMGDRVITTSTRTWALPTYNNHLYKQISSQSGASNDNHYFGYSTPWGYFDFNRFHCHFSPRDWQRLINNNWGFRPKRLNFKLFNIQVKEVTQNDGTTTIANNLTSTVQVFTDSEYQLPYVLGSAHQGCLPPFPADVFMVPQYGYLTLNNGSQAVGRSSFYCLEYFPSQMLRTGNNFTFSYTFEDVPFHSSYAHSQSLDRLMNPLIDQYLYYLSRTNTPSGTTTQSGLQFSQAGASDIRDQSRNWLPGPCYRQQRVSKTSADNNNSEYSWTGATKYHLNGRDSLVNPGPAMASHKDDEEKFFPQSGVLIFGKQGSEKTNVDIEKVMITDEEEIRTTNPVATEQYGSVSTNLQRGNRQAATADVNTQGVLPGMVWQDRDVYLQGPIWAKIPHTDGHFHPSPLMGGFGLKHPPPQILIKNTPVPANPSTTFSAAKFASFITQYSTGQVSVEIEWELQKENSKRWNPEIQYTSNYNKSVNVDFTVDTNGVYSEPRPIGTRYLTRNLLRP

SEQ ID NO: 179 - DNA, 2208 bp, Adeno-associated virus
  source 1..2208: mol_type = unassigned DNA
atggctgccgatggttatcttccagattggctcgaggacactctctctgaaggaataagacagtggtggaagctcaaacctggcccaccaccaccaaagcccgcagagcggcataaggacgacagcaggggtcttgtgcttcctgggtacaagtacctcggacccttcaacggactcgacaagggggagccggtcaacgaggcagacgccgcggccctcgagcacgacaaggcctacgaccggcagctcgacagcggagacaacccgtacctcaagtacaaccacgccgacgcagagtttcaggagcgccttaaagaagatacgtcttttgggggcaacctcggacgagcagtcttccaggcgaaaaagagggttcttgaacctctgggcctggttgaggaacctgttaagacggctccgggaaaaaagaggccggtagagcactctcctgtggagccagactcctcctcgggaaccggaaaagcgggccagcagcctgcaagaaaaagattaaattttggtcagactggagacgcagactccgtacctgacccccagcctctcggacagccaccagcagccccctctggtctgggatctactacaatggctacaggcagtggcgcaccaatggcagacaataacgagggtgccgatggagtgggtaattcctcaggaaattggcattgcgattcccaatggctgggcgacagagtcatcaccaccagcacccgaacctgggccctgcccacatacaacaaccacctctacaagcaaatctccagccaatcaggagccagcaacgacaaccactactttggctacagcaccccctgggggtattttgacttcaacagattccactgccacttttcaccacgtgactggcaaagactcatcaacaacaactggggattccggcccaaaagactcaacttcaagctctttaatattcaagtcaaagaggtcacgcagaatggcggtacgacgacgattgccaataaccttaccagcacggttcaggtgtttactgactcggagtaccagctcccgtacgtcctgggctcggcgcatcaaggatgcctcccgccgtttccagcggacgtcttcatggtcccacagtatggatacctcaccctgaacaacgggagtcaggcggtaggacgctcttccttttactgcctggagtactttccttctcagatgctgcgtactggaaacaactttcagttcagctacacttttgaagacgtgcctttccacagcagctacgctcacagccagagtctggatcggctgatgaatcctctgatcgaccagtacctgtattatctgaacaagacacaaacaaatagtggaactcttcagcagtctcggctactgtttagccaagctggaccaaccaacatgtctcttcaagctaaaaactggctgcctggaccttgctacagacagcagcgtctgtcaaaacaggcaaacggcaacaacaacagcaactttccctggactgcagctacaaagtatcatctaaatggccgggactcgttggttaatccaggaccagctatggccagtcacaaggatgacgaagaaaagtttttccccatgcatggaaccctgatatttggtaaacaaggaacaaatgccaacgacgcggatttggaaaatgtcatgattacagatgaagaagaaatcagggccaccaatcccgtggctacggagcagtacgggactgtgtcaaataatttgcaaaactcaaacactggtccaactactggaactgtcaatcaccaaggagcgttacctggtatggtgtggcaggatcgagacgtgtacctgcagggacccatttgggccaagattcctcacaccgatggacactttcatccttctccactgacgggaggttttggactcaaacacccgcctcctcagatcatgatcaaaaacactcccgttccagccaatcctcccacaaacttcagttctgccaagtttgcttctttcatcacacagtattccacgggacaggtcagcgtggagatcgagtgggagctgcagaaggagaacagcaaacgctggaatcccgaaattcagtacacttccaactacaacaagtctgttaatgtggactttactgtggacactaatggtgtgtattcagagcctcgccccattggcaccagatacctgactcgtaatctgtaa

SEQ ID NO: 180 - protein, 735 aa, Adeno-associated virus
MAADGYLPDWLEDTLSEGIRQWWKLKPGPPPPKPAERHKDDSRGLVLPGYKYLGPFNGLDKGEPVNEADAAALEHDKAYDRQLDSGDNPYLKYNHADAEFQERLKEDTSFGGNLGRAVFQAKKRVLEPLGLVEEPVKTAPGKKRPVEHSPVEPDSSSGTGKAGQQPARKRLNFGQTGDADSVPDPQPLGQPPAAPSGLGSTTMATGSGAPMADNNEGADGVGNSSGNWHCDSQWLGDRVITTSTRTWALPTYNNHLYKQISSQSGASNDNHYFGYSTPWGYFDFNRFHCHFSPRDWQRLINNNWGFRPKRLNFKLFNIQVKEVTQNGGTTTIANNLTSTVQVFTDSEYQLPYVLGSAHQGCLPPFPADVFMVPQYGYLTLNNGSQAVGRSSFYCLEYFPSQMLRTGNNFQFSYTFEDVPFHSSYAHSQSLDRLMNPLIDQYLYYLNKTQTNSGTLQQSRLLFSQAGPTNMSLQAKNWLPGPCYRQQRLSKQANGNNNSNFPWTAATKYHLNGRDSLVNPGPAMASHKDDEEKFFPMHGTLIFGKQGTNANDADLENVMITDEEEIRATNPVATEQYGTVSNNLQNSNTGPTTGTVNHQGALPGMVWQDRDVYLQGPIWAKIPHTDGHFHPSPLTGGFGLKHPPPQIMIKNTPVPANPPTNFSSAKFASFITQYSTGQVSVEIEWELQKENSKRWNPEIQYTSNYNKSVNVDFTVDTNGVYSEPRPIGTRYLTRNL

SEQ ID NO: 181 - DNA, 2208 bp, Adeno-associated virus
  source 1..2208: mol_type = unassigned DNA
atggctgccgatggttatcttccagattggctcgaggacactctctctgaaggaataagacagtggtggaagctcaaacctggcccaccaccaccaaagctcgcagagcggcatcaggacgacagcaggggtcttgtgcttcctgggtacaagtacctcggacccttcaacggactcgacaaaggagagccggtcaacgaggcagacgccgcggccctcgagcacgacaaggcctacgaccggcagctcgacagcggagacaacccgtacctcaagtacaaccacgccgacgcggagtttcaggagcgtcttaaagaagatacgtcttttgggggcaacctcggacgagcagtcttccaggcgaaaaagagggttcttgaacctctgggcctggttgaggaacctgttaagacggctccgggaaaaaagaggccggtagagcactctcctgtggagccagactcctcctcgggaaccggaaaggcgggccatcagcctgcgagaaagagattgaattttggtcagactggagacgcagactccgtacctgacccccagcctctcggacagccaccagcagcccccacaagtctgggatctactacaatggctacaggcagtggcgcaccaatggcagacaataacgagggtgccgatggagtgggtaattcctcaggaaattggcattgcgattcccaatggctgggcgacagagtcatcaccaccagcacccgaacctgggccctgcccacctacaacaaccacctctacaagcaaatctccagccaatcaggagcctcgaacgacaaccactactttggctacagcaccccctgggggtattttgacttcaacagattccactgtcacttctccccacgtgattggcaaagactcatcaacaacaactggggattccgacccaagagactcaacttcaagctctttaacattcaagtcaaagaggtcacgcagaatgacggtacgacgacgattgccaataaccttaccagcacggttcaggtgtttactgactcggagtaccagctcccgtacgtcctcggctcggcgcatcaaggatgcctcccgccgtttccagcggacgtcttcacggtcccacagtatggatacctcaccctgaacaacgggagtcaggcggtaggacgctcttccttttactgcctggagtactttccttctcagatgctgcgtactggaaacaaccttaccttcagctacacctttgaggacgttcctttccacagcagctacgctcacagccagagtttggaccggctgatgaatcctctgatcgaccagtatctatattatctgaacaggacacaatcaaatagtggaactcttcagcagtctaggctactgtttagccaagctggacccaccagcatgtctcttcaagctaaaaactggctgcctggaccttgctacagacagcagcgtctttcaaagcaggcaaacgacaacaacaacagcaactttccctggactgcggctacaaagtatcatctaaatggccgggactcgttggttaatccaggaccagctatggccagccacaaagacgatgaagaaaagtttttccccatgcatggaaccctgatatttggtaaacaaggaacaaatgctaacgacgcggatttggagcatgttatgattacagatgaagaagaaatcaggaccaccaatcctgtggctacagagcagtacggaaacgtgtcaaataatttgcaaaactcaaatactggtccaactacagaaaatgtcaatcaccagggagcgttacctggtatggtgtggcaggatcgagacgtgtacctgcagggacccatttgggccaagattcctcacaccgacggacactttcacccttctccactgatgggaggttttggactcaaacacccgcctcctcaaatcatgatcaaaaacactcccgttccagccaatcctcccacaaactacagttctgccaagtttgcttctttcatcacacagtattccacgggccaggtcagcgtggagattgagtgggagctgcggaaggagaacagcaaacgctggaaccccgagatccagtatacttccaactacaacaaatctgttaatgtggactttactgtggacactaatggtgtgtattcagagcctcgccccattggcaccagatacctgactcgtaatctgtaa

SEQ ID NO: 182 - protein, 735 aa, Adeno-associated virus
MAADGYLPDWLEDTLSEGIRQWWKLKPGPPPPKLAERHQDDSRGLVLPGYKYLGPFNGLDKGEPVNEADAAALEHDKAYDRQLDSGDNPYLKYNHADAEFQERLKEDTSFGGNLGRAVFQAKKRVLEPLGLVEEPVKTAPGKKRPVEHSPVEPDSSSGTGKAGHQPARKRLNFGQTGDADSVPDPQPLGQPPAAPTSLGSTTMATGSGAPMADNNEGADGVGNSSGNWHCDSQWLGDRVITTSTRTWALPTYNNHLYKQISSQSGASNDNHYFGYSTPWGYFDFNRFHCHFSPRDWQRLINNNWGFRPKRLNFKLFNIQVKEVTQNDGTTTIANNLTSTVQVFTDSEYQLPYVLGSAHQGCLPPFPADVFTVPQYGYLTLNNGSQAVGRSSFYCLEYFPSQMLRTGNNLTFSYTFEDVPFHSSYAHSQSLDRLMNPLIDQYLYYLNRTQSNSGTLQQSRLLFSQAGPTSMSLQAKNWLPGPCYRQQRLSKQANDNNNSNFPWTAATKYHLNGRDSLVNPGPAMASHKDDEEKFFPMHGTLIFGKQGTNANDADLEHVMITDEEEIRTTNPVATEQYGNVSNNLQNSNTGPTTENVNHQGALPGMVWQDRDVYLQGPIWAKIPHTDGHFHPSPLMGGFGLKHPPPQIMIKNTPVPANPPTNYSSAKFASFITQYSTGQVSVEIEWELRKENSKRWNPEIQYTSNYNKSVNVDFTVDTNGVYSEPRPIGTRYLTRNL

SEQ ID NO: 183 - DNA, 2208 bp, Adeno-associated virus
  source 1..2208: mol_type = unassigned DNA
atggctgccgatggttatcttccagattggctcgaggacactctctctgaaggaataagacagtggtggaagctcaaacctggcccaccaccaccaaagcccgcagagcggcatcaggacgacagcaggggtcttgtgcttcctgggtacaagtacctcggacccttcaacggactcgacaaaggagagccggtcaacgaggcagacgccgcggccctcgagcacgacaaggcctacgaccggcagctcgacagcggagacaacccgtacctcaagtacaaccacgccgacgcggagtttcaggagcgtcttaaagaagatacgtcttttgggggcaacctcggacgagcagtcttccaggcgaaaaagagggttcttgaacctctgggcctggttgaggaacctgttaagacggctccgggaaaaaagaggccggtagagcactctcctgtggagccagactcctcctcgggaaccggaaaagcgggccatcagcctgcgagaaagagattgaattttggtcagactggagacgcagactccgtacctgacccccagcctctcggacagccaccagcagcccccacaagtttgggatctactacaatggctacaggcagtggcgcaccaatggcagacaataacgagggtgccgatggagtgggtaattcctcaggaaattggcattgcgattcccaatggctgggcgacagagtcatcaccaccagcacccgaacctgggccctgcccacctacaacaaccacctctacaagcaaatctccagccaatcaggagcctcgaacgacaaccactactttggctacagcaccccctgggggtattttgacttcaacagattccactgtcacttctccccacgtgattggcaaagactcatcaacaacaactggggattccgacccaagagactcaacttcaagctctttaacattcaagtcaaggaggtcacgcagaatgacggtacgacgacgattgccaataaccttaccagcacggttcaggtgtttactgactcggagtaccagctcccgtacgtcctcggctcggcgcatcaaggatgcctcccgccgtttccagcggacgtcttcatggtcccacagtatggatacctcaccctgaacaacgggagtcaggcggtaggacgctcttccttttactgcctggagtactttccttctcagatgctgcgtactggaaacaactttaccttcagctacacctttgaggacgttcctttccacagcagctacgctcacagccagagtttggaccggctgatgaatcctctgatcgaccagtatctatattatctgaacaggacacaatcaaatagtggaactcttcagcagtctaggctactgtttagccaagctggacccaccagcatgtctcttcaagctaaaaactggctgcctggaccttgctacagacagcagcgtctttcaaagcaggcaaacgacaacaacaacagcaactttccctggactgcggctacaaagtatcgtctaaatggccgggactcgttggttaatccaggaccagctatggccagccacaaagacgatgaagaaaagtttttccccatgcatggaaccctgatatttggtaaacaaggaacaaatgctaacgacgcggatttggagcatgttatgattacagatgaagaagaaatcaggaccaccaatcctgtggctacagagcagtacggaaacgtgtcaaataatttgcaaaactcaaatactggtccaactacagaaaatgtcaatcaccagggagcgttacctggtatggtgtggcaggatcgagacgtgtacctgcagggacccatttgggccaagattcctcacaccgacggacactttcacccttctccactgatgggaggttttggactcaaacacccgcctcctcaaatcatgatcaaaaacactcccgttccagccaatcctcccacaaacttcagttctgccaagtttgcttctttcatcacacagtattccacgggccaggtcagcgtggagattgagtgggagctgcagaaggagaacagcaaacgctggaaccccgagatccagtatacttccaactacaacaaatctgttaatgtggactttactgtggacactaatggtgtgtattcagagcctcgccccattggcaccagatacctgactcgtaatctgtaa

SEQ ID NO: 184 - protein, 735 aa, Adeno-associated virus
MAADGYLPDWLEDTLSEGIRQWWKLKPGPPPPKPAERHQDDSRGLVLPGYKYLGPFNGLDKGEPVNEADAAALEHDKAYDRQLDSGDNPYLKYNHADAEFQERLKEDTSFGGNLGRAVFQAKKRVLEPLGLVEEPVKTAPGKKRPVEHSPVEPDSSSGTGKAGHQPARKRLNFGQTGDADSVPDPQPLGQPPAAPTSLGSTTMATGSGAPMADNNEGADGVGNSSGNWHCDSQWLGDRVITTSTRTWALPTYNNHLYKQISSQSGASNDNHYFGYSTPWGYFDFNRFHCHFSPRDWQRLINNNWGFRPKRLNFKLFNIQVKEVTQNDGTTTIANNLTSTVQVFTDSEYQLPYVLGSAHQGCLPPFPADVFMVPQYGYLTLNNGSQAVGRSSFYCLEYFPSQMLRTGNNFTFSYTFEDVPFHSSYAHSQSLDRLMNPLIDQYLYYLNRTQSNSGTLQQSRLLFSQAGPTSMSLQAKNWLPGPCYRQQRLSKQANDNNNSNFPWTAATKYRLNGRDSLVNPGPAMASHKDDEEKFFPMHGTLIFGKQGTNANDADLEHVMITDEEEIRTTNPVATEQYGNVSNNLQNSNTGPTTENVNHQGALPGMVWQDRDVYLQGPIWAKIPHTDGHFHPSPLMGGFGLKHPPPQIMIKNTPVPANPPTNFSSAKFASFITQYSTGQVSVEIEWELQKENSKRWNPEIQYTSNYNKSVNVDFTVDTNGVYSEPRPIGTRYLTRNL

SEQ ID NO: 185 - DNA, 2208 bp, Adeno-associated virus
  source 1..2208: mol_type = unassigned DNA
atggctgccgatggttatcttccagattggctcgaggacactctctctgaaggaataagacagtggtggaagctcaaacctggcccaccaccaccaaagcccgcagagcggcatcaggacgacagcaggggtcttgtgcttcctgggtacaagtacctcggacccttcaacggactcgacaaaggagagccggtcaacgaggcagacgccgcggccctcgagcacgacaaggcctacgaccggcagctcgacagcggagacaacccgtacctcaagtacaaccacgccgacgcggagtttcaggagcgtcttaaagaagatacgtcttttgggggcaacctcggacgagcagtcttccaggcgaaaaagagggttcttgaacctctgggcctggttgaggaacctgttaagacggctccgggaaaaaagaggccggtagagcactctcctgtggagccagactcctcctcgggaaccggaaaagcgggccatcagcctgcgagaaagagattgaattttggtcagactggagacgcagactccgtacctgacccccagcctctcggacagccaccagcagcccccacaagtttgggatctactacaatggctacaggcagtggcgcaccaatggcagacaataacgagggtgccgatggagtgggtaattcctcaggaaattggcattgcgattcccaatggctgggcgacagagtcatcaccaccagcacccgaacctgggccctgcccacctacaacaaccacctctacaagcaaatctccagccaatcaggagcctcgaacgacaaccactactttggctacagcaccccctgggggtattttgacttcaacagattccactgtcacttctccccacgtgattggcaaagactcatcaacaacaactggggattccgacccaagagactcaacttcaagctctttaacattcaagtcaaagaggtcacgcagaatgacggtacgacgacgattgccaataaccttaccagcacggttcaggtgtttactgactcggagtaccagctcccgtacgtcctcggctcggcgcatcaaggatgcctcccgccgtttccagcggacgtcttcatggtcccacagtatggatacctcaccctgaacaacgggagtcaggcggtaggacgcccttccttttactgcctggagtactttccttctcagatgctgcgtactggaaacaactttaccttcagctacacctttgaggacgttcctttccacagcagctacgctcacagccagagtttggaccggctgatgaatcctctgatcgaccagtatctatattatctgaacaggacacaatcaaatagtggaactcttcagcagtctaggctactgtttagccaagctggacccaccagcatgtctcttcaagctaaaaactggctgcctggaccttgctacagacagcagcgtctttcaaagcaggcaaacgacaacaacaacagcaactttccctggactgcggctacaaagtatcatctaaatggccgggactcgttggttaatccaggaccagctatggccagccacaaagacgatgaagaaaagtttttccccatgcatgggaccctgatatttggtaaacaaggaacaaatgctaacgacgcggatttggagcatgttatgattacagatgaagaagaaatcaggaccaccaatcctgtggctacagagcagtacggaaacgtgtcaaataatttgcaaaactcaaatactggtccaactacagaaaatgtcaatcaccagggagcgttacctggtatggtgtggcaggatcgagacgtgtacctgcagggacccatttgggccaagattcctcacaccgacggacactttcacccttctccactgatgggaggttttggactcaaacacccgcctcctcaaatcatgatcaaaaacactcccgttccagccaatcctcccacaaacttcagttctgccaagtttgcttctttcatcacacagtattccacgggccaggtcagcgtggagattgagtgggagctgcagaaggagaacagcaaacgctggaaccccgagatccagtatacttccaactacaacaaatctgttaatgtggactttactgtggacactaatggtgtgtattcagagcctcgccccattggcaccagatacctgactcgtaatctgtaa

SEQ ID NO: 186 - protein, 735 aa, Adeno-associated virus
MAADGYLPDWLEDTLSEGIRQWWKLKPGPPPPKPAERHQDDSRGLVLPGYKYLGPFNGLDKGEPVNEADAAALEHDKAYDRQLDSGDNPYLKYNHADAEFQERLKEDTSFGGNLGRAVFQAKKRVLEPLGLVEEPVKTAPGKKRPVEHSPVEPDSSSGTGKAGHQPARKRLNFGQTGDADSVPDPQPLGQPPAAPTSLGSTTMATGSGAPMADNNEGADGVGNSSGNWHCDSQWLGDRVITTSTRTWALPTYNNHLYKQISSQSGASNDNHYFGYSTPWGYFDFNRFHCHFSPRDWQRLINNNWGFRPKRLNFKLFNIQVKEVTQNDGTTTIANNLTSTVQVFTDSEYQLPYVLGSAHQGCLPPFPADVFMVPQYGYLTLNNGSQAVGRPSFYCLEYFPSQMLRTGNNFTFSYTFEDVPFHSSYAHSQSLDRLMNPLIDQYLYYLNRTQSNSGTLQQSRLLFSQAGPTSMSLQAKNWLPGPCYRQQRLSKQANDNNNSNFPWTAATKYHLNGRDSLVNPGPAMASHKDDEEKFFPMHGTLIFGKQGTNANDADLEHVMITDEEEIRTTNPVATEQYGNVSNNLQNSNTGPTTENVNHQGALPGMVWQDRDVYLQGPIWAKIPHTDGHFHPSPLMGGFGLKHPPPQIMIKNTPVPANPPTNFSSAKFASFITQYSTGQVSVEIEWELQKENSKRWNPEIQYTSNYNKSVNVDFTVDTNGVYSEPRPIGTRYLTRNL

SEQ ID NO: 187 - DNA, 2208 bp, Adeno-associated virus
  source 1..2208: mol_type = unassigned DNA
atggctgccgatggttatcttccagattggctcgaggacactctctctgaaggaataagacagtggtggaagctcaaacctggcccaccaccaccaaagcccgcagagcggcataaggacgacagcaggggtcttgtgcttcctgggtacaagtacctcggacccttcaacggactcgacaagggagagccggtcaacgaggcagacgccgcggccctcgagcacgacaaggcctacgaccggcagctcgacagcggagacaacccgtacctcaagtacaaccacgccgacgcggagtttcaggagcgccttaaagaagatacgtcttttgggggcaacctcggacgagcagtcttccaggcaaaaaagagggttcttgaacctctgggcctggttgaggagcctgttaaaacggctccgggaaaaaagaggccggtagagcactctcctgcggagccagactcctcctcgggaaccggaaaagcgggccagcagcctgcaagaaaaagattgaatttcggtcagactggagacgcagactccgtacctgacccccagcctctcggacagccaccagcagccccctctggtctgggaactaatacgatggcttcaggcagtggcgcaccaatggcagacaataacgagggcgccgacggagtgggtaattcctcgggaaattggcattgcgattccacatggatgggcgacagagtcatcaccaccagcacccgaacttgggccctgcccacctacaacaaccatctctacaagcaaatctccagccaatcaggagccagcaacgacaaccactactttggctacagcaccccttgggggtattttgacttcaacagattccactgccacttttcaccacgtgactggcaaagactcatcaacaacaactggggattccggcccaagagactcaacttcaagctctttaacattcaagtcaaagaggtcacgcagaatgacggtacgacgacgattgccaataaccttaccagcacggttcaggtgtttactgactcggagtaccagctcccgtacgtcctcggctcggcgcatcaaggatgcctcccgccgttcccagcagacgtcttcatggtgccacagtatggatacctcaccctgaacaacgggagtcaggcagtaggacgctcttcattttactgcctggagtactttccttctcagatgctgcgtaccggaaacaactttaccttcagctacacctttgaggacgttcctttccacagcagctacgctcacagccagagtttggaccgtctcatgaatcctctcatcgaccagtacctgtattacttgagcagaacaaacactccaagcggaaccaccacgcagtccaggcttcagttttctcaggccggagcaagtgacattcgggaccagtctaggaactggcttcctggaccctgttaccgccagcagcgagtatcaaagacatctgcggataacaacaacagtgaatactcgtggactggagctaccaagtaccacctcaatggcagagactctctggtgaatccgggcccggccatggccagccacaaggacgatgaagaaaagttttttcctcagagcggggttctcatctttgggaagcaaggctcagagaaaacaaatgtggacattgaaaaggtcatgattacagacgaagaggaaatcaggaccaccaatcccgtggctacggagcagtatggttctgtatctaccaacctgcagggcggcaacacacaagcagctaccgcagatgtcaacacacaaggcgttcttccaggcatggtctggcaggacagagacgtgtacctgcaggggcccatctgggcaaagattccacacacggacggacattttcacccctctcccctcatgggcggattcggacttaaacaccctcctccacagattctcatcaagaacaccccggtacctgcgaatccttcgaccaccttcagtgcggcaaagtttgcttctttcatcacacagtattccacggggcaggtcagcgtggagatcgagtgggagctgcagaaggagaacagcaaacgctggaatcccgagatccagtacacttccaactacaacaaatctgttaatgtggactttactgttgacactaatggcgtgtattcagagcctcgccccattggcaccagatacctgactcgtaatctgtaa

SEQ ID NO: 188 - protein, 735 aa, Adeno-associated virus
MAADGYLPDWLEDTLSEGIRQWWKLKPGPPPPKPAERHKDDSRGLVLPGYKYLGPFNGLDKGEPVNEADAAALEHDKAYDRQLDSGDNPYLKYNHADAEFQERLKEDTSFGGNLGRAVFQAKKRVLEPLGLVEEPVKTAPGKKRPVEHSPAEPDSSSGTGKAGQQPARKRLNFGQTGDADSVPDPQPLGQPPAAPSGLGTNTMASGSGAPMADNNEGADGVGNSSGNWHCDSTWMGDRVITTSTRTWALPTYNNHLYKQISSQSGASNDNHYFGYSTPWGYFDFNRFHCHFSPRDWQRLINNNWGFRPKRLNFKLFNIQVKEVTQNDGTTTIANNLTSTVQVFTDSEYQLPYVLGSAHQGCLPPFPADVFMVPQYGYLTLNNGSQAVGRSSFYCLEYFPSQMLRTGNNFTFSYTFEDVPFHSSYAHSQSLDRLMNPLIDQYLYYLSRTNTPSGTTTQSRLQFSQAGASDIRDQSRNWLPGPCYRQQRVSKTSADNNNSEYSWTGATKYHLNGRDSLVNPGPAMASHKDDEEKFFPQSGVLIFGKQGSEKTNVDIEKVMITDEEEIRTTNPVATEQYGSVSTNLQGGNTQAATADVNTQGVLPGMVWQDRDVYLQGPIWAKIPHTDGHFHPSPLMGGFGLKHPPPQILIKNTPVPANPSTTFSAAKFASFITQYSTGQVSVEIEWELQKENSKRWNPEIQYTSNYNKSVNVDFTVDTNGVYSEPRPIGTRYLTRNL

SEQ ID NO: 189 - DNA, 3161 bp, Adeno-associated virus
  source 1..3161: mol_type = unassigned DNA
gattgaatttagcggccgcgaattcgcccttgctgcgtcaactggaccaatgagaactttccattcaatgattgcgtcgacaagatggtgatctggtgggaggagggaaagatgaccgccaaggtcatggagtcggccaaagccattctcggaggaagcaaggtgcgcgtggaccagaaatgtaagtcctcggcccagatagacccgactcccgtgattgtcacctccaacaccaacatgtgcgccgtgattgacgggaactcaacgaccttcgagcaccagcagccgttgcaagaccggatgttcaaatttgaactcacccgccgtctggatcatgactttgggaaggtcaccaagcaggaagtcaaagactttttccggtgggcaaaggatcacgtggttgaggtggagcatgaattctacgtcaaaaagggtggagccaagaaaagacccgcccccagtgacgcagatataagtgagcccaaacgggcgcgcgggtcagttgcgcagccatcgacgtcagacgcggaagcttcgatcaactacgcggacaggtaccaaaacaaatgttctcgtcacgtgggcatgaatctgatgctgtttccctgcagacaatgcgagagaatgaatcaaaattcaaatatctgcttcactcacggacagaaggactgtttagagtgctttcccgtgtcagaatctcaacccgtttctgtcgtcaaaaaggcgtatcagaaactttgctacattcatcatatcatgggaaaggtgccagacgcttgcactgcctgcgatctggtcaatgtggatttggatgactgcatctctgaacaataaatgatttaaatcaggtatggctgccgatggttatcttccagattggctcaaggacactctctctgaaggaataagacagtggtggaagctcaaacctggcccaccaccaccaaagcccgcagagcggcataaggacgacagcgggggtcttgtgcttcctgggtacaagtacctcggacccttcaacggactcgacaagggagagccggtcaacgaggcagacgccgcggccctcgagtacgacaaggcctacgaccggcagctcgacagcggagacaacccgtacctcaagtacaaccacgccgacgcggagtttcaggagcgccttaaagaagatacgtcttttgggggcaacctcggacgagcagtcttccaggcgaaaaagagggttcttgaacctctgggcctggttgaggaacctgttaagacggctccgggaaaaaagaggccggtagagcactctcctgtggagccagactcctcctcgggaacaggaaaagcgggccagcagcctgcgagaaagagattgaattttggtcagactggagacgcagactccgtacctgacccccagcctctcggacagccaccagcagccccctctggtctgggaactaatacgatggctacaggcagtggcgcaccaatggcagacaataacgagggcgccgacggagtgggtaattcctcgggaagttggcattgcgattccacatggatgggcgacagagtcatcaccaccagcacccgaacctgggctctgcccacctacaacaaccatctgtacaagcagatctccagccaatcaggagccagcaacgacaaccactactttggctacagcaccccttgggggtattttgacttcaacagattccactgccacttttcaccacgtgactggcaaagactcatcaacaacaactggggattccggcccaagagactcaacttcaagctctttaacattcaagtcaaggaggtcacgcagaatgacggtacgacgacgattgccaataaccttaccagcacggttcaggtgtttactgactcggagtaccagctcccgtacgtccccggctcggcgcatcaaggatgcctcccgccgttcccagcagacgtcttcatggtgccacagtatggatacctcaccctgaacaacgggagtcaggcagtaggacgctcttcattttactgcctggagtactttccttctcagatgcttcgtaccggaaacaactttaccttcagctacacctttgaggatgttcctttccacagcagctacgctcacagccagagtttggaccgtctcatgaatcctctcatcgaccagtacctgtattacttgagcagaacaaacactccaagcggaaccaccacgcagtccaggcttcagttttctcaggccggagcaagtgacattcgggaccagtctaggaactggcttcctggaccctgttaccgccagcagcgagtatcaaagacagctgcggacaacaacaacagtgaatactcgtggactggagctaccaagtaccacctcaatggcagagactctctggtgaatccgggcccggccatggccagccacaaggacgatgaagaaaagttttttcctcaaagcggggttctcatctttgggaagcaaggctcagagaaaacaaatgtggacattgaaaaggtcatgattacagacgaagaggaaatcagaaccaccaatcccgtggccacggagcagtatggttctgtatctaccaacctccagagcggcaacacacaagcagctactgcagatgtcaacacacaaggcgttcttccaggcatggtctggcaggacagagacgtgcacctgcaggggcctatctgggcaaagattccacacacggacggacattttcacccctctcccctcatgggcggatttggacttaaacaccctcctccacagattctcatcaagaacaccccggtacctgcaaatccttcgaccaccttcagtgcggcaaagtttgcttccttcatcacacagtattccacagggcaggtcagcgtggagatcgagtgggagctgcagaaggagaacagcaaacgctggaaccccgagatccagtacacttccaactacaacaaatctgttaatgtggactttactgtggacactaatggtgtgtattcagagcctcgccccattggcaccagatacctgactcgtaatctgtaattgcttgttaatcaataaaccgtttaattcgtttcagttgaactttggtctctgcgaagggcgaattcgtttaaaccctgcaggactagtccctttagtgagg

SEQ ID NO: 190 - DNA, 3162 bp, Adeno-associated virus
  source 1..3162: mol_type = unassigned DNA
gaattgaatttagcggccgcgaattcgcccttcgcagagaccaaagttcaactgaaacgaattaaacggtttattgattaacaagcaattacagattacgagtcaggtatctggtgccaatggggcgaggctctgaatacacgccattagtgtccacagtaaagtccacattaacagacttgttgtagttggaagtgtactgaatttcgggattccagcgtttgctgttttccttctgcagctcccactcgatctccacgctgacctgtcccgtggagtactgtgtgatgaaggaagcaaactttgccgcactgaaggtggtcgaaggattcgcaggtaccggggtgttcttgatgagaatctgtggaggagggtgtttaagtccgaatccacccatgaggggagaggggtgaaaatgtccgtccgtgtgtggaatctttgcccagatgggcccctgaaggtacacatctctgtcctgccagaccatgcctggaagaacgccttgtgtgttgacatctgcggtagctgcttgtctgttgcctctctggaggttggtagatacagaaccgtactgctccgtagccacgggattggttgtcctgatttcctcttcgtctgtaatcatgaccttttcaatgtccacatttgttttctctgagccttgcttcccaaagatgagaaccccgctctgaggaaaaaacttttcttcattgtccttgtggcttgccatggccgggcccggattcaccagagagtctctgccattgaggtggtacttggtagctccagtccacgagtattcactgttgttgttatccgcagatgtctttgatactcgctgctggcggtaacagggtccaggaagccagttcctagactggtcccgaatgtcactcgctccggcctgagaaaactgaagccttgactgcgtggtggttccacttggagtgtttgttgtgctcaagtaatacaggtactggtcgatgagaggattcatgagacggtccagactctggctgtgagcgtagccgctgtggaaaggaacgtcctcaaaagtgtagctgaaggtaaagttgtttccggtacgcagcatctgagaaggaaagtactccaggcagtaaaatgaagagcgtcctactgcctgactcccgttgttcagggtgaggtatccatactgtggcaccatgaagacgtctgctgggaacggcgggaggcatccttgatgcgccgagccgaggacgtacgggagctggtactccgagtcagtaaacacctgaaccgtgctggtaaggttattggcaatcgtcgtcgtaccgtcattctgcgtgacctctttgacttgaatgttaaagagcttgaagttgagtctcttgggtcggaatccccagttgttgttgatgagtctttgccagtcacgtggtgaaaagtggcagtggaatctgttgaagtcaaaatacccccaaggggtgctgtagccaaagtagtgattgtcgttcgaggctcctgattggctggaaatttgtttgtagaggtggttgttgtaggtgggcagggcccaggttcgggtgctggtggtgatgactctgtcgcccatccatgtggaatcgcaatgccaatttcccgaggaattacccactccgtcggcgccctcgttattgtctgccattggtgcgccactgcctgtagccatcgtattagttcccagaccagagggggctgctggtggctgtccgagaggctgggggtcaggtactgagtctgcgtctccagtctgaccaaaattcaatctttttcttgcaggctgctggcccgcctttccggttcccgaggaggagtctggctccacaggagagtgctctaccggcctcttttttcctggagccgtcttgacaggttccccaaccaggcccagaggttcaagaaccctctttttcgcctggaagactgctcgtccgaggttgcccccaaaagacgtatcttctttaaggcgctcctgaaactccgcgtcggcgtggttgtacttgaggtacgggttgtctccgctgtcgagctgccggtcgtaggctttgtcgtgctcgagggccgcggcgtctgcctcgttgaccggctctcccttgtcgagtccgttgaagggtccgaggtacttgtacccaggaagcacaagacccctgctgtcgtccttatgccgctctgcgggctttggtggtggtgggccaggtttgagcttccaccactgtcttattccttcagagagagtgtcctcgagccaatctggaagataaccatcggcagccatacctgatttaaatcatttattgttcaaagatgcagtcatccaaatccacattgaccagatcgcaggcagtgcaagcgtctggcacctttcccatgatatgatgaatgtagcacagtttctgatacgcctttttgacgacagaaacgggttgagattctgacacgggaaagcactctaaacagtctttctgtccgtgagtgaagcagatatttgaattctgattcattctctcgcattgtctgcagggaaacagcatcagattcatgcccacgtgacgagaacatttgttttggtacctgtctgcgtagttgatcgaagcttccgcgtctgacgtcgatggctgcgcaactgactcgcgcacccgtttgggctcacttatatctgcgtcactgggggcgggtcttttcttggctccaccctttttgacgtagaattcatgctccacctcaaccacgtgatcctttgcccaccggaaaaagtctttgacttcctgcttggtgaccttcccaaagtcatgatccagacggcgggtgagttcaaatttgaacatccggtcttgcaacggctgctggtgttcgaaggtcgttgagttcccgtcaatcacggcgcacatgttggtgttggaggtgacgatcacgggagtcgggtctatctgggccgaggacttgcatttctggtccacgcgcaccttgcttcctccgagaatggctttggccgactccacgaccttggcggtcatcttcccctcctcccaccagatcaccatcttgtcgacacagtcgttgaagggaaagttctcattggtccagttgacgcagcaagggcgaattcgtttaaacctgcaggactagtccctttagtgaggg

SEQ ID NO: 191 - DNA, 3164 bp, Adeno-associated virus
  source 1..3164: mol_type = unassigned DNA
gcgaattgaatttagcggccgcgaattcgcccttcgcagagaccaaagttcaactgaaacgaattaaacggtttattgattaacaagcaattacaaattacgagtcaggtatctggtgccaatggggcgaggctctgaatacacgccattagtgtccacagtaaagtccacattaacagacttgttgtagttggaagtgtactgaatttcgggattccagcgtttgctgttttccttctgcagctcccactcgatctccacgctgacctgtcccgtggagtactgtgtgatgaaggaagcaaactttgccgcactgaaggtggtcgaaggattcgcaggtaccggggtgttcttgatgagaatctgtggaggagggtgtttaggtccgaatccacccatgaggggagaggggtgaaaatgtccgtccgtgtgtggaatctttgcccagatgggcccctgaaggtacacatctctgtcctgccagaccatgcctggaagaacgccttgtgtgttgacatctgcggtagctgcttgtctgttgcctctctggaggttggtagatacagaaccatactgctccgtagccacgggattggttgtcctgatttcctcttcgtctgtaatcatgaccttttcaatgtccacatttgttttctctgagccttgcttcccaaagatgagaaccccgctctgaggaaaaaacttttcttcattgtccttgtggcttgccatggccgggcccggattcaccagagagtctctgccattgaggtggtacttggtagctccagtccacgagtattcactgttgttgttatccgcagatgtctttgatactcgctgctggcggtaacagggtccaggaagccagttcctagactggtcccgaatgtcactcgctccggcctgagaaaactgaagccttgactgcgtggtggttccacttggagtgtttgttgtgctcaagtaatacaggtactggtcgatgagaggattcatgagacggtccagactctggctgtgagcgtagctgctgtggaaaggaacgtcctcaaaagtgtagctgaaggtaaagttgtttccggtacgcagcatctgagaaggaaagtactccgggcagtaaaatgaagagcgtcctactgcctgactcccgttgctcagggtgaggtatccatactgtggcaccatgaagacgtctgctgggaacggcgggaggcatccttgatgcgccgagccgaggacgtacgggagctggtactccgagtcagtaaacacctgaaccgtgctggtaaggttattggcaatcgtcgtcgtaccgtcattctgcgtgacctctttgacttgaatgttaaagagcttgaagttgagtctcttgggtcggaatccccagttgttgttgatgagtctttgccagtcacgtggtgaaaagtggcagtggaatctgttgaagtcaaaatacccccaaggggtgctgtagccaaagtagtgattgtcgttcgaggctcctgattggctggaaatttgtctgtagaggtggttgttgtaggtgggcagggcccaggttcgggtgctggtggtgatgactctgtcgcccatccatgtggaatcgcaatgccgatttcccgaggaattacccactccgtcggcgccctcgttattgtctgccattggtgcgccactgcctgtagccatcgtattagttcccagaccagagggggctgctggtggctgtccgagaggctgggggtcaggtactgagtctgcgtctccagtctgaccaaaattcaatctttttcttgcaggctgctggcccgcctttccggttcccgaggaggagtctggctccacaggagagtgctctaccggcctcttttttcccggagccgtcttaacaggttccccaaccaggcccagaggttcaagaaccctctttttcgcctggaagactgctcgtccgaggttgcccccaaaagacgtatcttctttaaggcgctcctgaaactccgcgtcggcgtggttgtacttgaggtacgggttgtctccgctgtcgagctgccggtcgtaggctttgtcgtgctcgagggccgcggcgtctgcctcgttgaccggctctcccttgtcgagtccgttgaagggtccgaggtacttgtacccaggaagcacaagacccctgctgtcgtccttatgccgctctgcgggctttggtggtggtgggccaggtttgagcttccaccactgtcttattccttcagagagagtgtcctcgagccaatctggaagataaccatcggcagccatacctgatttaaatcatttattgttcaaagatgcagtcatccaaatccacattgaccagatcgcaggcagtgcaagcgtctggcacctttcccatgatatgatgaatgtagcacagtttctgatacgcctttttgacgacagaaacgggttgagattctgacacgggaaagcactctaaacagtctttctgtccgtgagtgaagcagatatttgaattctgattcattctctcgcattgtctgcagggaaacagcatcagattcatgcccacgtgacgagaacatttgttttggtacctgtctgcgtagttgatcgaagcttccgcgtctgacgtcgatggctgcgcaactgactcgcgcacccgtttgggcccacttatatctgcgtcactgggggcgggtcttttcttggctccaccctttttgacgtagaattcatgctccacctcaaccacgtgatcctttgcccaccggaaaaagtctttgacttcctgcttggtgaccttcccaaagtcatgatccagacggcgggtgagttcaaatttgaacatccggtcttgcaacggctgctggtgttcgaaggtcgttgagttcccgtcaatcacggcgcacatgttggtgttggaggtgacgatcacgggagtcgggtctatctgggccgaggacttgcatttctggtccacgcgcaccttgcttcctccgagaatggctttggccgactccacgaccttggcggtcatcttcccctcctcccaccagatcaccatcttgtcgacacagtcgttgaagggaaagttctcattggtccagttgacgcagcaagggcgaattcgtttaaacctgcaggactagtccctttagtgaggg

SEQ ID NO: 192 - DNA, 3163 bp, Adeno-associated virus
  source 1..3163: mol_type = unassigned DNA
accctcactaaagggactagtcctgcaggtttaaacgaattcgcccttgctgcgtcaactggagcaatgagaactttcccttcaacgactgtgtcgacaagatggtgatttggtgggaggaggggaagatgaccgccaaggtcgtggagtcggccaaagccattctcggaggaagcaaggtgcgcgtggaccagaaatgcaagtcctcggcccagatagatccgactcccgtgatcgtcacctccaacaccaacatgtgcgccgtgattgacgggaactcaacgaccttcgaacaccagcagccgttgcaagaccggatgttcaaatttgaactcacccgccgtctggatcatgactttgggaaggtcaccaagcaggaagtcaaagactttttccggtgggcaaaggatcacgtggttgaggtggagcatggattctacgtcaaaaagggtggagccaagaaaagacccgcccctagtgacgcagatataagtgagcccaaacgggtgcgcgagtcagttgcgcagccatcgacgtcggacgcggaagcttcgatcaactacgcggacaggtaccaaaacaaatgttctcgtcacgtgggcatgaatctgatgctgtttccctgcagacaatgcgagagaatgaatcaaaattcaaatatctgcttcactcacggacagaaagactgtttagagtgctttcccgtgtcagaatctcaacctgtttctgtcgtcaaaaaggcgtatcagaaactgcgctacattcatcatatcatgggaaaggtgccagacgcttgcactgcctgcgatctggtcaatgtggatttggatgactgcatctctgaacaataaatgatttaaatcaggtatggctgccgatggttatcttccagattggctcgaggacactctctctgaaggaataagacagtggtggaagctcaaacctggcccaccaccaccaaagcccgcagagcggcataaggacgacagcaggggtcttgtgcttcctgggtacaagtacctcggacccttcaacggactcgacaagggagagccggtcaacgaggcagacgccgcggccctcgagcacgacaaggcctacgaccggcagctcgacagcggagacaacccgtacctcaagtacaaccacgccgacgcggagtttcaggagcgtcttaaagaagatacgtcttttgggggcaacctcggacgagcagtcttccaggcgaaaaagagggttcttgaacctctgggcctggttgaggaacctgttaagacggctccgggaaaaaagaggccggtagagcactctcctgcggagccagactcctcctcgggaaccggaaaagcgggccagcagcctgcaagaaaaagactgaatttcggtcagactggagacgcagactccgtacctgacccccagcctctcggacagccaccagcagcccccacaagtttgggatctactacaatggctacaggcagtggcgcaccaatggcagacaataacgagggtgccgatggagtgggtaattcctcaggaaattggcattgcgattcccaatggctgggcgacagagtcatcaccaccagcacccgaacctgggccctgcccacctacaacaaccacctttacaagcaaatctccagccaatcaggagcctcaaacgacaaccactactttggctacagcaccccctgggggtattttgacttcaacagattccactgccacttttcaccacgtgactggcaaagactcatcaacaacaactggggattccgacccaagagactcaacttcaagctctttaacattcaagtcaaagaggtcacgcagaatgacggtacgacgacgattgccaataaccttaccagcacggttcaggtgtttactgactcggagtaccagctcccgtacgtcctcggctcggcgcatcaaggatgcctcccgccgtttccagcggacgtcttcatggtcccacagtatggatacctcaccctgaacaacgggagtcaggcggtaggacgctcttccttttactgcctggagtgctttccttctcagatgctgcgtactggaaacaactttcagttcagctacacttttgaagacgtgcctttccacagcagctacgctcacagccagagtttggatcggctgatgaatcctctgatcgaccagtacctgtattatctaaacagaacacaaacagctagtggaactcagcagtctcggctactgtttagccaagctggacccacaagcatgtctcttcaagctaaaaactggctgcctggaccgtgttatcgccagcagcgtttgtcaaagcaggcaaacgacaacaacaacagcaactttccctggactggagctaccaagtaccacctcaatggcagagactctttggtgaacccgggcccggccatggccagccacaaggacgatgaagaaaagtttttccccatgcatggaaccctaatatttggtaaagaaggaacaaatgctaccaacgcggaattggaaaatgtcatgattacagatgaagaggaaatcaggaccaccaatcccgtggctacagagcagtacggatatgtgtcaaataatttgcaaaactcaaatactgctgcaagtactgaaactgtgaatcaccaaggagcattacctggtatggtgtggcaggatcgagacgtgtacctgcagggacccatttgggccaagattcctcacaccgatggacactttcatccttctccactgatgggaggttttggactcaaacacccgcctcctcagattatgatcaaaaacactcccgttccagccaatcctcccacaaacttcagttctgccaagtttgcttccttcatcacacagtattccacgggacaggtcagcgtggagatcgagtgggagctgcagaaggagaacagcaaacgctggaatcccgaaattcagtacacttccaactacaacaaatctgttaatgtggactttactgtggacactaatggtgtgtattcagagcctcgccccattggcaccagatacctgactcgtaatctgtaattgcttgttaatcaataaaccgtttaattcgtttcagttgaactttggtctctgcgaagggcgaattcgcggccgctaaattcaattcgcc

SEQ ID NO: 193 - protein, 735 aa, Adeno-associated virus
MAADGYLPDWLEDTLSEGIRQWWKLKPGPPPPKPAERHKDDSRGLVLPGYKYLGPFNGLYKGEPVDEADAAALEHDKAYDRQLDSGDNPYLKYNHADAEFQERLKEDTSFGGNLGRAVFQAKKRVLEPLGLVGEPVKTAPGKKRPVEHSPVEPDSSSGTGKAGNQPARKRLNFGQTGDADSVPDPQPLGQPPAAPSGLGSTTMATGSGAPVADNNEGADGVGNSSGNWHCDSQWLGDRVITTSTRTWALPTYNNHLYKQISSQSGASNDNHYFGYSTPWGYFDFNRFHCHFSPRDRQRLINNNWGFRPKRLNFKLFNIQVKEVTQNDGTTTIANNLTSTVQVFTDSGYQLPYVLGLAHQGCLPPFPADVFMVPQYGYLTLNNGSQAVGRSSFYCLEYFPSQMLRTGNNFQFSYTFEDVPFHSSYAHSQSLDRLMNPLIDQYLYYLNKTQSNSGTLQQSRLLFSQAGPTSMSLQAKNWLPGPCYRQQRLSKQANDNNNSNFPWTAATKYHLNGRDSLVNPGPAMASHKDDEEKFFPMHGTLIFGKQGTNANDADLDNVMITDEEEIRTTNPVATEQYGYVSNNLQNSNTGPTTGTVNHQGALPGMVWQDRDVYLQGPIWAKIPHTDGHFHPSPLMGGFGLKHPPPQIMIKNTPVPANPPTNFSSAKFASFITQYSTGQVSVEIEWELQKEDSKRWNPEIQYTSNYNKPVNVDFTVDTNGVYSEPRPIGTRYLTRNL

SEQ ID NO: 194 - DNA, 2208 bp, Adeno-associated virus
  source 1..2208: mol_type = unassigned DNA
atggctgccgatggttatcttccagattggctcgaggacactctctctgaaggaataagacagtggtggaagctcaaacctggcccaccaccaccaaagcccgcagagcggcataaggacgacagcaggggtcttgtgcttcctgggtacaagtacctcggacccttcaacggactctacaagggagagccggtcgacgaggcagacgccgcggccctcgagcacgacaaggcctacgaccggcagctcgacagcggagacaacccgtacctcaagtacaaccacgccgacgcggagtttcaggagcgccttaaagaagatacgtcttttgggggcaacctcggacgagcagtcttccaggccaaaaagagggttcttgaacctctgggcttggttggggagcctgttaaaacggctccgggaaaaaagaggccggtagagcactctcctgtggagccagactcctcctcgggaaccggaaaagcgggcaaccagcctgcaagaaaaagattgaattttggtcagactggagacgcagactccgtacctgacccccagcctctcggacagccaccagcagccccctctggtctgggatctactacaatggctacaggcagtggcgcaccagtggcagacaataacgagggtgccgatggagtgggtaattcctcaggaaattggcattgcgattcccaatggctgggcgacagagtcatcaccaccagcacccgaacctgggctctgcccacctacaataaccacctctacaagcaaatctccagccaatcaggagcctcaaacgacaaccactactttggctacagcaccccctgggggtattttgacttcaacagattccactgccacttttcaccacgtgaccggcaaagactcatcaacaacaactggggattccgaccaaaaagactcaacttcaagctctttaacattcaagtcaaagaggtcacgcagaatgacggtacgacgacgattgccaataaccttaccagcacggttcaggtgtttactgactcggggtaccagctcccgtacgtcctcggcttggcgcatcaaggatgcctcccgccgttcccagcagacgtcttcatggtgccacagtatggatacctcaccctgaacaacgggagtcaggcggtaggacgctcttccttttactgcctggagtactttccttctcagatgctgcgtactggaaacaactttcagttcagctacacctttgaagacgttcctttccacagcagctacgctcacagccagagtctggatcggctgatgaatcctctgatcgaccagtacctgtattatctgaacaagacacaatcaaatagtggaactcttcagcagtctcggctactgtttagccaagctggacccaccagcatgtctcttcaagctaaaaactggctgcctggaccttgctacagacagcagcgtctgtcaaagcaggcaaacgacaacaacaacagcaactttccctggactgcggctacaaagtatcatctaaatggccgggactcgttggttaatccaggaccagctatggccagccacaaagacgatgaagaaaagtttttccccatgcatggaaccctgatatttggtaaacaaggaacaaatgctaacgacgcggatttggacaatgtcatgattacagatgaagaagaaatccgcaccaccaatcccgtggctacggagcagtacggatatgtgtcaaataatttgcaaaactcaaatactggtccaactactggaactgtcaatcaccaaggagcgttacctggtatggtgtggcaggatcgagacgtgtacctgcagggacccatttgggccaagattcctcacaccgatggacactttcatccttctccacttatgggaggttttggactcaaacacccacctcctcagatcatgattaaaaacactcccgttccagccaatcctcccacaaacttcagttctgccaagtttgcttctttcatcacacagtattccacgggacaagtcagcgtggagatcgagtgggagctgcagaaggaggacagcaaacgctggaaccccgagatccagtacacttccaactataacaaacctgttaatgtggactttactgtggacactaatggtgtgtattcagagcctcgccccattggcaccagatacctgactcgtaatctgtaa

SEQ ID NO: 195 - DNA, 3161 bp, Adeno-associated virus
  source 1..3161: mol_type = unassigned DNA
cgaattgatttagcggccgcgaattcgcccttcgcagagaccaaagttcaactgaaacgaattaaacggtttattgattaacaagcaattacagattacgagtcaggtatctggtgccaatggggcgaggctctgaatacacaccattagtgtccacagtaaagtccacattaacagatttgttgtagttggaagtgtactggatctcgggattccagcgtttgctgttctccttctgtagctcccactcgatctccacgctgacccgccccgtggaatactgtgtgatgaaggaagcaaactttgccgcactgaaggtggtcgaaggattcgcaggtaccggggtgtttttgatgagaatctgtggaggagggtgtttaagtccgaatccgcccatgaggggagaggggtgaaaatgtccgtccgtgtgcggaatctttgcccagataggcccctgcaggtacacgtctctgtcctgccagaccatgcctggaagaacgccttgtgtgttgacatctgcagtagatgcttgtgtgttgccgctctggaggttggtagatacagaaccatactgctccgtggccacgggattggtggttctgatttcctcttcgtctgtaatcatgaccttttcaatgtccacatttgttttctctgatccttgttttccaaagatgagaaccccgctctgaggaaaaaacttttcttcatcgtccttgtggctggccattgccgggcccggattcaccagagagtctctgccattgaggtggtacttggtagctccaatccacgagtattcactgttgttgttgtccgcagatgtctttgatactcgctgctggcggtaacagggtccaggaagccagttcctagactgatcccgaatgtcactcgctccggcctgagaaaactgaagcctggactgcgtggtggttccgcttggagtgtttgttctgctcaagtaatacaggtactggtcgatgagaggattcatgagacggtccaaactctggctgtgagcgtagctgctgtggaaaggaacatcctcaaaggtgtagctgaaggtaaagttgtttccggtacgcagcatctgagaagggaagtactccaggcagtaaaatgaagagcgtcctactgcctgactcccgttgttcagggtgaggtatccatactgtggcaccatgaagacgtctgctgggaacggcgggaggcatccttgatgcgccgagccgaggacgtacgggagctggtactccgagtcagtaaacacctgaaccgtgctggtaaggttattggcaatcgtcgtcgtaccatcattctgcgtgacctctctgacttgaatgttaaagagcttgaagttgagtctcttgggccggaatccccagttgttgttgatgagtctttgccagtcacgtggtgaaaagtggcagtggaatctgttgaagtcaaaatacccccaaggggtgctgtagccaaagtagtggttgtcgttgctggctcctgattggctggaaatctgcttgtacagatggttgttgtaggtgggcagagcccaggttcgggtgctggtggtgatgactctgtcgcccatccatgtggaatcgcaatgccaatttcccgaggaattacccactccgtcggcgccatcgttattgtctgccattggtgcgccactgcctgtagccatcgtattagttcccagaccagagggggctgctggtggctgtccgagaggctgggggtcaggtacggagtctgcgtctccagtctgaccgaaattcaatctctttcttgcaggctggttgcccgcttttccggttcccgaggaggagtctggctccacaggagagtgctctaccggcctcttttttcccggagccgtcttaacaggctcctcaaccaggcccagaggttcaagaaccctcttttttgcctggaagactgctcgtccgaggttgcccccaaaagacgtatcttctttaaggcgctcctgaaactccgcgtcggcgtggtcgtacttgaggtacgggttgtctccgctgtcgagctgccggtcgtaggccttgtcgtgctcgagggccgcggcgtctgcctcgttgaccggctctcccttgtcgagtccgttgaagggtccgaggtacttgtacccaggaagcacaagacccctgctgtcgtccttatgccgctctgcgggctttggtggtggtgggccaggtttgagcttccaccactgtcttattccttcagagagagtgtcctcgagccaatctggaagataaccatcggcagccatacctgatttaaatcatttattgttcagagatgcagtcatccaaatccacattgaccagatcgcaggcagtgcaagcgtctggcacctttcccatgatatgatgaatgtagcaaagtttctgatacgcctttttgacgacagaaacgggttgagattctgacacgggaaagcactctaaacagtctttctgtccgtgagtgaagcagatatttgaattctgattcattctctcgcattgtctgcagggaaacagcatcagattcatgcccacgtgacgagaacatttgttttggtacctgtccgcgtagttgatcgaagcttccgcgtctgacgtcgatggctgcgcaactgactcgcgcgcccgtttgggctcacttatatctgcgtcactgggggcgggtcttttcttggctccaccctttttgacgtagaattcatgctccacctcaaccacgtgatcctttgcccaccggaaaaagtctttcacttcctgcttggtgaccttcccaaagtcatgatccagacggcgggttagttcaaatttgaacatccggtcttgcaacggctgctggtgttcgaaggtcgttgagttcccgtcaatcacggcgcacatgttggtgttggaggtggcgatcacgggagtcgggtctatctgggccgaggacttgcacttttggtccacgcgcaccttgcttcctccgagaatggcttcggccgattccacgaccttggcggtcatctttccctcctcccaccagatcaccatcttgtcgacacagtcgttgaagggaaagttctcattggtccagttgacgcagcaagggcgaattcgtttaaacctgcaggaactagtcccttagtgagg

SEQ ID NO: 196 - protein, 735 aa, Adeno-associated virus
MAADGYLPDWLEDTLSEGIRQWWKLKPGPPPPKPAERHKDDSRGLVLPGYKYLGPFNGLYKGEPVNEADAAALEHDKAYDRQLDSGDNPYLKYNHAGAEFQERLKEDTSFGGNLGRAVFQAKKRVLEPLGLVEEPVKTAPGKKRPVEHSPVEPDSSSGTGKAGNQPARKRLNFGQTGDADSVPDPQPLGQPPAAPSGLGSTTMATGSGAPVADNNEGADGVGNSSGNWHCDSQWLGDRVITTSTRTWALPTYNNHLYKQISSQSGASNDNHYFGYSTPWGYFDFNRFHCHFSPRDWQRLINNNWGFRPKRLNFKLFNIQVKEVTQNDGTTTIANNLTSTVQVFTDSEYQLPYVLGSAHQGCLPPFPADVFMVPQYGYLTLNNGSQAVGRSSFYCLEYFPSQMLRTGNNFQFSYTFEDVPFHSSYAHSQSLDRLMNPLIDQYLYYLNKTQSNSGTLQQSRLLFSQAGPTSMSLQAKNWLPGPCYRQQRLSKQANDNNNSNFPWTAATKYHLNGRDSLVNPGPAMASHKDDEEKFFPMHGTLIFGKQGTNANDADLDNVMITDEEEIRTTNPVATEQYGYVSNNLQDSNTGPTTGTVNHQGALPGMVWQDRDVYLQGPIWAKIPHTDGHFHPSPLMGGFGLKHPPPQIMIKNTPVPANPPTNFSSAKFASFITQYSTGQVSVEIEWELQKENSKRWNPEIQYTSNYNKSVNVDFTVDTNGVYSEPRPIGTRYLTRNL

SEQ ID NO: 197 - DNA, 2208 bp, Adeno-associated virus
  source 1..2208: mol_type = unassigned DNA
atggctgccgatggttatcttccagattggctcgaggacactctctctgaaggaataagacagtggtggaagctcaaacctggcccaccaccgccaaagcccgcagagcggcataaggacgacagcaggggtcttgtgcttcctgggtacaagtacctcggacccttcaacggactctacaagggagagccggtcaacgaggcagacgccgcggccctcgagcacgacaaggcctacgaccggcagctcgacagcggagacaacccgtacctcaagtacaaccacgccggcgcggagtttcaggagcgccttaaagaagatacgtcttttgggggcaacctcggacgagcagtcttccaggccaaaaagagggttcttgaacctctgggcttggttgaggagcctgttaaaacggctccgggaaaaaagaggccggtagagcactctcctgtggagccagactcctcctcgggaaccggaaaagcgggcaaccagcctgcaagaaaaagattgaattttggtcagactggagacgcagactccgtacctgacccccagcctctcggacagccaccagcagccccctctggtctgggatctactacaatggctacaggcagtggcgcaccagtggcagacaataacgagggtgccgatggagtgggtaattcctcaggaaattggcattgcgattcccaatggctgggcgacagagtcatcaccaccagcacccgaacctgggctctgcccacctacaacaaccacctctacaagcaaatctccagccaatcaggagcctcaaacgacaaccactactttggctacagcaccccctgggggtattttgacttcaacagattccactgccacttttcaccacgtgactggcaaagactcatcaacaacaactggggattccgaccaaagagactcaacttcaagctctttaacattcaagtcaaagaggtcacgcagaatgacggtacgacgacgattgccaataaccttaccagcacggttcaggtgtttactgactcggagtaccagctcccgtacgtcctcggctcggcgcatcaaggatgcctcccgccgttcccagcagacgtcttcatggtgccacagtatggatacctcaccctgaacaacgggagtcaggcggtaggacgctcttccttttactgcctggagtactttccttctcagatgctgcgtactggaaacaactttcagttcagctacacctttgaagacgttcctttccacagcagctacgctcacagccagagtctggatcggctgatgaatcctctgatcgaccagtacctgtattatctgaacaagacacaatcaaatagtggaacccttcagcagtctcggctactgtttagccaagctggacccaccagcatgtctcttcaagctaaaaactggctgcctggaccttgctacagacagcagcgtctgtcaaagcaggcaaacgacaacaacaacagcaactttccctggactgcggctacaaagtatcatctaaatggccgggactcgttggttaatccaggaccagctatggccagccacaaagacgatgaagaaaagtttttccccatgcatggaaccctgatatttggtaaacaaggaacaaatgctaacgacgcggatttggacaatgtcatgattacagatgaagaagaaatccgcaccaccaatcccgtggctacggagcagtacggatatgtgtcaaataatttgcaagactcaaatactggtccaactactggaactgtcaatcaccaaggagcgttacctggtatggtgtggcaggatcgagacgtgtacctgcagggacccatttgggccaagattcctcacaccgatggacactttcatccttctccacttatgggaggttttggactcaaacacccacctcctcagatcatgattaaaaacactcccgttccagccaatcctcccacaaacttcagttctgccaagtttgcttctttcatcacacagtattccacgggacaagtcagcgtagagatcgagtgggagctgcagaaggagaacagcaaacgctggaaccccgagatccagtacacttccaactataacaaatctgttaatgtggactttactgtggacactaatggtgtgtattcagagcctcgccccattggcaccagatacctgactcgtaatctgtaa

SEQ ID NO: 198 - protein, 738 aa, Adeno-associated virus
MAADGYLPDWLEDNLSEGIREWWDLKPGAPKPKANQQKQDDGRGLVLPGCKYLGPFNGLDKGEPVNAADAAALEHDKAYDQQLKAGDNPYLRYNHADAEFQERLQEDTSFGGNLGRAVFQAKKRVLEPLGLVEEGAKTAPGKKRPVEPSPQRSPDSSTGIGKTGQQPAKKRLNFGQTGDSESVPDPQPIGEPPAGPSGLGSGTMAAGGGAPMADNNEGADGVGSSSGNWHCDSTWLGDRVITTSTRTWALPTYNNHLYKQISNGTSGGSTNDNTYFGYSTPWGYFDFNRFHCHFSPRDWQRLINNNWGFRPKRLNFKLFNIQVKEVTQNEGTKTIANNLTSTIQVFTDSEYQLPYVLGSAHQGCPPPFPADVFMIPQYGYLTLNNGSQAVGRSSFYCLEYFPSQMRRTGNNFEFSYQFEDVPFHSSYAHSQSLDRLMNPLIDQYLYYLSRTQSTGGTAGTQQLLFSQAGPNNMSAQAKNWLPGPCYRQQRVSTTLSQNNNSNFAWTGATKYHLNGRDSLVNPGVAMATHKDDEERFFPSSGVLMFGKQGAGKDNVDYSSVMLTSEEEIKTTNPVATEQYGVVADNLQQQNAAPIVGAVNSQGALPGMVWQNRDVYLQGPIWAKIPHTDGNFHPSPLMGGFGLKHPPPQILIKNTPVPADPPTTFSQAKLASFITQYSTGQVSVEIEWELQKENSKRWNPEIQYTSNYNKSVNVDFTVDTNGVYSEPRPIGTRYLTRNL

SEQ ID NO: 199 - DNA, 2217 bp, Adeno-associated virus
  source 1..2217: mol_type = unassigned DNA
atggctgccgatggttatcttccagattggctcgaggacaacctctctgagggcattcgcgagtggtgggacttgaaacctggagccccgaaacccaaagccaaccagcaaaagcaggacgacggccggggtctggtgcttcctggctgcaagtacctcggacccttcaacggactcgacaagggggagcccgtcaacgcggcggacgcagcggccctcgagcacgacaaggcctacgaccagcagctcaaagcgggtgacaatccgtacctgcggtataaccacgccgacgccgagtttcaggagcgtctgcaagaagatacgtcttttgggggcaacctcgggcgagcagtcttccaggccaagaagcgggttctcgaacctctcggtctggttgaggaaggcgctaagacggctcctggaaagaagagaccggtagagccatcaccccagcgttctccagactcctctacgggcatcggcaagacaggccagcagcccgcgaaaaagagactcaactttgggcagactggcgactcagagtcagtgcccgaccctcaaccaatcggagaaccccccgcaggcccctctggtctgggatctggtacaatggctgcaggcggtggcgctccaatggcagacaataacgaaggcgccgacggagtgggtagttcctcaggaaattggcattgcgattccacatggctgggcgacagagtcatcaccaccagcacccgaacctgggccctccccacctacaacaaccacctctacaagcaaatctccaacgggacatcgggaggaagcaccaacgacaacacctacttcggctacagcaccccctgggggtattttgactttaacagattccactgccacttctcaccacgtgactggcagcgactcatcaacaacaactggggattccggcccaagagactcaacttcaagctcttcaacatccaggtcaaggaggtcacgcagaatgaaggcaccaagaccatcgccaataaccttaccagcacgattcaggtctttacggactcggaataccagctcccgtacgtcctcggctctgcgcaccagggctgcccgcctccgttcccggcggacgtcttcatgattcctcagtacgggtacctgactctgaacaacggcagtcaggccgtgggccgttcctccttctactgcctggagtactttccttctcaaatgcggagaacgggcaacaactttgagttcagctaccagtttgaggacgtgccttttcacagcagctacgcgcatagccaaagcctggaccggctgatgaaccccctcatcgaccagtacctgtactacctgtctcggactcagtccacgggaggtaccgcaggaactcagcagttgctattttctcaggccgggcctaataacatgtcggctcaggccaaaaactggctacccgggccctgctaccggcagcaacgcgtctccacgacactgtcgcaaaataacaacagcaactttgcttggaccggtgccaccaagtatcatctgaatggcagagactctctggtaaatcccggtgtcgctatggcaacgcacaaggacgacgaagagcgattttttccatccagcggagtcttgatgtttgggaaacagggagctggaaaagacaacgtggactatagcagcgttatgctaaccagtgaggaagaaatcaaaaccaccaacccagtggccacagaacagtacggcgtggtggccgataacctgcaacagcaaaacgccgctcctattgtaggggccgtcaacagtcaaggagccttacctggcatggtctggcagaaccgggacgtgtacctgcagggtcctatctgggccaagattcctcacacggacggcaactttcatccttcgccgctgatgggaggctttggactgaaacacccgcctcctcagatcctgattaagaatacacctgttcccgcggatcctccaactaccttcagtcaagccaagctggcgtcgttcatcacgcagtacagcaccggacaggtcagcgtggaaattgaatgggagctgcagaaagagaacagcaagcgctggaacccagagattcagtatacttccaactataacaaatctgttaatgtggactttactgtggacactaatggtgtgtattcagagcctcgccccattggcaccagatacctgactcgtaatctgtaa

SEQ ID NO: 200 - DNA, 3167 bp, Adeno-associated virus
  source 1..3167: mol_type = unassigned DNA
attgaatttagcggccgcgaattcgcccttcgcagagaccaaagttcaactgaaacgaattaaacggtttattgattaacaagcaattacagattacgagtcaggtacctggtgccaatggggcgaggctctgaatacacaccattagtgtccacagtaaagtccacattaacagatttgttgtagttggaagtgtactgaatctcgggattccagcgtttgctgttctccttctgcagctcccactcgatctccacgctgacctgccccgtggagtactgtgtaatgaaggaagcaaactttgccgcactgaaggtagtcgaaggattcgcaggtaccggggtgttcttgatgagaatctgcgggggagggtgtttaagtccgaatccgcccatgaggggagaggggtgaaaatgtccgtccgtgtgtggaatctttgcccagatgggcccctgcaggtacacgtctctgtcctgccacaccatgcctggaagaacgccttgtgtgttgacatctgaggtagctgcttgtgtgttgccgctctggaggttggtagatacagaaccatactgctccgtagccacgggattggtggtcctgatttcctcttcgtctgtaatcatgaccttttcaatgtccacattagtttttcccgagtcttgttttccaaagatgagaaccccgctctgaggaaaaaacttttcttcatcgtccttgtggctggccatggccgggcccggattcaccagagagtctcttccattaaggtggtacttggtagctccagtccacgagtattcactgttgttgttatccgcagatgtctttgatactcgctgctggcggtaacagggtccaggaagccagttcctagactggtcccgaatgtcacttgctccggcctgagaaaactgaagccttgactgcgtggtggttccgcttggagtgtttgttctgctcaagtaatacaggtactggtcgatgagaggattcatgagacggtccaaactctggctgtgggcgtagctgctgtggaaaggaacgtcctcaaaggtgtagctgaaggtaaagttgtttccggtacgcagcatctgagaaggaaagtactccaggcagtaaaatgaagagcgtcctactgcctgactcccgttgttcagggtgaggtatccatactgtggcaccatgaagacgtctgctgggaacggcgggaggcatccttgatgcgccgagccgaggacgtacgggagctggtactccgagtcagtaaacacctgaaccgtgctggtaaggttattggcaatcgtcgtcgtaccgtcattctgcgtgacctccttgacttgaatgttaaagagcttgaagttgagtcttttgggccggaatccccaattgttgttgatgagtctttgccagtcacgtggcgaaaagtggcagtggaatctgttgaagtcaaaatacccccaaggggtgctgtagccaaagtagtggttgtcgtttgaggctcctgattggctggaaatctgcttgtagaggtggttgttgtaggtgggcagagcccaggtgcgggtgctggtggtgatgactctgtcgcccatccatgtggaatcgcaatgccaatttcccgaggaattacccactccgtcggcgccctcgttattgtctgccattggtgcgccactgcctgtagccatcgtattagttcccagaccagagggggctgctggtggctgtccgagaggctgggggtcaggtacggagtctgcgtctccagtctgaccgaaattcaatctctttcttgcaggctgctggcccgcttttccggttcccgaggaggagtctggctccgcaggagagtgctctaccggcctcttttttcccggagccgtcttaacaggttcctcaaccaggcccagaggttcaagaaccctctttttcgcctggaagactgctcgtccgaggttgcccccaaaagacgtatcttctttaagacgctcctggaactccgcgtcggcgtggttgtacttggggtacgggttgtctccgctgtcgagctgccggtcgtaggccttgtcgtgctcgagggccgcggcgtctgcctcgttgaccggctctcccttgtcgagtccgttgaagggtccaaggtacttgtacccaggaagcacaagacccctgctgtcgtccttatgccgctctgcgggctttggtggtggtgggccaggtttgagcttccaccactgtcttattccttcagagagagtgtcctcgagccaatctggaagataaccatcggcagccatacctgatttaaatcatttattgttcagagatgcagtcatccaaatccacattgaccagatcgcaagcagtgcaagcgtctggcacctttcccatgatatgatgaatgtagcacagtttctgatacgcctttttgacgacagaaacgggttgagattctgacacgggaaagcactctaaacagtctttctgtccgtgagtgaagcagatatttgaattctgattcattctctcgcattgtctgcagggaaacagcatcagattcatgcccacgtgacgagaacatttgttttggtacctgtccgcgtagttgattgaagcttccgcgtctgacgtcgatggctgcgcaactgactcgcgcgcccgtttgggctcacttatatctgcgtcactgggggcgggtctttttttggctccaccctttttgacgtagaattcatgctctacctcaaccacgtgatcctttgcccaccggaaaaagtctttgacttcctgcttggtgaccttcccaaagtcatgatccagacggcgggtgagttcaaatttgaacatccggtcttgcaacggctgctggtgttcgaaggtcgttgagttcccgtcaatcactgcgcacatgttggtgttggaggtgacaatcacgggagtcgggtctatctgggccgaggacttgcatttctggtccacgcgcaccttgcttcctccgagaatggctttggccgactccacgaccttggcggtcatcttcccctcctcccaccagatcaccatcttgtcgacgcaatcattgaaaggaaagttctcattggtccagttgacgcagccgtagaaagggcgaattcgtttaaacctgcaggactagtccctttagtgagggt

SEQ ID NO: 201 - DNA, 3161 bp, Adeno-associated virus
  source 1..3161: mol_type = unassigned DNA
aattgaatttagcggccgcgaattcgcccttcgcagagaccaaagttcaactgaaacgaattaaacggtttattgattaacaagcaattacagattacgagtcaggtatctggtgccaatggggcgaggctctgaatacacaccattagtgtccacagtaaagtccacattaacagatttgttgtagttggaagtgtactgaatctcgggattccagcgtttgctgttctccttctgcagctcccactcgatctccacgctgacctgccccgtggagtactgtgtaatgaaggaagcaaactttgccgcactgaaggtagtcgaaggattcgcaggtaccggggtgttcttgatgagaatctgcgggggagggtgtttaagtccgaatccgcccatgaggggagaggggtgaaaatgtccgtccgtgtgtggaatctttgcccagatgggcccctgcaggtacacgtctctgtcctgccacaccatgcctggaagaacgccttgtgtgttgacatctgaggtagctgcttgtgtgttgccgctctggaggttggtagatacagaaccatactgctccgtagccacgggattggtggtcctgatttcctcttcgtctgtaatcatgaccttttcaatgtccacattagtttttcccgagtcttgttttccaaagatgagaaccccgctctgaggaaaaaacttttcttcatcgtccttgtggctggccatggccgggcccggattcaccagagagtctcttccattaaggtggtacttggtagctccagtccacgagtattcactgttgttgttatccgcagatgtctttgatactcgctgctggcggtaacagggtccaggaagccagttcctagactggtcccgaatgtcacttgctccggcctgagaaaactgaagccttgactgcgtggtggttccgcttggagtgtttgttctgctcaagtaatacaggtactggtcgacgagaggattcatgagacggtccaaactctggctgtgggcgtagctgctgtggaaaggaacgtcctcaaaggtgtagctgaaggtaaagttgtttccggtacgcagcatctgagaaggaaagtactccaggcagtaaaatgaagagcgtcctactgcctgactcccgttgttcagggtgaggtatccatactgtggcaccatgaagacgtctgctgggaacggcgggaggcatccttgatgcgccgagccgaggacgtacgggagctggtactccgagtcagtaaacacctgaaccgtgctggtaaggttattggcaatcgtcgtcgtaccgtcattctgcgtgacctccttgacttgaatgttaaagagcttgaagttgagtcttttgggccgggatccccaattgttgttgatgagtctttgccagtcacgtggcgaaaagtggcagtggaatctgttgaagtcaaaatacccccaaggggtgctgtagccaaagtagtggttgtcgtttgaggctcctgattggctggaaatctgcctgtagaggtggttgttgtaggtgggcagagcccaggtgcgggtgctggtggtgatgactctgtcgcccatccatgtggaatcgcaatgccaatttcccgaggaattacccactccgtcggcgccctcgttattgtctgccattggtgcgccactgcctgtagccatcgtattagttcccagaccagagggggctgctggtggctgtccgagaggctgggggtcaggtacggagtctgcgtctccagtctgaccgaaattcaatctccttcttgcaggctgctggcccgcttttccggttcccgaggaggagtctggctccgcaagagagtgctctaccggcctcttttttcccggagccgtcttaacaggttcctcaaccaggcccagaggttcaagaaccctctttttcgcctggaagactgctcgtccgaggttgcccccaaaagacgtatcttctttaagacgctcctggaactccgcgtcggcgtggttgtacttgaggtacgggttgtctccgccgtcgagctgccggtcgtaggccttgtcgtgctcgagggccgcggcgtctgcctcgttgaccggctctcccttgtcgagtccgttgaagggtccaaggtacttgtacccaggaagcacaagacccctgctgtcgtccttatgccgctctgcgggctttggtggtggtgggccaggtttgagcttccaccactgtcttattccttcagagagagtgtcctcgagccaatctggaagataaccatcggcagccatacctgatttaaatcatttattgttcagagatgcagtcatccaaatccacattgaccagatcgcaagcagtgcaagcgtctggcacctttcccatgatatgatgaatgtagcacagtttctgatacgcctttttgacgacagaaacgggttgagattctgacacgggaaagcactctaaacagtctttctgtccgtgagtgaagcagatatttgaattctgattcattctctcgcattgtctgcagggaaacagcatcagattcatgcccacgtgacgagaacatttgttttggtacctgtccgcgtagttgattgaagcttccgcgtctgacgtcgatggctgcgcaactgactcgcgcgcccgtttgggctcacttatatctgcgtcactgggggcgggtctttttttggctccaccctttttgacgtagaattcatgctctacctcaaccacgtgatcctttgcccaccggaaaaagtctttgacttcctgcttggtgaccttcccaaagtcatgatccagacggcgggtgagttcaaatttgaacatccggtcttgcaacggctgctggtgttcgaaggtcgttgagttcccgtcaatcactgcgcacatgttggtgttggaggtgacaatcacgggagtcgggtctatctgggccgaggacttgcatttctggtccacgcgcaccttgcttcctccgagaatggctttggccgactccacgaccttggcggtcatcttcccctcctcccaccagatcaccatcttgtcgacgcaatcattgaaaggaaagttctcattggtccagttgacgcagcaagggcgaattcgtttaaacctgcaggactagtccctttagtgaggg

SEQ ID NO: 202 - DNA, 3172 bp, Adeno-associated virus
  source 1..3172: mol_type = unassigned DNA
gattgaatttagcggccgcgaattcgcccttgctgcgtcaactggaccaatgagaactttcccttcaacgattgcgtcgacaagatggtgatctggtgggaggagggcaagatgaccgccaaggtcgtggagtccgccaaggccattctgggtggaagcaaggtgcgcgtggaccaaaagtgcaagtcatcggcccagatcgaccccacgcccgtgatcgtcacctccaacaccaacatgtgcgccgtgatcgacgggaacagcaccaccttcgagcaccagcagcccctgcaggaccgcatgttcaagttcgagctcacccgccgtctggagcacgactttggcaaggtgaccaagcaggaagtcaaagagttcttccgctgggctcaggatcacgtgactgaggtggcgcatgagttctacgtcagaaagggcggagccaccaaaagacccgcccccagtgacgcggatataagcgagcccaagcgggcctgcccctcagttgcggagccatcgacgtcagacgcggaagcaccggtggactttgcggacaggtaccaaaacaaatgttctcgtcacgcgggcatgcttcagatgctgtttccctgcaagacatgcgagagaatgaatcagaatttcaacgtctgcttcacgcacggggtcagagactgctcagagtgcttccccggcgcgtcggaatctcaacccgtcgtcagaaaaaagacgtatcagaaactgtgcgcgattcatcatctgctggggcgggcacccgagattgcgtgttcggcctgcgatctcgtcaacgtggacttggatgactgtgtttctgagcaataaatgacttaaaccaggtatggctgctgacggttatcttccagattggctcgaggacaacctctctgagggcattcgcgagtggtgggacctgaaacctggagcccccaagcccaaggccaaccagcagaagcaggacgacggccggggtctggtgcttcctggctacaagtacctcggacccttcaacggactcgacaagggggagcccgtcaacgcggcggacgcagcggccctcgagcacgacaaggcctacgaccagcagctcaaagcgggtgacaatccgtacctgcggtataaccacgccgacgccgagtttcaggagcgtctgcaagaagatacgtcttttgggggcaacctcgggcgagcagtcttccaggccaagaagcgggttctcgaacctctcggtctggttgaggaagctgctaagacggctcctggaaagaagagaccggtagaaccgtcacctcagcgttcccccgactcctccgcgggcatcggcaagaaaggccagcagcccgctaaaaagagactgaactttggtcagactggcgactcagagtcagtccccgaccctcaaccaatcggagaaccaccagcaggcccctctggtctgggatctggtacaatggctgcaggcggtggcgctccaatggcagacaataacgaaggcgccgacggagtgggtagttcctcaggaaattggcattgcgattccacatggctgggcgacagagtcatcaccaccagcacccgaacctgggccctgcccacctacaacaaccacctctacaagcaaatatccaatgggacatcgggaggaagcaccaacgacaacacctacttcggctacagcaccccctgggggtattttgacttcaacagattccactgccacttctcaccacgtgactggcagcgactcatcaacaacaactggggattccggccaaaaagactcagcttcaagctcttcaacatccaggtcaaggaggtcacgcagaatgaaggcaccgagaccatcgccaataaccttaccagcacgattcaggtatttacggactcggaataccagctgccgtacgtcctcggctccgcgcaccagggctgcctgcctccgttcccggcggacgtcttcatgattccccagtacggctaccttacactgaacaatggaagtcaagccgtaggccgttcctccttctactgcctggaatattttccatctcaaatgctgcgaactggaaacaattttgaattcagctacaccttcgaggacgtgcctttccacagcagctgcgcacacagccagagctcggaccgactgatgaatcctctcatcgaccagtacctgtactacttatccagaactcggtccacaggaggaactcaaggtacccagcaattgttattttctcaagctgggcctgcaaacatgtcggctcaggctaagaactggctacctggaccttgctaccggcagcagcgagtctctacgacactgtcgcaaaacaacaacagcaactttgcttggactggtgccaccaaatatcacctgaacggaagagactctttggtaaatcccggtgtcgccatggcaacccacaaggacgacgaggaacgcttcttcccgtcgagtggagtcctgatgtttggaaaacagggtgctggaagagacaatgtggactacagcagcgttatgctaaccagcgaagaagaaattaaaaccactaaccctgtagccacagaacaatacggtgtggtggctgacaacttgcagcaaaccaatacagggcctattgtgggaaatgtcaacagccaaggagccttacctggcatggtctggcagaaccgagacgtgtacctgcagggtcccatctgggccaagattcctcacacggacggcaacttccacccttcaccgctaatgggaggatttggactgaagcacccacctcctcagatcctgatcaagaacacgccggtacctgcggatcctccaacaacgttcagccaggcgaaattggcttccttcattacgcagtacagcaccggacaggtcagcgtggaaatcgagtgggagctgcagaaggagaacagcaaacgctggaacccagagattcagtacacttcaaactactacaaatctacaaatgtggactttgctgtcaatacagagggaacttattctgagcctcgccccattggtactcgttacctcacccgtaatctgtaattgctggttaatcaataaaccgtttgattcgtttcagttgaactttggtctctgcgaagggcgaattcgtttaaacctgcaggactagtccctttagtgagg

SEQ ID NO: 203 - DNA, 3172 bp, Adeno-associated virus
  source 1..3172: mol_type = unassigned DNA
gattgaatttagcggccgcgaattcgcccttgctgcgtcaactggaccaatgagaactttcccttcaacgattgcgtcgacaagatggtgatctggtgggaggagggcaagatgaccgccaaggtcgtggagtccgccaaggccattctgggtggaagcaaggtgcgcgtggaccaaaagtgcaagtcatcggcccagatcgaccccacgcccgtgatcgtcacctccaacaccaacatgtgcgccgtgatcggcgggaacagcaccaccttcgagcaccagcagcccctgcaggaccgcatgttcaagttcgagctcacccgccgtctggagcacgactttggcaaggtgaccaagcaggaagtcaaagagttcttccgctgggctcaggatcacgtgactgaggtggcgcatgagttctacgtcagaaagggcggagccaccaaaagacccgcccccagtgacgcggatataagcgagcccaagcgggcctgcccctcagttgcggagccatcgacgtcagacgcggaagcaccggtggactttgcggacaggtaccaaaacaaatgttctcgtcacgcgggcatgcttcagatgctgtttccctgcaagacatgcgagagaatgaatcagaatttcaacgtctgcttcacgcacggggtcagagactgctcagagtgcctccccggcgcgtcagaatctcaacccgtcgtcagaaaaaagacgtatcagaaactgtgcgcgattcatcatctgctggggcgggcacccgagattgcgtgttcggcctgcgatctcgtcaacgtggacttggatgactgtgtttctgagcaataaatgacttaaaccaggtatggctgctgacggttatcttccagattggctcgaggacaacctctctgagggcattcgcgagtggtgggacctgaaacctggagcccccaagcccaaggccaaccagcagaagcaggacgacggccggggtctggtgcttcttggctacaagtacctcggacccttcaacggactcgacaagggggagcccgtcaatgcggcggacgcagcggccctcgagcacgacaaggcctacgaccagcagctcaaagcgggtgacaatccgtacctgcggtataaccacgccgacgccgagtttcaggagcgtctgcaagaagatacgtcttttgggggcaacctcgggcgagcagtcttccaggccaagaagcgggttctcgaacctctcggtctggttgaggaagctgctaagacggctcctggaaagaagagaccggtagaaccgtcacctcagcgttcccccgactcctccacgggcatcggcaagaaaggccagcagcccgctaaaaagagactgaactttggtcagactggcgactcagagtcagtccccgaccctcaaccaatcggagaaccaccagcaggcccctctggtctgggatctggtacaatggctgcaggcggtggcgctccaatggcagacaataacgaaggcgccgacggagtgggtagttcctcaggaaattggcattgcgattccacatggctgggcgacagagtcatcaccaccagcacccgaacctgggccctgcccacctacaacaaccacctctacaagcaaatatccaatgggacatcgggaggaagcaccaacgacaacacctacttcggctacagcaccccctgggggtattttgacttcaacagattccactgccacttctcaccacgtgactggcagcgactcatcaacaacaactggggattccggccaaaaagactcagcttcaagctcttcaacatccaggtcaaggaggtcacgcagaatgaaggcaccaagaccatcgccaataaccttaccagcacgattcaggtatttacggactcggaataccagctgccgtacgtcctcggctccgcgcaccagggctgcctgcctccgttcccggcggacgtcttcatgattccccagtacggctaccttacactgaacaatggaagtcaagccgtaggccgttcctccttctactgcctggaatattttccatctcaaatgctgcgaactggaaacaattttgaattcagctacaccttcgaggacgtgcctttccacagcggctacgcacacagccagagcttggaccgactgatgaatcctctcatcgaccagtacctgtactacttatccagaactcagtccacaggaggaactcaaggtacccagcaattgttattttctcaagctgggcctgcaaacatgtcggctcaggctaagaactggctacctggaccttgctaccggcagcagcgagtctctacgacactgtcgcaaaacaacaacagcaactttgcttggactggtgccaccaaatatcacctgaacggaagagactctttggtaaatcccggtgtcgccatggcaacccacaaggacgacgaggaacgcttcttcccgtcgagtggagtcctgatgtttggaaaacagggtgctggaagagacaatgtggactacagcagcgttatgctaaccagcgaagaagaaattaaaaccactaaccctgtagccacagaacaatacggtgtggtggctgacaacttgcagcaaaccaatacagggcctattgtgggaaatgtcaacagccaaggagccttacctggcatggtctggcagaaccgagacgtgtacctgcagggtcccatctgggccaagattcctcacacggacggcaacttccacccttcaccgctaatgggaggatttggactgaagcacccacctcctcagatcctgatcaagaacacgccggtacctgcggatcctccaacgacgttcagccaggcgaaattggcttccttcattacgcagtacagcaccggacaggtcagcgtggaaatcgagtgggagctgcagaaggagaacagcaaacgctggaacccagagattcagtacacttcaaactactacaaatctacaaatgtggactttgctgtcaatacagagggaacttattctgagcctcgccccattggtactcgttacctcacccgtaatctgtaattgctggttaatcaataaaccgtttgattcgtttcagttgaactttggtctctgcgaagggcgaattcgtttaaacctgcaggactagtccctttagtgagg

SEQ ID NO: 204 - DNA, 2208 bp, Adeno-associated virus
  source 1..2208: mol_type = unassigned DNA
atggctgccgatggttatcttccagattggctcgaggacactctctctgaaggaataagacagtggtggaagctcaaacctggcccaccaccaccaaagcccgcagagcggcataaggacgacagcaggggtcttgtgcttcctgggtacaagtacctcggacccttcaacggactcgacaagggagagccggtcaacgaggcagacgccgcggccctcgagcacgacaaggcctacgaccggcagctcgaaagcggagacaacccgtacctcaagtacaaccacgccgacgcggagtttcaggagcgtcttaaagaagatacgtcttttgggggcaacctcggacgagcagtcttccaggcgaaaaagagggttcttgaacctctgggcctggttgaggagcctgttaaaacggctccgggaaaaaagaggccggtagagcactctcctgtggagccagactcctcctcgggaaccggaaaagcgggccagcagcctgcgagaaaaagattgaattttggtcagactggagacgcagactccgtacctgacccccagcctctcggacagccaccagcagccccctctggtctgggatctactacaatggcttcaggcagtggcgcaccagtggcagacaataacgagggtgccgatggagtgggtaattcctcaggaaattggcattgcgattcccaatggctgggcgacagagtcatcaccaccagcacccgaacctgggccctgcccacctacaacaaccacctctacaagcaaatctccagccaatcaggagcctcaaacgacaaccactactttggctacagcaccccctgggggtattttgacttcaacagattccactgccacttttcaccacgtgactggcaaagactcatcaacaacagctggggattccgacccaaaagactcaacttcaagctctttaacattcaagtcaaagaggtcacgcagaatgacggtacgacgacgattgccaataaccttaccagcacggttcaagtgtttaccgactcggagtaccagctcccgtacgtcctcggctcggcgcatcaaggatgcctcccgccgttcccagcagacgtctttatggtcccacagtatggatacctcaccctgaacaacgggagtcaggcggtaggacgctcttccttttactgcctggagtactttccttctcagatgctgcgtactggaaacaactttcagttcagctacacctttgaagacgttcccttccacagcagctacgctcacagccagagtctggatcggctgctgaatcctctgatcgaccagtacctatattatctgaacaagacacaatcaaatagtggaactcttcagcagtctcggctactgtttagccaagctggacccaccagcatgtctcttcaagctaaaaactggctgcctggaccttgctacagacagcagcgtctgtcaaagcaggcaaacgacaacaacaacagcaactttccctggactgcggctacaaagtatcatctaaatggccgggactcgttggttaatccaggaccagctatggccagccacaaagacgatgaagaaaagtttttccccatgcatggaaccctgatatttggtaaacaaggaacaaatgctaacgacgcggatttggacaatgtcatgattacagatgaagaagaaatccgcaccaccaatcccgtggctacggagcagtacggatatgtgtcaaataatttgcaaaactcaaatactggtccaactactggaactgtcaatcaccaaggagcgttacctggtatggtgtggcaggatcgagacgtgtacctgcagggacccatttgggccaagattcctcacacggacgggcactttcatccttctccactaatgggaggttttgggctcaaacacccgcctcctcagatcatgatcaaaaacactcccgttccagccaatcctcctacaaacttcagttcttccaagtttgcttctttcatcacacagtattccacggggcaggtcagcgtggagatcgagtgggagctgcagaaggagaacagcaaacgctggaatcccgaaattcagtatacttccaactacaacaaatctgttaatgtggactttactgtggacactaatggtgtgtattcagagcctcgccccattggcaccagatacccgactcgtaatctgtaa

SEQ ID NO: 205 - protein, 735 aa, Adeno-associated virus
MAADGYLPDWLEDTLSEGIRQWWKLKPGPPPPKPAERHKDDSRGLVLPGYKYLGPFNGLDKGEPVNEADAAALEHDKAYDRQLESGDNPYLKYNHADAEFQERLKEDTSFGGNLGRAVFQAKKRVLEPLGLVEEPVKTAPGKKRPVEHSPVEPDSSSGTGKAGQQPARKRLNFGQTGDADSVPDPQPLGQPPAAPSGLGSTTMASGSGAPVADNNEGADGVGNSSGNWHCDSQWLGDRVITTSTRTWALPTYNNHLYKQISSQSGASNDNHYFGYSTPWGYFDFNRFHCHFSPRDWQRLINNSWGFRPKRLNFKLFNIQVKEVTQNDGTTTIANNLTSTVQVFTDSEYQLPYVLGSAHQGCLPPFPADVFMVPQYGYLTLNNGSQAVGRSSFYCLEYFPSQMLRTGNNFQFSYTFEDVPFHSSYAHSQSLDRLLNPLIDQYLYYLNKTQSNSGTLQQSRLLFSQAGPTSMSLQAKNWLPGPCYRQQRLSKQANDNNNSNFPWTAATKYHLNGRDSLVNPGPAMASHKDDEEKFFPMHGTLIFGKQGTNANDADLDNVMITDEEEIRTTNPVATEQYGYVSNNLQNSNTGPTTGTVNHQGALPGMVWQDRDVYLQGPIWAKIPHTDGHFHPSPLMGGFGLKHPPPQIMIKNTPVPANPPTNFSSSKFASFITQYSTGQVSVEIEWELQKENSKRWNPEIQYTSNYNKSVNVDFTVDTNGVYSEPRPIGTRYPTRNL

SEQ ID NO: 206 - DNA, 2208 bp, Adeno-associated virus
  source 1..2208: mol_type = unassigned DNA
atggctgccgatggttatcttccagattggctcgaggacactctctctgaaggaataagacagtggtggaagctcaaacctggcccaccaccaccaaagcccgcagagcggcataaggacgacagcaggggtcttgtgcttcctgggtacaagtacctcggacccttcaacggactcgacaagggagagccggtcaacgaggcagacgccgcggccctcgagcacgacaaggcctacgaccggcagctcgacagcggagacaacccgtacctcaagtacaaccacgccgacgcggagtttcaggagcgtcttaaagaagatacgtcttttgggggcaacctcggacgagcagtcttccaggccaaaaagaggattcttgaacctctgggcctggttgaggaacctgttaagacggctccgggagaaaagaggccggtagagcactctcctgcggagccagactcctcctcgggaaccggaaaagcgggccagcagcctgcaagaaagagattgaattttggccagactggagacgcagactcagtacctgacccccagcctctcggacagccaccagcagccccctctggtctgggaactaatacgatggcttcaggcagtggcgcaccaatggcagacaataacgagggcgccgacggagtgggtaattcctcgggaaattggtattgcgattccacatggatgggcgacagagtcatcaccaccagcacccgcacctgggccctgcccacctacaacaaccatctgtacaagcaaatctccagccagtctggagccagcaacgacaaccactactttggctacagcaccccctgggggtattttgacttcaacagattccactgccacttctccccacgtgactggcaaagactcatcaacaacaactggggattccggcccaagagactcagcttcaagctctttaacattcaagtcaaagaggtcacgcagaatgacggtacgacgacgattgccaataaccttaccagcacggttcaggtgtttactgactcggagtaccagctcccgtacgtcctcggctcggcgcatcaaggatgcctcccgccgttcccagcagacgtcttcatggtgccacagtatggatacctcaccctgaacaacggcagtcaggcggtaggacgctcttccttttactgcctggagtactttccttctcagatgcttcgtaccggaaacaactttaccttcagctacacctttgaagacgttcctttccatagcagctacgctcacagccaaagtctggaccgtctcatgaatcctctcatcgaccagtacctgtattacttgagcagaacaaacactccaagcggaaccaccacgatgtccaggcttcagttttctcaggccggagcaagtgacattcgggaccagtctagaaactggcttcctggaccctgttaccgccagcagcgagtatcaaagacagctgcggacaacaacaacagtgattactcgtggactggagctaccaagtaccacctcaatggaagagactctctggtgaatccgggcccagctatggccagccacaaggacgatgaagaaaaatattttcctcagagcggggttctcatctttggaaaacaagactcgggaaaaactaatgtggacattgaaaaggttatgattacagacgaagaggaaatcaggaccaccaatcccgtggctacggagcagtatggttctgtatctaccaacctccagagcggcaacacacaagcagctacctcagatgtcaacacacaaggcgttcttccaggcatggtctggcaggacagagacgtgtacctgcaggggcccatctgggcaaagattccacacacggacggacattttcacccctctcccctcgtgggcggattcggacttaaacaccctcctccacaaattctcatcaagaacaccccggtacctgcgaatccttcgaccactttcagtgcggcaaagtttgcttccttcatcacacagtactccacggggcaggtcagcgtggagatcgagtgggagctgcagaaggagaacagcaaacgctggaatcccgaaattcagtacacttccaactacaacaaatctgttaatgtggactttactgtggacactaatggtgtgtattcagagcctcgccccattggcaccagatacctgactcgtaatctgtaa

SEQ ID NO: 207 - protein, 735 aa, Adeno-associated virus
MAADGYLPDWLEDTLSEGIRQWWKLKPGPPPPKPAERHKDDSRGLVLPGYKYLGPFNGLDKGEPVNEADAAALEHDKAYDRQLDSGDNPYLKYNHADAEFQERLKEDTSFGGNLGRAVFQAKKRILEPLGLVEEPVKTAPGEKRPVEHSPAEPDSSSGTGKAGQQPARKRLNFGQTGDADSVPDPQPLGQPPAAPSGLGTNTMASGSGAPMADNNEGADGVGNSSGNWYCDSTWMGDRVITTSTRTWALPTYNNHLYKQISSQSGASNDNHYFGYSTPWGYFDFNRFHCHFSPRDWQRLINNNWGFRPKRLSFKLFNIQVKEVTQNDGTTTIANNLTSTVQVFTDSEYQLPYVLGSAHQGCLPPFPADVFMVPQYGYLTLNNGSQAVGRSSFYCLEYFPSQMLRTGNNFTFSYTFEDVPFHSSYAHSQSLDRLMNPLIDQYLYYLSRTNTPSGTTTMSRLQFSQAGASDIRDQSRNWLPGPCYRQQRVSKTAADNNNSDYSWTGATKYHLNGRDSLVNPGPAMASHKDDEEKYFPQSGVLIFGKQDSGKTNVDIEKVMITDEEEIRTTNPVATEQYGSVSTNLQSGNTQAATSDVNTQGVLPGMVWQDRDVYLQGPIWAKIPHTDGHFHPSPLVGGFGLKHPPPQILIKNTPVPANPSTTFSAAKFASFITQYSTGQVSVEIEWELQKENSKRWNPEIQYTSNYNKSVNVDFTVDTNGVYSEPRPIGTRYLTRNL

SEQ ID NO: 208 - DNA, 2209 bp, Adeno-associated virus
  source 1..2209: mol_type = unassigned DNA
atggctgccgatggttatcctccagattggctcgaggacactctctctgaagggataagacagtggtggaagctcaaacctggcccaccaccaccaaagcccgcagagcggcataaggacgacagcaggggtcttgtgcttcctgggtacaagtacctcggacccttcaacggactcgacaagggggagccggtcaacgaggcagacgccgcggccctcgagcacgacaaggcctacgaccggcagctcgacagcggagacaacccgtacctcaagtacaaccacgccgacgcagagtttcaggagcgccttaaagaagatacgtcttttgggggcaacctcggacgagcagtcttccaggcgaaaaagagggttcttgaacctctgggcctggttgaggaacctgttaagacggctccgggaaaaaagaggccggtagagcactctcctgtggagccagactcctcctcgggaaccggaaaagcgggccagcggcctgcaagaaaaagattaaattttggtcagactggagacgcagactccgtacctgacccccagcctctcggacagccaccagcagccccctctggtctgggatctactacaatggctacaggcagtggcgcaccaatggcagacaataacgagggtgccgatggagtgggtaattcctcaggaaattggcattgcgattcccaatggctgggcgacagagtcatcaccaccagcacccgaacctgggccctgcccacatacaacaaccacctctacaagcaaatctccagccaatcaggagccagcaacgacaaccactactttggctacagcaccccctgggggtattttgacttcaacagattccactgccacttttcaccacgtgactggcaaagactcatcaacaacaactggggattccggcccaaaagactcaacttcaagctctttaatattcaagtcaaagaggtcacgcagaatgacggtacgacgacgattgccaataaccttaccagcacggttcaggtgtttactgactcggagtaccagctcccgtacgtcctgggctcggcgcatcaaggatgcctcccgccgtttccagcggacgtcttcatggtcccacagtatggatacctcaccctgaacaacgggagtcaggcggtaggacgctcttccttttactgcctggagtactttccttctcagatgctgcgtactggaaacaactttcagttcagctacacttttgaagacgtgcctttccacagcagctacgctcacagccagagtctggatcggctgatgaatcctctgatcgaccagtacctgtattatctgaacaagacacaaacaaatagtggaactcttcagcagtctcggctactgtttagccaagctggaccaaccaacatgtctcttcaagctaaaaactggctgcctggaccttgctacagacagcagcgtctgtcaaaacaggcaaacgacaacaacaacagcaactttccctggactgcagctacaaagtatcatctaaatggccgggactcgttggttaatccaggaccagctatggccagtcacaaggatgacgaagaaaagtttttccccatgcatggaaccctgatatttggtaaacaaggaacaaatgccaacgacgcggatttggaaaatgtcatgattacagatgaagaagaaatcagggccaccaatcccgtggctacggagcagtacgggactgtgtcaaataatttgcaaaactcaaacactggtccaactactggaactgtcaatcgccaaggagcgttacctggtatggtgtggcaggatcgagacgtgtacctgcagggacccatttgggccaagattcctcacaccgatggacactttcatccttctccactgatgggaggttttggactcaaacacccgcctcctcagatcatgatcaaaaacactcccgttccagccaatcctcccacaaacttcagttctgccaagtttgcttctttcatcacacagtattccacgggacaggtcagcgtggagatcgagtgggagctgcagaaggagaacagcaaacgctggaatcccgaaattcagtacacttccaactacaacaagtctgttaatgtggactttactgtggacactaatggtgtgtattcagagcctcgccccattggcaccagatacctgactcgtaatctgtaat

SEQ ID NO: 209 - protein, 735 aa, Adeno-associated virus
MAADGYPPDWLEDTLSEGIRQWWKLKPGPPPPKPAERHKDDSRGLVLPGYKYLGPFNGLDKGEPVNEADAAALEHDKAYDRQLDSGDNPYLKYNHADAEFQERLKEDTSFGGNLGRAVFQAKKRVLEPLGLVEEPVKTAPGKKRPVEHSPVEPDSSSGTGKAGQRPARKRLNFGQTGDADSVPDPQPLGQPPAAPSGLGSTTMATGSGAPMADNNEGADGVGNSSGNWHCDSQWLGDRVITTSTRTWALPTYNNHLYKQISSQSGASNDNHYFGYSTPWGYFDFNRFHCHFSPRDWQRLINNNWGFRPKRLNFKLFNIQVKEVTQNDGTTTIANNLTSTVQVFTDSEYQLPYVLGSAHQGCLPPFPADVFMVPQYGYLTLNNGSQAVGRSSFYCLEYFPSQMLRTGNNFQFSYTFEDVPFHSSYAHSQSLDRLMNPLIDQYLYYLNKTQTNSGTLQQSRLLFSQAGPTNMSLQAKNWLPGPCYRQQRLSKQANDNNNSNFPWTAATKYHLNGRDSLVNPGPAMASHKDDEEKFFPMHGTLIFGKQGTNANDADLENVMITDEEEIRATNPVATEQYGTVSNNLQNSNTGPTTGTVNRQGALPGMVWQDRDVYLQGPIWAKIPHTDGHFHPSPLMGGFGLKHPPPQIMIKNTPVPANPPTNFSSAKFASFITQYSTGQVSVEIEWELQKENSKRWNPEIQYTSNYNKSVNVDFTVDTNGVYSEPRPIGTRYLTRNL

SEQ ID NO: 210 - DNA, 2208 bp, Adeno-associated virus
  source 1..2208: mol_type = unassigned DNA
atggctgccgatggttatcttccagattggctcgaggacactctctctgaaggaataagacagtggtggaagctcaaacctggcccaccaccaccaaagcccgcagagcggcataaggacgacagcaggggtcttgtgcttcctgggtacaggtacctcggacccttcaacggactcgacaagggagagccggtcaacgaggcagacgccgcggccctcgagcacgacaaggcctacgaccggcagctcgacagcggagacaacccgtacctcaagtacaaccacgtcgacgcggagtttcaggagcgtcttaaagaagatacgtcttttgggggcaacctcggacgagcagtcttccaggccaaaaagaggattcttgaacctctgggcctggttgaggaacctgttaaggcggctccgggagaaaagaggccggtagagcactctcctgcggagccagactcctcctcgggaaccggaaaagcgggccagcagcctgcaagaaagagattgaattttggtcagactggagacgcagactcagtacctgacccccagcctctcggacagccaccagcagccccctctggtctgggaactaatacgatggcttcaggcagtggcgcaccaatggcagacaataacgagggcgccgacggagtgggtaattcctcgggaaattggcattgcgattccacatggatgggcgacagagtcatcaccaccagcacccgcacctgggccctgcccacctacaacaaccatctgtacaagcaaatctccagccagtctggagccagcaacgacaaccactactttggctacagcaccccctgggggcattttgacttcaacagattccactgccacttctccccacgtgactggcaaagactcatcaacaacaactggggattccggcccaagagactcagcttcaagctctttaacattcaagtcaaagaggtcacgcagaatgacggtacgacgacgattgccaataaccttaccagcacggttcaggtgtttactgactcggagtaccagctcccgtacgtcctcggctcggcgcatcaaggatgcctcccgccgttcccagcagacgtcttcatggtgccacagtatggatacctcaccctgaacaacggcagtcaggcggtaggacgctcttccttttactgcctggagtactttccttctcagatgcttcgtaccggaaacaactttaccttcagctacacctttgaagacgttcctttccatagcagctacgctcacagccaaagtctggaccgtctcatgaatcctctcatcgaccagtacctgtattacttgagcagaacaaacactccaagcggaaccaccacgatgtccaggcttcagttttctcaggccggagcaagtgacattcgggaccagtctagaaactggcttcctggaccctgttaccgccagcagcgagtatcaaagacagctgcggacaacaacaacagtgattactcgtggactggagctaccaagtaccacctcaatggaagagactctctggtgaatccgggcccagctatggccagccacaaggacgatgaagaaaaatattttcctcagagcggggttctcatctttggaaaacaagactcgggaaaaactaatgtggacattgaaaaggttatgattacagacgaagaggaaatcaggaccaccaatcccgtggctacggagcagtatggttctgtatctaccaacctccagagcggcaacacacaagcagctacctcagatgtcaacacacaaggcgttcttccaggcatggtctggcaggacagagacgtgtacctgcaggggcccatctgggcaaagattccacacacggacggacattttcacccctctccccccatgggcggattcggacttaaacaccctcctccacaaattctcatcaagaacaccccggtacctgcgaatccttcgaccactttcagtgcggcaaagtttgcttccttcatcacacagtactccacggggcaggtcagcgtggagatcgagtgggagctgcagaaggagaacagcaaacgctggaatcccgaaattcagtacacttccaactacaacaaatctgttaatgtggactttactgtggacactaatggtgtgtattcagagcctcgccccattggcgccagatacctgactcgtaatctgtaa

SEQ ID NO: 211 - protein, 735 aa, Adeno-associated virus
MAADGYLPDWLEDTLSEGIRQWWKLKPGPPPPKPAERHKDDSRGLVLPGYRYLGPFNGLDKGEPVNEADAAALEHDKAYDRQLDSGDNPYLKYNHVDAEFQERLKEDTSFGGNLGRAVFQAKKRILEPLGLVEEPVKAAPGEKRPVEHSPAEPDSSSGTGKAGQQPARKRLNFGQTGDADSVPDPQPLGQPPAAPSGLGTNTMASGSGAPMADNNEGADGVGNSSGNWHCDSTWMGDRVITTSTRTWALPTYNNHLYKQISSQSGASNDNHYFGYSTPWGHFDFNRFHCHFSPRDWQRLINNNWGFRPKRLSFKLFNIQVKEVTQNDGTTTIANNLTSTVQVFTDSEYQLPYVLGSAHQGCLPPFPADVFMVPQYGYLTLNNGSQAVGRSSFYCLEYFPSQMLRTGNNFTFSYTFEDVPFHSSYAHSQSLDRLMNPLIDQYLYYLSRTNTPSGTTTMSRLQFSQAGASDIRDQSRNWLPGPCYRQQRVSKTAADNNNSDYSWTGATKYHLNGRDSLVNPGPAMASHKDDEEKYFPQSGVLIFGKQDSGKTNVDIEKVMITDEEEIRTTNPVATEQYGSVSTNLQSGNTQAATSDVNTQGVLPGMVWQDRDVYLQGPIWAKIPHTDGHFHPSPPMGGFGLKHPPPQILIKNTPVPANPSTTFSAAKFASFITQYSTGQVSVEIEWELQKENSKRWNPEIQYTSNYNKSVNVDFTVDTNGVYSEPRPIGARYLTRNL

SEQ ID NO: 212 - DNA, 2208 bp, Adeno-associated virus
  source 1..2208: mol_type = unassigned DNA
atggctgccgatggttatcttccagattggctcgaggacaccctctctgaaggaataagacagtggtggaagctcaaacctggcccaccaccaccaaagcccgcagagcggcataaggacgacagcaggggtcttgtgcttcctgggtacaagtacctcggacccttcaacggactcgacaagggagagccggtcaacgaggcagacgccgcggccctcgagcacgacaaggcctacgaccggcagctcgacagcggagataacccgtacctcaagtacaaccacgccgacgcggagtttcaggagcgccttaaagaggatacgtcttttgggggcaacctcggacgagcagtcttccaggccaaaaagaggattcttgaacctctgggcctggttgaggaacctgttaagacggctccgggaaaaaagaggccggtagagcactctcctgcggagccagactcctcctcgggaaccggaaaagcgggccagcagcctgcaagaaagagattgaattttggtcagactggagacgcagactcagtacctgacccccggcctctcggacagccaccagcagccccctctggtctgggaactaatacgatggcttcaggcagtggcgcaccaatggcagacaataacgagggcgccgacggagtgggtaattcctcgggaaattggcattgcgattccacatggatgggcgacagagtcatcaccaccagcacccgcacctgggccctgcccacctacaacaaccatctgtacaagcaaatctccagccagtctggagccagcaacgacaaccactactttggctacagcaccccctgggggtattttgacttcaacagattccactgccacttctccccacgtgactggcaaagactcatcaacaacaactggggattccggcccaagagactcagcttcaagctctttaacattcaagtcaaagaggtcacgcagaatgacggtacgacgacgattgccaataaccttaccagcacggttcaggtgtttactgactcggagtaccagctcccgtacgtcctcggctcggcgcatcaaggatgcctcccgccgttcccagcagacgtcttcatggtgccacagtatggatacctcaccctgaacaacggcagtcaggcggtaggacgctcttccttttactgcctggagtactttccttctcagatgcttcgtaccggaaacaactttaccttcagctacacctttgaagacgttcctttccatagcagctacgctcacagccaaagtctggaccgtctcatgaatcctctcatcgaccagtacctgtattacttgagcagaacaaacactccaagcggaaccaccacgatgtccaggcttcagttttctcaggccggagcaagtgacattcgggaccagtctagaaactggcttcctggaccctgttaccgccagcagcgagtatcaaagacagctgcggacaacaacaacagtgattactcgtggactggagctaccaagtaccacctcaatggaagagactctctggtgaatccgggcccagctatggccagccacaaggacgatgaagaaaaatattttcctcagagcggggttctcatctttggaaaacaagactcgggaaaaactaatgtggacattgaaaaggttatgattacagacgaagaggaaatcaggaccaccaatcccgtggctacggagcagtatggttctgtatctaccaacctccagagcggcaacacacaagcagctacctcagatgtcaacacacaaggcgttcttccaggcatggtctggcaggacagagacgtgtacctgcaggggcccatctgggcaaagattccacacacggacggacattttcacccctctcccctcatgggcggattcggacttaaacaccctcctccacaaattctcatcaagaacaccccggtacctgcgaatccttcgaccactttcagtgcggcaaagtttgcttccttcatcacacagtactccacggggcaggtcagcgtggagatcgagtgggagctgcagaaggagaacagcaaacgctggaatcccgaaattcagtacacttccaactacaacaaatctgttaatgtggactttactgtggacactaatggtgtgtattcagagcctcgccccattggcaccagatacctgactcgtaatctgtaa

SEQ ID NO: 213 - protein, 735 aa, Adeno-associated virus
MAADGYLPDWLEDTLSEGIRQWWKLKPGPPPPKPAERHKDDSRGLVLPGYKYLGPFNGLDKGEPVNEADAAALEHDKAYDRQLDSGDNPYLKYNHADAEFQERLKEDTSFGGNLGRAVFQAKKRILEPLGLVEEPVKTAPGKKRPVEHSPAEPDSSSGTGKAGQQPARKRLNFGQTGDADSVPDPRPLGQPPAAPSGLGTNTMASGSGAPMADNNEGADGVGNSSGNWHCDSTWMGDRVITTSTRTWALPTYNNHLYKQISSQSGASNDNHYFGYSTPWGYFDFNRFHCHFSPRDWQRLINNNWGFRPKRLSFKLFNIQVKEVTQNDGTTTIANNLTSTVQVFTDSEYQLPYVLGSAHQGCLPPFPADVFMVPQYGYLTLNNGSQAVGRSSFYCLEYFPSQMLRTGNNFTFSYTFEDVPFHSSYAHSQSLDRLMNPLIDQYLYYLSRTNTPSGTTTMSRLQFSQAGASDIRDQSRNWLPGPCYRQQRVSKTAADNNNSDYSWTGATKYHLNGRDSLVNPGPAMASHKDDEEKYFPQSGVLIFGKQDSGKTNVDIEKVMITDEEEIRTTNPVATEQYGSVSTNLQSGNTQAATSDVNTQGVLPGMVWQDRDVYLQGPIWAKIPHTDGHFHPSPLMGGFGLKHPPPQILIKNTPVPANPSTTFSAAKFASFITQYSTGQVSVEIEWELQKENSKRWNPEIQYTSNYNKSVNVDFTVDTNGVYSEPRPIGTRYLTRNL

SEQ ID NO: 214 - DNA, 2208 bp, Adeno-associated virus
  source 1..2208: mol_type = unassigned DNA
atggctgccgatggttatcttccagattggctcgaggacactctctctgaaggaataagacagtggtggaagctcaaacctggcccaccaccaccaaagcccgcagagcggcataaggacgacagcaggggtcttgtgcttcctgggtacaagtacctcggacccttcaacggactcgacaagggagagccggtcaacgaggcagacgccgcggccctcgagcacgacaaggcctacgaccggcagctcgacagcggagacaacccgtacctcaagtacaaccacgccgacgcggagtttcaggagcgccttaaaggagatacgtcttttgggggcaacctcggacgagcagtcttccaggccaaaaagaggattcttgaacctctgggcctggttgaggaacctgttaagacggctccgggaaaaaagaggccggtagagcactctcctgcggagccagactcctcctcgggaaccggaaaagcgggccagcagcctgcaagaaagagattgaattttggtcagactggagacgcagactcagtacctgacccccagcctctcggacagccaccagcagccccctctggtctgggaactaatacgatggcttcaggcagtggcgcaccaatggcagacaataacgagggcgccgacggagtgggtaattcctcgggaaattggcattgcgattccacatggatgggcggcagagtcatcaccaccagcacccgcacctgggccctgcccacctacaacaaccatctgtacaagcaaatctccagccagtctggagccagcaacgacaaccactactttggctacagcaccccctgggggtattttgacttcaacagattccactgccacttctccccacgtgactggcaaagactcatcaacaacaactggggattccggcccaagagactcagcttcaagctctttaacattcaagtcaaagaggtcacgcagaatgacggtacgacgacgattgccaataaccttaccagcacggttcaggtgtttactgactcggagtaccagctcccgtacgtcctcggctcggcgcatcaaggatgcctcccgccgttcccagcagacgtcttcatggtgccacagtatggatacctcaccctgaacaacggcagtcaggcggtaggacgctcttccttttactgcctggagtactttccttctcagacgcttcgtaccggaaacaactttaccttcagctacacctttgaagacgttcctttccatagcagctacgctcacagccaaagtctggaccgtctcatgaatcctctcatcgaccagtacctgtattacttgagcagaacaaacactccaagcggaaccaccacgatgtccaggcttcagttttctcaggccggagcaagtgacattcgggaccagtctagaaactggcttcctggaccctgttaccgccagcagcgagtatcaaagacagctgcggacaacaacaacagtgattactcgtggactggagctaccaagtaccacctcaatggaagagactctctggtgaatccgggcccagctatggccagccacaaggacgatgaagaaaaatattttcctcagagcggggttctcatctttggaaaacaagactcgggaaaaactaatgtggacattgaaaaggttatgattacagacgaagaggaaatcaggaccaccaatcccgtggctacggagcagtatggttctgtatctaccaacctccagagcggcaacacacaagcagctacctcagatgtcaacacacaaggcgttcttccaggcatggtctggcaggacagagacgtgtacctgcaggggcccatctgggcaaagattccacacacggacggacattttcacccctctcccctcatgggcggattcggacttaaacaccctcctccacaaattctcatcaagaacaccccggtacctgcgaatccttcgaccactttcagtgcggcaaagtttgcttccttcatcacacagtactccacggggcaggtcagcgtggagatcgagtgggagctgcagaaggagaacagcaaacgctggaatcccgaaattcagtacacttccaactacaacaaatctgttaatgtggactttactgtggacactaatggtgtgtattcagagcctcgccccattggcaccagatacctgactcgtaatctgtaa

SEQ ID NO: 215 - protein, 735 aa, Adeno-associated virus
MAADGYLPDWLEDTLSEGIRQWWKLKPGPPPPKPAERHKDDSRGLVLPGYKYLGPFNGLDKGEPVNEADAAALEHDKAYDRQLDSGDNPYLKYNHADAEFQERLKGDTSFGGNLGRAVFQAKKRILEPLGLVEEPVKTAPGKKRPVEHSPAEPDSSSGTGKAGQQPARKRLNFGQTGDADSVPDPQPLGQPPAAPSGLGTNTMASGSGAPMADNNEGADGVGNSSGNWHCDSTWMGGRVITTSTRTWALPTYNNHLYKQISSQSGASNDNHYFGYSTPWGYFDFNRFHCHFSPRDWQRLINNNWGFRPKRLSFKLFNIQVKEVTQNDGTTTIANNLTSTVQVFTDSEYQLPYVLGSAHQGCLPPFPADVFMVPQYGYLTLNNGSQAVGRSSFYCLEYFPSQTLRTGNNFTFSYTFEDVPFHSSYAHSQSLDRLMNPLIDQYLYYLSRTNTPSGTTTMSRLQFSQAGASDIRDQSRNWLPGPCYRQQRVSKTAADNNNSDYSWTGATKYHLNGRDSLVNPGPAMASHKDDEEKYFPQSGVLIFGKQDSGKTNVDIEKVMITDEEEIRTTNPVATEQYGSVSTNLQSGNTQAATSDVNTQGVLPGMVWQDRDVYLQGPIWAKIPHTDGHFHPSPLMGGFGLKHPPPQILIKNTPVPANPSTTFSAAKFASFITQYSTGQVSVEIEWELQKENSKRWNPEIQYTSNYNKSVNVDFTVDTNGVYSEPRPIGTRYLTRNL

SEQ ID NO: 216 - DNA, 2208 bp, Adeno-associated virus
  source 1..2208: mol_type = unassigned DNA
atggctgccgatggttatcttccagattggctcgaggacactctctctgaaggaataagacagtggtggaagctcaaacctggcccaccaccaccaaagcccgcagagcggcataaggacgacagcaggggtcttgtgcttcctgggtacaagtacctcggacccttcaacggactcgacaagggagagccggtcaacgaggcagacgccgcggccctcgagcacgacaaggcctacgaccggcagctcgacagcggagacaacccgtacctcaagtacaaccacgccgacgcggagtttcaggagcgtcttaaagaagatacgtcttttgggggcaacctcggacgagcagtcttccaggccaaaaagaggattcttgaacctctgggcctggttgaggaacctgttaagacggctccgggaaaaaagaggccggtagagcactctcctgcggagccagactcctcctcgggaaccggaaaagcgggccagcagcctgcaagaaagagattgaattttggtcagactggagacgcagactcagtacctgacccccagcctctcggacagccaccagcagccccctctggtctgggaactaatacgatggcttcaggcagtggcgcaccaatggcagacaataacgagggcgccgacggagtgggtaattcctcgggaaattggcattgcgattccacatggatgggcgacagagtcatcaccaccagcacccgcacctgggccctgcccacctgcaacaaccatctgtacaagcaaatctccagccagtctggagccagcaacgacaaccactactttggctacagcaccccctgggggtattttgacttcaacagattccactgccacttctccccacgtgactggcaaagactcatcaacaacaactggggattccggcccaagagactcagcttcaagctctttaacattcaagtcaaagaggtcacgcagaatgacggtacgacgacgattgccaataaccttaccagcacggttcaggtgtttactgactcggagtaccagctcccgtacgtcctcggctcggcgcatcaaggatgcctcccgccgttcccagcagacgtcttcatggtgccacagtatggatacctcaccctgaacaacggcagtcaggcggtaggacgctcttccttttactgcctggagtattttccttctcagatgcttcgtaccggaaacaactttaccttcagctacacctttgaagacgttcctttccatagcagctacgctcacagccaaagtctggaccgtctcatgaatcctctcatcgaccagtacctgtattacttgagcagaacaaacactccaagcggaaccaccacgatgtccaggcttcagttttctcaggccggagcaagtgacattcgggaccagtctagaaactggcttcctggaccctgttaccgccagcagcgagtatcaaagacagctgcggacaacaacaacagtgattactcgtggactggagctaccaagtaccacctcaatggaagagactctctggtgaatccgggcccagctatggccagccacaaggacgatgaagaaaaatattttcctcagagcggggttctcatctttggaaaacaagactcgggaaaaactaatgtggacattgaaaaggttatgattacagacgaagaggaaatcaggaccaccaatcccgtggctacggagcagtatggttctgtatctacctacctccagagcggcaacacacaagcagctacctcagatgtcaacacacaaggcgttcttccaggcatggtctggcaggacagagacgtgtacctgcgggggcccatctgggcaaagattccacacacggacggacattttcacccctctcccctcatgggcggatttggacttaaacaccctcctccacaaattctcatcaagaacaccccggtacctgcgaatccttcgaccactttcagtgcggcaaagtttgcttccttcatcacacagtactccacggggcaggtcagcgtggagatcgagtgggagctgcagaaggagaacagcaaacgctggaatcccgaaattcagtacacttccaactacaacaaatctgttaatgtggactttactgtggacactaatggtgtgtattcagagcctcgccccattggcaccagatacctgactcgtaatctgtaa

SEQ ID NO: 217 - protein, 735 aa, Adeno-associated virus
MAADGYLPDWLEDTLSEGIRQWWKLKPGPPPPKPAERHKDDSRGLVLPGYKYLGPFNGLDKGEPVNEADAAALEHDKAYDRQLDSGDNPYLKYNHADAEFQERLKEDTSFGGNLGRAVFQAKKRILEPLGLVEEPVKTAPGKKRPVEHSPAEPDSSSGTGKAGQQPARKRLNFGQTGDADSVPDPQPLGQPPAAPSGLGTNTMASGSGAPMADNNEGADGVGNSSGNWHCDSTWMGDRVITTSTRTWALPTCNNHLYKQISSQSGASNDNHYFGYSTPWGYFDFNRFHCHFSPRDWQRLINNNWGFRPKRLSFKLFNIQVKEVTQNDGTTTIANNLTSTVQVFTDSEYQLPYVLGSAHQGCLPPFPADVFMVPQYGYLTLNNGSQAVGRSSFYCLEYFPSQMLRTGNNFTFSYTFEDVPFHSSYAHSQSLDRLMNPLIDQYLYYLSRTNTPSGTTTMSRLQFSQAGASDIRDQSRNWLPGPCYRQQRVSKTAADNNNSDYSWTGATKYHLNGRDSLVNPGPAMASHKDDEEKYFPQSGVLIFGKQDSGKTNVDIEKVMITDEEEIRTTNPVATEQYGSVSTYLQSGNTQAATSDVNTQGVLPGMVWQDRDVYLRGPIWAKIPHTDGHFHPSPLMGGFGLKHPPPQILIKNTPVPANPSTTFSAAKFASFITQYSTGQVSVEIEWELQKENSKRWNPEIQYTSNYNKSVNVDFTVDTNGVYSEPRPIGTRYLTRNL

SEQ ID NO: 218 - DNA, 2208 bp, Adeno-associated virus; identical to SEQ ID NO: 212
  source 1..2208: mol_type = unassigned DNA

SEQ ID NO: 219 - protein, 735 aa, Adeno-associated virus; identical to SEQ ID NO: 213

SEQ ID NO: 220 - DNA, 2208 bp, Adeno-associated virus
  source 1..2208: mol_type = unassigned DNA
atggctgccgatggttatcttccagattggctcgaggacactctctctgaaggaataagacagtggtggaagctcaaacctggcccaccaccaccaaagcccgcagagcggcataaggacggcagcaggggtcttgtgcttcctgggtacaagtacctcggacccttcaacggactcgacaagggagagccggtcaacgaggcagacgccgcggccctcgagcacgacaaggcctacgaccggcagctcaacagcggagacaacccgtacctcaagtacaaccacgccgacgcggagtttcaggagcgccttaaagaagatacgtcttttgggggcaacctcggacgagcagtcttccaggcaaaaaagagggttcttgaacctctgggcctggttgaggagcctgttaaaacggctccgggaaaaaagagaccggtagagcactctcctgcggagccagactcctcctcgggaaccggaaaagcgggccagcagcctgcaagaaagagattgaattttggtcagactggagacgcagactccgtacctgacccccagcctctcggacagccaccagcagccccctctggtctgggatctactacaatggctacaggcagtggcgcaccaatggcagacaataacgagggtgccgatggagtgggtaattcctcaggaaattggcattgcgattcccaatggctgggcgacagagtcatcaccacaagcactcgaacctgggccctgcccacctacaacaaccacctctacaagcaaatctccagccaatcaggagcctcaaacgacaaccactattttggctacagcaccccttgggggtattttgacttcaacagattccactgccacttttcaccacgtgactggcaaagactcatcaacaacaactggggattccgacccaagagactcaacttcaagctctttaacattcaagtcaaagaggtcacgcagaatgacggtacgacgacgattgccaataaccttaccagcacggttcaggtgtttactgactcggagtaccagctcccgtacgtcctcggctcggcgcatcaaggatgcctcccgccgttcccagcggacgtcttcatggtcccacagtatggatacctcaccctgaacaacgggagtcaggcggtaggacgctctcccttttactgcctggagtactttccttctcagatgctgcgtactggaaacaactttcagttcagctacacttttgaagacgtgcctttccacagcagctacgctcacagccagagtctggatcggctgatgaatcctctgatcgaccagtacctgtattatctgaacaagacacaaacaaatagtggaactcttcagcagtctcggctactgtttagccaagctggacccaccaacatgtctcttcaagctaaaaactggctgcctggaccttgctacagacagcagcgtctgtcaaagcaggcaaacgacaacaacaacagcaactttccctggactgcagctacaaagtatcatctaaatggccgggactcgttggttaatccaggaccagctatggccagtcacaaggatgacgaagaaaagtttttccccatgcatggaaccctgatatttggtaaacaaggaacaaatgccaacgacgcggatttggaaaatgtcatgattacagatgaagaagaaatcaggaccaccaatcccgtggctacggagcagtacgggactgtgtcaaataatttgcaaaactcaaacactggtccaactactggaactgtcaatcaccaaggagcgttacctggtatggtgtggcaggatcgagatgtgtaccttcagggacccatttgggccaagattcctcacaccgatggacactttcatccttctccactgatgggaggttttggactcaaacacccgcctcctcagattatgatcaaaaacactcccgttccagccaatcctcctacaaacttcagttctgccaagtttgcttctttcatcacacagtattccacggggcaggtcagcgtggagatcgagtgggagctgcagaaggagaacagcaaacgctggaatcccgaaattcagtacacttccaactacaacaaatctgttaatgtggactttactgtggacaataatggcgtgtactcagagcctcgccccattggcaccagatacctgactcgtaatctgtaa

SEQ ID NO: 221 - protein, 735 aa, Adeno-associated virus
MAADGYLPDWLEDTLSEGIRQWWKLKPGPPPPKPAERHKDGSRGLVLPGYKYLGPFNGLDKGEPVNEADAAALEHDKAYDRQLNSGDNPYLKYNHADAEFQERLKEDTSFGGNLGRAVFQAKKRVLEPLGLVEEPVKTAPGKKRPVEHSPAEPDSSSGTGKAGQQPARKRLNFGQTGDADSVPDPQPLGQPPAAPSGLGSTTMATGSGAPMADNNEGADGVGNSSGNWHCDSQWLGDRVITTSTRTWALPTYNNHLYKQISSQSGASNDNHYFGYSTPWGYFDFNRFHCHFSPRDWQRLINNNWGFRPKRLNFKLFNIQVKEVTQNDGTTTIANNLTSTVQVFTDSEYQLPYVLGSAHQGCLPPFPADVFMVPQYGYLTLNNGSQAVGRSPFYCLEYFPSQMLRTGNNFQFSYTFEDVPFHSSYAHSQSLDRLMNPLIDQYLYYLNKTQTNSGTLQQSRLLFSQAGPTNMSLQAKNWLPGPCYRQQRLSKQANDNNNSNFPWTAATKYHLNGRDSLVNPGPAMASHKDDEEKFFPMHGTLIFGKQGTNANDADLENVMITDEEEIRTTNPVATEQYGTVSNNLQNSNTGPTTGTVNHQGALPGMVWQDRDVYLQGPIWAKIPHTDGHFHPSPLMGGFGLKHPPPQIMIKNTPVPANPPTNFSSAKFASFITQYSTGQVSVEIEWELQKENSKRWNPEIQYTSNYNKSVNVDFTVDNNGVYSEPRPIGTRYLTRNL

SEQ ID NO: 222 - DNA, 2208 bp, Adeno-associated virus
  source 1..2208: mol_type = unassigned DNA
atggctgccgatggttatcttccagattggctcgaggacactctctctgaaggaataagacagtggtggaagctcaaacctggcccaccaccaccaaagcccgcagagcggcataaggacgacagcaggggtcttgtgcttcctgggtacaagtacctcggacccttcaacggactcgacaagggagagccggtcaacgaggcagacgccgcggccctcgagcacgacaaggcctacgaccggcagctcgacagcggagacaacccgtacctcaagtacaaccacgccgacgcggagtttcaggagcgtcttaaagaagatacgtcttttgggggcaacctcggacgagcagtcttccaggccaaaaagaggattcttgaacctctgggcctggttgaggaacctgttaagacggctccgggaaaaaagaggccggtagagcactctcctgcggagccagactcctcctcgggaaccggaaaagcgggccagcagcctgcaagaaagagattgaattttggtcagactggagacgcagactcagtacctgacccccagcctctcggacagccaccagcagccccctctggtctgggaactaatacgatggcttcaggcagtggcgcaccaatggcagacaataacgagggcgccgacggagtgggtaattcctcgggaaattggcattgcgattccacatggatgggcgacagagtcatcaccaccagcacccgcacctgggccctgcccacctacaacaaccatctgtacaagcaaatctccagccagtctggagccagcaacgacaaccactactttggctacagcaccccctgggggtattttgacttcaacagattccactgccacttctccccacgtgactggcaaagactcatcaacaacaactggggattccggcccaagagactcagcttcaagctctttaacattcaagtcaaagaggtcacgcagaatgacggtacgacgacgattgccaataaccttaccagcacggttcaggtgtttactgactcggagtaccagctcccgtacgtcctcggctcggcgcatcaaggatgcctcccgccgttcccagcagacgtcttcatggtgccacagtatggatacctcaccctgaacaacggcagtcaggcggtaggacgctcttccttttactgcctggagtactttccttctcagatgcttcgtaccggaaacaactttaccttcagctacacctttgaagacgttcctttccatagcagctacgctcacagccaaagtctggaccgtctcatgaatcctctcatcgaccagtacctgtattacttgagcagaacaaacactccaagcggaaccaccacgatgtccaggcttcagttttctcaggccggagcaagtgacattcgggaccagtctagaaactggcttcctggaccctgttaccgccagcagcgagtatcaaagacagctgcggacaacaacaacagtgattactcgtggactggagctaccaagtaccacctcaatggaagagactctctggtgaatccgggcccagctatggccagccacaaggacgatgaagaaaaatattttcctcagagcggggttctcatctttggaaaacaagactcgggaaaaactaatgtggacattgaaaaggttatgattacagacgaagaggaaatcaggaccaccaatcccgtggctacggagcagtatggttctgtatctaccaacctccagagcggcaacacacaagcagctacctcagatgtcaacacacaaggcgttcttccaggcatggtctggcaggacagagacgtgtacctgcaggggcccatctgggcaaagattccacacacggacggacattttcacccctctcccctcatgggcggattcggacttaaacaccctcctccacaaattctcatcaagaacaccccggtacctgcgaatccttcgaccactttcagtgcggcaaagtttgcttccttcatcacacagtactccacggggcaggtcagcgtggagatcgagtgggagctgcagaaggagaacagcaaacgctggaatcccgaaattcagtacacttccaactacaacaaatctgttaatgtggactttactgtggacactaatggtgtgtattcagagcctcgccccattggcaccagatacctgactcgtaatctgtaa

SEQ ID NO: 223 - protein, 735 aa, Adeno-associated virus
MAADGYLPDWLEDTLSEGIRQWWKLKPGPPPPKPAERHKDDSRGLVLPGYKYLGPFNGLDKGEPVNEADAAALEHDKAYDRQLDSGDNPYLKYNHADAEFQERLKEDTSFGGNLGRAVFQAKKRILEPLGLVEEPVKTAPGKKRPVEHSPAEPDSSSGTGKAGQQPARKRLNFGQTGDADSVPDPQPLGQPPAAPSGLGTNTMASGSGAPMADNNEGADGVGNSSGNWHCDSTWMGDRVITTSTRTWALPTYNNHLYKQISSQSGASNDNHYFGYSTPWGYFDFNRFHCHFSPRDWQRLINNNWGFRPKRLSFKLFNIQVKEVTQNDGTTTIANNLTSTVQVFTDSEYQLPYVLGSAHQGCLPPFPADVFMVPQYGYLTLNNGSQAVGRSSFYCLEYFPSQMLRTGNNFTFSYTFEDVPFHSSYAHSQSLDRLMNPLIDQYLYYLSRTNTPSGTTTMSRLQFSQAGASDIRDQSRNWLPGPCYRQQRVSKTAADNNNSDYSWTGATKYHLNGRDSLVNPGPAMASHKDDEEKYFPQSGVLIFGKQDSGKTNVDIEKVMITDEEEIRTTNPVATEQYGSVSTNLQSGNTQAATSDVNTQGVLPGMVWQDRDVYLQGPIWAKIPHTDGHFHPSPLMGGFGLKHPPPQILIKNTPVPANPSTTFSAAKFASFITQYSTGQVSVEIEWELQKENSKRWNPEIQYTSNYNKSVNVDFTVDTNGVYSEPRPIGTRYLTRNL

SEQ ID NO: 224 - DNA, 2208 bp, Adeno-associated virus
  source 1..2208: mol_type = unassigned DNA
atggctgccgatggttatcttccagattggctcgaggacactctctctgaaggaataagacagtggtggaagctcaaacctggcccaccaccaccaaagcccgcagagcggcataaggacgacagcaggggtcttgtgcttcctgggtacaagtacctcggacccttcaacggactcgacaagggagagccggtcaacgaggcagacgccgcggccctcgagcacgacaaggcctacgaccggcagctcgacagcggagacaacccgtacctcaagtacaaccacgccgacgcggagtttcaggagcgtcttaaagaagatacgtcttttgggggcaacctcggacgagcagtcttccaggccaaaaagaggattcttgaacctctgggcctggttgaggaacctgttaagacggctccgggaaaaaagaggccggtagagcactctcctgcggagccagactcctcctcgggaaccggaaaagcgggccagcagcctgcaagaaagagattgaattttggtcagactggagacgcagactcagtacctgacccccagcctctcggacagccaccagcagccccctctggtctgggaactaatacgatggcttcaggcagtggcgcaccaatggcagacaataacgagggcgccgacggagtgggtaattcctcgggaaattggcattgcgattccacatggatgggcgacagagtcatcaccaccagcacccgcacctgggccctgcccacctacaacaaccatctgtacaagcaaatctccagccagtctggagccagcaacgacaaccactactttggctacagcaccccctgggggtatttcgacttcaacagattccactgccacttctccccacgtgactggcaaagactcatcaacaacaactggggattccggcccaagagactcagcttcaagctctttaacattcaagtcaaagaggtcacgcagaatgacggtacgacgacgattgccaataaccttaccagcacggttcaggtgtttactgactcggggtaccagctcccgtacgtcctcggctcggcgcatcaaggatgccttccgccgttcccagcagacgtcttcatggtgccacagtatggatacctcaccctgaacaacggcagtcaggcggtaggacgctcttccttttactgcctggagtactttccttctcagatgcttcgtaccggaaacaactttaccttcagctacacctttgaagacgttcctttccatagcagctacgctcacggccaaagtctggaccgtctcatgaatcctctcatcgaccagtacctgtattacttgagcagaacaaacactccaagcggaaccaccacgatgtccaggcttcagttttctcaggccggagcaagtgacgttcgggaccagtctagaaactggcttcctggaccctgttaccgccagcagcgagtatcaaagacagctgcggacaacaacaacagtgattactcgtggactggagctaccaagtaccacctcaatggaagagactctctggtgaatccgggcccagctatggccagccacaaggacgatgaagaaaaatattttcctcagagcggggttctcgtctttggaaaacaagactcgggaaaaactaatgtggacattgaaaaggttatgattacagacgaagaggaaatcaggaccaccaatcccgcggctacggagcagtatggttctgtatctaccaacctccagagcggcaacacacaagcagctacctcagatgtcaacacacaaggcgttcttccaggcatggtctggcaggacagagacgtgtacctgcaggggcccatctgggcaaagattccacacacggacggacattttcacccctctcccctcatgggcggattcggacttaaacaccctcctccacaaattctcatcaagaacaccccggtacctgcgaatccttcgaccactttcagtgcggcaaagtttgtttccttcatcacacagtactccacggggcaggtcagcgtggagatcgagtgggagctgcagaaggagaacagcaaacgctggaatcccgaaattcagtacacttccaactacaacaaatctgttaatgtggactttactgtggacactaatggtgtgtattcagagcctcgccccattggcaccagatacctgactcgtaatctgtaa

SEQ ID NO: 225 - protein, 735 aa, Adeno-associated virus
MAADGYLPDWLEDTLSEGIRQWWKLKPGPPPPKPAERHKDDSRGLVLPGYKYLGPFNGLDKGEPVNEADAAALEHDKAYDRQLDSGDNPYLKYNHADAEFQERLKEDTSFGGNLGRAVFQAKKRILEPLGLVEEPVKTAPGKKRPVEHSPAEPDSSSGTGKAGQQPARKRLNFGQTGDADSVPDPQPLGQPPAAPSGLGTNTMASGSGAPMADNNEGADGVGNSSGNWHCDSTWMGDRVITTSTRTWALPTYNNHLYKQISSQSGASNDNHYFGYSTPWGYFDFNRFHCHFSPRDWQRLINNNWGFRPKRLSFKLFNIQVKEVTQNDGTTTIANNLTSTVQVFTDSGYQLPYVLGSAHQGCLPPFPADVFMVPQYGYLTLNNGSQAVGRSSFYCLEYFPSQMLRTGNNFTFSYTFEDVPFHSSYAHGQSLDRLMNPLIDQYLYYLSRTNTPSGTTTMSRLQFSQAGASDVRDQSRNWLPGPCYRQQRVSKTAADNNNSDYSWTGATKYHLNGRDSLVNPGPAMASHKDDEEKYFPQSGVLVFGKQDSGKTNVDIEKVMITDEEEIRTTNPAATEQYGSVSTNLQSGNTQAATSDVNTQGVLPGMVWQDRDVYLQGPIWAKIPHTDGHFHPSPLMGGFGLKHPPPQILIKNTPVPANPSTTFSAAKFVSFITQYSTGQVSVEIEWELQKENSKRWNPEIQYTSNYNKSVNVDFTVDTNGVYSEPRPIGTRYLTRNL

SEQ ID NO: 226 - DNA, 2208 bp, Adeno-associated virus
  source 1..2208: mol_type = unassigned DNA
atggctgccgatggttatcttccagattggctcgaggacactctctctgaaggaataagacagtggtggaaactcaaacctggcccaccaccaccaaagcccgcagagcggcataaggacgacagcaggggtcttgtgcttcctgggtacaagtacctcggacccttcaacggactcgacaagggagagccggtcaacgaggcagacgccgcggccctcgagcacgacaaggcctacgaccggcagctcgacagcggagacaacccgtacctcaagtacaaccacgccgacgcggagtttcaggagcgccttaaagaagatacgtcttttgggggcaacctcggacgagcagtcttccaggcaaaaaagagggttctggaacctctgagcctggttgaggagcctgttaagacggctccgggaaaaaagaggccggtagagcactctcccgcagagccagattcctcctccggaactggaaagtcgggcaaccagcctgcaagaaagagattgaatttcggtcagactggagactcagactccgtacctgacccccagcctctcggacagccaccagcagccccctctggtctgggaactaatacgatggctacaggcagtggcgcaccaatggcagacaataacgagggcgccgacggagtgggtaattcctcgggaaattggcattgcgattccacatggatgggcgacagagtcatcaccaccagcacccgaacctgggccctgcccacctacaacaaccatctgtacaagcaaatatccagccagtctggagccagcaacgacaatcactactttggctacagcaccccctgggggtattttgacttcaacagattccactgccacttttcaccacgtgactggcaaagactcatcaacaacaactggggattccgacccaagagactcaacttcaagctctttaacattcaagtcaaagaggtcacgcagaatgacggtacgacgacgattgccaataaccttaccagcacggttcaggtgtttactgactcggagtaccagctcccgtacgtcctcggctcggcgcatcaaggatgcctcccgccgttcccagcagacgtcttcatggtgccacagtatggatacctcaccctgaacaacgggagtcaggcagtaggacgctcttcattttactgcctagagtactttccttctcagatgctgcgtaccggaaacaactttaccttcagctacacctttgaggacgttcctttccacagcagctacgctcacagccagagtttggaccgtctcatgaatcctctcatcgaccagtacctgtattacttgagcagaacaaacactccaagcggaaccaccacgcagtccaggcttcagttttctcaggccggagcgagtgacattcaggaccagtctaggaactggcttcctggaccctgttaccgtcagcagcgagtatcaaagacatctgcggataacaacaacagtgaatactcgtggactggagctaccaagtaccacctcaatggcagagactctctggtgaatccgggcccggccatggccagccacaaagacgatgaagaaaagttttttcctcagagcggggttcttatctttgggaagcaaggctcagagaaaacaaatgtggatattgaaaaggtcatgattacagacgaagaggaaatcaggaccaccaatcccgtggctacggagcagtatggttctgtatctaccaacctccagagcggcaacacacaagcagctaccgcagatgtcaacacacaaggcgttcttccaggcatggtcgggcaagacagagacgtgtacctgcaggggcctacttgggcaaagattccacacacggacggacattttcacccctctcccctcatgggcggatttggacttaaacaccctcctccacagattctcatcaagaacaccccggtacctgcgaatccttcgaccaccttcagtgcggcaaagtttgcttccttcattacacagtactccacggggcaggtcagcgtggagatcgagtgggagctgcagaaggagaacagcaaacgctggaatcccgagatccagtacacttccaactacaacaagtctgttaatgtggactttactgtggacactaatggcgtgtattcagagcctcgccccattggcaccagatacctgactcgtaatctgtaa

SEQ ID NO: 227 - protein, 735 aa, Adeno-associated virus
MAADGYLPDWLEDTLSEGIRQWWKLKPGPPPPKPAERHKDDSRGLVLPGYKYLGPFNGLDKGEPVNEADAAALEHDKAYDRQLDSGDNPYLKYNHADAEFQERLKEDTSFGGNLGRAVFQAKKRVLEPLSLVEEPVKTAPGKKRPVEHSPAEPDSSSGTGKSGNQPARKRLNFGQTGDSDSVPDPQPLGQPPAAPSGLGTNTMATGSGAPMADNNEGADGVGNSSGNWHCDSTWMGDRVITTSTRTWALPTYNNHLYKQISSQSGASNDNHYFGYSTPWGYFDFNRFHCHFSPRDWQRLINNNWGFRPKRLNFKLFNIQVKEVTQNDGTTTIANNLTSTVQVFTDSEYQLPYVLGSAHQGCLPPFPADVFMVPQYGYLTLNNGSQAVGRSSFYCLEYFPSQMLRTGNNFTFSYTFEDVPFHSSYAHSQSLDRLMNPLIDQYLYYLSRTNTPSGTTTQSRLQFSQAGASDIQDQSRNWLPGPCYRQQRVSKTSADNNNSEYSWTGATKYHLNGRDSLVNPGPAMASHKDDEEKFFPQSGVLIFGKQGSEKTNVDIEKVMITDEEEIRTTNPVATEQYGSVSTNLQSGNTQAATADVNTQGVLPGMVGQDRDVYLQGPTWAKIPHTDGHFHPSPLMGGFGLKHPPPQILIKNTPVPANPSTTFSAAKFASFITQYSTGQVSVEIEWELQKENSKRWNPEIQYTSNYNKSVNVDFTVDTNGVYSEPRPIGTRYLTRNL

SEQ ID NO: 228 - DNA, 2208 bp, Adeno-associated virus
  source 1..2208: mol_type = unassigned DNA
atggctgccgatggttatcttccagattggctcgaggacactctctctgaaggaataagacagtggtggaagctcaaacctggcccaccaccaccaaagcccgcagagcggcataaggacgacagcaggggtcttgtgcttcctgggtacaagtacctcggacccttcaacggactcgacaagggagagccggtcaacgaggcagacgccgcggccctcgagcacgacaaggcctacgaccggcagctcgacagcggagacaacccgtacctcaagtacaaccacgccgacgcagagtttcaggagcgccttaaagaagatacgtcttttgggggcaacctcggacgagcagtcttccaggcaaaaaagagggttctggaacctctgggcctggttgaggagcctgttaagacggctccgggaaaaaagaggccggtagagcactctcctgcagagccagattcctcctccggaactggaaagtcgggcaaccagcctgcaagaaagagattgaatttcggtcagactggagactcagactccgtacctgacccccagcctctcggacagccaccagcagccccctctggtctgggaactaatacgatggctacaggcagtggcgcaccaatggcagacaataacgagggcgccgacggagtgggtaattcctcgggaaattggcattgcgattccacatggatgggcgacagagtcatcaccaccagcacccgaacctgggccctgcccacctacaacaaccatctgtacaagcaaatatccagccagtctggagccagcaacgacaatcactactttggctacagcaccccctgggggtattttgacttcaacagattccactgccacttttcaccacgtgactggcaaagactcatcaacaacaactggggattccgacccaagagactcaacttcaagctctttaacattcaagtcaaagaggtcacgcagaatgacggtacgacgacgattgccaataaccttaccagcacggttcaggtgtttactgactcggagtaccagctcccgtacgtcctcggctcggcgcatcaaggatgcctcccgccgttcccagcagacgtcttcatggtgccacagtatggatacctcaccctgaacaacgggagtcaggcagtaggacgctcttcattttactgcctagggtactttccttctcagatgctgcgtaccggaaacaactttaccttcagctacacctttgaggacgttcctttccacagcagctacgctcacagccagagtttggaccgtctcatgaatcctctcatcgaccagtacctgtattacttgagcagaacaaacactccaagcggaaccaccacgcagtccaggcttcagttttctcaggccggagcgagtgacattcgggaccagtctaggaactggcttcctggaccctgttaccgtcagcagcgagtatcaaagacatctgcggataacaacaacagtgaatactcgtggactggagctaccaagtaccacctcaatggcagagactctctggtgaatccgggcccggccatggccagccacaaagacgatgaagaaaagttttttcctcagagcggggttcttatctttgggaagcaaggcccagagaaaacaaatgtggatattgaaaaggtcatgattacagacgaagaggaaatcaggaccaccaatcccgtggctacggagcagtatggttctgtatctaccaacctccagagcggcaacacacaagcagctaccgcagatgtcaacacacaaggcgttcttccaggcatggtctggcaagacagagacgtgtacctgcaggggcctatttgggcaaagattccacacacggacggacattttcacccctctcccctcatgggcggatttggacttaaacaccctcctccacagattctcatcaagaacaccccggtacctgcgaatccttcgaccaccttcagtgcggcaaagtttgcttccttcattacacagtactccacggggcaggtcagcgtggagatcgagtgggagctgcagaaggagaacagcaaacgctggaatcccgagatccagtacacttccaactacaacaagtctgttaatgtggactttactgtggacactaatggcgtgtattcagagcctcgccccattggcaccagatacctgactcgtaatctgtaa

SEQ ID NO: 229 - protein, 735 aa, Adeno-associated virus
MAADGYLPDWLEDTLSEGIRQWWKLKPGPPPPKPAERHKDDSRGLVLPGYKYLGPFNGLDKGEPVNEADAAALEHDKAYDRQLDSGDNPYLKYNHADAEFQERLKEDTSFGGNLGRAVFQAKKRVLEPLGLVEEPVKTAPGKKRPVEHSPAEPDSSSGTGKSGNQPARKRLNFGQTGDSDSVPDPQPLGQPPAAPSGLGTNTMATGSGAPMADNNEGADGVGNSSGNWHCDSTWMGDRVITTSTRTWALPTYNNHLYKQISSQSGASNDNHYFGYSTPWGYFDFNRFHCHFSPRDWQRLINNNWGFRPKRLNFKLFNIQVKEVTQNDGTTTIANNLTSTVQVFTDSEYQLPYVLGSAHQGCLPPFPADVFMVPQYGYLTLNNGSQAVGRSSFYCLGYFPSQMLRTGNNFTFSYTFEDVPFHSSYAHSQSLDRLMNPLIDQYLYYLSRTNTPSGTTTQSRLQFSQAGASDIRDQSRNWLPGPCYRQQRVSKTSADNNNSEYSWTGATKYHLNGRDSLVNPGPAMASHKDDEEKFFPQSGVLIFGKQGPEKTNVDIEKVMITDEEEIRTTNPVATEQYGSVSTNLQSGNTQAATADVNTQGVLPGMVWQDRDVYLQGPIWAKIPHTDGHFHPSPLMGGFGLKHPPPQILIKNTPVPANPSTTFSAAKFASFITQYSTGQVSVEIEWELQKENSKRWNPEIQYTSNYNKSVNVDFTVDTNGVYSEPRPIGTRYLTRNL

SEQ ID NO: 230 - protein, 735 aa, Adeno-associated virus
MAADGYLPDWLEDTLSEGIRQWWKLKPGPPPPKPAERHKDDSRGLVLPGYKYLGPFNGLDKGEPVNEADAAALEHDKAYDRQLDSGDNPYLKYNHADAEFQERLKEDTSFGGNLGRAVFQAKKRVLEPLGLVEEPVKTAPGKKRPVEHSPAEPDSSSGTGKSGNQPARKRLNFGQTGDSDSVPDPQPLGQPPAAPSGLGTNTMATGSGAPMADNNEGADGVGNSSGNWHCDSTWMGDRVITTSTRTWALPTYNNHLYKQISSQSGASNDNHYFGYSTPWGYFDFNRFHCHFSPRDWQRLINNNWGFRPKRLNFKLFNIQVKEVTQNDGTTTIANNLTSTVQVFTDSEYQLPYVLGSAHQGCLPPFPADVFMVPQYGYLTLNNGSQAVGRSSFYCLEYFPSQMLRTGNNFTFSYTFEDVPFHSSYAHSQSLDRLMNPLIDQYLYYLSRTNTPSGTTTQSRLQFSQAGASDIRDQSRNWLPGPCYRQQRVSKTSADNNNSEYSWTGATKYHLNGRDSLVNPGPAMASHKDDEEKFFPQSGVLIFGKQGPEKTNVDIEKVMITDEEEIRTTNPVATEQYGSVSTNLQSGNTQAATADVNTQGVLPGMVWQDRDVYLQGPIWAKIPHTDGHFHPSPLMGGFGLKHPPPQILIKNTPVPANPSTTFSAAKFASFITQYSTGQVSVEIEWELQKENSKRWNPEIQYTSNYNKSVNVDFTVDTNGVYSEPRPIGTRYLTRNL

SEQ ID NO: 231 - protein, 735 aa, Adeno-associated virus; identical to SEQ ID NO: 230

SEQ ID NO: 232 - DNA, 2211 bp, Adeno-associated virus
  source 1..2211: mol_type = unassigned DNA
atggctgccgatggttatcttccagattggctcgaggacactctctctgaaggaataagacagtggtggaagctcaaacctggcccaccaccaccaaagcccgcagagcggcataaggacgacagcaggggtcttgtgcttcctgggtacaagtacctcggacccttcaacggactcgacaagggggagccggtcaacgaggcagacgccgcggccctcgagcacgacaaggcctacgaccggcagctcgacagcggagacaacccgtacctcaagtacaaccacgccgacgcagagtttcaggagcgccttaaagaagatacgtcttttgggggcaacctcggacgagcagtcttccaggcgaaaaagagggttcttgaacctctgcggcctggtttgaggaaacctgttaagacggctccgggaaaaaagaggccggtagagcactctcctgtggagccagactcctcctcgggaaccggaaaagcgggccagcagcctgcaagaaaaagattaaattttggtcagactggagacgcagactccgtacctgacccccagcctctcggacagccaccagcagccccctctggtctgggatctactacaatggctacaggcagtggcgcaccaatggcagacaataacgagggtgccgatggagtgggtaattcctcaggaaattggcattgcgattcccaatggctggacgacagagtcatcgccaccagcacccgaacctgggccctgcccacatacaacaaccacctctacaagcaaatctccagccaatcaggagcctgcaacgacaaccactactttggctacagcaccccctgggggtattttgacttcaacagattccactgccacttttcaccacgtgactggcaaagactcatcaacagcaactggggattccggcccaaaagactcaacttcaagctctttaatattcaagtcaaagaggtcacgcagaatgacggtacgacgacgattgccaataaccttaccagcacggttcaggtgtttactgactcggagtaccagctcccgtacgtcccgggctcggcgcatcaaggatgcctcccgccgtttccagcggacgtcttcatggtcccacagtatggatacctcaccctgaacaacgggagtcaggcggtaggacgctcttccttttactgcctggagtactttccttctcagatgctgcgtactggaaacaactttcagttcagctacacttttgaagacgtgcctttccacagcagctacgctcactgccagagtctggatcggctgatgaatcctctgatcgaccagtacctgtattatctgaacaagacacaaacaaatagtggaactcttcagcagtctcggctactgtttagccaagctggaccaaccaacatgtctcttcaagctaaaaactggctgcctggaccttgctacagacagcagcgtctgtcaaaacaggcaaacgacaataacaactgcaactttccctggactgcagctacaaagtatcatctaaatggccgggactcgttggttaatccaggaccagctatggccagtcacaaggatgacgaagaaaagtttttccccatgcatggaaccctgatatttggtaaacaaggaacaaatgccaacgacgcggatttggaaaatgtcatgattacagatgaagaagaaatcaggcccaccaatcccgtggctacggagcagtacgggactgtgtcaaataatttgcaaaactcaaacactggtccaactacaggaactgtcaatcaccaaggagcgttacctggtatggtgtggcaggatcgagacgtgtacctgcagggacccatttgggccaagattcctcacaccgatggacactttcatccttctccactgatgggaggttttggactcaaacacccgcctcctcagatcatgatcaaaagcactcccgttccagccaatcctcccacaaacttcagttctgccaagtttgcttcttccatcacacagtattccacgggacaggtcagcgtggagatcgagtgggagctgcagaaggagaacagcaaacgctggaatcccgaaattcagtacacttccaactacaacaagtctgttaatgtggactttactgtggacactaatggtgtgtattcagagcctcgccccattggcaccagatacctgactcgtaatctgtaa

SEQ ID NO: 233 - protein, 736 aa, Adeno-associated virus
MAADGYLPDWLEDTLSEGIRQWWKLKPGPPPPKPAERHKDDSRGLVLPGYKYLGPFNGLDKGEPVNEADAAALEHDKAYDRQLDSGDNPYLKYNHADAEFQERLKEDTSFGGNLGRAVFQAKKRVLEPLRPGLRKPVKTAPGKKRPVEHSPVEPDSSSGTGKAGQQPARKRLNFGQTGDADSVPDPQPLGQPPAAPSGLGSTTMATGSGAPMADNNEGADGVGNSSGNWHCDSQWLDDRVIATSTRTWALPTYNNHLYKQISSQSGACNDNHYFGYSTPWGYFDFNRFHCHFSPRDWQRLINSNWGFRPKRLNFKLFNIQVKEVTQNDGTTTIANNLTSTVQVFTDSEYQLPYVPGSAHQGCLPPFPADVFMVPQYGYLTLNNGSQAVGRSSFYCLEYFPSQMLRTGNNFQFSYTFEDVPFHSSYAHCQSLDRLMNPLIDQYLYYLNKTQTNSGTLQQSRLLFSQAGPTNMSLQAKNWLPGPCYRQQRLSKQANDNNNCNFPWTAATKYHLNGRDSLVNPGPAMASHKDDEEKFFPMHGTLIFGKQGTNANDADLENVMITDEEEIRPTNPVATEQYGTVSNNLQNSNTGPTTGTVNHQGALPGMVWQDRDVYLQGPIWAKIPHTDGHFHPSPLMGGFGLKHPPPQIMIKSTPVPANPPTNFSSAKFASSITQYSTGQVSVEIEWELQKENSKRWNPEIQYTSNYNKSVNVDFTVDTNGVYSEPRPIGTRYLTRNL

SEQ ID NO: 234 - DNA, 2208 bp, Adeno-associated virus
  source 1..2208: mol_type = unassigned DNA
atggctgccgatggttatcttccagattggctcgaggacactctctctgaaggaataagacagtggtggaagctcaaacctggcccaccaccaccaaagcccgcagagcggcataaggacgacagcaggggtcttgtgcttcctgggtacaagtacctcggacccttcaacggactcgacaagggagagccggtcaacgaggcagacgccgcggccctcgagcacgacaaggcctacgaccggcagctcgacagcggagacaacccgtacctcaagtacaaccacgccgacgcggagtttcaggagcgccttaaagaggatacgtcttttgggggcaacctcggacgagcagtcttccaggcaaaaaagagggttctggaacctctgggcctggttgaggagcctgttaagacggctccgggaaaaaagaggccggtagagcactctcctgcagagccagattcctcctccggaactggaaagtcgggcaaccagcctgcaagaaagagattgaatttcggtcagactggagactcagactccgtacctgacccccagcctctcggacagccaccagcagccccctctggtctgggaactaatacgatggctacaggcagtggcgcaccaatggcagacaataacgagggcgccgacggagtgggtaattcctcgggaaattggcattgcgattccacatggatgggcgacagagtcatcaccaccagcacccgaacctgggccctgcccacctacaacaaccatctgtacaagcaaatatccagccagtctggagccagcaacgacaatcactactttggctacagcaccccctgggggtattttgacttcaacagattccactgccacttttcaccacgtgactggcaaagactcatcaacaacaactggggattccgacccaagagactcaacttcaagctctttaacattcaagtcaaagaggtcacgcagaatgacggtacgacgacgattgccaataaccttaccagcacggttcaggtgtttactgactcggagtaccagctcccgtacgtcctcggctcggcgcatcaaggatgcctcccgccgttcccagcagacgtcttcatggtgccacagtatggatacctcaccctgaacaacgggagtcaggcagtaggacgctcttcattttactgcctagagtactttccttctcagatgctgcgtaccggaaacagctttaccttcagctacacctttgaggacgttcctttccacagcagctacgctcacagccagagtttggaccgtctcatgaatcctctcatcgaccagtacctgtattacttgagcagaacaaacactccaagcggaaccaccacgcagtccaggcttcagttttctcaggccggagcgagtgacattcgggaccagtctaggaactggcttcctggaccctgttaccgtcagcagcgagtatcaaagacatctgcggataacaacaacagtgaatactcgtggactggagctaccaagtaccacctcaatggcagagactctctggtgaatccgggcccggccatggccagccacaaagacgatgaagaaaagttctttcctcagagcggggttcttatctttgggaagcaaggctcagagaaaacaaatgtggatattgaaaaggtcatgattacagacgaagaggaaatcaggaccaccaatcccgtggctacggagcagtatggttctgtatctaccaacctccagagcggcaacacacaagcagctaccgcagatgtcaacacacaaggcgttcttccaggcatggtctggcaagacagagacgtgtacctgcaggggcctatttgggcaaagattccacacacggacggacattttcacccctctcccctcatgggcggatttggacttaaacaccctcctccacagattctcatcaagaacaccccggtacctgcgaatccttcgaccaccttcagtgcggcaaagtttgcttccttcattacacagtactccacggggcaggtcagcgtggagatcgagtgggagctgcagaaggagaacagcaaacgctggaatcccgagatccagtacacttccaactacaacaagtctgttaatgtggactttactgtggacactaatggcgtgtattcagagcctcgccccattggcaccagatacctgactcgtaatctgtaa

SEQ ID NO: 235 - protein, 735 aa, Adeno-associated virus
MAADGYLPDWLEDTLSEGIRQWWKLKPGPPPPKPAERHKDDSRGLVLPGYKYLGPFNGLDKGEPVNEADAAALEHDKAYDRQLDSGDNPYLKYNHADAEFQERLKEDTSFGGNLGRAVFQAKKRVLEPLGLVEEPVKTAPGKKRPVEHSPAEPDSSSGTGKSGNQPARKRLNFGQTGDSDSVPDPQPLGQPPAAPSGLGTNTMATGSGAPMADNNEGADGVGNSSGNWHCDSTWMGDRVITTSTRTWALPTYNNHLYKQISSQSGASNDNHYFGYSTPWGYFDFNRFHCHFSPRDWQRLINNNWGFRPKRLNFKLFNIQVKEVTQNDGTTTIANNLTSTVQVFTDSEYQLPYVLGSAHQGCLPPFPADVFMVPQYGYLTLNNGSQAVGRSSFYCLEYFPSQMLRTGNSFTFSYTFEDVPFHSSYAHSQSLDRLMNPLIDQYLYYLSRTNTPSGTTTQSRLQFSQAGASDIRDQSRNWLPGPCYRQQRVSKTSADNNNSEYSWTGATKYHLNGRDSLVNPGPAMASHKDDEEKFFPQSGVLIFGKQGSEKTNVDIEKVMITDEEEIRTTNPVATEQYGSVSTNLQSGNTQAATADVNTQGVLPGMVWQDRDVYLQGPIWAKIPHTDGHFHPSPLMGGFGLKHPPPQILIKNTPVPANPSTTFSAAKFASFITQYSTGQVSVEIEWELQKENSKRWNPEIQYTSNYNKSVNVDFTVDTNGVYSEPRPIGTRYLTRNL

SEQ ID NO: 236 - DNA, 2211 bp, Adeno-associated virus; identical to SEQ ID NO: 126
  source 1..2211: mol_type = unassigned DNA

SEQ ID NO: 237 - protein, 736 aa, Adeno-associated virus
MAADGYLPDWLEDTLSEGIRQWWKLKPGPPPPKPAERHKDDSRGLVLPGYKYLGPGNGLDKGEPVNAADAAALEHDKAYDQQLKAGDNPYLKYNHADAEFQERLKEDTSFGGNLGRAVFQAKKRLLEPLGLVEEAAKTAPGKKRPVEQSPQEPDSSAGIGKSGSQPAKKKLNFGQTGDTESVPDPQPIGEPPAAPSGVGSLTMASGGGAPVADNNEGADGVGSSSGNWHCDSQWLGDRVITTSTRTWALPTYNNHLYKQISNSTSGGSSNDNAYFGYSTPWGYFDFNRFHCHFSPRDWQRLINNNWGFRPKRLNFKLFNIQVKEVTDNNGVKTIANNLTSTVQVFTDSDYQLPYVLGSAHEGCLPPFPADVFMIPQYGYLTLNDGGQAVGRSSFYCLEYFPSQMLRTGNNFQFSYEFENVPFHSSYAHSQSLDRLMNPLIDQYLYYLSKTINGSGQNQQTLKFSVAGPSNMAVQGRNYIPGPSYRQQRVSTTVTQNNNSEFAWPGASSWALNGRNSLMNPGPAMASHKEGEDRFFPLSGSLIFGKQGTGRDNVDADKVMITNEEEIKTTNPVATESYGQVATNHQSAQAQAQTGWVQNQGILPGMVWQDRDVYLQGPIWAKIPHTDGNFHPSPLMGGFGMKHPPPQILIKNTPVPADPPTAFNKDKLNSFITQYSTGQVSVEIEWELQKENSKRWNPEIQYTSNYYKSNNVEFAVSTEGVYSEPRPIGTRYLTRNL

SEQ ID NO: 238 - DNA, 2211 bp, Adeno-associated virus
  source 1..2211: mol_type = unassigned DNA
atggctgccgatggttatcttccagattggctcgaggacactctctctgaaggaataagacagtggtggaagctcaaacctggcccaccaccaccaaagcccgcagagcggcataaggacgacagcaggggtcttgtgcttcctgggtacaagtacctcggacccggcaacggactcgacaagggggagccggtcaacgcagcagacgcggcggccctcgagcacgacaaggcctacgaccagcagctcaaggccggagacaacccgtacctcaagtacaaccacgccgacgccgagttccaggagcggctcaaagaagatacgtcttttgggggcaacctcgggcgagcagtcttccaggccaaaaagaggcttcttgaacctcttggtctggttgaggaagcggctaagacggctcctggaaagaagaggcctgtagagcagtctcctcaggaaccggactcctccgcgggtattggcaaatcgggttcacagcccgctaaaaagaaactcaatttcggtcagactggcgacacagagtcagtccccgaccctcaaccaatcggagaacctcccgcagccccctcaggtgtgggatctcttacaatggcttcaggtggtggcgcaccagtggcagacaataacgaaggtgccgatggagtgggtagttcctcgggaaattggcattgcgattcccaatggctgggggacagagtcatcaccaccagcacccgaacctgggccctgcccacctacaacaatcacctctacaagcaaatctccaacagcacatctggaggatcttcaaatgacaacgcctacttcggctacagcaccccctgggggtattttgacttcaacagattccactgccacttctcaccacgtgactggcagcgactcatcaacaacaactggggattccggcctaagcgactcaacttcaagctcttcaacattcaggtcaaagaggttacggacaacaatggagtcaagaccatcgccaataaccttaccagcacggtccaggtcttcacggactcagactatcagctcccgtacgtgctcgggtcggctcacgagggctgcctcccgccgttcccagcggacgttttcatgattcctcagtacgggtatctgacgcttaatgatgggagccaggccgtgggtcgttcgtccttttactgcctggaatatttcccgtcgcaaatgctaagaacgggtaacaacttccagttcagctacgagtttgagaacgtacctttccatagcagctacgctcacagccaaagcctggaccgactaatgaatccactcatcgaccaatacttgtactatctctcaaagactattaacggttctggacagaatcaacaaacgctaaaattcagcgtggccggacccagcaacatggctgtccagggaagaaactacatacctggacccagctaccgacaacaacgtgtctcaaccactgtgactcaaaacaacaacagcgaatttgcttggcctggagcttcttcttgggctctcaatggacgtaatagcttgatgaatcctggacctgctatggccagccacaaagaaggagaggaccgtttctttcctttgtctggatctttaatttttggcaaacaaggaactggaagagacaacgtggatgcggacaaagtcatgataaccaacgaagaagaaattaaaactactaacccggtagcaacggagtcctatggacaagtggccacaaaccaccagagtgcccaagcacaggcgcagaccggctgggttcaaaaccaaggaatacttccgggtatggtttggcaggacagagatgtgtacctgcaaggacccatttgggccaaaattcctcacacggacggcaactttcacccttctccgctaatgggagggtttggaatgaagcacccgcctcctcagatcctcatcaaaaacacacctgtacctgcggatcctccaacggctttcaataaggacaagctgaactctttcatcacccagtattctactggccaagtcagcgtggagattgagtgggagctgcagaaggaaaacagcaagcgctggaacccggagatccagtacacttccaactattacaagtctaataatgttgaatttgctgttaatactgaaggtgtatatagtgaaccccgccccattggcaccagatacctgactcgtaatctgtaa

SEQ ID NO: 239 - protein, 736 aa, Adeno-associated virus
MAADGYLPDWLEDTLSEGIRQWWKLKPGPPPPKPAERHKDDSRGLVLPGYKYLGPGNGLDKGEPVNAADAAALEHDKAYDQQLKAGDNPYLKYNHADAEFQERLKEDTSFGGNLGRAVFQAKKRLLEPLGLVEEAAKTAPGKKRPVEQSPQEPDSSAGIGKSGSQPAKKKLNFGQTGDTESVPDPQPIGEPPAAPSGVGSLTMASGGGAPVADNNEGADGVGSSSGNWHCDSQWLGDRVITTSTRTWALPTYNNHLYKQISNSTSGGSSNDNAYFGYSTPWGYFDFNRFHCHFSPRDWQRLINNNWGFRPKRLNFKLFNIQVKEVTDNNGVKTIANNLTSTVQVFTDSDYQLPYVLGSAHEGCLPPFPADVFMIPQYGYLTLNDGSQAVGRSSFYCLEYFPSQMLRTGNNFQFSYEFENVPFHSSYAHSQSLDRLMNPLIDQYLYYLSKTINGSGQNQQTLKFSVAGPSNMAVQGRNYIPGPSYRQQRVSTTVTQNNNSEFAWPGASSWALNGRNSLMNPGPAMASHKEGEDRFFPLSGSLIFGKQGTGRDNVDADKVMITNEEEIKTTNPVATESYGQVATNHQSAQAQAQTGWVQNQGILPGMVWQDRDVYLQGPIWAKIPHTDGNFHPSPLMGGFGMKHPPPQILIKNTPVPADPPTAFNKDKLNSFITQYSTGQVSVEIEWELQKENSKRWNPEIQYTSNYYKSNNVEFAVNTEGVYSEPRPIGTRYLTRNL

SEQ ID NO: 240 - DNA, 2208 bp, Adeno-associated virus
  source 1..2208: mol_type = unassigned DNA
atggctgccgatggttatcttccagattggctcgaggacactctctctgaaggaataagacagcggtggaagctcaaacctggcccaccaccaccagagcccgcagagcggcataaggacgacagcaggggtcttgtgcttcctgggtacaagtacctcggacccttcaacggactcgacaagggagagccggtcaacgaggcagacgccgcggccctcgagcacgacaaagcctacgaccggcagctcgacagcggagacaacccgtacctcaagtacaaccacgccgacgcggagtttcaggagcgccttaaagaagatacgtcttttgggggcaacctcggacgagcagtcttccaggcgaaaaagagggtacttgaacctctgggcctggttgaggaacctgttaagacggctccgggaaaaaagaggccggtagagcactctcctgtggagccagactcctcctcgggaaccggaaaggcgggccagcagcctgcaagaaaaagattgaattttggtcagactggagacgcagactcagtacctgacccccagcctctcggacagccaccagcagccccctctggtctgggaactaatacgatggctacaggcagtggcgcaccaatggcagacaataacgagggcgccgacggagtgggtaattcctcgggaaattggcattgcgattccacatggatgggcgacagagtcatcaccaccagcacccgaacctgggccctgcccacctacaacaaccacctctacaaacaaatttccagccaatcaggagcctcgaacgacaatcactactttggctacagcaccccttgggggtattttgacttcaacagattccactgccacttttcaccacgtgactggcaaagactcatcaacaacaactggggattccgacccaagagactcaacttcaagctctttaacattcaagtcaaagaggtcacgcagaatgacggtacgacgacgattgccaataaccttaccggcacggttcaggtgtttactgactcggagtaccagctcccgtacgtcctcggctcggcgcatcaaggatgcctcccgccgttcccagcagacgtcttcatggtgccacagtatggatacctcaccctgaacaacgggagtcaggcagtaggacgctcttcattttactgcctggagtactttccttctcagatgctgcgtaccggaaacaactttaccttcagctacacttttgaggacgttcctttccacagcagctacgctcacagccagagtctgggccgtctcatgaatcctctcatcgaccagtacctgtattacttgagcagaacaaacactccaagtggaaccaccacgcagtcaaggcttcagttttctcaggccggagcgagtgacattcgggaccagtctaggaactggcttcctggaccctgttaccgccagcagcgagtatcaaagacatctgcggataacaacaacagtgaatactcgtggactggagctaccaagtaccacctcaatggcagagactctctggtgaatccgggcccggccatggcaagccacaaggacgatgaagaaaagttttttcctcagagcggggttctcatctttgggaagcaaggctcagagaaaacaaatgtggacattgaaaaggtcatgattacagacgaagaggaaatcaggacaaccaatcccgtggctacggagcagtatggttctgtatctaccaacctccagagaggcaacagacaagcagctaccgcagatgtcaacacacaaggcgttcttccaggcatggtctggcaggacagagatgtgtaccttcaggggcccatctgggcaaagattccacacacggacggacattttcacccctctcccctcatgggtggattcggacttaaacaccctcctccacagattctcatcaagaacaccccggtacctgcgaatccttcgaccaccttcagtgcggcaaagtttgcttccttcatcacacagtactccacgggacaggtcagcgtggagatcgagtgggagctgcagaaggaaaacagcaaacgctggaatcccgaaattcagtacacttccaactacaacaagtctgttaatgtggactttactgtggacactaatggcgtgtattcagagcctcgccccattggcaccagatacctgactcgtaatctgtaa

SEQ ID NO: 241 - protein, 735 aa, Adeno-associated virus
MAADGYLPDWLEDTLSEGIRQRWKLKPGPPPPEPAERHKDDSRGLVLPGYKYLGPFNGLDKGEPVNEADAAALEHDKAYDRQLDSGDNPYLKYNHADAEFQERLKEDTSFGGNLGRAVFQAKKRVLEPLGLVEEPVKTAPGKKRPVEHSPVEPDSSSGTGKAGQQPARKRLNFGQTGDADSVPDPQPLGQPPAAPSGLGTNTMATGSGAPMADNNEGADGVGNSSGNWHCDSTWMGDRVITTSTRTWALPTYNNHLYKQISSQSGASNDNHYFGYSTPWGYFDFNRFHCHFSPRDWQRLINNNWGFRPKRLNFKLFNIQVKEVTQNDGTTTIANNLTGTVQVFTDSEYQLPYVLGSAHQGCLPPFPADVFMVPQYGYLTLNNGSQAVGRSSFYCLEYFPSQMLRTGNNFTFSYTFEDVPFHSSYAHSQSLGRLMNPLIDQYLYYLSRTNTPSGTTTQSRLQFSQAGASDIRDQSRNWLPGPCYRQQRVSKTSADNNNSEYSWTGATKYHLNGRDSLVNPGPAMASHKDDEEKFFPQSGVLIFGKQGSEKTNVDIEKVMITDEEEIRTTNPVATEQYGSVSTNLQRGNRQAATADVNTQGVLPGMVWQDRDVYLQGPIWAKIPHTDGHFHPSPLMGGFGLKHPPPQILIKNTPVPANPSTTFSAAKFASFITQYSTGQVSVEIEWELQKENSKRWNPEIQYTSNYNKSVNVDFTVDTNGVYSEPRPIGTRYLTRNL

SEQ ID NO: 242 - DNA, 2208 bp, Adeno-associated virus
  source 1..2208: mol_type = unassigned DNA
atggctgccgatggttatcttccagattggctcgaggacactctctctgaaggaataagacagcggtggaagctcaaacctggcccaccaccaccagagcccgcagagcggcataaggacgacagcaggggtcttgtgcttcctgggtacaagtacctcggacccttcaacggactcgacaagggagagccggtcaacgaggcagacgccgcggccctcgagcacgacaaagcctacgaccggcagctcgacagcggagacaacccgtacctcaagtacaaccacgccgacgcggagtttcaggagcgccttaaagaagatacgtcctttgggggcaacctcggacgagcagtcttccaggcgaaaaagagggtacttgaacctctgggcctggttgaggaacctgttaagacggctccgggaaaaaagaggccggtagagcactctcctgtggagccagactcctcctcgggaaccggaaaggcgggccagcagcctgcaagaaaaagattgaattttggtcagactggagacgcagactcagtacctgacccccagcctctcggacagccaccagcagccccctctggtctgggaactaatacgatggctacaggcagtggcgcaccaatggcagacaataacgagggcgccgacggagtgggtaattcctcgggaaattggcattgcgattccacatggatgggcgacagagtcatcaccaccagcacccgaacctgggccctgcccacctacaacaaccacctctacaaacaaatttccagccaatcaggagcctcgaacgacaatcactactttggctacagcaccccttgggggtattttgacttcaacagattccactgccacttttcaccacgtgactggcaaagactcatcaacaacaactggggattccgacccaagagactcaacttcaagctctttaacattcaagtcaaagaggtcacgcagaatgacggtacgacgacgattgccaataaccttaccagcacggttcaggtgtttactgactcggagtaccagctcccgtacgtcctcggctcggcgcatcaaggatgcctcccgccgttcccagcagacgtcttcatggtgccacagtatggatacctcaccctgaacaacgagagtcaggcagtaggacgctcttcattttactgcctggagtactttccttctcagatgctgcgtaccggaaacaactttaccttcagctacacttttgaggacgttcctttccacagcagctacgctcacagccagagtctgggccgtctcatgaatcctctcatcgaccagtacctgtattacttgagcagaacaaacactccaagtggaaccaccacgcagtcaaggcttcagttttctcaggccggagcgagtgacattcgggaccagtctaggaactggcttcctggaccctgttaccgccagcagcgagtatcaaagacatctgcggataacaacaacagtgaatactcgtggactggagctaccaagtaccacctcaatggcagagactctctggtgaatccgggcccggccatggcaagccacaaggacgatgaagaaaagttttttcctcagagcggggttctcatctttgggaagcaaggctcagagaaaacaaatgtggacattgaaaaggtcatgattacagacgaagaggaaatcaggacaaccaatcccgtggctacggagcagtatggttctgtatctaccaacctccagagaggcaacagacaagcagctaccgcagatgtcaacacacaaggcgttcttccaggcatggtctggcaggacagagatgtgtaccttcaggggcccatctgggcaaagattccacacacggacggacattttcacccctctcccctcatgggtggattcggacttaaacaccctcctccacagattctcatcaagaacaccccggtacctgcgaatccttcgaccaccttcagtgcggcaaagtttgcttccttcatcacacagtactccacgggacaggtcagcgtggagatcgagtgggagctgcagaaggaaaacagcaaacgctggaatcccgaaattcagtacacttccaactacaacaagtctgttaatgtggactttactgtggacactaatggcgtgtattcagagcctcgccccattggcaccagatacctgactcgtaatctgtaa

SEQ ID NO: 243 - protein, 735 aa, Adeno-associated virus
MAADGYLPDWLEDTLSEGIRQRWKLKPGPPPPEPAERHKDDSRGLVLPGYKYLGPFNGLDKGEPVNEADAAALEHDKAYDRQLDSGDNPYLKYNHADAEFQERLKEDTSFGGNLGRAVFQAKKRVLEPLGLVEEPVKTAPGKKRPVEHSPVEPDSSSGTGKAGQQPARKRLNFGQTGDADSVPDPQPLGQPPAAPSGLGTNTMATGSGAPMADNNEGADGVGNSSGNWHCDSTWMGDRVITTSTRTWALPTYNNHLYKQISSQSGASNDNHYFGYSTPWGYFDFNRFHCHFSPRDWQRLINNNWGFRPKRLNFKLFNIQVKEVTQNDGTTTIANNLTSTVQVFTDSEYQLPYVLGSAHQGCLPPFPADVFMVPQYGYLTLNNESQAVGRSSFYCLEYFPSQMLRTGNNFTFSYTFEDVPFHSSYAHSQSLGRLMNPLIDQYLYYLSRTNTPSGTTTQSRLQFSQAGASDIRDQSRNWLPGPCYRQQRVSKTSADNNNSEYSWTGATKYHLNGRDSLVNPGPAMASHKDDEEKFFPQSGVLIFGKQGSEKTNVDIEKVMITDEEEIRTTNPVATEQYGSVSTNLQRGNRQAATADVNTQGVLPGMVWQDRDVYLQGPIWAKIPHTDGHFHPSPLMGGFGLKHPPPQILIKNTPVPANPSTTFSAAKFASFITQYSTGQVSVEIEWELQKENSKRWNPEIQYTSNYNKSVNVDFTVDTNGVYSEPRPIGTRYLTRNL

SEQ ID NO: 244 - DNA, 2208 bp, Adeno-associated virus
  source 1..2208: mol_type = unassigned DNA
atggctgccgatggttatcttccagattggctcgaggacactctctctgaaggaataagacagcggtggaagctcaaacctggcccaccaccaccagagcccgcagagcggcataaggacgacagcaggggtcttgtgcttcctgggtacaagtacctcggacccttcaacggactcgacaagggagagccggtcaacgaggcagacgccgcggccctcgagcacgacaaagcctacgaccggcagctcgacagcggagacaacccgtacctcaagtacaaccacgccgacgcggagtttcaggagcgccttaaagaagatacgtcttttgggggcaacctcggacgagcagtcttccaggcgaaaaagagggtacttgaacctctgggcctggttgaggaacctgttaagacggctccgggaaaaaagaggccggtagagcactctcctgtggagccagactcctcctcgggaaccggaaaggcgggccagcagcctgcaagaaaaagattgaattttggtcagactggagacgcagactcagtacctgacccccagcctctcggacagccaccagcagccccctctggtctgggaactaatacgatggctacaggcagtggcgcaccaatggcagacaataacgagggcgccgacggagtgggtaattcctcgggaaattggcattgcgattccacatggatgggcgacagagtcatcaccaccagcacccgaacctgggccctgcccacctacaacaaccacctctacaaacaaatttccagccaatcaggagcctcgaacgacaatcactactttggctacagcaccccttgggggtattttgacttcaacagattccactgccacttttcaccacgtgactggcaaagactcatcaacaacaactggggattccgacccaagagactcaacttcaagctctttaacattcaagtcaaagaggtcacgcagaatgacggtacgacgacgattgccaataaccttaccagcacggttcaggtgtttactgactcggagtaccagctcccgtacgtcctcggctcggcgcatcaaggatgcctcccgccgttcccagcagacgtcttcatggtaccacagtatggatacctcaccctgaacaacgggagtcaggcagtaggacgctcttcattttactgcctggagtactttccttctcagatgctgcgtaccggaaacaactttaccttcagctacacttttgaggacgttcctttccacagcagctacgctcacagccagagtctgggccgtctcatgaatcctctcatcgaccagtacctgtattacttgagcagaacaaacactccaagtggaaccaccacgcagtcaaggcttcagttttctcaggccggagcgagtgacattcgggaccagtctaggaactggcttcctggaccctgttaccgccagcagcgagtatcaaagacatctgcggataacaacaacagtgaatactcgtggactggagctaccaagtaccacctcaatggcagagactctctggtgaatccgggcccggccatggcaagccacaaggacgatgaagaaaagttttttcctcagagcggggttctcatctttgggaagcaaggctcagagaaaacaaatgtggacattgaaaaggtcatgattacagacgaagaggaaatcaggacaaccaatcccgtggctacggagcagtatggttctgtatctaccaacctccagagaggcaacagacaagcagctaccgcagatgtcaacacacaaggcgttcttccaggcatggtctggcaggacagagatgtgtaccttcaggggcccatctgggcaaagattccacacacggacggacattttcacccctctcccctcatgggtggattcggacttaaacaccctcctccacagattctcatcaagaacaccccggtacctgcgaatccttcgaccaccttcagtgcggcaaagtttgcttccttcatcacacagtactccacgggacaggtcagcgtggagatcgagtgggagctgcagaaggaaaacagcaaacgctggaatcccgaaattcagtacacttccaactacaacaagtctgttaatgtggactttactgtggacactaatggcgtgtattcagagcctcgccccattggcaccagatacctgactcgtaatctgtaa

SEQ ID NO: 245 - protein, 735 aa, Adeno-associated virus
MAADGYLPDWLEDTLSEGIRQRWKLKPGPPPPEPAERHKDDSRGLVLPGYKYLGPFNGLDKGEPVNEADAAALEHDKAYDRQLDSGDNPYLKYNHADAEFQERLKEDTSFGGNLGRAVFQAKKRVLEPLGLVEEPVKTAPGKKRPVEHSPVEPDSSSGTGKAGQQPARKRLNFGQTGDADSVPDPQPLGQPPAAPSGLGTNTMATGSGAPMADNNEGADGVGNSSGNWHCDSTWMGDRVITTSTRTWALPTYNNHLYKQISSQSGASNDNHYFGYSTPWGYFDFNRFHCHFSPRDWQRLINNNWGFRPKRLNFKLFNIQVKEVTQNDGTTTIANNLTSTVQVFTDSEYQLPYVLGSAHQGCLPPFPADVFMVPQYGYLTLNNGSQAVGRSSFYCLEYFPSQMLRTGNNFTFSYTFEDVPFHSSYAHSQSLGRLMNPLIDQYLYYLSRTNTPSGTTTQSRLQFSQAGASDIRDQSRNWLPGPCYRQQRVSKTSADNNNSEYSWTGATKYHLNGRDSLVNPGPAMASHKDDEEKFFPQSGVLIFGKQGSEKTNVDIEKVMITDEEEIRTTNPVATEQYGSVSTNLQRGNRQAATADVNTQGVLPGMVWQDRDVYLQGPIWAKIPHTDGHFHPSPLMGGFGLKHPPPQILIKNTPVPANPSTTFSAAKFASFITQYSTGQVSVEIEWELQKENSKRWNPEIQYTSNYNKSVNVDFTVDTNGVYSEPRPIGTRYLTRNL

SEQ ID NO: 246 - DNA, 2208 bp, Adeno-associated virus
  source 1..2208: mol_type = unassigned DNA
atggctgccgatggttatcttccagattggctcgaggacactctctctgaaggaataagacagcggtggaagctcaaacctggcccaccaccaccagagcccgcagagcggcataaggacgacagcaggggtcttgtgcttcctgggtacaagtacctcggacccttcaacggactcgacaagggagagccggtcaacgaggcagacgccgcggccctcgagcacgacaaagcctacgaccggcagctcgacagcggagacaacccgtacctcaagtacaaccacgccgacgcggagtttcaggagcgccttaaagaagatacgtcttttgggggcaacctcggacgagcagtcttccaggcgaaaaagagggtactcgaacctctgggcctggttgaggaacctgttaagacggctccgggaaaaaagaggccggtagagcactctcctgtggagccagactcctcctcgggaaccggaaaggcgggccagcagcctgcaagaaaaagattgaattttggtcagactggagacgcagactcagtacctgacccccagcctctcggacagccaccagcagccccctctggtctgggaactaatacgatggctacaggcagtggcgcaccaatggcagacaataacgagggcgccgacggagtgggtaattcctcgggaaattggcattgcgattccacatggatgggcgacagagtcatcaccaccagcacccgaacctgggccctgcccacctacaacaaccacctctacaaacaaatttccagccaatcaggagcctcgaacgacaatcactactttggctacagcaccccttgggggtattttgacttcaacagattccactgccacttttcaccacgtgactggcaaagactcatcaacaacaactggggattccgacccaagagactcaacttcaagctctttaacattcaagtcaaagaggtcacgcagaatgacggtacgacgacgattgccaataaccttaccagcacggttcaggtgtttactgactcggagtaccagctcccgtacgtcctcggctcggcgcatcaaggatgcctcccgccgttcccagcagacgtcttcatggtgccacagtatggatacctcaccctgaacaacgggagtcaggcagcaggacgctcttcattttactgcctggagtactttccttctcagatgctgcgtaccggaaacaactttaccttcagctacacttttgaggacgttcctttccacagcagctacgctcacagccagagtctgggccgtctcatgaatcctctcatcgaccagtacctgtattacttgagcagaacaaacactccaagtggaaccaccacgcagtcaaggcttcagttttctcaggccggagcgagtgacattcgggaccagtctaggaactggcttcctggaccctgttaccgccagcagcgagtatcaaagacatctgcggataacaacaacagtgaatactcgtggactggagctaccaagtaccacctcaatggcagagactctctggtgaatccgggcccggccatggcaagccacaaggacgatgaagaaaagttttttcctcagagcggggttctcatctttgggaagcaaggctcagagaaaacaaatgtggacattgaaaaggtcatgattacagacgaagaggaaatcaggacaaccaatcccgtggctacggagcagtatggttctgtatctaccaacctccagagaggcaacagacaagcagctaccgcagatgtcaacacacaaggcgttcttccaggcatggtctggcaggacagagatgtgtaccttcaggggcccatctgggcaaagattccacacacggacggacattttcacccctctcccctcatgggtggattcggacttaaacaccctcctccacagattctcatcaagaacaccccggtacctgcgaatccttcgaccaccttcagtgcggcaaagtttgcttccttcatcacacagtactccacgggacaggtcagcgtggagatcgagtgggagctgcagaaggaaaacagcaaacgctggaatcccgaaattcagtacacttccaactacaacaagtccgttaatgtggactttactgtggacactaatggcgtgtattcagagcctcgccccattggcaccagatacctgactcgtaatctgtaa

SEQ ID NO: 247 - protein, 735 aa, Adeno-associated virus
MAADGYLPDWLEDTLSEGIRQRWKLKPGPPPPEPAERHKDDSRGLVLPGYKYLGPFNGLDKGEPVNEADAAALEHDKAYDRQLDSGDNPYLKYNHADAEFQERLKEDTSFGGNLGRAVFQAKKRVLEPLGLVEEPVKTAPGKKRPVEHSPVEPDSSSGTGKAGQQPARKRLNFGQTGDADSVPDPQPLGQPPAAPSGLGTNTMATGSGAPMADNNEGADGVGNSSGNWHCDSTWMGDRVITTSTRTWALPTYNNHLYKQISSQSGASNDNHYFGYSTPWGYFDFNRFHCHFSPRDWQRLINNNWGFRPKRLNFKLFNIQVKEVTQNDGTTTIANNLTSTVQVFTDSEYQLPYVLGSAHQGCLPPFPADVFMVPQYGYLTLNNGSQAAGRSSFYCLEYFPSQMLRTGNNFTFSYTFEDVPFHSSYAHSQSLGRLMNPLIDQYLYYLSRTNTPSGTTTQSRLQFSQAGASDIRDQSRNWLPGPCYRQQRVSKTSADNNNSEYSWTGATKYHLNGRDSLVNPGPAMASHKDDEEKFFPQSGVLIFGKQGSEKTNVDIEKVMITDEEEIRTTNPVATEQYGSVSTNLQRGNRQAATADVNTQGVLPGMVWQDRDVYLQGPIWAKIPHTDGHFHPSPLMGGFGLKHPPPQILIKNTPVPANPSTTFSAAKFASFITQYSTGQVSVEIEWELQKENSKRWNPEIQYTSNYNKSVNVDFTVDTNGVYSEPRPIGTRYLTRNL

SEQ ID NO: 248 - protein, 738 aa, Adeno-associated virus; identical to SEQ ID NO: 90

SEQ ID NO: 249 - DNA, 2217 bp, Adeno-associated virus
  source 1..2217: mol_type = unassigned DNA
atggctgctgacggttatcttccagattggctcgaggacaacctctctgagggcattcgcgagtggtgggacctgaaacctggagcccccaagcccaaggccaaccagcagaagcaggacgacggccggggtctggtgcttcctggctacaagtacctcggacccttcaacggactcgacaagggggagcccgtcaacgcggcggacgcagcggccctcgagcacgacaaggcctacgaccagcagctcaaagcgggtgacaatccgtacctgcggtataaccacgccgacgccgagtttcaggagcgtctgcaagaagatacgtcttttgggggcaacctcgggcgagcagtcttccaggccaagaagcgggttctcgaacctctcggtctggttgaggaagctgctaagacggctcctggaaagaagagaccggtagaaccgtcacctcagcgttcccccgactcctccacgggcatcggcaagaaaggccagcagcccgctaaaaagagactgaactttggtcagactggcgactcagagtcagtccccgaccctcaaccaatcggagaaccaccagcaggcccctctggtctgggatctggtacaatggctgcaggcggtggcgctccaatggcagacaataacgaaggcgccgacggagtgggtagttcctcaggaaattggcattgcgattccacatggctgggcgacagagtcatcaccaccagcacccgaacctgggccctgcccacctacaacaaccacctctacaagcaaatatccaatgggacatcgggaggaagcaccaacgacaacacctacttcggctacagcaccccctgggggtattttgacttcaacagattccactgccacttctcaccacgtgactggcagcgactcatcaacaacaactggggattccggccaaaaagactcagcttcaagctcttcaacatccaggtcaaggaggtcacgcagaatgaaggcaccaagaccatcgccaataaccttaccagcacgattcaggtatttacggactcggaataccagctgccgtacgtcctcggctccgcgcaccagggctgcctgcctccgttcccggcggacgtcttcatgattccccagtacggctaccttacactgaacaatggaagtcaagccgtaggccgttcctccttctactgcctggaatattttccatctcaaatgctgcgaactggaaacaattttgaattcagctacaccttcgaggacgtgcctttccacagcagctacgcacacagccagagcttggaccgactgatgaatcctctcatcgaccagtacctgtactacttatccagaactcagtccacaggaggaactcaaggtacccagcaattgttattttctcaagctgggcctgcaaacatgtcggctcaggctaagaactggctacctggaccttgctaccggcagcagcgagtctctacgacactgtcgcaaaacaacaacagcaactttgcttggactggtgccaccaaatatcacctgaacggaagagactctttggtaaatcccggtgtcgccatggcaacccacaaggacgacgaggaacgcttcttcccgtcgagtggagtcctgatgttcggaaaacagggtgctggaagagacaatgtggactacagcagcgttatgctaaccagcgaagaagaaattaaaaccactaaccccgtagccacagaacaatacggtgtggtggctgacaacttgcagcaaaccaatacagggcctattgtgggaaatgtcaacagccaaggagccttacctggcatggtctggcagaaccgagacgtgtacctgcagggtcccatctgggccaagattcctcacacggacggcaacttccacccttcaccgctaatgggaggatttggactgaagcacccacctcctcagatcctgatcaagaacacgccggtacctgcggatcctccaacaacgttcagccaggcgaaattggcttccttcattacgcagtacagcaccggacaggtcagcgtggaaatcgagtgggagctgcagaaggagaacagcaaacgctggaacccagagattcagtacacttcaaactactacaaatctacaaatgtggactttgctgtcaatacagagggaacttattctgagcctcgccccattggtactcgttacctcacccgtaatctgtaa

SEQ ID NO: 250 - protein, 738 aa, Adeno-associated virus
MAADGYLPDWLEDNLSEGIREWWDLKPGAPKPKANQQKQDDGRGLVLPGYKYLGPFNGLDKGEPVNAADAAALEHDKAYDQQLKAGDNPYLRYNHADAEFQERLQEDTSFGGNLGRAVFQAKKRVLEPLGLVEEAAKTAPGKKRPVEPSPQRSPDSSTGIGKKGQQPAKKRLNFGQTGDSESVPDPQPIGEPPAGPSGLGSGTMAAGGGAPMADNNEGADGVGSSSGNWHCDSTWLGDRVITTSTRTWALPTYNNHLYKQISNGTSGGSTNDNTYFGYSTPWGYFDFNRFHCHFSPRDWQRLINNNWGFRPKRLSFKLFNIQVKEVTQNEGTKTIANNLTSTIQVFTDSEYQLPYVLGSAHQGCLPPFPADVFMIPQYGYLTLNNGSQAVGRSSFYCLEYFPSQMLRTGNNFEFSYTFEDVPFHSSYAHSQSLDRLMNPLIDQYLYYLSRTQSTGGTQGTQQLLFSQAGPANMSAQAKNWLPGPCYRQQRVSTTLSQNNNSNFAWTGATKYHLNGRDSLVNPGVAMATHKDDEERFFPSSGVLMFGKQGAGRDNVDYSSVMLTSEEEIKTTNPVATEQYGVVADNLQQTNTGPIVGNVNSQGALPGMVWQNRDVYLQGPIWAKIPHTDGNCHPSPLMGGFGLKHPPPQILIKNTPVPADPPTTFSQAKLASFITQYSTGQVSVEIEWELQKENSKRWNPEIQYTSNYYKSTNVDFAVNTEGTYSEPRPIGTRYLTRNL

SEQ ID NO: 251 - protein, 738 aa, Adeno-associated virus
MAADGYLPDWLEDNLSEGIREWWDLKPGAPKPKANQQKQDDGRGLVLPGYKYLGPFNGLDKGEPVNAADAAALEHDKAYDQQLKAGDNPYLRYNHADAEFQERLQEDTSFGGNLGRAVFQAKKRVLEPLGLVEEGAKTAPGKKRPVEPSPQRSPDSSTGIGKKGQQPARKRLNFGRTGDSESVPDPQPIGEPPAAPSSVGSGTMAAGGGAPMADNNEGADGVGSSSGNWHCDSTWLGDRVITTSTRTWALPTYNNHLYKQISNGTSGGSTNDNTYFGYSTPWGYLDFNRFHCHFSPRDWQRLINNNWGFRPKRLSFKLFNIQVKEVTQNEGTKTIANNLASTIQVFTDSEYQPPYVLGSAHQGCLPPFPADVFMIPQYGYLTLNNGSQAVGRSSFYCLEYFPSQMLRTGNNFSFSYTFEDVPFHSSYAHSQSLDRLMNPLIDQYLYYLSRTQSTGGTAGTQQLLFSRAGPSNMSAQARNWLPGPCYRQQRVSTTLSQNNNSNFAWTGATKYHLNGRDSLVNPGVAMATNKDDEDRFFPSSGILMFGKQGAGKDNVDYSNVMLTSEEEIKTTNPVATEQYGVVADNLQQQNTAPTVGAVNSQGALPGMVWQNRDVYLQGPIWAKIPHTDGNFHPSPLMGGFGLKHPPPQILIKNTPVPADPPTAFNQAKLNSFIAQYSTGQVSVEIEWELQKENSKRWNPEIQYTSNYYKSTNADFAVNTEGVYSEPRPIGTRYLTRNL

SEQ ID NO: 252 - DNA, 2217 bp, Adeno-associated virus
  source 1..2217: mol_type = unassigned DNA
atggctgccgatggttatcttccagattggctcgaggacaacctctctgagggcattcgcgagtggtgggacctgaaacctggagccccgaaacccaaagccaaccagcaaaagcaggacgacggccggggtctggtgcttcctggctacaagtacctcggacccttcaacggactcgacaagggggagcccgtcaacgcggcggacgcagcggccctcgagcacgacaaggcctacgaccagcagctcaaagcgggtgacaatccgtacctgcggtataatcacgccgacgccgagtttcaggagcgtctgcaagaagatacgtcttttgggggcaacctcgggcgagcagtcttccaggccaagaagcgggttctcgaacctctcggtctggttgaggaaggcgctaagacggctcctggaaagaagagaccggtagagccgtcaccacagcgttcccccgactcctccacgggcatcggcaagaaaggccagcagcccgccagaaagagactcaatttcggtcggactggcgactcagagtcagtccccgaccctcaacctatcggagaacctccagcagcgccctctagtgtgggatctggtacaatggctgcaggcggtggcgcaccaatggcagacaataacgaaggtgccgacggagtgggtagttcctcgggaaattggcattgcgattccacatggctgggcgacagagttatcaccaccagcacccgaacctgggccctgcccacctacaacaaccacctctacaagcaaatctccaacgggacctcgggaggcagcaccaacgacaacacctactttggctacagcaccccctgggggtatcttgactttaacagattccactgccacttctcaccacgtgactggcagcgactcatcaacaacaactggggattccggcccaagagactcagcttcaagctcttcaacatccaggtcaaagaggtcacgcagaatgaaggcaccaagaccatcgccaataacctcgccagcaccatccaggtgtttacggactcggaataccagccgccgtacgtcctcggctctgcccaccagggctgcctgcctccgttcccggcggacgtcttcatgattcctcagtacggctacctgactctcaacaacggtagtcaggccgtgggacgttcctccttctactgcctggagtacttcccctctcagatgctgagaacgggcaacaacttttccttcagctacactttcgaggacgtgcctttccacagcagctacgcgcacagccagagtttggacaggctgatgaatcctctcatcgaccagtacctgtactacctgtcaagaacccagtctacgggaggcacagcgggaacccagcagttgctgttttctcgggccgggcctagcaacatgtcggctcaggccagaaactggctgcctggaccctgctacagacagcagcgcgtctccacgacactgtcgcaaaacaacaacagcaactttgcctggactggtgccaccaagtatcatctgaacggcagagactctctggtgaatccgggcgtcgccatggcaaccaacaaggacgacgaggaccgcttcttcccatccagcggcatcctcatgtttggcaagcagggagctggaaaagacaacgtggactatagcaacgtgatgctaaccagcgaggaagaaatcaagaccaccaaccccgtggccacagaacagtatggcgtggtggctgataacctacagcagcaaaacaccgctcctactgtgggggccgtcaacagccagggagccttacctggcatggtctggcagaaccgggacgtgtacctgcagggtcctatttgggccaagattcctcacacagatggcaactttcacccgtctcctttaatgggcggctttggacttaaacatccgcctcctcagatcctcatcaaaaacactcctgttcctgcggatcctccaacagcgttcaaccaggccaagctgaattctttcatcgcgcagtacagcaccggacaagtcagcgtggagatcgagtgggagctgcagaaggagaacagcaagcgctggaacccagagattcagtatacttccaactactacaaatctacaaatgcggactttgctgttaatactgagggtgtttactctgagcctcgccccattggcactcgttacctcacccgtaatctgtaa

SEQ ID NO: 253 - DNA, 2208 bp, Adeno-associated virus
  source 1..2208: mol_type = unassigned DNA
atggctgccgatggttatcttccagattggctcgaggacactctctctgaaggaataagacagtggtggaagctcaaacctggcccaccaccaccaaagcccgcagagcggcataaggacgacagcaggggtcttgtgcttcctgggtacaagtacctcggacccttcaacggactcgacaagggggagccggtcaacgaggcagacgccgcggccctcgagcacgacaaggcctacgaccggcagctcgacagcggagacaacccgtacctcaagtacaaccacgccgacgcagagtttcaggagcgccttaaagaagatacgtcttttgggggcaacctcggacgagcagtcttccaggcgaaaaagagggttcttgaacctctgggcctggttgaggagcctgttaagacggctccgggaaaaaagaggccggtagagcactctcctgtggagccagactcctcctcgggaaccggaaaagcgggccagcagcctgcaagaaaaagattaaattttggtcagactggagacgcagactccgtacctgacccccagcctctcggacagccaccagcagccccctctggtctgggatctactacaatggctacaggcagtggcgcaccaatggcagacaataacgagggtgccgatggagtgggtaattcctcaggaaattggcattgcgattcccaatggctgggcgacagagtcatcaccaccagcacccgaacctgggccctgcccacatacaacaaccacctctacaagcaaatctccagccaatcaggagccagcaacgacaaccactactttggctacagcaccccctgggggtattttgacttcaacagattccactgccacttttcaccacgtgactggcaaagactcgtcaacaacaaccggggattccggcccaaaagactcaacttcaagctctttaatattcaagtcaaagaggtcacgcagaatgacggtacgacgacgattgccaataaccttaccagcacggttcaggtgtttactgactcggagtaccagctcccgtacgtcctgggctcggcgcatcaaggatgcctcccgccgtttccagcggacgtcttcatggtcccacagtatggatacctcaccctgaacaacgggagtcaggcggtaggacgctcttccttttactgcctggagtactttccttctcagatgctgcgtactggaaacaactttcagttcagctacacttttgaagacgtgcctttccacagcagctacgctcacagccagagtctggatcggctgatgaatcctctgatcgaccagtacctgtattatctgaacaagacacaaacaaatagtggaactcttcagcagtctcggctactgtttagccaagctggaccaaccaacatgtctcttcaagctaaaaactggctgcctggaccttgctacagacagcagcgtctgtcaaaacaggcaaacgacaacaacaacagcaactttccctggactgcagctacaaagtatcatctaaatggccgggactcgttggttaatccaggaccagctatggccagtcacaaggatgacgaagaaaagtttttccccatgcatggaaccctgatatttggtaaacaaggaacaaatgccaacgacgcggatttggaaaatgtcatgattacagatgaagaagaaatcagggccaccaatcccgtggctacggagcagtacgggactgtgtcaaataatttgcaaaactcaaacactggtccaactactggaactgtcaatcaccaaggagcgttacctggtatggtgtggcaggatcgagacgtgtacctgcagggacccatttgggccaagattcctcacaccgatggacactttcatccttctccactgatgggaggttttggactcaaacacccgcctcctcagatcatgatcaaaaacactcccgttccagccaatcctcccacaaacttcagttctgccaagtttgcttctttcatcacacagtattccacgggacaggtcagcgtggagatcgagtgggagctgcagaaggagaacagcaaacgctggaatcccgaaattcagtacacttccaactacaacaagtctgttaatgtggactttactgtggacactaatggtgtgtattcagagcctcgccccattggcaccagatacctgactcgtaatctgtaa

SEQ ID NO: 254 - protein, 735 aa, Adeno-associated virus
MAADGYLPDWLEDTLSEGIRQWWKLKPGPPPPKPAERHKDDSRGLVLPGYKYLGPFNGLDKGEPVNEADAAALEHDKAYDRQLDSGDNPYLKYNHADAEFQERLKEDTSFGGNLGRAVFQAKKRVLEPLGLVEEPVKTAPGKKRPVEHSPVEPDSSSGTGKAGQQPARKRLNFGQTGDADSVPDPQPLGQPPAAPSGLGSTTMATGSGAPMADNNEGADGVGNSSGNWHCDSQWLGDRVITTSTRTWALPTYNNHLYKQISSQSGASNDNHYFGYSTPWGYFDFNRFHCHFSPRDWQRLVNNNRGFRPKRLNFKLFNIQVKEVTQNDGTTTIANNLTSTVQVFTDSEYQLPYVLGSAHQGCLPPFPADVFMVPQYGYLTLNNGSQAVGRSSFYCLEYFPSQMLRTGNNFQFSYTFEDVPFHSSYAHSQSLDRLMNPLIDQYLYYLNKTQTNSGTLQQSRLLFSQAGPTNMSLQAKNWLPGPCYRQQRLSKQANDNNNSNFPWTAATKYHLNGRDSLVNPGPAMASHKDDEEKFFPMHGTLIFGKQGTNANDADLENVMITDEEEIRATNPVATEQYGTVSNNLQNSNTGPTTGTVNHQGALPGMVWQDRDVYLQGPIWAKIPHTDGHFHPSPLMGGFGLKHPPPQIMIKNTPVPANPPTNFSSAKFASFITQYSTGQVSVEIEWELQKENSKRWNPEIQYTSNYNKSVNVDFTVDTNGVYSEPRPIGTRYLTRNL

SEQ ID NO: 255 - protein, 738 aa, Adeno-associated virus
MAADGYLPDWLEDNLSEGIREWWDLKPGAPKPKANQQKQDDGRGLVLPGYKYLGPFNGLDKGEPVNAADAAALEHDKAYDQQLKAGDNPYLRYNHADAEFQERLQEDTSFGGNLGRAVFQAKKRVLEPLGLVEEAAKTAPGKKRPVEPSPQRSPDSSTGIGKKGQQPAKKRLSFGQTGDSESVPDPQPIGEPPAGPSGLGSGTMAAGGGAPMADNNEGADGVGSSSGNWHCDSTWLGDRVITTSTRTWALPTYNNHLYKQISNGTSGGSTNDNTYFGYSTPWGYFDFNRFHCHFSPRDWQRLINNNWGFRPKRLSFKLFNIQVKEVTQNEGTKTIANNLTSTIQVFTDSEYQLPYVLGSAHQGCLPPFPADVFMIPQYGYLTLNNGSQAVGRSSFYCLEYFPSQMLRTGNNSEFSYTFEDVPFHSSYAHSQSLDRLMNPLIDQYLYYLSRTQSTGGTQGTQQLLFSQAGPANMSAQAKNWLPGPCYRQQRVSTTLSQNNNSNFAWTGATKYHLNGRDSLVNPGVAMATHKDDEERFFPSSGVLMFGKQGAGRDNVDYSSVMLTSEEEIKTTNPVATEQYGVVADNLQQTNTGPIVGNVNSQGALPGMVWQNRDVYLQGPIWAKIPHTDGNFHPSPLMGGFGLKHPPPQILIKNTPVPADPPTTFSQAKLASFITQYSTGQVSVEIEWELQKENSKRWNPEIQYTSNYYKSTNVDFAVNTEGTYSEPRPIGTRYLTRNL

SEQ ID NO: 256 - DNA, 2217 bp, Adeno-associated virus
  source 1..2217: mol_type = unassigned DNA
atggctgctgacggttatcttccagattggctcgaggacaacctctctgagggcattcgcgagtggtgggacctgaaacctggagcccccaagcccaaggccaaccagcagaagcaggacgacggccggggtctggtgcttcctggctacaagtacctcggacccttcaacggactcgacaagggggagcccgtcaacgcggcggacgcagcggccctcgagcacgacaaggcctacgaccagcagctcaaagcgggtgacaatccgtacctgcggtataaccacgccgacgccgagtttcaggagcgtctgcaagaagatacgtcttttgggggcaacctcgggcgagcagtcttccaggccaagaagcgggttctcgaacctctcggtctggttgaggaagctgctaagacggctcctggaaagaagagaccggtagaaccgtcacctcagcgttcccccgactcctccacgggcatcggcaagaaaggccagcagcccgctaaaaagagactgagctttggtcagactggcgactcagagtcagtccccgaccctcaaccaatcggagaaccaccagcaggcccctctggtctgggatctggtacaatggctgcaggcggtggcgctccaatggcagacaataacgaaggcgccgacggagtgggtagttcctcaggaaattggcattgcgattccacatggctgggcgacagagtcatcaccaccagcacccgaacctgggccctgcccacctacaacaaccacctctacaagcaaatatccaatgggacatcgggaggaagcaccaacgacaacacctacttcggctacagcaccccctgggggtattttgacttcaacagattccactgccacttctcaccacgtgactggcagcgactcatcaacaacaactggggattccggccaaaaagactcagcttcaagctcttcaacatccaggtcaaggaggtcacgcagaatgaaggcaccaagaccatcgccaataaccttaccagcacgattcaggtatttacggactcggaataccagctgccgtacgtcctcggctccgcgcaccagggctgcctgcctccgttcccggcggacgtcttcatgattccccagtacggctaccttacactgaacaatggaagtcaagccgtaggccgttcctccttctactgcctggaatattttccatctcaaatgctgcgaactggaaacaattctgaattcagctacaccttcgaggacgtgcctttccacagcagctacgcacacagccagagcttggaccgactgatgaatcctctcatcgaccagtacctgtactacttatccagaactcagtccacaggaggaactcaaggtacccagcaattgttattttctcaagctgggcctgcaaacatgtcggctcaggctaagaactggctacctggaccttgctaccggcagcagcgagtctctacgacactgtcgcaaaacaacaacagcaactttgcttggactggtgccaccaaatatcacctgaacggaagagactctttggtaaatcccggtgtcgccatggcaacccacaaggacgacgaggaacgcttcttcccgtcgagtggagtcctgatgtttggaaaacagggtgctggaagagacaatgtggactacagcagcgttatgctaaccagcgaagaagaaattaaaaccactaaccctgtagccacagaacaatacggtgtggtggctgacaacttgcagcaaaccaatacagggcctattgtgggaaatgtcaacagccaaggagccttacctggcatggtctggcagaaccgagacgtgtacctgcagggtcccatctgggccaagattcctcacacggacggcaacttccacccttcaccgctaatgggaggatttggactgaagcacccacctcctcagatcctgatcaagaacacgccggtacctgcggatcctccaacaacgttcagccaggcgaaattggcttccttcattacgcagtacagcaccggacaggtcagcgtggaaatcgagtgggagctgcagaaggagaacagcaaacgctggaacccagagattcagtacacttcaaactactacaaatctacaaatgtggactttgctgtcaatacagagggaacttattctgagcctcgccccattggtactcgttacctcacccgtaatctgtaa

SEQ ID NO: 257 - protein, 738 aa, Adeno-associated virus
MAADGYLPDWLEDNLSEGIREWWDLKPGAPKPKANQQKQDDGRGLVLPGYKYLGPFNGLDKGEPVNAADAAALEHDKAYDQQLKAGDNPYLRYNHADAEFQERLQEDTSFGGNLGRAVFQAKKRVLEPLGPVEEAAKTAPGKKRPVEPPPQRSPDSSTGIGKKGQQPAKKRLNFGQTGDSESVPDPQPIGEPPAGPSGLGSGTMAAGGGAPMADNNEGADGVGSSSGNWHCDSTWLGDRVITTSTRTWALPTYNNHLYKQISNGTSGGSTNDNTYFGYSTPWGYFDFNRFHCHFSPRDWQRLINNNWGFRPKRLSFKLFNIQVKEVTQNEGTKTVANNLTSTIQVFTDSEYQLPYVLGSAHQGCLPPFPADVFMIPQYGYLTLNNGSQAVGRSSFYCLEYFPSQMLRTGNNFEFSYTFEDVPFHSSYAHSQSLDRLMNPLIDQYLYYLSRTQSTGGTQGTQQLLFSQAGPANMSAQAKNWLPGPCYRQQRVSTTLSQNNNSNFAWTGATKYHLNGRDSLVNPGVAMATHKDDEERFFPSSGVLMFGKQGAGRDNVDYSSVMLTSEEEIKTTNPVATEQYGVVADNLQQTNTGPIVGNVNSQGALPGMVWQNRDVYLQGPIWAKIPHTDGNFHPSPLMGGFGLKHPPPQILIKNTPVPADPPTTFSQAKLASFITQYSTGQVSVEIEWELQKENSKRWNPEIQYTSNYYKSTNVDFAVNTEGTYSEPRPIGTRYLTRNL

SEQ ID NO: 258 - DNA, 2217 bp, Adeno-associated virus
  source 1..2217: mol_type = unassigned DNA
atggctgctgacggttatcttccagattggctcgaggacaacctctctgagggcattcgcgagtggtgggacctgaaacctggagcccccaagcccaaggccaaccagcagaagcaggacgacggccggggtctggtgcttcctggctacaagtacctcggacccttcaacggactcgacaagggggagcccgtcaacgcggcggacgcagcggccctcgagcacgacaaggcctacgaccagcagctcaaagcgggtgacaatccgtacctgcggtataaccacgccgacgccgagtttcaggagcgtctacaagaagatacgtcttttgggggcaacctcgggcgagcagtcttccaggccaagaagcgggttctcgaacctctcggtccggttgaggaagctgctaagacggctcctggaaagaagagaccggtagaaccgccacctcagcgttcccccgactcctccacgggcatcggcaagaaaggccagcagcccgctaaaaagagactgaactttggtcagactggcgactcagagtcagtccccgaccctcaaccaatcggagaaccaccagcaggcccctctggtctgggatctggtacaatggctgcaggcggtggcgctccaatggcagacaataacgaaggcgccgacggagtgggtagttcctcaggaaattggcattgcgattccacatggctgggcgacagagtcatcaccaccagcacccgaacctgggccctgcccacctacaacaaccacctctacaagcaaatatccaatgggacatcgggaggaagcaccaacgacaacacctacttcggctacagcaccccctgggggtattttgacttcaacagattccactgccacttctcaccacgtgactggcagcgactcatcaacaacaactggggattccggccaaaaagactcagcttcaagctcttcaacatccaggtcaaggaggtcacgcagaatgaaggcaccaagaccgtcgccaataaccttaccagcacgattcaggtatttacggactcggaataccagctgccgtacgtcctcggctccgcgcaccagggctgcctgcctccgttcccggcggacgtcttcatgattccccagtacggctaccttacactgaacaatggaagtcaagccgtaggccgttcctccttctactgcctggaatattttccatctcaaatgctgcgaactggaaacaattttgaattcagctacaccttcgaggacgtgcctttccacagcagctacgcacacagccagagcttggaccgactgatgaatcctctcatcgaccagtacctgtactacttatccagaactcagtccacaggaggaactcaaggtacccagcaattgttattttctcaagctgggcctgcaaacatgtcggctcaggctaagaactggctacctggaccttgctaccggcagcagcgagtctctacgacactgtcgcaaaacaacaacagcaactttgcttggactggtgccaccaaatatcacctgaacggaagagactctttggtaaatcccggtgtcgccatggcaacccacaaggacgacgaggaacgcttcttcccgtcgagtggagtcctgatgtttggaaaacagggtgctggaagagacaatgtggactacagcagcgttatgctaaccagcgaagaagaaattaaaaccactaaccctgtagccacagaacaatacggtgtggtggctgacaacttgcagcaaaccaatacagggcctattgtgggaaatgtcaacagccaaggagccttacctggcatggtctggcagaaccgagacgtgtacctgcagggtcccatctgggccaagattcctcacacggacggcaacttccacccttcaccgctaatgggaggatttggactgaagcacccacctcctcagatcctgatcaagaacacgccggtacctgcggatcctccaacaacgttcagccaggcgaaattggcttccttcattacgcagtacagcaccggacaggtcagcgtggaaatcgagtgggagctgcagaaggagaacagcaaacgttggaacccagagattcagtacacttcaaactactacaaatctacaaatgtggactttgctgtcaatacagagggaacttattctgagcctcgccccattggtactcgttacctcacccgtaatctgtaa

SEQ ID NO: 259 - protein, 738 aa, Adeno-associated virus
MAADGYLPDWLEDNLSEGIREWWDLKPGAPKPKANQQKQDDGRGLVLPGYKYLGPFNGLDKGEPVNAADAAALEHDKAYDQQLKAGDNPYLRYNHADAEFQERLQEDTSFGGNLGRAVFQAKKRVLEPLGLVEEAAKTAPGKKRPVEPSPQRSPDSSTGIGKKGQQPAKKRLNFGQTGDSESVPDPQPIGEPPAGPSGLGSGTMAAGGGAPMADNNEGADGVGSSSGNWHCDSTWLGDRVITTSTRTWALPTYNNHLYKQISNGTSGGSTNDNTYFGYSTPWGYFDFNRFHCHFSPRDWQRLINNNWGFRPKRLSFKLFNIQVKEVTQNEGTKTIANNLTSTIQVFTDSEYQLPYVLGSAHQGCLPPFPADVFMIPQYGYLTLNNGSQAVGRSSFYCLEYFPSQMLRTGNNFEFSYTFEDVPFHSSYAHSQSLDRLMNPLIDQYLYYLSRTQSTGGTQGTQQLLFSQAGPANMSAQAKNWLPGPCYRQQRVSTTLSQSNNSNFAWTGATKYHLNGRDSLVNPGVAMATHKDDEERFFPSSGVLMFGKQGAGRDNVDYSSVMLTSEEEIKTTNPVATEQYGVVADNLQQTNTGPIVGNVNSQGALPGMVWQNRDVYLQGPIWAKIPHTDGNFHPSPLMGGLGLKHPPPQILIKNTPVPADPPTTFSQAKLASFITQYSTGQVSVEIEWELQKENSKRWNPEIQYTSNYYKSTNVDFAVNTEGTYSEPRPIGTRYLTRNL

SEQ ID NO: 260 - DNA, 2217 bp, Adeno-associated virus
  source 1..2217: mol_type = unassigned DNA
atggctgctgacggttatcttccagattggctcgaggacaacctctctgagggcattcgcgagtggtgggacctgaaacctggagcccccaagcccaaggccaaccagcagaagcaggacgacggccggggtctggtgcttcctggctacaagtacctcggacccttcaacggactcgacaagggggagcccgtcaacgcggcggacgcagcggccctcgagcacgacaaggcctacgaccagcagctcaaagcgggtgacaatccgtacctgcggtataaccacgccgacgccgagtttcaggagcgtctgcaagaagatacgtcttttgggggcaacctcgggcgagcagtcttccaggccaagaagcgggttctcgaacctctcggtctggttgaggaagcggctaagacggctcctggaaagaagagaccggtagaaccgtcacctcagcgttcccccgactcctccacgggcatcggcaagaaaggccagcagcccgctaaaaagagactgaactttggtcagactggcgactcagagtcagtccccgaccctcaaccaatcggagaaccaccagcaggcccctctggtctgggatctggtacaatggctgcaggcggtggcgctccaatggcagacaataacgaaggcgccgacggagtgggtagttcctcaggaaattggcattgcgattccacatggctgggcgacagagtcatcaccaccagcacccgaacctgggccctgcccacctacaacaaccacctctacaagcaaatatccaatgggacatcgggaggaagcaccaacgacaacacctacttcggctacagcaccccctgggggtattttgacttcaacagattccactgccacttctcaccacgtgactggcagcgactcatcaacaacaactggggattccggccaaaaagactcagcttcaagctcttcaacatccaggtcaaggaggtcacgcagaatgaaggcaccaagaccatcgccaataaccttaccagcacgattcaggtatttacggactcggaataccagctgccgtacgtcctcggctccgcgcaccagggctgcctgcctccgttcccggcggacgtcttcatgattccccagtacggctaccttacactgaacaatggaagtcaagccgtaggccgttcctccttctactgcctggaatattttccatctcaaatgctgcgaactggaaacaattttgaattcagctacaccttcgaggacgtgcctttccacagcagctacgcacacagccagagcttggaccgactgatgaatcctctcatcgaccagtacctgtactacttatccagaactcagtccacaggaggaactcaaggtacccagcaattgttattttctcaagctgggcctgcaaacatgtcggctcaggctaagaactggctacctggaccttgctaccggcagcagcgagtctctacgacactgtcgcaaagcaacaacagcaactttgcttggactggtgccaccaaatatcacctgaacggaagagactctttggtaaatcccggtgtcgccatggcaacccacaaggacgacgaggaacgcttcttcccgtcgagtggagtcctgatgtttggaaaacagggtgctggaagagacaatgtggactacagcagcgttatgctaaccagcgaagaagaaattaaaaccactaaccctgtagccacagaacaatacggtgtggtggctgacaacttgcagcaaaccaatacagggcctattgtgggaaatgtcaacagccaaggagccttacctggcatggtctggcagaaccgagacgtgtacctgcagggtcccatctgggccaagattcctcacacggacggcaacttccacccttcaccgctaatgggaggacttggactgaagcacccacctcctcagatcctgatcaagaacacgccggtacctgcggatcctccaacaacgttcagccaggcgaaattggcttccttcattacgcagtacagcaccggacaggtcagcgtggaaatcgagtgggagctgcagaaggagaacagcaaacgctggaacccagagattcagtacacttcaaactactacaaatctacaaatgtggactttgctgtcaatacagagggaacttattctgagcctcgccccattggtactcgttacctcacccgtaatctgtaa

SEQ ID NO: 261 - protein, 737 aa, Adeno-associated virus
MAADGYLPDWLEDNLSEGIREWWDLKPGAPKPKANQQKQDDGRGLVLPGYKYLGPFNGLDKGEPVNAADAAALEHDKAYDQQLKAGDNPYPRYNHADAEFQERLQEDTPFGGNLGRAVFQAKKRVLEPLGLVEEAAKTAPGKKRPVEPSPQRSPDSSTGIGKKGQQPAKKRLNFGQTGDSESVPDPQPIGEPPAGPSGLGSGTMAAGGGAPMADNNEGADGVGNASGNWHCDSTWLGDRVITTSTRTWALPTYNNHLYKQISSASTGASNDNHYFGYSTPWGYFDFNRFHCHFSPRDWQRLINNNWGFRPKRLNFKLFNIQVKEVTTNDGVTTIANNLTSTVQVFSDSEYQLPYVLGSAHQGCLPPFPADVFMIPQYGYLTLNNGSQAVGRSSFYCLEYFPSQMLRTGNNFTFSYTFEEVPLHSSYAHSQSLDRLMNPLIVQYLYYLNRTQNQSGSAQNKDLLFSRGSPAGMSVQPKNWLPGPCYRQQRVSKTKTDNNNSNFTWTGASKYNLNGRESIINPGTAMASHKDDEDKFFPMSGVMIFGKESAGASNTALDNVMITDEEEIKATNPVATERFGTVAVNFQSSSTDPATGDVHAMGALPGMVWQDRDVYLQGPIWAKIPHTDGHFHPSPLMGGFGLKNPPPQILIKNTPVPANPPAEFSATKFASFITQYSTGQVSVEIEWELQKENSKRWNPEVQYTSNYAKSASVDFTVDNNGLYTEPRPIGTRYLTRPL

SEQ ID NO: 262 - protein, 737 aa, Adeno-associated virus
MAADGYLPDWLEDNLSEGIREWWDLKPGAPKPKANQQKQDDGRGLVLPGYKYLGPFNGLDKGEPVNAADAAALEHDKAYDQQLKAGDNPYPRYNHADAEFQERLQEDTSFGGNLGRAVFQAKKRVLEPLGLVEEAAKTAPGKKRPVEPSPQRSPDSSTGIGKKGQQPAKKRLNFGQTGDSESVPDPQPIGEPPAGPSGLGSGTMAAGGGAPMADNNEGADGVGNASGNWHCDSTWLGDRVITTSTRTWALPTYNNHLYKQISSASTGASNDNHYFGYSTPWGYFDFNRFHCHFSPRDWQRLINNNWGFRPKRLNFKLFNIQVKEVTTNDGVTTIANNLTSTVQVFSDSEYQLPYVLGSAHQGCLPPFPADVFMIPQYGYLTLNNGSQAVGRSSFYCLEYFPSQMLRTGNNFTFSYTFEEVPLHSSYAHSQSLDRLMNPLIDQYLYYLNRTQNQSGSAQNKDLLFSRGSPAGMSVQPKNWLPGPCYRQQRVSKTKTDNNNSNFTWTGASKYNLNGRESIINPGTAMASHKDDEDKFFPMSGVMIFGKESAGASNTALDNVMITDEEEIKATNPVATERFGTVAVNFQSSSTDPATGDVHAMGALPGMVWQDRDVYLQGPIWAKIPHTDGHFHPSPLMGGFGLKNPPPQILIKNTPVPANPPAEFSATKFASFITQYSTGQVSVEIEWELQKENSKRWNPEVQYTSNYAKSASVDFTVDNNGLYTEPRPIGTRYLTRPL

SEQ ID NO: 263 - DNA, 2214 bp, Adeno-associated virus
  source 1..2214: mol_type = unassigned DNA
atggctgctgacggttatcttccagattggctcgaggacaacctctctgagggcattcgcgagtggtgggacctgaaacctggagcccccaagcccaaggccaaccagcagaagcaggacgacggccggggtctggtgcttcctggctacaagtacctcggacccttcaacggactcgacaagggggagcccgtcaacgcggcggacgcagcggccctcgagcacgacaaggcctacgaccagcagctcaaagcgggtgacaatccgtacccgcggtataaccacgccgacgccgagtttcaggagcgtctgcaagaagatacgccttttgggggcaacctcgggcgagcagtcttccaggccaagaagcgggttctcgaacctctcggtctggttgaggaagctgctaagacggctcctggaaagaagagaccggtagaaccgtcacctcagcgttcccccgactcctccacgggcatcggcaagaaaggccagcagcccgctaaaaagagactgaactttggtcagactggcgactcagagtcagtccccgaccctcaaccaatcggagaaccaccagcaggcccctctggtctgggatctggtacaatggctgcaggcggtggcgctccaatggcagacaataacgaaggcgccgacggagtgggtaatgcctcaggaaattggcattgcgattccacatggctgggcgacagagtcatcaccaccagcacccgcacctgggccttgcccacctacaataaccacctctacaagcaaatctccagtgcttcaacgggggccagcaacgacaaccactacttcggctacagcaccccctgggggtattttgatttcaacagattccactgccacttttcaccacgtgactggcagcgactcatcaacaacaattggggattccggcccaagagactcaacttcaaactcttcaacatccaagtcaaggaggtcacgacgaatgatggcgtcacaaccatcgctaataaccttaccagcacggttcaagtcttctcggactcggagtaccagcttccgtacgtcctcggctctgcgcaccagggctgcctccctccgttcccggcggacgtgttcatgattccgcaatacggctacctgacgctcaacaatggcagccaagccgtgggacgttcatccttttactgcctggaatatttcccttctcagatgctgagaacgggcaacaactttaccttcagctacacctttgaggaagtgcctctccacagcagctacgcgcacagccagagcctggaccggctgatgaatcctctcatcgtccaatacctgtattacctgaacagaactcaaaatcagtccggaagtgcccaaaacaaggacttgctgttcagccgtgggtctccagctggcatgtctgttcagcccaaaaactggctacctggaccctgttatcggcagcagcgcgtttctaaaacaaaaacagacaacaacaacagcaattttacctggactggtgcttcaaaatataacctcaatgggcgtgaatccatcatcaaccctggcactgctatggcctcacacaaagacgacgaagacaagttctttcccatgagcggtgtcatgatttttggaaaagagagcgccggagcttcaaacactgcattggacaatgtcatgattacagacgaagaggaaattaaagccactaaccctgtggccaccgaaagatttgggaccgtggcagtcaatttccagagcagcagcacagaccctgcgaccggagatgtgcatgctatgggagcattacctggcatggtgtggcaagatagagacgtgtacctgcagggtcccatttgggccaaaattcctcacacagatggacactttcacccgtctcctcttatgggcggctttggactcaagaacccgcctcctcagatcctcatcaaaaacacgcctgttcctgcgaatcctccggcggagttttcagctacaaagtttgcttcattcatcacccaatactccacaggacaagtgagtgtggaaattgaatgggagctgcagaaagaaaacagcaagcgctggaatcccgaagtgcagtacacatccaattatgcaaaatctgccagcgttgattttactgtggacaacaatggactttatactgagcctcgccccattggcacccgttaccttacccgtcccctgtaa

SEQ ID NO: 264 - protein, 736 aa, Adeno-associated virus
MAADGYLPDWLEDTLSEGIRQWWKLRPGPPPPKPAERHKDDSRGLVLPGYKYLGPFNGLDKGEPVNEADAAALEHDKAYDRQLDSGDNPYLKYNHADAEFQERLKEDTSFGGNLGRAVFQAKKRVLEPLGLVEEGAETAPGKKRPVEQSPQGPDSSSGIGKTGQQPAKKRLNFGQTGDSESVPDPQPLGEPPATPAAVGPTTMASGGGAPMADNNEGADGVGNASGNWHCDSTWLGDRVITTSTRTWALPTYNNHLYKQISSASTGASNDNHYFGYSTPWGYFDFNRFHCHFSPRDWQRLINNNWGFRPKRLNFKLFNIQVKEVTTNDGVTTIANNLTSTVQVFSDSEYQLPYVLGSAHQGCLPPFPADVFMIPQYGYLTLNNGSQAVGRSSFYCLEYFPSQMLRTGNNFTFSYTFEEVPFHSSYAHSQSLDRLMNPLIDQYLYYPNRTQNQSGSAQNKDLLFSRGSPAGMSVQPKNWLPGPCYRQQRVSKTKTDNNNSNFTWTGASKYNLNGRESIINPGTAMASHKDDEDKFFPMSGVMIFGKESAGASNTALDNVMITDEEEIKATNPVATERFGTVAVNFQSSSTDPATGDVHAMGALPGMVWQGRDVYLQGPIWAKIPHTDGHFHPSPLMGGFGLKNPPPQILIKNTPVPANPPAEFSATKFASFITQYSTGQVSVEIEWELQKENSKRWNPEVQYTSNYAKSANVDFTVDNNGLYTEPRPIGTRYLTRPL

SEQ ID NO: 265 - DNA, 2211 bp, Adeno-associated virus
  source 1..2211: mol_type = unassigned DNA
atggctgccgatggttatcttccagattggctcgaggacactctctctgaaggaataagacagtggtggaagctcagacctggcccaccaccaccaaagcccgcagagcggcataaggacgacagcaggggtcttgtgcttcctgggtacaagtacctcggacccttcaacggactcgacaagggagagccggtcaacgaggcagacgccgcggccctcgagcacgacaaagcctacgaccggcagctcgacagcggagacaacccgtacctcaagtacaaccacgccgacgcggagtttcaggagcgccttaaagaagatacgtcttttgggggcaacctcgggcgagcagtcttccaggccaagaagcgggttctcgaacctctcggtctggttgaggaaggcgctgagacggctcctggaaagaaacgtccggtagagcagtcgccacaagggccagactcctcctcgggcatcggcaagacaggccagcagcccgctaaaaagagactcaattttggtcagactggcgactcagagtcagtccccgatccacaacctctcggagaacctccagcaacccccgctgctgtgggacctactacaatggcttcaggcggtggcgcaccaatggcagacaataacgaaggcgccgacggagtgggtaatgcctcaggaaattggcattgcgattccacatggctgggcgacagagtcatcaccaccagcacccgcacctgggccttgcccacctacaataaccacctctacaagcaaatctccagtgcttcaacgggggccagcaacgacaaccactacttcggctacagcaccccctgggggtattttgatttcaacagattccactgccacttttcaccacgtgactggcagcgactcatcaacaacaattggggattccggcccaagagactcaacttcaaactcttcaacatccaagtcaaggaggtcacgacgaatgatggcgtcacaaccatcgctaataaccttaccagcacggttcaagtcttctcggactcggagtaccagcttccgtacgtcctcggctctgcgcaccagggctgcctccctccgttcccggcggacgtgttcatgattccgcaatacggctacctgacgctcaacaatggcagccaagccgtgggacgttcatccttttactgcctggaatatttcccttctcagatgctgagaacgggcaacaactttaccttcagctacacctttgaggaagtgcctttccacagcagctacgcgcacagccagagcctggaccggctgatgaatcctctcatcgaccaatacctgtattacccgaacagaactcaaaatcagtccggaagtgcccaaaacaaggacttgctgtttagccgtgggtctccagctggcatgtctgttcagcccaaaaactggctacctggaccctgttatcggcagcagcgcgtttctaaaacaaaaacagacaacaacaacagcaattttacctggactggtgcttcaaaatataacctcaatgggcgtgaatccatcatcaaccctggcactgctatggcctcacacaaagacgacgaagacaagttctttcccatgagcggtgtcatgatttttggaaaagagagcgccggagcttcaaacactgcattggacaatgtcatgattacagacgaagaggaaattaaagccactaaccctgtggccaccgaaagatttgggaccgtggcagtcaatttccagagcagcagcacagaccctgcgaccggagatgtgcatgctatgggagcattacctggcatggtgtggcaaggtagagacgtgtacctgcagggtcccatttgggccaaaattcctcacacagatggacactttcacccgtctcctcttatgggcggctttggactcaagaacccgcctcctcagatcctcatcaaaaacacgcctgttcctgcgaatcctccggcggagttttcagctacaaagtttgcttcattcatcacccaatactccacaggacaagtgagtgtggaaattgaatgggagctgcagaaagaaaacagcaagcgctggaatcccgaagtgcagtacacatccaattatgcaaaatctgccaacgttgattttactgtggacaacaatggactttatactgagcctcgccccattggcacccgttaccttacccgtcccctgtaa

SEQ ID NO: 266 - protein, 736 aa, Adeno-associated virus
MAADGYLPDWLEDTLSEGIRQWWKLRPGPPPPKPAERHKDDSRGLVLPGYKYLGPFNGLDKGEPVNEADAAALEHDKAYDRQLDSGDNPYLKYNHADAEFQERLKEDTSFGGNLGRAVFQAKKRVLEPLGLVEEGAKTAPGKKRPVEQSPQGPDSSSGIGKTGQQPAKKRLNFGQTGDSESVPDPQPLGEPPATPAAVGPTTMASGGGAPMADNNEGADGVGNASGNWHCDSTWLGDRVITTSTRTWALPTYNNHLYKQISSASTGASNDNHYFGYSTPWGYFDFNRFHCHFSPRDWQRLINNNWGFRPKRLNFKLFNIQVKEVTTNDGVTTIANNLTSTVQVFSDSEYQLPYVLGSAHQGCLPPFPADVFMIPQYGYLTLNNGSQAVGRSSFYCLEYFPSQMLRTGNNFTFSYTFEEVPFHSSYAHSQSLDRLMNPLIDQYLYYPNRTQNQSGSAQNKDLLFSRGSPAGMSVQPKNWLPGPCYRQQRVSKTKTDNNNSNFTWTGASKYNLNGRESIINPGTAMASHKDDEDKFFPMSGVMIFGKESAGASNTALDNVMITDEEEIKATNPVATERFGTVAVNFQSSSTDPATGDVHAMGALPGMVWQGRDVYLQGPIWAKIPHTDGHFHPSPLMGGFGLKNPPPQILIKNTPVPANPPAEFSATKFASFITQYSTGQVSVEIEWELQKENSKRWNPEVQYTSNYAKSANVDFTVDNNGLYTEPRPIGTRYLTRPL

SEQ ID NO: 267 - protein, 736 aa, Adeno-associated virus
MAADGYLPDWLEDTLSEGIRQWWKLRPGPPPPKPAERHKDDSRGLVLPGYKYLGPFNGLDKGEPVNEADAAALEHDKAYDRQLDSGDNPYLKYNHADAEFQERLKEDTSFGGNLGRAVFQAKKRVLEPLGLVEEGAKTAPGKKRPVEQSPQGPDSSSGIGKTGQQPAKKRLNFGQTGDSESVPDPQPLGEPPATPAAVGPTTMASGGGAPMADNNEGADGVGNASGNWHCDSTWLGDRVITTSTRTWALPTYNNHLYKQISSASTGASNDNHYFGYSTPWGYFDFNRFHCHFSPRDWQRLINNNWGFRPKRLNFKLFNIQVKEVTTNDGVTTIANNLTSTVQVFSDSEYQLPYVLGSAHQGCLPPFPADVFMIPQYGYLTLNNGSQAVGRSSFYCLEYFPSQMLRTGNNFTFSYTFEEVPFHSSYAHSQSLDRLMNPLIDQYLYYLNRTQNQSGSAQNKDLLFSRGSPAGMSVQPKNWLPGPCYRQQRVSKTKTDNNNSNFTWTGASKYNLNGRESIINPGTAMASHKDDEDKFFPMSGVMIFGKESAGASNTALDNVMITDEEEIKATNPVATERFGTVAVNFQSSSTDPATGDVHAMGALPGMVWQGRDVYLQGPIWAKIPHTDGHFHPSPLMGGFGLKNPPPQILIKNTPVPANPPAEFSATKFASFITQYSTGQVSVEIEWELQKENSKRWNPEVQYTSNYAKSANVDFTVDNNGLYTEPRPIGTRYLTRPL

SEQ ID NO: 268 - protein, 736 aa, Adeno-associated virus
MAADGYLPDWLEDTLSEGIRQWWKLRPGPPPPKPAERHKDDSRGLVLPGYKYLGPFNGLDKGEPVNEADAAALEHDKAYDRQLDSGDNPYLKYNHADAEFQERLKEDTSFGGNLGRAVFQAKKRVLEPLGLVEEGAKTAPGKKRPVEQSPQGPDSSSGIGKTGQQPAKKRLNFGQTGDSESVPDPQPLGEPPATPAAVGPTTMASGGGAPMADNNEGADGVGNASGNWHCDSTWLGDRVITTSTRTWALPTYNNHLYKQISSASTGASNDNHYFGYSTPWGYFDFNRFHCHFSPRDWQRLINNNWGFRPKRLNFKLFNIQVKEVTTNDGVTTIANNLTSTVQVFSDSEYQLPYVLGSAHQGCLPPFPADVFMIPQYGYLTLNNGSQAVGRSSFYCLEYFPSQMLRTGNNFTFSYTFEEVPFHSSYAHSQSLDRLMNPLIDQYLYYLNRTQNQSGSAQNKDLLFSRGSPAGMSVQPKNWLPGPCYRQQRVSKTKTDNNNSNFTWTGASKYNLNGRESIINPGTAMASHKDDEDKFFPMSGVMIFGKESAGASNTALDNVMITDEEEIKATNPVATERFGTVAVNFQSSSTDPATGDVHAMGALPGMVWQDRDVYLQGPIWAKIPHTDGHFHPSPLMGGFGLKNPPPQILIKNTPVPANPPAEFSATKFASFITQYSTGQVSVEIEWELQKENSKRWNPEVQYTSNYAKSANVDFTVDNNGLYTEPRPIGTRYLTRPL

SEQ ID NO: 269 - DNA, 2208 bp, Adeno-associated virus
  source 1..2208: mol_type = unassigned DNA
atggctgccgatggctatcttccagattggctcgaggacactctctctgaaggaataagacagtggtggaagctcaaacctggcccaccaccaccaaagcccgcagagcggcatagggacgacagcaggggtcttgtgcttcctgggtacaagtacctcggacccttcaacggactcgacaagggagagccggtcaacgaggcagacgccgcggccctcgagcacgacaaagcctacgaccggcagctcgacagcggagacaacccgtacctcaagtacaaccacgccgacgcggagtttcaggagcgccttaaagaagatacgtcttttgggggcaacctcggacgagcagtcttccaggcgaaaaagagggttcttgaacctctgggcctggttgaggaacctgttaagacggctccgggaaaaaagaggccggtagagcactctcctgtggagccagactcctcctcgggaaccggaaaggcgggccagcagcctgcaagaaaaagattgaattttggtcagactggagacgcagactcagtacctgacccccagcctctcggacagccaccagcagccccctctggtctgggaactaatacgatggctacaggcagtggcgcaccaatggcagacaataacgagggcgccgacggagtgggtaattcctcgggaaattggcattgcgattccacatggatgggcgacagagtcatcaccaccagcacccgaacctgggccctgcccacctacaacaaccacctctacaaacaaatttccagccaatcaggagcctcgaacgacaatcactactttggctacagcaccccttgggggtattttgacttcaacagattccactgccacttttcaccacgtgactggcaaagactcatcaacaacaactggggattccgacccaagagactcaacttcaagctctttaacattcaagtcaaagaggtcacgcagaatgacggtacgacgacgattgccaataaccttaccagcacggttcaggtgtttactgactcggggtaccagctcccgtacgtcctcggctcggcgcatcaaggatgcctcccgccgttcccagcagacgtcttcatggtgccacagtatggataccccaccctgaacaacgggagtcaggcagtaggacgctcttcattttactgcctggagtactttccttctcagatgctgcgtaccggaaacaactttaccttcagctacacttttgaggacgttcctttccacagcagctacgctcacagccagagtctggaccgtctcatgaatcctctcatcgaccagtacctgtattacttgagcacaacaaacactccaagtggaaccaccacgcagtcaaggcttcagttttctcaggccggagcgagtgacattcgggaccagtctaggaactggcttcctggaccctgttaccgccagcagcgagtatcaaagacatctgcggataacaacaacagtgaatactcgtggactggagctaccaagtaccacctcaatggcagagactctctggtgaatccgggcccggccgtggcaagccacaaggacgatgaagaaaagttttttcctcagagcggggttctcatctttgggaagcaaggctcagagaaaacaaatgtggacattgaaaaggtcatgattacagacgaagaggaaatcaggacaaccaatcccgtggctacggagcagtatggttctgtatctaccaacctccagagaggcaacagacaagcagctaccgcagatgtcaacacacaaggcgttcttccaggcatggtctggcaggacagagatgtgtaccttcaggggcccatctgggcaaagattccacacacggacggacattttcacccctctcccctcatgggtggattcggacttaaacaccctcctccacagattctcatcaagaacaccccggtacctgcgaatccttcgaccaccttcagtgcggcaaagtttgcttccttcatcacacagtactccacgggacaggtcagcgtggagatcgagtgggagctgcagaaggaaaacagcaaacgctggaatcccgaaattcagtacacttccaactacaacaagtctgttaatgtggactttactgtggacactaatggcgtgtattcagagcctcgccccattggcaccagatacctgactcgtaatctgtaa

SEQ ID NO: 270 - protein, 735 aa, Adeno-associated virus
MAADGYLPDWLEDTLSEGIRQWWKLKPGPPPPKPAERHRDDSRGLVLPGYKYLGPFNGLDKGEPVNEADAAALEHDKAYDRQLDSGDNPYLKYNHADAEFQERLKEDTSFGGNLGRAVFQAKKRVLEPLGLVEEPVKTAPGKKRPVEHSPVEPDSSSGTGKAGQQPARKRLNFGQTGDADSVPDPQPLGQPPAAPSGLGTNTMATGSGAPMADNNEGADGVGNSSGNWHCDSTWMGDRVITTSTRTWALPTYNNHLYKQISSQSGASNDNHYFGYSTPWGYFDFNRFHCHFSPRDWQRLINNNWGFRPKRLNFKLFNIQVKEVTQNDGTTTIANNLTSTVQVFTDSGYQLPYVLGSAHQGCLPPFPADVFMVPQYGYPTLNNGSQAVGRSSFYCLEYFPSQMLRTGNNFTFSYTFEDVPFHSSYAHSQSLDRLMNPLIDQYLYYLSTTNTPSGTTTQSRLQFSQAGASDIRDQSRNWLPGPCYRQQRVSKTSADNNNSEYSWTGATKYHLNGRDSLVNPGPAVASHKDDEEKFFPQSGVLIFGKQGSEKTNVDIEKVMITDEEEIRTTNPVATEQYGSVSTNLQRGNRQAATADVNTQGVLPGMVWQDRDVYLQGPIWAKIPHTDGHFHPSPLMGGFGLKHPPPQILIKNTPVPANPSTTFSAAKFASFITQYSTGQVSVEIEWELQKENSKRWNPEIQYTSNYNKSVNVDFTVDTNGVYSEPRPIGTRYLTRNL

SEQ ID NO: 271 - DNA, 2211 bp, Adeno-associated virus
  source 1..2211: mol_type = unassigned DNA
atggctgccgacggttatcttccagattggctcgaggacactctctctgaaggaataagacagtggtggaagctcaaacctggcccaccaccaccaaagcccgcagagcggcataaggacgacagcaggggtcttgtgcttcctgggtacaagtacctcggacccttcaacggactcgacaagggagagccggtcaacgaggcagacgccgcggccctcgagcacgacaaagcctacgaccggcagctcgacagcggagacaacccgtacctcaagtacaaccacgccgacgcggagtttcaggagcgccttaaagaagatacgtcttttgggggcaacctcgggcgggcagtcttccaggccaagaagcgggttctcgaacctctcggtctggttgaggaaggcgctaagacggctcctggaaagaaacgtccggtagagcagtcgccacaagagccagactccccctcgggcatcggcaagacaggccagcagcccgctaaaaagagactcaattttggtcagactggcgactcagagtcagtccccgatccacaacctctcggagaacctccagcaacccccgctgctgtgggacctactacaatggcttcaggcggtggcgcaccaatggcagacaataacgaaggcgccgacggagtgggtaatgcctcaggaaattggcactgcgattccacatggctgggcgacagagtcatcaccaccagcacccgcacctgggccttgcccacctacaataaccacctctacaagcaaatctccagtgcttcaacgggggccagcaacgacaaccactacttcggctacagcaccccctgggggtattttgatttcaacagattccactgccacttttcaccacgtgactggcagcgactcatcaacaacaattggggattccggcccaagagactcaacttcaaactcttcaacatccaagtcaaggaggtcacgacgaatgatggcgtcacaaccatcgctaataaccttaccagcacggttcaagtcttctcggactcggagtaccagcttccgtacgtcctcggctctgcgcaccagggccgcctccctccgttcccggcggacgtgttcatgattccgcaatacggctacctgacgctcaacaatggcagccaagccgtgggacgttcatcctcttactgcctggaatatttcccttctcagatgctgagaacgggcaacaactttaccttcagctacacctttgaggaagtgcctctccacagcagctgcgcgcacagccagagcctggaccggctgatgaatcctctcatcgaccaatacctgtattacctgaacagaactcaaaatcagtccggaagtgcccaaaacagggacttgctgttcagccgtgggtctccagctggcatgtctgttcagcccaaaaactggctacctggaccctgttatcggcagcagcgcgtttctaaaacaaaaacagacaacaacaacagcaattttacctggactggtgcttcaaaatataacctcaatgggcgtgaatccatcatcaaccctggcactgctatggcctcacacaaagacgacgaagacaagttctttcccatgagcggtgtcatgatttttggaaaagagagcgccggagcttcaaacactgcattggacaatgtcatgattacagacgaagaggaaattaaagccactaaccctgtggccaccgaaagatttgggaccgtggcagtcaatttccagagcagcagcacagaccctgcgaccggagatgtgcatgctatgggagcattacctggcatggtgtggcaagatagagacgtgtacctgcagggtcccatttgggccaaaattcctcacacagatggacactttcacccgtctcctcttatgggcggctttggactcaagaacccgcctcctcagatcctcatcaaaaacacgcctgttcctgcgaatcctccggcggagttttcagctacaaagtttgcttcattcatcacccaatactccgcaggacaagtgagtgtggaaattgaatgggagctgcagaaagaaaacagcaagcgctggaatcccgaagtgcagtacacatccaattatgcaaaatctgccaacgttgattttactgtggacaacaatggactttatactgagcctcgccccattggcacccgttaccttacccgtcccctgtaa

SEQ ID NO: 272 - protein, 736 aa, Adeno-associated virus
MAADGYLPDWLEDTLSEGIRQWWKLKPGPPPPKPAERHKDDSRGLVLPGYKYLGPFNGLDKGEPVNEADAAALEHDKAYDRQLDSGDNPYLKYNHADAEFQERLKEDTSFGGNLGRAVFQAKKRVLEPLGLVEEGAKTAPGKKRPVEQSPQEPDSPSGIGKTGQQPAKKRLNFGQTGDSESVPDPQPLGEPPATPAAVGPTTMASGGGAPMADNNEGADGVGNASGNWHCDSTWLGDRVITTSTRTWALPTYNNHLYKQISSASTGASNDNHYFGYSTPWGYFDFNRFHCHFSPRDWQRLINNNWGFRPKRLNFKLFNIQVKEVTTNDGVTTIANNLTSTVQVFSDSEYQLPYVLGSAHQGRLPPFPADVFMIPQYGYLTLNNGSQAVGRSSSYCLEYFPSQMLRTGNNFTFSYTFEEVPLHSSCAHSQSLDRLMNPLIDQYLYYLNRTQNQSGSAQNRDLLFSRGSPAGMSVQPKNWLPGPCYRQQRVSKTKTDNNNSNFTWTGASKYNLNGRESIINPGTAMASHKDDEDKFFPMSGVMIFGKESAGASNTALDNVMITDEEEIKATNPVATERFGTVAVNFQSSSTDPATGDVHAMGALPGMVWQDRDVYLQGPIWAKIPHTDGHFHPSPLMGGFGLKNPPPQILIKNTPVPANPPAEFSATKFASFITQYSAGQVSVEIEWELQKENSKRWNPEVQYTSNYAKSANVDFTVDNNGLYTEPRPIGTRYLTRPL

SEQ ID NO: 273 - protein, 736 aa, Adeno-associated virus
MAADGYLPDWLEDTLSEGIRQWWKLKPGPPPPKPAERHKDDSRGLVLPGYKYLGPFNGLDKGEPVNEADAAALEHDKAYDRQLDSGDNPYLKYNHADAEFQERLKEDTSFGGNLGRAVFQAKKRVLEPLGLVEEGAKTAPGKKRPVEQSPQEPDSSSGIGKTGQQPAKKRLNFGQTGDSESVPDPQPLGEPPATPAAVGPTTMASGGGAPMADNNEGADGVGNASGNWHCDSTWLGDRVITTSTRTWALPTYNNHLYKQISSASTGASNDNHYFGYSTPWGYFDFNRFHCHFSPRDWQRLINNNWGFRPKRLNFKLFNIQVKEVTTNDGVTTIANNLTSTVQVFSDSEYQLPYVLGSAHQGCLPPFPADVFMIPQYGYLTLNNGSQAVGRSSFYCLEYFPSQMLRTGNNFTFSYTFEEVPLHSSCAHSQSLDRLMNPLIDQYLYYLNRTQNQSGSAQNRDLLFSRGSPAGMSVQPKNWLPGPCYRQQRVSKTKTDNNNSNFTWTGASKYNLNGRESIINPGTAMASHKDDEDKFFPMSGVMIFGKESAGASNTALDNVMITDEEEIKATNPVATERFGTVAVNFQSSSTDPATGDVHAMGALPGMVWQDRDVYLQGPIWAKIPHTDGHFHPSPLMGGFGLKNPPPQILIKNTPVPANPPAEFSATKFASFITQYSTGQVSVEIEWELQKENSKRWNPEVQYTSNYAKSANVDFTVDNNGLYTEPRPIGTRYLTRPL

SEQ ID NO: 274 - DNA, 2208 bp, Adeno-associated virus
  source 1..2208: mol_type = unassigned DNA
atggctgccgatggctatcttccagattggctcgaggacactctctctgaaggaataagacagtggtggaagctcaaacctggcccaccaccaccaaagcccgcagagcggcatagggacgacagcaggggtcttgtgcttcctgggtacaagtacctcggacccttcaacggactcgacaagggagagccggtcaacgaggcagacgccgcggccctcgagcacgacaaagcctacgaccggcagctcgacagcggagacaacccgtacctcaagtacaaccacgccgacgcggagtttcaggagcgccttaaagaagatacgtcttttgggggcaacctcggacgagcagtcttccaggcgaaaaagagggttcttgaacctctgggcctggttggggaacctgttaagacggctccgggaaaaaagaggccggtagagcactctcctgtggagccagactcctcctcgggaaccggaaaggcgggccagcagcctgcaagaaaaagattgaattttggtcagactggagacgcagactcagtacctgacccccagcctctcggacagccaccagcagccccctctggtctgggaactaatacgatggctacaggcagtggcgcaccaatggcagacaataacgagggcgccgacggagtgggtaattcctcgggaaattggcattgcgattccacatggatgggcgacagagtcatcaccaccagcacccgaacctgggccctgcccacctacaacaaccacctctacaaacaaatttccagccaatcaggagcctcgaacgacagtcactactttggctacagcaccccttgggggtattttgacttcaacagattccactgccacttttcaccacgtgactggcaaagactcatcaacaacaactggggattccgacccaagagactcaacttcaagctctttaacattcaagtcaaagaggtcacgcagaatgacggtacgacgacgattgccaataaccttaccagcacggttcaggtgtttactgactcggagtaccagctcccgtacgtcctcggctcggcgcatcaaggatgcctcccgccgttcccagcagacgtcttcatggtgccacagtatggatacctcaccctgaacaacgggagtcaggcagtaggacgctcttcattttactgcctggagtactttccttctcagatgctgcgtaccggaaacaactttaccttcagctacacttttgaggacgttcctttccacagcagctacgctcacagccagagtctggaccgtctcatgaatcctctcatcgaccagtacctgtattacttgagcacaacaaacactccaagtggaaccaccacgcagtcaaggctccagttttctcaggccggagcgagtgacattcgggaccagtctaggaactggcttcctggaccctgttaccgccagcagcgagtatcaaagacatctgcggataacaacaacagtgaatactcgtggactggagctaccaagtaccacctcaatggcagagactctctggtgaatccgggcccggccatggcaagccacaaggacaatgaagaaaagttttttcctcagagcggggttctcatctttgggaagcaaggctcagagaaaacaaatgtggacattgaaaaggtcatgattacagacgaagaggaaatcaggacaaccaatcccgtggctacggagcagtatggttctgtatctaccaacctccagagaggcaacagacaagcagctaccgcagatgtcaacacacaaggcgttcttccaggcatggtctggcaggacagagatgtgtaccttcaggggcccatctgggcaaagattccacacacggacggacattttcacccctctcccctcatgggtggattcggacttaaacaccctcctccacagattctcatcaagaacaccccggtacctgcgaatccttcgaccaccttcagtgcggcaaagtttgcttccttcatcacacagtactccacgggacaggtcagcgtggagatcgagtgggagctgcagaaggaaaacagcaaacgctggaatcccgaaattcagtacacttccaactacaacaagtctgttaatgtggactttactgtggacactaatggcgtgtattcagagcctcgccccattggcaccagatacctgactcgtaatctgtaa

SEQ ID NO: 275 - protein, 735 aa, Adeno-associated virus
MAADGYLPDWLEDTLSEGIRQWWKLKPGPPPPKPAERHRDDSRGLVLPGYKYLGPFNGLDKGEPVNEADAAALEHDKAYDRQLDSGDNPYLKYNHADAEFQERLKEDTSFGGNLGRAVFQAKKRVLEPLGLVGEPVKTAPGKKRPVEHSPVEPDSSSGTGKAGQQPARKRLNFGQTGDADSVPDPQPLGQPPAAPSGLGTNTMATGSGAPMADNNEGADGVGNSSGNWHCDSTWMGDRVITTSTRTWALPTYNNHLYKQISSQSGASNDSHYFGYSTPWGYFDFNRFHCHFSPRDWQRLINNNWGFRPKRLNFKLFNIQVKEVTQNDGTTTIANNLTSTVQVFTDSEYQLPYVLGSAHQGCLPPFPADVFMVPQYGYLTLNNGSQAVGRSSFYCLEYFPSQMLRTGNNFTFSYTFEDVPFHSSYAHSQSLDRLMNPLIDQYLYYLSTTNTPSGTTTQSRLQFSQAGASDIRDQSRNWLPGPCYRQQRVSKTSADNNNSEYSWTGATKYHLNGRDSLVNPGPAMASHKDNEEKFFPQSGVLIFGKQGSEKTNVDIEKVMITDEEEIRTTNPVATEQYGSVSTNLQRGNRQAATADVNTQGVLPGMVWQDRDVYLQGPIWAKIPHTDGHFHPSPLMGGFGLKHPPPQILIKNTPVPANPSTTFSAAKFASFITQYSTGQVSVEIEWELQKENSKRWNPEIQYTSNYNKSVNVDFTVDTNGVYSEPRPIGTRYLTRNL

SEQ ID NO: 276 - protein, 737 aa, Adeno-associated virus
RMAADGYLPDWLEDNLSEGIREWWDLKPGAPKPKANQQKQDDGRGLVLPGYKYLGPFNGLDKGEPVNAADAAALEHDKAYDQQLKAGDNPYLRYNHADAEFQERLQEDTSFGGNLGRAVFQAKKRVLEPLGLVEEGAKTAPGKKRPVEQSPQEPDSSSGIGKTGQQPAKKRLNFGQTGDSESVPDPQPLGEPPATPAAVGPTTMASGGGAPMADNNEGADGVGNASGNWHCDSTWLGDRVITTSTRTWALPTYNNHLYKQISSTSTGASNDNHYFGYGTPWGYFDFNRFHCHFSPRDWQRLINNNWGFRPKRLNFKLFNIQVEEVTTNDGVTTIANNLTSTVQVFSDSEYQLPYVLGSAHQGCLPPFPADVFMIPQYGYLTLNNGSQAVGRSSFYCLEYFPSQMLRTGNNFTFSYTFEEVPFHSSYAHSQSLDRLMNPLIDQYLYYLNRTQNQSGSAQNKDLLFSRGSPAGMSVQPKNWLPGPCYRQQRVSKTKTDNNNSNFTWTGASKYNLNGRESIINPGTAVASHKDDEDKFFPMSGVMIFGKESAGASSTALDNVMITDEEEIKATNPVATERFGTVAVNFQSSSTDPATGDVHAMGALPGMVWQDRDVYLQGPIWAKIPHTDGHFHPSPLMGGFGLKNPPPQILIKNTPVPANPPAEFSATKFASFITQYSTGQVSVEIEWELQKENSKRWNPEVQYTSNYAKSANVDFTVDNNGLYTEPRPIGTRYLTRPL

SEQ ID NO: 277 - protein, 736 aa, Adeno-associated virus
MAADGYLPDWLEDNLSEGIREWWDLKPGAPKPKANQQKQDDGRGLVLPGYKYLGPFNGLDKGEPVNAADAAALEHDKAYDQQLKAGDNPYLRYNHADAEFQERLQEDTSFGGNLGRAVFQAKKRVLEPLGLVEEGAKTAPGKKRPVEQSPQEPDSSSGIGKTGQQPAKKRLNFGQTGDSESVPDPQPLGEPPATPAAVGPTTMASGGGAPMADNNEGADGVGNASGNWHCDSTWLGDRVITTSTRTWALPTYNNHLYKQISSTSTGASNDNHYFGYGTPWGYFDFNRFHCHFSPRDWQRLINNNWGFRPKRLNFKLFNIQVEEVTTNDGVTTIANNLTSTVQVFSDSEYQLPYVLGSAHQGCLPPFPADVFMIPQYGYLTLNNGSQAVGRSSFYCLEYFPSQMLRTGNNFTFSYTFEEVPFHSSYAHSQSLDRLMNPLIDQYLYYLNRTQNQSGSAQNKDLLFSRGSPAGMSVQPKNWLPGPCYRQQRVSKTKTDNNNSNFTWTGASKYNLNGRESIINPGTAVASHKDDEDKFFPMSGVMIFGKESAGASSTALDNVMITDEEEIKATNPVATERFGTVAVNFQSSSTDPATGDVHAMGALPGMVWQDRDVYLQGPIWAKIPHTDGHFHPSPLMGGFGLKNPPPQILIKNTPVPANPPAEFSATKFASFITQYSTGQVSVEIEWELQKENSKRWNPEVQYTSNYAKSANVDFTVDNNGLYTEPRPIGTRYLTRPL

SEQ ID NO: 278 - DNA, 2211 bp, Adeno-associated virus
  source 1..2211: mol_type = unassigned DNA
atggctgccgatggttatcttccagattggctcgaggacaacctctctgagggcattcgcgagtggtgggacttgaaacctggagccccgaagcccaaagccaaccagcaaaagcaggacgacggccggggtctggtgcttcctggctacaagtacctcggacccttcaacggactcgacaagggggagcccgtcaacgcggcggacgcagcggccctcgagcacgacaaggcctacgaccagcagctcaaagcgggtgacaatccgtacctgcggtataaccacgccgacgccgagtttcaggagcgtctgcaagaagatacgtcttttgggggcaacctcgggcgagcagtcttccaggccaagaagcgggttctcgaacctctcggtctggttgaggaaggcgctaagacggctcctggaaagaaacgtccggtagagcagtcgccacaagagccagactcctcctcgggcatcggcaagacaggccagcagcccgctaaaaagagactcaattttggccagactggcgactcagagtcagtccccgatccacaacctctcggagaacctccagcaacccccgctgctgtgggacctactacaatggcttcaggcggtggcgcaccaatggcagacaataacgaaggcgccgacggagtgggtaatgcctcaggaaattggcattgcgattccacatggctgggcgacagagtcatcaccaccagcacccgcacctgggccttgcccacctacaataaccacctctacaagcaaatctccagtacttcaacgggggccagcaacgacaaccactacttcggctacggcaccccctgggggtattttgatttcaacagattccactgccacttttcaccacgtgactggcagcgactcatcaacaacaattggggattccggcccaagagactcaacttcaaactcttcaacatccaagtcgaggaggtcacgacgaatgatggcgtcacaaccatcgctaataaccttaccagcacggttcaagtcttctcggactcggagtaccagcttccgtacgtcctcggctctgcgcaccagggctgcctccctccgttcccggcggacgtgttcatgattccgcaatacggctacctgacgctcaacaatggcagccaagccgtgggacgttcatccttttactgcctggaatatttcccttctcagatgctgagaacgggcaacaactttaccttcagctacacctttgaggaagtgcctttccacagcagctacgcgcacagccagagcctggaccggctgatgaatcctctcatcgaccaatacctgtattacctgaacagaacacaaaatcagtccggaagtgcccaaaacaaggacttgctgtttagccgtgggtctccagctggcatgtctgttcagcccaaaaactggctacctggaccctgttatcggcagcagcgcgtttctaaaacaaaaacagacaacaacaacagcaattttacctggactggtgcttcaaaatataacctcaatgggcgtgaatccatcatcaaccctggcaccgctgtggcctcacacaaagacgacgaagacaagttctttcccatgagcggtgtcatgatttttggaaaagagagcgccggagcttcaagcactgcattggacaatgtcatgattacagacgaagaggaaattaaagccactaaccctgtggccaccgaaagatttgggaccgtggcagtcaatttccagagcagcagcacagaccctgcgaccggagatgtgcatgctatgggagcattacctggcatggtgtggcaagatagagacgtgtacctgcagggtcccatttgggccaaaattcctcacacagatggacactttcacccgtctcctcttatgggcggctttggactcaagaacccgcctcctcagatcctcatcaaaaacacgcctgttcctgcgaatcctccggcggagttttcagctacaaagtttgcttcattcatcacccaatactccacaggacaagtgagtgtggaaattgaatgggagctgcagaaagaaaacagcaagcgctggaatcccgaagtgcagtacacatccaattatgcaaaatctgccaacgttgattttactgtggacaacaatggactttatactgagcctcgccccattggcacccgttaccttacccgtcccctgtaa

SEQ ID NO: 279 - protein, 737 aa, Adeno-associated virus
RMAADGYLPDWLEDNLSEGIREWWDLKPGAPKPKANQQKQDDGRGLVLPGYKYLGPFNGLDKGEPVNAADAAALEHDKAYDQQLKAGDNPYLRYNHADAEFQERLQEDTSFGGNLGRAVFQAKKRVLEPLGLVEEGAKTAPGKKRPVEQSPQEPDSSSGIGKTGQQPAKKRLNFGQTGDSESVPDPQPLGEPPATPAAVGPTTMASGGGAPMADNNEGADGVGNASGNWHCDSTWLGDRVITTSTRTWALPTYNNHLYKQISSTSTGASNDNHYFGYSTPWGYFDFNRFHCHFSPRDWQRLINNNWGFRPKRLNFKLFNIQVEEVTTNDGVTTIANNLTSTVQVFSDSEYQLPYVLGSAHQGCLPPFPADVFMIPQYGYLTLNNGSQAVGRSSFYCLEYFPSQMLRTGNNFTFSYTFEEVPFHSSYAHSQSLDRLMNPLIDQYLYYLNRTQNQSGSAQNKDLLFSRGSPAGMSVQPKNWLPGPCYRQQRVSKTKTDNNNSNFTWTGASKYNLNGRESIINPGTAVASHKDDEDKFFPMSGVMIFGKESAGASSTALDNVMITDEEEIKATNPVATERFGTVAVNFQSSSTDPATGDVHAMGALPGMVWQDRDVYLQGPIWAKIPHTDGHFHPSPLMGGFGLKNPPPQILIKNTPVPANPPAEFSATKFASFITQYSTGQVSVEIEWELQKENSKRWNPEVQYTSNYAKSANVDFTVDNNGLYTEPRPIGTRYLTRPL

SEQ ID NO: 280 - protein, 737 aa, Adeno-associated virus
RMAADGYLPDWLEDNLSEGIREWWDLKPGAPKPKANQQKQDDGRGLVLPGYKYLGPFNGLDKGEPVNAADAAALEHDKAYDQQLKAGDNPYLRYNHADAEFQERLQEDTSFGGNLGRAVFQAKKRVLEPLGLVEEGAKTAPGKKRPVEQSPQEPDSSSGIGKTGQQPAKKRLNFGQTGDSESVPDPQPLGEPPATPAAVGPTTMASGGGAPMADNNEGADGVGNASGNWHCDSTWLGDRVITTSTRTWALPTYNNHLYKQISSTSTGASNDNHYFGYSTPWGYFDFNRFHCHFSPRDWQRLINNNWGFRPKRLNFKLFNIQVKEVTTNDGVTTIANNLTSTVQVFSDSEYQLPYVLGSAHQGCLPPFPADVFMIPQYGYLTLNNGSQAVGRSSFYCLEYFPSQMLRTGNNFTFSYTFEEVPFHSSYAHSQSLDRLMNPLIDQYLYYLNRTQNQSGSAQNKDLLFSRGSPAGMSVQPKNWLPGPCYRQQRVSKTKTDNNNSNFTWTGASKYNLNGRESIINPGTAVASHKDDEDKFFPMSGVMIFGKESAGASSTALDNVMITDEEEIKATNPVATERFGTVAVNFQSSSTDPATGDVHAMGALPGMVWQDRDVYLQGPIWAKIPHTDGHFHPSPLMGGFGLKNPPPQILIKNTPVPANPPAEFSATKFASFITQYSTGQVSVEIEWELQKENSKRWNPEVQYTSNYAKSANVDFTVDNNGLYTEPRPIGTRYLTRPL

SEQ ID NO: 281 - protein, 737 aa, Adeno-associated virus
RMAADGYLPDWLEDNLSEGIREWWDLKPGAPKPKANQQKQDDGRGLVLPGYKYLGPFNGLDKGEPVNAADAAALEHDKAYDQQLKAGDNPYLRYNHADAEFQERLQEDTSFGGNLGRAVFQAKKRVLEPLGLVEEGAKTAPGKKRPVEQSPQEPDSSSGIGKTGQQPAKKRLNFGQTGDSESVPDPQPLGEPPATPAAVGPTTMASGGGAPMADNNEGADGVGNASGNWHCDSTWLGDRVITTSTRTWALPTYNNHLYKQISSTSTGASNDNHYFGYSTPWGYFDFNRFHCHFSPRDWQRLINNNWGFRPKRLNFKLFNIQVKEVTTNDGVTTIANNLTSTVQVFSDSEYQLPYVLGSAHQGCLPPFPADVFMIPQYGYLTLNNGSQAVGRSSFYCLEYFPSQMLRTGNNFTFSYTFEEVPFHSSYAHSQSLDRLMNPLIDQYLYYLNRTQNQSGSAQNKDLLFSRGSPAGMSVQPKNWLPGPCYRQQRVSKTKTDNNNSNFTWTGASKYNLNGRESIINPGTAVASHKDDEDKFFPMSGVMIFGKESAGANSTALDNVMITDEEEIKATNPVATERFGTVAVNFQSSSTDPATGDVHAMGALPGMVWQDRDVYLQGPIWAKIPHTDGHFHPSPLMGGFGLKNPPPQILIKNTPVPANPPAEFSATKFASFITQYSTGQVSVEIEWELQKENSKRWNPEVQYTSNYAKSANVDFTVDNNGLYTEPRPIGTRYLTRPL

SEQ ID NO: 282 - DNA, 2208 bp, Adeno-associated virus
  source 1..2208: mol_type = unassigned DNA
atggctgccgatggttatcttccagattggctcaaggacactctctctgaaggaataagacagtggtggaagctcaaacctggcccaccaccaccaaagcccgcagagcggcataaggacgacagcgggggtcttgtgcttcctgggtacaagtacctcggacccttcaacggactcgacaagggagagccggtcaacgaggcagacgccgcggccctcgagtacgacaaggcctacgaccggcagctcgacagcggagacaacccgtacctcaagtacaaccacgccgacgcggagtttcaggagcgccttaaagaagatacgtcttttgggggcaacctcggacgagcagtcttccaggcgaaaaagagggttcttgaacctctgggcctggttgaggaacctgttaagacggctccgggaaaaaagaggccggtagagcactctcctgtggagccagactcctcctcgggaacaggaaaagcgggccagcagcctgcgagaaagagattgaattttggtcagactggagacgcagactccgtacctgacccccagcctctcggacagccaccagcagccccctctggtctgggaactaatacgatggctacaggcagtggcgcaccaatggcagacaataacgagggcgccgacggagtgggtaattcctcgggaagttggcattgcgattccacatggatgggcgacagagtcatcaccaccagcacccgaacctgggctctgcccacctacaacaaccatctgtacaagcagatctccagccaatcaggagccagcaacgacaaccactactttggctacagcaccccttgggggtattttgacttcaacagattccactgccacttttcaccacgtgactggcaaagactcatcaacaacaactggggattccggcccaagagactcaacttcaagctctttaacattcaagtcaaggaggtcacgcagaatgacggtacgacgacgattgccaataaccttaccagcacggttcaggtgtttactgactcggagtaccagctcccgtacgtccccggctcggcgcatcaaggatgcctcccgccgttcccagcagacgtcttcatggtgccacagtatggatacctcaccctgaacaacgggagtcaggcagtaggacgctcttcattttactgcctggagtactttccttctcagatgcttcgtaccggaaacaactttaccttcagctacacctttgaggatgttcctttccacagcagctacgctcacagccagagtttggaccgtctcatgaatcctctcatcgaccagtacctgtattacttgagcagaacaaacactccaagcggaaccaccacgcagtccaggcttcagttttctcaggccggagcaagtgacattcgggaccagtctaggaactggcttcctggaccctgttaccgccagcagcgagtatcaaagacagctgcggacaacaacaacagtgaatactcgtggactggagctaccaagtaccacctcaatggcagagactctctggtgaatccgggcccggccatggccagccacaaggacgatgaagaaaagttttttcctcaaagcggggttctcatctttgggaagcaaggctcagagaaaacaaatgtggacattgaaaaggtcatgattacagacgaagaggaaatcagaaccaccaatcccgtggccacggagcagtatggttctgtatctaccaacctccagagcggcaacacacaagcagctactgcagatgtcaacacacaaggcgttcttccaggcatggtctggcaggacagagacgtgcacctgcaggggcctatctgggcaaagattccacacacggacggacattttcacccctctcccctcatgggcggatttggacttaaacaccctcctccacagattctcatcaagaacaccccggtacctgcaaatccttcgaccaccttcagtgcggcaaagtttgcttccttcatcacacagtattccacagggcaggtcagcgtggagatcgagtgggagctgcagaaggagaacagcaaacgctggaaccccgagatccagtacacttccaactacaacaaatctgttaatgtggactttactgtggacactaatggtgtgtattcagagcctcgccccattggcaccagatacctgactcgtaatctgtaa

SEQ ID NO: 283 - protein, 735 aa, Adeno-associated virus
MAADGYLPDWLKDTLSEGIRQWWKLKPGPPPPKPAERHKDDSGGLVLPGYKYLGPFNGLDKGEPVNEADAAALEYDKAYDRQLDSGDNPYLKYNHADAEFQERLKEDTSFGGNLGRAVFQAKKRVLEPLGLVEEPVKTAPGKKRPVEHSPVEPDSSSGTGKAGQQPARKRLNFGQTGDADSVPDPQPLGQPPAAPSGLGTNTMATGSGAPMADNNEGADGVGNSSGSWHCDSTWMGDRVITTSTRTWALPTYNNHLYKQISSQSGASNDNHYFGYSTPWGYFDFNRFHCHFSPRDWQRLINNNWGFRPKRLNFKLFNIQVKEVTQNDGTTTIANNLTSTVQVFTDSEYQLPYVPGSAHQGCLPPFPADVFMVPQYGYLTLNNGSQAVGRSSFYCLEYFPSQMLRTGNNFTFSYTFEDVPFHSSYAHSQSLDRLMNPLIDQYLYYLSRTNTPSGTTTQSRLQFSQAGASDIRDQSRNWLPGPCYRQQRVSKTAADNNNSEYSWTGATKYHLNGRDSLVNPGPAMASHKDDEEKFFPQSGVLIFGKQGSEKTNVDIEKVMITDEEEIRTTNPVATEQYGSVSTNLQSGNTQAATADVNTQGVLPGMVWQDRDVHLQGPIWAKIPHTDGHFHPSPLMGGFGLKHPPPQILIKNTPVPANPSTTFSAAKFASFITQYSTGQVSVEIEWELQKENSKRWNPEIQYTSNYNKSVNVDFTVDTNGVYSEPRPIGTRYLTRNL

SEQ ID NO: 284 - DNA, 2208 bp, Adeno-associated virus
  source 1..2208: mol_type = unassigned DNA
atggctgccgatggttatcttccagattggctcgaggacactctctctgaaggaataagacagtggtggaagctcaaacctggcccaccaccaccaaagcccgcagagcggcataaggacgacagcaggggtcttgtgcttcctgggtacaagtacctcggacccttcaacggactcgacaagggggagccggtcaacgaggcagacgccgcggccctcgagcacgacaaggcctacgaccggcagctcgacagcggagacaacccgtacctcaagtacaaccacgccgacgcagagtttcaggagcgccttaaagaagatacgtcttttgggggcaacctcggacgagcagtcttccaggcgaaaaagagggttcttgaacctctgggcctggttgaggaacctgttaagacggctccgggaaaaaagaggccggtagagcactctcctgtggagccagactcctcctcgggaaccggaaaagcgggccagcagcctgcaagaaaaagattaaattttggtcagactggagacgcagactccgtacctgacccccagcctctcggacagccaccagcagccccctctggtctgggatctactacaatggctacaggcagtggcgcaccaatggcagacaataacgagggtgccgatggagtgggtaattcctcaggaaattggcattgcgattcccaatggctgggcgacagagtcatcaccaccagcacccgaacctgggccctgcccacatacaacaaccacctctacaagcaaatctccagccaatcaggagccagcaacgacaaccactactttggctacagcaccccctgggggtattttgacttcaacagattccactgccacttttcaccacgtgactggcaaagactcatcaacaacaactggggattccggcccaaaagactcaacttcaagctctttaatattcaagtcaaagaggtcacgcagaatgacggtacgacgacgattgccaataaccttaccagcacggttcaggtgtttactgactcggagtaccagctcccgtacgtcctgggctcggcgcatcaaggatgcctcccgccgtttccagcggacgtcttcatggtcccacagtatggatacctcaccctgaacaacgggagtcaggcggtaggacgctcttccttttactgcctggagtactttccttctcagatgctgcgtactggaaacaactttcagttcagctacacttttgaagacgtgcctttccacagcagctacgctcacagccagagtctggatcggctgatgaatcctctgatcgaccagtacctgtattatctgaacaagacacaaacaaatagtggaactcttcagcagtctcggctactgtttagccaagctggaccaaccaacatgtctcttcaagctaaaaactggctgcctggaccttgctacagacagcagcgtctgtcaaaacaggcaaacgacaacaacaacagcaactttccctggactgcagctacaaagtatcatctaaatggccgggactcgttggttaatccaggaccagctatggccagtcgcaaggatgacgaagaaaagtttttccccatgcatggaaccctgatatttggtaaacaaggaacaaatgccaacgacgcggatttggaaaatgtcatgattacagatgaagaagaaatcagggccaccaatcccgtggctacggagcagtacgggactgtgtcaaataatttgcaaaactcaaacactggtccaactactggaactgtcaatcaccaaggagcgttacctggtatggtgtggcaggatcgagacgtgtacctgcagggacccatttgggccaagattcctcacaccgatggacactttcatccttctccactgatgggaggttttggactcaaacacccgcctcctcagatcatgatcaaaaacactcccgttccagccaatcctcccacaaacttcagttctgccaagtttgcttctttcatcacacagtattccacgggacaggtcagcgtggagatcgagtgggagctgcagaaggagaacagcaaacgctggaatcccgaaattcagtacacttccaactacaacaagtctgttaatgtggactttactgtggacactaatggtgtgtattcagagcctcgccccattggcaccagatacctgactcgtaatctgtaa

SEQ ID NO: 285 - protein, 735 aa, Adeno-associated virus
MAADGYLPDWLEDTLSEGIRQWWKLKPGPPPPKPAERHKDDSRGLVLPGYKYLGPFNGLDKGEPVNEADAAALEHDKAYDRQLDSGDNPYLKYNHADAEFQERLKEDTSFGGNLGRAVFQAKKRVLEPLGLVEEPVKTAPGKKRPVEHSPVEPDSSSGTGKAGQQPARKRLNFGQTGDADSVPDPQPLGQPPAAPSGLGSTTMATGSGAPMADNNEGADGVGNSSGNWHCDSQWLGDRVITTSTRTWALPTYNNHLYKQISSQSGASNDNHYFGYSTPWGYFDFNRFHCHFSPRDWQRLINNNWGFRPKRLNFKLFNIQVKEVTQNDGTTTIANNLTSTVQVFTDSEYQLPYVLGSAHQGCLPPFPADVFMVPQYGYLTLNNGSQAVGRSSFYCLEYFPSQMLRTGNNFQFSYTFEDVPFHSSYAHSQSLDRLMNPLIDQYLYYLNKTQTNSGTLQQSRLLFSQAGPTNMSLQAKNWLPGPCYRQQRLSKQANDNNNSNFPWTAATKYHLNGRDSLVNPGPAMASRKDDEEKFFPMHGTLIFGKQGTNANDADLENVMITDEEEIRATNPVATEQYGTVSNNLQNSNTGPTTGTVNHQGALPGMVWQDRDVYLQGPIWAKIPHTDGHFHPSPLMGGFGLKHPPPQIMIKNTPVPANPPTNFSSAKFASFITQYSTGQVSVEIEWELQKENSKRWNPEIQYTSNYNKSVNVDFTVDTNGVYSEPRPIGTRYLTRNL

SEQ ID NO: 286 - DNA, 2208 bp, Adeno-associated virus
  source 1..2208: mol_type = unassigned DNA
atggctgccgatggttatcttccagattggctcgaggacactctctctgaaggaataagacagtggtggaagctcaaacctggcccaccaccaccaaagcccgcagagcggcataaggacgacagcaggggtcttgtgcttcctgggtacaagtacctcggacccttcaacggactcgacaagggagagccggtcaacgaggcagacgccgcggccctcgagcacgacaaagcctacgaccggcagctcgacagcggagacaacccgtacctcaagtacaaccacgccgacgcggagtttcaggagcgccttaaagaagatacgtcttttgggggcaacctcggacgagcagtcttccaggcgaaaaagagggttcttgaacctctgggcctggttggggaacctgtcaagacggctccaggaaaaaagaggccggtagagcactctcctgtggagccagactcctcctcgggaaccggaaaggcgggccagcagcctgcaagaaaaagattgaattttggtcagactggagacgcagactcagtacctgacccccagcctctcggacagccaccagcagccccctctggtctgggaactaatacgatggctacaggcagtggcgcaccaatggcagacaataacgagggcgccgacggagtgggtaattcctcgggaaattggcattgcgattccacatggatgggcgacagagtcatcaccaccagcacccgaacctgggccctgcccacctacaacaaccacctctacaaacaaatttccagccaatcaggagcctcgaacgacaatcactactttggctacagcaccccttgggggtattttgacttcaacagattccactgccacttttcaccacgtgactggcaaagactcatcaacaacaactggggattccgacccaagagactcaacttcaagctctttaacattcaagtcaaagaggtcacgcagaatgacggtacgacgacgattgccaataaccttaccagcacggttcaggtgtttactgactcggagtaccagctcccgtacgtcctcggctcggcgcatcaaggatgcctcccgccgttcccagcagacgtcttcatggtgccacagtatggatacctcaccctgaacaacgggagtcaggcagtaggacgctcttcattttactgcctggagtactttccttctcagatgctgcgtaccggaaacaactttaccttcagctacacttttgaggacgttcctttccacagcggctacgctcacagccagagtctggaccgtctcatgaatcctctcatcgaccagtacctgtattacttgagcacaacaaacactccaagtggaaccaccacgcagtcaaggcttcagttttctcaggccggagcgagtgacattcgggaccagtctaggaactggcttcctggaccctgttaccgccagcagcgagtatcaaagacatctgcggataacaacaacagtgaatactcgtggactggagctaccaagtaccacctcaatggcagagactctctggtgaatccgggcccggccatggcaagccacaaggacaatgaagaaaagttttttcctcagagcggggttctcatctttgggaagcaaggctcagagaaaacaaatgtggacattgaaaaggtcatgattacagacgaagaggaaatcaggacaaccaatcccgtggctacggagcagtacggttctgtatctaccaacctccagagaggcaacagacaagcagctaccgcagatgtcaacacacaaggcgttcttccaggcatggtctggcaggacagagatgtgtaccttcaggggcccatctgggcaaagattccacacacggacggacattttcacccctctcccctcatgggtggattcggacttaaacaccctcctccacagattctcatcaagaacaccccggtacctgcgaatccttcgaccaccttcagtgcggcaaagtttgcttccttcatcacacagtactccacgggacaggtcagcgtggagatcgagtgggagctgcagaaggaaaacagcaaacgctggaatcccgaaattcagtacacttccaactacaacaagtctgttaatgtggactttactgtggacactaatggcgtgtattcagagcctcgccccattggcaccagatacctgactcgtaatctgtaa

SEQ ID NO: 287 - protein, 735 aa, Adeno-associated virus
MAADGYLPDWLEDTLSEGIRQWWKLKPGPPPPKPAERHKDDSRGLVLPGYKYLGPFNGLDKGEPVNEADAAALEHDKAYDRQLDSGDNPYLKYNHADAEFQERLKEDTSFGGNLGRAVFQAKKRVLEPLGLVGEPVKTAPGKKRPVEHSPVEPDSSSGTGKAGQQPARKRLNFGQTGDADSVPDPQPLGQPPAAPSGLGTNTMATGSGAPMADNNEGADGVGNSSGNWHCDSTWMGDRVITTSTRTWALPTYNNHLYKQISSQSGASNDNHYFGYSTPWGYFDFNRFHCHFSPRDWQRLINNNWGFRPKRLNFKLFNIQVKEVTQNDGTTTIANNLTSTVQVFTDSEYQLPYVLGSAHQGCLPPFPADVFMVPQYGYLTLNNGSQAVGRSSFYCLEYFPSQMLRTGNNFTFSYTFEDVPFHSGYAHSQSLDRLMNPLIDQYLYYLSTTNTPSGTTTQSRLQFSQAGASDIRDQSRNWLPGPCYRQQRVSKTSADNNNSEYSWTGATKYHLNGRDSLVNPGPAMASHKDNEEKFFPQSGVLIFGKQGSEKTNVDIEKVMITDEEEIRTTNPVATEQYGSVSTNLQRGNRQAATADVNTQGVLPGMVWQDRDVYLQGPIWAKIPHTDGHFHPSPLMGGFGLKHPPPQILIKNTPVPANPSTTFSAAKFASFITQYSTGQVSVEIEWELQKENSKRWNPEIQYTSNYNKSVNVDFTVDTNGVYSEPRPIGTRYLTRNL

SEQ ID NO: 288 - DNA, 2208 bp, Adeno-associated virus
  source 1..2208: mol_type = unassigned DNA
atggctgccgatggttatcttccagattggctcgaggacactctctctgaaggaataagacagtggtggaagctcaaacctggcccaccaccaccaaagcccgcagagcggcataaggacgacagcaggggtcttgtgcttcctgggtacaagtacctcggacccttcaacggactcgacaagggagagccggtcaacgaggcagacgccgcggccctcgagcacgacaaagcctacgaccggcagctcgacagcggagacaacccgtacctcaagtacaaccacgccgacgcggagtttcaggagcgccttaaagaagatacgtcttttgggggcaacctcggacgagcagtcttccaggcgaaaaagagggttcttgaacctctgggcctggttggggaacctgttaagacggctccgggaaaaaagaggccggtagagcactctcctgtggagccagactcctcctcgggaaccggaaaggcgggccagcagcctgcaagaaaaagattgaattttggtcagactggagacgcagactcagtacctgacccccagcctctcggacagccaccagcagccccctctggtctgggaactaatacgatggctacaggcagtggcgcaccaatggcagacaataacgagggcgccgacggagtgggtaattcctcgggaaatcggcattgcgattccacatggatgggcgacagagtcatcaccaccagcacccgaacctgggccctgcccacctacaacaaccacctctacagacaaatttccagccaatcaggagcctcgaacgacaatcactactttggctacagcaccccttgggggtattttgacttcaacagattccactgccacttttcaccacgtgactggcaaagactcatcaacaacaactggggattccgacccaagagactcaacttcaagctctttaacattcaagtcaaagaggtcacgcagaatgacggtacgacgacgattgccaataaccttaccagcacggttcaggtgtttactgactcggagtaccagctcccgtacgtcctcggctcggcgcatcaaggatgcctcccgccgttcccagcagacgtcttcatggtgccacagtatggatacctcaccctgagcaacgggagtcaggcagtaggacgctcttcattttactgcccggagtactttccttctcagatgctgcgtaccggaaacaactttaccttcagctacacttttgaggacgttcctttccacagcagctacgctcacagccagagtctggaccgtctcatgaatcctctcatcgaccagtacctgtattacttgagcacaacaaacactccaagtggaaccaccacgcagtcaaggcttcagttttctcaggccggagcgagtgacattcgggaccagtctaggaactggcttcctggaccctgttaccgccagcagcgagtatcaaagacatctgcggataacaacaacagtgaatactcgtggactggagctaccaagtaccacctcaatggcagagactctctggtgaatccgggcccggccatggcaagccacaaggacaatgaagaaaagttttttcctcagagcggggttctcatctttgggaagcaaggctcagagaaaacaaatgtggacattgaaaaggtcatgattacagacgaagaggaaatcaggacaaccaatcccgtggctacggagcagtatggttctgtatctaccaacctccagagaggcaacagacaagcagctaccgcagatgtcaacacacaaggcgttcttccaggcatggtctggcaggacagagatgtgtaccttcaggggcccatctgggcaaagattccacacacggacggacattttcacccctctcccctcatgggtggattcggacctaaacaccctcctccacagattctcatcaagaacaccccggtacctgcgaatccttcgaccaccttcagtgcggcaaagtttgcttccttcatcacacagtactccacgggacaggtcagcgtggagatcgagtgggagctgcagaaggaaaacagcaaacgctggaatcccgaaattcagtacacttccaactacaacaagtctgttaatgtggactttactgtggacactaatggcgtgtattcagagcctcgccccattggcaccagatacctgactcgtaatttgtaa

SEQ ID NO: 289 - protein, 735 aa, Adeno-associated virus
MAADGYLPDWLEDTLSEGIRQWWKLKPGPPPPKPAERHKDDSRGLVLPGYKYLGPFNGLDKGEPVNEADAAALEHDKAYDRQLDSGDNPYLKYNHADAEFQERLKEDTSFGGNLGRAVFQAKKRVLEPLGLVGEPVKTAPGKKRPVEHSPVEPDSSSGTGKAGQQPARKRLNFGQTGDADSVPDPQPLGQPPAAPSGLGTNTMATGSGAPMADNNEGADGVGNSSGNRHCDSTWMGDRVITTSTRTWALPTYNNHLYRQISSQSGASNDNHYFGYSTPWGYFDFNRFHCHFSPRDWQRLINNNWGFRPKRLNFKLFNIQVKEVTQNDGTTTIANNLTSTVQVFTDSEYQLPYVLGSAHQGCLPPFPADVFMVPQYGYLTLSNGSQAVGRSSFYCPEYFPSQMLRTGNNFTFSYTFEDVPFHSSYAHSQSLDRLMNPLIDQYLYYLSTTNTPSGTTTQSRLQFSQAGASDIRDQSRNWLPGPCYRQQRVSKTSADNNNSEYSWTGATKYHLNGRDSLVNPGPAMASHKDNEEKFFPQSGVLIFGKQGSEKTNVDIEKVMITDEEEIRTTNPVATEQYGSVSTNLQRGNRQAATADVNTQGVLPGMVWQDRDVYLQGPIWAKIPHTDGHFHPSPLMGGFGPKHPPPQILIKNTPVPANPSTTFSAAKFASFITQYSTGQVSVEIEWELQKENSKRWNPEIQYTSNYNKSVNVDFTVDTNGVYSEPRPIGTRYLTRNL

SEQ ID NO: 290 - DNA, 2205 bp, Adeno-associated virus
  source 1..2205: mol_type = unassigned DNA
atggctgccgatggttatcttccagattggctcgaggacactctctctgaaggaataagacagtggtggaagctcaaacctggcccaccaccaccaaagcccgcagagcggcataaggacgacagcaggggtcttgtgcttcctgggtacaagtacctcggacccttcaacggactcgacaagggagagccggtcaacgaggcagacgccgcggccctcgagcacgacaaggcctacgaccggcagctcgacagcggagacaacccgtacctcaagtacaaccacgccgacgcggagtttcaggagcgtcttaaagaagatacgtcttttgggggcaacctcggacgagcagtcttccaggcgaaaaagagggttcttgaacctctgggcctggttgaggaacctgttaagacggctccgggaaaaaagaggccggtagagcactctcctgcggagccagactcctcctcgggaaccggaaaagcgggccagcagcctgcaagaaaaagactgaatttcggtcagactggagacgcagactccgtacctgacccccagcctctcagacagccaccagcagcccccacaagtttgggatctactacaatggctacaggcagtggcgcaccaatggcagacaataacgagggtgccgatggagtgggtaattcctcaggaaattggcattgcgattcccaatggctgggcgacagagtcatcaccaccagcacccgaacctgggccctgcccacctacaacaaccacctttacaagcaaatctccagccaatcaggagcctcaaacgacaaccactactttggctacagcaccccctgggggtattttgacttcaacagattccactgccacttttcaccacgtgactggcaaagactcatcaacaacaactggggattccgacccaagagactcaacttcaagctctttaacattcaagtcaaagaggtcacgcagaatgacggtacgacgacgattgccaataaccttaccagcacggttcaggtgtttactgactcggagtaccagctcccgtacgtcctcggctcggcgcatcaaggatgcctcccgccgtttccagcggacgtcttcatggtcccacagtatggatacctcaccctgaacaacgggagtcaggcggtaggacgctcttccttttactgcctggagtactttccttctcagatgctgcgtactggaaacaactttcagttcagctacacttttgaagacgtgcctttccacagcagctacgctcacagccagagtttggatcggctgatgaatcctctgatcgaccagtacctgtattatctaaacagaacacaaacagctagtggaactcagcagtctcggctactgtttagccaagctggacccacaagcatgtctcttcaagctaaaaactggctgcctggaccgtgttatcgccagcagcgtttgtcaaagcaggcaaacgacaacaacaacagcaactttccctggactggagctaccaagtactacctcaatggcagagactctttggtgaacccgggcccggccatggccagccacaaggacgatgaagaaaagtttttccccatgcatggaaccctaatatttggtaaagaaggaacaaatgctaccaacgcggaattggaaaatgtcatgattacagatgaagaggaaatcaggaccaccaatcccgtggctacagagcagtacggatatgtgtcaaataatttgcaaaactcaaatactgctgcaagtactgaaactgtgaatcaccaaggagcattacctggtatggtgtggcaggatcgagacgtgtacctgcagggacccatttgggccaagattcctcacaccgatggacactttcatccttctccactgatgggaggttttggactcaaacacccgcctcctcagattatgatcaaaaacactcccgttccagccaatcctcccacaaacttcagttctgccaagtttgcttccttcatcacacagtattccacgggacaggtcagcgtggagatcgagtgggagctgcagaaggagaacagcaaacgctggaatcccgaaattcagtacacttccaactacaacaaatctgttaatgtggactttactgtggacactaatggtgtgtattcagagcctcgccccattggcaccagatacctgactcgtaatctgtaa

SEQ ID NO: 291 - protein, 734 aa, Adeno-associated virus
MAADGYLPDWLEDTLSEGIRQWWKLKPGPPPPKPAERHKDDSRGLVLPGYKYLGPFNGLDKGEPVNEADAAALEHDKAYDRQLDSGDNPYLKYNHADAEFQERLKEDTSFGGNLGRAVFQAKKRVLEPLGLVEEPVKTAPGKKRPVEHSPAEPDSSSGTGKAGQQPARKRLNFGQTGDADSVPDPQPLRQPPAAPTSLGSTTMATGSGAPMADNNEGADGVGNSSGNWHCDSQWLGDRVITTSTRTWALPTYNNHLYKQISSQSGASNDNHYFGYSTPWGYFDFNRFHCHFSPRDWQRLINNNWGFRPKRLNFKLFNIQVKEVTQNDGTTTIANNLTSTVQVFTDSEYQLPYVLGSAHQGCLPPFPADVFMVPQYGYLTLNNGSQAVGRSSFYCLEYFPSQMLRTGNNFQFSYTFEDVPFHSSYAHSQSLDRLMNPLIDQYLYYLNRTQTASGTQQSRLLFSQAGPTSMSLQAKNWLPGPCYRQQRLSKQANDNNNSNFPWTGATKYYLNGRDSLVNPGPAMASHKDDEEKFFPMHGTLIFGKEGTNATNAELENVMITDEEEIRTTNPVATEQYGYVSNNLQNSNTAASTETVNHQGALPGMVWQDRDVYLQGPIWAKIPHTDGHFHPSPLMGGFGLKHPPPQIMIKNTPVPANPPTNFSSAKFASFITQYSTGQVSVEIEWELQKENSKRWNPEIQYTSNYNKSVNVDFTVDTNGVYSEPRPIGTRYLTRNL

SEQ ID NO: 292 - DNA, 3160 bp, Adeno-associated virus
  source 1..3160: mol_type = unassigned DNA
acccttcactaaagggactagtcctgcaggtttaaacgaattcgcccttgctgcgtcaactggaccaatgagaactttcccttcaacgactgtgtcgacaagatggtgatttggtgggaggaggggaagatgaccgccaaggtcgtggagtcggccaaagccattctcggaggaagcaaggtgcgcgtggaccagaaatgcaagtcctcggcccagatagatccgactcccgtgatcgtcacctccaacaccaacatgtgcgccgtgattgacgggaactcaacgaccttcgaacaccagcagccgttgcaagaccggatgttcaaatttgaactcacccgccgtctggatcatgactttgggaaggtcaccaagcgggaagtcaaagactttttccggtgggcaaaggatcacgtggttgaggtggagcatgaattctacgtcaaaaagggtggagccaagaaaagacccgcccctagtgacgcagatataagtgagcccaaacgggtgcgcgagtcagttgcgcagccatcgacgtcagacgcggaagcttcgatcaactacgcggacaggtaccaaaacaaatgttctcgtcacgtgggcatgaatctgatgctgtttccctgcagacaatgcgagagaatgaatcaaaattcaaatatctgcttcactcacggacagaaagactgtttagagtgctttcccgtgtcagaatctcaacctgtttctgtcgtcaaaaaggcgtatcagaaactgtgctacattcatcatatcatgggaaaggtgccagacgcttgcactgcctgcgatctggtcaatgtggatttggatgactgcatctctgaacaataaatgatttaaatcaggtatggctgccgatggttatcttccagattggctcgaggacactctctctgaaggaataagacagtggtggaagctcaaacctggcccaccaccaccaaagcccgcagagcggcataaggacgacagcaggggtcttgtgcttcctgggtacaagtacctcggacccttcaacggactcgacaagggagagccggtcaacgaggcagacgccgcggccctcgagcacgacaaggcctacgaccggcagctcgacagcggagacaacccgtacctcaagtacaaccacgccgacgcggagtttcaggagcgtcttaaagaagatacgtcttttgggggcaacctcggacgagcagtcttccaggcgaaaaagagggttcttgaacctctgggcctggttgaggaacctgttaagacggctccgggaaaaaagaggccggtagagcactctcctgcggagccagactcctcctcgggaaccggaaaagcgggccagcagcctgcaagaaaaagactgaatttcggtcagactggagacgcagactccgtacctgacccccagcctctcagacagccaccagcagcccccacaagtttgggatctactacaatggctacaggcagtggcgcaccaatggcagacaataacgagggtgccgatggagtgggtaattcctcaggaaattggcattgcgattcccaatggctgggcgacagagtcatcaccaccagcacccgaacctgggccctgcccacctacaacaaccacctttacaagcaaatctccagccaatcaggagcctcaaacgacaaccactactttggctacagcaccccctgggggtattttgacttcaacagattccactgccacttttcaccacgtgactggcaaagactcatcaacaacaactggggattccgacccaagagactcaacttcaagctctttaacattcaagtcaaagaggtcacgcagaatgacggtacgacgacgattgccaataaccttaccagcacggttcaggtgtttactgactcggagtaccagctcccgtacgtcctcggctcggcgcatcaaggatgcctcccgccgtttccagcggacgtcttcatggtcccacagtatggatacctcaccctgaacaacgggagtcaggcggtaggacgctcttccttttactgcctggagtactttccttctcagatgctgcgtactggaaacaactttcagttcagctacacttttgaagacgtgcctttccacagcagctacgctcacagccagagtttggatcggctgatgaatcctctgatcgaccagtacctgtattatctaaacagaacacaaacagctagtggaactcagcagtctcggctactgtttagccaagctggacccacaagcatgtctcttcaagctaaaaactggctgcctggaccgtgttatcgccagcagcgtttgtcaaagcaggcaaacgacaacaacaacagcaactttccctggactggagctaccaagtactacctcaatggcagagactctttggtgaacccgggcccggccatggccagccacaaggacgatgaagaaaagtttttccccatgcatggaaccctaatatttggtaaagaaggaacaaatgctaccaacgcggaattggaaaatgtcatgattacagatgaagaggaaatcaggaccaccaatcccgtggctacagagcagtacggatatgtgtcaaataatttgcaaaactcaaatactgctgcaagtactgaaactgtgaatcaccaaggagcattacctggtatggtgtggcaggatcgagacgtgtacctgcagggacccatttgggccaagattcctcacaccgatggacactttcatccttctccactgatgggaggttttggactcaaacacccgcctcctcagattatgatcaaaaacactcccgttccagccaatcctcccacaaacttcagttctgccaagtttgcttccttcatcacacagtattccacgggacaggtcagcgtggagatcgagtgggagctgcagaaggagaacagcaaacgctggaatcccgaaattcagtacacttccaactacaacaaatctgttaatgtggactttactgtggacactaatggtgtgtattcagagcctcgccccattggcaccagatacctgactcgtaatctgtaattgcttgttaatcaataaaccgtttaattcgtttcagttgaactttggtctctgcgaagggcgaattcgcggccgctaaatcaatcg

SEQ ID NO: 293 - protein, 734 aa, Adeno-associated virus
MAADGYLPDWLEDTLSEGIRQWWKLKPGPPPPKPAERHKDDSRGLVLPGYKYLGPFNGLDKGEPVNEADAAALEHDKAYDRQLDSGDNPYLKYNHADAEFQERLKEDTSFGGNLGRAVFQAKKRVLEPLGLVEEPVKTAPGKKRPVEHSPAEPDSSSGTGKAGQQPARKRLNFGQTGDADSVPDPQPLGQPPAAPTSLGSTTMATGSGAPMADNNEGADGVGNSSGNWHCDSQWLGDRVITTSTRTWALPTYNNHLYKQISSQSGASNDNHYFGYSTPWGYFDFNRFHCRFSPRDWQRLINNNWGFRPKRLNFKLFNIQVKEVTQNDGTTTIANNLTSTVQVFTDSEYQLPYVLGSAHQGCLPPFPADVFMVPQYGYLTLNNGSQAVGRSSFYCLEYFPSQMLRTGNNFQFSYTFEDVPFHSSYAHSQGLDRLMNPLIDQYLYYLNRTQTASGTQQSRLLFSQAGPTSMSLQAKNWLPGPCYRQQRLSKQANDNNNSNFPWTGATKYHLNGGDSLVNPGPAMASHKDDEEKFFPMHGTLIFGKEGTNATNAELENVMITDEEEIRTTNPVATEQYGYVSNNLQNSNTAASTETVNHQGALPGMVWQDRDVYLRGPIWAKIPHADGHFHPSPLMGGFGLKHPPPQIMIKNTPVPANPPTNFSSAKFASFITQYSTGQVSVEIEWELQKENSKRWNPEIQYTSNYNKSVNVDFTVDTNGVYSEPRPIGTRYLTRNL

SEQ ID NO: 294 - DNA, 3157 bp, Adeno-associated virus
  source 1..3157: mol_type = unassigned DNA
ctcactaagggactagtcctgcaggtttaaacgaattcgcccttgctgcgtcaactggaccaatgagaactttcccttcaacgactgtgtcgacaagatggtgatttggtgggaggaggggaagatgaccgccaaggtcgtggagtcggccaaagccactctcggaggaagcaaggtgcgcgtggaccagaaacgcaagtcctcggcccagatagatccgactcccgtgatcgtcacctccaacaccaacatgtgcgccgtgattgacgggaactcaacgaccttcgaacaccagcagccgttgcaagaccgaatgttcaaatttgaactcacccgccgtctggatcatgacttcgggaaggtcaccaagcaggaagtcaaagactttttccggtgggcaaaggatcacgtggttgaggtggagcatgaattctacgtcaaaaagggtggagccaagaaaagacccgcccctagtgacgcagatataagtgagcccaaacgggtgcgcgagtcagttgcgcagccatcgacgtcagacgcggaagcttcgatcaactacgcggacaggtaccaaaacaaatgttctcgtcacgtgggcatgaatctgatgctgtttccctgcagacaatgcgagagaatgaatcaaaattcaaatatctgcttcactcacggacagaaagactgtttagagtgctttcccgtgtcagaatctcaacctgtttctgtcgtcaaaaaggcgtatcagaaactgtgctacattcatcatatcatgggaaaggtgccagacgcttgcactgcctgcgatctggtcaatgtggatttggatgactgcatctctgaacaataaatgatttaaatcaggtatggctgccgatggttatcttccagattggctcgaggacactctctctgaaggaataagacagtggtggaagctcaaacctggcccaccaccaccaaagcccgcagagcggcataaggacgacagcaggggtcttgtgcttcctgggtacaagtacctcggacccttcaacggactcgacaagggagagccggtcaacgaggcagacgccgcggctctcgagcacgacaaggcctacgaccggcagctcgacagcggagacaacccgtacctcaagtacaaccacgccgacgcggagtttcaggagcgtcttaaagaagatacgtcttttgggggcaacctcggacgagcagtcttccaggcgaaaaagagggttcttgaacctctgggcctggttgaggaacctgttaagacggctccgggaaaaaagaggccggtagagcactctcctgcggagccagactcctcctcgggaaccggaaaagcgggccagcagcctgcaagaaaaagactgaatttcggtcagactggagacgcagactccgtacctgacccccagcctctcggacagccaccagcagcccccacaagtttgggatctactacaatggctacaggcagtggcgcaccaatggcagacaataacgagggtgccgatggagtgggtaattcctcaggaaattggcattgcgattcccaatggctgggcgacagagtcatcaccaccagcacccgaacctgggccctgcccacctacaacaaccacctttacaagcaaatctccagccaatcaggagcctcaaacgacaaccactactttggctacagcaccccctgggggtattttgacttcaacagattccactgccgcttttcaccacgtgactggcaaagactcatcaacaacaactggggattccgacccaagagactcaacttcaagctctttaacattcaagtcaaagaggtcacgcagaatgacggtacgacgacgattgccaataaccttaccagcacggttcaggtgtttactgactcggagtaccagctcccgtacgtcctcggctcggcgcatcaaggatgcctcccgccgtttccagcggacgtcttcatggtcccacagtatggatacctcaccctgaacaacgggagtcaggcggtaggacgctcttccttttactgcctggagtactttccttctcagatgctgcgtactggaaacaactttcagttcagctacacttttgaagacgtgcctttccacagcagctacgctcacagccagggtttggatcggctgatgaatcctctgatcgaccagtacctgtattatctaaacagaacacaaacagctagtggaactcagcagtctcggctactgtttagccaagctggacccacaagcatgtctcttcaagctaaaaactggctgcctggaccgtgttatcgccagcagcgtttgtcaaagcaggcaaacgacaacaacaacagcaactttccctggactggagctaccaagtaccacctcaatggcggagactctttggtgaacccgggcccggccatggccagccacaaggacgatgaagaaaagtttttccccatgcatggaaccctaatatttggtaaagaaggaacaaatgctaccaacgcggaattggaaaatgtcatgattacagatgaagaggaaatcaggaccaccaatcccgtggctacagagcagtacggatatgtgtcaaataatttgcaaaactcaaatactgctgcaagtactgaaactgtgaatcaccaaggagcattacctggtatggtgtggcaggatcgagacgtgtacctgcggggacccatttgggccaagattcctcacgccgatggacactttcatccttctccactgatgggaggttttggactcaaacacccgcctcctcagattatgatcaaaaacactcccgttccagccaatcctcccacaaacttcagttctgccaagtttgcttccttcatcacacagtattccacgggacaggtcagcgtggagatcgagtgggagctgcagaaggagaacagcaaacgctggaatcccgaaattcagtacacttccaactacaacaaatctgttaatgtggactttactgtggacactaatggtgtgtattcagagcctcgccccattggcaccagatacctgactcgtaatctgtaattgcttgttaatcaataaaccgtttaattcgtttcagttgaactttggtctctgcgaagggcgaattcgcggccgctaaattcaattcg

SEQ ID NO: 295 - protein, 734 aa, Adeno-associated virus
MAADGYLPDWLEDTLSEGIRQWWKLKPGPPPPKPAERHKDDSRGLVLPGYKYLGPFNGLDKGEPVNEADAAALEHDKAYDRQLDSGDNPYLKYNHADAEFQERLKEDTSFGGNLGRAVFQAKKRVLEPLGLVEEPVKTAPGKKRPVEHSPAEPDSSSGTGKAGQQPARKRLNFGQTGDADSVPDPQPLGQPPAAPTSLGSTTMATGSGAPMADNNEGADGVGNSSGNWHCDSQWLGDRVITTSTRTWALPTYNNHLYKQISSQSGASNDNHYFGYSTPWGYFDFNRFHCHFSPRDWQRLINNNWGFRPKRLNFKLFNIQVKEVTQNDGTTTIANNLTSTVQVFTDSEYQLPYVLGSAHQGCLPPFPADVFMVPQYGYLTLNNGSQAVGRSSFYCLECFPSQMLRTGNNFQFSYTFEDVPFHSSYAHSQSLDRLMNPLIDQYLYYLNRTQTASGTQQSRLLFSQAGPTSMSLQAKNWLPGPCYRQQRLSKQANDNNNSNFPWTGATKYHLNGRDSLVNPGPAMASHKDDEEKFFPMHGTLIFGKEGTNATNAELENVMITDEEEIRTTNPVATEQYGYVSNNLQNSNTAASTETVNHQGALPGMVWQDRDVYLQGPIWAKIPHTDGHFHPSPLMGGFGLKHPPPQIMIKNTPVPANPPTNFSSAKFASFITQYSTGQVSVEIEWELQKENSKRWNPEIQYTSNYNKSVNVDFTVDTNGVYSEPRPIGTRYLTRNL

SEQ ID NO: 296 - DNA, 2208 bp, Adeno-associated virus
  source 1..2208: mol_type = unassigned DNA
atggctgccgatggttatcttccagattggctcgaggacactctctctgaaggaataagacagtggtggaagctcaaacctggcccaccaccaccaaagcccgcagagcggcataaggacgacagcaggggtcttgtgcttcctggatacaagtacctcggacccttcaacggactcgacaagggagagccggtcaacgaggcagacgccgcggccctcgagcacgacaaggcctacgaccggcagctcgacagcggagacaacccgtacctcaagtacaaccacgccgacgcggagtttcaggagcgccttaaagaagatacgtcttttgggggcaacctcggacgagcagtcttccaggcgaaaaagagggttcttgaacctctgggcctggttgaggaacctgttaagacggctccgggaaaaaagaggccggtagagcactctcctgtggagccagactcctcctcgggaaccggaaaagcgggcaaccagcctgcaagaaaaagattgaatttcggtcagactggagacgcagactccgtacctgacccccagcctctcggacagccaccagcatccccctctggtctgggaactaatacgatggctacaggcagtggcgcaccaatggcagacaataacgagggcgccgacggagtgggtaattcctcgggaaattggcattgcgattccacatggatgggcgacagagtcgtcaccaccagcacccgcacctgggccctgcccacctacaacaaccacctctacaagcagatttccagccaatcaggagccagcaacgacaaccactactttggctacagcaccccttgggggtattttgacttcaacagattccactgccacttttcgccacgcgactggcagagactcatcaacaacaactggggattccggcccaaaagactcaacttcaagctgtttaacattcaagtcaaggaggtcacgcagaatgacggtacgacgacgattgccaataaccttaccagcacggttcaggtgtttactgacttggagtaccagctcccgtacgtcctcggctcggcgcatcaaggatgcctcccgccgttcccagcagacgtcttcatggtgccacagtatggatacctcaccctgaacaacgggagtcaggcggtaggacgctcttccttttactgcctggagtactttccttctcagatgcttcgcaccggaaacaactttaccttcagctacacttttgaagacgttcctttccacagcagctacgctcacagtcaaagtctggaccgtctcatgaatcctctcatcgaccagtacctgtattacttgagcagaacaaacactccaagcggaaccactacgcagtccaggcttcagttttctcaggccggagcgagtgacattcgggaccagtctaggaactggcttcctggaccctgttaccgccagcagcgagtatcaaagacagctgcggataacaacaacagtgaatactcgtggactggagctaccaagtaccacctcaatggcagagactctctggtgaatccgggcccggccatggccagccacaaggacgatgaagaaaagttttttcctcaaagcggggttctcatctttgggaagcaaggctcagagaaaacaaatgtggacattgaaaaggtcatgattacagacgaagaggaaatcaggaccaccaatcccgtggctacggagcagtatggttctgtatctaccaacctccagagcggcaacacacaagcagctacctcagatgtcaacacacaaggcgttcttccaggcatggtctggcaggacagagacgtgtacctgcaggggcccatctgggcaaaaattccacacacggacggacattttcacccctctcccctcatgggcggatttggacttaaacaccctcctccacagattctcattaagaataccccggtacctgcgaatccttcgaccaccttcagcgcggcaaagtttgcttccttcatcacacagtattccacggggcaggtcagcgtggagatcgagtgggagctgcagaaggagaacagcaaacgctggaatcccgaaattcagtacacttccaactacaacaaatctgttaatgtggactttactgtggacactaatggggtgtattcagagcctcgccctattggcaccagatacctgactcgtaatctgtaa

SEQ ID NO: 297 - DNA, 3159 bp, Adeno-associated virus
  source 1..3159: mol_type = unassigned DNA
gattgatttagcggccgcgaattcgcccttgctgcgtcaactggaccaatgagaactttcccttcaacgattgcgtcgacaagatggtgatctggtgggaggagggaaagatgaccgccaaggtcgtggagtcggccaaagccattctcggaggaagcaaggtgcgtgtggaccaaaagtgcaagtcttcggcccagatcgacccgactcccgtgatcgtcacctccaacaccaacatgtgcgccgtgattgatggaaactcaacgaccttcgagcaccagcagccgttgcaagaccggatgttcaaatttgaacttacccgccgtctggatcatgactttggaaaggtcaccaagcaggaagtgaaagactttttccggtgggcaaaggatcacgtggttgaggtggagcatgagttctacgtcaaaaagggtggagccaaaaaaagacccgcccccagtgacgcagatataagtgagcccaaacgggcgcgcgagtcagttgcgcagccatcgacgtcagacgcggaagcttcgatcaactacgcggacaggtaccaaaacaaatgttctcgtcacgtgggcatgaatctgatgctgtttccctgcagacaatgcgagagaatgaatcagaattcaaatatctgcttcactcacggacagaaagactgtccatagtgctttcccgtgtcagaatctcaacccgtttctgtcgtcaaaaaggcgtatcagaaactgtgctacattcatcacatcatgggaaaggtgccagacgcttgcactgcttgcgacctggtcaatgtggatttggatgactgcatctctgaacaataaatgatttaaatcaggtatggctgccgatggttatcttccagattggctcgaggacactctctctgaaggaataagacagtggtggaagctcaaacctggcccaccaccaccaaagcccgcagagcggcataaggacgacagcaggggtcttgtgcttcctggatacaagtacctcggacccttcaacggactcgacaagggagagccggtcaacgaggcagacgccgcggccctcgagcacgacaaggcctacgaccggcagctcgacagcggagacaacccgtacctcaagtacaaccacgccgacgcggagtttcaggagcgccttaaagaagatacgtcttttgggggcaacctcggacgagcagtcttccaggcgaaaaagagggttcttgaacctctgggcctggttgaggaacctgttaagacggctccgggaaaaaagaggccggtagagcactctcctgtggagccagactcctcctcgggaaccggaaaagcgggcaaccagcctgcaagaaaaagattgaatttcggtcagactggagacgcagactccgtacctgacccccagcctctcggacagccaccagcatccccctctggtctgggaactaatacgatggctacaggcagtggcgcaccaatggcagacaataacgagggcgccgacggagtgggtaattcctcgggaaattggcattgcgattccacatggatgggcgacagagtcgtcaccaccagcacccgcacctgggccctgcccacctacaacaaccacctctacaagcagatttccagccaatcaggagccagcaacgacaaccactactttggctacagcaccccttgggggtattttgacttcaacagattccactgccacttttcgccacgcgactggcagagactcatcaacaacaactggggattccggcccaaaagactcaacttcaagctgtttaacattcaagtcaaggaggtcacgcagaatgacggtacgacgacgattgccaataaccttaccagcacggttcaggtgtttactgacttggagtaccagctcccgtacgtcctcggctcggcgcatcaaggatgcctcccgccgttcccagcagacgtcttcatggtgccacagtatggatacctcaccctgaacaacgggagtcaggcggtaggacgctcttccttttactgcctggagtactttccttctcagatgcttcgcaccggaaacaactttaccttcagctacacttttgaagacgttcctttccacagcagctacgctcacagtcaaagtctggaccgtctcatgaatcctctcatcgaccagtacctgtattacttgagcagaacaaacactccaagcggaaccactacgcagtccaggcttcagttttctcaggccggagcgagtgacattcgggaccagtctaggaactggcttcctggaccctgttaccgccagcagcgagtatcaaagacagctgcggataacaacaacagtgaatactcgtggactggagctaccaagtaccacctcaatggcagagactctctggtgaatccgggcccggccatggccagccacaaggacgatgaagaaaagttttttcctcaaagcggggttctcatctttgggaagcaaggctcagagaaaacaaatgtggacattgaaaaggtcatgattacagacgaagaggaaatcaggaccaccaatcccgtggctacggagcagtatggttctgtatctaccaacctccagagcggcaacacacaagcagctacctcagatgtcaacacacaaggcgttcttccaggcatggtctggcaggacagagacgtgtacctgcaggggcccatctgggcaaaaattccacacacggacggacattttcacccctctcccctcatgggcggatttggacttaaacaccctcctccacagattctcattaagaataccccggtacctgcgaatccttcgaccaccttcagcgcggcaaagtttgcttccttcatcacacagtattccacggggcaggtcagcgtggagatcgagtgggagctgcagaaggagaacagcaaacgctggaatcccgaaattcagtacacttccaactacaacaaatctgttaatgtggactttactgtggacactaatggggtgtattcagagcctcgccctattggcaccagatacctgactcgtaatctgtaattgcttgttaatcaataaaccgtttaattcgtttcagttgaactttggtctctgcgaagggcgaattcgtttaaacctgcaggactagtccctttagtgagg

SEQ ID NO: 298 - protein, 735 aa, Adeno-associated virus
MAADGYLPDWLEDTLSEGIRQWWKLKPGPPPPKPAERHKDDSRGLVLPGYKYLGPFNGLDKGEPVNEADAAALEHDKAYDRQLDSGDNPYLKYNHADAEFQERLKEDTSFGGNLGRAVFQAKKRVLEPLGLVEEPVKTAPGKKRPVEHSPVEPDSSSGTGKAGNQPARKRLNFGQTGDADSVPDPQPLGQPPASPSGLGTNTMATGSGAPMADNNEGADGVGNSSGNWHCDSTWMGDRVVTTSTRTWALPTYNNHLYKQISSQSGASNDNHYFGYSTPWGYFDFNRFHCHFSPRDWQRLINNNWGFRPKRLNFKLFNIQVKEVTQNDGTTTIANNLTSTVQVFTDLEYQLPYVLGSAHQGCLPPFPADVFMVPQYGYLTLNNGSQAVGRSSFYCLEYFPSQMLRTGNNFTFSYTFEDVPFHSSYAHSQSLDRLMNPLIDQYLYYLSRTNTPSGTTTQSRLQFSQAGASDIRDQSRNWLPGPCYRQQRVSKTAADNNNSEYSWTGATKYHLNGRDSLVNPGPAMASHKDDEEKFFPQSGVLIFGKQGSEKTNVDIEKVMITDEEEIRTTNPVATEQYGSVSTNLQSGNTQAATSDVNTQGVLPGMVWQDRDVYLQGPIWAKIPHTDGHFHPSPLMGGFGLKHPPPQILIKNTPVPANPSTTFSAAKFASFITQYSTGQVSVEIEWELQKENSKRWNPEIQYTSNYNKSVNVDFTVDTNGVYSEPRPIGTRYLTRNL

SEQ ID NO: 299 - DNA, 2205 bp, Adeno-associated virus
  source 1..2205: mol_type = unassigned DNA
atggctgccgatggttatcttccagattggctcgaggacactctctctgaaggaataagacagtggtggaagctcaaacctggcccaccaccaaagcccgcagagcggcataaggacgacagcaggggtcttgtgcttcctggatacaagtacctcggacccttcaacggactcgacaagggagagccggtcaacgaggcagacgccgcggccctcgagcacgacaaggcctacgaccggcagctcgacagcggagacaacccgtacctcaagtacaaccacgccgacgcggagtttcaggagcgccttaaagaagatacgtcttttgggggcaacctcggacgagcagtcttccaggcgaaaaagagggttcttgaacctctgggcctggttgaggaacctgttaagacggctccgggaaaaaagaggcccgtagagcactctcctgtggagccagactcctcctcgggaaccggaaaagcgggcaaccagcctgcaagaaaaagattgaatttcggtcagactggagacgcagactccgtacctgacccccagcctctcggacagccaccagcagccccctctggtctgggaactaatacgatggctacaggcagtggcgcaccaatggcagacaataacgagggcgccgacggagtgggtaattcctcgggagattggcattgcgattccacatggatgggcgacagagtcatcaccaccagcacccgcacctgggccctgcccacctacaacaaccacctctacaagcagatttccagccaatcaggagccagcaatgacaaccactactttggctacagcaccccttgggggtattttgacttcaacagattccactgccacttttcgccacgcgactggcagagactcatcaacaacaactggggattccggcccaaaagactcaacctcaagctgtttaacattcaagtcaaggaggtcacgcagaatgacggtacgacgacgattgccaataaccttaccagcacggttcaggtgtttactgacttggagtaccagctcccgtacgtcctcggctcggcgcatcaaggatgcctcccgccgttcccagcagacgtcttcatggtgccacagtatggatacctcaccctgaacaacgggagtcaggcggtaggacgctcttccttttactgcctggagtactttccttctcagatgcttcgtaccggaaacaactttaccttcagctacacttttgaagacgttcctttccacagcagctacgctcacagtcaaagtctggaccgtctcatgaatcctctcatcgaccagtacctgtattacttgagcagaacaaacactccaagcggaaccactacgcagtccaggcttcagttttctcaggccggagcgagtgacattcgggaccagtctaggaactggcttcctggaccctgttaccgccagcagcgagtatcaaagacagctgcggataacaacaacggtgaatactcgtggactggagctaccaagtaccacctcaatggcagagactctctggtgaatccgggcccggccatggccagccacaaggacgatgaagaaaagttttttcctcaaagcggggttctcatctttgggaagcaaggctcagagaaaacaaatgtggacattgaaaaggtcatgattacagacgaagaggaaatcaggaccaccaatcccgtggctacggagcagtatggttctgtatctaccaacctccagagcggcaacacacgagcagctacctcagatgtcaacacacaaggcgttcttccaggcatggtctggcaggacagagacgtgtacctgcaggggcccatctgggcaaaaattccacacacggacggacattttcacccctctcccctcatgggcggatttggacttaaacaccctcctccacagattctcattaagaataccccggtacctgcgaatccttcgaccaccttcagcgcggcaaagtttgcttccttcatcacacagtattccacggggcaggtcagcgtggagatcgagtgggagctgcagaaggagaacagcaaacgctggaatcccgaaattcagtacacttccaactacaacaaatctgttaatgtggactttactgtggacactaatggggtgtattcagagcctcgccctattggcaccagatacctgactcgtaatctgtaa

SEQ ID NO: 300 - DNA, 3156 bp, Adeno-associated virus
  source 1..3156: mol_type = unassigned DNA
cgattgaatttagcggccgcgaattcgcccttgctgcgtcaacggaccaatgagaactttcccttcaacgattgcgtcgacaagatggtgatctggtgggaggagggaaagatgaccgccaaggtcgtggagtcggccaaagccattctcggaggaagcaaggtgcgtgtggaccaaaagtgcaagtcttcggcccagatcgacccgactcccgtgatcgtcacctccaacaccaacatgtgcgccgtgattgatggaaactcaacgaccttcgagcaccagcagccgttgcaagaccggatgttcaaatttgaacttacccgccgtctggatcatgactttggaaaggtcaccaagcaggaagtgaaagactttttccggtgggcaaaggatcacgtggttgaggtggagcatgagttctacgtcaaaaagggtggagccaaaaaaagacccgcccccagtgacgcagatataagtgagcccaaacgggcgcgcgagtcagttgcgcagccatcgacgtcagacgcggaagcttcgatcaactacgcggacaggtaccaaaacaaatgttctcgtcacgtgggcatgaatctgatgctgtttccctgcagacaatgcgagcgaatgaatcagaattcaaatatctgcttcactcacggacagaaagactgtttagagtgctttcccgtgtcagaatctcaacccgtttctgtcgtcaaaaaggcgtatcagaaactgtgctacattcatcacatcatgggaaaggtgccagacgcttgcactgcttgcgacctggtcaatgtggatttggatgactgcatctctgaacaataaatgatttaaatcaggtatggctgccgatggttatcttccagattggctcgaggacactctctctgaaggaataagacagtggtggaagctcaaacctggcccaccaccaaagcccgcagagcggcataaggacgacagcaggggtcttgtgcttcctggatacaagtacctcggacccttcaacggactcgacaagggagagccggtcaacgaggcagacgccgcggccctcgagcacgacaaggcctacgaccggcagctcgacagcggagacaacccgtacctcaagtacaaccacgccgacgcggagtttcaggagcgccttaaagaagatacgtcttttgggggcaacctcggacgagcagtcttccaggcgaaaaagagggttcttgaacctctgggcctggttgaggaacctgttaagacggctccgggaaaaaagaggcccgtagagcactctcctgtggagccagactcctcctcgggaaccggaaaagcgggcaaccagcctgcaagaaaaagattgaatttcggtcagactggagacgcagactccgtacctgacccccagcctctcggacagccaccagcagccccctctggtctgggaactaatacgatggctacaggcagtggcgcaccaatggcagacaataacgagggcgccgacggagtgggtaattcctcgggagattggcattgcgattccacatggatgggcgacagagtcatcaccaccagcacccgcacctgggccctgcccacctacaacaaccacctctacaagcagatttccagccaatcaggagccagcaatgacaaccactactttggctacagcaccccttgggggtattttgacttcaacagattccactgccacttttcgccacgcgactggcagagactcatcaacaacaactggggattccggcccaaaagactcaacctcaagctgtttaacattcaagtcaaggaggtcacgcagaatgacggtacgacgacgattgccaataaccttaccagcacggttcaggtgtttactgacttggagtaccagctcccgtacgtcctcggctcggcgcatcaaggatgcctcccgccgttcccagcagacgtcttcatggtgccacagtatggatacctcaccctgaacaacgggagtcaggcggtaggacgctcttccttttactgcctggagtactttccttctcagatgcttcgtaccggaaacaactttaccttcagctacacttttgaagacgttcctttccacagcagctacgctcacagtcaaagtctggaccgtctcatgaatcctctcatcgaccagtacctgtattacttgagcagaacaaacactccaagcggaaccactacgcagtccaggcttcagttttctcaggccggagcgagtgacattcgggaccagtctaggaactggcttcctggaccctgttaccgccagcagcgagtatcaaagacagctgcggataacaacaacggtgaatactcgtggactggagctaccaagtaccacctcaatggcagagactctctggtgaatccgggcccggccatggccagccacaaggacgatgaagaaaagttttttcctcaaagcggggttctcatctttgggaagcaaggctcagagaaaacaaatgtggacattgaaaaggtcatgattacagacgaagaggaaatcaggaccaccaatcccgtggctacggagcagtatggttctgtatctaccaacctccagagcggcaacacacgagcagctacctcagatgtcaacacacaaggcgttcttccaggcatggtctggcaggacagagacgtgtacctgcaggggcccatctgggcaaaaattccacacacggacggacattttcacccctctcccctcatgggcggatttggacttaaacaccctcctccacagattctcattaagaataccccggtacctgcgaatccttcgaccaccttcagcgcggcaaagtttgcttccttcatcacacagtattccacggggcaggtcagcgtggagatcgagtgggagctgcagaaggagaacagcaaacgctggaatcccgaaattcagtacacttccaactacaacaaatctgttaatgtggactttactgtggacactaatggggtgtattcagagcctcgccctattggcaccagatacctgactcgtaatctgtaattgcttgttaatcaataaaccgtttaattcgtttcagttgaactttggtctctgcgaagggcgaattcgtttaaacctgcaggactagtccctttagtgag

SEQ ID NO: 301 - protein, 734 aa, Adeno-associated virus
MAADGYLPDWLEDTLSEGIRQWWKLKPGPPPKPAERHKDDSRGLVLPGYKYLGPFNGLDKGEPVNEADAAALEHDKAYDRQLDSGDNPYLKYNHADAEFQERLKEDTSFGGNLGRAVFQAKKRVLEPLGLVEEPVKTAPGKKRPVEHSPVEPDSSSGTGKAGNQPARKRLNFGQTGDADSVPDPQPLGQPPAAPSGLGTNTMATGSGAPMADNNEGADGVGNSSGDWHCDSTWMGDRVITTSTRTWALPTYNNHLYKQISSQSGASNDNHYFGYSTPWGYFDFNRFHCHFSPRDWQRLINNNWGFRPKRLNLKLFNIQVKEVTQNDGTTTIANNLTSTVQVFTDLEYQLPYVLGSAHQGCLPPFPADVFMVPQYGYLTLNNGSQAVGRSSFYCLEYFPSQMLRTGNNFTFSYTFEDVPFHSSYAHSQSLDRLMNPLIDQYLYYLSRTNTPSGTTTQSRLQFSQAGASDIRDQSRNWLPGPCYRQQRVSKTAADNNNGEYSWTGATKYHLNGRDSLVNPGPAMASHKDDEEKFFPQSGVLIFGKQGSEKTNVDIEKVMITDEEEIRTTNPVATEQYGSVSTNLQSGNTRAATSDVNTQGVLPGMVWQDRDVYLQGPIWAKIPHTDGHFHPSPLMGGFGLKHPPPQILIKNTPVPANPSTTFSAAKFASFITQYSTGQVSVEIEWELQKENSKRWNPEIQYTSNYNKSVNVDFTVDTNGVYSEPRPIGTRYLTRNL

SEQ ID NO: 302 - DNA, 2208 bp, Adeno-associated virus
  source 1..2208: mol_type = unassigned DNA
atggctgccgatggttatcttccagattggctcgaggacactctctctgaaggaataagacagtggtggaagctcaaacctggcccaccaccaccaaagcccgcagagcggcataaggacgacagcaggggtcttgtgcttcctgggtacaagtacctcggacccttcaacggactcgacaagggagagccggtcaacgaggcagacgccgcggccctcgagcacgacaaggcctacgaccggcagctcgacagcggagacaacccgtacctcaagtacgaccacgccgacgcggagtttcaggagcgccttaaagaagatacgtcttttgggggcaacctcggacgagcagtcttccaggcaaaaaagagggttcttgaacctctgggcctggttgaggagcctgttaagacggctccgggaaaaaagaggccggtagagcactctcctgtggagccagactcctcctcgggaaccggaaaagcgggcaaccagcctgcaagaaagagattgaatttcggtcagactggagacgcagactccgtacctgacccccagcctctcggacagccaccagcagccccctctggtctgggaactaatacgatggctacaggcagtggcgcaccaatggcagacaataacgatggcgccgacggagtgggtaattcctcgggaaattggcattgcgattccacatggatgggcgacagagtcatcaccaccagcacccgaacctgggctctgcccacctacaacaaccatctgtacaagcagatttccagccaatcaggagccagcaacgacaaccactactttggctacagcaccccttgggggtattttgacttcaacagattccactgccacttttcaccacgtgactggcaaagactcatcaacaacaactggggattccggcccaagagactcaacttcaagctctttaacattcaagtcagagaggtcacgcagaatgatggtacgacgacgattgccaataaccttaccagcacggttcaggtgtttactgactcggagtaccagctcccgtacgtcctcggctcggcgcatcaaggatgcctcccgccgttcccagcagacgtcttcatggtgccacagtatggatacctcaccctgaacaacgggagtcaggcagtaggacgctcttcattttactgcctggagtacttcccttctcagatgctgcgtaccggaaacaactttaccttcagctacacctttgaggatgttcctttccacagcagctacgctcacagccagagtttggaccgtctcatgaatcctctcatcgaccagtacctgtattacttgagcagaacaaacactccaagcggaaccaccacgcagtccaggcttcagttttctcaggccggagcgagtgacattcgggatcagtctaggaactggcttcctggaccctgttaccgccagcagcgagtatcaaagacatctgcggacaacaacaacagtgaatactcgtggattggagctaccaagtaccacctcaatggcagagactctctggtgaatccgggcccggcaatggccagccacaaggacgatgaagaaaagttttttcctcagagcggggttctcatctttggaaaacaaggatcagagaaaacaaatgtggacattgaaaaggtcatgattacagacgaagaggaaatcagaaccaccaatcccgtggccacggagcagtatggttctgtatctaccaacctccagagcggcaacacacaagcatctactgcagatgtcaacacacaaggcgttcttccaggcatggtctggcaggacagagacgtgtacctgcaggggcctatctgggcaaagattccgcacacggacggacattttcacccctctcccctcatgggcggattcggacttaaacaccctcctccacagattctcatcaaaaacaccccggtacctgcgaatccttcgaccaccttcagtgcggcaaagtttgcttccttcatcacacagtattccacggggcgggtcagcgtggagatcgagtgggagctacagaaggagaacagcaaacgctggaatcccgagatccagtacacttccaactacaacaaatctgttaatgtggactttactgtggacactaatggtgtgtattcagagcctcgccccattggcaccagatacctgactcgtaatctgtaa

SEQ ID NO: 303 - protein, 735 aa, Adeno-associated virus
MAADGYLPDWLEDTLSEGIRQWWKLKPGPPPPKPAERHKDDSRGLVLPGYKYLGPFNGLDKGEPVNEADAAALEHDKAYDRQLDSGDNPYLKYDHADAEFQERLKEDTSFGGNLGRAVFQAKKRVLEPLGLVEEPVKTAPGKKRPVEHSPVEPDSSSGTGKAGNQPARKRLNFGQTGDADSVPDPQPLGQPPAAPSGLGTNTMATGSGAPMADNNDGADGVGNSSGNWHCDSTWMGDRVITTSTRTWALPTYNNHLYKQISSQSGASNDNHYFGYSTPWGYFDFNRFHCHFSPRDWQRLINNNWGFRPKRLNFKLFNIQVREVTQNDGTTTIANNLTSTVQVFTDSEYQLPYVLGSAHQGCLPPFPADVFMVPQYGYLTLNNGSQAVGRSSFYCLEYFPSQMLRTGNNFTFSYTFEDVPFHSSYAHSQSLDRLMNPLIDQYLYYLSRTNTPSGTTTQSRLQFSQAGASDIRDQSRNWLPGPCYRQQRVSKTSADNNNSEYSWIGATKYHLNGRDSLVNPGPAMASHKDDEEKFFPQSGVLIFGKQGSEKTNVDIEKVMITDEEEIRTTNPVATEQYGSVSTNLQSGNTQASTADVNTQGVLPGMVWQDRDVYLQGPIWAKIPHTDGHFHPSPLMGGFGLKHPPPQILIKNTPVPANPSTTFSAAKFASFITQYSTGRVSVEIEWELQKENSKRWNPEIQYTSNYNKSVNVDFTVDTNGVYSEPRPIGTRYLTRNL

SEQ ID NO: 304 - DNA, 2217 bp, Adeno-associated virus
  source 1..2217: mol_type = unassigned DNA
atggctgccgatggttatcttccagattggctcgaggacaacctctctgagggcattcgcgagtggtgggacttgaaacctggagccccgaaacccaaagccaaccagcaaaagcaggacgacggccggggtctggtgcttcctggctacaagtacctcggacccttcaacggactcgacaagggggagcccgtcaacgcggcggacgcagcggccctcgagcacgacaaggcctacgaccagcagctcaaagcgggtgacaatccgtacctgcggtataaccacgccgacgccgagtttcaggagcgtctgcaagaagatacgtcttttgggggcaacctcgggcgagcagtcttccaggccaagaagcgggttctcgaacctctcggtctggttgaggaaggcgctaagacggctcctggaaagaagagaccggtagagccatcaccccagcgttctccagactcctctacgggcatcggcaagacaggccagcagcccgcgaaaaagagactcaactttgggcagactggcgactcagagtcagtgcccgaccctcaaccaatcggagaaccccccgcaggcccctctggtctgggatctggtacaatggctgcaggcggtggcgctccaatggcagacaataacgaaggcgccgacggagtgggtagttcctcaggaaattggcattgcgattccgcatggctgggcgacagagtcatcaccaccagcacccgaccctgggccctccccacctacaacaaccacctctacaagcaaatctccaacgggacatcgggaggaagcaccaacgacaacacctacttcggctacagcaccccctgggggtattttgactttaacagattccactgccacttctcaccacgtgactggcagcgactcatcaacaacaactggggattccggcccaagagactcaacttcaagctcttcaacatccaggtcaaggaggtcacgcagaatgaaggcaccaagaccatcgccaataaccttaccagcacgattcaggtctttacggactcggaataccagctcccgtacgtcctcggctctgcgcaccagggctgcccgcctccgttcccggcggacgtcttcatgattcctcagtacgggtacctgactctgaacaacggcagtcaggccgtgggccgttcctccttctactgcctggagtactttccttctcaaatgcggagaacgggcaacaactttgagttcagctaccagtttgaggacgtgccttttcacagcagctacgcgcatagccaaagcctggaccggctgatgaaccccctcatcgaccagtacctgtactacctgtctcggactcagtccacgggaggtaccgcaggaactcagcagttgctattttctcaggccgggcctaataacatgtcggctcaggccaaaaactggctacccgggccctgctaccggcagcaacgcgtctccacgacactgtcgcaaaataacaacagcaactttgcttggaccggtgccaccaagtatcatctgaatggcagagactctctggtaaatcccggtgtcgctatggcaacgcacaaggacgacgaagagcgattttttccatccagcggagtcttgatgtttgggaaacagggagctggaaaagacaacgtggactatagcagcgttatgctaaccagtgaggaagaaatcaaaaccaccaacccagtggccacagaacagtacggcgtggtggccgataacctgcaacagcaaaacgccgctcctattgtaggggccgtcaacagtcaaggagccttacctggcatggtctggcagaaccgggacgtgtacctgcagggtcctatctgggccaagattcctcacacggacggcaactttcatccttcgccgctgatgggaggctttggactgaaacacccgcctcctcagatcctgattaagaatacacctgttcccgcggatcctccaactaccttcagtcaagccaagctggcgtcgttcatcacgcagtacagcaccggacaggtcagcgtggaaattgaatgggagctgcagaaagagaacagcaagcgctggaacccagagattcagtatacttccaactactacaaatctacaaatgtggactttgctgtcaatactgagggtacttattcagagcctcgccccattggcacccgttacctcacccgtaacctgtaa

SEQ ID NO: 305 - protein, 738 aa, Adeno-associated virus
MAADGYLPDWLEDNLSEGIREWWDLKPGAPKPKANQQKQDDGRGLVLPGYKYLGPFNGLDKGEPVNAADAAALEHDKAYDQQLKAGDNPYLRYNHADAEFQERLQEDTSFGGNLGRAVFQAKKRVLEPLGLVEEGAKTAPGKKRPVEPSPQRSPDSSTGIGKTGQQPAKKRLNFGQTGDSESVPDPQPIGEPPAGPSGLGSGTMAAGGGAPMADNNEGADGVGSSSGNWHCDSAWLGDRVITTSTRPWALPTYNNHLYKQISNGTSGGSTNDNTYFGYSTPWGYFDFNRFHCHFSPRDWQRLINNNWGFRPKRLNFKLFNIQVKEVTQNEGTKTIANNLTSTIQVFTDSEYQLPYVLGSAHQGCPPPFPADVFMIPQYGYLTLNNGSQAVGRSSFYCLEYFPSQMRRTGNNFEFSYQFEDVPFHSSYAHSQSLDRLMNPLIDQYLYYLSRTQSTGGTAGTQQLLFSQAGPNNMSAQAKNWLPGPCYRQQRVSTTLSQNNNSNFAWTGATKYHLNGRDSLVNPGVAMATHKDDEERFFPSSGVLMFGKQGAGKDNVDYSSVMLTSEEEIKTTNPVATEQYGVVADNLQQQNAAPIVGAVNSQGALPGMVWQNRDVYLQGPIWAKIPHTDGNFHPSPLMGGFGLKHPPPQILIKNTPVPADPPTTFSQAKLASFITQYSTGQVSVEIEWELQKENSKRWNPEIQYTSNYYKSTNVDFAVNTEGTYSEPRPIGTRYLTRNL

SEQ ID NO: 306 - protein, 735 aa, Adeno-associated virus
MAADGYLPDWLEDTLSEGIRQWWKLKPGPPPPKPAERHKDDSRGLVLPGYKYLGPFNGLDKGEPVNEADAAALEHDKAYDRQLDSGDNPYLKYNHADAEFQERLKEDTSFGGNLGRAVFQAKKRVLEPLGLVEEPVKTAPGKKRPVEHSPVEPDSSSGTGKAGQQPARKRLNFGQTGDADSVPDPQPLGQPPAAPSGLGSTTMATGSGAPMADNNEGADGVGNSSGNWHCDSQWLGDRVITTSTRTWALPTYNNHLYKQISSQSGASNDNHYFGYSTPWGYFDFNRFHCHFSPRDWQRLINNNWGFRPKRLNFKLFNIQVKEVTQNDGTTTIANNLTSTVQVFTDSEYQLPYVLGSAHQGCLPPFPADVFMVPQYGYLTLNNGSQAVGRSSFYCLEYFPSQMLRTGNNFQFSYTFEDVPFHSSYAHSQSLDRLMNPLVDQYLYYLNKTQTNSGTLQQSRLLFSQAGPTNMSLQAKNWLPGPCYRQQRLSKQANDNNNSNFPWTAATKYHLNGRDSLVNPGPAMASHKDDEEKFFPMHGTLIFGKQGTNANDADLENVMITDEEEIRTTNPVATEQYGTVSNNLQNSNTGPTTGTVNHQGALPGMVWQDRDVYLQGPIWAKIPHTDGHFHPSPLMGGFGLKHPPPQIMIKNTPVPANPPTNFSSAKFASFITQYSTGQVSVEIEWELQKENSKRWNPEIQYTSNYNKSVNVDFTVDTNGVYSEPRPIGTRYLTRNL

SEQ ID NO: 307 - DNA, 3158 bp, Adeno-associated virus
  source 1..3158: mol_type = unassigned DNA
gattgaatttagcggccgcgaattcgcccttgctgcgtcaactggaccaatgagaactttcctttcaatgattgcgtcgacaagatggtgatctggtgggaggagggaaagatgaccgccaaggtcgtggagtcggccaaagccattctcggaggaagcaaggtgcgcgcggaccagaaatgcaagtcctcggcccagatagacccgactcccgtgattgtcacctccaacaccaacatgtgcgccgtgattgacgggaactcaacgaccttcgaacaccagcagccgttgcaagaccggatgttcaaatttgaactcacccgccgtctggatcatgactttgggaaggtcaccaagcaggaagtcaaagactttttccggtgggcaaaggatcacgtggttgaggtggagcatgaattctacgtcaaaaagggtggagctaagaaaagacccgcccccagtgacgcagatataagtgagcccaaacgggcgcgcgagtcagttgcgcagccatcgacgtcagacgcggaagcttcgatcaactacgcgggcaggtaccaaaacaaatgttctcgtcacgtgggcatgaatctgatgctgtttccctgcagacaatgcgagagaatgaatcagaattcaaatatctgcttcactcacggacagaaagactgtttagagtgctttcccgtgtcagaatctcaacccgtttctgtcgtcaaaaaggcgtatcagaaactttgctacattcatcatatcatgggaaaggtgccagacgcttgcactgcctgcgatctggtcaatgtggatttggatgactgcatctctgaacaataaatgatttaaatcaggtatggctgccgatggttatcttccagattggctcgaggacactctctctgaaggaataagacagtggtggaagctcaaacctggcccaccaccaccaaagcccgcagagcggcataaggacgacagcaggggtcttgtgcttcctgggtacaagtacctcggacccttcaacggactcgacaagggggagccggtcaacgaggcagacgccgcggccctcgagcacgacaaggcctacgaccggcagctcgacagcggagacaacccgtacctcaagtacaaccacgccgacgcggagtttcaggagcgccttaaagaagatacgtcttttgggggcaacctcggacgagcagtcttccaggcaaaaaagagggttcttgaacctctgggcctggttgaggaacctgttaaaacggctccgggaaaaaagaggccggtagagcactctcctgtggagccagactcctcctcgggaaccggaaaagcgggccagcagcctgcaagaaaaagattgaatttcggtcagactggagacgcagactccgtacctgacccccagcctctcggacagccaccagcagccccctctggtctgggatctactacaatggctacaggcagtggcgcaccaatggcagacaataacgagggtgccgatggagtgggtaattcctcgggaaattggcattgcgattcccaatggctgggcgacagagtcatcaccaccagcacccgcacctgggccctgcccacctacaacaaccacctctacaagcaaatctccagccaatcaggagcctcaaacgacaaccactactttggctacagcaccccctgggggtattttgacttcaacagattccactgccacttttcaccacgtgactggcaaagactcatcaacaacaactggggattccgacccaagagactcaacttcaagctctttaacattcaagtcaaagaggtcacgcagaatgacggtacgacgacgattgccaataaccttaccagcacggttcaggtgtttactgactcggagtaccagctcccgtacgtcctcggctcggcgcatcaaggatgcctcccgccgtttccagcggacgtcttcatggtcccacagtatggatacctcaccctgaacaacgggagtcaggcagtaggacgctcttcattttactgcctggagtactttccttctcagatgctgcgtaccggaaacaactttcaattcagctacacttttgaagacgtgcctttccacagcagctacgctcacagccagagtctggatcggctgatgaatcctctggtcgaccagtacctgtattatctgaacaagacacaaacaaatagtggaactcttcagcagtctcggctactgtttagccaagctggacccaccaacatgtctcttcaagctaaaaactggctgcctggaccttgctacagacagcagcgtctgtcaaagcaggcaaacgacaacaacaacagcaactttccctggactgcagctacaaagtatcatctaaatggccgggactcgttggttaatccaggaccagctatggccagtcacaaggatgacgaagaaaagtttttccccatgcatggaacccttatatttggtaaacaaggaacaaatgccaacgacgcggatttggaaaatgtcatgattacagatgaagaagaaatcaggaccaccaatcccgtggctacggagcagtacggaactgtatcaaataatttgcaaaactcaaacactggtccaactactggaactgtcaatcaccaaggagcgttacctggtatggtgtggcaggatcgagacgtgtacctgcagggacccatttgggccaagattcctcacaccgatggacactttcatccttctccactgatgggaggttttggactcaaacacccacctcctcaaatcatgatcaaaaacactcccgttccagccaatcctcccacaaacttcagttctgccaagtttgcttctttcatcacacagtattccacggggcaggtcagcgtggagatcgagtgggagctgcagaaggagaacagcaaacgctggaatcccgaaattcagtacacttccaactacaacaaatctgttaatgtggactttactgtggacactaatggtgtgtattcagagcctcgccccattggcaccagatacctgactcgtaatctgtaattgcttgttaatcaataaaccgtttaattcgtttcagttgaactttggtctctgcgaagggcgaattcgtttaaacctgcaggactagtccctttagtga

SEQ ID NO: 308 - protein, 735 aa, Adeno-associated virus
MAADGYLPDWLEDTLSEGIRQWWKLKPGPPPPKPAERHKDDSRGLVLPGYKYLGPFNGLDKGEPVNEADAAALEHDKAYDRQLDSGDNPYLKYNHADAEFQERLKEDTSFGGNLGRAVFQAKKRVLEPLGLVEEPVKTAPGKKRPVEHPPVEPDSSSGTGKAGQQPARKRLNFGQTGDADSVPDPQPLGQPPAAPSGLGSTTMATGSGAPMADNNEGADGVGNSSGNWHCDSQWLGDRVITTSTRTWALPTYNNHLYKQISSQSGASNDNHYFGYSTPWGYFDFNRFHCHFSPRDWQRLINNNWGFRPKRLNFKLFNIQVKEVTQNDGTTTIANNLTSTVQVFTDSEYQLPYVLGSAHQGCLPPFPADVFMVPQYGYLTLNNGSQAVGRSSFYCLEYFPSQMLRTGNNFQFSYTFEDVPFHSSYAHSQSLDRLMNPLIDQYLYYLNKTQTNSGTLQQSRLLFSQAGPTNMSLQAKNRLPGPCYRQQRLSKQANDNNNSNFPWTAATKYHLNGRDSLVNPGPAMASHKDDEEKFFPMHGTLIFGKQGTNANDADLENVMITDEEEIRTTNPVATEQYGTVSNNLQNSNTGPTTGTVNHQGALPGMVWQDRDVYLQGPIWAKIPHTDGHFHPSPLVGGFGLKHPPPQIMIKNTPVPANPPTNFSSAKFASFITQYSTGQVSVEIEWELQKENSKRWNPEIQYTSNYNKSVNVDFTVDTNGVYSEPRPIGTRYLTRNL

SEQ ID NO: 309 - DNA, 3159 bp, Adeno-associated virus
  source 1..3159: mol_type = unassigned DNA
gattgaatttagcggccgcgaattcgcccttgctgcgtcaactggaccaatgagaactttcctttcaatgattgcgtcgacaagatggtgatctggtgggaggagggaaagatgaccgccaaggtcgtggagtcggccaaagccattctcggaggaagcaaggtgcgcgtggaccagaaatgcaagtcctcggcccagatagacccgactcccgtgattgtcacctccaacaccgacatgtgcgccgtgattgacgggaactcaacgaccttcgaacaccagcagccgttgcaagaccggatgttcaaatttgaactcacccgccgtctggatcatgactttgggaaggtcaccaagcaggaagtcaaagactttttccggtgggcaaaggatcacgtggttgaggtggagcatgaattctacgtcaaaaagggtggagctaagaaaagacccgcccccagtgacgcagatataagtgagcccaaacgggcgcgcgagtcagttgcgcagccatcgacgtcagacgcggaagcttcgatcaactacgcggacaggtaccaaaacaaatgttctcgtcacgtgggcatgaatctgatgctgtttccctgcagacaatgcgagagaatgaatcagaattcaaatatctgcttcactcacggacagaaagactgtttagagtgctttcccgtgtcagaatctcaacccgtttctgtcgtcaaaaaggcgtatcagaaactttgctacattcatcatatcatgggaaaggtgccagacgcttgcactgcctgcgatctggtcaatgtggatttggatgactgcatctctgaacaataaatgatttaaatcaggtatggctgccgatggttatcttccagattggctcgaggacactctctctgaaggaataagacagtggtggaagctcaaacctggcccaccaccaccaaagcccgcagagcggcataaggacgacagcaggggtcttgtgcttcctgggtacaagtacctcggacccttcaacggactcgacaagggggagccggtcaacgaggcagacgccgcggccctcgagcacgacaaggcctacgaccggcagctcgacagcggagacaacccgtacctcaagtacaaccacgccgacgcggagtttcaggagcgccttaaagaagatacgtcttttgggggcaacctcggacgagcagtcttccaggcaaaaaagagggttcttgaacctctgggcctggttgaggaacctgttaaaacggctccgggaaaaaagaggccggtagagcaccctcctgtggagccagactcctcctcgggaaccggaaaagcgggccagcagcctgcaagaaaaagattgaatttcggtcagactggagacgcagactccgtacctgacccccagcctctcggacagccaccagcagccccctctggtctgggatctactacaatggctacaggcagtggcgcaccaatggcagacaataacgagggtgccgatggagtgggtaattcctcgggaaattggcattgcgattcccaatggctgggcgacagagtcatcaccaccagcacccgcacctgggccctgcccacctacaacaaccacctctacaagcaaatctccagccaatcaggagcctcaaacgacaaccactactttggctacagcaccccctgggggtattttgacttcaacagattccactgccacttttcaccacgtgactggcaaagactcatcaacaacaactggggattccgacccaagagactcaacttcaagctctttaacattcaagtcaaagaggtcacgcagaatgacggtacgacgacgattgccaataaccttaccagcacggttcaggtgtttactgactcggagtaccagctcccgtacgtcctcggctcggcgcatcaaggatgcctcccgccgtttccagcggacgtcttcatggtcccacagtatggatacctcaccctgaacaacgggagtcaggcagtaggacgctcttcattttactgcctggagtactttccttctcagatgctgcgtaccggaaacaactttcagttcagctacacttttgaagacgtgcctttccacagcagctacgctcacagccagagtctggatcggctgatgaatcctctgatcgaccagtacctgtattatctgaacaagacacaaacaaatagtggaactcttcagcagtctcggctactgtttagccaagctggacccaccaacatgtctcttcaagctaaaaaccggctgcctggaccttgctacagacagcagcgtctgtcaaagcaggcaaacgacaacaacaacagcaactttccctggaccgcagctacaaagtatcatctaaatggccgggactcgttggttaatccaggaccagctatggccagtcacaaggatgacgaagaaaagtttttccccatgcatggaacccttatatttggtaaacaaggaacaaatgccaacgacgcggatttggaaaatgtcatgattacagatgaagaagaaatcaggaccaccaatcccgtggctacggagcagtacggaactgtatcaaataatttgcaaaactcaaacactggtccaactactggaactgtcaatcaccaaggagcgttacctggtatggtgtggcaggatcgagacgtgtacctgcagggacccatttgggccaagattcctcacaccgatggacactttcatccttctccactggtgggaggttttggactcaaacacccacctcctcaaatcatgatcaaaaacactcccgttccagccaatcctcccacaaacttcagttctgccaagtttgcttctttcatcacacagtattccacggggcaggtcagcgtggagatcgagtgggagctgcagaaggagaacagcaaacgctggaatcccgaaattcagtacacttccaactacaacaaatctgttaatgtggactttactgtggacactaatggtgtgtattcagagcctcgccccattggcaccagatacctgactcgtaatctgtaattgcttgttaatcaataaaccgtttaattcgtttcagttgaactttggtctctgcgaagggcgaattcgtttaaacctgcaggactagtccctttagtgag

SEQ ID NO: 310 - DNA, 2208 bp, Adeno-associated virus
  source 1..2208: mol_type = unassigned DNA
atggctgccgatggttatcttccagattggctcgaggacactctctctgaaggaataagacagtggtggaagctcaaacctggcccaccaccaccaaagcccgcagagcggcataaggacgacagcaggggtcttgtgcttcctgggtacaagtaccttggacccttcaacggactcgacaagggagagccggtcaacgaggcagacgccgcggccctcgagcacgacaaggcctacgaccggcagctcgacagcggagacaacccgtaccccaagtacaaccacgccgacgcggagttccaggagcgtcttaaagaagatacgtcttttgggggcaacctcggacgagcagtcttccaggcgaaaaagagggttcttgaacctctgggcctggttgaggaacctgttaagacggctccgggaaaaaagaggccggtagagcactctcctgcggagccagactcctcctcgggaaccggaaaagcgggccagcagcctgcaagaaagagattgaatttcggtcagactggagacgcagactccgtacctgacccccagcctctcggacagccaccagcagccccctctggtctgggaactaatacgatggctacaggcagtggcgcaccaatggcagacaataacgagggcgccgacggagtgggtaattcctcgggaaattggcattgcgattccacatggatgggcgacagagtcatcaccaccagcacccgcacctgggctctgcccacctacaacaaccacctctacaagcagatttccagccaatcaggagcctcaaacgacaaccactactttggctacagcaccccttgggggtattttgacttcaacagattccactgccacttttcgccacgtgactggcaaagactcatcaacaacaattggggattccggcccaaaagactcaacttcaagctctttaacattcaagtcaaggaggtcacgcagaatgacggtacgacgacgattgccaataaccttaccagcacggttcaggtgtttactgactcggagtaccagctcccgtacgtcctcggctcggcgcatcaaggatgcctcccgccgttcccagcagacgtcttcatggtgccacagtatggatacctcaccctgaacaacgggagtcaggcagtaggacgctcttcattttactgcctggagtactttccttctcagatgctgcgtaccggaaacaactttaccttcagctacacctttgaggacgttcctttccacagcagctacgcccacagccagagtttggaccgtctcatgaatcctctcatcgaccagtacctgtattacttgagcagaacaaacactccaagcggaaccaccacgcagtcaaggcttcagttttctcaggccggagcaagtgacattcgggaccagtctaggaactggcttcctggaccctgttaccgccagcagcgagtatcaaagacatctgcggataacaacaacagtgaatactcgtggactggagctaccaagtaccaccttaatggaagagactctctggtgaatccgggcccggccatggccagccacaaggacgatgaagaaaagttttttcctcagagcggggttctcatctttggaaaacaagactcgggaaaaactaatgtggacattgaaaaggtcatgattacagacgaagaggaaatcaggaccaccaatcccgtggctacggagcagtatggttctgtatctaccaacctccagagcggcaacacacaagcagctacctcagatgtcaacacacaaggcgttcttccaggcatggtgtggcaggacagagacgtgtacctgcaggggcccatctgggcaaagattccacacacggacggacattttcacccctctcccctcatgggcggattcggacttaaacaccctcccccgcagattctcatcaagaacaccccggtacctgcgaatccttcgactaccttcagtgcggcaaagtttgcttccttcattacacagtactccacggggcaggtcagcgtggagatcgagtgggagctgcagaaggagaacagcaaacgctggaatcccgagattcagtacacttccaactacaacaaatctgttaatgtggactttactgtggacactaatggtgtgtattcagagcctcgccccattggcaccaggtacctgactcgtaatctgtaa

SEQ ID NO: 311 - protein, 735 aa, Adeno-associated virus
MAADGYLPDWLEDTLSEGIRQWWKLKPGPPPPKPAERHKDDSRGLVLPGYKYLGPFNGLDKGEPVNEADAAALEHDKAYDRQLDSGDNPYPKYNHADAEFQERLKEDTSFGGNLGRAVFQAKKRVLEPLGLVEEPVKTAPGKKRPVEHSPAEPDSSSGTGKAGQQPARKRLNFGQTGDADSVPDPQPLGQPPAAPSGLGTNTMATGSGAPMADNNEGADGVGNSSGNWHCDSTWMGDRVITTSTRTWALPTYNNHLYKQISSQSGASNDNHYFGYSTPWGYFDFNRFHCHFSPRDWQRLINNNWGFRPKRLNFKLFNIQVKEVTQNDGTTTIANNLTSTVQVFTDSEYQLPYVLGSAHQGCLPPFPADVFMVPQYGYLTLNNGSQAVGRSSFYCLEYFPSQMLRTGNNFTFSYTFEDVPFHSSYAHSQSLDRLMNPLIDQYLYYLSRTNTPSGTTTQSRLQFSQAGASDIRDQSRNWLPGPCYRQQRVSKTSADNNNSEYSWTGATKYHLNGRDSLVNPGPAMASHKDDEEKFFPQSGVLIFGKQDSGKTNVDIEKVMITDEEEIRTTNPVATEQYGSVSTNLQSGNTQAATSDVNTQGVLPGMVWQDRDVYLQGPIWAKIPHTDGHFHPSPLMGGFGLKHPPPQILIKNTPVPANPSTTFSAAKFASFITQYSTGQVSVEIEWELQKENSKRWNPEIQYTSNYNKSVNVDFTVDTNGVYSEPRPIGTRYLTRNL

SEQ ID NO: 312 - DNA, 2208 bp, Adeno-associated virus
  source 1..2208: mol_type = unassigned DNA
atggctgccgatggttatcttccagattggctcgaggacactctctctgaaggaataagacagtggtggaagctcaaacctggcccaccaccaccaaagcccgcagagcggcataaggacgacagcaggggtcttgtgcttcctgggtacaagtaccttggacccttcaacggactcgacaagggagagccggtcaacgaggcagacgccgcggccctcgagcacgacaaggcctacgaccggcagctcgacggcggagacaacccgtacctcaagtacaaccacgccgacgcggagttccaggagcgtcttaaagaagatacgtcttttgggggcaacctcggacgagcagtcttccaggcgaaaaagagggttcttgaacctctgggcctggttgaggaacctgttaagacggctccgggaaaaaagaggccggtagagcactctcttgcggagccagactcctcctcgggaaccggaaaagcgggccagcagcctgcaagaaggagattgaatttcggtcagactggagacgcagactccgtacctgacccccagcctctcggacagccaccagcagccccctctggtctgggaactaatacgatggctacaggcagtggcgcaccaatggcagacaataacgagggcgccgacggagtgggtaattcctcgggaaattggcattgcgattccacatggatgggcgacagagtcatcaccaccagcacccgcacctgggctctgcccacctacaacaaccacctctacaggcagatttccagccaatcaggagcctcaaacgacaaccactactttggctacagcaccccttgggggtattttgacttcaacagattccactgccacttttcgccacgtgactggcaaagactcatcaacaacaattggggatcccggcccaaaagactcaacttcaagctctttaacattcaagtcaaggaggtcacgcagaatgacggtacgacgacgattgccaataaccttaccagcacggttcaggtgtttactgactcggagtaccagctcccgtacgtcctcggctcggcgcatcaaggatgcctcccgccgttcccagcagacgtcttcatggtgccacagtatggatacctcaccctgaacaacgggagtcaggcagtaggacgctcttcattttactgcctggagtactttccttctcagatgctgcgtaccggaaacaactttaccttcagctacacctttgaggacgttcctttccacagcagctacgcccacagccagagtttggaccgtctcatgaatcctctcgtcgaccagtacctgtattacttgagcagaacaaacactccaagcggaaccaccacgcagtcaaggcttcagttttctcaggccggagcaagtgacattcgggaccagtctaggaactggcttcctggaccctgttaccgccagcagcgagtatcaaagacatctgcggataacaacaacagtgaatactcgtggactggagctaccaagtaccaccttaatggaagagactctctggtgaatccgggcccggccatggccagccacaaggacgatgaagaaaagttttttcctcagagcggggttctcatctttggaaaacaagactcgggaaaaactaatgtggacattgaaaaggtcatgattacagacgaagaggaaatcaggaccaccaatcccgtggctacggagcagtatggttctgtatctaccaacctccagagcggcaacacacaagcagctacctcagatgtcaacacacaaggcgttcttccaggcatggtgtggcaggacagagacgtgtacctgcaggggcccatctgggcaaagattccacacacggacggacattttcacccctctcccctcatgggcggattcggacttaaacaccctcccccgcagattctcatcaagaacaccccggtacctgcgaatccttcgactaccttcagtgcggcaaagtttgcttccttcattacacagtactccacggggcaggtcagcgtggagatcgagtgggagctgcagaaggagaacagcaaacgctggaatcccgagattcagtacacttccaactacaacaaatctgttaatgtggactttactgtggacactaatggtgtgtattcagagcctcgccccattggcaccagatacctgactcgtaatctgtaa

SEQ ID NO: 313 - protein, 735 aa, Adeno-associated virus
MAADGYLPDWLEDTLSEGIRQWWKLKPGPPPPKPAERHKDDSRGLVLPGYKYLGPFNGLDKGEPVNEADAAALEHDKAYDRQLDGGDNPYLKYNHADAEFQERLKEDTSFGGNLGRAVFQAKKRVLEPLGLVEEPVKTAPGKKRPVEHSLAEPDSSSGTGKAGQQPARRRLNFGQTGDADSVPDPQPLGQPPAAPSGLGTNTMATGSGAPMADNNEGADGVGNSSGNWHCDSTWMGDRVITTSTRTWALPTYNNHLYRQISSQSGASNDNHYFGYSTPWGYFDFNRFHCHFSPRDWQRLINNNWGSRPKRLNFKLFNIQVKEVTQNDGTTTIANNLTSTVQVFTDSEYQLPYVLGSAHQGCLPPFPADVFMVPQYGYLTLNNGSQAVGRSSFYCLEYFPSQMLRTGNNFTFSYTFEDVPFHSSYAHSQSLDRLMNPLVDQYLYYLSRTNTPSGTTTQSRLQFSQAGASDIRDQSRNWLPGPCYRQQRVSKTSADNNNSEYSWTGATKYHLNGRDSLVNPGPAMASHKDDEEKFFPQSGVLIFGKQDSGKTNVDIEKVMITDEEEIRTTNPVATEQYGSVSTNLQSGNTQAATSDVNTQGVLPGMVWQDRDVYLQGPIWAKIPHTDGHFHPSPLMGGFGLKHPPPQILIKNTPVPANPSTTFSAAKFASFITQYSTGQVSVEIEWELQKENSKRWNPEIQYTSNYNKSVNVDFTVDTNGVYSEPRPIGTRYLTRNL

SEQ ID NO: 314 - protein, 738 aa, Adeno-associated virus
MAADGYLPDWLEDNLSEGIREWWDLKPGAPKPKANQQKQDDGRGLVLPGYKYLGPFNGLDKGEPVNAADAAALEHDKAYDQQLKAGDNPYLRYNHADAEFQERLQEDTSFGGNLGRAVFQAKKRVLEPLGLVEEAAKTAPGKKRPVEPSPQRSPDSSAGIGKKGQQPAKKRLNFGQTGDSESVPDPQPIGEPPAGPSGLGSGTMAAGGGAPMADNNEGADGVGSSSGNWHCDSTWLGDRVITTSTRTWALPTYNNHLYKQISNGTSGGSTNDNTYFGYSTPWGYFDFNRFHCHFSPRDWQRLINNNWGFRPKRLSFKLFNIQVKEVTQNEGTETIANNLTSTIQVFTDSEYQLPYVLGSAHQGCLPPFPADVFMIPQYGYLTLNNGSQAVGRSSFYCLEYFPSQMLRTGNNFEFSYTFEDVPFHSSCAHSQSSDRLMNPLIDQYLYYLSRTRSTGGTQGTQQLLFSQAGPANMSAQAKNWLPGPCYRQQRVSTTLSQNNNSNFAWTGATKYHLNGRDSLVNPGVAMATHKDDEERFFPSSGVLMFGKQGAGRDNVDYSSVMLTSEEEIKTTNPVATEQYGVVADNLQQTNTGPIVGNVNSQGALPGMVWQNRDVYLQGPIWAKIPHTDGNFHPSPLMGGFGLKHPPPQILIKNTPVPADPPTTFSQAKLASFITQYSTGQVSVEIEWELQKENSKRWNPEIQYTSNYYKSTNVDFAVNTEGTYSEPRPIGTRYLTRNL

SEQ ID NO: 315 - DNA, 2217 bp, Adeno-associated virus
  source 1..2217: mol_type = unassigned DNA
atggctgctgacggttatcttccagattggctcgaggacaacctctctgagggcattcgcgagtggtgggacctgaaacctggagcccccaagcccaaggccaaccagcagaagcaggacgacggccggggtctggtgcttcttggctacaagtacctcggacccttcaacggactcgacaagggggagcccgtcaatgcggcggacgcagcggccctcgagcacgacaaggcctacgaccagcagctcaaagcgggtgacaatccgtacctgcggtataaccacgccgacgccgagtttcaggagcgtctgcaagaagatacgtcttttgggggcaacctcgggcgagcagtcttccaggccaagaagcgggttctcgaacctctcggtctggttgaggaagctgctaagacggctcctggaaagaagagaccggtagaaccgtcacctcagcgttcccccgactcctccacgggcatcggcaagaaaggccagcagcccgctaaaaagagactgaactttggtcagactggcgactcagagtcagtccccgaccctcaaccaatcggagaaccaccagcaggcccctctggtctgggatctggtacaatggctgcaggcggtggcgctccaatggcagacaataacgaaggcgccgacggagtgggtagttcctcaggaaattggcattgcgattccacatggctgggcgacagagtcatcaccaccagcacccgaacctgggccctgcccacctacaacaaccacctctacaagcaaatatccaatgggacatcgggaggaagcaccaacgacaacacctacttcggctacagcaccccctgggggtattttgacttcaacagattccactgccacttctcaccacgtgactggcagcgactcatcaacaacaactggggattccggccaaaaagactcagcttcaagctcttcaacatccaggtcaaggaggtcacgcagaatgaaggcaccaagaccatcgccaataaccttaccagcacgattcaggtatttacggactcggaataccagctgccgtacgtcctcggctccgcgcaccagggctgcctgcctccgttcccggcggacgtcttcatgattccccagtacggctaccttacactgaacaatggaagtcaagccgtaggccgttcctccttctactgcctggaatattttccatctcaaatgctgcgaactggaaacaattttgaattcagctacaccttcgaggacgtgcctttccacagcggctacgcacacagccagagcttggaccgactgatgaatcctctcatcgaccagtacctgtactacttatccagaactcagtccacaggaggaactcaaggtacccagcaattgttattttctcaagctgggcctgcaaacatgtcggctcaggctaagaactggctacctggaccttgctaccggcagcagcgagtctctacgacactgtcgcaaaacaacaacagcaactttgcttggactggtgccaccaaatatcacctgaacggaagagactctttggtaaatcccggtgtcgccatggcaacccacaaggacgacgaggaacgcttcttcccgtcgagtggagtcctgatgtttggaaaacagggtgctggaagagacaatgtggactacagcagcgttatgctaaccagcgaagaagaaattaaaaccactaaccctgtagccacagaacaatacggtgtggtggctgacaacttgcagcaaaccaatacagggcctattgtgggaaatgtcaacagccaaggagccttacctggcatggtctggcagaaccgagacgtgtacctgcagggtcccatctgggccaagattcctcacacggacggcaacttccacccttcaccgctaatgggaggatttggactgaagcacccacctcctcagatcctgatcaagaacacgccggtacctgcggatcctccaacgacgttcagccaggcgaaattggcttccttcattacgcagtacagcaccggacaggtcagcgtggaaatcgagtgggagctgcagaaggagaacagcaaacgctggaacccagagattcagtacacttcaaactactacaaatctacaaatgtggactttgctgtcaatacagagggaacttattctgagcctcgccccattggtactcgttacctcacccgtaatctgtaa

SEQ ID NO: 316 - protein, 738 aa, Adeno-associated virus
MAADGYLPDWLEDNLSEGIREWWDLKPGAPKPKANQQKQDDGRGLVLLGYKYLGPFNGLDKGEPVNAADAAALEHDKAYDQQLKAGDNPYLRYNHADAEFQERLQEDTSFGGNLGRAVFQAKKRVLEPLGLVEEAAKTAPGKKRPVEPSPQRSPDSSTGIGKKGQQPAKKRLNFGQTGDSESVPDPQPIGEPPAGPSGLGSGTMAAGGGAPMADNNEGADGVGSSSGNWHCDSTWLGDRVITTSTRTWALPTYNNHLYKQISNGTSGGSTNDNTYFGYSTPWGYFDFNRFHCHFSPRDWQRLINNNWGFRPKRLSFKLFNIQVKEVTQNEGTKTIANNLTSTIQVFTDSEYQLPYVLGSAHQGCLPPFPADVFMIPQYGYLTLNNGSQAVGRSSFYCLEYFPSQMLRTGNNFEFSYTFEDVPFHSGYAHSQSLDRLMNPLIDQYLYYLSRTQSTGGTQGTQQLLFSQAGPANMSAQAKNWLPGPCYRQQRVSTTLSQNNNSNFAWTGATKYHLNGRDSLVNPGVAMATHKDDEERFFPSSGVLMFGKQGAGRDNVDYSSVMLTSEEEIKTTNPVATEQYGVVADNLQQTNTGPIVGNVNSQGALPGMVWQNRDVYLQGPIWAKIPHTDGNFHPSPLMGGFGLKHPPPQILIKNTPVPADPPTTFSQAKLASFITQYSTGQVSVEIEWELQKENSKRWNPEIQYTSNYYKSTNVDFAVNTEGTYSEPRPIGTRYLTRNL

SEQ ID NO: 317 - protein, 735 aa, Adeno-associated virus
MAADGYLPDWLEDTLSEGIRQWWKLKPGPPPPKPAERHKDDSRGLVLPGYKYLGPFNGLDKGEPVNEADAAALEHDKAYDRQLDSGDNPYLKYNHADAEFQERLKEDTSFGGNLGRAVFQAKKRVLEPLGLVEPPVKTAPGKKRPVEHSPAEPDSSSGTGKAGQQPARKRLNFGQTGDADSVPDPQPLGQPPAAPSGLGSTTMATGSGAPMADNNEGADGVGNSSGNWHCDSQWLGDRVITTSTRTWALPTYNNHLYKQISSQSGASNDNHYFGYSTPWGYFDFNRFHCHFSPRDWQRLINNNWGFRPKRLNFKLFNIQVKEVTQNDGTTTIANNLTSTVQVFTDSEYQLPYVLGSAHQGCLPPFPADVFMVPQYGYLTLNNGSQAVGRSSFYCLEYFPSQMLRTGNNFQFSYTFEDVPFHSSYAHSQSLDRLMNPLIDQYLYYLNKTQSNSGTLQQSRLLFSQAGPTSMSLQAKNWLPGPCYRQQRLSKQANDNNNSNFPWTAATKYHLNGRDSLVNPGPAMASHKDDEEKFFPMHGTLIFGKQGTNANDADLDNVMITDEEEIRTTNPVATEQYGYVSNNLQNSNTGPTTGTVNHQGALPGMVWQDRDVYLQGPIWAKIPHTDGHFHPSPLMGGFGLKHPPPQIMIKNTPVPANPPTNFSSAKFASFITQYSTGQVSVEIEWELQKENSKRWNPEIQYTSNYNKSVNVDFTVDTNGVYSEPRPIGTRYLTRNL

SEQ ID NO: 318 - protein, 735 aa, Adeno-associated virus
MAADGYLPDWLEDTLSEGIRQWWKLKPGPPPPKPAERHKDDSRGLVLPGYKYLGPFNGLDKGEPVNEADAAALEHDKAYDRQLDSGDNPYLKYNHADAEFQERLKEDTSFGGNLGRAVFQAKKRVLEPLGLVEGPVKTAPGKKRPVEHSPAEPDSSSGTGKAGQQPARKRLNFGQTGDADSVPDPQPLGQPPAAPSGLGSTTMATGSGAPMADNNEGADGVGNSSGNWHCDSQWLGDRVITTSTRTWALPTYNNHLYKQISSQSGASNDNHYFGYSTPWGYFDFNRFHCHFSPRDWQRLINNNWGFRPKRLNFKLFNIQVKEVTQNDGTTTIANNLTSTVQVFTDSEYQLPYVLGSAHQGCLPPFPADVFMVPQYGYLTLNNGSQAVGRSSFYCLEYFPSQMLRTGNNFQFSYTFEDVPFHSSYAHSQSLDRLMNPLIDQYLYYLNKTQSNSGTLQQSRLLFSQAGPTSMSLQAKNWLPGPCYRQQRLSKQANDNNNSNFPWTAATKYHLNGRDSLVNPGPAMASHKDDEEKFFPMHGTLIFGKQGTNANDADLDNVMITDEEEIRTTNPVATEQYGYVSNNLQNSNTGPTTGTVNHQGALPGMVWQDRDVYLQGPIWAKIPHTDGHFHPSPLMGGFGLKHPPPQIMIKNTPVPANPPTNFSSAKFASFITQYSTGQVSVEIEWELQKENSKRWNPEIQYTSNYNKSVNVDFTVDTNGVYSEPRPIGTRYLTRNL

SEQ ID NO: 319 - DNA, 2208 bp, Adeno-associated virus
  source 1..2208: mol_type = unassigned DNA
atggctgccgatggttatcttccagattggctcgaggacactctctctgaaggaataagacagtggtggaagctcaaacctggcccaccaccaccaaagcccgcagagcggcataaggacgacagcaggggtcttgtgcttcctgggtacaagtacctcggacccttcaacggactcgacaagggggagccggtcaacgaggcagacgccgcggccctcgagcacgacaaggcctacgaccggcagctcgacagcggagacaacccgtacctcaagtacaaccacgccgacgcggagtttcaggagcgtcttaaagaagatacgtcttttgggggcaacctcggacgagcagtcttccaggcgaaaaagagggttcttgaacctctgggcctggttgagggacctgttaagacggctccgggaaaaaagaggccggtagagcactctcctgcggagccagactcctcctcgggaaccggaaaagcgggccagcagcctgcaagaaaaagattgaattttggtcagactggagacgcagactccgtacctgacccccagcctctcggacagccaccagcagccccctctggtttgggatctactacaatggctacaggcagtggcgcaccaatggcagacaataacgagggtgccgatggagtgggtaattcctcaggaaattggcattgcgattcccaatggctgggcgacagagtcatcaccaccagcacccgaacctgggccctgcccacctacaacaaccacctctacaagcaaatctcaagccaatcaggagcctcaaacgacaaccactactttggctacagcaccccttgggggtattttgacttcaacagattccactgccacttttcaccacgtgactggcaaagactcatcaacaacaactggggattccgacccaagagactcaacttcaagctctttaacattcaagtcaaagaggtcacgcagaatgacggtacgacgacgattgccaataaccttaccagcacggttcaggtgtttactgactcggagtaccagctcccgtacgtcctcgggtcggcgcatcaaggatgcctcccgccgtttccagcggacgtcttcatggtcccacagtatggatacctcaccctgaacaacgggagtcaggcggtaggacgctcttccttttactgcctggagtactttccttctcagatgcttcgtactggaaacaactttcagttcagctacacctttgaagacgttcctttccacagcagctacgctcacagccagagtctggatcggctgatgaatcctctgatcgaccagtacctgtattatctgaacaaaacacaatcaaatagtggaactcttcagcagtctcggctactgtttagtcaagctggacccaccagcatgtctcttcaagctaaaaactggctacctggaccttgctacagacagcagcgtctgtcaaagcaggcaaacgacaacaacaacagcaactttccctggactgcggctacaaagtatcacctaaatggccgggactcgttggttaatccaggaccagctatggccagtcacaaagacgatgaagaaaagtttttccccatgcatggaaccctgatatttggtaaacaaggaacaaatgctaacgacgcggatttggacaatgtcatgattacagatgaagaagaaatccgcaccaccaatcccgtggctacggagcagtacggatatgtgtcaaataatttgcaaaactcaaatactggtccaactactggaactgtcaatcaccaaggagcgttacctggcatggtgtggcaggatcgagacgtgtacctgcagggacccatttgggccaagattcctcacaccgatggacactttcatccttctccactgatgggaggttttgggctcaaacacccgcctcctcagatcatgatcaaaaacactcccgttccagccaatcctcccacaaacttcagttctgccaagtttgcttctttcatcacacagtattccacggggcaggtcagcgtggagatcgagtgggagctgcagaaagagaacagcaaacgctggaatcccgaaattcagtacacttccaactacaacaaatctgttaatgtggactttactgtggacactaatggcgtgtattcagagcctcgccccattggcaccagatacctgactcgtaatctgtaa

SEQ ID NO: 320 - DNA, 2211 bp, Adeno-associated virus; identical to SEQ ID NO: 1
  source 1..2211: mol_type = unassigned DNA

SEQ ID NO: 321 - DNA, 2208 bp, Adeno-associated virus
  source 1..2208: mol_type = unassigned DNA
atggctgccgatggttatcttccagattggctcgaggacactctctctgaaggaacaagacagtggtggaagctcaaacctggcccaccaccaccaaagcccgcagagcggcataaggacgacagcaggggtcttgtgcttcctgggtacaagtacctcggacccttcaacggactcgacaagggggagccggtcaacgaggcagacgccgcggccctcgagcacgacaaggcctacgaccggcagctcgacagcggagacaacccgtacctcaagtacaaccacgccgacgcggagtttcaggagcgtcttaaagaagatacgtcttttgggggcaacctcggacgagcagtcttccaggcgaaaaagagggttcttgaacctctgggcctggttgaggaacctgttaagacggctccgggaaaaaagaggccggtagagcactctcctgcggagccagactcctcctcgggaaccggaaaagcgggccagcagcctgcaagaaaaagattgaattttggtcagactggagacgcagactccgtacctgacccccagcctctcggacagccaccagcagccccctctggtttgggatctactacaatggctacaggcagtggcgcaccaatggcagacaataacgagggtgccgatggagtgggtaattcctcaggaaattggcattgcgattcccaatggctgggcgacagagtcatcaccaccagcacccgaacctgggccctgcccacctacaacaaccacctctacaagcaaatctcaagccaatcaggagcctcaaacgacaaccactactttggctacagcaccccttgggggtattttgacttcaacagattccactgccacttttcaccacgtgactggcaaagactcatcaacaacaactggggattccgacccaagagactcaacttcaagctctttaacattcaagtcaaagaggtcacgcagaatgacggtacgacgacgattgccaataaccttaccagcacggttcaggtgtttactgactcggagtaccagctcccgtacgtcctcgggtcggcgcatcaaggatgcctcccgccgtttccagcggacgtcttcatggtcccacagtatggatacctcaccctgaacaacgggagtcaggcggtaggacgctcttccttttactgcctggagtactttccttctcagatgcttcgtactggaaacaactttcagttcagctacacctttgaagacgttcctttccacagcagctacgctcacagccagagtctggatcggctgatgaatcctctgatcgaccagtacctgtattatctgaacaaaacacaatcaaatagtggaactcttcagcagtctcggctactgtttagtcaagctggacccaccagcatgtctcttcaagctaaaaactggctacctggaccttgctacagacagcagcgtctgtcaaagcaggcaaacgacaacaacaacagcaactttccctggactgcggctacaaagtaccacctaaatggccgggactcgttggttaatccaggaccagctatggccagtcacaaagacgatgaagaaaagtttttccccatgcatggaaccctgatatttggtaaacaaggaacaaatgctaacgacgcggatttggacaatgtcatgattacagatgaagaagaaatccgcaccaccaatcccgtggctacggagcagtacggatatgtgtcaaataatttgcaaaactcaaatactggtccaactactggaactgtcaatcaccaaggagcgttacctggcatggtgtggcaggatcgagacgtgtacctgcagggacccatttgggccaagattcctcacaccgatggacactttcatccttctccactgatgggaggttttgggctcaaacacccgcctcctcagatcatgatcaaaaacactcccgttccagccaatcctcccacaaacttcagttctgccaagtttgcttctttcatcacacagtattccacggggcaggtcagcgtggagatcgagtgggagctgcagaaagagaacagcaaacgctggaatcccgaaattcagtacacttccaactacaacaaatctgttaatgtggactttactgtggacactaatggcgtgtattcagagcctcgccccattggcaccagatacctgactcgtaatctgtaa

SEQ ID NO: 322 - DNA, 2217 bp, Adeno-associated virus
  source 1..2217: mol_type = unassigned DNA
atggctgctgacggttatcttccagattggctcgaggacaacctctctgagggcattcgcgagtggtgggacctgaaacctggagcccccaagcccaaggccaaccagcagaagcaggacgacggccggggtctggtgcttcctggctacaagtacctcggacccttcaacggactcgacaagggggagcccgtcaacgcggcggacgcagcggccctcgagcacgacaaggcctacgaccagcagctcaaagcgggtgacaatccgtacctgcggtataaccacgccgacgccgagtttcaggagcgtctgcaagaagatacgtcttttgggggcaacctcgggcgagcagtcttccaggccaagaagcgggttctcgaacctctcggtctggttgaggaagctgctaagacggctcctggaaagaagagaccggtagaaccgtcacctcagcgttcccccgactcctccacgggcatcggcaagaaaggccagcagcccgctaaaaagagactgaactttggtcagactggcgactcagagtcagtccccgaccctcaaccaatcggagaaccacctgcaggcccctctggtctgggatctggtacaatggctgcaggcggtggcgctccaatggcagacaataacgaaggcgccgacggagtgggtagttcctcaggaaattggcattgcgattccacatggctgggcgacagagtcatcaccaccagcacccgaacctgggccctgcccacctacaacaaccacctctacaagcaaatatccaatgggacatcgggagggagcaccaacgacaacacctacttcggctacagcaccccctgggggtattttgacttcaacagattccactgccacttctcaccacgtgactggcagcgactcatcaacaacaactggggattccggccaaaaagactcagcttcaagctcttcaacatccaggtcaaggaggtcacgcagaatgaaggcaccaagaccatcgccaataaccttaccagcacgattcaggtatttacggactcggaataccagctgccgtacgtcctcggctccgcgcaccagggctgcctgcctccgttcccggcggacgtcttcatgattccccagtacggctaccttacactgaacaatggaagtcaagccgtaggccgttcctccttctactgcctggaatattttccatctcaaatgctgcgaactggaaacaattttgaattcagctacaccttcgaggacgtgcctttccacagcagctacgcacacagccagagcttggaccgactgatgaatcctctcatcgaccagtacctgtactacttatccagaactcagtccacaggaggaactcaaggtacccagcaattgttattttctcaagctgggcctgcaaacatgtcggctcaggctaagaactggctacctggaccttgctaccggcagcagcgagtctctacgacactgtcgcaaaacaacaacagcaactttgcttggactggtgccaccaaatatcacctgaacggaagagactctttggtaaatcccggtgtcgccatggcaacccacaaggacgacgaggaacgcttcttcccgtcgagtggagtcctgatgtttggaaaacagggtgctggaagagacaatgtggactacagcagcgttatgctaaccagcgaagaagaaattaaaaccactaaccctgtagccacagaacaatacggtgtggtggctgacaacttgcagcaaaccaatacagggcctattgtgggaaatgtcaacagccaaggagccttacctggcatggtctggcagaaccgagacgtgtacctgcagggtcccatctgggccaagattcctcacacggacggcaactgccacccttcaccgctaatgggaggatttggactgaagcacccacctcctcagatcctgatcaagaacacgccggtacctgcggatcctccaacaacgttcagccaggcgaaattggcttccttcattacgcagtacagcaccggacaggtcagcgtggaaatcgagtgggagctgcagaaggagaacagcaaacgctggaacccagagattcagtacacttcaaactactacaaatctacaaatgtggactttgctgtcaatacagagggaacttattctgagcctcgccccattggtactcgttacctcacccgtaatctgtaa

SEQ ID NO: 323 - protein, 735 aa, Adeno-associated virus
MAADGYLPDWLEDTLSEGTRQWWKLKPGPPPPKPAERHKDDSRGLVLPGYKYLGPFNGLDKGEPVNEADAAALEHDKAYDRQLDSGDNPYLKYNHADAEFQERLKEDTSFGGNLGRAVFQAKKRVLEPLGLVEEPVKTAPGKKRPVEHSPAEPDSSSGTGKAGQQPARKRLNFGQTGDADSVPDPQPLGQPPAAPSGLGSTTMATGSGAPMADNNEGADGVGNSSGNWHCDSQWLGDRVITTSTRTWALPTYNNHLYKQISSQSGASNDNHYFGYSTPWGYFDFNRFHCHFSPRDWQRLINNNWGFRPKRLNFKLFNIQVKEVTQNDGTTTIANNLTSTVQVFTDSEYQLPYVLGSAHQGCLPPFPADVFMVPQYGYLTLNNGSQAVGRSSFYCLEYFPSQMLRTGNNFQFSYTFEDVPFHSSYAHSQSLDRLMNPLIDQYLYYLNKTQSNSGTLQQSRLLFSQAGPTSMSLQAKNWLPGPCYRQQRLSKQANDNNNSNFPWTAATKYHLNGRDSLVNPGPAMASHKDDEEKFFPMHGTLIFGKQGTNANDADLDNVMITDEEEIRTTNPVATEQYGYVSNNLQNSNTGPTTGTVNHQGALPGMVWQDRDVYLQGPIWAKIPHTDGHFHPSPLMGGFGLKHPPPQIMIKNTPVPANPPTNFSSAKFASFITQYSTGQVSVEIEWELQKENSKRWNPEIQYTSNYNKSVNVDFTVDTNGVYSEPRPIGTRYLTRNL

SEQ ID NO: 324 - DNA, 2208 bp, Adeno-associated virus
  source 1..2208: mol_type = unassigned DNA
atggctgccgatggttatcttccagattggctcgaggacactctctctgaaggaataagacagtggtggaagctcaaacctggcccaccaccaccaaagcccgcagagcggcatcaggacaacagcaggggtcttgtgcttcctgggtacaagtacctcggaccctccaacggactcgacaaaggagagccggtcaacgaggcagacgccgcggccctcgagcacgacaaggcctacgaccggcagctcgacagcggagacaacccgtacctcaagtacaaccacgccgacgcggagtttcaggagcgtcttaaagaagatacgtcttttgggggcaacctcggacgagcagtcttccaggcgaaaaagagggttcttgaacctctgggcctggttgaggaacctgttaagacggctccgggaaaaaagaggccggtagagcactctcctgtggagccagactcctcctcgggaaccggaaaagcgggccatcagcctgcgagaaagagattgaattttggtcagactggagacgcagactccgtacctgacccccagcctctcggacagccaccagcagcccccacaagtttgggatctactacaatggctacaggcagtggcgcaccaatggcagacaataacgagggtgccgatggagtgggtaattcctcaggaaattggcattgcgattcccaatggctgggcgacagagtcatcaccaccagcacccgaacctgggccctgcccacctacaacaaccacctctacaagcaaatctccagccaatcaggagcctcgaacgacaaccactactttggctgcagcaccccctgggggtattttgacttcaacagattccactgtcacttctccccacgtgattggcaaagactcatcaacaacaactggggattccgacccaagagactcaacttcaagctctttaacattcaagtcaaagaggtcacgcagaatgacggtacgacgacgattgccaataaccttaccagcacggttcaggtgtttactgactcggagtacccgctcccgtacgtcctcggctcggcgcatcaaggatgcctcccgccgtttccagcggacgtcttcatggtcccacagtatggatacctcaccctgaacaacgggagtcaggcggtaggacgctcttccttttactgcctggagtactttccttctcagatgctgcgtaccggaaacaactttaccttcagctacacctttgaggacgttcctttccacagcagctacgctcacagccagagtttggaccggctgatgaatcctctgatcgaccagtatctatattatctgaacaggacacaatcaaatagtggaactcttcagcagtctaggctactgtttagccaagctggacccaccagcatgtctcttcaagctaaaaactggctgcctggaccttgctacagacagcagcgtctttcaaagcaggcaaacgacaacaacaacagcaactttccctggactgcggctacaaagtatcatctaaatggccgggactcgttggttaatccaggaccagctatggccagccacaaagacgatgaagaaaagtttttccccatgcatggaaccctgatatttggtaaacaaggaacaaatgctaacgacgcggatttggagcatgttatgattacagatgaagaagaaatcaggaccaccaatcctgtggctacagagcagtacggaaacgtgtcaaataatttgcaaaactcaaatactggtccaactacagaaaatgtcaatcaccagggagcgttacctggtatggtgtggcaggatcgagacgtgtacctgcagggacccatttgggccaagattcctcacaccgacggacactttcacccttctccactgatgggaggttttggactcaaacacccgcctcctcaaatcatgatcaaaaacactcccgttccagccaatcctcccacaaacttcagttctgccaagtttgcttctttcatcacacagtattccacgggccaggtcagcgtggagattgagtgggagctgcagaaggagaacagcaaacgctggaaccccgagatccagtatacttccaactacaacaaatctgttaatgtggactttactgtggacactaatggtgtgtattcagagccttgccccattggcaccagatacctgactcgtaatctgtaa

SEQ ID NO: 325 - protein, 735 aa, Adeno-associated virus
MAADGYLPDWLEDTLSEGIRQWWKLKPGPPPPKPAERHQDNSRGLVLPGYKYLGPSNGLDKGEPVNEADAAALEHDKAYDRQLDSGDNPYLKYNHADAEFQERLKEDTSFGGNLGRAVFQAKKRVLEPLGLVEEPVKTAPGKKRPVEHSPVEPDSSSGTGKAGHQPARKRLNFGQTGDADSVPDPQPLGQPPAAPTSLGSTTMATGSGAPMADNNEGADGVGNSSGNWHCDSQWLGDRVITTSTRTWALPTYNNHLYKQISSQSGASNDNHYFGCSTPWGYFDFNRFHCHFSPRDWQRLINNNWGFRPKRLNFKLFNIQVKEVTQNDGTTTIANNLTSTVQVFTDSEYPLPYVLGSAHQGCLPPFPADVFMVPQYGYLTLNNGSQAVGRSSFYCLEYFPSQMLRTGNNFTFSYTFEDVPFHSSYAHSQSLDRLMNPLIDQYLYYLNRTQSNSGTLQQSRLLFSQAGPTSMSLQAKNWLPGPCYRQQRLSKQANDNNNSNFPWTAATKYHLNGRDSLVNPGPAMASHKDDEEKFFPMHGTLIFGKQGTNANDADLEHVMITDEEEIRTTNPVATEQYGNVSNNLQNSNTGPTTENVNHQGALPGMVWQDRDVYLQGPIWAKIPHTDGHFHPSPLMGGFGLKHPPPQIMIKNTPVPANPPTNFSSAKFASFITQYSTGQVSVEIEWELQKENSKRWNPEIQYTSNYNKSVNVDFTVDTNGVYSEPCPIGTRYLTRNL

SEQ ID NO: 326 - DNA, 2214 bp, synthetic construct
  source 1..2214: mol_type = other DNA; note = Description of Artificial Sequence: Synthetic polynucleotide
atggctgccgatggttatcttccagattggctcgaggacaaccttagtgaaggaattcgcgagtggtgggctttgaaacctggagcccctcaacccaaggcaaatcaacaacatcaagacaacgctcgaggtcttgtgcttccgggttacaaataccttggacccggcaacggactcgacaagggggagccggtcaacgcagcagacgcggcggccctcgagcacgacaaggcctacgaccagcagctgcaggcgggtgacaatccgtacctgcggtataaccacgccgacgccgagtttcaggagcgtctgcaagaagatacgtcttttgggggcaaccttggcagagcagtcttccaggccaaaaagaggatccttgagcctcttggtctggttgaggaagcagctaaaacggctcctggaaagaagaggcctgtagatcagtctcctcaggaaccggactcatcatctggtgttggcaaatcgggcaaacagcctgccagaaaaagactaaatttcggtcagactggcgactcagagtcagtcccagaccctcaacctctcggagaaccaccagcagcccccacaagtttgggatctaatacaatggcttcaggcggtggcgcaccaatggcagacaataacgagggtgccgatggggtgggtagttcctcgggaaattggcattgcgattcccaatggctgggggacagagtcatcaccaccagcacccgaacctgggccctgcccacctacaacaatcacctctacaagcaaatctccaacgggacatcgggaggagccaccaacgacaacacctacttcggctacagcaccccctgggggtattttgactttaacagattccactgccacttttcaccacgtgactggcagcgactcatcaacaacaactggggattccggcccaagagactcagcttcaagctcttcaacatccaggtcaaggaggtcacgcagaatgaaggcaccaagaccatcgccaataacctcaccagcaccatccaggtgtttacggactcggagtaccagctgccgtacgttctcggctctgcgcaccagggctgcctccctccgttcccggcggacgtgttcatgattccgcaatacggctacctgacgctcaacaatggcagccaagccgtgggacgttcatccttttactgcctggaatatttcccttctcagatgctgagaacgggcaacaactttaccttcagctacacctttgaggaagtgcctttccacagcagctacgcgcacagccagagcttggaccggctgatgaatcctctgattgaccagtacctgtactacttgtctcggactcaaacaacaggaggcacggcaaatacgcagactctgggcttcagccaaggtgggcctaatacaatggccaatcaggcaaagaactggctgccaggaccctgttaccgccaacaacgcgtctcaacgacaaccgggcaaaacaacaatagcaactttgcctggactgctgggaccaaataccatctgaatggaagaaattcattggctaatcctggcatcgctatggcaacacacaaagacgacgaggagcgtttttttcccagtaacgggatcctgatttttggcaaacaaaatgctgccagagacaatgcggattacagcgatgtcatgctcaccagcgaggaagaaatcaaaaccactaaccctgtggctacagaggaatacggtatcgtggcagataacttgcagcagcaaaacacggctcctcaaattggaactgtcaacagccagggggccttacccggtatggtctggcagaaccgggacgtgtacctgcagggtcccatctgggccaagattcctcacacggacggcaacttccacccgtctccgctgatgggcggctttggcctgaaacatcctccgcctcagatcctgatcaagaacacgcctgtacctgcggatcctccgaccaccttcaaccagtcaaagctgaactctttcatcacgcaatacagcaccggacaggtcagcgtggagatcgagtgggagctgcagaaggaaaacagcaagcgctggaacccggagatccagtacacttccaactattacaagtctaataatgttgaatttgctgttaatactgaaggtgtatatagtgaaccccgccccattggcaccagatacctgactcgtaatctgtaa

SEQ ID NO: 327 - protein, 737 aa, synthetic construct
  source 1..737: note = Description of Artificial Sequence: Synthetic polypeptide
MAADGYLPDWLEDNLSEGIREWWALKPGAPQPKANQQHQDNARGLVLPGYKYLGPGNGLDKGEPVNAADAAALEHDKAYDQQLQAGDNPYLRYNHADAEFQERLQEDTSFGGNLGRAVFQAKKRILEPLGLVEEAAKTAPGKKRPVDQSPQEPDSSSGVGKSGKQPARKRLNFGQTGDSESVPDPQPLGEPPAAPTSLGSNTMASGGGAPMADNNEGADGVGSSSGNWHCDSQWLGDRVITTSTRTWALPTYNNHLYKQISNGTSGGATNDNTYFGYSTPWGYFDFNRFHCHFSPRDWQRLINNNWGFRPKRLSFKLFNIQVKEVTQNEGTKTIANNLTSTIQVFTDSEYQLPYVLGSAHQGCLPPFPADVFMIPQYGYLTLNNGSQAVGRSSFYCLEYFPSQMLRTGNNFTFSYTFEEVPFHSSYAHSQSLDRLMNPLIDQYLYYLSRTQTTGGTANTQTLGFSQGGPNTMANQAKNWLPGPCYRQQRVSTTTGQNNNSNFAWTAGTKYHLNGRNSLANPGIAMATHKDDEERFFPSNGILIFGKQNAARDNADYSDVMLTSEEEIKTTNPVATEEYGIVADNLQQQNTAPQIGTVNSQGALPGMVWQNRDVYLQGPIWAKIPHTDGNFHPSPLMGGFGLKHPPPQILIKNTPVPADPPTTFNQSKLNSFITQYSTGQVSVEIEWELQKENSKRWNPEIQYTSNYYKSNNVEFAVNTEGVYSEPRPIGTRYLTRNL

SEQ ID NO: 328 - DNA, 2211 bp, synthetic construct
  source 1..2211: mol_type = other DNA; note = Description of Artificial Sequence: Synthetic polynucleotide
atggctgccgatggttatcttccagattggctcgaggacaacctctctgagggcattcgcgagtggtgggacttgaaacctggagccccgaagcccaaagccaaccagcaaaagcaggacgacggccggggtctggtgcttcctggctacaagtacctcggacccttcaacggactcgacaagggggagcccgtcaacgcggcggacgcagcggccctcgagcacgacaaggcctacgaccagcagctcaaagcgggtgacaatccgtacctgcggtataaccacgccgacgccgagtttcaggagcgtctgcaagaagatacgtcttttgggggcaacctcgggcgagcagtcttccaggccaagaagcgggttctcgaacctctcggtctggttgaggaaggcgctaagacggctcctggaaagaaacgtccggtagagcagtcgccacaagagccagactcctcctcgggcatcggcaagacaggccagcagcccgctaaaaagagactcaattttggtcagactggcgactcagagtcagtccccgacccacaacctctcggagaacctccagcaacccccgctgctgtgggacctactacaatggcttcaggcggtggcgcaccaatggcagacaataacgaaggcgccgacggagtgggtaatgcctcaggaaattggcattgcgattccacatggctgggcgacagagtcatcaccaccagcacccgaacatgggccttgcccacctataacaaccacctctacaagcaaatctccagtgcttcaacgggggccagcaacgacaaccactacttcggctacagcaccccctgggggtattttgatttcaacagattccactgccatttctcaccacgtgactggcagcgactcatcaacaacaattggggattccggcccaagagactcaacttcaagctcttcaacatccaagtcaaggaggtcacgacgaatgatggcgtcacgaccatcgctaataaccttaccagcacggttcaagtcttctcggactcggagtaccagctgccgtacgttctcggctctgcccaccagggctgcctgcctccgttcccggcggacgtgttcatgattccccagtacggctacctaacactcaacaacggtagtcaggccgtgggacgctcctccttctactgcctggaatactttccttcgcagatgctgagaaccggcaacaacttccagtttacttacaccttcgaggacgtgcctttccacagcagctacgcccacagccagagcttggaccggctgatgaatcctctgattgaccagtacctgtactacttgtctcggactcaaacaacaggaggcacggcaaatacgcagactctgggcttcagccaaggtgggcctaatacaatggccaatcaggcaaagaactggctgccaggaccctgttaccgccaacaacgcgtctcaacgacaaccgggcaaaacaacaatagcaattttacctggactggtgcttcaaaatataacctcaatgggcgtgaatccatcatcaaccctggcactgctatggcctcacacaaagacgacgaagacaagttctttcccatgagcggtgtcatgatttttggaaaagagagcgccggagcttcaaacactgcattggacaatgtcatgattacagacgaagaggaaattaaagccactaaccctgtggccaccgaaagatttgggaccgtggcagtcaatttccagagcagcagcacagaccctgcgaccggagatgtgcatgctatgggagcattacctggcatggtgtggcaagatagagacgtgtacctgcagggtcccatttgggccaaaattcctcacacagatggacactttcacccgtctcctcttatgggcggctttggactcaagaacccgcctcctcagatcctcatcaaaaacacgcctgttcctgcgaatcctccggcggagttttcagctacaaagtttgcttcattcatcacccaatactccacaggacaagtgagtgtggaaattgaatgggagctgcagaaagaaaacagcaagcgctggaatcccgaagtgcagtacacatccaattatgcaaaatctgccaacgttgattttactgtggacaacaatggactttatactgagcctcgccccattggcacccgttacctcacccgtcccctgtaa

SEQ ID NO: 329 - protein, 736 aa, synthetic construct
  source 1..736: note = Description of Artificial Sequence: Synthetic polypeptide
MAADGYLPDWLEDNLSEGIREWWDLKPGAPKPKANQQKQDDGRGLVLPGYKYLGPFNGLDKGEPVNAADAAALEHDKAYDQQLKAGDNPYLRYNHADAEFQERLQEDTSFGGNLGRAVFQAKKRVLEPLGLVEEGAKTAPGKKRPVEQSPQEPDSSSGIGKTGQQPAKKRLNFGQTGDSESVPDPQPLGEPPATPAAVGPTTMASGGGAPMADNNEGADGVGNASGNWHCDSTWLGDRVITTSTRTWALPTYNNHLYKQISSASTGASNDNHYFGYSTPWGYFDFNRFHCHFSPRDWQRLINNNWGFRPKRLNFKLFNIQVKEVTTNDGVTTIANNLTSTVQVFSDSEYQLPYVLGSAHQGCLPPFPADVFMIPQYGYLTLNNGSQAVGRSSFYCLEYFPSQMLRTGNNFQFTYTFEDVPFHSSYAHSQSLDRLMNPLIDQYLYYLSRTQTTGGTANTQTLGFSQGGPNTMANQAKNWLPGPCYRQQRVSTTTGQNNNSNFTWTGASKYNLNGRESIINPGTAMASHKDDEDKFFPMSGVMIFGKESAGASNTALDNVMITDEEEIKATNPVATERFGTVAVNFQSSSTDPATGDVHAMGALPGMVWQDRDVYLQGPIWAKIPHTDGHFHPSPLMGGFGLKNPPPQILIKNTPVPANPPAEFSATKFASFITQYSTGQVSVEIEWELQKENSKRWNPEVQYTSNYAKSANVDFTVDNNGLYTEPRPIGTRYLTRPL

SEQ ID NO: 330 - DNA, 2211 bp, synthetic construct
  source 1..2211: mol_type = other DNA; note = Description of Artificial Sequence: Synthetic polynucleotide
atggctgctgacggttatcttccagattggctcgaggacaacctttctgaaggcattcgagagtggtgggcgctgcaacctggagcccctaaacccaaggcaaatcaacaacatcaggacaacgctcggggtcttgtgcttccgggttacaaatacctcggacccggcaacggactcgacaagggggaacccgtcaacgcagcggacgcggcagccctcgagcacgacaaggcctacgaccagcagctcaaggccggtgacaacccctacctcaagtacaaccacgccgacgccgagttccaggagcggctcaaagaagatacgtcttttgggggcaacctcgggcgagcagtcttccaggccaaaaagaggcttcttgaacctcttggtctggttgaggaagcggctaagacggctcctggaaagaagaggcctgtagatcagtctcctcaggaaccggactcatcatctggtgttggcaaatcgggcaaacagcctgccagaaaaagactaaatttcggtcagactggcgactcagagtcagtcccagaccctcaacctctcggagaaccaccagcagcccccacaagtttgggatctaatacaatggcttcaggcggtggcgcaccaatggcagacaataacgagggtgccgatggagtgggtaattcctcaggaaattggcattgcgattcccaatggctgggcgacagagtcatcaccaccagcaccagaacctgggccctgcccacttacaacaaccatctctacaagcaaatctccagccaatcaggagcttcaaacgacaaccactactttggctacagcaccccttgggggtattttgactttaacagattccactgccacttctcaccacgtgactggcagcgactcattaacaacaactggggattccggcccaagaaactcagcttcaagctcttcaacatccaagttaaagaggtcacgcagaacgatggcacgacgactattgccaataaccttaccagcacggttcaagtgtttacggactcggagtatcagctcccgtacgtgctcgggtcggcgcaccaaggctgtctcccgccgtttccagcggacgtcttcatggtccctcagtatggatacctcaccctgaacaacggaagtcaagcggtgggacgctcatccttttactgcctggagtacttcccttcgcagatgctaaggactggaaataacttccaattcagctataccttcgaggatgtaccttttcacagcagctacgctcacagccagagtttggatcgcttgatgaatcctcttattgatcagtatctgtactacctgaacagaacgcaaggaacaacctctggaacaaccaaccaatcacggctgctttttagccaggctgggcctcagtctatgtctttgcaggccagaaattggctacctgggccctgctaccggcaacagagactttcaaagactgctaacgacaacaacaacagtaactttccttggacagcggccagcaaatatcatctcaatggccgcgactcgctggtgaatccaggaccagctatggccagtcacaaggacgatgaagaaaaatttttccctatgcacggcaatctaatatttggcaaagaagggacaacggcaagtaacgcagaattagataatgtaatgattacggatgaagaagagattcgtaccaccaatcctgtggcaacagagcagtatggaactgtggcaaataacttgcagagctcaaatacagctcccacgactagaactgtcaatgatcagggggccttacctggcatggtgtggcaagatcgtgacgtgtaccttcaaggacctatctgggcaaagattcctcacacggatggacactttcatccttctcctctgatgggaggctttggactgaaacatccgcctcctcaaatcatgatcaaaaatactccggtaccggcaaatcctccgacgactttcagcccggccaagtttgcttcatttatcactcagtactccactggacaggtcagcgtggaaattgagtgggagctacagaaagaaaacagcaaacgttggaatccagagattcagtacacttccaactacaacaagtctgttaatgtggactttactgtagacactaatggtgtttatagtgaacctcgccccattggcacccgttaccttacccgtcccctgtaa

SEQ ID NO: 331 - protein, 736 aa, synthetic construct
  source 1..736: note = Description of Artificial Sequence: Synthetic polypeptide
MAADGYLPDWLEDNLSEGIREWWALQPGAPKPKANQQHQDNARGLVLPGYKYLGPGNGLDKGEPVNAADAAALEHDKAYDQQLKAGDNPYLKYNHADAEFQERLKEDTSFGGNLGRAVFQAKKRLLEPLGLVEEAAKTAPGKKRPVDQSPQEPDSSSGVGKSGKQPARKRLNFGQTGDSESVPDPQPLGEPPAAPTSLGSNTMASGGGAPMADNNEGADGVGNSSGNWHCDSQWLGDRVITTSTRTWALPTYNNHLYKQISSQSGASNDNHYFGYSTPWGYFDFNRFHCHFSPRDWQRLINNNWGFRPKKLSFKLFNIQVKEVTQNDGTTTIANNLTSTVQVFTDSEYQLPYVLGSAHQGCLPPFPADVFMVPQYGYLTLNNGSQAVGRSSFYCLEYFPSQMLRTGNNFQFSYTFEDVPFHSSYAHSQSLDRLMNPLIDQYLYYLNRTQGTTSGTTNQSRLLFSQAGPQSMSLQARNWLPGPCYRQQRLSKTANDNNNSNFPWTAASKYHLNGRDSLVNPGPAMASHKDDEEKFFPMHGNLIFGKEGTTASNAELDNVMITDEEEIRTTNPVATEQYGTVANNLQSSNTAPTTRTVNDQGALPGMVWQDRDVYLQGPIWAKIPHTDGHFHPSPLMGGFGLKHPPPQIMIKNTPVPANPPTTFSPAKFASFITQYSTGQVSVEIEWELQKENSKRWNPEIQYTSNYNKSVNVDFTVDTNGVYSEPRPIGTRYLTRPL

SEQ ID NO: 332 - DNA, 2211 bp, synthetic construct
  source 1..2211: mol_type = other DNA; note = Description of Artificial Sequence: Synthetic polynucleotide
atggctgccgatggttatcttccagattggctcgaggacaaccttagtgaaggaattcgcgagtggtgggctttgaaacctggagcccctcaacccaaggcaaatcaacaacatcaagacaacgctcgaggtcttgtgcttccgggttacaaataccttggacccggcaacggactcgacaagggggagccggtcaacgcagcagacgcggcggccctcgagcacgacaaggcctacgaccagcagctcaaggccggagacaacccgtacctcaagtacaaccacgccgacgccgagttccaggagcggctcaaagaagatacgtcttttgggggcaacctcgggcgagcagtcttccaggccaaaaagaggcttcttgaacctcttggtctggttgaggaagcggctaagacggctcctggaaagaagagaccggtagagccatcaccccagcgttctccagactcctctacgggcatcggcaagaaaggccaacagcccgctaaaaagagactcaattttggtcagactggcgactcagagtcagtccccgacccacaacctctcggagaacctccagcaacccccgctgctgtgggacctactacaatggcttcaggcggtggcgcaccaatggcagacaataacgagggtgccgatggagtgggtaattcctcaggaaattggcattgcgattcccaatggctgggcgacagagtcatcaccaccagcaccagaacctgggccctgcccacttacaacaaccatctctacaagcaaatctccagccaatcaggagcttcaaacgacaaccactactttggctacagcaccccttgggggtattttgactttaacagattccactgccacttttcaccacgtgactggcaaagactcatcaacaacaactggggattccgacccaagagactcaacttcaagctcttcaacatccaagtcaaggaggtcacgacgaatgatggcgtcacgaccatcgctaataaccttaccagcacggttcaagtcttctcggactcggagtaccagttgccgtacgtcctcggctctgcgcaccagggctgcctccctccgttcccggcggacgtgttcatgattccgcagtacggctacctaacgctcaacaatggcagccaagccgtgggacgttcatccttttactgcctggaatatttcccttctcagatgctgagaacgggcaacaactttaccttcagctacacttttgaggacgttcctttccacagcagctacgctcacagccagagtctggaccgtctcatgaatcctctcatcgaccagtacctgtattacttgagcagaacaaacactccaagtggaaccaccacgcagtcaaggcttcagttttctcaggccggagcgagtgacattcgggaccagtctaggaactggcttcctggaccctgttaccgccagcagcgcgtttctaaaacaaaaacagacaacaacaacagcaattttacctggactggtgcttcaaaatataaccttaatgggcgtgaatctataatcaaccctggcactgctatggcctcacacaaagacgacgaagacaagttctttcccatgagcggtgtcatgatttttggaaaagagagcgccggagcttcaaacactgcattggacaatgtcatgattacagacgaagaggaaattaaagccactaaccctgtggccaccgaaagatttgggaccgtggcagtcaatttccagagcagcagcacagaccctgcgaccggagatgtgcatgttatgggagccttacctggaatggtgtggcaagacagagacgtatacctgcagggtcctatttgggccaaaattcctcacacggatggacactttcacccgtctcctcttatgggcggctttggactcaagaacccgcctcctcagatcctcatcaaaaacacgcctgttcctgcgaatcctccggcggagttttcagctacaaagtttgcttcattcatcacccaatactccacaggacaagtgagtgtggaaattgaatgggagctgcagaaagaaaacagcaagcgctggaatcccgaagtgcagtacacatccaattatgcaaaatctgccaacgttgattttactgtggacaacaatggactttatactgagcctcgccccattggcacccgttaccttacccgtcccctgtaa

SEQ ID NO: 333 - protein, 736 aa, synthetic construct
  source 1..736: note = Description of Artificial Sequence: Synthetic polypeptide
MAADGYLPDWLEDNLSEGIREWWALKPGAPQPKANQQHQDNARGLVLPGYKYLGPGNGLDKGEPVNAADAAALEHDKAYDQQLKAGDNPYLKYNHADAEFQERLKEDTSFGGNLGRAVFQAKKRLLEPLGLVEEAAKTAPGKKRPVEPSPQRSPDSSTGIGKKGQQPAKKRLNFGQTGDSESVPDPQPLGEPPATPAAVGPTTMASGGGAPMADNNEGADGVGNSSGNWHCDSQWLGDRVITTSTRTWALPTYNNHLYKQISSQSGASNDNHYFGYSTPWGYFDFNRFHCHFSPRDWQRLINNNWGFRPKRLNFKLFNIQVKEVTTNDGVTTIANNLTSTVQVFSDSEYQLPYVLGSAHQGCLPPFPADVFMIPQYGYLTLNNGSQAVGRSSFYCLEYFPSQMLRTGNNFTFSYTFEDVPFHSSYAHSQSLDRLMNPLIDQYLYYLSRTNTPSGTTTQSRLQFSQAGASDIRDQSRNWLPGPCYRQQRVSKTKTDNNNSNFTWTGASKYNLNGRESIINPGTAMASHKDDEDKFFPMSGVMIFGKESAGASNTALDNVMITDEEEIKATNPVATERFGTVAVNFQSSSTDPATGDVHVMGALPGMVWQDRDVYLQGPIWAKIPHTDGHFHPSPLMGGFGLKNPPPQILIKNTPVPANPPAEFSATKFASFITQYSTGQVSVEIEWELQKENSKRWNPEVQYTSNYAKSANVDFTVDNNGLYTEPRPIGTRYLTRPL

SEQ ID NO: 334 - DNA, 2211 bp, synthetic construct
  source 1..2211: mol_type = other DNA; note = Description of Artificial Sequence: Synthetic polynucleotide
atggctgccgatggttatcttccagattggctcgaggacaacctctctgagggcattcgcgagtggtgggacttgaaacctggagcccctaaacccaaggcaaatcaacaacatcaggacaacgctcgaggtcttgtgcttccgggttacaaataccttggacccggcaacggactcgacaagggggagccggtcaacgcagcagacgcggcggccctcgagcacgacaaggcctacgaccagcagctcaaggccggagacaacccgtacctcaagtacaaccacgccgacgccgagttccaggagcggctcaaagaagatacgtcttttgggggcaacctcgggcgagcagtcttccaggccaaaaagaggcttcttgaacctcttggtctggttgaggaagcggctaagacggctcctggaaagaagagaccggtagagccatcaccccagcgttctccagactcctctacgggcatcggcaagaaaggccaacagcccgctaaaaagagactcaattttggtcagactggcgactcagagtcagtccccgacccacaacctctcggagaacctccagcaacccccgctgctgtgggacctactacaatggcttcaggcggtggcgcaccaatggcagacaataacgagggtgccgatggagtgggtaattcctcaggaaattggcattgcgattcccaatggctgggcgacagagtcatcaccaccagcaccagaacctgggccctgcccacttacaacaaccatctctacaagcaaatctccagccaatcaggagcttcaaacgacaaccactactttggctacagcaccccttgggggtattttgactttaacagattccactgccacttttcaccacgtgactggcaaagactcatcaacaacaactggggattccgacccaagagactcaacttcaagctcttcaacatccaagtcaaggaggtcacgacgaatgatggcgtcacgaccatcgctaataaccttaccagcacggttcaagtcttctcggactcggagtaccagttgccgtacgtcctcggctctgcgcaccagggctgcctccctccgttcccggcggacgtgttcatgattccgcagtacggctacctaacgctcaacaatggcagccaagccgtgggacgttcatccttttactgcctggaatatttcccttctcagatgctgagaacgggcaacaactttaccttcagctacacttttgaggacgttcctttccacagcagctacgctcacagccagagtctggaccgtctcatgaatcccctcatcgaccagtacctgtattacttgagcagaacaaacactccaagtggaaccaccacgcagtcaaggcttcagttttctcaggccggagcgagtgacattcgggaccagtctaggaactggcttcctggaccctgttaccggcagcagcgcgtttctaaaacaaaaacagacaacaacaacagcaactttacctggactggtgcttcaaaatataaccttaatgggcgtgaatctataatcaaccctggcactgctatggcctcacacaaagacgacgaagacaagttctttcccatgagcggtgtcatgatttttggaaaggagagcgccggagcttcaaacactgcattggacaatgtcatgatcacagacgaagaggaaatcaaagccactaaccccgtggccaccgaaagatttgggactgtggcagtcaatctccagagcagcagcacagaccctgcgaccggagatgtgcatgttatgggagccttacctggaatggtgtggcaagacagagacgtgtacctgcagggtcctatttgggccaaaattcctcacacggatggacactttcacccgtctcctctcatgggcggctttggacttaagcacccgcctcctcagatcctcatcaaaaacacgcctgttcctgcgaatcctccggcagagttttcggctacaaagtttgcttcattcatcacccagtattccacaggacaagtgagtgtggaaattgaatgggagctgcagaaagaaaacagcaagcgctggaatcccgaagtgcagtacacatccaattatgcaaaatctgccaacgttgattttactgtggacaacaatggactttatactgagcctcgccccattggcacccgttacctcacccgtcccctgtaa

SEQ ID NO: 335 - protein, 736 aa, synthetic construct
  source 1..736: note = Description of Artificial Sequence: Synthetic polypeptide
MAADGYLPDWLEDNLSEGIREWWDLKPGAPKPKANQQHQDNARGLVLPGYKYLGPGNGLDKGEPVNAADAAALEHDKAYDQQLKAGDNPYLKYNHADAEFQERLKEDTSFGGNLGRAVFQAKKRLLEPLGLVEEAAKTAPGKKRPVEPSPQRSPDSSTGIGKKGQQPAKKRLNFGQTGDSESVPDPQPLGEPPATPAAVGPTTMASGGGAPMADNNEGADGVGNSSGNWHCDSQWLGDRVITTSTRTWALPTYNNHLYKQISSQSGASNDNHYFGYSTPWGYFDFNRFHCHFSPRDWQRLINNNWGFRPKRLNFKLFNIQVKEVTTNDGVTTIANNLTSTVQVFSDSEYQLPYVLGSAHQGCLPPFPADVFMIPQYGYLTLNNGSQAVGRSSFYCLEYFPSQMLRTGNNFTFSYTFEDVPFHSSYAHSQSLDRLMNPLIDQYLYYLSRTNTPSGTTTQSRLQFSQAGASDIRDQSRNWLPGPCYRQQRVSKTKTDNNNSNFTWTGASKYNLNGRESIINPGTAMASHKDDEDKFFPMSGVMIFGKESAGASNTALDNVMITDEEEIKATNPVATERFGTVAVNLQSSSTDPATGDVHVMGALPGMVWQDRDVYLQGPIWAKIPHTDGHFHPSPLMGGFGLKHPPPQILIKNTPVPANPPAEFSATKFASFITQYSTGQVSVEIEWELQKENSKRWNPEVQYTSNYAKSANVDFTVDNNGLYTEPRPIGTRYLTRPL

SEQ ID NO: 336 - DNA, 2214 bp, synthetic construct
  source 1..2214: mol_type = other DNA; note = Description of Artificial Sequence: Synthetic polynucleotide
atggctgccgatggttatcttccagattggctcgaggacaaccttagtgaaggaattcgcgagtggtgggctttgaaacctggagcccctcaacccaaggcaaatcaacaacatcaagacaacgctcgaggtcttgtgcttccgggttacaaataccttggacccggcaacggactcgacaagggggagccggtcaacgcagcagacgcggcggccctcgagcacgacaaggcctacgaccagcagctgcaggcgggtgacaatccgtacctgcggtataaccacgccgacgccgagtttcaggagcgtctgcaagaagatacgtcttttgggggcaaccttggcagagcagtcttccaggccaaaaagaggatccttgagcctcttggtctggttgaggaagcagctaaaacggctcctggaaagaagaggcctgtagatcagtctcctcaggaaccggactcatcatctggtgttggcaaatcgggcaaacagcctgccagaaaaagactaaatttcggtcagactggcgactcagagtcagtcccagaccctcaacctctcggagaaccaccagcagcccccacaagtttgggatctaatacaatggcttcaggcggtggcgcaccaatggcagacaataacgagggtgccgatggggtgggtagttcctcgggaaattggcattgcgattcccaatgactgggggacagagtcatcaccaccagcacccgaacctgggccctgcccacctacaacaatcacctctacaagcaaatctccaacgggacatcgggaggagccaccaacgacaacacctacttcggctacagcaccccctgggggtattttgactttaacagattccactgccacttttcaccacgtgactggcagcgactcatcaacaacaactggggattccggcccaagagactcagcttcaagctcttcaacatccaggtcaaggaggtcacgcagaatgaaggcaccaagaccatcgccaataacctcaccagcaccatccaggtgtttacggactcggagtaccagctgccgtacgttctcggctctgcgcaccagggctgcctccctccgttcccggcggacgtgttcatgattccgcaatacggctacctgacgctcaacaatggcagccaagccgtgggacgttcatccttttactgcctggaatatttcccttctcagatgctgagaacgggcaacaactttaccttcagctacacctttgaggaagtgcctttccacagcagctacgcgcacagccagagcttggaccggctgatgaatcctctgattgaccagtacctgtactacttgtctcggactcaaacaacaggaggcacggcaaatacgcagactctgggcttcagccaaggtgggcctaatacaatggccaatcaggcaaagaactggctgccaggaccctgttaccgccaacaacgcgtctcaacgacaaccgggcaaaacaacaatagcaactttgcctggactgctgggaccaaataccatctgaatggaagaaattcattggctaatcctggcatcgctatggcaacacacaaagacgacgaggagcgtttttttcccagtaacgggatcctgatttttggcaaacaaaatgctgccagagacaatgcggattacagcgatgtcatgctcaccagcgaggaagaaatcaaaaccactaaccctgtggctacagaggaatacggtatcgtggcagataacttgcagcagcaaaacacggctcctcaaattggaactgtcaacagccagggggccttacccggtatggtctggcagaaccgggacgtgtacctgcagggtcccatctgggccaagattcctcacacggacggcaacttccacccgtctccgctgatgggcggctttggcctgaaacatcctccgcctcagatcctgatcaagaacacgcctgtacctgcggatcctccgaccaccttcaaccagtcaaagctgaactctttcatcacgcaatacagcaccggacaggtcagcgtggagatcgagtgggagctgcagaaggaaaacagcaagcgctggaacccggagatccagtacacttccaactattacaagtctaataatgttgaatttgctgttaatactgaaggtgtatatagtgaaccccgccccattggcaccagatacctgactcgtaatctgtaa

SEQ ID NO: 337 - protein, 736 aa, synthetic construct
  source 1..736: note = Description of Artificial Sequence: Synthetic polypeptide
MAADGYLPDWLEDNLSEGIREWWALKPGAPQPKANQQHQDNARGLVLPGYKYLGPGNGLDKGEPVNAADAAALEHDKAYDQQLQAGDNPYLRYNHADAEFQERLQEDTSFGGNLGRAVFQAKKRILEPLGLVEEAAKTAPGKKRPVDQSPQEPDSSSGVGKSGKQPARKRLNFGQTGDSESVPDPQPLGEPPAAPTSLGSNTMASGGGAPMADNNEGADGVGSSSGNWHCDSQLGDRVITTSTRTWALPTYNNHLYKQISNGTSGGATNDNTYFGYSTPWGYFDFNRFHCHFSPRDWQRLINNNWGFRPKRLSFKLFNIQVKEVTQNEGTKTIANNLTSTIQVFTDSEYQLPYVLGSAHQGCLPPFPADVFMIPQYGYLTLNNGSQAVGRSSFYCLEYFPSQMLRTGNNFTFSYTFEEVPFHSSYAHSQSLDRLMNPLIDQYLYYLSRTQTTGGTANTQTLGFSQGGPNTMANQAKNWLPGPCYRQQRVSTTTGQNNNSNFAWTAGTKYHLNGRNSLANPGIAMATHKDDEERFFPSNGILIFGKQNAARDNADYSDVMLTSEEEIKTTNPVATEEYGIVADNLQQQNTAPQIGTVNSQGALPGMVWQNRDVYLQGPIWAKIPHTDGNFHPSPLMGGFGLKHPPPQILIKNTPVPADPPTTFNQSKLNSFITQYSTGQVSVEIEWELQKENSKRWNPEIQYTSNYYKSNNVEFAVNTEGVYSEPRPIGTRYLTRNL

SEQ ID NO: 338 - DNA, 2214 bp, synthetic construct
  source 1..2214: mol_type = other DNA; note = Description of Artificial Sequence: Synthetic polynucleotide
atggctgccgatggttatcttccagattggctcgaggacaaccttagtgaaggaattcgcgagtggtgggctttgaaacctggagcccctcaacccaaggcaaatcaacaacatcaagacaacgctcgaggtcttgtgcttccgggttacaaataccttggacccggcaacggactcgacaagggggagccggtcaacgcagcagacgcggcggccctcgagcacgacaaggcctacgaccagcagctgcaggcgggtgacaatccgtacctgcggtataaccacgccgacgccgagtttcaggagcgtctgcaagaagatacgtcttttgggggcaaccttggcagagcagtcttccaggccaaaaagaggatccttgagcctcttggtctggttgaggaagcagctaaaacggctcctggaaagaagaggcctgtagatcagtctcctcaggaaccggactcatcatctggtgttggcaaatcgggcaaacagcctgccagaaaaagactaaatttcggtcagactggcgactcagagtcagtcccagaccctcaacctctcggagaaccaccagcagcccccacaagtttgggatctaatacaatggcttcaggcggtggcgcaccaatggcagacaataacgagggtgccgatggggtgggtagttcctcgggaaattggcattgcgattcccaatggctgggggacagagtcatcaccaccagcacccgaacctgggccctgcccacctacaacaatcacctctacaagcaaatctccaacgggacatcgggaggagccaccaacgacaacacctacttcggctacagcaccccctgggggtattttgactttaacagattccactgccacttttcaccacgtgactggcagcgactcatcaacaacaactggggattccggcccaagagactcagcttcaagctcttcaacatccaggtcaaggaggtcacgcagaatgaaggcaccaagaccatcgccaataacctcaccagcaccatccaggtgtttacggactcggagtaccagctgccgtacgttctcggctctgcgcaccagggctgcctccctccgttcccggcggacgtgttcatgattccgcaatacggctacctgacgctcaacaatggcagccaagccgtgggacgttcatccttttactgcctggaatatttcccttctcagatgctgagaacgggcaacaactttaccttcagctacacctttgaggaagtgccttttcacagcagctacgcgcacagccagagcttggaccggctgatgaatcctctgattgaccagtacctgtactacttgtctcggactcaaacaacaggaggcacggcaaatacgcagactctgggcttcagccaaggtgggcctaatacaatggccaatcaggcaaagaactggctgccaggaccctgttaccgccaacaacgcgtctcaacgacaaccgggcaaaacaacaatagcaactttgcctggactgctgggaccaaataccatctgaatggaagaaattcattggctaatcctggcatcgctatggcaacacacaaagacgacgaggagcgtttttttcccagtaacgggatcctgatttttggcaaacaaaatgctgccagagacaatgcggattacagcgatgtcatgctcaccagcgaggaagaaatcaaaaccactaaccctgtggctacagaggaatacggtatcgtggcagataacttgcagcagcaaaacacggctcctcaaattggaactgtcaacagccagggggccttacccggtatggtctggcagaaccgggacgtgtacctgcagggtcccatctgggccaagattcctcacacggacggcaacttccacccgtctccgctgatgggcggctttggcctgaaacatcctccgcctcagatcctgatcaagaacacgcctgtacctgcggatcctccgaccaccttcaaccagtcaaagctgaactctttcatcacgcaatacagcaccggacaggtcagcgtggagatcgagtgggagctgcagaaggaaaacagcaagcgctggaacccggagatccagtacacttccaactattacaagtctaataatgttgaatttgctgttaatactgaaggtgtatatagtgaaccccgccccattggcaccagatacctgactcgtaatctgtaa

SEQ ID NO: 339 - protein, 737 aa, synthetic construct; identical to SEQ ID NO: 327
  source 1..737: note = Description of Artificial Sequence: Synthetic polypeptide

SEQ ID NO: 340 - DNA, 2211 bp, synthetic construct
  source 1..2211: mol_type = other DNA; note = Description of Artificial Sequence: Synthetic polynucleotide
atggctgccgatggttatcttccagattggctcgaggacaacctctctgagggcattcgcgagtggtgggacttgaaacctggagcccctaaacccaaggcaaatcaacaacatcaggacaacgctcgaggtcttgtgcttccgggttacaaataccttggacccggcaacggactcgacaagggggagccggtcaacgcagcagacgcggcggccctcgagcacgacaaggcctacgaccagcagctcaaggccggagacaacccgtacctcaagtacaaccacgccgacgccgagttccaggagcggctcaaagaagatacgtcttttgggggcaacctcgggcgagcagtcttccaggccaaaaagaggcttcttgaacctcttggtctggttgaggaagcggctaagacggctcctggaaagaagagaccggtagagccatcaccccagcgttctccagactcctctacgggcatcggcaagaaaggccaacagcccgctaaaaagagactcaattttggtcagactggcgactcagagtcagtccccgacccacaacctctcggagaacctccagcaacccccgctgctgtgggacctactacaatggcttcaggcggtggcgcaccaatggcagacaataacgagggtgccgatggagtgggtaattcctcaggaaattggcattgcgattcccaatggctgggcgacagagtcatcaccaccagcaccagaacctgggccctgcccacttacaacaaccatctctacaagcaaatctccagccaatcaggagcttcaaacgacaaccactactttggctacagcaccccttgggggtattttgactttaacagattccactgccacttttcaccacgtgactggcaaagactcatcaacaacaactggggattccgacccaagagactcaacttcaagctcttcaacatccaagtcaaggaggtcacgacgaatgatggcgtcacgaccatcgctaataaccttaccagcacggttcaagtcttctcggactcggagtaccagttgccgtacgtcctcggctctgcgcaccagggctgcctccctccgttcccggcggacgtgttcatgattccgcagtacggctacctaacgctcaacaatggcagccaagccgtgggacgttcatccttttactgcctggaatatttcccttctcagatgctgagaacgggcaacaactttaccttcagctacacttttgaggacgttcctttccacagcagctacgctcacagccagagtctggaccgtctcatgaatcctctcatcgaccagtacctgtattacttgagcagaacaaacactccaagtggaaccaccacgcagtcaaggcttcagttttctcaggccggagcgagtgacattcgggaccagtctaggaactggcttcctggaccctgttaccgccagcagcgcgtttctaaaacaaaaacagacaacaacaacagcaattttacctggactggtgcttcaaaatataaccttaatgggcgtgaatctataatcaaccctggcactgctatggcctcacacaaagacgacgaagacaagttctttcccatgagcggtgtcatgatttttggaaaagagagcgccggagcttcaaacactgcattggacaatgtcatgattacagacgaagaggaaattaaagccactaaccctgtggccaccgaaagatttgggaccgtggcagtcaatttccagagcagcagcacagaccctgcgaccggagatgtgcatgctatgggagcattacctggcatggtgtggcaagatagagacgtgtacctgcagggtcccatttgggccaaaattcctcacacagatggacactttcacccgtctcctcttatgggcggctttggactcaagaacccgcctcctcagatcctcatcaaaaacacgcctgttcctgcgaatcctccggcggagttttcagctacaaagtttgcttcattcatcacccaatactccacaggacaagtgagtgtggaaattgaatgggagctgcagaaagaaaacagcaagcgctggaatcccgaagtgcagtacacatccaattatgcaaaatctgccaacgttgattttactgtggacaacaatggactttatactgagcctcgccccattggcacccgttaccttacccgtcccctgtaa

SEQ ID NO: 341 - protein, 736 aa, synthetic construct
  source 1..736: note = Description of Artificial Sequence: Synthetic polypeptide
MAADGYLPDWLEDNLSEGIREWWDLKPGAPKPKANQQHQDNARGLVLPGYKYLGPGNGLDKGEPVNAADAAALEHDKAYDQQLKAGDNPYLKYNHADAEFQERLKEDTSFGGNLGRAVFQAKKRLLEPLGLVEEAAKTAPGKKRPVEPSPQRSPDSSTGIGKKGQQPAKKRLNFGQTGDSESVPDPQPLGEPPATPAAVGPTTMASGGGAPMADNNEGADGVGNSSGNWHCDSQWLGDRVITTSTRTWALPTYNNHLYKQISSQSGASNDNHYFGYSTPWGYFDFNRFHCHFSPRDWQRLINNNWGFRPKRLNFKLFNIQVKEVTTNDGVTTIANNLTSTVQVFSDSEYQLPYVLGSAHQGCLPPFPADVFMIPQYGYLTLNNGSQAVGRSSFYCLEYFPSQMLRTGNNFTFSYTFEDVPFHSSYAHSQSLDRLMNPLIDQYLYYLSRTNTPSGTTTQSRLQFSQAGASDIRDQSRNWLPGPCYRQQRVSKTKTDNNNSNFTWTGASKYNLNGRESIINPGTAMASHKDDEDKFFPMSGVMIFGKESAGASNTALDNVMITDEEEIKATNPVATERFGTVAVNFQSSSTDPATGDVHAMGALPGMVWQDRDVYLQGPIWAKIPHTDGHFHPSPLMGGFGLKNPPPQILIKNTPVPANPPAEFSATKFASFITQYSTGQVSVEIEWELQKENSKRWNPEVQYTSNYAKSANVDFTVDNNGLYTEPRPIGTRYLTRPL

SEQ ID NO: 342 - DNA, 2211 bp, synthetic construct
  source 1..2211: mol_type = other DNA; note = Description of Artificial Sequence: Synthetic polynucleotide
atggctgccgatggttatcttccagattggctcgaggacaaccttagtgaaggaattcgcgagtggtgggcgctgaaacctggagccccgaagcccaaagccaaccagcaaaagcaggacgacggccggggtctggtgcttccgggttacaaatacctcggacccggtaacggactcgacaaaggagagccggtcaacgaggcggacgcggcagccctcgagcacgacaaggcctacgaccagcagctcaaagcgggtgacaatccgtacctgcggtataaccacgccgacgccgagtttcaggagcgtctgcaagaagatacgtcttttgggggcaacctcgggcgagcagtcttccaggccaagaagcgggttctcgaacctctcggtctggttgaggaaggcgctaagacggctcccggaaagaaacgtccggtagagcagtcgccacaagagccagactcctctacgggcatcggcaagaaaggccaacagcccgccagaaaaagactcaatttcggtcagactggcgactcagagtcagttccagaccctcaacctctcggagaacctccagcagcgccctctggtgtgggacctactacaatggcttcaggcggtggcgcaccaatggcagacaataacgaaggcgccgacggagtgggtaatgcctcaggaaattggcattgcgattccacatggctgggcgacagagtcatcaccaccagcacccgaacatgggccttgcccacctataacaaccacctctacaagcaaatctccagtgcttcaacgggggccagcaacgacaacacctacttcggctacagcaccccctgggggtattttgatttcaacagattccactgccatttctcaccacgtgactggcagcgactcatcaacaacaattggggattccggcccaagagactcaacttcaaactcttcaacatccaagtcaaggaggtcacgacgaatgatggcgtcacgaccatcgctaataaccttaccagcacggttcaagtcttctcggactcggagtaccagttgccgtacgtcctcggctctgcgcaccagggctgcctccctccgttcccggcggacgtgttcatgattccgcagtacggctacctaacgctcaacaatggcagccaggcagtgggacggtcatccttttactgcctggaatatttcccatcgcagatgctgagaacgggcaataactttaccttcagctacaccttcgaggacgtgcctttccacagcagctacgcgcacagccagagcctggaccggctgatgaatcctctcatcgaccagtacctgtattacctgaacagaactcagaatcagtccggaagtgcccaaaacaaggacttgctgtttagccgggggtctccagctggcatgtctgttcagcccaaaaactggctacctggaccctgttatcggcagcagcgcgtttctaaaacaaaaacagacaacaacaacagcaattttacctggactggtgcttcaaaatataacctcaatgggcgtgaatccatcatcaaccctggcactgctatggcctcacacaaagacgacgaagacaagttctttcccatgagcggtgtcatgatttttggaaaagagagcgccggagcttcaaacactgcattggacaatgtcatgattacagacgaagaggaaattaaagccactaaccctgtggccaccgaaagatttgggaccgtggcagtcaatttccagagcagcagcacagaccctgcgaccggagatgtgcatgttatgggagccttacctggaatggtgtggcaagacagagacgtatacctgcagggtcctatttgggccaaaattcctcacacagatggacactttcacccgtctcctcttatgggcggctttggactcaagaacccgcctcctcagatcctcatcaaaaacacgcctgttcctgcgaatcctccggcagagttttcggctacaaagtttgcttcattcatcacccagtattccacaggacaagtgagcgtggagattgaatgggagctgcagaaagaaaacagcaaacgctggaatcccgaagtgcagtatacatctaactatgcaaaatctgccaacgttgatttcactgtggacaacaatggactttatactgagcctcgccccattggcacccgttacctcacccgtcccctgtaa

SEQ ID NO: 343 - protein, 736 aa, synthetic construct
  source 1..736: note = Description of Artificial Sequence: Synthetic polypeptide
MAADGYLPDWLEDNLSEGIREWWALKPGAPKPKANQQKQDDGRGLVLPGYKYLGPGNGLDKGEPVNEADAAALEHDKAYDQQLKAGDNPYLRYNHADAEFQERLQEDTSFGGNLGRAVFQAKKRVLEPLGLVEEGAKTAPGKKRPVEQSPQEPDSSTGIGKKGQQPARKRLNFGQTGDSESVPDPQPLGEPPAAPSGVGPTTMASGGGAPMADNNEGADGVGNASGNWHCDSTWLGDRVITTSTRTWALPTYNNHLYKQISSASTGASNDNTYFGYSTPWGYFDFNRFHCHFSPRDWQRLINNNWGFRPKRLNFKLFNIQVKEVTTNDGVTTIANNLTSTVQVFSDSEYQLPYVLGSAHQGCLPPFPADVFMIPQYGYLTLNNGSQAVGRSSFYCLEYFPSQMLRTGNNFTFSYTFEDVPFHSSYAHSQSLDRLMNPLIDQYLYYLNRTQNQSGSAQNKDLLFSRGSPAGMSVQPKNWLPGPCYRQQRVSKTKTDNNNSNFTWTGASKYNLNGRESIINPGTAMASHKDDEDKFFPMSGVMIFGKESAGASNTALDNVMITDEEEIKATNPVATERFGTVAVNFQSSSTDPATGDVHVMGALPGMVWQDRDVYLQGPIWAKIPHTDGHFHPSPLMGGFGLKNPPPQILIKNTPVPANPPAEFSATKFASFITQYSTGQVSVEIEWELQKENSKRWNPEVQYTSNYAKSANVDFTVDNNGLYTEPRPIGTRYLTRPL

SEQ ID NO: 344 - DNA, 2205 bp, synthetic construct
  source 1..2205: mol_type = other DNA; note = Description of Artificial Sequence: Synthetic polynucleotide
atggctgctgacggttatcttccagattggctcgaggacaacctttctgaaggcattcgtgagtggtgggctctgaaacctggagtccctcaacccaaagcgaaccaacaacaccaggacaaccgtcggggtcttgtgcttccgggttacaaatacctcggacccggtaacggactcgacaaaggagagccggtcaacgaggcggacgcggcagccctcgaacacgacaaggcctacgaccagcagctcaaggccggagacaacccgtacctcaagtacaaccacgccgacgccgagttccaggagcggctcaaagaagatacgtcttttgggggcaacctcgggcgagcagtcttccaggccaaaaagaggcttcttgaacctcttggtctggttgaggaagcggctaagacggctcctggaaagaagaggcctgtagagcagtctcctcaggaaccggactcctccgcgggtattggcaaatcgggtgcacagcccgctaaaaagagactcaatttcggtcagactggcgacacagagtcagtcccagaccctcaaccaatcggagaacctcccgcagccccctcaggtgtgggatctcttacaatggcttcaggtggtggcgcaccagtggcagacaataacgaaggtgccgatggagtgggtagttcctcgggaaattggcattgcgattcccaatggctgggggacagagtcatcaccaccagcacccgaacctgggccctgcccacctacaacaaccacctctacaaacaaatttccagccaatcaggagcctcgaacgacaatcactactttggctacagcaccccttgggggtattttgacttcaacagattccactgccacttttcaccacgtgactggcagcgactcatcaacaacaactggggattccggcccaagagactcagcttcaagctcttcaacatccaggtcaaagaggttacggacaacaatggagtcaagaccatcgccaataaccttaccagcacggtccaggtcttcacggactcagactatcagctcccgtacgtgctcgggtcggctcacgagggctgcctcccgccgttcccagcggacgttttcatgattcctcagtacgggtatctgacgcttaatgatggaagccaggccgtgggtcgttcgtccttttactgcctggaatatttcccgtcgcaaatgctaagaacgggtaacaacttccagttcagctacgagtttgagaacgtacctttccatagcagctacgctcacagccaaagcctggaccgactaatgaatccactcatcgaccaatacttgtactatctctcaaagactattaacggttctggacagaatcaacaaacgctaaaattcagtgtggccggacccagcaacatggctgtccagggaagaaactacatacctggacccagctaccgacaacaacgtgtctcaaccactgtgactcaaaacaacaacagcgaatttgcttggcctggagcttcttcttgggctctcaatggacgtaatagcttgatgaatcctggacctgctatggccagccacaaagaaggagaggaccgtttctttcctttgtctggatctttaatttttggcaaacaaggaactggaagagacaacgtggatgcggacaaagtcatgataaccaacgaagaagaaattaaaactactaacccggtagcaacggagtcctatggacaagtggccacaaaccaccagagtgcccaagcacaggcgcagaccggctgggttcaaaaccaaggaatacttccgggtatggtttggcaggacagagatgtgtacctgcaaggacccatctgggccaagattcctcacacggacggcaacttccacccgtctccgctgatgggcggctttggcctgaaacatcctccgcctcagatcctgatcaagaacacgcctgtacctgcggatcctccgaccaccttcaaccagtcaaagctgaactctttcatcacgcaatacagcaccggacaggtcagcgtggaaattgaatgggagctgcagaaggaaaacagcaagcgctggaatcccgaagtgcagtatacatctaactatgcaaaatctgccaacgttgatttcactgtggacaacaatggactttatactgagcctcgccccattggcacccgttacctcacccgtcccctgtaa

SEQ ID NO: 345 - protein, 734 aa, synthetic construct
  source 1..734: note = Description of Artificial Sequence: Synthetic polypeptide
MAADGYLPDWLEDNLSEGIREWWALKPGVPQPKANQQHQDNRRGLVLPGYKYLGPGNGLDKGEPVNEADAAALEHDKAYDQQLKAGDNPYLKYNHADAEFQERLKEDTSFGGNLGRAVFQAKKRLLEPLGLVEEAAKTAPGKKRPVEQSPQEPDSSAGIGKSGAQPAKKRLNFGQTGDTESVPDPQPIGEPPAAPSGVGSLTMASGGGAPVADNNEGADGVGSSSGNWHCDSQWLGDRVITTSTRTWALPTYNNHLYKQISSQSGASNDNHYFGYSTPWGYFDFNRFHCHFSPRDWQRLINNNWGFRPKRLSFKLFNIQVKEVTDNNGVKTIANNLTSTVQVFTDSDYQLPYVLGSAHEGCLPPFPADVFMIPQYGYLTLNDGSQAVGRSSFYCLEYFPSQMLRTGNNFQFSYEFENVPFHSSYAHSQSLDRLMNPLIDQYLYYLSKTINGSGQNQQTLKFSVAGPSNMAVQGRNYIPGPSYRQQRVSTTVTQNNNSEFAWPGASSWALNGRNSLMNPGPAMASHKEGEDRFFPLSGSLIFGKQGTGRDNVDADKVMITNEEEIKTTNPVATESYGQVATNHQSAQAQAQTGWVQNQGILPGMVWQDRDVYLQGPIWAKIPHTDGNFHPSPLMGGFGLKHPPPQILIKNTPVPADPPTTFNQSKLNSFITQYSTGQVSVEIEWELQKENSKRWNPEVQYTSNYAKSANVDFTVDNNGLYTEPRPIGTRYLTRPL

SEQ ID NO: 346 - DNA, 2211 bp, synthetic construct
  source 1..2211: mol_type = other DNA; note = Description of Artificial Sequence: Synthetic polynucleotide
atggctgccgatggttatcttccagattggctcgaggacaacctctctgagggcattcgcgagtggtgggcgctgaaacctggagccccgaagcccaaagccaaccagcaaaagcaggacgacggccggggtctggtgcttcctggctacaagtacctcggacccttcaacggactcgacaagggggagcccgtcaacgcggcggacgcagcggccctcgagcacgacaaggcctacgaccagcagctgcaggcgggtgacaatccgtacctgcggtataaccacgccgacgccgagtttcaggagcgtctgcaagaagatacgtcttttgggggcaacctcgggcgagcagtcttccaggccaagaagtgggttctcgaacctctcggtctggttgaggaaggcgctaagacggctcctggaaagaaacgtccggtagagcagtcgccacaagagccagactcctcctcgggcatcggcaagacaggccagcagcccgctaaaaagagactcaattttggtcagactggcgactcagagtcagtccccgacccacaacctctcggagaacctccagcaacccccgctgctgtgggacctactacaatggcttcaggcggtggcgcaccaatggcagacaataacgaaggcgccgacggagtgggtaatgcctcaggaaattggcattgcgattccacatggctgggcgacagagtcatcaccaccagcacccgcacctgggccttgcccacctacaataaccacctctacaagcaaatctccagtgcttcaacgggggccagcaacgacaaccactacttcggctacagcaccccctgggggtattttgatttcaacagattccactgccatttctcaccacgtgactggcagcgactcatcaacaacaattggggattccggcccaagagactcaacttcaagctcttcaacatccaagtcaaggaggtcacgacgaatgatggcgtcacaaccatcgctaataaccttaccagcacggttcaagtcttctcggactcggagtaccagcttccgtacgtcctcggctctgcgcaccagggctgcctccctccgttcccggcggacgtgttcatgattccgcaatacggctacctgacgctcaacaatggcagccaagccgtgggacgttcatccttttactgcctggaatatttcccttctcagatgctgagaacgggcaacaactttaccttcagctacacctttgaggaagtgcctttccacagcagctacgcgcacagccagagcctggaccggctgatgaatcctctcatcgaccaatacctgtattacctgaacagaactcaaaatcagtccggaagtgcccaaaacaaggacttgctgtttagccgtgggtctccagctggcatgtctgttcagcccaaaaactggctacctggaccctgttatcggcagcagcgcgtttctaaaacaaaaacagacaacaacaacagcaattttacctggactggtgcttcaaaatataacctcaatgggcgtgaatccatcatcaaccctggcactgctatggcctcacacaaagacgacgaagacaagttctttcccatgagcggtgtcatgatttttggaaaggagagcgccggagcttcaaacactgcattggacaatgtcatgatcaccgacgaagaggaaatcaaagccactaaccccgtggccaccgaaagatttgggactgtggcagtcaatctccagagcagcagcacagaccctgcgaccggagatgtgcatgttatgggagccttacctggcatggtgtggcaagatagagacgtgtacctgcagggtcccatttgggccaaaattcctcacacagatggacactttcacccgtctcctcttatgggcggctttggactcaagaacccgcctcctcagatcctcatcaaaaacacgcctgttcctgcgaatcctccggcggagttttcagctacaaagtttgcttcattcatcacccaatactccacaggacaagtgagtgtggaaattgaatgggagctgcagaaagaaaacagcaagcgctggaatcccgaagtgcagtacacatccaattatgcaaaatctgccaacgttgattttactgtggacaacaatggactttatactgagcctcgccccattggcacccgttacctcacccgtcccctgtaa

SEQ ID NO: 347 - protein, 736 aa, synthetic construct
  source 1..736: note = Description of Artificial Sequence: Synthetic polypeptide
MAADGYLPDWLEDNLSEGIREWWALKPGAPKPKANQQKQDDGRGLVLPGYKYLGPFNGLDKGEPVNAADAAALEHDKAYDQQLQAGDNPYLRYNHADAEFQERLQEDTSFGGNLGRAVFQAKKWVLEPLGLVEEGAKTAPGKKRPVEQSPQEPDSSSGIGKTGQQPAKKRLNFGQTGDSESVPDPQPLGEPPATPAAVGPTTMASGGGAPMADNNEGADGVGNASGNWHCDSTWLGDRVITTSTRTWALPTYNNHLYKQISSASTGASNDNHYFGYSTPWGYFDFNRFHCHFSPRDWQRLINNNWGFRPKRLNFKLFNIQVKEVTTNDGVTTIANNLTSTVQVFSDSEYQLPYVLGSAHQGCLPPFPADVFMIPQYGYLTLNNGSQAVGRSSFYCLEYFPSQMLRTGNNFTFSYTFEEVPFHSSYAHSQSLDRLMNPLIDQYLYYLNRTQNQSGSAQNKDLLFSRGSPAGMSVQPKNWLPGPCYRQQRVSKTKTDNNNSNFTWTGASKYNLNGRESIINPGTAMASHKDDEDKFFPMSGVMIFGKESAGASNTALDNVMITDEEEIKATNPVATERFGTVAVNLQSSSTDPATGDVHVMGALPGMVWQDRDVYLQGPIWAKIPHTDGHFHPSPLMGGFGLKNPPPQILIKNTPVPANPPAEFSATKFASFITQYSTGQVSVEIEWELQKENSKRWNPEVQYTSNYAKSANVDFTVDNNGLYTEPRPIGTRYLTRPL

SEQ ID NO: 348 - DNA, 2214 bp, synthetic construct
  source 1..2214: mol_type = other DNA; note = Description of Artificial Sequence: Synthetic polynucleotide
atggctgccgatggttatcttccagattggctcgaggacaaccttagtgaaggaattcgcgagtggtgggctttgaaacctggagcccctcaacccaaggcaaatcaacaacatcaagacaacgctcgaggtcttgtgcttccgggttacaaataccttggacccggcaacggactcgacaagggggagccggtcaacgcagcagacgcggcggccctcgagcacgacaaggcctacgaccagcagctgcaggcgggtgacaatccgtacctgcggtataaccacgccgacgccgagtttcaggagcgtctgcaagaagatacgtcttttgggggcaaccttggcagagcagtcttccaggccaaaaagaggatccttgagcctcttggtctggttgaggaagcagctaaaacggctcctggaaagaagaggcctgtagatcagtctcctcaggaaccggactcatcatctggtgttggcaaatcgggcaaacagcctgccagaaaaagactaaatttcggtcagactggcgactcagagtcagtcccagaccctcaacctctcggagaaccaccagcagcccccacaagtttgggatctaatacaatggcttcaggcggtggcgcaccaatggcagacaataacgagggtgccgatggggtgggtagttcctcgggaaattggcattgcgattcccaatggctgggggacagagtcatcaccaccagcacccgaacctgggccctgcccacctacaacaatcacctctacaagcaaatctccaacgggacatcgggaggagccaccaacgacaacacctacttcggctacagcaccccctgggggtattttgactttaacagattccactgccacttttcaccacgtgactggcagcgactcatcaacaacaactggggattccggcccaagagactcagcttcaagctcttcaacatccaggtcaaggaggtcacgcagaatgaaggcaccaagaccatcgccaataacctcaccagcaccatccaggtgtttacggactcggagtaccagctgccgtacgttctcggctcggcgcaccagggctgcctccctccgttcccggcggacgtcttcatggtgccacagtatggatacctgacgctcaacaatggcagccaagccgtgggacgttcatccttttactgcctggaatatttcccttctcagatgctgagaacgggcaacaactttaccttcagctacacctttgaggaagtgcctttccacagcagctacgcgcacagccagagcttggaccggctgatgaatcctctgattgaccagtacctgtactacttgtctcggactcaaacaacaggaggcacggcaaatacgcagactctgggcttcagccaaggtgggcctaatacaatggccaatcaggcaaagaactggctgccaggaccctgttaccgccaacaacgcgtctcaacgacaaccgggcaaaacaacaatagcaactttgcctggactgctgggaccaaataccatctgaatggaagaaattcattggctaatcctggcatcgctatggcaacacacaaagacgacgaggagcgtttttttcccagtaacgggatcctgatttttggcaaacaaaatgctgccagagacaatgcggattacagcgatgtcatgctcaccagcgaggaagaaatcaaaaccactaaccctgtggctacagaggaatacggtatcgtggcagataacttgcagcagcaaaacacggctcctcaaattggaactgtcaacagccagggggacttacccggtatggtctggcagaaccgggacgtgtacctgcagggtcccatctgggccaagattcctcacacggacggcaacttccacccgtctccgctgatgggcggctttggcctgaaacatcctccgcctcagatcctgatcaagaacacgcctgtacctgcggatcctccgaccaccttcaaccagtcaaagctgaactctttcatcacgcaatacagcaccggacaggtcagcgtggagatcgagtgggagctgcagaaggaaaacagcaagcgctggaacccggagatccagtacacttccaactattacaagtctaataatgttgaatttgctgttaatactgaaggtgtatatagtgaaccccgccccattggcaccagatacctgactcgtaatctgtaa

SEQ ID NO: 349 - protein, 737 aa, synthetic construct
  source 1..737: note = Description of Artificial Sequence: Synthetic polypeptide
MAADGYLPDWLEDNLSEGIREWWALKPGAPQPKANQQHQDNARGLVLPGYKYLGPGNGLDKGEPVNAADAAALEHDKAYDQQLQAGDNPYLRYNHADAEFQERLQEDTSFGGNLGRAVFQAKKRILEPLGLVEEAAKTAPGKKRPVDQSPQEPDSSSGVGKSGKQPARKRLNFGQTGDSESVPDPQPLGEPPAAPTSLGSNTMASGGGAPMADNNEGADGVGSSSGNWHCDSQWLGDRVITTSTRTWALPTYNNHLYKQISNGTSGGATNDNTYFGYSTPWGYFDFNRFHCHFSPRDWQRLINNNWGFRPKRLSFKLFNIQVKEVTQNEGTKTIANNLTSTIQVFTDSEYQLPYVLGSAHQGCLPPFPADVFMVPQYGYLTLNNGSQAVGRSSFYCLEYFPSQMLRTGNNFTFSYTFEEVPFHSSYAHSQSLDRLMNPLIDQYLYYLSRTQTTGGTANTQTLGFSQGGPNTMANQAKNWLPGPCYRQQRVSTTTGQNNNSNFAWTAGTKYHLNGRNSLANPGIAMATHKDDEERFFPSNGILIFGKQNAARDNADYSDVMLTSEEEIKTTNPVATEEYGIVADNLQQQNTAPQIGTVNSQGDLPGMVWQNRDVYLQGPIWAKIPHTDGNFHPSPLMGGFGLKHPPPQILIKNTPVPADPPTTFNQSKLNSFITQYSTGQVSVEIEWELQKENSKRWNPEIQYTSNYYKSNNVEFAVNTEGVYSEPRPIGTRYLTRNL

SEQ ID NO: 350 - DNA, 2205 bp, synthetic construct
  source 1..2205: mol_type = other DNA; note = Description of Artificial Sequence: Synthetic polynucleotide
atggctgctgacggttatcttccagattggctcgaggacaacctttctgaaggcattcgtgagtggtgggctctgaaacctggagtccctcaacccaaagcgaaccaacaacaccaggacaactgtcggggtcttgtgcttccgggttacaaatacctcggacccggtaacggactcgacaaaggagagccggtcaacgaggcggacgcggcagccctcgaacacgacaaggcctacgaccagcagctcaaggccggagacaacccgtacctcaagtacaaccacgccgacgccgagttccaggagcggctcaaagaagatacgtcttttgggggcaacctcgggcgagcagtcttccagaccaaaaagaggcttcttgaacctcttggtctggttgaggaagcggctaagacggctcctggaaagaagaggcctgtagagcagtctcctcaggaaccggactcctccgcgggtattggcaaatcgggtgcacagcccgctaaaaagagactcaatttcggtcagactggcgacacagagtcagtcccagaccctcaaccaatcggagaacctcccgcagccccctcaggtgtgggatctcttacaatggcttcaggtggtggcgcaccagtggcagacaataacgaaggtgccgatggagtgggtagttcctcgggaaattggcattgcgattcccaatggctgggggacagagtcatcaccaccagcacccgaacctgggccctgcccacctacaacaaccacctctacaaacaaatttccagccaatcaggagcctcgaacgacaatcactactttggctacagcaccccttgggggtattttgacttcaacagattccactgccacttttcaccacgtgactggcagcgactcatcaacaacaactggggattccggcccaagagactcagcttcaagctcttcaacatccaggtcaaagaggttacggacaacaatggagtcaagaccatcgccaataaccttaccagcacggtccaggtcttcacggactcagactatcagctcccgtacgtgctcgggtcggctcacgagggctgcctcccgccgttcccagcggacgttttcatgattcctcagtacgggtatctgacgcttaatgatggaagccaggccgtgggtcgttcgtccttttactgcctggaatatttcccgtcgcaaatgctaagaacgggtaacaacttccagttcagctacgagtttgagaacgtacctttccatagcagctacgctcacagccaaagcctggaccgactaatgaatccactcatcgaccaatacttgtactatctctcaaagactattaacggttctggacagaatcaacaaacgctaaaattcagtgtggccggacccagcaacatggctgtccagggaagaaactacatacctggacccagctaccgacaacaacgtgtctcaaccactgtgactcaaaacaacaacagcgaatttgcttggcctggagcttcttcttgggctctcaatggacgtaatagcttgatgaatcctggacctgctatggccagccacaaagaaggagaggaccgtttctttcctttgtctggatctttaatttttggcaaacaaggaactggaagagacaacgtggatgcggacaaagtcatgataaccaacgaagaagaaattaaaactactaacccggtagcaacggagtcctatggacaagtggccacaaaccaccagagtgcccaagcacaggcgcagaccggctgggttcaaaaccaaggaatacttccgggtatggtttggcaggacagagatgtgtacctgcaaggacccatctgggccaagattcctcacacggacggcaacttccacccgtctccgctgatgggcggctttggcctgaaacatcctccgcctcagatcctgatcaagaacacgcctgttcctgcgaatcctccggcggagttttcagctacaaagtttgcttcattcatcacccagtactccacaggacaagtgagtgtggaaattgaatgggagctgcagaaagaaaacagcaagcgctggaatcccgaagtgcagtacacatccaattatgcaaaatctgccaacgttgattttactgtggacaacaatggactttatactgagcctcgccccattggcacccgttaccttaccaaacctctgtaa

SEQ ID NO: 351 - protein, 734 aa, synthetic construct
  source 1..734: note = Description of Artificial Sequence: Synthetic polypeptide
MAADGYLPDWLEDNLSEGIREWWALKPGVPQPKANQQHQDNCRGLVLPGYKYLGPGNGLDKGEPVNEADAAALEHDKAYDQQLKAGDNPYLKYNHADAEFQERLKEDTSFGGNLGRAVFQTKKRLLEPLGLVEEAAKTAPGKKRPVEQSPQEPDSSAGIGKSGAQPAKKRLNFGQTGDTESVPDPQPIGEPPAAPSGVGSLTMASGGGAPVADNNEGADGVGSSSGNWHCDSQWLGDRVITTSTRTWALPTYNNHLYKQISSQSGASNDNHYFGYSTPWGYFDFNRFHCHFSPRDWQRLINNNWGFRPKRLSFKLFNIQVKEVTDNNGVKTIANNLTSTVQVFTDSDYQLPYVLGSAHEGCLPPFPADVFMIPQYGYLTLNDGSQAVGRSSFYCLEYFPSQMLRTGNNFQFSYEFENVPFHSSYAHSQSLDRLMNPLIDQYLYYLSKTINGSGQNQQTLKFSVAGPSNMAVQGRNYIPGPSYRQQRVSTTVTQNNNSEFAWPGASSWALNGRNSLMNPGPAMASHKEGEDRFFPLSGSLIFGKQGTGRDNVDADKVMITNEEEIKTTNPVATESYGQVATNHQSAQAQAQTGWVQNQGILPGMVWQDRDVYLQGPIWAKIPHTDGNFHPSPLMGGFGLKHPPPQILIKNTPVPANPPAEFSATKFASFITQYSTGQVSVEIEWELQKENSKRWNPEVQYTSNYAKSANVDFTVDNNGLYTEPRPIGTRYLTKPL

SEQ ID NO: 352 - DNA, 2211 bp, synthetic construct
  source 1..2211: mol_type = other DNA; note = Description of Artificial Sequence: Synthetic polynucleotide
atggctgccgatggttatcttccagattggctcgaggacaacctctctgagggcattcgcgagtggtgggacttgaaacctggagcccctaaacccaaggcaaatcaacaacatcaggacaacgctcgaggtcttgtgcttccgggttacaaataccttggacccggcaacggactcgacaagggggagccggtcaacgcagcagacgcggcggccctcgagcacgacaaggcctacgaccagcagctcaaggccggagacaacccgtacctcaagtacaaccacgccgacgccgagttccaggagcggctcaaagaagatacgtcttttgggggcaacctcgggcgagcagtcttccaggccaaaaagaggcttcttgaacctcttggtctggttgaggaagcggctaagacggctcctggaaagaagagaccggtagagccatcaccccagcgttctccagactcctctacgggcatcggcaagaaaggccaacagcccgctaaaaagagactcaattttggtcagactggcgactcagagtcagtccccgacccacaacctctcggagaacctccagcaacccccgctgctgtgggacctactacaatggcttcaggcggtggcgcaccaatggcagacaataacgagggtgccgatggagtgggtaattcctcaggaaattggcattgcgattcccaatggctgggcgacagagtcatcaccaccagcaccagaacctgggccctgcccacttacaacaaccatctctacaagcaaatctccagccaatcaggagcttcaaacgacaaccactactttggctacagcaccccttgggggtattttgactttaacagattccactgccacttttcaccacgtgactggcaaagactcatcaacaacaactggggattccgacccaagagactcaacttcaagctcttcaacatccaagtcaaggaggtcacgacgaatgatggcgtcacgaccatcgctaataaccttaccagcacggttcaagtcttctcggactcggagtaccagttgccgtacgtcctcggctctgcgcaccagggctgcctccctccgttcccggcggacgtgttcatgattccgcagtacggctacctaacgctcaacaatggcagccaagccgtgggacgttcatccttttactgcctggaatatttcccttctcagatgctgagaacgggcaacaactttaccttcagctacacttttgaggacgttcctttccacagcagctacgctcacagccagagtctggaccgtctcatgaatcctctcatcgaccagtacctgtattacttgagcagaacaaacactccaagtggaaccaccacgcagtcaaggcttcagttttctcaggccggagcgagtgacattcgggaccagtctaggaactggcttcctggaccctgttaccgccagcagcgcgtttctaaaacaaaaacagacaacaacaacagcaattttacctggactggtgcttcaaaatataaccttaatgggcgtgaatctataatcaaccctggcactgctatggcctcacacaaagacgacgaagacaagttctttcccatgagcggtgtcatgatttttggaaaagagagcgccggagcttcaaacactgcattggacaatgtcatgatcacagacgaagaggaaatcaaagccactaaccccgtggccaccgaaagatttgggactgtggcagtcaatctccagagcagcagcacagaccctgcgaccggagatgtgcatgttatgggagcattacctggcatggtgtggcaagatagagacgtgtacctgcagggtcccatttgggccaaaattcctcacacagatggacactttcacccgtctcctcttatgggcggctttggactcaagaacccgcctcctcagatcctcatcaaaaacacgcctgttcctgcgaatcctccggcggagttttcagctacaaagtttgcttcattcatcacccaatactccacaggacaagtgagtgtggaaattgaatgggagctgcagaaagaaaacagcaagcgctggaatcccgaagtgcagtacacatccaattatgcaaaatctgccaacgttgattttactgtggacaacaatggactttatactgagcctcgccccattggcacccgttaccttacccgtcccctgtaa

SEQ ID NO: 353 - protein, 736 aa, synthetic construct
  source 1..736: note = Description of Artificial Sequence: Synthetic polypeptide
MAADGYLPDWLEDNLSEGIREWWDLKPGAPKPKANQQHQDNARGLVLPGYKYLGPGNGLDKGEPVNAADAAALEHDKAYDQQLKAGDNPYLKYNHADAEFQERLKEDTSFGGNLGRAVFQAKKRLLEPLGLVEEAAKTAPGKKRPVEPSPQRSPDSSTGIGKKGQQPAKKRLNFGQTGDSESVPDPQPLGEPPATPAAVGPTTMASGGGAPMADNNEGADGVGNSSGNWHCDSQWLGDRVITTSTRTWALPTYNNHLYKQISSQSGASNDNHYFGYSTPWGYFDFNRFHCHFSPRDWQRLINNNWGFRPKRLNFKLFNIQVKEVTTNDGVTTIANNLTSTVQVFSDSEYQLPYVLGSAHQGCLPPFPADVFMIPQYGYLTLNNGSQAVGRSSFYCLEYFPSQMLRTGNNFTFSYTFEDVPFHSSYAHSQSLDRLMNPLIDQYLYYLSRTNTPSGTTTQSRLQFSQAGASDIRDQSRNWLPGPCYRQQRVSKTKTDNNNSNFTWTGASKYNLNGRESIINPGTAMASHKDDEDKFFPMSGVMIFGKESAGASNTALDNVMITDEEEIKATNPVATERFGTVAVNLQSSSTDPATGDVHVMGALPGMVWQDRDVYLQGPIWAKIPHTDGHFHPSPLMGGFGLKNPPPQILIKNTPVPANPPAEFSATKFASFITQYSTGQVSVEIEWELQKENSKRWNPEVQYTSNYAKSANVDFTVDNNGLYTEPRPIGTRYLTRPL

SEQ ID NO: 354 - DNA, 2214 bp, synthetic construct; identical to SEQ ID NO: 326
  source 1..2214: mol_type = other DNA; note = Description of Artificial Sequence: Synthetic polynucleotide

SEQ ID NO: 355 - protein, 737 aa, synthetic construct; identical to SEQ ID NO: 327
  source 1..737: note = Description of Artificial Sequence: Synthetic polypeptide

SEQ ID NO: 356 - DNA, 2205 bp, synthetic construct
  source 1..2205: mol_type = other DNA; note = Description of Artificial Sequence: Synthetic polynucleotide
atggctgctgacggttatcttccagattggctcgaggacaacctttctgaaggcattcgtgagtggtgggctctgaaacctggagtccctcaacccaaagcgaaccaacaacaccaggacaaccgtcggggtcttgtgcttccgggttacaaatacctcggacccggtaacggactcgacaaaggagagccggtcaacgaggcggacgcggcagccctcgaacacgacaaggcctacgaccagcagctcaaggccggagacaacccgtacctcaagtacaaccacgccgacgccgagttccaggagcggctcaaagaagatacgtcttttgggggcaacctcgggcgagcagtcttccaggccaaaaagaggcttcttgaacctcttggtctggttgaggaagcggctaagacggctcctggaaagaagaggcctgtagagcagtctcctcaggaaccggactcctccgcgggtattggcaaatcgggtgcacagcccgctaaaaagagactcaatttcggtcagactggcgacacagagtcagtcccagaccctcaaccaatcggagaacctcccgcagccccctcaggtgtgggatctcttacaatggcttcaggtggtggcgcaccagtggcagacaataacgaaggtgccgatggagtgggtagttcctcgggaaattggcattgcgattcccaatggctgggggacagagtcatcaccaccagcacccgaacctgggccctgcccacctacaacaaccacctctacaaacaaatttccagccaatcaggagcctcgaacgacaatcactactttggctacagcaccccttgggggtattttgacttcaacagattccactgccacttttcaccacgtgactggcagcgactcatcaacaacaactggggattccggcccaagagactcagcttcaagctcttcaacatccaggtcaaagaggttacggacaacaatggagtcaagaccatcgccaataaccttaccagcacggtccaggtcttcacggactcagactatcagctcccgtacgtgctcgggtcggctcacgagggctgcctcccgccgttcccagcggacgttttcatgattcctcagtacgggtatctgacgcttaatgatggaagccaggccgtgggtcgttcgtccttttactgcctggaatatttcccgtcgcaaatgctaagaacgggtaacaacttccagttcagctacgagtttgagaacgtacctttccatagcagctacgctcacagccaaagcctggaccgactaatgaatccactcatcgaccaatacttgtactatctctcaaagactattaacggttctggacagaatcaacaaacgctaaaattcagtgtggccggacccagcaacatggctgtccagggaagaaactacatacctggacccagctaccgacaacaacgtgtctcaaccactgtgactcaaaacaacaacagcgaatttgcttggcctggagcttcttcttgggctctcaatggacgtaatagcttgatgaatcctggacctgctatggccagccacaaagaaggagaggaccgtttctttcctttgtctggatctttaatttttggcaaacaaggaactggaagagacaacgtggatgcggacaaagtcatgataaccaacgaagaagaaattaaaactactaacccggtagcaacggagtcctatggacaagtggccacaaaccaccagagtgcccaagcacaggcgcagaccggctgggttcaaaaccaaggaatacttccgggtatggtttggcaggacagagatgtgtacctgcaaggacccatttgggccaaaattcctcacacggacggcaactttcacccttctccgctgatgggagggtttggaatgaaacacccgcctcctcagatcctcatcaaaaacacacctgtacctgcggatcctccaacggccttcaacaaggacaagctgaactctttcatcacccagtattctactggccaagtcagcgtggagatcgagtgggagctgcagaaggaaaacagcaagcgctggaaccccgagatccagtacacctccaactactacaaatctacaagtgtggactttgctgttaatacagaaggcgtgtactctgaaccccgccccattggcacccgttacctcacccgtaatctgtaa

SEQ ID NO: 357 - protein, 734 aa, synthetic construct
  source 1..734: note = Description of Artificial Sequence: Synthetic polypeptide
MAADGYLPDWLEDNLSEGIREWWALKPGVPQPKANQQHQDNRRGLVLPGYKYLGPGNGLDKGEPVNEADAAALEHDKAYDQQLKAGDNPYLKYNHADAEFQERLKEDTSFGGNLGRAVFQAKKRLLEPLGLVEEAAKTAPGKKRPVEQSPQEPDSSAGIGKSGAQPAKKRLNFGQTGDTESVPDPQPIGEPPAAPSGVGSLTMASGGGAPVADNNEGADGVGSSSGNWHCDSQWLGDRVITTSTRTWALPTYNNHLYKQISSQSGASNDNHYFGYSTPWGYFDFNRFHCHFSPRDWQRLINNNWGFRPKRLSFKLFNIQVKEVTDNNGVKTIANNLTSTVQVFTDSDYQLPYVLGSAHEGCLPPFPADVFMIPQYGYLTLNDGSQAVGRSSFYCLEYFPSQMLRTGNNFQFSYEFENVPFHSSYAHSQSLDRLMNPLIDQYLYYLSKTINGSGQNQQTLKFSVAGPSNMAVQGRNYIPGPSYRQQRVSTTVTQNNNSEFAWPGASSWALNGRNSLMNPGPAMASHKEGEDRFFPLSGSLIFGKQGTGRDNVDADKVMITNEEEIKTTNPVATESYGQVATNHQSAQAQAQTGWVQNQGILPGMVWQDRDVYLQGPIWAKIPHTDGNFHPSPLMGGFGMKHPPPQILIKNTPVPADPPTAFNKDKLNSFITQYSTGQVSVEIEWELQKENSKRWNPEIQYTSNYYKSTSVDFAVNTEGVYSEPRPIGTRYLTRNL

SEQ ID NO: 358 - DNA, 2217 bp, synthetic construct
  source 1..2217: mol_type = other DNA; note = Description of Artificial Sequence: Synthetic polynucleotide
atggctgccgatggttatcttccagattggctcgaggacaacctctctgagggcattcgcgagtggtgggcgctgaaacctggagccccgaagcccaaagccaaccagcaaaagcaggacgacggccggggtctggtgcttcctggctacaagtacctcggacccttcaacggactcgacaagggggagcccgtcaacgcggcggacgcagcggccctcgagcacgacaaggcctacgaccagcagctgcaggcgggtgacaatccgtacctgcggtataaccacgccgacgccgagtttcaggagcgtctgcaagaagatacgtcttttgggggcaacctcgggcgagcagtcttccaggccaagaagcgggttctcgaacctctcggtctggttgaggaaggcgctaagacggctcctggaaagaagagaccggtagagccatcaccccagcgttctccagactcctctacgggcatcggcaagaaaggccaacagcccgccagaaaaagactcaattttggtcagactggcgactcagagtcagttccagaccctcaacctctcggagaacctccagcagcgccctctggtgtgggacctaatacaatggctgcaggcggtggcgcaccaatggcagacaataacgaaggcgccgacggagtgggtagttcctcgggaaattggcattgcgattccacatggctgggcgacagagtcatcaccaccagcacccgaacctgggccctgcccacctacaacaaccacctctacaagcaaatctccaacgggacatcgggaggagccaccaacgacaacacctacttcggctacagcaccccctgggggtattttgactttaacagattccactgccacttttcaccacgtgactggcagcgactcatcaacaacaactggggattccggcccaagagactcagcttcaagctcttcaacatccaggtcaaggaggtcacgcagaatgaaggcaccaagaccatcgccaataacctcaccagcaccatccaggtgtttacggactcggagtaccagctgccgtacgttctcggctctgcccaccagggctgcctgcctccgttcccggcggacgtgttcatgattccccagtacggctacctaacactcaacaacggtagtcaggccgtgggacgctcctccttctactgcctggaatactttccttcgcagatgctgagaaccggcaacaacttccagtttacttacaccttcgaggacgtgcctttccacagcagctacgcccacagccagagcttggaccggctgatgaatcctctgattgaccagtacctgtactacttgtctcggactcaaacaacaggaggcacggcaaatacgcagactctgggcttcagccaaggtgggcctaatacaatggccaatcaggcaaagaactggctgccaggaccctgttaccgccaacaacgcgtctcaacgacaaccgggcaaaacaacaatagcaactttgcctggactgctgggaccaaataccatctgaatggaagaaattcattggctaatcctggcatcgctatggcaacacacaaagacgacgaggagcgtttttttcccagtaacgggatcctgatttttggcaaacaaaatgctgccagagacaatgcggattacagcgatgtcatgctcaccagcgaggaagaaatcaaaaccactaaccctgtggctacagaggaatacggtatcgtggcagataacttgcagcagcaaaacacggctcctcaaattggaactgtcaacagccagggggccttacccggtatggtctggcagaaccgggacgtgtacctgcagggtcccatctgggccaagattcctcacacggacggcaacttccacccctctcccctcatgggtggattcggacttaaacatcctccgcctcagatcctgatcaagaacacgcctgtacctgcggatcctccgaccaccttcaaccagtcaaagctgaactctttcatcacgcaatacagcaccggacaggtcagcgtggaaattgaatgggagctgcagaaggaaaacagcaagcgctggaaccccgagatccagtacacctccaactactacaaatctacaagtgtggactttgctgttaatacagaaggcgtgtactctgaaccccgccccattggcacccgttacctcacccgtaatctgtaa

SEQ ID NO: 359 - protein, 738 aa, synthetic construct; identical to SEQ ID NO: 105
  source 1..738: note = Description of Artificial Sequence: Synthetic polypeptide

SEQ ID NO: 360 - DNA, 2211 bp, synthetic construct
  source 1..2211: mol_type = other DNA; note = Description of Artificial Sequence: Synthetic polynucleotide
atggctgctgacggttatcttccagattggctcgaggacaacctttctgaaggcattcgagagtggtgggcgctgcaacctggagcccctaaacccaaggcaaatcaacaacatcaggacaacgctcggggtcttgtgcttccgggttacaaatacctcggacccggcaacggactcgacaagggggaacccgtcaacgcagcggacgcggcagccctcgagcacgacaaggcctacgaccagcagctcaaggccggtgacaacccctacctcaagtacaaccacgccgacgccgagttccaggagcggctcaaagaagatacgtcttttgggggcaacctcgggcgagcagtcttccaggccaaaaagaggcttcttgaacctcttggtctggttgaggaagcggctaagacggctcctggaaagaagaggcctgtagatcagtctcctcaggaaccggactcatcatctggtgttggcaaatcgggcaaacagcctgccagaaaaagactaaatttcggtcagactggcgactcagagtcagtcccagaccctcaacctctcggagaaccaccagcagcccccacaagtttgggatctaatacaatggcttcaggcggtggcgcaccaatggcagacaataacgagggtgccgatggagtgggtaattcctcaggaaattggcattgcgattcccaatggctgggcgacagagtcatcaccaccagcaccagaacctgggccctgcccacttacaacaaccatctctacaagcaaatctccagccaatcaggagcttcaaacgacaaccactactttggctacagcaccccttgggggtattttgactttaacagattccactgccacttctcaccacgtgactggcagcgactcattaacaacaactggggattccggcccaagaaactcagcttcaagctcttcaacatccaagttaaagaggtcacgcagaacgatggcacgacgactattgccaataaccttaccagcacggttcaggtgtttacggactcggagtatcagctcccgtacgtgctcgggtcggcgcaccaaggctgtctcccgccgtttccagcggacgtcttcatggtccctcagtatggatacctcaccctgaacaacggaagtcaagcggtgggacgctcatccttttactgcctggagtacttcccttcgcagatgctaaggactggaaataacttccaattcagctataccttcgaggatgtaccttttcacagcagctacgctcacagccagagtttggatcgcttgatgaatcctcttattgatcagtatctgtactacctgaacagaacgcaaggaacaacctctggaacaaccaaccaatcacggctgctttttagccaggctgggcctcagtctatgtctttgcaggccagaaattggctacctgggccctgctaccggcaacagagactttcaaagactgctaacgacaacaacaacagtaactttccttggacagcggccagcaaatatcatctcaatggccgcgactcgctggtgaatccaggaccagctatggccagtcacaaggacgatgaagaaaaatttttccctatgcacggcaatctaatatttggcaaagaagggacaacggcaagtaacgcagaattagataatgtaatgattacggatgaagaagagattcgtaccaccaatcctgtggcaacagagcagtatggaactgtggcaaataacttgcagagctcaaatacagctcccacgactagaactgtcaatgatcagggggccttacctggcatggtgtggcaagatcgtgacgtgtaccttcaaggacctatctgggcaaagattcctcacacggatggacactttcatccttctcctctgatgggaggctttggactgaaacatccgcctcctcaaatcatgatcaaaaatactccggtaccggcaaatcctccgacgactttcagcccggccaagtttgcttcatttatcactcagtactccactggacaggtcagcgtggaaattgagtgggagctacagaaagaaaacagcaaacgttggaatccagagattcagtacacttccaactacaacaagtctgttaatgtggactttactgtagacactaatggtgtttatagtgaacctcgccccattggcacccgttaccttacccgtcccctgtaa

SEQ ID NO: 361 - protein, 736 aa, synthetic construct; identical to SEQ ID NO: 331
  source 1..736: note = Description of Artificial Sequence: Synthetic polypeptide

SEQ ID NO: 362 - DNA, 2211 bp, synthetic construct; identical to SEQ ID NO: 330
  source 1..2211: mol_type = other DNA; note = Description of Artificial Sequence: Synthetic polynucleotide

SEQ ID NO: 363 - protein, 736 aa, synthetic construct; identical to SEQ ID NO: 331
  source 1..736: note = Description of Artificial Sequence: Synthetic polypeptide

SEQ ID NO: 364 - DNA, 2211 bp, synthetic construct
  source 1..2211: mol_type = other DNA; note = Description of Artificial Sequence: Synthetic polynucleotide
atggctgctgacggttatcttccagattggctcgaggacaacctttctgaaggcattcgtgagtggtgggctctgaaacctggagtccctcaacccaaagcgaaccaacaacaccaggacaaccgtcggggtcttgtgcttccgggttacaaatacctcggacccggtaacggactcgacaaaggagagcccgtcaacgcggcggatgcagcggccctcgagcacgacaaggcctacgaccagcagctcaaagcgggtgacaatccgtacctgcggtataaccacgccgacgccgagtttcaggagcgtctgcaagaagatacgtcttttgggggcaacctcgggcgagcagtcttccaggccaagaagagggttctcgaaccttttggtctggttgaggaaggtgctaagacggctcctggaaagaaacgtccggtagagcagtcgccacaagagccagactcctcctcgggcatcggcaagacaggccagcagcccgctaaaaagagactcaattttggtcagactggcgactcagagtcagtccccgacccacaacctctcggagaacctccagcaacccccgctgctgtgggacctactacaatggcttcaggcggtggcgcaccaatggcagacaataacgaaggcgccgacggagtgggtaatgcctcaggaaattggcattgcgattccacatggctgggcgacagagtcatcaccaccagcacccgcacctgggccttgcccacctacaataaccacctctacaagcaaatctccagtgcttcaacgggggccagcaacgacaaccactacttcggctacagcaccccctgggggtattttgatttcaacagattccactgccatttctcaccacgtgactggcagcgactcatcaacaacaattggggattccggcccaagagactcaacttcaagctcttcaacatccaagtcaaggaggtcacgacgaatgatggcgtcacgaccatcgctaataaccttaccagcacggttcaagtcttctcggactcggagtaccagcttccgtacgtcctcggctctgcgcaccagggctgcctccctccgttcccggcggacgtgttcatgattccgcaatacggctacctgacgctcaacaatggcagccaagccgtgggacgttcatccttttactgcctggaatatttcccttctcagatgctgagaacgggcaacaactttaccttcagctacacctttgaggaagtgcctttccacagcagctacgcgcacagccagagcctggaccggctgatgaatcctctcatcgaccaatacctgtattacctgaacagaactcaaaatcagtccggaagtgcccaaaacaaggacttgctgtttagccgtgggtctccagctggcatgtctgttcagcccaaaaactggctacctggaccctgttatcggcagcagcgcgtttctaaaacaaaaacagacaacaacaacagcaattttacctggactggtgcttcaaaatataacctcaatgggcgtgaatccatcatcaaccctggcactgctatggcctcacacaaagacgacgaagacaagttctttcccatgagcggtgtcatgatttttggaaaagagagcgccggagcttcaaacactgcattggacaatgtcatgattacagacgaagaggaaattaaagccactaaccctgtggccaccgaaagatttgggaccgtggcagtcaatttccagagcagcagcacagaccctgcgaccggagatgtgcatgttatgggagccttacctggaatggtgtggcaagacagagacgtatacctgcagggtcctatttgggccaaaattcctcacacggatggacactttcacccgtctcctctcatgggcggctttggacttaagcacccgcctcctcagatcctcatcaaaaacacgcctgttcctgcgaatcctccggcagagttttcggctacaaagtttgcttcattcatcacccagtattccacaggacaagtgagcgtggagattgaatgggagctgcagaaagaaaacagcaaacgctggaatcccgaagtgcagtatacatctaactatgcaaaatctgccaacgttgatttcactgtggacaacaatggactttatactgagcctcgccccattggcacccgttacctcacccgtcccctgtaa

SEQ ID NO: 365 - protein, 736 aa, synthetic construct
  source 1..736: note = Description of Artificial Sequence: Synthetic polypeptide
MAADGYLPDWLEDNLSEGIREWWALKPGVPQPKANQQHQDNRRGLVLPGYKYLGPGNGLDKGEPVNAADAAALEHDKAYDQQLKAGDNPYLRYNHADAEFQERLQEDTSFGGNLGRAVFQAKKRVLEPFGLVEEGAKTAPGKKRPVEQSPQEPDSSSGIGKTGQQPAKKRLNFGQTGDSESVPDPQPLGEPPATPAAVGPTTMASGGGAPMADNNEGADGVGNASGNWHCDSTWLGDRVITTSTRTWALPTYNNHLYKQISSASTGASNDNHYFGYSTPWGYFDFNRFHCHFSPRDWQRLINNNWGFRPKRLNFKLFNIQVKEVTTNDGVTTIANNLTSTVQVFSDSEYQLPYVLGSAHQGCLPPFPADVFMIPQYGYLTLNNGSQAVGRSSFYCLEYFPSQMLRTGNNFTFSYTFEEVPFHSSYAHSQSLDRLMNPLIDQYLYYLNRTQNQSGSAQNKDLLFSRGSPAGMSVQPKNWLPGPCYRQQRVSKTKTDNNNSNFTWTGASKYNLNGRESIINPGTAMASHKDDEDKFFPMSGVMIFGKESAGASNTALDNVMITDEEEIKATNPVATERFGTVAVNFQSSSTDPATGDVHVMGALPGMVWQDRDVYLQGPIWAKIPHTDGHFHPSPLMGGFGLKHPPPQILIKNTPVPANPPAEFSATKFASFITQYSTGQVSVEIEWELQKENSKRWNPEVQYTSNYAKSANVDFTVDNNGLYTEPRPIGTRYLTRPL

SEQ ID NO: 366 - DNA, 2217 bp, synthetic construct
  source 1..2217: mol_type = other DNA; note = Description of Artificial Sequence: Synthetic polynucleotide
atggctgccgatggttatcttccagattggctcgaggacaacctctctgagggcattcgcgagtggtgggacttgaaacctggagccccgaaacccaaagccaaccagcaaaagcaggacgacggccggggtctggtgcttcctggctacaagtacctcggacccttcaacggactcgacaagggggagcccgtcaacgcggcggatgcaacggccctcgagcacgacaaggcctacgaccagcagctgcaggcgggtgacaatccgtacctgcggtataaccacgccgacgccgagtttcaggagcgtctgcaagaagatacgtcttttgggggcaacctcgggcgagcagtcttccaggccaagaagcgggttctcgaacctctcggtctggttgaggaaggcgctaagacggctcctggaaagaagagaccggtagagccatcaccccagcgttctccagactcctctacgggcatcggcaagaaaggccaacagcccgccagaaaaagactcaattttggtcagactggcgactcagagtcagttccagaccctcaacctctcggagaaccaccagcagcccccacaagtttgggatctaatacaatggcttcaggcggtggcgcaccaatggcagacaataacgagggtgccgatggagtgggtaattcctcaggaaattggcattgcgattcccaatggctgggcgacagagtcatcaccaccagcacccgcacctgggccttgcccacctacaataaccacctctacaagcaaatctccagtgcttcaacgggggccagcaacgacaaccactacttcggctacagcaccccctgggggtattttgactttaaccgcttccactgccacttctcgccaagagactggcaaagactcatcaacaacaattggggattccggcccaagagactcaacttcaaactcttcaacatccaagtcaaggaggtcacgacgaatgatggcgtcacgaccatcgccaataacctcaccagcaccatccaggtgtttacggactcggagtaccagctgccgtacgttctcggctctgcccaccagggctgcctgcctccgttcccggcggacgtgttcatgattccccagtatggatacctcaccctgaacaacggaagtcaagcggtgggacgctcatccttttactgcctggagtacttcccttcgcagatgctaaggactggaaataacttccaattcagctataccttcgaggatgtaccttttcacagcagctacgctcacagccagagtttggatcgcttgatgaatcctcttattgatcagtatctgtactacctgaacagaacgcaaggaacaacctctggaacaaccaaccaatcacggctgctttttagccaggctgggcctcagtctatgtctttgcaggccagaaattggctacctgggccctgctaccggcaacagagactttcaaagactgctaacgacaacaacaacagtaactttccttggacagcagccagcaaatatcatctcaatggccgcgactcgctggtgaatccaggaccagctatggccagtcacaaggacgatgaagaaaaatttttccctatgcacggcaatctaatatttggcaaagaagggacaacggcaagtaacgcagaattagataatgtaatgattacggatgaagaagagattcgtaccaccaatcctgtggcaacagagcagtatggaactgtggcaaataacttgcagagctcaaatacagctcccacgactagaactgtcaatgatcagggggccttacctggcatggtgtggcaagatcgtgacgtgtaccttcaggggcccatctgggcaaagattccacacacggacggacattttcacccctctcccctcatgggtggattcggacttaaacaccctcctccgcagattctcatcaagaacaccccggtacctgcgaatccttcgaccaccttcagtgcggcaaagtttgcttccttcatcacacagtactccacgggacaggtcagcgtggagatcgagtgggagctgcagaaggaaaacagcaagcgctggaacccggagatccagtacacttccaactattacaagtctaataatgttgaatttgctgttaatactgaaggtgtatatagtgaaccccgccccattggcaccagatacctgactcgtaatctgtaa

SEQ ID NO: 367 - protein, 738 aa, synthetic construct
  source 1..738: note = Description of Artificial Sequence: Synthetic polypeptide
MAADGYLPDWLEDNLSEGIREWWDLKPGAPKPKANQQKQDDGRGLVLPGYKYLGPFNGLDKGEPVNAADATALEHDKAYDQQLQAGDNPYLRYNHADAEFQERLQEDTSFGGNLGRAVFQAKKRVLEPLGLVEEGAKTAPGKKRPVEPSPQRSPDSSTGIGKKGQQPARKRLNFGQTGDSESVPDPQPLGEPPAAPTSLGSNTMASGGGAPMADNNEGADGVGNSSGNWHCDSQWLGDRVITTSTRTWALPTYNNHLYKQISSASTGASNDNHYFGYSTPWGYFDFNRFHCHFSPRDWQRLINNNWGFRPKRLNFKLFNIQVKEVTTNDGVTTIANNLTSTIQVFTDSEYQLPYVLGSAHQGCLPPFPADVFMIPQYGYLTLNNGSQAVGRSSFYCLEYFPSQMLRTGNNFQFSYTFEDVPFHSSYAHSQSLDRLMNPLIDQYLYYLNRTQGTTSGTTNQSRLLFSQAGPQSMSLQARNWLPGPCYRQQRLSKTANDNNNSNFPWTAASKYHLNGRDSLVNPGPAMASHKDDEEKFFPMHGNLIFGKEGTTASNAELDNVMITDEEEIRTTNPVATEQYGTVANNLQSSNTAPTTRTVNDQGALPGMVWQDRDVYLQGPIWAKIPHTDGHFHPSPLMGGFGLKHPPPQILIKNTPVPANPSTTFSAAKFASFITQYSTGQVSVEIEWELQKENSKRWNPEIQYTSNYYKSNNVEFAVNTEGVYSEPRPIGTRYLTRNL

SEQ ID NO: 368 - DNA, 2208 bp, synthetic construct
  source 1..2208: mol_type = other DNA; note = Description of Artificial Sequence: Synthetic polynucleotide
atggctgccgatggttatcttccagattggctcgaggacaaccttagtgaaggaattcgcgagtggtgggacttgaaacctggagccccgaagcccaaagccaaccagcaaaagcaggacgacggccggggtctggtgcttcctggctacaagtacctcggacccttcaacggactcgacaagggggagcccgtcaacgcggcggacgcagcggccctcgagcacgacaaggcctacgaccagcagctcaaagcgggtgacaatccgtacctgcggtataaccacgccgacgccgagtttcaggagcgtctgcaagaagatacgtcttttgggggcaacctcgggcgagcagtcttccaggccaagaagcgggttctcgaacctctcggtctggttgaggaaggtgctaagacggctcctggaaagaaacgtccggtagagcagtcgccacaagagccagactcctcctcgggcattggcaagacaggccagcagcccgctaaaaagagactcaattttggtcagactggcgactcagagtcagtccccgacccacaacctctcggagaacctccagcaacccccgctgctgtgggacctactacaatggcttcaggcggtggcgcaccaatggcagacaataacgaaggcgccgacggagtgggtaatgcctcaggaaattggcattgcgattccacatggctgggcgacagagtcatcaccaccagcacccgaacctgggccctgcccacctacaacaaccacctctacaaacaaatttccagccaatcaggagcctcgaacgacaatcactactttggctacagcaccccttgggggtattttgatttcaacagattccactgccacttttcaccacgtgactggcagcgactcatcaacaacaattggggattccggcccaagagactcagcttcaagctcttcaacatccaggtcaaggaggtcacgcagaatgaaggcaccaagaccatcgccaataaccttaccagcacggttcaagtgtttacggactcggagtatcagctcccgtacgtgctcggctcggcgcatcaaggatgcctcccgccgttcccagcagacgtcttcatggtgccacagtatggatacctcaccctgaacaacgggagtcaggcagtaggacgctcttcattttactgcctggagtactttccttctcagatgctgcgtaccggaaacaactttaccttcagctacacttttgaggacgttcctttccacagcagctacgctcacagccagagtctggaccgtctcatgaatcctctgattgaccagtacctgtattacttgagcagaacaaacactccaagtggaaccaccacgcagtcaaggcttcagttttctcaggccggagcgagtgacattcgggaccagtctaggaactggcttcctggaccctgttaccgccagcagcgagtatcaaagacatctgcggataacaacaacagtgaatactcgtggactggagctaccaagtaccacctcaatggcagagactctctggtgaatccgggcccggccatggcaagccacaaggactatgaagaaaagttttttcctcagagcggggttctcatctttgggaagcaaggctcagagaaaacaaatgtggacattgaaaaggtcatgattacagacgaagaggaaatcaggacaaccaatcccgtggctacggagcagtatggttctgtatctaccaacctccagagaggcaacagacaagcagctaccgcagatgtcaacacacaaggcgttcttccaggcatggtctggcaggacagagatgtgtaccttcaggggcccatctgggcaaagattccacacacggacggacattttcacccgtctccgctgatgggcggctttggcctgaaacatcctccgcctcagatcctgatcaagaacacgcctgtacctgcggatcctccgaccaccttcaaccagtcaaagctgaactctttcatcactcagtattctactggccaagtcagcgtggagatcgagtgggagctgcagaaggaaaacagcaagcgctggaaccccgagatccagtacacctccaactactacaaatctacaagtgtggactttgctgttaatacagaaggcgtgtactctgaaccccgccccattggcacccgttacctcacccgtaatctgtaa

SEQ ID NO: 369 - protein, 735 aa, synthetic construct
  source 1..735: note = Description of Artificial Sequence: Synthetic polypeptide
MAADGYLPDWLEDNLSEGIREWWDLKPGAPKPKANQQKQDDGRGLVLPGYKYLGPFNGLDKGEPVNAADAAALEHDKAYDQQLKAGDNPYLRYNHADAEFQERLQEDTSFGGNLGRAVFQAKKRVLEPLGLVEEGAKTAPGKKRPVEQSPQEPDSSSGIGKTGQQPAKKRLNFGQTGDSESVPDPQPLGEPPATPAAVGPTTMASGGGAPMADNNEGADGVGNASGNWHCDSTWLGDRVITTSTRTWALPTYNNHLYKQISSQSGASNDNHYFGYSTPWGYFDFNRFHCHFSPRDWQRLINNNWGFRPKRLSFKLFNIQVKEVTQNEGTKTIANNLTSTVQVFTDSEYQLPYVLGSAHQGCLPPFPADVFMVPQYGYLTLNNGSQAVGRSSFYCLEYFPSQMLRTGNNFTFSYTFEDVPFHSSYAHSQSLDRLMNPLIDQYLYYLSRTNTPSGTTTQSRLQFSQAGASDIRDQSRNWLPGPCYRQQRVSKTSADNNNSEYSWTGATKYHLNGRDSLVNPGPAMASHKDYEEKFFPQSGVLIFGKQGSEKTNVDIEKVMITDEEEIRTTNPVATEQYGSVSTNLQRGNRQAATADVNTQGVLPGMVWQDRDVYLQGPIWAKIPHTDGHFHPSPLMGGFGLKHPPPQILIKNTPVPADPPTTFNQSKLNSFITQYSTGQVSVEIEWELQKENSKRWNPEIQYTSNYYKSTSVDFAVNTEGVYSEPRPIGTRYLTRNL

SEQ ID NO: 370 - DNA, 2214 bp, synthetic construct
  source 1..2214: mol_type = other DNA; note = Description of Artificial Sequence: Synthetic polynucleotide
atggctgccgatggttatcttccagattggctcgaggacaacctctctgagggcattcgcgagtggtgggacttgaaacctggagccccgaaacccaaagccaaccagcaaaagcaggacgacggccggggtctggtgcttcctggctacaagtacctcggacccttcaacggactcgacaagggggagcccgtcaacgcggcggatgcagcggccctcgagcacgacaaggcctacgaccagcagctcaaagcgggtgacaatccgtacctgcggtataaccacgccgacgccgagtttcaggagcgtctgcaagaagatacgtcttttgggggcaacctcgggcgagcagtcttccaggccaagaagagggttctcgaaccttttggtctggttgaggaaggtgctaagacggctcctggaaagaaacgtccggtagagcagtcgccacaagagccagactcctcctcgggcattggcaagacaggccagcagcctgcaagaaaaagattgaattttggtcagactggagacgcagactcagtacctgacccccagcctctcggacagccaccagcagccccctctggtctgggaactaatacgatggctacaggcagtggcgcaccaatggcagacaataacgagggcgccgacggagtgggtaattcctcgggaaattggcattgcgattcccaatggctgggggacagagtcatcaccaccagcacccgaacctgggccctgcccacctacaacaatcacctctacaagcaaatctccaacagcacatctggaggatcttcaaatgacaacgcctacttcggctacagcaccccctgggggtattttgatttcaacagattccactgccatttctcaccacgtgactggcagcgactcatcaacaacaattggggattccggcccaagagactcaacttcaagctcttcaacatccaggtcaaggaggtcacgcagaatgaaggcaccaagaccatcgccaataacctcaccagcaccatccaggtgtttacggactcggagtaccagctgccgtacgttctcggctctgcccaccagggctgcctgcctccgttcccggcggacgtgttcatgattccccagtacggctacctaacactcaacaacggtagtcaggccgtgggacgctcctccttctactgcctggaatactttccttcgcagatgctgagaaccggcaacaacttccagtttacttacaccttcgaggacgtgcctttccacagcagctacgcccacagccagagcttggaccggctgatgaatcctctgattgaccagtacctgtactacttgtctcggactcaaacaacaggaggcacgacaaatacgcagactctgggcttcagccaaggtgggcctaatacaatggccaatcaggcaaagaactggctgccaggaccctgttaccgccagcagcgagtatcaaagacatttgcggataacaacaacagtgaatactcgtggactggagctaccaagtaccacctcaatggcagagactctctggtgaatccgggcccggccatggcaagccacaaggacgatgaagaaaagttttttcctcagagcggggttctcatctttgggaagcaaggctcagagaaaacaaatgtggacattgaaaaggtcatgattacagacgaagaggaaatcaggacaaccaatcccgtggctacggagcagtatggttctgtatctaccaacctccagagaggcaacagacaagcagctaccgcagatgtcaacacacaaggcgttcttccaggcatggtctggcaggacagagatgtgtaccttcaggggcccatctgggcaaagattccacacacggacggacattttcacccctctcccctcatgggtggattcggacttaaacaccctccgcctcagatcctgatcaagaacacgcctgtacccgcggatcctccgaccaccttcaaccagtcaaagctgaactctttcatcacccagtattctactggccaagtcagcgtggagatcgagtgggagctgcagaaggaaaacagcaagcgctggaaccccgagatccagtacacctccaactactacaaatctacaagtgtggactttgctgttaatacagaaggcgtgtactctgaaccccgccccattggcacccgttacctcacccgtaatctgtaa

SEQ ID NO: 371 - protein, 737 aa, synthetic construct
  source 1..737: note = Description of Artificial Sequence: Synthetic polypeptide
MAADGYLPDWLEDNLSEGIREWWDLKPGAPKPKANQQKQDDGRGLVLPGYKYLGPFNGLDKGEPVNAADAAALEHDKAYDQQLKAGDNPYLRYNHADAEFQERLQEDTSFGGNLGRAVFQAKKRVLEPFGLVEEGAKTAPGKKRPVEQSPQEPDSSSGIGKTGQQPARKRLNFGQTGDADSVPDPQPLGQPPAAPSGLGTNTMATGSGAPMADNNEGADGVGNSSGNWHCDSQWLGDRVITTSTRTWALPTYNNHLYKQISNSTSGGSSNDNAYFGYSTPWGYFDFNRFHCHFSPRDWQRLINNNWGFRPKRLNFKLFNIQVKEVTQNEGTKTIANNLTSTIQVFTDSEYQLPYVLGSAHQGCLPPFPADVFMIPQYGYLTLNNGSQAVGRSSFYCLEYFPSQMLRTGNNFQFTYTFEDVPFHSSYAHSQSLDRLMNPLIDQYLYYLSRTQTTGGTTNTQTLGFSQGGPNTMANQAKNWLPGPCYRQQRVSKTFADNNNSEYSWTGATKYHLNGRDSLVNPGPAMASHKDDEEKFFPQSGVLIFGKQGSEKTNVDIEKVMITDEEEIRTTNPVATEQYGSVSTNLQRGNRQAATADVNTQGVLPGMVWQDRDVYLQGPIWAKIPHTDGHFHPSPLMGGFGLKHPPPQILIKNTPVPADPPTTFNQSKLNSFITQYSTGQVSVEIEWELQKENSKRWNPEIQYTSNYYKSTSVDFAVNTEGVYSEPRPIGTRYLTRNL

SEQ ID NO: 372 - DNA, 2217 bp, synthetic construct
  source 1..2217: mol_type = other DNA; note = Description of Artificial Sequence: Synthetic polynucleotide
atggctgccgatggttatcttccagattggctcgaggacactctctctgaaggaataagacagtggtgggcgctgaaacctggagccccgaagcccaaagccaaccagcaaaagcaggacgacggccggggtctggtgcttcctggctacaagtacctcggacccttcaacggactcgacaagggggagcccgtcaacgcggcggatgcagcggccctcgagcacgacaaggcctacgaccagcagctcaaagcgggtgacaatccgtacctgcggtataaccacgccgacgccgagtttcaggagcgtctgcaagaagatacgtcttttgggggcaacctcgggcgagcagtcttccaggccaagaagcgggttctcgaacctctcggtctggttgaggaaggcgctaagacggctcctggaaagaagagaccggtagagccatcaccccagcgttctccagactcctctacgggcatcggcaagaaaggccaacagcccgccagaaaaagactcaattttggtcagactggcgactcagagtcagttccagaccctcaacctctcggagaaccaccagcagcccccacaagtttgggatctaatacaatggcttcaggcggtggcgcaccaatggcagacaataacgagggtgccgatggagtgggtaattcctcaggaaattggcattgcgattcccaatggctgggcgacagagtcatcaccaccagcacccgcacctgggccttgcccacctacaataaccacctctacaagcaaatctccagtgcttcaacgggggccagcaacgacaaccactacttcggctacagcaccccctgggggtattttgactttaaccgcttccactgccacttctcgccaagagactggcaaagactcatcaacaacaattggggattccggcccaagagactcaacttcaaactcttcaacatccaagtcaaggaggtcacgacgaatgatggcgtcacgaccatcgccaataacctcaccagcaccatccaggtgtttacggactcggagtaccagctgccgtacgttctcggctctgcccaccagggctgcctgcctccgttcccggcggacgtgttcatgattccccagtatggatacctcaccctgaacaacggaagtcaagcggtgggacgctcatccttttactgcctggagtacttcccttcgcagatgctaaggactggaaataacttccaattcagctataccttcgaggatgtaccttttcacagcagctacgctcacagccagagtttggatcgcttgatgaatcctcttattgatcagtatctgtactacctgaacagaacgcaaggaacaacctctggaacaaccaaccaatcacggctgctttttagccaggctgggcctcagtctatgtctttgcaggccagaaattggctacctgggccctgctaccggcaacagagactttcaaagactgctaacgacaacaacaacagtaactttccttggacagcagccagcaaatatcatctcaatggccgcgactcgctggtgaatccaggaccagctatggccagtcacaaggacgatgaagaaaaatttttccctatgcacggcaatctaatatttggcaaagaagggacaacggcaagtaacgcagaattagataatgtaatgattacggatgaagaagagattcgtaccaccaatcctgtggcaacagagcagtatggaactgtggcaaataacttgcagagctcaaatacagctcccacgactagaactgtcaatgatcagggggccttacctggcatggtgtggcaagatcgtgacgtgtaccttcaggggcccatctgggcaaagattccacacacggacggacattttcacccctctcccctcatgggtggattcggacttaaacaccctcctccgcagattctcatcaagaacaccccggtacctgcgaatccttcgaccaccttcagtgcggcaaagtttgcttccttcatcacacagtactccacgggacaggtcagcgtggagatcgagtgggagctgcagaaggaaaacagcaagcgctggaacccggagatccagtacacttccaactattacaagtctaataatgttgaatttgctgttaatactgaaggtgtatatagtgaaccccgccccattggcaccagatacctgactcgtaatctgtaa

SEQ ID NO: 373 - protein, 738 aa, synthetic construct
  source 1..738: note = Description of Artificial Sequence: Synthetic polypeptide
MAADGYLPDWLEDTLSEGIRQWWALKPGAPKPKANQQKQDDGRGLVLPGYKYLGPFNGLDKGEPVNAADAAALEHDKAYDQQLKAGDNPYLRYNHADAEFQERLQEDTSFGGNLGRAVFQAKKRVLEPLGLVEEGAKTAPGKKRPVEPSPQRSPDSSTGIGKKGQQPARKRLNFGQTGDSESVPDPQPLGEPPAAPTSLGSNTMASGGGAPMADNNEGADGVGNSSGNWHCDSQWLGDRVITTSTRTWALPTYNNHLYKQISSASTGASNDNHYFGYSTPWGYFDFNRFHCHFSPRDWQRLINNNWGFRPKRLNFKLFNIQVKEVTTNDGVTTIANNLTSTIQVFTDSEYQLPYVLGSAHQGCLPPFPADVFMIPQYGYLTLNNGSQAVGRSSFYCLEYFPSQMLRTGNNFQFSYTFEDVPFHSSYAHSQSLDRLMNPLIDQYLYYLNRTQGTTSGTTNQSRLLFSQAGPQSMSLQARNWLPGPCYRQQRLSKTANDNNNSNFPWTAASKYHLNGRDSLVNPGPAMASHKDDEEKFFPMHGNLIFGKEGTTASNAELDNVMITDEEEIRTTNPVATEQYGTVANNLQSSNTAPTTRTVNDQGALPGMVWQDRDVYLQGPIWAKIPHTDGHFHPSPLMGGFGLKHPPPQILIKNTPVPANPSTTFSAAKFASFITQYSTGQVSVEIEWELQKENSKRWNPEIQYTSNYYKSNNVEFAVNTEGVYSEPRPIGTRYLTRNL

SEQ ID NO: 374 - DNA, 2208 bp, synthetic construct; identical to SEQ ID NO: 10
  source 1..2208: mol_type = other DNA; note = Description of Artificial Sequence: Synthetic polynucleotide

SEQ ID NO: 375 - protein, 735 aa, synthetic construct [sequence omitted]

SEQ ID NO: 376 - DNA, 2208 bp, synthetic construct
  source 1..2208: mol_type = other DNA; note = Description of Artificial Sequence: Synthetic polynucleotide
atggctgccgatggttatcttccagattggctcgaggacaacctctctgagggcattcgcgagtggtgggcgctgaaacctggagccccgaagcccaaagccaaccagcaaaagcaggacgacggccggggtctggtgcttcctggctacaagtacctcggacccttcaacggactcgacaagggggagcccgtcaacgcggcggacgccgcggccctcgagcacgacaaggcctacgaccagcagctgcaggcgggtgacaatccgtacctgcggtataaccacgccgacgccgagtttcaggagcgtctgcaagaagatacgtcttttgggggcaacctcgggcgagcagtcttccaggccaaaaagaggcttcttgaacctcttggtctggttgaggaagcagctaaaacggctcctggaaagaagaggcctgtagagcagtctcctcaggaaccggactcctccgcgggtattggcaaatcgggtgcacagcccgccaaaaagagactcaatttcggtcagactggcgactcagagtcagtcccagaccctcaacctctcggagaaccaccagcagcccccacaagtttgggatctaatacaatggcttcaggcggtggcgcaccaatggcagacaataacgaaggcgccgacggagtgggtaatgcctcaggaaattggcattgcgattccacatggctgggcgacagagtcatcaccaccagcacccgcacctgggccttgcccacctacagcaaccatctctacaagcaaatctccagccaatcaggagcttcaaacgacaacgactactttggctacagcaccccttgggggtattttgatttcaacagattccactgccacttttcaccacgtgactggcaaagactcatcaacaacaactggggattccgacccaagagactcaacttcaagctctttaacattcaagtcaaagaggtcacgcagaatgacggtacgacgacgattgccaataaccttaccagcacggttcaggtgtttactgactcggagtaccagctcccgtacgtcctcggctcggcgcatcaaggatgcctcccgccgttcccagcagacgtcttcatggtgccacagtatggatacctcaccctgaacaacgggagtcaggcagtaggacgctcttcattttactgcctggagtactttccttctcagatgctgcgtaccggaaacaactttaccttcagctacacttttgaggacgttcctttccacagcagctacgctcacagccagagtctggaccgtctcatgaatcctctcatcgaccagtacctgtattacttgagcagaacaaacactccaagtggaaccaccacgcagtcaaggcttcagttttctcaggccggagcgagtgacattcgggaccagtctaggaactggcttcctggaccctgttaccgccagcagcgagtatcaaagacatctgaggataacaacaacagtgaatactcgtggactggagctaccaagtaccacctcaatggcagagactctctggtgaatccgggcccggccatggcaagccacaaggacgatgaagaaaagttttttcctcagagcggggttctcatctttgggaagcaaggctcagagaaaacaaatgtggacattgaaaaggtcatgattacagacgaagaggaaatcaggacaaccaatcccgtggctacggagcagtatggttctgtatctaccaacctccagagaggcaacagacaagcagctaccgcagatgtcaacacacaaggcgttcttccaggcatggtctggcaggacagagatgtgtaccttcaggggcccatctgggcaaagattccacacacggacggacattttcacccctctcccctcatgggtggattcggacttaaacaccctcctccacagattctcatcaagaacaccccggtacctgcgaatccttcgaccaccttcagtgcggcaaagtttgcttccttcatcacacagtactccacgggacaggtcagcgtggagatcgagtgggagctgcagaaggaaaacagcaaacgctggaatcccgaaattcagtacacttccaactacaacaagtctgttaatgtggactttactgtggacactaatggcgtgtattcagagcctcgccccattggcaccagatacctgactcgtaatctgtaa

SEQ ID NO: 377 - protein, 735 aa, synthetic construct
  source 1..735: note = Description of Artificial Sequence: Synthetic polypeptide
MAADGYLPDWLEDNLSEGIREWWALKPGAPKPKANQQKQDDGRGLVLPGYKYLGPFNGLDKGEPVNAADAAALEHDKAYDQQLQAGDNPYLRYNHADAEFQERLQEDTSFGGNLGRAVFQAKKRLLEPLGLVEEAAKTAPGKKRPVEQSPQEPDSSAGIGKSGAQPAKKRLNFGQTGDSESVPDPQPLGEPPAAPTSLGSNTMASGGGAPMADNNEGADGVGNASGNWHCDSTWLGDRVITTSTRTWALPTYSNHLYKQISSQSGASNDNDYFGYSTPWGYFDFNRFHCHFSPRDWQRLINNNWGFRPKRLNFKLFNIQVKEVTQNDGTTTIANNLTSTVQVFTDSEYQLPYVLGSAHQGCLPPFPADVFMVPQYGYLTLNNGSQAVGRSSFYCLEYFPSQMLRTGNNFTFSYTFEDVPFHSSYAHSQSLDRLMNPLIDQYLYYLSRTNTPSGTTTQSRLQFSQAGASDIRDQSRNWLPGPCYRQQRVSKTSEDNNNSEYSWTGATKYHLNGRDSLVNPGPAMASHKDDEEKFFPQSGVLIFGKQGSEKTNVDIEKVMITDEEEIRTTNPVATEQYGSVSTNLQRGNRQAATADVNTQGVLPGMVWQDRDVYLQGPIWAKIPHTDGHFHPSPLMGGFGLKHPPPQILIKNTPVPANPSTTFSAAKFASFITQYSTGQVSVEIEWELQKENSKRWNPEIQYTSNYNKSVNVDFTVDTNGVYSEPRPIGTRYLTRNL

SEQ ID NO: 378 - DNA, 2208 bp, synthetic construct
  source 1..2208: mol_type = other DNA; note = Description of Artificial Sequence: Synthetic polynucleotide
atggctgccgatggttatcttccagattggctcgaggacaacctctctgagggcattcgcgagtggtgggcgctgaaacctggagccccgaagcccaaagccaaccagcaaaagcaggacgacggccggggtctggtgcttcctggctacaagtacctcggacccttcaacggactcgacaagggggagcccgtcaacgcggcggacgcagcggccctcgagcacgacaaggcctacgaccagcagctgcaggcgggtgacaatccgtacctgcggtataaccacgccgacgccgagttccaggagcgtctgcaagaagatacgtcttttgggggcaacctcgggcgagcagtcttccaggccaagaagagggttctcgaaccttttggtctggttgaggaaggtgctaagacggctcctggaaagaaacgtccggtagagcagtcgccacaagagccagactcctcctcgggcattggcaagacaggccagcagcccgctaaaaagagactcaattttggtcagactggcgactcagagtcagtcccagaccctcaacctctcggagaaccaccagcagcccccacaagtttgggatctaatacaatggcttcaggcggtggcgcaccaatggcagacaataacgagggcgccgacggagtgggtaattcctcgggaaattggcattgcgattccacatggatgggcgacagagtcatcaccaccagcacccgaacctgggccctgcccacctacaacaaccacctctacaaacaaatttccagccaatcaggagcttcaaacgacaaccactactttggctacagcaccccttgggggtattttgactttaacagattccactgccacttttcaccacgtgactggcagcgactcattaacaacaactggggattccggcccaagaaactcaacttcaagctctttaacatccaggtcaaggaggtcacgcagaatgaaggcaccaagaccatcgccaataacctcaccagcaccatccaggtgtttacggactcggagtaccagctgccgtacgttctcggctctgcccaccagggctgcctgcctccgttcccggcggacgtgttcatgattccccagtacggctacctaacactcaacaacggtagtcaggccgtgggacgctcctccttctactgcctggaatactttccttcgcagatgctgagaaccggcaacaacttccagtttacttacaccttcgaggacgtgcctttccacagcagctacgcccacagccagagcttggaccggctgatgaatcctctgattgaccagtacctgtattacttgtctcggactcaaacaacaggaggcacgacaaatacgcagactctgggcttcagccaaggtgggcctaatacaatggccaatcaggcaaagaactggctgcctggaccctgttaccgccagcagcgagtatcaaagacatctgcggataacaacaacagtgaatactcgtggactggagctaccaagtaccacctcaatggcagagactctctggtgaatccgggcccggccatggcaagccacaaggacgatgaagaaaagttttttcctcagagcggggttctcatctttgggaagcaaggctcagagaaaacaaatgtggacattgaaaaggttatgattacagacgaagaggaaatcaggacaaccaatcccgtggctacggagcagtatggttctgtatctaccaacctccagagaggcaacagacaagcagctaccgcagatgtcaacacacagggcgttcttccaggcatggtctggcaggacagagatgtgtaccttcagggtcccatttgggccaaaattcctcacacagatggacactttcacccgtcccctcttatgggcggctttggactcaagaacccgcctcctcagatcctcatcaaaaacacgcctgttcctgcgaatcctccggcagagttttcagctacaaagtttgcttcattcatcacccaatactccacaggacaagtgagtgtggaaattgaatgggagctgcagaaagaaaacagcaagcgctggaatcccgaagtgcagtacacatccaattatgcaaaatctgccaacgttgattttactgtggacactaatggcgtgtattcagagcctcgccccattggcaccagatacctcacccgtaatctgtaa

SEQ ID NO: 379 - protein, 735 aa, synthetic construct
  source 1..735: note = Description of Artificial Sequence: Synthetic polypeptide
MAADGYLPDWLEDNLSEGIREWWALKPGAPKPKANQQKQDDGRGLVLPGYKYLGPFNGLDKGEPVNAADAAALEHDKAYDQQLQAGDNPYLRYNHADAEFQERLQEDTSFGGNLGRAVFQAKKRVLEPFGLVEEGAKTAPGKKRPVEQSPQEPDSSSGIGKTGQQPAKKRLNFGQTGDSESVPDPQPLGEPPAAPTSLGSNTMASGGGAPMADNNEGADGVGNSSGNWHCDSTWMGDRVITTSTRTWALPTYNNHLYKQISSQSGASNDNHYFGYSTPWGYFDFNRFHCHFSPRDWQRLINNNWGFRPKKLNFKLFNIQVKEVTQNEGTKTIANNLTSTIQVFTDSEYQLPYVLGSAHQGCLPPFPADVFMIPQYGYLTLNNGSQAVGRSSFYCLEYFPSQMLRTGNNFQFTYTFEDVPFHSSYAHSQSLDRLMNPLIDQYLYYLSRTQTTGGTTNTQTLGFSQGGPNTMANQAKNWLPGPCYRQQRVSKTSADNNNSEYSWTGATKYHLNGRDSLVNPGPAMASHKDDEEKFFPQSGVLIFGKQGSEKTNVDIEKVMITDEEEIRTTNPVATEQYGSVSTNLQRGNRQAATADVNTQGVLPGMVWQDRDVYLQGPIWAKIPHTDGHFHPSPLMGGFGLKNPPPQILIKNTPVPANPPAEFSATKFASFITQYSTGQVSVEIEWELQKENSKRWNPEVQYTSNYAKSANVDFTVDTNGVYSEPRPIGTRYLTRNL

SEQ ID NO: 380 - DNA, 2214 bp, synthetic construct; identical to SEQ ID NO: 370
  source 1..2214: mol_type = other DNA; note = Description of Artificial Sequence: Synthetic polynucleotide

SEQ ID NO: 381 - protein, 737 aa, synthetic construct; identical to SEQ ID NO: 371
  source 1..737: note = Description of Artificial Sequence: Synthetic polypeptide

SEQ ID NO: 382 - DNA, 2196 bp, Adeno-associated virus
  source 1..2196: mol_type = unassigned DNA
atggctgctgacggttatcttccagattggctcgaggacaacctctctgagggcattcgcgagtggtgggcgctgaaacctggagccccgcaacccaaagccaaccagcaaaagcaggacgacggccggggtctggtgcttcctggctacaagtacctcggacccttcaacggactcgacaagggggagcccgtcaacgaggcggacgccgcggccctcgagcacgacaaggcctacgaccagcagctcaaagcgggtgacaatccgtacctgcggtataatcacgccgacgccgagtttcaagagcgtctgcaagaagatacgtcctttgggggcaacctcgggcgagcagtcttccaggccaaaaagagggtactcgagcctctgggtctggttgaggaaggcgctaagacggctcctggaaagaagcggccagtagaaccggactccagctcgggcatcggcaagtcaggccagcagcccgcgaaaaagagactgaattttgggcagactggcgactcagagtcagtgcctgacccccaacctctctcagaaccacccgcaggtccctctggtctgggatctggtacaatggctgctggcggtggcgctccaatggcagacaataacgaaggcgccgacggagtgggtaatgtctcaggaaattggcattgcgattccacatggctgggcgaccgagtcatcaccaccagcactcggacctgggccctccccacctacaacaaccacctctacaagcaaatctccaacgggacctcgggaggcagcagcaacgacaacacctactttggctacagcaccccctgggggtattttgactttaacagattccactgccacttttcaccacgtgactggcagcgactcatcaacaacaactgggggttccggcccaagaagctcaacttcaagctcttcaacatccaggtcaaggaggtcacccagaatgaaggcaccaagaccatcgccaataacctcaccagcacggtgcaggtctttacggactcggagtaccagctcccgtacgtgctcggctctgcccaccagggctgcctgcctccgttcccggcggacgtgttcatgattccgcagtacgggtacctgacgctgaacaacgggagccaggccgtggggcgatcctccttctactgcctggagtactttccctcgcagatgctgagaacgggcaacaactttaccttcagctacaccttcgaggacgtgcccttccacagcagctacgcgcacagccagagcctggaccggctgatgaacccgctgattgaccagtacctgtactacctgtctcggactcagaccaacgggaccaatgccacgcagactctgttgtttgctcaggccgggcctcagaacatgtcggctcaggccaagaactggctgcctggtccttgctatcggcagcagcgcgtctctacgacagtgtcgcaaaacaacaacagcaactttacctggaccggggcgaccaagtaccacctgaacggccgagactccctggtgagccccggtgtcgccatggcaacgcacaaggacgacgaggagcgcttcttcccgagcagcggggtcctgatgtttggcaagcagggcgctggaaaggacaatgtcgagtacaccaacgtgatgctcaccagcgaggaggagatcaagaccaccaaccctgtggccacggagcagtacggcgtggtggctgacaatctgcagcagaccaactcagctcccattgtgggggcagtcaacagccagggggccttacccggtatggtctggcagaaccgggacgtgtacctgcagggtcccatctgggccaagatcccgcatacggacggcaactttcacccgtctcctctcatgggcggctttggactgaaacacccgcctccccagatcctgatcaaaaacacgccggtacctgcggatcccccggtgaactttacggacgctaagctggcgagtttcatcacgcagtacagcaccgggcaggtcagcgtggagattgagtgggagctgcagaaggagaacagcaagcgctggaatcccgagattcagtacacttccaattattataaatcagctaatgtggactttgccgtcaatgcagatggtgtatatagtgaaccccgccccattggcactcgttacctcacccgtaatctgtaa

SEQ ID NO: 383 - protein, 731 aa, Adeno-associated virus
MAADGYLPDWLEDNLSEGIREWWALKPGAPQPKANQQKQDDGRGLVLPGYKYLGPFNGLDKGEPVNEADAAALEHDKAYDQQLKAGDNPYLRYNHADAEFQERLQEDTSFGGNLGRAVFQAKKRVLEPLGLVEEGAKTAPGKKRPVEPDSSSGIGKSGQQPAKKRLNFGQTGDSESVPDPQPLSEPPAGPSGLGSGTMAAGGGAPMADNNEGADGVGNVSGNWHCDSTWLGDRVITTSTRTWALPTYNNHLYKQISNGTSGGSSNDNTYFGYSTPWGYFDFNRFHCHFSPRDWQRLINNNWGFRPKKLNFKLFNIQVKEVTQNEGTKTIANNLTSTVQVFTDSEYQLPYVLGSAHQGCLPPFPADVFMIPQYGYLTLNNGSQAVGRSSFYCLEYFPSQMLRTGNNFTFSYTFEDVPFHSSYAHSQSLDRLMNPLIDQYLYYLSRTQTNGTNATQTLLFAQAGPQNMSAQAKNWLPGPCYRQQRVSTTVSQNNNSNFTWTGATKYHLNGRDSLVSPGVAMATHKDDEERFFPSSGVLMFGKQGAGKDNVEYTNVMLTSEEEIKTTNPVATEQYGVVADNLQQTNSAPIVGAVNSQGALPGMVWQNRDVYLQGPIWAKIPHTDGNFHPSPLMGGFGLKHPPPQILIKNTPVPADPPVNFTDAKLASFITQYSTGQVSVEIEWELQKENSKRWNPEIQYTSNYYKSANVDFAVNADGVYSEPRPIGTRYLTRNL

SEQ ID NO: 384 - DNA, 2196 bp, Adeno-associated virus
  source 1..2196: mol_type = unassigned DNA
atggctgctgacggttatcttccagattggctcgaggacaacctctctgagggcattcgcgagtggtgggcgctgaaacctggagccccgcaacccaaagccaaccagcaaaagcaggacgacggccggggtctggtgcttcctggctacaagtacctcggacccttcaacggactcgacaagggggagcccgtcaacgaggcggacgccgcggccctcgagcacgacaaggcctacgaccagcagctcaaagcgggtgacaatccgtacctgcggtataatcacgccgacgccgagtttcaagagcgtctgcaagaagatacgtcctttgggggcaacctcgggcgagcagtcttccaggccaaaaagagggtactcgagcctctgggtctggttgaggaaggcgctaagacggctcctggaaagaagcggccagtagaaccggactccagctcgggcatcggcaagtcaggccggcagcccgcgaaaaagagactgaattttgggcagactggcgactcagagtcagtgcctgacccccaacctctctcagaaccacccgcaggtccctctggtctgggatctggtacaatggctgcaggcggtggcgctccaatggcagacaataacgaaggcgccgacggagtgggtaatgcctcaggaaattggcattgcgattccacatggctgggcgaccgagtcatcaccaccagcactcggacctgggccctccccacctacaacaaccacctctacaagcaaatctccaacgggacctcgggaggcagcagcaacgacaacacctactttggctacagcaccccctgggggtattttgactttaacagattccactgccacttttcaccacgtgactggcagcgactcatcaacaacaactggggattccggcccaagaggctcaacttcaagctcttcaacatccaggtcaaggaggtcacccagaatgaaggcaccaagaccatcgccaataacctcaccagcacggtgcaggtctttacggactcgaagtaccagctcccgtacgtgctcggctctgcccaccagggctgcctgcctccgttcccggcggacgtgttcatgattccgcagtacgggtacctgacgctgaacaacgggagccaggccgtggggcgatcctccttctactgcctggagtactttccctcgcagatgctgagaacgggcaacaactttaccttcagctacaccttcgaggacgtgcccttccacagcagctacgcgcacagccagagcctggaccggctgatgaacccgctgattgaccagtacctgtactacctgtctcggactcagaccaacgggaccaatgccacgcagactctgttgtttgctcaggccgggcctcagaacatgtcggctcaggccaagaactggctgcctggtccttgctatcggcagcagcgcgtctctacgacagtgtcgcaaaacaacaacagcaactttacctggaccggggcgaccaagtaccacctgaacggccgagactccctggtgaaccccggtgtcgccatggcaacgcacaaggacgacgaggagcgcttcttcccgagcagcggggtcctgatgtttggcaagcagggcgctggaaaggacaatgtcgagtacaccaacgtgatgctcaccagcgaggaggagatcaagaccaccaaccctgtggccacggagcagtacggtgtggtggctgacaatctgcagcagaccaactcggctcccattgtgggggcagtcaacagccagggggccttacccggtatggtctggcagaaccgggacgtgtacctgcagggtcccatctgggccaagatcccgcatacggacggcaactttcacccgtctcctctcatgggcggctttggactgaaacacccgcctccccagatcctgatcaaaaacacgccggtacctgcggatcccccggtgaactttacggacgctaagctggcgagtttcatcacgcagtacagcaccgggcaggtcagcgtggagattgagtgggagctgcagaaggagaacagcaagcgctggaatcccgagattcagtacacttccaattattataaatcagctaatgtggactttgccgtcaatgcagatggtgtatatagtgaaccccgccccattggcactcgttacctcacccgtaatctgtaa

SEQ ID NO: 385 - protein, 731 aa, Adeno-associated virus
MAADGYLPDWLEDNLSEGIREWWALKPGAPQPKANQQKQDDGRGLVLPGYKYLGPFNGLDKGEPVNEADAAALEHDKAYDQQLKAGDNPYLRYNHADAEFQERLQEDTSFGGNLGRAVFQAKKRVLEPLGLVEEGAKTAPGKKRPVEPDSSSGIGKSGRQPAKKRLNFGQTGDSESVPDPQPLSEPPAGPSGLGSGTMAAGGGAPMADNNEGADGVGNASGNWHCDSTWLGDRVITTSTRTWALPTYNNHLYKQISNGTSGGSSNDNTYFGYSTPWGYFDFNRFHCHFSPRDWQRLINNNWGFRPKRLNFKLFNIQVKEVTQNEGTKTIANNLTSTVQVFTDSKYQLPYVLGSAHQGCLPPFPADVFMIPQYGYLTLNNGSQAVGRSSFYCLEYFPSQMLRTGNNFTFSYTFEDVPFHSSYAHSQSLDRLMNPLIDQYLYYLSRTQTNGTNATQTLLFAQAGPQNMSAQAKNWLPGPCYRQQRVSTTVSQNNNSNFTWTGATKYHLNGRDSLVNPGVAMATHKDDEERFFPSSGVLMFGKQGAGKDNVEYTNVMLTSEEEIKTTNPVATEQYGVVADNLQQTNSAPIVGAVNSQGALPGMVWQNRDVYLQGPIWAKIPHTDGNFHPSPLMGGFGLKHPPPQILIKNTPVPADPPVNFTDAKLASFITQYSTGQVSVEIEWELQKENSKRWNPEIQYTSNYYKSANVDFAVNADGVYSEPRPIGTRYLTRNL

SEQ ID NO: 386 - DNA, 2196 bp, Adeno-associated virus
  source 1..2196: mol_type = unassigned DNA
atggctgctgacggttatcttccagattggctcgaggacaacctctctgagggcattcgcgagtggtgggcgctgaaacctggagccccgcaacccaaagccaaccagcaaaagcaggacgacggccggggtctggtgcttcctggctacaagtacctcggacccttcaacggactcgacaagggggagcccgtcaacgaggcggacgccgcggccctcgagcacgacaaggcctacgaccagcagctcaaagcgggtgacaatccgtacctgcggtataatcacgccgacgccgagtttcaagagcgtctgcaagaagatacgtcctttgggggcaacctcgggcgagcagtcttccaggccaaaaagagggtactcgagcctctgggtctggttgaggaaggcgctaagacggctcctggaaagaagcggccagtagaaccggactccagctcgggcatcggcaagtcaggccagcagcccgcgaaaaagagactgaattttgggccgactggcgactcagagtcagtgcctgacccccaacctctctcagaaccacctgcaggtccctctggtctgggatctggtacaatggctgcaggcggtggcgctccaatggcagacaataacgaaggcgccgacggagtgggtaatgtctcaggaaattggcattgcgattccacatggctgggcgaccgagtcatcaccaccagcactcggacctgggccctccccacctacaacaaccacctctacaagcaaatctccaacgggacctcgggaggcagcagcaacgacaacacctactttggctacagcaccccctgggggtattttgactttaacagattccactgccacttttcaccacgcgactggcagcgactcatcaacaacaactggggattccggcccaagaagctcaacttcaagctcttcaacatccaggtcaaggaggtcacccagaatgaaggcaccaagaccaccgccaataacctcaccagcacggtgcaggtctttacggactcggagtaccagctcccgtacgtgctcggctctgcccaccagggctgcctgcctccgttcccggcggacgtgttcatgattccgcagtacgggtacctgacgctgaacaacgggagccaggccgtggggcgatcctccttctactgcctggagtactttccctcgcagatgctgagaacgggcaacaactttaccttcagctacaccttcgaggacgtgcccttccacagcagctacgcgcacagccagagcctggaccggctgatgaacccgctgattgaccagtacctgtactacctgtctcggactcagaccaacgggaccaatgccacgcagactctgttgtttgctcaggccgggcctcagaacatgtcggctcaggccaagaactggctgcctggtccttgctatcggcagcagcgcgtctctacggcagtgtcgcaaaacaacaacagcaactttacctggaccggggcgaccaagtaccacctgaacggccgagactccctggtgaaccccggtgtcgccatggcaacgcacaaggacgacgaggagcgcttcttcccgagcagcggggtcctgatgtttggcaagcagggcgctggaaaggacaatgtcgagtacaccaacgtgatgctcaccagcgaggaggagatcaagaccaccaaccctgtggccacggagcagtacggtgtggtggctgacaatctgcagcagaccaactcggctcccattgtgggggcagtcaacagccagggggccttacccggtatggtctggcagaaccgggacgtgtacctgcagggtcccatctgggccaagatcccgcatacggacggcaactttcacccgtctcctctcatgggcggctttggactgaaacacccgcctccccagatcctgatcaaaaacacgccggtacctgcggatcccccggtgaactttacggacgctaagctggcgagtttcatcacgcagtacagcaccgggcaggtcagcgtggagattgagtgggagctgcagaaggagaacagcaagcgctggaatcccgagattcagtacacttccaattattataaatcagctaatgtggactttgccgtcaatgcagatggtgtatatagcgaaccccgccccattggcactcgttacctcacccgtaatctgtaa

SEQ ID NO: 387 - protein, 731 aa, Adeno-associated virus
MAADGYLPDWLEDNLSEGIREWWALKPGAPQPKANQQKQDDGRGLVLPGYKYLGPFNGLDKGEPVNEADAAALEHDKAYDQQLKAGDNPYLRYNHADAEFQERLQEDTSFGGNLGRAVFQAKKRVLEPLGLVEEGAKTAPGKKRPVEPDSSSGIGKSGQQPAKKRLNFGPTGDSESVPDPQPLSEPPAGPSGLGSGTMAAGGGAPMADNNEGADGVGNVSGNWHCDSTWLGDRVITTSTRTWALPTYNNHLYKQISNGTSGGSSNDNTYFGYSTPWGYFDFNRFHCHFSPRDWQRLINNNWGFRPKKLNFKLFNIQVKEVTQNEGTKTTANNLTSTVQVFTDSEYQLPYVLGSAHQGCLPPFPADVFMIPQYGYLTLNNGSQAVGRSSFYCLEYFPSQMLRTGNNFTFSYTFEDVPFHSSYAHSQSLDRLMNPLIDQYLYYLSRTQTNGTNATQTLLFAQAGPQNMSAQAKNWLPGPCYRQQRVSTAVSQNNNSNFTWTGATKYHLNGRDSLVNPGVAMATHKDDEERFFPSSGVLMFGKQGAGKDNVEYTNVMLTSEEEIKTTNPVATEQYGVVADNLQQTNSAPIVGAVNSQGALPGMVWQNRDVYLQGPIWAKIPHTDGNFHPSPLMGGFGLKHPPPQILIKNTPVPADPPVNFTDAKLASFITQYSTGQVSVEIEWELQKENSKRWNPEIQYTSNYYKSANVDFAVNADGVYSEPRPIGTRYLTRNL

SEQ ID NO: 388 - DNA, 4404 bp, Adeno-associated virus
  source 1..4404: mol_type = unassigned DNA
atggctgccgatggttatcttccagattggctcgagggcaacctctctgagggcattcgcgagtggtgggacttgaaacctggagccccgaaacccaaagccaaccagcaaaagcaggacgacggccggggtctggtgcttcctggctacaggtacctcggacccttcaacggactcgacaagggagagccggtcaacgaggcagacgccgcggccctcgagcacgacaaggcctacgacaagcagctcgagcagggggacaacccgtacctcaagtacaaccacgccgacgccgagtttcaggagcgtcttcaagaagatacgtcttttgggggcaacctcgggcgagcagtcttccaggccaagaagcgggttctcgaacctctcggtctggttgaggaaggcgctaagacggctcctggaaagaagagacccatagaatcccccgactcctccacgggcatcggcaagaacggccagccgcccgctaaaaagaagctcaactttgggcagactggcgactcagagtcagtgcccgacccccaacctctcggagaacctcccgccgcgccctcaggtctgggatctggtacaatggctgcaggcggtggcgcaccaatggcagacaataacgaaggcgccgacggagtgggtaatgcctccggaaattggcattgcgattccacatggctgggcgacagagtcatcaccaccagcacccgcacctgggccctgcccacctacaacaaccacctctacaagcagatatcaagtcagagcggggctaccaacgacaaccacttcttcggctacagcaccccctggggctattttgacttcaacagattccactgccacttctcaccacgtgactggcagcgactcatcaacaacaactggggattccggcccagaaagctgcggttcaagttgttcaacatccaggtcaaggaggtcacgacgaacgacggcgttacgaccatcgctaataaccttaccagcacgattcaggtcttctcggactcggagtaccaactgccgtacgtcctcggctctgcgcaccagggctgcctccctccgttccctgcggacgtgttcatgattcctcagtacggatatctgactctaaacaacggcagtcagtctgtgggacgttcctccttctactgcctggagtactttccttctcagatgctgagaacgggcgataactttgaattcagctacacctttgaggaagtgcctttccacagcagctatgcgcacagccagagcctggaccggctgatgaatcccctcatcgaccagtacctgtactacctggcccggacccagagcactacggggtccacaagggagctgcagttccatcaggctgggcccaacaccatggccgagcaatcaaagaactggctgcccggaccctgttatcggcagcagagactgtcaaaaaacatagacagcaacaacaacagtaactttgcctggaccggggccactaaataccatctgaatggtagaaattcattaaccaacccgggcgtagccatggccaccaacaaggacgacgaggaccagttctttcccatcaacggagtgctggtttttggcaaaacgggggctgccaacaagacaacgctggaaaacgtgctaatgaccagcgaggaggagatcaaaaccaccaatcccgtggctacagaagaatacggtgtggtctccagcaacctgcaatcgtctacggccggaccccagacacagactgtcaacagccagggggctctgcccggcatggtctggcagaaccgggacgtgtacctgcagggtcccatctgggccaaaattcctcacacggacggcaactttcacccgtctcccctgatgggcggatttggactcaaacacccgcctcctcaaattctcatcaaaaacaccccggtacctgctaatcctccagaggtgtttactcctgccaagtttgcctcatttatcacgcagtacagcaccggccaggtcagcgtggagatcgagtgggaactgcagaaagaaaacagcaaacgctggaatccagagattcagtacacctcaaattatgccaagtctaataatgtggaatttgctgtcaacaacgaaggggtttatactgagcctcgccccattggcacccgttacctcacccgtaacctgtaaatggctgccgatggttatcttccagattggctcgaggacaacctctctgagggcattcgcgagtggtgggacttgaaacctggagccccgaaacccaaagccaaccagcaaaagcaggacgacggccggggtctggtgcttcctggctacaagtacctcggacccttcaacggactcgacaagggggagcccgtcaacgcggcggacgcagcggccctcgagcacgacaaggcctacgaccagcagctcaaagcgggtgacaatccgtacctgcggtataaccacgccgacgccgagtttcaggagcgtctgcaagaagatacgtcttttgggggcaacctcgggcgagcagtcttccaggccaagaagcgggttctcgaacctctcggtctggttgaggaaggcgctaagacggctcctggaaagaagagaccggtagagccatcaccccagcgttctccagactcctctacgggcatcggcaagaaaggccagcagcccgcgaaaaagagactcaactttgggcagactggcgactcagagtcagtgcccgaccctcaaccaatcggagaaccccccgcaggcccctctggtctgggatctggtacaatggctgcaggcggtggcgctccaatggcagacaataacgaaggcgccgacggagtgggtagttcctcaggaaattggcattgcgattccacatggctgggcgacagagtcatcaccaccagcacccgaacctgggccctccccacctacaacaaccacctctacaagcaaatctccaacgggacttcgggaggaagcaccaacgacaacacctacttcggctacagcaccccctgggggtattttgactttaacagattccactgccacttctcaccacgtgactggcagcgactcatcaacaacaactggggattccggcccaagagactcaacttcaagctcttcaacatccaggtcaaggaggtcacgcagaatgaaggcaccaagaccatcgccaataaccttaccagcacgattcaggtctttacggactcggaataccagctcccgtacgtcctcggctctgcgcaccagggctgcctgcctccgttcccggcggacgtcttcatgattcctcagtacgggtacctgactctgaacaatggcagtcaggccgtgggccgttcctccttctactgcctggagtactttccttctcaaatgctgagaacgggcaacaactttgagttcagctaccagtttgaggacgtgccttttcacagcagctacgcgcacagccaaagcctggaccggctgatgaaccccctcatcgaccagtacctgtactacctgtctcggactcagtccacgggaggtaccgcaggaactcagcagttgctattttctcaggccgggcctaataacatgtcggctcaggccaaaaactggctacccgggccctgctaccggcagcaacgcgtctccacgacactgtcgcaaaataacaacagcaactttgcctggaccggtgccaccaagtatcatctgaatggcagagactctctggtaaatcccggtgtcgctatggcaacccacaaggacgacgaagagcgattttttccgtccagcggagtcttaatgtttgggaaacagggagctggaaaagacaacgtggactatagcagcgttatgctaaccagtgaggaagaaattaaaaccaccaacccagtggccacagaacagtacggcgtggtggccgataacctgcaacagcaaaacgccgctcctattgtaggggccgtcaacagtcaaggagccttacctggcatggtctggcagaaccgggacgtgtacctgcagggtcctatctgggccaagattcctcacacggacggaaactttcatccctcgccgctgatgggaggctttggactgaaacacccgcctcctcagatcctgattaagaatacacctgttcccgcggatcctccaactaccttcagtcaagctaagctggcgtcgttcatcacgcagtacagcaccggacaggtcagcgtggaaattgaatgggagctgcagaaagaaaacagcaaacgctggaacccagagattcaatacacttccaactactacaaatctacaaatgtggactttgctgttaacacagatggcacttattctgagcctcgccccatcggcacccgttacctcacccgtaatctgtaa

SEQ ID NO: 389 - protein, 738 aa, Adeno-associated virus; identical to SEQ ID NO: 7

SEQ ID NO: 390 - DNA, 3129 bp, Adeno-associated virus
  source 1..3129: mol_type = unassigned DNA
gaattcgccctttctacggctgcgtcaactggaccaatgagaactttcccttcaacgattgcgtcgacaagatggtgatctggtgggaggagggcaagatgacggccaaggtcgtggagtccgccaaggccattctcggcggcagcaaagtgcgcgtggaccaaaagtgcaagtcgtccgcccagatcgaccccacccccgtgatcgtcacctccaacaccaacatgtgcgccgtgattgacgggaacagcaccaccttcgagcaccagcagccgttgcaggaccggatgttcaagtttgaactcacccgccgtctggagcacgactttggcaaggtgacaaagcaggaagtcagagagttcttccgctgggcgcaggatcacgtgaccgaggtggcgcacgagttctacgtcagaaagggtggagccaacaagagacccgcccccgatgacgcggataaaagcgagcccaagcgggcctgcccctcagtcgcggatccatcgacgtcagacgcggaaggagctccggtggactttgccgacaggtaccaaaacaaatgttctcgtcacgcgggcatgcttcagatgctgtttccctgcaaaacatgcgagagaatgaatcagaatttcaacatttgcttcacgcacgggaccagagactgttcagaatgtttccccggcgtgtcagaatctcaaccggtcgtcagaaaaaagacgtatcggaaactctgtgcgattcatcatctgctgggggcgggcacccgagattgcttgctcggcctgcgatctggtcaacgtggacctagatgactgtgtttctgagcaataaatgacttaaaccaggtatggctgccgatggttatcttccagattggctcgaggacaacctctctgagggcattcgcgagtggtgggacttgaaacctggagccccgaaacccaaagccaaccagcaaaagcaggacgacggccggggtctggtgcttcctggctacaagtacctcggacccttcaacggactcgacaagggggagcccgtcaacgcggcggacgcagcggccctcgagcacgacaaggcctacgaccagcagctcaaagcgggtgacaatccgtacctgcggtataaccacgccgacgccgagtttcaggagcgtctgcaagaagatacgtcttttgggggcaacctcgggcgagcagtcttccaggccaagaagcgggttctcgaacctctcggtctggttgaggaaggcgctaagacggctcctggaaagaagagaccggtagagccatcaccccagcgttctccagactcctctacgggcatcggcaagaaaggccagcagcccgcgaaaaagagactcaactttgggcagactggcgactcagagtcagtgcccgaccctcaaccaatcggagaaccccccgcaggcccctctggtctgggatctggtacaatggctgcaggcggtggcgctccaatggcagacaataacgaaggcgccgacggagtgggtagttcctcaggaaattggcattgcgattccacatggctgggcgacagagtcatcaccaccagcacccgaacctgggccctccccacctacaacaaccacctctacaagcaaatctccaacgggacttcgggaggaagcaccaacgacaacacctacttcggctacagcaccccctgggggtattttgactttaacagattccactgccacttctcaccacgtgactggcagcgactcatcaacaacaactggggattccggcccaagagactcaacttcaagctcttcaacatccaggtcaaggaggtcacgcagaatgaaggcaccaagaccatcgccaataaccttaccagcacgattcaggtctttacggactcggaataccagctcccgtacgtcctcggctctgcgcaccagggctgcctgcctccgttcccggcggacgtcttcatgattcctcagtacgggtacctgactctgaacaatggcagtcaggccgtgggccgttcctccttctactgcctggagtactttccttctcaaatgctgagaacgggcaacaactttgagttcagctaccagtttgaggacgtgccttttcacagcagctacgcgcacagccaaagcctggaccggctgatgaaccccctcatcgaccagtacctgtactacctgtctcggactcagtccacgggaggtaccgcaggaactcagcagttgctattttctcaggccgggcctaataacatgtcggctcaggccaaaaactggctacccgggccctgctaccggcagcaacgcgtctccacgacactgtcgcaaaataacaacagcaactttgcctggaccggtgccaccaagtatcatctgaatggcagagactctctggtaaatcccggtgtcgctatggcaacccacaaggacgacgaagagcgattttttccgtccagcggagtcttaatgtttgggaaacagggagctggaaaagacaacgtggactatagcagcgttatgctaaccagtgaggaagaaattaaaaccaccaacccagtggccacagaacagtacggcgtggtggccgataacctgcaacagcaaaacgccgctcctattgtaggggccgtcaacagtcaaggagccttacctggcatggtctggcagaaccgggacgtgtacctgcagggtcctatctgggccaagattcctcacacggacggaaactttcatccctcgccgctgatgggaggctttggactgaaacacccgcctcctcagatcctgattaagaatacacctgttcccgcggatcctccaactaccttcagtcaagctaagctggcgtcgttcatcacgcagtacagcaccggacaggtcagcgtggaaattgaatgggagctgcagaaagaaaacagcaaacgctggaacccagagattcaatacacttccaactactacaaatctacaaatgtggactttgctgttaacacagatggcacttattctgagcctcgccccatcggcacccgttacctcacccgtaatctgtaattgcttgttaatcaataaaccggttgattcgtttcagttgaactttggtctctgcgaagggcgaattc

SEQ ID NO: 391 - protein, 738 aa, synthetic construct; identical to SEQ ID NO: 7
  source 1..738: note = Description of Artificial Sequence: Synthetic polypeptide

SEQ ID NO: 392 - protein, 733 aa, synthetic construct
  source 1..733: note = Description of Artificial Sequence: Synthetic polypeptide
MAADGYLPDWLEDNLSEGIREWWDLRPGAPKPKANQQKQDDGRGLVLPGYKYLGPFNGLDKGEPVNEADAAALEHDKAYDKQLEQGDNPYLKYNHADAEFQERLQEDTSFGGNLGRAVFQAKKRVLEPLGLVEEGAKTAPGKKRPIESPDSSTGIGKKGQQPAKKRLNFGQTGDSESVPDPQPIGEPPAGPSGLGSGTMAAGGGAPMADNNEGADGVGSSSGNWHCDSTWLGDRVITTSTRTWALPTYNNHLYKQISNGTSGGSTNDNTYFGYSTPWGYFDFNRFHCHFSPRDWQRLINNNWGFRPKRLNFKLFNIQVKEVTQNEGTKTIANNLTSTIQVFTDSEYQLPYVLGSAHQGCLPPFPADVFMIPQYGYLTLNNGSQAVGRSSFYCLEYFPSQMLRTGNNFEFSYQFEDVPFHSSYAHSQSLDRLMNPLIDQYLYYLSRTQSTGGTAGTQQLLFSQAGPNNMSAQAKNWLPGPCYRQQRVSTTVSQNNNSNFAWTGATKYHLNGRDSLVNPGVAMATHKGDEERFFPSSGVLMFGKQGAGKDNVDYSSVMLTSEEEIKTTNPVATEQYGVVADNLQQQNAAPIVGAVNSQGALPGMVWQNRDVYLQGPIWAKIPHTDGNFHPSPLMGGFGLKHPPPQILIKNTPVPADPPTTFSQAKLASFITQYSTGQVSVEIEWELQKENSKRWNPEIQYTSNYYKSTNVDFAVNTEGTYSEPRPIGTRYLTRNL

SEQ ID NO: 393 - DNA, 2501 bp, Adeno-associated virus
  source 1..2501: mol_type = unassigned DNA
gaattcgcccttggctgcgtcaactggaccaatgagaactttcccttcaacgattgcgtcgacaagatggtgatctggtgggaggagggcaagatgacggccaaggtcgtggagtccgccaaggccattcatcatctgctggggcgggctcccgagattgcttgctcggcctgcgatctggtcaacgtggacctggatgactgtgtttctgagcaataaatgacttaaaccaggtatggctgccgatggttatcttccagattggctcgaggacaacctctctgagggcattcgcgagtggtgggacttgagacctggagccccgaaacccaaagccaaccagcaaaagcaggacgacggccggggtctggtgcttcctggctacaagtacctcggacccttcaacggactcgacaagggagagccggtcaacgaggcagacgccgcggccctcgagcacgacaaggcctacgacaagcagctcgagcagggggacaacccgtacctcaagtacaaccacgccgacgccgagtttcaggagcgtcttcaagaagatacgtcttttgggggcaacctcgggcgagcagtcttccaggccaagaagcgggttctcgaacctctcggtctggttgaggaaggcgctaagacggctcctggaaagaagagacccatagaatcccccgactcctccacgggcatcggcaagaaaggccagcagcccgctaaaaagagactcaactttgggcagactggcgactcagagtcagtgcccgaccctcaaccaatcggagaaccccccgcaggcccctctggtctgggatctggcacaatggctgcaggcggtggcgctccaatggcagacaataacgaaggcgccgacggagtgggtagttcctcaggaaattggcattgcgattccacatggctgggcgacagagtcatcaccaccagcacccgaacctgggccctccccacctacaacaaccacctctacaagcaaatctccaacgggacatcgggaggaagcaccaacgacaacacctacttcggctacagcaccccctgggggtattttgactttaacagattccactgccacttctcaccacgtgactggcagcgactcatcaacaacaactggggattccggcccaagagactcaacttcaagctcttcaacatccaggtcaaggaggtcacgcagaatgaaggcaccaagaccatcgccaataaccttaccagcacgattcaggtctttacggactcggaataccagctcccgtacgtcctcggctctgcgcaccagggctgcctgcctccgttcccggcggacgtcttcatgattcctcagtacgggtacctgactctgaacaacggcagtcaggccgtgggccgttcctccttctactgcctggagtactttccttctcaaatgctgagaacgggcaacaactttgagttcagctaccagtttgaggacgtgccttttcacagcagctatgcgcacagccaaagcctggaccggctgatgaaccccctcatcgaccagtacctgtactacctgtctcggactcagtccacgggaggtaccgcaggaactcagcagttgctattttctcaggccgggcctaataacatgtcggctcaggccaaaaactggctacccgggccctgctaccggcagcaacgcgtctccacgacagtgtcgcaaaataacaacagcaactttgcttggaccggtgccaccaagtatcatctgaatggcagagactctctggtaaatcccggtgtcgctatggcaacgcacaagggcgacgaagagcgattttttccatccagcggagtcttgatgtttgggaaacagggagctggaaaagacaacgtagactatagcagcgttatgctaaccagtgaggaagaaatcaaaaccaccaacccagtggccacagaacagtacggcgtggtggccgataacctgcaacagcaaaacgccgctcctattgtaggggccgtcaacagtcaaggagccttacctggcatggtctggcagaaccgggacgtgtacctgcagggtcctatctgggccaagattcctcacacggacggcaactttcatccttcgccgctgatgggaggctttggactgaaacacccgcctcctcagatcctgattaagaatacacctgttcccgcggatcctccaactaccttcagtcaagccaagctggcgtcgttcatcacgcagtacagcaccggacaggtcagcgtggaaattgaatgggagctgcagaaagagaacagcaagcgctggaacccagagattcagtatacttccaactactacaaatctacaaatgtggactttgctgtcaatactgagggtacttattcagagcctcgccccattggcacccgttacctcacccgtaacctgtaattgcctgttaatcaataaaccggttgattcgtttcagttgaactttggtctcaagggcgaattc

SEQ ID NO: 394 - DNA, 2187 bp, Adeno-associated virus
  source 1..2187: mol_type = unassigned DNA
atggctgccgatggttatcttccagattggctcgaggacaacctctctgagggcattcgcgagtggtgggacttgaaacctggagccccgaaacccaaagccaaccagcaaaagcaggacgacggccggggtctggtgcttcctggctacaagtacctcggacccttcaacggactcgacaagggagagccggtcaacgaggcagacgccgcggccctcgagcacgacaaggcctacgacaagcagctcgagcagggggacaacccgtacctcaagtacaaccacgccgacgccgagtttcaggagcgtcttcaagaagatacgtcttttgggggcaacctcgggcgagcagtcttccaggccaagaagcgggttctcgaacctctcggtctggttgaggaaggcgctaagacggctcctggaaagaagagacccatagaatcccccgactcctccacgggcatcggcaagaaaggccagcagcccgctaaaaagaagctcaactttgggcagactggcgactcagagtcagtgcccgacccccaacctctcggagaacctcccgccgcgccctcaggtctgggatctggtacaatggctgcaggcggtggcgcaccaatggcagacaataacgaaggcgccgacggagtgggtaatgcctccggaaattggcattgcgattccacatggctgggcgacagagtcatcaccaccagcacccgcacctgggccctgcccacctacaacaaccacctctacaagcagatatcaagtcagagcggggctaccaacgacaaccacttcttcggctacagcaccccctggggctattttgacttcaacagattccactgccacttctcaccacgtgactggcagcgactcatcaacaacaactggggattccggcccagaaagctgcggttcaagttgttcaacatccaggtcaaggaggtcacgacgaacgacggcgttacgaccatcgctaataaccttaccagcacgattcaggtcttctcggactcggagtaccaactgccgtacgtcctcggctctgcgcaccagggctgcctccctccgttccctgcggacgtgttcatgattcctcagtacggatatctgactctaaacaacggcagtcagtctgtgggacgttcctccttctactgcctggagtactttccttctcagatgctgagaacgggcaataactttgaattcagctacacctttgaggaagtgcctttccacagcagctatgcgcacagccagagcctggaccggctgatgaatcccctcatcgaccagtacctgtactacctggcccggacccagagcactacggggtccacaagggagctgcagttccatcaggctgggcccaacaccatggccgagcaatcaaagaactggctgcccggaccctgttatcggcagcagagactgtcaaaaaacatagacagcaacaacaacagtaactttgcctggaccggggccactaaataccatctgaatggtagaaattcattaaccaacccgggcgtagccatggccaccaacaaggacgacgaggaccagttctttcccatcaacggagtgctggtttttggcgaaacgggggctgccaacaagacaacgctggaaaacgtgctaatgaccagcgaggaggagatcaaaaccaccaatcccgtggctacagaagaatacggtgtggtctccagcaacctgcaatcgtctacggccggaccccagacacagactgtcaacagccagggggctctgcccggcatggtctggcagaaccgggacgtgtacctgcagggtcccatctgggccaaaattcctcacacggacggcaactttcacccgtctcccctgatgggcggatttggactcaaacacccgcctcctcaaattctcatcaaaaacaccccggtacctgctaatcctccagaggtgtttactcctgccaagtttgcctcatttatcacgcagtacagcaccggccaggtcagcgtggagatcgagtgggaactgcagaaagaaaacagcaaacgctggaatccagagattcagtacacctcaaattatgccaagtctaataatgtggaatttgctgtcaacaacgaaggggtttatactgagcctcgccccattggcacccgttacctcacccgtaacctgtaa

SEQ ID NO: 395 - protein, 728 aa, Adeno-associated virus; identical to SEQ ID NO: 63

SEQ ID NO: 396 - protein, 728 aa, Adeno-associated virus; identical to SEQ ID NO: 155

SEQ ID NO: 397 - protein, 728 aa, Adeno-associated virus; identical to SEQ ID NO: 155

SEQ ID NO: 398 - protein, 733 aa, synthetic construct
  source 1..733: note = Description of Artificial Sequence: Synthetic polypeptide
MAADGHLPDWLEDNLSEGIREWWDLKPGAPKPKANQQKQDDGRGLVLPGYKYLGPFNGLDKGEPVNAADAAALEHDKAYDQQLKAGDNPYLRYNHADAEFQERLQEDTSFGGNLGRAVFQAKKRVLEPLGLVEEGAKTAPGKKRPIESPDSSTGIGKKGQQPAKKKLNFGQTGDSESVPDPQPIGEPPAGPSGLGSGTMAAGGGAPMADNNEGADGVGSSSGNWHCDSTWLGDRVITTSTRTWALPTYNNHLYKQISNGTSGGSTNDNTYFGYSTPWGYFDFNRFHCHFSPRDWQRLINNSWGFRPKRLNFKLFNIQVKEVTQNEGTKTIANNLTSTIQVFTDSEYQLPYVLGSAHQGCLPPFPADVFMIPQYGYLTLNNGSQAVGRSSFYCLEYFPSQMLRTGNNFEFSYQFEDVPFHSSYAHSQSLDRLMNPLIDQYLYYLSRTQSTGGTAGTQQLLFSQAGPNNMSAQAKNWLPGPCYRQQRVSTTLSQNNNSNFAWTGATKYHLNGRDSLVNPGVAMATHKDDEERFFPSSGVLMFGKQGAGKDNVDYSSVMLTSEEEIKTTNPVATEQYGVVADNLQQQNAAPIVGAVNSQGALPGMVWQNRDVYLQGPIWAKIPHTDGNFHPSPLMGGFGLKHPPPQILIKNTPVPADPPTTFSQAKLASFITQYSTGQVSVEIEWELQKENSKRWNPEIQYTSNYYKSTNVDFAVNTEGTYSEPRPIGTRYLTRNL

SEQ ID NO: 399 - DNA, 3113 bp, Adeno-associated virus
  source 1..3113: mol_type = unassigned DNA
gaattcgccctttctacggctgcgtcaactggaccaatgagaactttcccttcaacgattgcgtcgacaagatggtgatctggtgggaggagggcaagatgacggccaaggtcgtggagtccgccaaggccattctcggcggcagcaaggtgcgcgtggaccaaaagtgcaagtcgtccgcccagatcgatcccacccccgtgatcgtcacttccaacaccaacatgtgcgccgtgattgacgggaacagcaccaccttcgagcaccagcagccgttacaagaccggatgttcaaatttgaactcacccgccgtctggagcatgactttggcaaggtgacaaagcaggaagtcaaagagttcttccgctgggcgcaggatcacgtgaccgaggtggcgcatgagttctacgtcagaaagggtggagccaacaagagacccgcccccgatgacgcggataaaagcgagcccaagcgggcctgcccctcagtcgcggatccatcgacgtcagacgcggaaggagctccggtggactttgccgacaggtaccaaaacaaatgttctcgtcacgcgggcatgcttcagatgctgcttccctgcaagacatgcgagagaatgaatcagaatttcagcatttgcttcacgcacgggaccagagactgttcagaatgtttccccggcgtgtcagaatctcaaccggtcgtcagaaagaggacgtatcggaaactctgtgccattcatcatctgctggggcgggctcccgagattgcttgctcggcctgcgatctggtcaacgtggacctggatgactgtgtttctgagcaataaatgacttaaaccaggtatggctgccgatggtcatcttccagattggctcgaggacaacctctctgagggcattcgcgagtggtgggacttgaaacctggagccccgaaacccaaagccaaccagcaaaagcaggacgacggccggggtctggtgcttcctggctacaagtacctcggacccttcaacggactcgacaagggggagcccgtcaacgcggcggacgcagcggccctcgagcacgacaaggcctacgaccagcagctcaaagcgggtgacaatccgtacctgcggtataaccacgccgacgccgagtttcaggagcgtcttcaagaagatacgtcttttgggggcaacctcgggcgagcagtcttccaggccaagaagcgggttctcgaacctctcggtctggttgaggaaggcgctaagacggctcctggaaagaagagacccatagaatcccccgactcctccacgggcatcggcaagaaaggccagcagcccgctaaaaagaagctcaactttgggcagactggcgactcagagtcagtgcccgaccctcaaccaatcggagaaccccccgcaggcccctctggtctgggatctggtacaatggctgcaggcggtggcgctccaatggcagacaataacgaaggcgccgacggagtgggtagttcctcaggaaattggcattgcgattccacatagctgggcgacagagtcatcaccaccagcacccgaacctgggccctccccacctacaacaaccacctctacaagcaaatctccaacgggacatcgggaggaagcaccaacgacaacacctacttcggctacagcaccccctgggggtattttgactttaacagattccactgccacttctcaccacgtgactggcagcgactcatcaacaacagctggggattccggcccaagagactcaacttcaagctcttcaacatccaggtcaaggaggtcacgcagaatgaaggcaccaagaccatcgccaataaccttaccagcacgattcaggtctttacggactcggaataccagctcccgtacgtcctcggctctgcgcaccagggctgcctgcctccgttcccggcggacgtcttcatgattcctcagtacgggtacctgactctgaacaacggcagtcaggccgtgggccgttcctccttctactgcctggagtactttccttctcaaatgctgagaacgggcaacaactttgagttcagctaccagtttgaggacgtgccttttcacagcagctacgcgcacagccaaagcctggaccggctgatgaaccccctcatcgaccagtacctgtactacctgtctcggactcagtccacgggaggtaccgcaggaactcagcagttgctattttctcaggccgggcctaataacatgtcggctcaggccaaaaactggctacccgggccctgctaccggcagcaacgcgtctccacgacactgtcgcaaaataacaacagcaactttgcttggaccggtgccaccaagtatcatctgaatggcagagactctctggtaaatcccggtgtcgctatggcaacgcacaaggacgacgaagagcgattttttccatccagcggagtcttgatgtttgggaaacagggagctggaaaagacaacgtggactatagcagcgttatgctaaccagtgaggaagaaatcaaaaccaccaacccagtggccacagaacagtacggcgtggtggccgataacctgcaacagcaaaacgccgctcctattgtaggggccgtcaacagtcaaggagccttacctggcatggtctggcagaaccgggacgtgtacctgcagggtcctatctgggccaagattcctcacacggacggcaactttcatccttcgccgctgatgggaggctttggactgaaacacccgcctcctcagatcctgattaagaatacacctgttcccgcggatcctccaactaccttcagtcaagccaagctggcgtcgttcatcacgcagtacagcaccggacaggtcagcgtggaaattgaatgggagctgcagaaagagaacagcaagcgctggaacccagagattcagtatacttccaactactacaaatctacaaatgtggactttgctgtcaatactgagggtacttattcagagcctcgccccattggcacccgttacctcacccgtaacctgtaattgcctgttaatcaataaaccggttaattcgtttcagttgaactttggtctctgcgaagggcgaattc

SEQ ID NO: 400 - protein, 731 aa, synthetic construct
  source 1..731: note = Description of Artificial Sequence: Synthetic polypeptide
MAADGYLPDWLEDNLSEGIREWWDLKPGAPKPKANQQKQDDGRGLVLPGYKYLGPFNGLDKGEPVNEADAAALEHDKAYDKQLEQGDNPYLKYNHADAEFQERLQEDTSFGGNLGRAVFRAKKRVLEPLGLVEEGAKTAPGKKRPIESPDSSTGIGKKGQQPAKKKLNFGQTGDSESVPDPQPLGEPPAAPSGLGSGTMAAGGGAPMADNNEGADGVGNASGNWHCDSTWLGDRVITTSTRTWALPTYNNHLYKQISSQSGATNDNHFFGYSTPWGYFDFNRFHCHFSPRDWQRLINNNRGFRPRKLRFKLFNIQVKEVTTNDGVTTIANNLTSTIQVFSDSEYQLPYVLGSAHQGCLPPFPADVFMIPQYGYLTLNNGSQSVGRSSFYCLEYFPSQMLRTGNNFEFSYQFEDVPFHSSYAHSQSLDRLMNPLIDQYLYYLSRTQSTGGTAGTQQLLFSQAGPNNMSAQAKNWLPGPCYRQQRVSTTLSQNNNSNFAWTGATKYHLNGRDSLVNPGVAMATHKDDEERFFPSSGVLMFGKQGAGKDNVDYSSVMLTSEEEIKTTNPVATEQYGVVADNLQQQNAAPIVGAVNSQGALPGMAWQNRDVYLQGPIWAKIPHTDGNFHPSPLMGGFGLKHPPPQILIKNTPVPADPPTTFSQAKLASFITQYSTGQVSVEIEWELQKENSKRWNPEIQYTSNYYKSTNVDFAVNTEGTYSEPRPIGTRYLTRNL

SEQ ID NO: 401 - DNA, 3106 bp, Adeno-associated virus
  source 1..3106: mol_type = unassigned DNA
gaattcgcccttctacggctgcgtcaactggaccaatgagaactttcccttcaacgattgcgtcgacaagatggtgatctggtgggaggagggcaagatgacggccaaggtcgtggagtccgccaaggccattctcggcggcagcaaggtgcgcgtggaccaaaagtgcaagtcgtccgcccagatcgaccccacccccgtgatcgtcacctccaacaccaacatgtgcgccgtgattgacgggaacagcaccaccttcgagcaccagcagccgttgcaggaccggatgttcaaatttgaactcacccgccgtctggagcatgactttggcaaggcgacaaagcaggaagtcaaagagttcttccgctgggcgcaggatcacgtgaccgaggtggcgcatgagttctacgtcagaaagggtggagccaacaagagacccgcccccgatgacgcggataaaagcgagcccaagcgggcccgcccctcagtcgcggatccatcgacgtcagacgcggaaggagctccggtggactttgccgacaggtaccaaaacaaatgttctcgtcacgcgggcatgcttcagatgctgtttccctgcaaaacatgcgagagaatgaatcagaatttcaacatttgcttcacgcacgggaccagagactgttcagaatgtttccccggcgtgtcagaatctcaaccggtcgtcagaaagaggacgtatcggaaactctgtgccattcatcatctgctggggcgggctcccgagattgcttgctcggcctgcgatctggtcaacgtggacctggatgactgtgtttctgagcaataaatgacttaaaccaggtatggctgccgatggttatcttccagattggctcgaggacaacctctctgagggcattcgcgagtggtgggacttgaaacctggagccccgaaacccaaagccaaccagcaaaagcaggacgacggccggggtctggtgcttcctggctacaagtacctcggacccttcaacggactcgacaagggagagccggtcaacgaggcagacgccgcggccctcgagcacgacaaggcctacgacaagcagctcgagcagggggacaacccgtacctcaagtacaaccacgccgacgccgagtttcaggagcgtcttcaagaagatacgtcttttgggggcaacctcgggcgagcagtcttccgggccaagaagcgggttctcgaacctctcggtctggttgaggaaggcgctaagacggctcctggaaagaagagacccatagaatcccccgactcctccacgggcatcggcaagaaaggccagcagcccgctaaaaagaagctcaactttgggcagactggcgactcagagtcagtgcccgacccccaacctctcggagaacctcccgccgcgccctcaggtctgggatctggtacaatggctgcaggcggtggcgcaccaatggcagacaataacgaaggcgccgacggagtgggtaatgcctccggaaattggcattgcgattccacatggctgggcgacagagtcatcaccaccagcacccgcacctgggccctgcccacctacaacaaccacctctacaagcagatatcaagtcagagcggggctaccaacgacaaccacttcttcggctacagcaccccctggggctattttgacttcaacagattccactgccacttctcaccacgtgactggcagcgactcatcaacaacaaccggggattccggcccagaaagctgcggttcaagttgttcaacatccaggtcaaggaggtcacgacgaacgacggcgttacgaccatcgctaataaccttaccagcacgattcaggtcttctcggactcggagtaccaactgccgtacgtcctcggctctgcgcaccagggctgcctccctccgttccctgcggacgtgttcatgattcctcagtacggatatctgactctaaacaacggcagtcagtctgtgggacgttcctccttctactgcctggagtactttccttctcagatgctgagaacgggcaataactttgaattcagctaccagtttgaggacgtgccctttcacagcagctacgcgcacagccaaagcctggaccggctgatgaaccccctcatcgaccagtacctgtactacctgtctcggactcagtccacgggaggtaccgcaggaactcagcagttgctattttctcaggccgggcctaataacatgtcggctcaggccaaaaactggctacccgggccctgctaccggcagcaacgcgtctccacgacactgtcgcaaaataacaacagcaactttgcttggaccggtgccaccaagtatcatctgaatggcagagactctctggtaaatcccggtgtcgctatggcaacgcacaaggacgacgaagagcgattttttccatccagcggagtcttgatgtttgggaaacagggagctggaaaagacaacgtggactatagcagcgttatgctaaccagtgaggaagaaatcaaaaccaccaacccagtggccacagaacagtacggcgtggtggccgataacctgcaacagcaaaacgccgctcctattgtaggggccgtcaacagtcaaggagccttacctggcatggcctggcagaaccgggacgtgtacctgcagggtcctatctgggccaagattcctcacacggacggcaactttcatccttcgccgctgatgggaggctttggactgaaacacccgcctcctcagatcctgattaagaatacacctgttcccgcggatcctccaactaccttcagtcaagccaagctggcgtcgttcatcacgcagtacagcaccggacaggtcagcgtggaaattgaatgggagctgcagaaagagaacagcaagcgctggaacccagagattcagtatacttccaactactacaaatctacaaatgtggactttgctgtcaatactgagggtacttattcagagcctcgccccattggcacccgttacctcacccgtaacctgtaattgcctgttaatcaataaaccggttaattcgtttcagttgaactttggtctctgcgaagggcgaattc

SEQ ID NO: 402 - protein, 738 aa, synthetic construct
  source 1..738: note = Description of Artificial Sequence: Synthetic polypeptide
MAADGYLPDWLEDNLSEGIREWWDLKPGAPKPKANQQKQDDGRGLVLPGYKYLGPFNGLDKGEPVNEADAAALEHDKAYDKQLEQGDNPYLKYNHADAEFQERLQEDTSFGGNLGRAVFQAKKRVLEPLGLVEEGAKTAPGKKRPVEPSPQRSPDSSTGIGKTGQQPAKKRLNFGQTGDSESVPDPQPIGEPPAGPSGLGSGTMAAGGGAPMADNNEGADGVGSSSGNWHCDSTWLGDRVITTSTRTWALPTYNNHLYKQISNGTSGGSTNDNTYFGYSTPWGYFDFNRFHCHFSPRDWQRLINNNWGFRPKRLNFKLFNIQVKEVTQNEGTKTIANNLTSTIQVFTDSEYQLPYVLGSAHQGCLPPFPADVFMIPQYGYLTLNNGSQAVGRSSFYCLEYFPSQMLRTGNNFEFSYQFEDVPFHSSYAHSQSLDRLMNPLIDQYLYYLSRTQSTGGTAGTQQLLFSQAGPNNMSAQAKNWLPGPCYRQQRVSTTLSQNNNSNFAWTGATKYHLNGRDSLVNPGVAMATHKDDEERFFPSSGVLMFGKQGAGKDNVDYSSVMLTSEEEIKTTNPVATEQYGVVADNLQQQNAAPIVGAVNSQGALPGMVWQNRDVYLQGPIWAKIPHTDGNFHPSPLMGGFGLKHPPPQILIKNTPVPADPPTTFSQAKLASFITQYSTGQVSVEIEWELQKENSKRWNPEIQYTSNYYKSTNVDFAVNTEGTYSEPRPIGTRYLTRNL

SEQ ID NO: 403 - DNA, 3197 bp, Adeno-associated virus
  source 1..3197: mol_type = unassigned DNA
gaattcgccctttctacggctgcgtcaactggaccaatgagaactttcccttcaacgattgcgtcgacaagatggtgatctggtgggaggagggcaagatgacggccaaggtcgtggagtccgccaaggccattctcggcggcagcaaggtgcgcgtggaccaaaagtgcaagtcgtccgcccagatcgaccccacccccgtgatcgtcacctccaacaccaacatgtgcgccgtgattgacgggaacagcaccaccttcgagcaccagcagccgttacaagaccggatgttcaaatttgaactcacccgccgtctggagcacgactttggcaaggtgacaaagcaggaagtcaaagagttcttccgctgggcgcaggatcacgtgaccgaggtggcgcatgagttctacgtcagaaagggtggagccaacaagagacccgcccccgatgacgcggataaaagcgagcccaagcgggcctgcccctcagtcgcggatccatcgacgtcagacgcggaaggagctccggtggactttgccgacaggtaccaaaacaaatgttctcgtcacgcgggcatgcttcagatgctgtttccctgcaagacatgcgagagaatgaatcagaatttcaacatttgcttcacgcacgggaccagagactgttcagaatgtttccccggcgtgtcagaatctcaaccggtcgtcagaaagaggacgtatcggaaactctgtgccattcatcatctgctggggcgggctcccgagattgcttgctcggcctgcgatctggtcaacgtggacctggatgactgtgtttctgagcaataaatgacttaaaccaggtatggctgccgatggttatcttccagattggctcgaggacaacctctctgagggcattcgcgagtggtgggacttgaaacctggagccccgaaacccaaagccaaccagcaaaagcaggacgacggccggggtctggtgcttcctggctacaagtacctcggacccttcaacggactcgacaagggagagccggtcaacgaggcagacgccgcggccctcgagcacgacaaggcctacgacaagcagctcgagcagggggacaacccgtacctcaagtacaaccacgccgacgccgagtttcaggagcgtcttcaagaagatacgtcttttgggggcaacctcgggcgagcagtcttccaggccaagaagcgggttctcgaacctctcggtctggttgaggaaggcgctaagacggctcctggaaagaagagaccggtagagccatcaccccagcgttctccagactcctctacgggcatcggcaagacaggccagcagcccgcgaaaaagagactcaactttgggcagactggcgactcagagtcagtgcccgaccctcaaccaatcggagaaccccccgcaggcccctctggtctgggatctggtacaatggctgcaggcggtggcgctccaatggcagacaataacgaaggcgccgacggagtgggtagttcctcaggaaattggcattgcgattccacatggctgggcgacagagtcatcaccaccagcacccgaacctgggccctccccacctacaacaaccacctctacaagcaaatctccaacgggacatcgggaggaagcaccaacgacaacacctacttcggctacagcaccccctgggggtattttgactttaacagattccactgccacttctcaccacgtgactggcagcgactcatcaacaacaactggggattccggcccaagagactcaacttcaagctcttcaacatccaggtcaaggaggtcacgcagaatgaaggcaccaagaccatcgccaataaccttaccagcacgattcaggtctttacggactcggaataccagctcccgtacgtcctcggctctgcgcaccagggctgcctgcctccgttcccggcggacgtcttcatgattcctcagtacgggtacctgactctgaacaacggcagtcaggccgtgggccgttcctccttctactgcctggagtactttccttctcaaatgctgagaacgggcaacaactttgagttcagctaccagtttgaggacgtgccttttcacagcagctacgcgcacagccaaagcctggaccggctgatgaaccccctcatcgaccagtacctgtactacctgtctcggactcagtccacgggaggtaccgcaggaactcagcagttgctattttctcaggccgggcctaataacatgtcggctcaggccaaaaactggctacccgggccctgctaccggcagcaacgcgtctccacgacactgtcgcaaaataacaacagcaactttgcttggaccggtgccaccaagtatcatctgaatggcagagactctctggtaaatcccggtgtcgctatggcaacgcacaaggacgacgaagagcgattttttccatccagcggagtcttgatgtttgggaaacagggagctggaaaagacaacgtggactatagcagcgttatgctaaccagtgaggaagaaatcaaaaccaccaacccagtggccacagaacagtacggcgtggtggccgataacctgcaacagcaaaacgccgctcctattgtaggggccgtcaacagtcaaggagccttacctggcatggtctggcagaaccgggacgtgtacctgcagggtcctatctgggccaagattcctcacacggacggcaactttcatccttcgccgctgatgggaggctttggactgaaacacccgcctcctcagatcctgattaagaatacacctgttcccgcggatcctccaactaccttcagtcaagccaagctggcgtcgttcatcacgcagtacagcaccggacaggtcagcgtggaaattgaatgggagctgcagaaagagaacagcaagcgctggaacccagagattcagtatacttccaactactacaaatctacaaatgtggactttgctgtcaatactgagggtacttattcagagcctcgccccattggcacccgttacctcacccgtaacctgtaattgcctgttaatcaataaaccggttaattcgtttcagttgaactttggtctctgcgaagggcgaattcgtttaaacctgcaggactagtccctttagtgagggttaattctgagcttggcgtaatcatgggtcatag

SEQ ID NO: 404 - protein, 735 aa, synthetic construct
  source 1..735: note = Description of Artificial Sequence: Synthetic polypeptide
MAADGYLPDWLEDNLSEGIREWWDLKPGAPKPKANQQKQDDGRGLVLPGYKYLGPFNGLDKGEPVNEADAAALEHDKAYDKQLEQGDNPYLKYNHADAEFQERLQEDTSFGGNLGRAVFQAKKRVLEPLGLVEEGAKTAPGKKRPVEPSPQRSPDSSTGIGKTGQQPAKKRLNFGQTGDSESVPDPQPIGEPPAGPSGLGSGTMAAGGGAPMADNNEGADGVGSSSGNWHCDSTWLGDRVITTSTRTWALPTYNNHLYKQISNGTSGGSTNDNTYFGYSTPWGYFDFNRFHCHFSPRDWQRLINNNWGFRPRKLRFKLFNIQVKEVTTDDGVTTIANNLTSTIQVFSDSEYQLPYVLGSAHQGCLPPFPADVFMIPQYGYLTLNNGSQSVGRSSFYCLEYFPSQMLRTGNNFEFSYTFEEVPFHSSYAHSQSLDRLMNPLIDQYLYYLARTQSTTGSTRELQFHQAGPNTMAEQSKNWLPGPCYRQQRLSKNIDSNNNSNFAWTGATKYHLNGRNSLTNPGVAMATNKDDEDQFFPINGVLVFGKTGAANKTTLENVLMTSEEEIKTTNPVATEEYGVVSSNLQSSTAGPQTQTVNSQGALPGMVWQNRDVYLQGPIWAKIPHTDGNFHPSPLMDGFGLKHPPPQILIKNTPVPANPPEVFTPAKFASFITQYSTGQVSVEIEWELQKENSKRWNPEIQYTSNYAKSNNVEFAVNNEGVYTEPRPIGTRYLTRNL

SEQ ID NO: 405 - DNA, 3276 bp, Adeno-associated virus
  source 1..3276: mol_type = unassigned DNA
gaattcgcccttcgcagagaccaaagttcaactgaaacgaattaaccggtttattgattaacaggcaattacaggttacgggtgaggtaacgggtgccaatggggcgaggctcagtataaaccccttcgttgttgacagcaaattccacattattagacttggcataatttgaggtgtactgaatctctggattccagcgtttgctgttttctttctgcagttcccactcgatctccacgctgacctggccggtgctgtactgcgtgataaatgaggcaaacttggcaggagtaaacacctctggaggattagcaggtaccggggtgtttttgatgagaatttgaggaggcgggtgtttgagtccaaatccgtccatcaggggagacgggtgaaagttgccgtccgtgtgaggaattttggcccagatgggaccctgcaggtacacgtcccggttctgccagaccatgccgggcagagccccctggctgttgacagtctgtgtctggggtccggccgtagacgattgcaggttgctggagaccacaccgtattcttctgtagccacgggattggtggttttgatctcctcctcgctggtcattagcacgttttccagcgttgtcttgttggcagcccccgttttgccaaaaaccagcactccgttgatgggaaagaactggtcctcgtcgtccttgttggtggccatggctacgcccgggttggttaatgaatttctaccattcagatggtatttagtggccccggtccaggcaaagttactgttgttgttgctgtctatgttttttgacagtctctgctgccgataacagggtccgggcagccagttctttgattgctcggccatggtgttgggcccagcctgatggaactgcagctcccttgtggaccccgtagtgctctgggtccgggccaggtagtacaggtactggtcgatgaggggattcatcagccggtccaggctctggctatgcgcatagctgctgtggaaaggcacttcctcaaaggtgtagctgaattcaaagttattgcccgttctcagcatctgagaaggaaagtactccaggcagtagaaggaggaacgtcccacagactgactgccgttgtttagagtcagatatccgtactgaggaatcatgaacacgtccgcagggaacggagggaggcagccctggtgcgcagagccgaggacgtacggcagttggtactccgagtccgagaagacctgaatcgtgctggtaaggttattagcgatggtcgtaacgccgtcgtccgtcgtgacctccttgacctggatgttgaacaacttgaaccgcagctttctgggccggaatccccagttgttgttgatgagtcgctgccagtcacgtggtgagaagtggcagtggaatctgttaaagtcaaaatacccccagggggtgctgtagccgaagtaggtgttgtcgttggtgcttcctcccgatgtcccgttggagatttgcttgtagaggtggttgttgtaggtggggagggcccaggttcgggtgctggtggtgatgactctgtcgcccagccatgtggaatcgcaatgccaatttcctgaggaactacccactccgtcggcgccttcgttattgtctgccattggagcgccaccgcctgcagccattgtaccagatcccagaccagaggggcctgcggggggttctccgattggttgagggtcgggcactgactctgagtcgccagtctgcccaaagttgagtctctttttcgcgggctgctggcctgtcttgccgatgcccgtagaggagtctggagaacgctggggtgatggctctaccggtctcttctttccaggagccgtcttagcgccttcctcaaccagaccgagaggttcgagaacccgcttcttggcctggaagactgctcgcccgaggttgcccccaaaagacgtatcttcttgaagacgctcctgaaactcggcgtcggcgtggttgtacttgaggtacgggttgtccccctgctcgagctgcttgtcgtaggccttgtcgtgctcgagggccgcggcgtctgcctcgttgaccggctctcccttgtcgagtccgttgaagggtccgaggtacttgtagccaggaagcaccagaccccggccgtcgtcctgcttttgctggttggctttgggtttcggggctccaggtttcaagtcccaccactcgcgaatgccctcagagaggttgtcctcgagccaatctggaagataaccatcggcagccatacctggtttaagtcatttattgctcagaaacacagtcatccaggtccacgttgaccagatcgcaggccgagcaagcaatctcgggagcccgccccagcagatgatgaatggcacagagtttccgatacgtcctctttctgacgaccggttgagattctgacacgccggggaaacattctgaacagtctctggtcccgtgcgtgaagcaaatgttgaaattctgattcattctctcgcatgtcttgcagggaaacagcatctgaagcatgcccgcgtgacgagaacacttgttttggtacctgtcggcaaagtccaccggagctccttccgcgtctgacgtcgatggatgcaaaatgtcgcaaaagcactcacgtgacagctaatacaggaccactcccctatgacgtgatttacgtcagcgctatgcccgcgtgacgagaacatttgttttggtacctgtcggcaaagtccaccggagctccttccgcgtctgacgtcgatggatccgcgactgaggggcaggcccgcttgggctcgcttttatccgcgtcatcgggggcgggtctcttgttggctccaccctttctgacgtagaactcatgcgccacctcggtcacgtgatcctgcgcccagcggaagaactctttgacttcctgctttgtcaccttgccaaagtcatgctccagacggcgggtgagttcaaatttgaacatccggtcctgcaacggctgctggtgctcgaaggtggtgctgttcccgtcaatcacggcgcacatgttggtgttggaagtgacgatcacgggggtgggatcgatctgggcggaagacttgcacttttggtccacgcgcaccttgctgccgccgagaatggccttggcggactccacgaccttggccgtcatcttgccctcctcccaccagatcaccatcttgtcgacgcaatcgttgaagggaaagttctcattggtccagttgacgcagccgtagaaagggcgaattc

SEQ ID NO: 406 - protein, 738 aa, Adeno-associated virus; identical to SEQ ID NO: 71

SEQ ID NO: 407 - protein, 738 aa, Adeno-associated virus
MAADGYLPDWLEDNLSEGIREWWDLKPGAPKPKANQQKQDDGRGLVLPGYKYLGPFNGLDKGEPVNAADAAALEHDKAYDQQLKAGDNPYLRYNHADAEFQERLQEDTSFGGNLGRAVFQAKKRVLEPLGLVEEGAKTAPGKKRPVEPSPQRSPDSSTGIGKKGHQPARKRLNFGQTGDSESVPDPQPIGEPPAGPSGLGSGTMAAGGGAPMADNNEGADGVGSSSGNWHCDSTWLGDRVITTSTRTWALPTYNNHLYKQISNGTSGGSTNDNTYFGYSTPWGYFDFNRFHCHFSPRDWQRLINNNWGFRPKRLNFKLFNIQVKEVTQNEGTKTIANNLTSTIQVFTDSEYQLPYVPGSAHQGCLPPFPADVFMIPQYGYLTLNNGSQAVGRSSFYCLEYFPSQMLRTGNNFEFSYTFEDVPFHSSYAHSQSLDRLMNPLIDQYLYYLSRTQSTGGTQGTQQLLFSQAGPANMSAQAKNWLPGPCYRQQRVSTTLSQNNNSNFAWTGATKYHLNGRDSLVNPGVAMATHKDDEERFFPSSGVLMFGKQGAGKDNVDYSSVMLTSEEEIKTTNPVATEQYGVVADNLQQTNGAPIVGTVNSQGALPGMVWQNRDVYLQGPIWAKIPHTDGNFHPSPLMGGFGLKHPPPQILIKNTPVPADPPTTFSQAKLASFITQYSTGQVSVEIEWELQKENSKRWNPEIQYTSNYYKSTNVDFAVNTEGTYSEPRPIGTRYLTRNL

SEQ ID NO: 408 - protein, 738 aa, Adeno-associated virus; identical to SEQ ID NO: 69

SEQ ID NO: 409 - protein, 728 aa, synthetic construct
  source 1..728: note = Description of Artificial Sequence: Synthetic polypeptide
MAADGYLPDWLEDNLSEGIREWWDLKPGAPKPKANQQKQDDGRGLVLPGYKYLGPFNGLDKGEPVNEADAAALEHDKAYDKQLEQGDNPYLKYNHADAEFQERLQEDTSFGGNLGRAVFQAKKRVLEPLGLVEEGAKTAPGKKRPIESPDSSTGIGRKGQQPAKKKLNFGQTGDSESVPDPQPIGEPPAGPSGLGSGTMAAGGGAPMADNNEGADGVGNASGNWHCDSTWLGDRVITTSTRTWALPTYNNHLYKQISSQSGATNDNHFFGYSTPWGYFDFNRFHCHFSPRDWQRLINNNWGFRPRKLRFKLFNIQVKEVTTNDGVTTIANNLTSTIQVFSDSEYQLPYVLGSAHQGCLPPFPADVFMIPQYGYLTLNNGSQSVGRSSFYCLEYFPSQMLRTGNNFEFSYTFEEVPFHSSYAHSQSLDRLMNPLIDQYLYYLARTQSTTGSTRELQFHQAGPNTMAEQSKNWLPGPCYRQQRLSKNIDSNNNSNFAWTGATKYHLNGRNSLTNPGVAMATNKDDEDQFFPINGVLVFGKTGAANKTTLENVLMTSEEEIKTTNPVATEEYGVVSSNLQSSTAGPQTQTVNSQGALPGMVWQNRDVYLQGPIWAKIPHTDGNFHPSPLMGGFGLKHPPPQILIKNTPVPANPPEVFTPAKFASFITQYSTGQVSVEIEWELQKENSKRWNPEIQYTSNYAKSNNVEFAVNNEGVYTEPRPIGTRYLTRNL

SEQ ID NO: 410 - DNA, 2489 bp, Adeno-associated virus
  source 1..2489: mol_type = unassigned DNA
gaattcgccctttctacggctgcgtcaactggaccaatgagaactttcccttcaacgattgcgtcgacaagatggtgatctggtgggaggagggcaagatgacggccaaggtcgtgaagtccgccaaggccattcatcatctgctggggcgggctcccgagattgcttgctcggcctgcgatctggtcaacgtggacctggatgactgtgtttctgagcaataaatgacttaaaccaggtatggctgccgatggttatcttccagattggctcgaggacaacctctctgagggcattcgcgagtggtgggacttgaaacctggagccccgaaacccaaagccaaccagcaaaagcaggacgacggccggggtctggtgcttcctggctacaagtacctcggacccttcaacggactcgacaagggagagccggtcaacgaggcagacgccgcggccctcgagcacgacaaggcctacgacaagcagctcgagcagggggacaacccgtacctcaagtacaaccacgccgacgccgagtttcaggagcgtcttcaagaagatacgtcttttgggggcaacctcgggcgagcagtcttccaggccaagaagcgggttctcgaacctctcggtctggttgaggaaggcgctaagacggctcctggaaagaagagacccatagaatcccccgactcctccacgggcatcggcaggaaaggccagcagcccgctaaaaagaagctcaactttgggcagactggcgactcagagtcagtgcccgaccctcaaccaatcggagaaccccccgcaggcccctctggtctgggatctggtacaatggctgcaggcggtggcgctccaatggcagacaataacgaaggcgccgacggagtgggtaatgcctccggaaattggcattgcgattccacatggctgggcgacagagtcatcaccaccagcacccgcacctgggccctgcccacctacaacaaccacctctacaagcagatatcaagtcagagcggggctaccaacgacaaccacttcttcggctacagcaccccctggggctattttgacttcaacagattccactgccacttctcaccacgtgactggcagcgactcatcaacaacaactggggattccggcccagaaagctgcggttcaagttgttcaacatccaggtcaaggaggtcacgacgaacgacggcgttacgaccatcgccaataaccttaccagcacgattcaggtcttctcggactcggagtaccaactgccgtacgtcctcggctctgcgcaccagggctgcctccctccgttccctgcggacgtgttcatgattcctcagtacggatatctgactctaaacaacggcagtcagtctgtgggacgttcctccttctactgcctggagtactttccttctcagatgctgagaacgggcaataactttgaattcagctacacctttgaggaagtgcctttccacagcagctatgcgcacagccagagcctggaccggctgatgaatcccctcatcgaccagtacctgtactacctggcccggacccagagcactacggggtccacaagggagctgcagttccatcaggctgggcccaacaccatggccgagcaatcaaagaactggctgcccggaccctgttatcggcagcagagactgtcaaaaaacatagacagcaacaacaacagtaactttgcctggaccggggccactaaataccatctgaatggtagaaattcattaaccaacccgggcgtagccatggccaccaacaaggacgacgaggaccagttctttcccatcaacggagtgctggtttttggcaaaacgggggctgccaacaagacaacgctggaaaacgtgctaatgaccagcgaggaggagatcaaaaccaccaatcccgtggctacagaagaatacggtgtggtctccagcaacctgcaatcgtctacggccggaccccagacacagactgtcaacagccagggggctctgcccggcatggtctggcagaaccgggacgtgtacctgcagggtcccatctgggccaaaattcctcacacggacggcaactttcacccgtctcccctgatgggcggatttggactcaaacacccgcctcctcaaattctcatcaaaaacaccccggtacctgctaatcctccagaggtgtttactcctgccaagtttgcctcatttatcacgcagtacagcaccggccaggtcagcgtggagatcgagtgggaactgcagaaagaaaacagcaaacgctggaatccagagattcagtacacctcaaattatgccaagtctaataatgtggaatttgctgtcaacaacgaaggggtttatactgagcctcgccccattggcacccgttacctcacccgtaacctgtaattgcctgttaatcaataaaccggttaattcgtttcagttgaactttggtcaagggcgaattc

SEQ ID NO: 411 - protein, 728 aa, synthetic construct
  source 1..728: note = Description of Artificial Sequence: Synthetic polypeptide
MAADGYLPDWLEDNLSEGIREWWDLKPGAPKPKANQQKQDDGRGLVLPGYKYLGPFNGLDKGEPVNAADAAALEHDKAYDQQLKAGDNPYLRYNHADAEFQERLQEDTSFGGNLGRAVFQAKKRVLEPLGLVEEGAKTAPGKKRPIESPDSSTGIGKKGQQPAKKKLNFGQTGDSESVPDPQPIGEPPAGPSGLGSGTMAAGGGAPMADNNEGADGVGNASGNWHCDSTWLGDRVITTSTRTWALPTYNNHLYKQISSQSGATNDNHFFGYSTPWGYFDFNRFHCHFSPRDWQRLINNNWGFRPRKLRFKLFNIQVKEVTTNDGVTTIANNLTSTIQVFSDSEYQLPYVLGSAHQGCLPPFPADVFMIPQYGYLTLNNGSQSVGRSSFYCLEYFPSQMLRTGNNFEFSYTFEEVPFHSSYAHSQSLDRLMNPLIDQYLYYLARTQSTTGSTRELQFHQAGPNTMAEQSKNWLPGPCYRRQRLSKDIDSNNNSNFAWTGATKYHLNGRNSLTNPGVAMATNKDDEDQFFPINGVLVFGKTGAANKTTLENVLMTSEEEIKTTNPVATEEYGVVSSNLQSSTAGPQTQTVNSQGALPGMVWQNRDVYLQGPIWAKIPHTDGNFHPSPLMGGFGLKHPPPQILIKNTPVPANPPEVFTPAKFASFITQYSTGQVSVEIEWELQKENSKRWNPEIQYTSNYAKSNNVEFAVNNEGVYTEPRPIGTRYLTRNL

SEQ ID NO: 412 - DNA, 3098 bp, Adeno-associated virus
  source 1..3098: mol_type = unassigned DNA
gaattcgccctttctacggctgcgtcaactggaccaatgagaactttcccttcaacgattgcgtcgacaagatggtgatctggtgggaggagggcaagatgacggccaaggtcgtggagtccgccaaggccattctcggcggcagcaaggtgcgcgtggaccaaaagtgcaagtcttccgcccagatcgatcccacccccgtgatcgtcacttccaacaccaacatgtgcgccgtgattgacgggaacagcaccaccttcgagcaccagcagccgttacaagaccggatgttcaaatttgaactcacccgccgtctggagcacgactttggcaaggtgacaaagcaggaagtcaaagagttcttccgctgggcgcaggatcacgtgaccgaggtggcgcatgagttctacgtcagaaagggtggagccaacaagagacccgcccccgatgacgcggataaaagcgagcccaagcgggcctgcccctcagtcgcggatccatcgacgtcagacgcggaaggagctccggtggactttgccgacaggtaccaaaacaaatgttctcgtcacgcgggcatgcttcagatgctgtttccctgcaagacatgcgagagaatgaatcagaatttcaacatttgcttcacgcacgggaccggagactgttcagaatgtttccccggcgtgtcagaatctcaaccggtcgtcagaaagaggacgtatcggaaactctgtgccattcatcatctgctggggcgggctcccgagattgcttgctcggcctgcgatctggtcaacgtggacctggatgactgtgtttctgagcaataaatgacttaaaccaggtatggctgccgatggttatcttccagattggctcgaggacaacctctctgagggcattcgcgagtggtgggacttgaaacctggagccccgaaacccaaagccaaccagcaaaagcaggacgacggccggggtctggtgcttcctggctacaagtacctcggacccttcaacggactcgacaagggagagccggtcaacgcggcggacgcagcggccctcgagcacgacaaggcctacgaccagcagctcaaagcgggtgacaatccgtacctgcggtataaccacgccgacgccgagtttcaggagcgtcttcaagaagatacgtcttttgggggcaacctcgggcgagcagtcttccaggccaagaagcgggttctcgaacctctcggtctggttgaggaaggcgctaagacggctcctggaaagaagagacccatagaatcccccgactcctccacgggcatcggcaagaaaggccagcagcccgctaaaaagaagctcaactttgggcagactggcgactcagagtcagtgcccgaccctcaaccaatcggagaaccccccgcaggcccctctggtctgggatctggtacaatggctgcaggcggtggcgctccaatggcagacaataacgaaggcgccgacggagtgggtaatgcctccggaaattggcattgcgattccacatggctgggcgacagagtcatcaccaccagcacccgcacctgggccctgcccacctacaacaaccacctctacaagcagatatcaagtcagagcggggctaccaacgacaaccacttcttcggctacagcaccccctggggctattttgacttcaacagattccactgccacttctcaccacgtgactggcagcgactcatcaacaacaactggggattccggcccagaaagctgcggttcaagttgttcaacatccaggtcaaggaggtcacgacgaacgacggcgttacgaccatcgctaataaccttaccagcacgattcaggtcttctcggactcggagtaccaactgccgtacgtcctcggctctgcgcaccagggctgcctccctccgttccctgcggacgtgttcatgattcctcagtacggatatctgactctaaacaacggcagtcagtctgtgggacgttcctccttctactgcctggagtactttccttctcagatgctgagaacgggcaataactttgaattcagctacacctttgaggaagtgcctttccacagcagctatgcgcacagccagagcctggaccggctgatgaatcccctcatcgaccagtacctgtactacctggcccggacccagagcactacggggtccacaagggagctgcagttccatcaggctgggcccaacaccatggccgagcaatcaaagaactggctgcccggaccctgttatcggcggcagagactgtcaaaagacatagacagcaacaacaacagtaactttgcctggaccggggccactaaataccatctgaatggtagaaattcattaaccaacccgggcgtagccatggccaccaacaaggacgacgaggaccagttctttcccatcaacggagtgctggtttttggcaaaacgggggctgccaacaagacaacgctggaaaacgtgctaatgaccagcgaggaggagatcaaaaccaccaatcccgtggctacagaagaatacggtgtggtctccagcaacctgcaatcgtctacggccggaccccagacacagactgtcaacagccagggggctctgcccggcatggtctggcagaaccgggacgtgtacctgcagggtcccatctgggccaaaattcctcacacggacggcaactttcacccgtctcccctgatgggcggatttggactcaaacacccgcctcctcaaattctcatcaaaaacaccccggtacctgctaatcctccagaggtgtttactcctgccaagtttgcctcatttatcacgcagtacagcaccggccaggtcagcgtggagatcgagtgggaactgcagaaagagaacagcaaacgctggaatccagagattcagtacacctcaaattatgccaagtctaataatgtggaatttgctgtcaacaacgaaggggtttatactgagcctcgccccattggcacccgttacctcacccgtaacctgtaattacttgttaatcaataaaccggttgattcgtttcagttgaactttggtctctgcgaagggcgaattc

SEQ ID NO: 413 - protein, 685 aa, synthetic construct
  source 1..685: note = Description of Artificial Sequence: Synthetic polypeptide
MAADGYLPDWLEDNLSEGIREWWDLKPGAPKPKANQQKQDDGRGLVLPGYKYLGPFNGLDKGEPVNEADAAALEHDKAYDKQLEQGDNPYLKYNHADAEFQERLQEDTSFGGNLGRAVFQAKKRVLEPLGLVEEGAKTAPGKKRPVEPSPQRSPDSSTGIGKTGQQPAKKRLNFGQTGDSESVPDPQPIGEPPAGPSGLGSGTMAAGGGAPMADNNEGADGVGSSSGNWHCDSTWLGDRVITTSTRTWALPTYNNHLYKQISNGTSGGSTNDNTYFGYSTPWGYFDFNRFHCHFSPRDWQRLINNNWGFRPKRLNFKLFNIQVKEVTQNEGTKTIANNLTSTIQVFTDSEYQLPYVLGSAHQGCLPPFPADVFMIPQYGYLTLNNGSQAVGRSSFYCLEYFPSQMLRTGNNFEFSYQFEDVPFHSSYAHSQSLDRLTNPLIDQYLYYLARTQSTTGSTRGLQFHQAGPNTMAEQSKNWLPGPCYRQQRLSKNIDSNNNSNFAWTGATKYHLNGRNSLTNPGVAMATNKDDEDQFFPINGVLVFGKTGAANKTTLENVLMTSEEEIKTTNPVATEEYGVVSSNLQSSTAGPQTQTVNSQGALPGMVWQNRDVYLQGPIWAKIPHTDGNFHPSPLMGGFGLKHPPPQILIKYTSNYYKSTNVDFAVNTEGTYSEPRPIGTRYLTRNL

SEQ ID NO: 414 - DNA, 2969 bp, Adeno-associated virus
  source 1..2969: mol_type = unassigned DNA
gaattcgccctttctacggctgcgtcaactggaccaatgagaactttcccttcaacgattgcgtcgacaagatggtgatctggtgggaggagggcaagatgacggccaaggtcgtggagtccgccaaggccattctcggcggcagcaaggtgcgcgtggaccaaaagtgcaagtcgtccgcccagatcgaccccacccccgtgatcgtcacctccaacaccaacatgtgcgccgtgattgacgggaacagcaccaccttcgagcaccagcagccgttacaagaccggatgttcaaatttgaactcacccgccgtctggagcacgactttggcaaggtgacaaagcaggaagtcaaagagttcttccgctgggcgcaggatcacgtgaccgaggtggcgcatgagttctacgtcagaaagggtggagccaacaagagacccgcccccgatgacgcggataaaagcgagcccaagcgggcctgcccctcagtcgcggatccatcgacgtcagacgcggaaggagctccggtggactttgccgacaggtaccaaaacaaatgttctcgtcacgcgggcatgcttcagatgctgtttccctgcaagacatgcgagagaatgaatcagaatttcaacatttgcttcacgcacgggaccagagactgttcagaatgtttccccggcgtgtcagaatctcaaccggtcgtcagaaagaggacgtatcggaaactctgtgccattcatcatctgctggggcgggctcccgagattgcttgctcggcctgcgatctggtcaacgtggacctggatgactgtgtttctgagcaataaatgacttaaaccaggtatggctgccgatggttatcttccagattggctcgaggacaacctctctgagggcatccgcgagtggtgggacttgaaacctggagccccgaaacccaaagccaaccagcaaaagcaggacgacggccggggtctggtgcttcctggctacaagtacctcggacccttcaacggactcgacaagggagagccggtcaacgaggcagacgccgcggccctcgagcacgacaaggcctacgacaagcagctcgagcagggggacaacccgtacctcaagtacaaccacgccgacgccgagtttcaggagcgtcttcaagaagatacgtcttttgggggcaacctcgggcgagcagtcttccaggccaagaagcgggttctcgaacctctcggtctggttgaggaaggcgctaagacggctcctggaaagaagagaccggtagagccatcaccccagcgttctccagactcctctacgggcatcggcaagacaggccagcagcccgcgaaaaagagactcaactttgggcagactggcgactcagagtcagtgcccgaccctcaaccaatcggagaaccccccgcaggcccctctggtctgggatctggtacaatggctgcaggcggtggcgctccaatggcagacaataacgaaggcgccgacggagtgggtagttcctcaggaaattggcattgcgattccacatggctgggcgacagagtcatcaccaccagcacccgaacctgggccctccccacctacaacaaccacctctacaagcaaatctccaacgggacatcgggaggaagcaccaacgacaacacctacttcggctacagcaccccctgggggtattttgactttaacagattccactgccacttctcaccacgtgactggcagcgactcatcaacaacaactggggattccggcccaagagactcaacttcaagctcttcaacatccaggtcaaggaggtcacgcagaatgaaggcaccaagaccatcgccaataaccttaccagcacgattcaggtctttacggactcggaataccagctcccgtacgtcctcggctctgcgcaccagggctgcctgcctccgttcccggcggacgtcttcatgattcctcagtacgggtacctgactctgaacaacggcagtcaggccgtgggccgttcctccttctactgcctggagtactttccttctcaaatgctgagaacgggcaacaactttgagttcagctaccagtttgaggacgtgccttttcacagcagctacgcgcacagccaaagcctggaccggctgacgaaccccctcatcgaccagtacctgtactacctggcccggacccagagcactacggggtccacaagggggctgcagttccatcaggctgggcccaacaccatggccgagcaatcaaagaactggctgcccggaccctgttatcggcagcagagactgtcaaaaaacatagacagcaacaacaacagtaactttgcctggaccggggccactaaataccatctgaatggtagaaattcattaaccaacccgggcgtagccatggccaccaacaaggacgacgaggaccagttctttcccatcaacggagtgctggtttttggcaaaacgggggctgccaacaagacaacgctggaaaacgtgctaatgaccagcgaggaggagatcaaaaccaccaatcccgtggctacagaagaatacggtgtggtctccagcaacctgcaatcgtctacggccggaccccagacacagactgtcaacagccagggggctctgcccggcatggtctggcagaaccgggacgtgtacctgcagggtcccatctgggccaaaattcctcacacggacggcaactttcacccgtctcccctgatgggcggatttggactcaaacacccgcctcctcaaattctcatcaagtatacttccaactactacaaatctacaaatgtggactttgctgtcaatactgagggtacttattcagagcctcgccccattggcacccgttacctcacccgtaacctgtaattgcctgttaatcaataaaccggttaattcgtttcagttgaactttggtctctgcgaagggcgaattc

SEQ ID NO: 415 - protein, 733 aa, synthetic construct
  source 1..733: note = Description of Artificial Sequence: Synthetic polypeptide
MAADGYLPDWLEDNLSEGIREWWDLKPGAPKPKANQQKQDDGRGLVLPGYKYLGPFNGLDKGEPVNAADAAALEHDKAYDQQLKAGDNPYLRYNHADAEFQERLQEDTSFGGNLGRAVFQAKKRVLEPLGLVEEGAKTAPGKKRPIESPDSSTGIGKKGQQPAKKKLNFGQTGDSESVPDPQPIGEPPAGPSGLGSGTMAAGGGAPMADNNEGADGVGSSSGNWHCDSTWLGDRVITTSTRTWALPTYNNHLYKQISNGTSGGSTNDNTYFGYSTPWGYFDFNRFHCHFSPRDWQRLINNNWGFRPKRLNFKLFNIQVKEVTQNEGTKTIANNLTSTIQVFTDSEYQLPYVLGSAHQGCLPPFPADVFMIPQYGYLTLNNGSQAVGRSSFYCLEYFPSQMLRTGNNFEFSYQFEDVPFHSSYAHSQSLDRLMNPLIDQYLYYLSRTQSTGGTAGTQQLLFSQAGPNNMSAQAKNWLPGPCYRQQRVSTTVSQNNNSNFAWTGATKYHLNGRDSLVNPGVAMATHKGDEERFFPSSGVLMFGKQGAGKDNVDYSSVMLTSEEEIKTTNPVATEQYGVVADNLQQQNAAPIVGAVNSQGALPGMVWQNRDVYLQGPIWAKIPHTDGNFHPSPLMGGFGLKHPPPQILIKNTPVPADPPTTFSQAKLASFITQYSTGQVSVEIEWELQKENSKRWNPEIQYTSNYYKSTNVDFAVNTEGTYSEPRPIGTRYLTRSL

SEQ ID NO: 416 - DNA, 3113 bp, Adeno-associated virus
  source 1..3113: mol_type = unassigned DNA
gaattcgccctttctacggctgcgtcaactggaccaatgagaactttcccttcaacgattgcgtcgacaagatggtgatctggtgggaggagggcaagatgacggccaaggtcgtggagtccgccaaggccattctcggcggcagcaaggtgcgcgtggaccaaaagtgcaagtcgtccgcccagatcgatcccacccccgtgatcgtcacttccaacaccaacatgtgcgccgtgattgacgggaacagcaccaccttcgagcaccagcagccgttacaagaccggatgttcaaatttgaactcacccgccgtctggagcatgactttggcaaggtgacaaagcaggaagtcaaagagttcttccgctgggcgcaggatcacgtgaccgaggtggcgcatgagttctacgtcagaaagggtggagccaacaagagacccgcccccgatgacgcggataaaagcgagcccaagcgggcctgcccctcagtcgcggatccatcgacgtcagacgcggaaggagctccggtggactttgccgacaggtaccaaaacaaatgttctcgtcacgcgggcatgcttcagatgctgtttccctgcaagacatgcgagagaatgaatcagaatttcaacatttgcttcacgcacgggaccagagactgttcagaatgtttccccggcgtgtcagaatctcaaccggtcgtcagaaagaggacgtatcggaaactctgtgccattcatcatctgctggggcgggctcccgagattgcttgctcggcctgcgatctggtcaacgtggacctggatgactgtgtttctgagcaataaatgacttaaaccaggtatggctgccgatggttatcttccagattggctcgaggacaacctctctgagggcattcgcgagtggtgggacttgaaacctggagccccgaaacccaaagccaaccagcaaaagcaggacgacggccggggtctggtgcttcctggctacaagtacctcggacccttcaacggactcgacaagggggagcccgtcaacgcggcggacgcagcggccctcgagcacgacaaggcctacgaccagcagctcaaagcgggtgacaatccgtacctgcggtataaccacgccgacgccgagtttcaggagcgtcttcaagaagatacgtcttttgggggcaacctcgggcgagcagtcttccaggccaagaagcgggttctcgaacctctcggtctggttgaggaaggcgctaagacggctcctggaaagaagagacccatagaatcccccgactcctccacgggcatcggcaagaaaggccagcagcccgctaaaaagaagctcaactttgggcagactggcgactcagagtcagtgcccgaccctcaaccaatcggagaaccccccgcaggcccctctggtctgggatctggtacaatggctgcaggcggtggcgctccaatggcagacaataacgaaggcgccgacggagtgggtagttcctcaggaaattggcattgcgattccacatggctgggcgacagagtcatcaccaccagcacccgaacctgggccctccccacctacaacaaccacctctacaagcaaatctccaacgggacatcgggaggaagcaccaacgacaacacctacttcggctacagcaccccctgggggtattttgactttaacagattccactgccacttctcaccacgtgactggcagcgactcatcaacaacaactggggattccggcccaagagactcaacttcaagctcttcaacatccaggtcaaggaggtcacgcagaatgaaggcaccaagaccatcgccaataaccttaccagcacgattcaggtctttacggactcggaataccagctcccgtacgtcctcggctctgcgcaccagggctgcctgcctccgttcccggcggacgtcttcatgattcctcagtacgggtacctgactctgaacaacggcagtcaggccgtgggccgttcctccttctactgcctggagtactttccttctcaaatgctgagaacgggcaacaactttgagttcagctaccagtttgaggacgtgccttttcacagcagctatgcgcacagccaaagcctggaccggctgatgaaccccctcatcgaccagtacctgtactacctgtctcggactcagtccacgggaggtaccgcaggaactcagcagttgctattttctcaggccgggcctaataacatgtcggctcaggccaaaaactggctacccgggccctgctaccggcagcaacgcgtctccacgacagtgtcgcaaaataacaacagcaactttgcttggaccggtgccaccaagtatcatctgaatggcagagactctctggtaaatcccggtgtcgctatggcaacgcacaagggcgacgaagagcgattttttccatccagcggagtcttgatgtttgggaaacagggagctggaaaagacaacgtggactatagcagcgttatgctaaccagtgaggaagaaatcaaaaccaccaacccagtggccacagaacagtacggcgtggtggccgataacctgcaacagcaaaacgccgctcctattgtaggggccgtcaacagtcaaggagccttacctggcatggtctggcagaaccgggacgtgtacctgcagggtcctatctgggccaagattcctcacacggacggcaactttcatccttcgccgctgatgggaggctttggactgaaacacccgcctcctcagatcctgattaagaatacacctgttcccgcggatcctccaactaccttcagtcaagccaagctggcgtcgttcatcacgcagtacagcaccggacaggtcagcgtggaaattgaatgggagctgcagaaagagaacagcaagcgctggaacccagagattcagtatacttccaactactacaaatctacaaatgtggactttgctgtcaatactgagggtacttattcagagcctcgccccattggcacccgttacctcacccgtagcctgtaattgcctgttaatcaataaaccggttgattcgtttcagttgaactttggtctctgcgaagggcgaattc

SEQ ID NO: 417 - protein, 738 aa, synthetic construct
  source 1..738: note = Description of Artificial Sequence: Synthetic polypeptide
MAADGYLPDWLEDNLSEGIREWWDLKPGAPKPKANQQKQDDGRGLVLPGYKYLGPFNGLDKGEPVNAADAAALEHDKAYDQQLKAGDNPYLRYNHADAEFQERLQEDTSFGGNLGRAVFQAKKRVLEPLGLVEEGAKTAPGKKRPVEPSPQRSPDSSTGIGKTGQQPAKKRLNFGQTGDSESVPDPQPIGEPPAGPSGLGSGTMAAGGGAPMADNNEGADGVGSSSGNWHCDSTWLGDRVITTSTRTWALPTYNNHLYKQISNGTSGGSTNDNTYFGYSTPWGYFDFNRFHCHFSPRDWQRLINNNWGFRPKRLNFKLFNIQVKEVTQNEGTKTIANNLTSTIQVFTDSEYQLPYVLGSAHQGCPPPFPADVFMIPQYGYLTLNNGSQAVGRSSFYCLEYFPSQMRRTGNNFEFSYQFEDVPFHSSYAHSQSLDRLMNPLIDQYLYYLSRTQSTGGTAGTQQLLFSQAGPNNMSAQAKNWLPGPCYRQQRVSTTLSQNNNSNFAWTGATKYHLNGRDSLVNPGVAMATHKDDEERFFPSSGVLMFGKQGAGKDNVDYSSVMLTSEEEIKTTNPVATEQYGVVADNLQQQNAAPIVGAVNSQGALPGMVWQNRDVYLQGPIWAKIPHTDGNFHPSPLMGGFGLKHPPPQILIKNTPVPADPPTTFSQAKLASFITQYSTGQVSVEIEWELQKENSKRWNPEIQYTSNYYKSTNVDFAVNTEGTYSEPRPIGTRYLTRNL

SEQ ID NO: 418 - DNA, 3128 bp, Adeno-associated virus
  source 1..3128: mol_type = unassigned DNA
gaattcgccctttctacggctgcgtcaactggaccaatgagaactttcccttcaacgattgcgtcgacaagatggtgatctggtgggaggagggcaagatgacggccaaggtcgtggagtccgccaaggccattctcggcggcagcaaggtgcgcgtggaccaaaagtgcaagtcgtccgcccagatcgaccccacccccgtgatcgtcacctccaacaccaacatgtgcgccgtgattgacgggaacagcaccaccttcgagcaccagcagccgttgcaggaccggatgttcaaatttgaactcacccgccgtctggagcatgactttggcaaggtgacaaagcaggaagtcaaagagttcttccgctgggcgcaggatcacgtgaccgaggtggcgcatgagttctacgtcagaaagggtggagccaacaagagacccgcccccgatgacgcggataaaagcgagcccaagcgggcctgcccctcagtcgcggatccatcgacgtcagacgcggaaggagctccggtggactttgccgacaggtaccaaaacaaatgttctcgtcacgcgggcatgcttcagatgctgtttccctgcaagacatgcgagagaatgaatcagaatttcaacatttgcttcacgcgcgggaccagagactgttcagaatgtttcccgggcgtgtcagaatctcaaccggtcgtcagaaagaggacgtatcggaaactctgtgccattcatcatctgctggggcgggctcccgagattgcttgctcggcctgcgatctggtcaacgtggacctggatgactgtgtttctgagcaataaatgacttaaaccaggtatggctgccgatggttatcttccagattggctcgaggacaacctctctgagggcattcgcgagtggtgggacttgaaacctggagccccgaaacccaaagccaaccagcaaaagcaggacgacggccggggtctggtgcttcctggctacaagtacctcggacccttcaacggactcgacaagggggagcccgtcaacgcggcggacgcagcggccctcgagcacgacaaggcctacgaccagcagctcaaagcgggtgacaatccgtacctgcggtataaccacgccgacgccgagtttcaggagcgtctgcaagaagatacgtcttttgggggcaacctcgggcgagcagtcttccaggccaagaagcgggttctcgaacctctcggtctggttgaggaaggcgctaagacggctcctggaaagaagagaccggtagagccatcaccccagcgttctccagactcctctacgggcatcggcaagacaggccagcagcccgcgaaaaagagactcaactttgggcagactggcgactcagagtcagtgcccgaccctcaaccaatcggagaaccccccgcaggcccctctggtctgggatctggtacaatggctgcaggcggtggcgctccaatggcagacaataacgaaggcgccgacggagtgggtagttcctcaggaaattggcattgcgattccacatggctgggcgacagagtcatcaccaccagcacccgaacctgggccctccccacctacaacaaccacctctacaagcaaatctccaacgggacatcgggaggaagcaccaacgacaacacctacttcggctacagcaccccctgggggtattttgactttaacagattccactgccacttctcaccacgtgactggcagcgactcatcaacaacaactggggattccggcccaagagactcaacttcaagctcttcaacatccaggtcaaggaggtcacgcagaatgaaggcaccaagaccatcgccaataaccttaccagcacgattcaggtctttacggactcggaataccagctcccgtacgtcctcggctctgcgcaccagggctgcccgcctccgttcccggcggacgtcttcatgattcctcagtacgggtacctgactctgaacaacggcagtcaggccgtgggccgttcctccttctactgcctggagtactttccttctcaaatgcggagaacgggcaacaactttgagttcagctaccagtttgaggacgtgccttttcacagcagctacgcgcatagccaaagcctggaccggctgatgaaccccctcatcgaccagtacctgtactacctgtctcggactcagtccacgggaggtaccgcaggaactcagcagttgctattttctcaggccgggcctaataacatgtcggctcaggccaaaaactggctacccgggccctgctaccggcagcaacgcgtctccacgacactgtcgcaaaataacaacagcaactttgcttggaccggtgccaccaagtatcatctgaatggcagagactctctggtaaatcccggtgtcgctatggcaacgcacaaggacgacgaagagcgattttttccatccagcggagtcttgatgtttgggaaacagggagctggaaaagacaacgtggactatagcagcgttatgctaaccagtgaggaagaaatcaaaaccaccaacccagtggccacagaacagtacggcgtggtggccgataacctgcaacagcaaaacgccgctcctattgtaggggccgtcaacagtcaaggagccttacctggcatggtctggcagaaccgggacgtgtacctgcagggtcctatctgggccaagattcctcacacggacggcaactttcatccttcgccgctgatgggaggctttggactgaaacacccgcctcctcagatcctgattaagaatacacctgttcccgcggatcctccaactaccttcagtcaagccaagctggcgtcgttcatcacgcagtacagcaccggacaggtcagcgtggaaattgaatgggagctgcagaaagagaacagcaagcgctggaacccagagattcagtatacttccaactactacaaatctacaaatgtggactttgctgtcaatactgagggtacttattcagagcctcgccccattggcacccgttacctcacccgtaacctgtaattgcctgttaatcaataaaccggttaattcgtttcagttgaactttggtctctgcgaagggcgaattc

SEQ ID NO: 419 - protein, 738 aa, Adeno-associated virus; identical to SEQ ID NO: 407

SEQ ID NO: 420 - DNA, 1933 bp, Adeno-associated virus
  source 1..1933: mol_type = unassigned DNA
  misc_difference 1302: note = misc_feature - n is a, c, t, or g
caaggcctacgaccagcagctcaaagcgggtgacaatccgtacctgcggtataaccacgccgacgccgagtttcaggagcgtcttcaagaagatacgtcttttgggggcaacctcgggcgagcagtcttccaggccaaaaagcgggttctcgaacctcttggtctggttgagacgccagctaagacggcacctggaaagaagcgaccggtagactcgccagactccacctcgggcatcggcaagaaaggccagcagcccgcgaaaaagagactcaactttgggcagactggcgactcagagtcagtccccgaccctcaaccaatcggagaaccaccagcaggcccctctggtctgggatctggtacaatggctgcaggcggtggcgcaccaatggctgacaataacgagggcgccgacggagtgggtaatgcctcaggaaattggcattgcgattccacatggctgggcgacagagtcatcaccaccagcacccgaacctgggccctgcccacctacaacaaccacctctacaagcaaatctccagtcagtcagcagggagcaccaacgataacgtctatttcggctacagcaccccctgggggtattttgacttcaacagattccattgccacttctcaccacgtgactggcagcgacttatcaacaacaactggggattccggcccaagaagctcaacttcaagctcttcaacatccaggtcaaggaggtcacgacgaatgacggtgtcacaaccatcgctaataaccttaccagcacggttcaggtcttttcggactcggaatatcaactgccgtacgtcctcggctccgcgcaccagggctgcctgcctccgttcccggcagacgtgttcatgattccgcagtacggatacctgactctgaacaatggcagccaatcggtaggccgttcctccttctactgcctggagtactttccttctcagatgctgagaacgggcaacaacttcacctttagctacaccttcgaggacgtgcctttccacagcagctacgcgcacagccagagtctggaccggctgatgaatcccctcatcgaccagtacctgtactacttggccagaacacagagcaacgcaggaggtactgctggcaatcgggaactgcagttttatcagggcggacctaccaccatggccgaacaagcaaagaactggctgcccggaccttgcttccggcaacagagagtatccaagacgctggatcaaaataacaacagcaactttgcctggactggtgccacaaaataccatttaaatgnaagaaattcattggttaatcccggtgtcgccatggcaacccacaaggacgacgaggaacgcttcttcccttcgagcggagttctaatttttggcaaaactggagcagctaataaaactacattagaaaacgtgctcatgacaaatgaagaagaaattcgtcctaccaacccggtagctaccgaggaatacgggattgtaagcagcaacttgcaggcggctagcaccgcagcccagacacaagttgttaacaaccagggagccttacctggcatggtctggcagaaccgggacgtgtacctgcaaggtcccatttgggccaagattcctcacacggacggcaactttcacccgtctcctctaatgggtggctttggactgaaacacccgcctccccagatcctgatcaaaaacacaccggtacctgctaatcctccagaagtgtttactcctgccaagtttgcttccttcatcacgcagtacagcaccgggcaagtcagcgttgagatcgagtgggagctgcagaaagagaacagcaagcgctggaacccagagattcagtacacctccaactttgacaaacagactggagtggactttgctgttgacagccagggtgtttactctgagcct

SEQ ID NO: 421 - protein, 733 aa, synthetic construct
  source 1..733: note = Description of Artificial Sequence: Synthetic polypeptide
MAADGYLPDWLEDNLSEGIREWWDLKPGAPKPKANQQKQDDGRGLVLPGYKYLGPFNGLDKGEPVNAADAAALEHDKAYDQQLKAGDNPYLRYNHADAEFQERLQEDTSFGGNLGRAVFQAKKRVLEPLGLVEEGAKTAPGKKRPLESPQEPDSSSGIGKKGKQPAKKRLNFEEDTGAGDGPPEGSDTSAMSSDIEMRAAPGGNAVDAGQGSDGVGNASGDWHCDSTWSEGKVTTTSTRTWVLPTYNNHLYLRLGTTSNSNTYNGFSTPWGYFDFNRFHCHFSPRDWQRLINNNWGLRPKAMRVKIFNIQVKEVTTSNGETTVANNLTSTVQIFADSSYELPYVMDAGQEGSLSPFPNDVFMVPQYGYCGIVTGENQNQTDRNAFYCLEYFPSQMLRTGNNFEMAYNFGKVPFHSMYAYSQSPDRLMNPLLDQYLWHLQSTTSGETLNQGNAATTFGKIRSGDFAFYRKNWLPGPCVKQQRLSKTASQNYKIPASGGNALLKYDTHYTLNNRWSNIAPGPPMATAGPSDGDFSNAQLIFPGPSVTGNTTTSANNLLFTSEEEIAATNPRDTDMFGQIADNNQNATTAPITGNVTAMGVLPGMVWQNRDIYYQGPIWAKIPHADGHFHPSPLIGGFGLKHPPPQIFIKNTPVPANPATTFTAARVDSFITQYSTGQVAVQIEWEIEKERSKRWNPEVQFTSNYGNQSSMLWAPDTTGKYTEPRVIGSRYLTNHL

SEQ ID NO: 422 - DNA, 3105 bp, Adeno-associated virus
  source 1..3105: mol_type = unassigned DNA
gaattcgcccttgctgcgtcaactggaccaatgagaactttcccttcaacgattgcgtcgacaagatggtgatctggtgggaggagggcaagatgaccgccaaggtcgtggagtccgccaaggccattctgggcggaagcaaggtgcgcgtggaccaaaagtgcaagtcatcggcccagatcgaccccacgcccgtgatcgtcacctccaacaccaacatgtgcgccgtgatcgacgggaacagcaccaccttcgagcaccagcagccgctgcaggaccgcatgttcaagttcgagctcacccgccgtctggagcacgactttggcaaggtgaccaagcaggaagtcaaagagttcttccgctgggctcaggatcacgtgactgaggtggcgcatgagttctacgtcagaaagggcggagccaccaaaagacccgcccccagtgacgcggatataagcgagcccaagcgggcctgcccctcagttgcggagccatcgacgtcagacgcggaagcaccggtggactttgcggacaggtaccaaaacaaatgttctcgtcacgcgggcatgcttcagatgctgtttccctgcaagacatgcgagagaatgaatcagaatttcaacgtctgcttcacgcacggggtcagagactgctcagagtgcttccccggcgcgtcagaatctcaacccgtcgtcagaaaaaagacgtatcagaaactgtgcgcgattcatcatctgctggggcgggcacccgagattgcgtgttcggcccgcgatctcgtcaacgtggacttggatgactgtgtttctgagcaataaatgacttaaaccaggtatggctgctgacggttatcttccagattggctcgaggacaacctctctgagggcattcgcgagtggtgggacctgaaacctggagcccccaagcccaaggccaaccagcagaagcaggacgacggccggggtctggtgcttcctggctacaagtacctcggacccttcaacggactcgacaagggggagcccgtcaacgcggcggacgcagcggccctcgagcacgacaaggcctacgaccagcagctcaaagcgggtgacaatccgtacctgcggtataaccacgccgacgccgagtttcaggagcgtctgcaagaagatacgtcttttgggggcaacctcgggcgagcagtcttccaggccaagaagagggtactcgaacctctgggcctggttgaagaaggtgctaagacggctcctggaaagaagagaccgttagagtcaccacaagagcccgactcctcctcaggaatcggcaaaaaaggcaaacaaccagccaaaaagagactcaactttgaagaggacactggagccggagacggaccccctgaaggatcagataccagcgccatgtcttcagacattgaaatgcgtgcagcaccgggcggaaatgctgtcgatgcgggacaaggttccgatggagtgggtaatgcctcgggtgattggcattgcgattccacctggtctgagggcaaggtcacaacaacctcgaccagaacctgggtcttgcccacctacaacaaccacttgtacctgcggctcggaacaacatcaaacagcaacacctacaacggattctccaccccctggggatactttgactttaacagattccactgtcacttctcaccacgtgactggcaaagactcatcaacaacaactggggactacgaccaaaagccatgcgcgttaaaatcttcaatatccaagttaaggaggtcacaacgtcgaacggcgagactacggtcgctaataaccttaccagcacggttcagatatttgcggactcgtcgtatgagctcccgtacgtgatggacgctggacaagagggaagtctgtctcctttccccaatgacgtcttcatggtgcctcaatatggctactgtggcattgtgactggcgaaaatcagaaccagacggacagaaatgctttctactgcctggagtattttccttcacaaatgctgagaactggcaataactttgaaatggcttacaactttgggaaggtgccgttccactcaatgtatgcttacagccagagcccggacagactgatgaatcccctcctggaccagtacctgtggcacttacagtcgaccacctctggagagactctgaatcaaggcaatgcagcaaccacatttggaaaaatcaggagtggagactttgccttttacagaaagaactggctgcctgggccttgtgttaaacagcagagactctcaaaaactgccagtcaaaattacaagattcctgccagcgggggcaacgctctgttaaagtatgacacccactataccttaaacaaccgctggagcaacatagcgcctggacctccaatggcaacagctggaccttcagatggggacttcagcaacgcccagctcatcttccctggaccatcagtcaccggaaacacaacaacctcagcaaacaatctgttgtttacatcagaagaagaaattgctgccaccaacccaagagacacggacatgtttggtcagattgctgacaataatcagaatgctacaactgctcccataaccggcaacgtgactgctatgggagtgcttcctggcatggtgtggcaaaacagagacatttactaccaagggccaatttgggccaagatcccacacgcggacggacattttcatccttcaccgctaattggcggttttggactgaaacatccgcctccccagatatttatcaaaaacacccccgtacctgccaatcctgcgacaaccttcactgcagccagagtggactctttcatcacacaatacagcaccggccaggtcgctgttcagattgaatgggaaatcgaaaaggaacgctccaaacgctggaatcctgaagtgcagtttacttcaaactatgggaaccagtcttctatgttgtgggctcccgatacaactgggaagtatacagagccgcgggttattggctctcgttatttgactaatcatttgtaactgcctagttaatcaataaaccgtgtgattcgtttcagttgaactttggtctctgcgaagggcgaattc

SEQ ID NO: 423 - protein, 733 aa, Adeno-associated virus
MAADGYLPDWLEDNLSEGIREWWDLKPGAPKPKANQQKQDDGRGLVLPGYKYLGPFNGLDKGEPVNAADAAALEHDKAYDQQLKAGDNPYLRYNHADAEFQERLQEDTSFGGNLGRAVFQAKKRVLEPLGLVEEGAKTAPGKKRPLESPQEPDSSSGIGKKGKQPAKKRLNFEEDTGAGDGPPEGSDTSAMSSDIEMRAAPGGNAVDAGQGSDGVGNASGDWHCDSTWSEGKVTTTSTRTWVLPTYNNHLYLRLGTTSNSNTYNGFSTPWGYFDFNRFHCHFSPRDWQRLINNNWGLRPKAMRVKIFNIQVKEVTTSNGETTVANNLTSTVQIFADSSYELPYVMDAGQEGSLPPFPNDVFMVPQYGYCGIVTGENQNQTDRNAFYCLEYFPSQMLRTGNNFEMAYNFEKVPFHSMYAHSQSLDRLMNPLLDQYLWHLQSTTSGETLNQGNAATTFGKIRSGDFAFYRKNWLPGPCVKQQRFSKTASQNYKIPASGGNALLKYDTHYTLNNRWSNIAPGPPMATAGPSDGDFSNAQLIFPGPSVTGNTTTSANNLLFTSEEEIAATNPRDTDMFGQIADNNQNATTAPITGNVTAMGVLPGMVWQNRDIYYQGPIWAKIPHADGHFHPSPLIGGFGLKHPPPQIFIKNTPVPANPATTFTAARVDSFITQYSTGQVAVQIEWEIEKERSKRWNPEVQFTSNYGNQSSMLWAPDTTGKYTEPRVIGSRYLTNHL

SEQ ID NO: 424 - DNA, 3105 bp, Adeno-associated virus
  source 1..3105: mol_type = unassigned DNA
gaattcgcccttgctgcgtcaactggaccaatgagaactttcccttcaacgattgcgtcgacaagatggtgatctggtgggaggagggcaagatgaccgccaaggtcgtggagtccgccaaggccattctgggcggaagcaaggtgcgcgtggaccaaaagtgcaagtcatcggcccagatcgaccccacgcccgtgatcgtcacctccaacaccaacatgtgcgccgtgatcgacgggaacagcaccaccttcgagcaccagcagccgctgcaggaccgcatgttcaagttcgagctcacccgccgtctggagcacgactttggcaaggtgaccaagcaggaagtcaaagagttcttccgctgggctcaggatcacgtgactgaggtggcgcatgagttctacgtcagaaagggcggagccaccaaaagacccgcccccagtgacgcggatataagcgagcccaagcgggcctgcccctcagttgcggagccatcgacgtcagacgcggaagcaccggtggactttgcggacaggtaccaaaacaaatgttctcgtcacgcgggcatgcttcagatgctgtttccctgcaagacatgcgagagaatgaatcagaatttcaacgtctgcttcacgcacggggtcagagactgctcagagtgcttccccggcgcgtcagaatctcaacccgtcgtcagaaaaaagacgtatcagaaactgtgcgcgattcatcatctgctggggcgggcacccgagattgcgtgttcggcctgcgatctcgtcaacgtggacttggatgactgtgtttctgagcaataaatgacttaaaccaggtatggctgctgacggttatcttccagattggctcgaggacaacctctctgagggcattcgcgagtggtgggacctgaaacctggagcccccaagctcaaggccaaccagcagaagcaggacgacggccggggtctggtgcttcctggctacaagtacctcggacccttccacggactcgacaagggggagcccgtcaacgcggcggacgcagcggccctcgagcacgacaaggcctacgaccagcagctcaaagcgggtgacaatccgtacctgcggtataaccacgccgacgccgagtttcaggagcgtctgcaagaagatacgtcttttgggggcaacctcgggcgagcagtcttccaggccaagaagagggtactcgaaccactgggcctggttgaagaaggtgctaagacggctcctggaaagaagagaccgttagagtcaccacaagagcccgactcctcctcaggaatcggcaaaaaaggcaaacaaccagccaaaaagagactcaactttgaagaggacactggagccggagacggaccccctgaaggatcagataccagcgccatgtcttcagacattgaaatgcgtgcagcaccgggcggaaatgctgtcgatgcgggacaaggttccgatggagtgggtaatgcctcgggtgattggcattgcgattccacctggtctgagggcaaggtcacaacaacctcgaccagaacctgggtcttgcccacctacaacaaccacttgtacctgcggctcggaacaacatcaaacagcaacacctacaacggattctccaccccctggggatactttgactttaacagattccactgtcacttctcaccacgtgactggcaaagactcatcaacaacaactggggactacgaccaaaagccatgcgcgttaaaatcttcaatatccaagttaaggaggtcacaacgtcgaacggcgagactacggtcgctaataaccttaccagcacggttcagatatttgcggactcgtcgtatgagctcccgtacgtgatggacgctggacaagagggaagtctgcctcctttccccaatgacgtcttcatggtgcctcaatatggctactgtggcattgtgactggcgaaaatcagaaccagacggacagaaatgctttctactgcctggagtattttccttcacaaatgctgagaactggcaataactttgaaatggcttacaactttgagaaggtgccgttccactcaatgtatgctcacagccagagcctggacagactgatgaatcccctcctggaccagtacctgtggcacttacagtcgaccacctctggagagactctgaatcaaggcaatgcagcaaccacatttggaaaaatcaggagtggagactttgccttttacagaaagaactggctgcctgggccttgtgttaaacagcagagattctcaaaaactgccagtcaaaattacaagattcctgccagcgggggcaacgctctgttaaagtatgacacccactataccttaaacaaccgctggagcaacatagcgcctggacctccaatggcaacagctggaccttcagatggggacttcagcaacgcccagctcatcttccctggaccatcagtcaccggaaacacaacaacctcagcaaacaatctgttgtttacatcagaaggagaaattgctgccaccaacccaagagacacggacatgtttggtcagattgctgacaataatcagaatgctacaactgctcccataaccggcaacgtgactgctatgggagtgcttcctggcatggtgtggcaaaacagagacatttactaccaagggccaatttgggccaagatcccacacgcggacggacattttcatccttcaccgctaattggcggttttggactgaaacatccgcctccccagatatttatcaaaaacacccccgtacctgccaatcctgcgacaaccttcactgcagccagagtggactctttcatcacacaatacagcaccggccaggtcgctgttcagattgaatgggaaatcgaaaaggaacgctccaaacgccggaatcctgaagtgcagtttacttcaaactatgggaaccagtcttctatgttgtgggctcccgatacaactgggaagtatacagagccgcgggttattggctctcgttatttgactaatcatttgtaactgcctagttaatcaataaaccgtgtgattcgtttcagttgaactttggtctctgcgaagggcgaattc

SEQ ID NO: 425 - protein, 733 aa, synthetic construct
  source 1..733: note = Description of Artificial Sequence: Synthetic polypeptide
MAADGYLPDWLEDNLSEGIREWWDLKPGAPKPKANQQKQDDGRGLVLPGYEYLGPFNGLDKGEPVNAADAAALEHDKAYDQQLKAGDNPYLRYNHADAEFQERLQEDTSFGGNLGRAVFQAKKRVLEPLGLVEEGAKTAPGKKRPLESPQEPDSSSGIGKKGKQPAKKRLNFEEDTGAGDGPPEGSDTSAMSSDIEMRAAPGGNAVDAGQGSDGVGNASGDWHCDSTWSEGKVTTTSTRTWVLPTYNNHLYLRLGTTSNSNTYNGFSTPWGYFDFNRFHCHFSPRDWQRLINNNWGLRPKAMRVKIFNIQVKEVTTSNGETTVANNLTSTVQIFADSSYELPYVMDAGQEGSLPPFPNDVFMVPQYGYCGIVTGENQNQTDRNAFYCLEYFPSQMLRTGNNFETAYNFEKVPFHSMYAHSQSLDGLMNPLLDQYLWHLQSTTSGETLNQGNAATTFGKIRSGDFAFYRKNWLPGPCVKQQRFSKTASQNYKIPASGGNALLKYDTHYTLNNRWSNIAPGPPMATAGPSDGDFSNAQLIFPGPSVTGNTTTSANNLLFTSEEEIAATNPRDTDMFGQIADNNQNATTAPITGNVTAMGVLPGMVWQNRDIYYQGPIWAKIPHADGHFHPSPLIGGFGLKHPPPQIFIKNTPVPAYPATTFTAARVDSFITQYSTGQVAVQIEWEIEKERSKRWNPEVQFTSNCGNQSSMLWAPDTTGKYTEPRVIGSRYLTNHL

SEQ ID NO: 426 - DNA, 3105 bp, Adeno-associated virus
  source 1..3105: mol_type = unassigned DNA
gaattcgcccttcgcagagaccaaagttcaactgaaacgaatcacacggtttattgattaactaggcagttacaaatgattagtcaaataacgagagccaataacccgcggctctgtatacttcccagttgtatcgggagcccacaacatagaagactggttcccacagtttgaagtaaactgcacttcaggattccagcgtttggagcgttccttttcgatttcccattcaatctgaacagcgacctggccggtgctgtattgtgtgatgaaagagtccactctggctgcagtgaaggttgtcgcaggataggcaggtacgggggtgtttttgataaatatctggggaggcggatgtttcagtccaaaaccgccaattagcggtgaaggatgaaaatgtccgtccgcgtgtgggatcttggcccaaattggcccttggtagtaaatgtctctgttttgccacaccatgccaggaagcactcccatagcagtcacgttgccggttatgggagcagttgtagcattctgattattgtcagcaatctgaccaaacatgtccgtgtctcttgggttggtggcagcaatttcttcttctgatgtaaacaacagattgtttgctgaggttgttgtgtttccggtgactgatggtccagggaagatgagctgggcgttgctgaagtccccatctgaaggtccagctgttgccattggaggtccaggcgctatgttgctccagcggttgtttaaggtatagtgggtgtcatactttaacagagcgttgcccccgctggcaggaatcttgtaattttgactggcagtttttgagaatctctgctgtttaacacaaggcccaggcagccagttctttctgtaaaaggcaaagtctccactcctgatttttccaaatgtggttgctgcattgccttgattcagagtctctccagaggtggtcgactgtaagtgccacaggtactggtccaggaggggattcatcagtccgtccaggctctggctgtgagcatacattgagtggaacggcaccttctcaaagttgtaagccgtttcaaagttattgccagttctcagcatttgtgaaggaaaatactccaggcagtagaaagcatttctgtccgtctggttctgattttcgccagtcacaatgccacagtagccatattgaggcaccatgaagacgtcattggggaaaggaggcagacttccctcttgtccagcgtccatcacgtacgggagctcatacgacgagtccgcaaatatctgaaccgtgctggtaaggttattagcgaccgtagtctcgccgttcgacgttgtgacctccttaacttggatattgaagattttaacgcgcatggcttttggtcgtagtccccagttgttgttgatgagtctttgccagtcacgtggtgagaagtgacagtggaatctgttaaagtcaaagtatccccagggggtggagaatccgttgtaggtgttgctgtttgatgttgttccgagccgcaggtacaagtggttgttgtaggtgggcaagacccaggttctggtcgaggttgttgtgaccttgccctcagaccaggtggaatcgcaatgccaatcacccgaggcattacccactccatcggaaccttgtcccgcatcgacagcatttccgcccggtgctgcacgcatttcaatgtctgaagacatggcgctggtatctgatccttcagggggtccgtctccggctccagtgtcctcttcaaagttgagtctctttttggctggttgtttgccttttttgccgattcctgaggaggagtcgggctcttgtggtgactctaacggtctcttctttccaggagccgtcttagcaccttcttcaaccaggcccagaggttcgagtaccctcttcttggcctggaagactgctcgcccgaggttgcccccaaaagacgtatcttcttgcagacgctcctgaaactcggcgtcggcgtggttataccgcaggtacggattgtcacccgctttgagctgctggtcgtaggccttgtcgtgctcgagggccgctgcgtccgccgcgttgacgggctcccccttgtcgagtccgttgaagggtccgaggtactcgtagccaggaagcaccagaccccggccgtcgtcctgcttctgctggttggccttgggcttgggggctccaggtttcaggtcccaccactcgcgaatgccctcagagaggttgtcctcgagccaatctggaagataaccgtcagcagccatacctggtttaagtcatttattgctcagaaacacagtcatccaagtccacgttgacgagatcgcaggccgaacacgcaatctcgggtgcccgccccagcagatgatgaatcgcgcacagtttctgatacgtcttttttctgacgacgggttgagattctgacgcgccggggaagcactctgagcagtctctgaccccgtgcgtgaagcagacgttgaaattctgattcattctctcgcatgtcttgcagggaaacagcatctgaagcatgcccgcgtgacgagaacatttgttttggtacctgtccgcaaggtccaccggtgcttccgcgtctgacgtcgatggctccgcaactgaggggcaggcccgcttgggctcgcttatatccgcgtcactgggggcgggtcttttggtggctccgccctttctgacgtagaactcatgcgccacctcagtcacgtgatcctgagcccagcggaagaactctttgacttcctgcttggtcaccttgccaaagtcgtgctccagacggcgggtgagctcgaacttgaacatgcggtcctgcagcggctgctggtgctcgaaggtggtgctgttcccgtcgatcacggcgcacatgttggtgttggaggtgacgatcacgggcgtggggtcgatctgggccgatgacttgcacttttggtccacgcgcaccttgcttccgcccagaatggccttggcggactccacgaccttggcggtcatcttgccctcctcccaccagatcaccatcttgtcgacgcaatcgttgaagggaaagttctcattggtccagttgacgcagcaagggcgaattc

SEQ ID NO: 427 - protein, 729 aa, synthetic construct
  source 1..729: note = Description of Artificial Sequence: Synthetic polypeptide
MAADGYLPDWLEDNLSEGIREWWDLKPGAPKPKANQQKQDDGRGLVLPGYKYLGPFNGLDKGEPVNAADAAALEHDKAYDQQLKAGDNPYLRYNHADAEFQERLQEDTSFGGNLGRAVFQAKKRVLEPLGLVEEGAKTAPGKKRPIDSPDSSTGIGKKGQQPAKKKLNFGQTGDSESVPDPQPLGEPPAAPSSVGSGTMAAGGGAPMADNNEGADGVGNASGNWHCDSTWLGDRVITTSTRTWALPTYNNHLYKQISSSSSGATNDNHYFGYSTPWGYFDFNRFHCHFSPRDWQRLINNNWGFRPKKLRFKLFNIQVKEVTTNDGVTTIANNLTSTVQVFSDSEYQLPYVLGSAHQGCLPPFPADVFMIPQYGYLTLNNGSQSVGRSSFYCLEYFPSQMLRTGNNFEFSYSFEDVPFHSSYAHSQSLDRLMNPLIDQYLYYLARTQSTTGSTRELQFHQAGPNTMAEQSKNWLPGPCYRQQGLSKNLDFNNNSNFAWTAATKYHLNGRNSLTNPGIPMATNKDDEDQFFPINGVLVFGKTGAANKTTLENVLMTSEEEIKTTNPVATEEYGVVSSNLQPSTAGPQSQTINSQGALPGMVWQNRDVYLQGPIWAKIPHTDGNFHPSPLMGGFGLKHPPPQILIKNTPVPANPPEVFTPAKFASFITQYSTGQVSVEIEWELQKENSKRWNPEIQYTSNYAKSNNVEFAVNPDGVYTEPRPIGTRYLPRNL

SEQ ID NO: 428 - DNA, 3094 bp, Adeno-associated virus
  source 1..3094: mol_type = unassigned DNA
gaattcgcccttgctgcgtcaactggaccaagagaactttcccttcaacgattgcgtcgacaagatggtgatctggtgggaggagggcaagatgacggccaaggtcgtggagtccgccaaagccattctgggcggaagcaaggtgcgcgtcgaccaaaagtgcaagtcctcggcccagatcgatcccacccccgtgatcgtcacctccaacaccaacatgtgcgccgtgatcgacgggaacagcaccaccttcgagcaccagcagccgttgcaggaccggatgttcaaatttgaactcacccgccgtctggaacacgactttggcaaggtgaccaagcaggaagtcaaagagttcttccgctgggctagtgatcacgtgactgaggtgacgcatgagttctacgtcagaaagggcggagccagcaaaagacccgcccccgatgacgcggatataagcgagcccaagcgggcctgtccctcagtcacggacccatcgacgtcagacgcggaaggagctccggtggactttgccgacaggtaccaaaacaaatgttctcgtcacgcgggcatgcttcagatgctgtttccctgcaaaacgtgcgagagaatgaatcagaatttcaacatttgcttcacgcacggggtcagagactgtttagaatgtttccccggcgtgtcagaatctcaaccggtcgtcagaaaaaagacgtatcggaagctgtgtgcgattcatcatctgctggggcgggcacccgagattgcttgctcggcctgcgacctggtcaacgtggacctggacgactgtgtttctgagcaataaatgacttaaaccgggtatggctgccgatggttatcttccagattggctcgaggacaacctctctgagggcattcgcgagtggtgggacctgaaacctggagccccgaaacccaaagccaaccagcaaaagcaggacgacggccggggtctggtgcttcctggctacaagtacctcggacccttcaacggactcgacaagggggagcccgtcaacgcggcggacgcagcggccctcgagcacgacaaggcctacgaccagcagctcaaagcgggtgacaatccgtacctgcggtataaccacgccgacgccgagtttcaggagcgtctgcaagaagatacgtcatttgggggcaacctcgggcgagcagtcttccaggccaagaagcgggttctcgaacctctcggtctggttgaggaaggcgctaagacggctcctggaaagaagagacccatagactctccagactcctccacgggcatcggcaaaaaaggccagcagcccgctaaaaagaagctcaattttggtcagactggcgactcagagtcagtccccgaccctcaacctcttggagaacctccagcagcgccctctagtgtgggatctggtacaatggctgcaggcggtggcgcaccaatggcagacaataacgaaggtgccgacggagtgggtaatgcctcaggaaattggcattgcgattccacatggctgggcgacagagtcatcaccaccagcaccagaacctgggccctccccacctacaacaaccacctctacaagcaaatctccagcagcagctcaggagccaccaatgacaaccactacttcggctacagcaccccctgggggtattttgactttaacagattccactgccacttctcaccacgtgactggcagcgactcatcaacaacaactggggattccggcccaagaagctgcggttcaagctcttcaacatccaggtcaaggaggtcacaacgaatgacggcgtcacgaccatcgctaataaccttaccagcacggttcaggtcttctcggactcggaataccagctgccgtacgtcctcggctctgcgcaccagggctgcctgcctccgttcccggcggacgtcttcatgattcctcagtacggctacctgactctgaacaacggcagccaatcggtgggccgttcctccttctactgcctggaatatttcccctctcaaatgctgagaacgggcaacaactttgagttcagttacagcttcgaggacgtgcctttccacagcagctacgcgcacagccagagcctagaccggctgatgaaccctctcatcgaccagtacctgtactacctggcccggacccagagcaccacgggttccaccagggaactgcaatttcatcaagctgggcccaatactatggccgagcagtcaaagaactggctgcctggaccctgctataggcaacagggactgtcaaagaacttggactttaacaacaacagcaattttgcctggactgctgccactaaatatcatctgaatggcagaaactctttgaccaatcctggcattcccatggcaaccaacaaggatgatgaggaccagttctttcccatcaacggggtactggtttttggcaagacgggagctgccaacaaaactacgctggaaaacgttctgatgaccagcgaggaggagatcaagaccactaaccctgtggctacagaagaatacggtgtggtctccagcaacctgcagccgtctacagccgggcctcaatcacagactatcaacagccagggagcactgcctggcatggtctggcagaaccgggacgtgtatctgcagggtcccatctgggccaaaattcctcacacggatggcaactttcacccgtctcctctgatgggcggttttggactcaaacacccgcctccacagatcctgatcaaaaacacacctgtacctgctaatcctccggaggtgtttactcctgccaagtttgcctccttcatcacgcagtacagcaccggacaagtcagcgtggaaatcgagtgggagctgcagaaagaaaacagcaagcgctggaacccagaaattcagtatacttccaattatgccaagtctaataatgttgaatttgctgtgaaccctgatggtgtttatactgagcctcgccccattggcactcgttacctcccccgtaatctgtaattgcttgttaatcaataaaccggttgattcgtttcagttgaactttggtctctgcgaagggcgaattc

SEQ ID NO: 429 - protein, 1458 aa, synthetic construct
  source 1..1458: note = Description of Artificial Sequence: Synthetic polypeptide
MAADGYLPDWLEDNLSEGIREWWDLKPGAPKPKANQQKQDDGRGLVLPGYKYLGPFNGLDKGEPVNAADAAALEHDKAYDQQLKAGDNPYLRYNHADAEFQERLQEDTSFGGNLGRAVFQAKKRVLEPLGLVEEGAKTAPGKKRPIDSPDSSTGIGKKGQQPAKKKLNFGQTGDSESVPDPQPLGEPPAAPSSVGSGTMAAGGGAPTADNNEGADGVGNASGNWHCDSTWLGDRVITTSTRTWALPTYNNHLYKQISSSSSGATNDNHYFGYSTPWGYFDFNRFHCHFSPRDWQRLINNNWGFRPKKLRFKLFNIQVKEVTTNDGVTTIANNLTSTVQVFSDSEYQLPYVLGSAHQGCLPPFPADVFMIPQYGYLTLNNGSQSVGRSSFYCLEYFPSQMLRTGNNFEFSYSFEDVPFHSSYAHSQSLDRLMNPLIDQYLYYLARTQSTTGSTRELQFHQAGPNTMAEQSKNWLPGPCYRQQRLSKNLDFNNNSNFAWTAATKYHLNGRNSLTNPGIPMATNKDDEDQFFPINGVLVFGKTGAANKTTLENVLMTSEEEIKTTNPVATEEYGVVSSNLQSSTAGPQSQTINSQGALPGMVWQNRDVYLQGPIWAKIPHTDGNFHPSPLMGGFGLEHPPPQILIKNTPVPANPPEVFTPAKFASFITQYSTGQVSVEIEWELQKENSKRWNPEIQYTSNYAKSNNVEFAVNPDGVYTEPRPIGTRYLTRNLMAADGYLPDWLEDNLSEGIREWWDLKPGAPKPKANQQKQDDGRGLVLPGYKYLGPFNGLDKGEPVNAADAAALEHDKAYDQQLKAGDNPYLRYNHADAEFQERLQEDTSFGGNLGRAVFQAKKRVLEPLGLVEEGAKTAPGKKRPIGSPDSSTGIGKKGQQPAKKKLNFGQTGDSESVPDPQPLGEPPAAPSSVGSGTMAAGGGAPMADNNEGADGVGNASGNWHCDSTWLGDRVITTSTRTWALPTYNNHLYKQISSSSSGATNDNHYFGYSTPWGYFDFNRFHCHFSPRDWQRLINNNWGFRPKKLRFKLLNIQVKEVTTNDGVTTIANNLTSTVQVFSDSEYQLPYVLGSAHQGCLPPFPADVFMIPQYGYLTLDNGSQSVGRSSFYCLEYFPSQMLRTGNNFEFSYSFEDVPFHSSYAHSQSLDRLMNPLIDQYLYYLARTQSTTGSTRELQFHQAGPNTMAEQSKNWLPGPCYRQQRLSKNLDFNNNSNFAWTAATKYHLNGRNSLTNPGIPMATNKDDEDQFFPINGVLVFGKTGAANKTTLENVLMTSEEEIKTTNPVATEEYGVVSSNLQSSTAGPQSQTINSQGALPGMVWQNRDVYLQGPIWAKIPHTDGNFHPSPLMGGFGLKHPPPQILIKNTPVPANPPEVFTPAKFASFITQYSTGQVSVEIEWELQKENSKRWNPEIQYTSNYAKSNNVEFAVNPDGVYTEPRPIGTRYLTRNL

SEQ ID NO: 430 - DNA, 3095 bp, Adeno-associated virus
  source 1..3095: mol_type = unassigned DNA
gaattcgcccttcgcagagaccaaagttcaactgaaacgaatcaaccggtttattgattaacaagcaattacagattacgggtgaggtaacgagtgccaatggggcgaggctcagtataaacaccatcagggttcacagcaaattcaacattattagacttggcataattggaagtatactgaatttctgggttccagcgcttgctgttttctttctgcagctcccactcgatttccacgctgacttgtccggtgctgtactgcgtgatgaaggaggcaaacttggcaggagtaaacacctccggaggattagcaggtacaggtgtgtttttgatcaggatctgtggaggcgggtgtttgagtccaaaaccgcccatcagaggagacgggtgaaagttgccatccgtgtgaggaattttggcccagatgggaccctgcagatacacgtcccggttctgccagaccatgccaggcagtgctccctggctgttgatagtctgtgattgaggcccggctgtagacgactgcaggttgctggagaccacaccgtattcttctgtagccacagggttagtggtcttgatctcctcctcgctggtcatcagaacgttttccagcgtagttttgttggcagctcccgtcttgccaaaaaccagtaccccgttgatgggaaagaactggtcctcatcatccttgttggttgccatgggaatgccaggattggtcaaagagtttctgccattcagatgatatttagtggcagcagtccaggcaaaattgctgttgttgttaaagtccaagttctttgacagtctctgttgcctatagcagggtccaggcagccagttctttgactgctcggccatagtattgggcccagcttgatgaaattgcagttccctggtggaacccgtggtgctctgggtccgggccaggtagtacaggtactggtcgatgagagggttcatcagccggtctaggctctggctgtgcgcgtagctgctgtggaaaggcacgtcctcgaagctgtaactgaactcaaagttgttgcccgttctcagcatttgagaggggaaatattccaggcagtagaaggaggaacggcccaccgattggctgccgttgtccagagtcaggtagccgtactgaggaatcatgaagacgtccgccgggaacggaggcaggcagccctggtgcgcagagccgaggacgtacggcagctggtattccgagtccgagaagacctgaaccgtgctggtaaggttattagcgatggtcgtgacgccgtcattcgttgtgacctccttgacctggatgttgaggagcttgaaccgcagcttcttgggccggaatccccagttgttgttgatgagtcgctgccagtcacgtggtgagaagtggcagtggaatctgttaaagtcaaaatacccccagggggtgctgtagccgaagtagtggttgtcattggtggctcctgagctgctgctggagatttgcttgtagaggtggttgttgtaggtggggagggcccaggttctggtgctggtggtgatgactctgtcgcccagccatgtggaatcgcaatgccaatttcctgaggcattacccactccgtcggcaccttcgttattgtctgccattggtgcgccaccgcctgcagccattgtaccagatcccacactagagggcgctgctggaggttctccaagaggttgagggtcggggactgactctgagtcgccagtctgaccaaaattgagcttctttttagcgggctgctggccttttttgccgatgcccgtggaggagtctggagagcctatgggtctcttctttccaggagccgtcttagcgccttcctcaaccagaccgagaggttcgagaacccgcttcttggcctggaagactgctcgcccgaggttgcccccaaatgacgtatcttcttgcagacgctcctgaaactcggcgtcggcgtggttataccgcaggtacggattgtcacccgctttgagctgctggtcgtaggccttgtcgtgctcgagggccgctgcgtccgccgcgttgacgggctcccccttgtcgagtccgttgaagggtccgaggtacttgtagccaggaagcaccagaccccggccgtcgtcctgcttttgctggttggctttgggtttcggggctccaggtttcaggtcccaccactcgcgaatgccctcagagaggttgtcctcgagccaatctggaagataaccatcggcagccatacctggtttaagtcatttattgctcagaaacacagtcgtccaggtccacgttgaccaggtcgcaggccgagcaagcaatctcgggtgcccgccccagcagatgatgaatcgcacacagcttccgatacgtcttttttctgacgaccggttgagattctgacacgccggggaaacattctaaacagtctctgaccccgtgcgtgaagcaaatgttgaaattctgattcattctctcgcacgttttgcagggaaacagcacctgaagcatgcccgcgtgacgagaacatttgttttggtacctgtcggcaaagtccaccggagctccttccgcgtctgacgtcgatgggtccgtgactgagggacgggcccgcttgggctcgcttatatccgcgtcatcgggggcgggtcttttgctggctccgccctttctgacgtagaactcatgcgtcacctcagtcacgtgatcactagcccagcggaagaactctttgacttcctgctttgtcaccttgccaaagtcgtgttccagacggcgggtgagttcaaatttgaacatccggtcctgcaacggttgctggtgctcgaaggtggtgctgttcccgtcgatcacggcgcacatgttggtgttggaggtgacgatcacgggggtgggatcgatctgggcggacgacttgcacttttggtccacgcgcaccttgctgccgccgagaatggccttggcggactccacgaccttggccgtcatcttgccctcctcccaccagatcaccatcttgtcgacgcaatcgttgaagggaaagttctcattggtccagttgacgcagcaagggcgaattc

SEQ ID NO: 431 - DNA, 3095 bp, Adeno-associated virus
  source 1..3095: mol_type = unassigned DNA
gaattcgcccttcgcagagaccaaagttcaactgaaacgaatcaaccggtttattgattaacaagcaattacagattacgggtgaggtaacgagtgccaatggggcgaggctcagtataaacaccatcagggttcacagcaaattcaacattattagacttggcataattggaagtatactgaatttctgggttccagcgcttgctgttttctttctgcagctcccactcgatttccacgctgacttgtccggtgctgtactgcgtgatgaaggaggcaaacttggcaggagtaaacacctccggaggattagcaggtacaggtgtgtttttgatcaggatctgtggaggcgggtgttcgagtccaaaaccgcccatcagaggagacgggtgaaagttgccatccgtgtgaggaattttggcccagatgggaccctgcagatacacgtcccggttctgccagaccatgccaggcagtgctccctggctgttgatagtctgtgattgaggcccggctgtagacgactgcaggttgctggagaccacaccgtattcttctgtagccacagggttagtggtcttgatctcctcctcgctggtcatcagaacgttttccagcgtagttttgttggcagctcccgtcttgccaaaaaccagtaccccgttgatgggaaagaactggtcctcatcatccttgttggttgccatgggaatgccaggattggtcaaagagtttctgccattcagatgatatttagtggcagcagtccaggcaaaattgctgttgttgttaaagtccaagttctttgacagtctctgttgcctatagcagggtccaggcagccagttctttgactgctcggccatagtattgggcccagcttgatgaaattgcagttccctggtggaacccgtggtgctctgggtccgggccaggtagtacaggtactggtcgatgagagggttcatcagccggtctaggctctggctgtgcgcgtagctgctgtggaaaggcacgtcctcgaagctgtaactgaactcaaagttgttgcccgttctcagcatttgagaggggaaatattccaggcagtagaaggaggaacggcccaccgattggctgccgttgttcagagtcaggtagccgtactgaggaatcatgaagacgtccgccgggaacggaggcaggcagccctggtgcgcagagccgaggacgtacggcagctggtattccgagtccgagaagacctgaaccgtgctggtaaggttattagcgatggtcgtgacgccgtcattcgttgtgacctccttgacctggatgttgaagagcttgaaccgcagcttcttgggccggaatccccagttgttgttgatgagtcgctgccagtcacgtggtgagaagtggcagtggaatctgttaaagtcaaaatacccccagggggtgctgtagccgaagtagtggttgtcattggtggctcctgagctgctgctggagatttgcttgtagaggtggttgttgtaggtggggagggcccaggttctggtgctggtggtgatgactctgtcgcccagccatgtggaatcgcaatgccaatttcctgaggcattacccactccgtcggcaccttcgttattgtctgccgttggtgcgccaccgcctgcagccattgtaccagatcccacactagagggcgctgctggaggttctccaagaggttgagggtcggggactgactctgagtcgccagtctgaccaaaattgagcttctttttagcgggctgctggccttttttgccgatgcccgtggaggagtctggagagtctatgggtctcttctttccaggagccgtcttagcgccttcctcaaccagaccgagaggttcgagaacccgcttcttggcctggaagactgctcgcccgaggttgcccccaaatgacgtatcttcttgcaggcgctcctgaaactcggcgtcggcgtggttataccgcaggtacggattgtcacccgctttgagctgctggtcgtaggccttgtcgtgctcgagggccgctgcgtccgccgcgttgacgggctcccccttgtcgagtccgttgaagggtccgaggtacttgtagccaggaagcaccagaccccggccgtcgtcctgcttttgctggttggctttgggtttcggggctccaggtttcaggtcccaccactcgcgaatgccctcagagaggttgtcctcgagccaatctggaagataaccatcggcagccatacctggtttaagccatttattgctcagaaacacagtcgtccaggtccacgttgaccaggtcgcaggccgagcaggcaatctcgggtgcccgccccagcagatgatgaatcgcacacagcttccgatacgtcttttttctgacgaccggttgagattctgacacgccggggaaacattctaaacagtctctgaccccgtgcgtgaagcaaatgttgaaattctgattcattctctcgcacgttttgcagggaaacagcatctgaagcatgcccgcgtggcgagaacatttgttttggtacctgtcggcaaagtccaccggagctccttccgcgtctgacgtcgatgggtccgtgactgagggacaggcccgcttgggctcgcttatatccgcgtcatcgggggcgggtcttttgctggctccgccctttctgacgtagaactcatgcgtcacctcagtcacgtgatcactagcccagcggaagaactctttgacttcctgctttgtcaccttgccaaagtcgtgttccagacggcgggtgagttcaaatttgaacatccggtcctgcaacggctgctggtgctcgaaggtggtgctgttcccgtcgatcacggcgcgcatgttggtgttggaggtgacgatcacgggggtgggatcgatctgggcggacgacttgcacttttggtccacgcgcaccttgctgccgccgagaatggccttggcggactccacgaccttggccgtcatcttgccctcctcccaccagatcaccatcttgtcgacgcaatcgttgaagggaaagttctcattggtccagttgacgcagcaagggcgaattc

SEQ ID NO: 432 - protein, 729 aa, Adeno-associated virus; identical to SEQ ID NO: 160

SEQ ID NO: 433 - protein, 729 aa, Adeno-associated virus
MAADGYLPDWLEDNLSEGIREWWDLKPGAPKPKANQQKQDDGRGLVLPGYKYLGPFNGLDKGEPVNAADAAALEHDKAYDQQLKAGDNPYLRYNHADAEFQERLQEDTSFGGNLGRAVFQAKKRVLEPLGLVEEGAKTAPGKKRPIDSPDSSTGIGKKGQQPAKKKLNFGQTGDSESVPDPQPLGEPPAAPSSVGSGTMAAGGGAPTADNNEGADGVGNASGNWHCDSTWLGDRVITTSTRTWALPTYNNHLYKQISSSSSGATNDNHYFGYSTPWGYFDFNRFHCHFSPRDWQRLINNNWGFRPKKLRFKLFNIQVKEVTTNDGVTTIANNLTSTVQVFSDSEYQLPYVLGSAHQGCLPPFPADVFMIPQYGYLTLNNGSQSVGRSSFYCLEYFPSQMLRTGNNFEFSYSFEDVPFHSSYAHSQSLDRLMNPLIDQYLYYLARTQSTTGSTRELQFHQAGPNTMAEQSKNWLPGPCYRQQRLSKNLDFNNNSNFAWTAATKYHLNGRNSLTNPGIPMATNKDDEDQFFPINGVLVFGKTGAANKTTLENVLMTSEEEIKTTNPVATEEYGVVSSNLQSSTAGPQSQTINSQGALPGMVWQNRDVYLQGPIWAKIPHTDGNFHPSPLMGGFGLKHPPPQILIKNTPVPANPPEVFTPAKFASFITQYSTGQVSVEIEWELQKENSKRWNPEIQYTSNYAKSNNVEFAVNPDGVYTEPRPIGTRYLTRNL

SEQ ID NO: 434 - protein, 729 aa, Adeno-associated virus
MAADGYLPDWLEDNLSEGIREWWDLKPGAPKPKANQQKQDDGRGLVLPGYKYLGPFNGLDKGEPVNAADAAALEHDKAYDQQLKAGDNPYLRYNHADAEFQERLQEDTSFGGNLGRAVFQAKKRVLEPLGLVEEGAKTAPGKKRPIDSPDSSTGIGKKGQQPAKKKLNFGQTGDSESVPDPQPLGEPPAAPSSVGSGTMAAGGGAPMADNNEGADGVGNASGNWHCDSTWLGDRVITTSTRTWALPTYNNHLYKQISSSSSGATNDNHYFGYSTPWGYFDFNRFHCHFSPRDWQRLINNNWGFRPKKLRFKLFNIQVKEVTTNDGVTTIANNLTSTVQVFSDSEYQLPYVLGSAHQGCLPPFPADVFMIPQYGYLTLNNGSQSVGRSSFYCLEYFPSQMLRTGNNFEFSYSFEDVPFHSSYAHSQSLDRLMNPLIDQYLYYLARTQSTTGSTRELQFHQAGPNTMAEQSKNWLPGPCYRQQRLSKNLDFNNNSNFAWTAATKYHLNGRNSLTNPGIPMATNKDDEDQFFPINGVLVFGKTGAANKTTLENVLMTSEEEIKTTNPVATEEYGVVSSNLQSSTAGPQSQTINSQGALPGMVWQNRDVYLQGPIWAKIPHTDGNFHPSPLMGGFGLKHPPPQILIKNTPVPANPPEVFTPAKFASFITQYSTGQVSVEIEWELQKENSKRWNPEIQYTSNYAKSNNVEFAVNPDGVYTEPRPIGTRYLTRNL

SEQ ID NO: 435 - DNA, 2217 bp, Adeno-associated virus
  source 1..2217: mol_type = unassigned DNA
atggctgctgacggttatcttccagattggctcgaggacaacctctctgagggcattcgcgagtggtgggacctgaaacctggagcccccaagcccaaggccaaccagcagaagcaggacgacggccggggtctggtgcttcctggctacaagtacctcggacccttcaacggactcgacaagggggagcccgtcaacgcggcggacgcagcggccctcgagcacgacaaggcctacgaccagcagctcaaagcgggtgacaatccgtacctgcggtataaccacgccgacgccgagtttcaggagcgtctacaagaagatacgtcttttgggggcaacctcgggcgagcagtcttccaggccaagaagcgggttctcgaacctctcggtctggttgaggaagctgctaagacggctcctggaaagaagagaccggtagaaccgtcacctcagcgttcccccgactcctccacgggcatcggcaagaaaggccagcggcccgctaaaaagagactgaactttggtcagactggcgactcagagtcagtccccgaccctcaaccaatcggagaaccaccagcaggcccctctggtctgggatctggtacaatggctgcaggcggtggcgctccaatggcagacaataacgaaggcgccgacggagtgggtagttcctcaggaaattggcattgcgattccacatggctgggcgacagagtcatcaccaccagcacccgaacctgggccctgcccacctacaacaaccacctctacaagcaaatatccaatgggacatcgggaggaagcaccaacgacaacacctacttcggctacagcaccccctgggggtattttgacttcaacagattccactgccacttctcaccacgtgactggcagcgactcatcaacaacaactggggattccggccaaaaagactcagcttcaagcccttcaacatccaggtcaaggaggtcacgcagaatgaaggcaccaagaccatcgccaataaccttaccagcacgattcaggtatttacggactcggaataccagctgccgtacgtcctcggctccgcgcaccagggctgcctgcctccgttcccggcggacgtcttcatgattccccagtacggctaccttacactgaacaatggaagtcaagccgtaggccgttcctccttctactgcctggaatattttccatctcaaatgctgcgaactggaaacaattttgaattcagctacaccttcgaggacgtgcctttccacagcagctacgcacacagccagagcttggaccgactgatgaatcctctcatcgaccagtacctgcactacttatccagaactcagtccacaggaggaactcaaggtacccagcaattgttattttctcaagctgggcctgcaaacatgtcggctcaggctaagaactggctacctggaccttgctaccggcagcagcgagtctctacgacactgtcgcaaaacaacaacagcaactttgcttggactggtgccaccaaatatcacctgaacggaagagactctttggtaaatcccggtgtcgccatggcaacccacaaggacgacgaggaacgcttcttcccgtcgagtggagtcctgatgtttggaaaacagggtgctggaagagacaatgtggactacagcagcgttatgctaaccagcgaagaagaaattaaaaccactaaccctgtagccacagaacaatacggtgtggtggctgacaacttgcagcaaaccaatacagggcctattgtgggaaatgtcaacagccaaggagccttacctggcatggtctggcagaaccgagacgtgtacctgcagggtcccatctgggccaagattcctcacacggacggcaacttccacccttcaccgctaatgggaggatttggactgaagcacccacctcctcagatcctgatcaagaacacgccggtacctgcggatcctccaacaacgttcagccaggcgaaattggcttccttcattacgcagtacagcaccggacaggtcagcgtggaaatcgagtgggagctgcagaaggagaacagcaaacgctggaacccagagattcagtacacttcaaactactacaaatctacaaatgtggactttgctgtcaatacagagggaacttattctgagcctcgccccattggtactcgctacctcacccgtaatctgtaa

SEQ ID NO: 436 - protein, 738 aa, Adeno-associated virus
MAADGYLPDWLEDNLSEGIREWWDLKPGAPKPKANQQKQDDGRGLVLPGYKYLGPFNGLDKGEPVNAADAAALEHDKAYDQQLKAGDNPYLRYNHADAEFQERLQEDTSFGGNLGRAVFQAKKRVLEPLGLVEEAAKTAPGKKRPVEPSPQRSPDSSTGIGKKGQRPAKKRLNFGQTGDSESVPDPQPIGEPPAGPSGLGSGTMAAGGGAPMADNNEGADGVGSSSGNWHCDSTWLGDRVITTSTRTWALPTYNNHLYKQISNGTSGGSTNDNTYFGYSTPWGYFDFNRFHCHFSPRDWQRLINNNWGFRPKRLSFKPFNIQVKEVTQNEGTKTIANNLTSTIQVFTDSEYQLPYVLGSAHQGCLPPFPADVFMIPQYGYLTLNNGSQAVGRSSFYCLEYFPSQMLRTGNNFEFSYTFEDVPFHSSYAHSQSLDRLMNPLIDQYLHYLSRTQSTGGTQGTQQLLFSQAGPANMSAQAKNWLPGPCYRQQRVSTTLSQNNNSNFAWTGATKYHLNGRDSLVNPGVAMATHKDDEERFFPSSGVLMFGKQGAGRDNVDYSSVMLTSEEEIKTTNPVATEQYGVVADNLQQTNTGPIVGNVNSQGALPGMVWQNRDVYLQGPIWAKIPHTDGNFHPSPLMGGFGLKHPPPQILIKNTPVPADPPTTFSQAKLASFITQYSTGQVSVEIEWELQKENSKRWNPEIQYTSNYYKSTNVDFAVNTEGTYSEPRPIGTRYLTRNL

SEQ ID NO: 437 - DNA, 2217 bp, Adeno-associated virus
  source 1..2217: mol_type = unassigned DNA
atggctgctgacggttatcttccagattggctcgaggacaacctctctgagggcattcgcgagtggtgggacctgaaacctggagcccccaagcccaaggccaaccagcagaagcaggacgacggccggggtctggtgcttcctggctacaagtacctcggacccttcaacggactcgacaagggggagcccgtcaacgcggcggacgcagcggccctcgagcacgacaaggcctacgaccagcagctcaaagcgggtgacaatccgtacctgcggtataaccacgccgacgccgagtttcaggagcgtctgcaagaagatacgtcttttgggggcaacctcgggcgagcagtcttccaggccaagaagcgggttctcgaacctctcggtctggttgaggaagctgctaagacggctcctggaaagaagagaccggtagaaccgtcacctcagcgttcccccgactcctccacgggcatcggcaagaaaggccagcagcccgctaaaaagagactgaactttggtcagactggcgactcagagtcagtccccgaccctcaaccaatcggagaaccaccagcaggcccctctggtctgggatctggtacaatggctgcaggcggtggcgctccaatggcagacaataacgaaggcgccgacggagtgggtagttcctcaggaaattggcattgcgattccacatggctgggcgacagagtcatcaccaccagcacccgaacctgggccctgcccacctacaacaaccacctctacaagcaaatatccaatgggacatcgggaggaagcaccaacgacaacacctacttcggctacagcaccccctgggggtattttgacttcaacagattccactgccacttctcaccacgtgactggcagcgactcatcaacaacaactggggattccggccaaaaagactcagcttcaagctcttcaacatccaggtcaaggaggtcacgcagaatgaaggcaccaagaccatcgccaataaccttaccagcacgattcaggtatttacggactcggaataccagctgccgtacgtcctcggctccgcgcaccagggctgcctgcctccgttcccggcggacgtcttcatgattccccagtacggctaccttacactgaacaatggaagtcaagccgtaggccgttcctccttctactgcctggaatattttccatctcaaatgctgcgaactggaaacaattttgaattcagctacaccttcgaggacgtgcctttccacagcagctacgcacacagccagagcttggaccgactgatgaatcctctcatcgaccagtacctgtactacttatccagaactcagtccacaggaggaactcaaggtacccagcaattgttattttctcaagctgggcctgcaaacatgtcggctcaggctaagaactggctacctggaccttgctaccggcagcagcgagtctctacgacactgtcgcaaaacaacaacagcaactttgcttggactggtgccaccaaatatcacctgaacggaagagactctttggtaaatcccggtgtcgccatggcaacccacaaggacgacgaggaacgcttcttcccgtcgagtggagtcctgatgtttggaaaacagggtgctggaagagacaatgtggactacagcagcgttatgctaaccagcgaagaagaaattaaaaccactaaccctgtagccacagaacaatacggtgtggtggctgataacttgcagcaaaccaatacggggcctattgtgggaaatgtcaacagccaaggagccttacctggcatggtctggcagaaccgagacgtgtacctgcagggtcccatctgggccaagattcctcacacggacggcaacttccacccttcaccgctaatgggaggatttggactgaagcacccacctcctcagatcctgatcaagaacacgccggtacctgcggatcctccaacaacgttcagccaggcgaaattggcttccttcattacgcagtacagcaccggacaggtcagcgtggaaatcgagtgggagctgcagaaggagaacagcaaacgctggaacccagagattcagtacacttcaaactactacaaatctacaaatgtggactttgctgtcaatacagagggaacttattctgagcctcgccccattggtactcgttacctcacccgtaatctgtaa

SEQ ID NO: 438 - protein, 738 aa, Adeno-associated virus; identical to SEQ ID NO: 90

SEQ ID NO: 439 - protein, 738 aa, Adeno-associated virus
MAADGYLPDWLEDNLSEGIREWWDLKPGAPKPKANQQKQDDGRGLVLPGYKYLGPFNGLDKGEPVNAADAAALEHDKAYDQQLKAGDNPYLRYNHADAEFQERLQEDTSFGGNLGRAVFQAKKRVLEPLGLVEEAAKTAPGKKRPVEPSPQRSPDSSTGIGKKGQQPAKKRLNFGQTGDSESVPDPQPIGEPPAGPSGLGSGTMAAGGGAPMADNNEGADGVGSSSGNWHCDSTWLGDRVITTSTRTWALPTYNNHLYKQISNGTSGGSTNDNTYFGYSTPWGYFDFNRFHCHFSPRDWQRLINNNWGFRPKRLSFKLFNIQVKEVTQDEGTKTIANNLTSTIQVFTDSEYQLPYVLGSAHQGCLPPFPADVFMIPQYGYLTLNNGSQAVGRSSFYCLEYFPSQMLRTGNNFEFSYTFEDVPFHSSYAHSQSLDRLMNPLIDQYLYYLSRTQSTGGTQGTQQLLFSQAGPANMSARAKNWLPGPCYRQQRVSTTLSQNNNSNFAWTGATKYHLNGRDSLVNPGVAMATHKDDEERFFPSSGVLMFGKQGAGRDNVDYSSVMLTSEEEIKTTNPVATEQYGVVADNLQQANTGPIVGNVNSQGALPGMVWQNRDVYLQGPIWAKIPHTDGNFHPSPLMGGFGLKHPPPQILIKNTPVPADPPTTFSQAKLASFITQYSTGQVSVEIEWELQKENSKRWNPEIQYTSNYYKSTNVDFAVNSEGTYSEPRPIGTRYLTRNL

SEQ ID NO: 440 - DNA, 2217 bp, Adeno-associated virus
  source 1..2217: mol_type = unassigned DNA
atggctgctgacggttatcttccagattggctcgaggacaacctctctgagggcattcgcgagtggtgggacctgaaacctggagcccccaagcccaaggccaaccagcagaagcaggacgacggccggggtctggtgcttcctggctacaagtacctcggacccttcaacggactcgacaagggggagcccgtcaacgcggcggacgcagcggccctcgagcacgacaaggcctacgaccagcagctcaaagcgggtgacaatccgtacctgcggtataaccacgccgacgccgagtttcaggagcgtctgcaagaagatacgtcttttgggggcaacctcgggcgagcagtcttccaggccaagaagcgggttctcgaacctctcggtctggttgaggaagctgctaagacggctcctggaaagaagagaccggtagaaccgtcacctcagcgttcccccgactcctccacgggcatcggcaagaaaggccagcagcccgctaaaaagagactgaactttggtcagactggcgactcagagtcagtccccgaccctcaaccaatcggagaaccaccagcaggcccctctggtctgggatctggtacaatggctgcaggcggtggcgctccaatggcagacaataacgaaggcgccgacggagtgggtagttcctcaggaaattggcattgcgattccacatggctgggcgacagagtcatcaccaccagcacccgaacctgggccctgcccacctacaacaaccacctctacaagcaaatatccaatgggacatcgggaggaagcaccaacgacaacacctacttcggctacagcaccccctgggggtattttgacttcaacagattccactgccacttctcaccacgtgactggcagcgactcatcaacaacaactggggattccggccaaaaagactcagcttcaagctcttcaacatccaggtcaaggaggtcacgcaggatgaaggcaccaagaccatcgccaataaccttaccagcacgattcaggtatttacggactcggaataccagctgccgtacgtcctcggctccgcgcaccagggctgcctgcctccgttcccggcggacgtcttcatgattccccagtacggctaccttacactgaacaatggaagtcaagccgtaggccgttcctccttctactgcctggaatattttccatctcaaatgctgcgaactggaaacaattttgaattcagctacaccttcgaggacgtgcctttccacagcagctacgcacacagccagagcttggaccgactgatgaatcctctcatcgaccagtacctgtactacttatccagaactcagtccacaggaggaactcaaggtacccagcaattgttattttctcaagctgggcctgcaaacatgtcggctcgggctaagaactggctacctggaccttgctaccggcagcagcgagtctctacgacactgtcgcaaaacaacaacagcaactttgcttggactggtgccaccaaatatcacctgaacggaagagactctttggtaaatcccggtgttgctatggcaacgcataaggacgacgaggaacgtttctttccatcgagcggagtcctgatgtttggaaaacagggtgctggaagagacaatgtggactatagcagcgttatgctaaccagcgaggaagaaattaaaaccactaaccctgtagccacagaacaatacggtgtggtggctgacaacttgcagcaagccaatacagggcctattgtgggaaatgtcaacagccaaggagccttacctggcatggtctggcagaaccgagacgtgtacctgcagggtcccatctgggccaaaattcctcacacggacggcaattttcacccgtctcctctgatgggcggctttggactgaagcacccacctccccagatcctgatcaagaatacgccggtacctgcggatcctccaacgacgttcagccaggcaaaattggcttccttcatcacgcagtacagcaccggccaggtcagcgtggagatcgagtgggagctgcagaaggagaacagcaagcgatggaacccagaaattcagtacacttccaactactacaaatctacaaatgtggactttgctgtcaattctgagggtacatattcagagcctcgccccattggtactcgttatctgacacgtaatctgtaa

SEQ ID NO: 441 - DNA, 2211 bp, Adeno-associated virus
  source 1..2211: mol_type = unassigned DNA
atggctgccgatggttatcttccagattggctcgaggacaacctctctgagggcattcgcgagtggtgggacttgaaacctggagccccgaaacccaaagccaaccagcaaaagcaggacgacggccggggcctggtgcttcctggctacaagtacctcggacccttcaacggactcgacaagggggagcccgtcaacgcggcggacgcagcggccctcgagcacgacaaggcctacgaccagcagctcgaagcgggtgacaatccgtacctgcggtataaccacgccgacgccgagtttcaggagcgtctgcaagaagatacgtcttttgggggcaacctcgggcgagcagtcttccaggccaagaagcgggttctcgaacctctcggtctggttgaggaaggcgctaagacggctcctggaaagaagagaccagtagagcagtcaccccaagaaccagactcctcctcgggcatcggcaagaaaggccaacagcccgccagaaaaagactcaattttggccagactggcgactcagagtcagttccagaccctcaacctctcggagaacctccagcagcgccctctggtgtgggacctaatacaatggctgcaggcggtggcgcaccaatggcagacaataacgaaggcgccgacggagtgggtagttcctcgggaaattggcattgcgattccacatggctgggcgacagagtcatcaccaccagcacccgaacctgggccctgcccacctacaacaaccacctctacaagcaaatctccaacgggacatcgggaggagccaccaacgacaacacctacttcggctacagcaccccctgggggtattttgactttaacagattccactgccacttttcaccacgtgactggcagcgactcatcaacaacaactggggattccggcccaagagactcagcttcaagctcttcaacatccaggtcaaggaggtcacgcagaatgaaggcaccaagaccatcgccaataacctcaccagcaccatccaggtgtttacggactcggagtaccagctgccgtacgttctcggctctgcccaccagggctgcctgcctccgttcccggcggacgtgttcatgattccccagtacggctacctaacactcaacaacggtagtcaggccgtgggacgctcctccttctactgcctggaatactttccttcgcagatgctgagaaccggcaacaacttccagtttacttacaccttcgaggacgtgcctttccacagcagctacgcccacagccagagcttggaccggctgatgaatcctctgattgaccagtacctgtactacttgtctcggactcaaacaacaggaggcacggcaaatacgcagactctgggcttcagccaaggtgggcctaatacaatggccaatcaggcaaagaactggctgccaggaccctgttaccgccaacaacgcgtctcaacgacaaccgggcaaaacaacaatagcaactttgcctggactgctgggaccaaataccatctgaatggaagaaattcattggctaatcctggcatcgctatggcaacacacaaagacgacgaggagcgttttttcccagtaacgggatcctgtttttggcaacaaaatgctgccagagacaatgcggattacagcgatgtcatgctcaccagcgaggaagaaatcaaaaccactaaccctgtggctacagaggaatacggtatcgtggcagataacttgcagcagcaaaacacggctcctcaaattggaactgtcaacagccagggggccttacccggtatggtctggcagaaccgggacgtgtacctgcagggtcccatctgggccaagattcctcacacggacggcaacttccacccgtctccgctgatgggcggctttggcctgaaacatcctccgcctcagatcctgatcaagaacacgcctgtacctgcggatcctccgaccaccttcaaccagtcaaagctgaactctttcatcacgcaatacagcaccggacaggtcagcgtggaaattgaatgggagctacagaaggaaaacagcaagcgctggaaccccgagatccagtacacctccaactactacaaatctacaagtgtggactttgctgttaatacagaaggcgtgtactctgaaccccgccccattggcacccgttacctcacccgtaatctgtaa

SEQ ID NO: 442 - protein, 736 aa, Adeno-associated virus
MAADGYLPDWLEDNLSEGIREWWDLKPGAPKPKANQQKQDDGRGLVLPGYKYLGPFNGLDKGEPVNAADAAALEHDKAYDQQLEAGDNPYLRYNHADAEFQERLQEDTSFGGNLGRAVFQAKKRVLEPLGLVEEGAKTAPGKKRPVEQSPQEPDSSSGIGKKGQQPARKRLNFGQTGDSESVPDPQPLGEPPAAPSGVGPNTMAAGGGAPMADNNEGADGVGSSSGNWHCDSTWLGDRVITTSTRTWALPTYNNHLYKQISNGTSGGATNDNTYFGYSTPWGYFDFNRFHCHFSPRDWQRLINNNWGFRPKRLSFKLFNIQVKEVTQNEGTKTIANNLTSTIQVFTDSEYQLPYVLGSAHQGCLPPFPADVFMIPQYGYLTLNNGSQAVGRSSFYCLEYFPSQMLRTGNNFQFTYTFEDVPFHSSYAHSQSLDRLMNPLIDQYLYYLSRTQTTGGTANTQTLGFSQGGPNTMANQAKNWLPGPCYRQQRVSTTTGQNNNSNFAWTAGTKYHLNGRNSLANPGIAMATHKDDEERFFPVTGSCFWQQNAARDNADYSDVMLTSEEEIKTTNPVATEEYGIVADNLQQQNTAPQIGTVNSQGALPGMVWQNRDVYLQGPIWAKIPHTDGNFHPSPLMGGFGLKHPPPQILIKNTPVPADPPTTFNQSKLNSFITQYSTGQVSVEIEWELQKENSKRWNPEIQYTSNYYKSTSVDFAVNTEGVYSEPRPIGTRYLTRNL

SEQ ID NO: 443 - DNA, 2214 bp, Adeno-associated virus
  source 1..2214: mol_type = unassigned DNA
atggctgctgacggttatcttccagattggctcgaggacaacctctctgagggcattcgcgagtggtgggacctgaaacctggagcccccaagcccaaggccaaccagcagaagcaggacgacggccggggtctggtgcttcctggctacaagtacctcggacccttcaacggactcgacaagggggagcccgtcagcgcggcggacgcagcggccctcgagcacgacaaggcctgcgaccagcggctcaaagcgggtgacaatccgtacctgcggtataaccacgccgacgccgagtttcaggagcgtctgcaagaagatacgtcttttgggggcaacctcgggcgagcagtcttccaggccaagaagcgggttctcgaacctctcggtctggttgaggaagctgctaagacggctcctggaaagaagggaccggtagaaccgtcacctcagcgttcccccgactcctccacgggcatcggcaagaaaggccagcagcccgctagaaagagactgaactttgggcagactggcgactcagagtcagtccccgaccctcaaccaatcggagaaccaccagcaggcccctctggtctgggatctggtacaatggctgcaggcggtggcgcaccaatggctgacaataacgagggcgccgacggagtgggtaatgcctcaggaaattggcattgcgattccacatggctgggcgacagagtcatcaccaccagcacccgaacctgggctttgcccacctacaacaatcacctctacaagcaaatctccagtcagtcagcaggtagcaccaacgacaacgtctacttcggctacagcaccccctgggggtattttgacttcaacagattccactgtcacttctcaccacgtgactggcagcggctcatcaacaacaactggggattccggcccaagaagctcaacttcaagctgttcaacatccaggtcaaggaggtcacaacgaatgacggcgtcacgaccatcgccaataaccttaccagcacggttcaggtcttttcggactcggaataccagctgccctacgtcctcggctccgcacaccagggctgcctgcctccgttcccggcggacgtcttcatgattccccagtacggctacctgactctgaacaatggcagccaatcggtgggtcgttcctctttctactgcctggaatatttcccttctcaaatgctgagaacgggcaacaacttcaccttcagctacaccttcgaggacgttcccttccacagcagctacgcacacagccagagcctggaccggctgatgaatcctcttatcgaccagtacctgtattacctggccagaacacagagcaacgcaggaggcacagctggcaatcgggaactgcagttttatcagggcgggcctaccaccatggccgaacaagccaaaaactggctgcctggaccttgcttccggcaacaaagagtctccaagacgctggatcaaaacaacaacagcaactttgcttggactggtgccaccaaataccatctaaatggaagaaattcattggttaatcccggtgtcgccatggcaacccacaaggacgacgaggaacgcttcttcccttcgagcggagtcctgatttttggaaaaactggagcagctaataagactacactggaaaatgtgttaatgacaaatgaagaggaaattcgtcctaccaacccggtagccaccgaggaatacgggactgttagcagcaacctgcaggcggctaacactgcagcccagacacaagttgtcaacaaccagggagccttacctggtatggtctggcagaaccgggacgtgtacctgcagggtcccatctgggccaagattcctcacacggacggcaactttcacccgtctccgctgatgggcggctttggactgaagcatccgcctcctcagatcctgatcaaaaacactcctgttcctgctaatcccccggaggtgtttacgcctgccaagtttgcttctttcatcacacagtacagcaccggccaggtcagcgtggagatcgagtgggagctgcagaaggagaacagcaagcgctggaacccagagattcagtatacctccaattttgacgaacagactggtgtggactttgccgttgacagccagggtgtttattctgagcctcgccccattggtactcgttacctcacccgtaatctgtaa

SEQ ID NO: 444 - protein, 737 aa, Adeno-associated virus
MAADGYLPDWLEDNLSEGIREWWDLKPGAPKPKANQQKQDDGRGLVLPGYKYLGPFNGLDKGEPVSAADAAALEHDKACDQRLKAGDNPYLRYNHADAEFQERLQEDTSFGGNLGRAVFQAKKRVLEPLGLVEEAAKTAPGKKGPVEPSPQRSPDSSTGIGKKGQQPARKRLNFGQTGDSESVPDPQPIGEPPAGPSGLGSGTMAAGGGAPMADNNEGADGVGNASGNWHCDSTWLGDRVITTSTRTWALPTYNNHLYKQISSQSAGSTNDNVYFGYSTPWGYFDFNRFHCHFSPRDWQRLINNNWGFRPKKLNFKLFNIQVKEVTTNDGVTTIANNLTSTVQVFSDSEYQLPYVLGSAHQGCLPPFPADVFMIPQYGYLTLNNGSQSVGRSSFYCLEYFPSQMLRTGNNFTFSYTFEDVPFHSSYAHSQSLDRLMNPLIDQYLYYLARTQSNAGGTAGNRELQFYQGGPTTMAEQAKNWLPGPCFRQQRVSKTLDQNNNSNFAWTGATKYHLNGRNSLVNPGVAMATHKDDEERFFPSSGVLIFGKTGAANKTTLENVLMTNEEEIRPTNPVATEEYGTVSSNLQAANTAAQTQVVNNQGALPGMVWQNRDVYLQGPIWAKIPHTDGNFHPSPLMGGFGLKHPPPQILIKNTPVPANPPEVFTPAKFASFITQYSTGQVSVEIEWELQKENSKRWNPEIQYTSNFDEQTGVDFAVDSQGVYSEPRPIGTRYLTRNL

SEQ ID NO: 445 - DNA, 2214 bp, Adeno-associated virus
  source 1..2214: mol_type = unassigned DNA
atggctgccgatggttatcttccagattggctcgaggacaacctctctgagggcattcgcgagtggtgggacctgaaacctggagccccgaaacccaaagccaaccagcaaaagcaggacgacggccggggtctggtgcttcctggctacaagtacctcggacccttcaacggactcgacaagggggagcccgtcaacgcggcggacgcagcggccctcgagcacgacaaggcctacgaccagcagctcaaagcgggtgacaatccgtacctgcggtataaccacgccgacgccgagtttcaggagcgtctgcaagaagatacgtcttttgggggcaacctcgggcgagcagtcttccaggccaagaagcgggttctcgaacctctcggtctggttgaggaagctgctaagacggctcctggaaagaagagaccggtagaaccgtcacctcagcgttcccccgactcctccacgggcatcggcaagaaaggccagcagcccgctagaaagagactgaactttgggcagactggcgactcagagtcagtccccgaccctcaaccaatcggagaaccaccagcaggcccctctggtctgggatctggtacaatggctgcaggcggtggcgctccaatggcagacaataacgaaggcgccgacggagtgggtaatgcctcaggaaattggcattgcgattccacatggctgggcgacagagtcatcaccaccagcacccgaacctgggctttgcccacctacaacaaccacctctacaagcaaatctccagtcagtcagcaggtagcaccaacgacaacgtctacttcggctacagcaccccctgggggtattttgacttcaacagattccactgtcacttctcaccacgtgactggcagcggctcatcaacaacaactggggattccggcccaagaagctcaacttcaagctgttcaacatccaggtcaaggaggtcacaacgaatgacggcgtcacgaccatcgccaataaccttaccagcacggttcaggtcttttcggactcggaataccagctgccctacgtcctcggctccgcacaccagggctgcctgcctccgttcccggcggacgtcttcatgattcctcagtacggctacctgactctcaacaacggtagtcaggccgtgggacgttcctccttctactgcctggagtacttcccctctcagatgctgagaacgggcaacaacttttccttcagctacactttcgaggacgtgcctttccacagcagctacgcgcacagccagagtttggacaggctgatgaatcctctcatcgaccagtacctgtactacctgtcaagaacccagtctacgggaggcacagcgggaacccagcagttgctgttttctcaggccgggcctagcaacatgtcgactcaggccagaaactggctgcctggaccctgctacagacagcagcgcgtctccacgacactgtcgcaaaacaacaacagcaactttgcctggactggtgccaccaagtatcatctgaacggcagagactctctggtgaatccgggcgtcgccatggcaaccaacaaggacgacgaggaccgcttcttcccatccagcggcatcctcatgtttggcaagcagggagctggaaaagacaacgtggactatagcaacgtgatgctaaccagcgaggaagaaatcaagaccaccaaccccgtggccacagaacagtatggcgtggtggctgataacctacagcagcaaaacaccgctcctattgtgggggccgtcaacagccagggagccttacctggcatggtctggcagaaccgggacgtgtacctgcagggtcctatttgggccaagattcctcacacagatggcaactttcacccgtctcctttaatgggcggctttggacttaaacatccgcctcctcagatccttatcaaaaacactcctgttcctgcggatcctccaacagcgttcaaccaggccaagctgaattctttcatcacgcagtacagcaccggacaagtcagcgtggagatcgagtgggagctgcagaaggagaacagcaagcgctggaacccagagattcagtatacttccaactactacaaatctacaaatgtggactttgctgttaatactgagggtgcttactctgagcctcgccccattggcactcgttacctcacccgtaatctgtaa

SEQ ID NO: 446 - protein, 737 aa, Adeno-associated virus
MAADGYLPDWLEDNLSEGIREWWDLKPGAPKPKANQQKQDDGRGLVLPGYKYLGPFNGLDKGEPVNAADAAALEHDKAYDQQLKAGDNPYLRYNHADAEFQERLQEDTSFGGNLGRAVFQAKKRVLEPLGLVEEAAKTAPGKKRPVEPSPQRSPDSSTGIGKKGQQPARKRLNFGQTGDSESVPDPQPIGEPPAGPSGLGSGTMAAGGGAPMADNNEGADGVGNASGNWHCDSTWLGDRVITTSTRTWALPTYNNHLYKQISSQSAGSTNDNVYFGYSTPWGYFDFNRFHCHFSPRDWQRLINNNWGFRPKKLNFKLFNIQVKEVTTNDGVTTIANNLTSTVQVFSDSEYQLPYVLGSAHQGCLPPFPADVFMIPQYGYLTLNNGSQAVGRSSFYCLEYFPSQMLRTGNNFSFSYTFEDVPFHSSYAHSQSLDRLMNPLIDQYLYYLSRTQSTGGTAGTQQLLFSQAGPSNMSTQARNWLPGPCYRQQRVSTTLSQNNNSNFAWTGATKYHLNGRDSLVNPGVAMATNKDDEDRFFPSSGILMFGKQGAGKDNVDYSNVMLTSEEEIKTTNPVATEQYGVVADNLQQQNTAPIVGAVNSQGALPGMVWQNRDVYLQGPIWAKIPHTDGNFHPSPLMGGFGLKHPPPQILIKNTPVPADPPTAFNQAKLNSFITQYSTGQVSVEIEWELQKENSKRWNPEIQYTSNYYKSTNVDFAVNTEGAYSEPRPIGTRYLTRNL

SEQ ID NO: 447 - DNA, 2217 bp, Adeno-associated virus
  source 1..2217: mol_type = unassigned DNA
atggctgccgatggttatcttccagattggctcgaggacaacctctctgagggcattcgcgagtggtgggacctgaaacctggagccccgaaacccaaagccaaccagcaaaagcaggacgacggccggggtctggtgcttcctggctacaagtacctcggacccttcaacggactcgacaagggggagcccgtcaacgcggcggacgcagcggccctcgagcacgacaaggcctacgaccagcagctcaaagcgggtgacaatccgtacctgcggtataatcacgccgacgccgagtttcaggagcgtctgcaagaagatacgtcttttgggggcaacctcgggcgagcagtcttccaggccaagaagcgggttctcgaacctctcggtctggttgaggaaggcgctaagacggctcctggaaagaagagaccggtagagccgtcaccacagcgttcccccgactcctccacgggcatcggcaagaaaggccagcagcccgccagaaagagactcaatttcggtcagactggcgactcagagtcagtccccgaccctcaacctatcggagaacctccagcagcgccctctagtgtgggatctggtacaatggctgcaggcggtggcgcaccaatggcagacaataacgaaggtgccgacggagtgggtagttcctcgggaaattggcattgcgattccacatggctgggcgacagagtcatcaccaccagcacccgaacctgggccctgcccacctacaacaaccacctctacaagcaaatctccaacgggacctcgggaggcagcaccaacgacaacacctactttggctacagcaccccctgggggtattttgactttaacagattccactgccacttctcaccacgtgactggcagcgactcatcaacaacaactggggattccggcccaagagactcagcttcaagctcttcaacatccaggtcaaagaggtcacgcagaatgaaggcaccaagaccatcgccaataacctcaccagcaccatccaggtgtttacggactcggaataccagctgccgtacgtcctcggctctgcccaccagggctgcctgcctccgttcccggcggacgtcttcatgattcctcagtacggctacctgactctcaacaacggtagtcaggccgtgggacgttcctccttctactgcctggagtacttcccctctcagatgctgagaacgggcaacaacttttccttcagctacactttcgaggacgtgcctttccacagcagctacgcgcacagccagagtttggacaggctgatgaatcctctcatcgaccagtacctgtactacctgtcaagaacccagtctacgggaggcacagcgggaacccagcagttgctgttttctcaggccgggcctagcaacatgtcggctcaggccagaaactggctgcctggaccctgctacagacagcagcgcgtctccacgacactgtcgcaaaacaacaacagcaactttgcctggactggtgccaccaagtatcatctgaacggcagagactctctggtgaatccgggcgtcgccatggcaaccaacaaggacgacgaggaccgcttcttcccatccagcggcatcctcatgtttggcaagcagggagctggaaaagacaacgtggactatagcaacgtgatgctaaccagcgaggaagaaatcaaggccaccaaccccgtggccacagaacagtatggcgtggtggctgataacctacagcagcaaaacaccgctcctattgtgggggccgtcaacagccagggagccttacctggcatggtctggcagaaccgggacgtgtacctgcagggtcctatttgggccaagattcctcacacagatggcaactttcacccgtctcctttaatgggcggctttggacttaaacatccgcctcctcagatcctcatcaaaaacactcctgttcctgcggatcctccaacagcgttcaaccaggccaagctgaattctttcatcacgcagtacagcaccggacaagtcagcgtggagatcgagtgggagctgcagaaggagaacagcaagcgctggaacccagagattcagtatacttccaactactacaaatctacaaatgtggactttgctgttaatactgagggtgtttactctgagcctcgccccattggcactcgttacctcacccgtaatctgtaa

SEQ ID NO: 448 - protein, 738 aa, Adeno-associated virus
MAADGYLPDWLEDNLSEGIREWWDLKPGAPKPKANQQKQDDGRGLVLPGYKYLGPFNGLDKGEPVNAADAAALEHDKAYDQQLKAGDNPYLRYNHADAEFQERLQEDTSFGGNLGRAVFQAKKRVLEPLGLVEEGAKTAPGKKRPVEPSPQRSPDSSTGIGKKGQQPARKRLNFGQTGDSESVPDPQPIGEPPAAPSSVGSGTMAAGGGAPMADNNEGADGVGSSSGNWHCDSTWLGDRVITTSTRTWALPTYNNHLYKQISNGTSGGSTNDNTYFGYSTPWGYFDFNRFHCHFSPRDWQRLINNNWGFRPKRLSFKLFNIQVKEVTQNEGTKTIANNLTSTIQVFTDSEYQLPYVLGSAHQGCLPPFPADVFMIPQYGYLTLNNGSQAVGRSSFYCLEYFPSQMLRTGNNFSFSYTFEDVPFHSSYAHSQSLDRLMNPLIDQYLYYLSRTQSTGGTAGTQQLLFSQAGPSNMSAQARNWLPGPCYRQQRVSTTLSQNNNSNFAWTGATKYHLNGRDSLVNPGVAMATNKDDEDRFFPSSGILMFGKQGAGKDNVDYSNVMLTSEEEIKATNPVATEQYGVVADNLQQQNTAPIVGAVNSQGALPGMVWQNRDVYLQGPIWAKIPHTDGNFHPSPLMGGFGLKHPPPQILIKNTPVPADPPTAFNQAKLNSFITQYSTGQVSVEIEWELQKENSKRWNPEIQYTSNYYKSTNVDFAVNTEGVYSEPRPIGTRYLTRNL

SEQ ID NO: 449 - DNA, 2217 bp, Adeno-associated virus
  source 1..2217: mol_type = unassigned DNA
atggctgccgatggttatcttccagattggctcgaggacaacctctctgagggcattcgcgagtggtgggacctgaaacctggagccccgaaacccaaagccaaccagcaaaagcaggacgacggccggggtctggtgcttcctggctacaagcacctcggacccttcaacggactcgacaagggggagcccgtcaacgcggcggacgcagcggccctcgagcacgacaaggcctacgaccagcagctcaaagcgggtgacaatccgtacctgcggtataatcacgctgacgccgagtttcaggagcgtctgcaagaagatacgtcttttgggggcaacctcgggcgagcagtcttccaggccaagaagcgggttctcgaacctctcggtctggttgaggaaggcgctaagacggctcctggaaagaagagaccggtagagccgtcaccacagcgttcccccgactcctccacgggcatcggcaagaaaggccagcagcccgccagaaagagactcaatttcggtcagactggcgactcagagtcagtccccgaccctcaacctatcggagaacctccagcagcgccctctagtgtgggatctggtacaatggctgcaggcggtggcgcaccaatggcagacaataacgaaggtgccgacggagtgggtagttcctcgggaaattggcattgcgattccacatggctgggcgacagagtcatcaccaccagcacccgaacctgggccctgcccacctacaacaaccacctctacaagcaaatctccaacgggacctcgggaggcagcaccaacgacaacacctactttggctacagcaccccctgggggtattttgactttaacagattccactgccacttctcaccacgtgactggcagcgactcatcaacaacaactggggattccggcccaagagactcagcttcaagctcttcaacatccaggtcaaagaggtcacgcagaatgaaggcaccaagaccatcgccaataaccttaccagcacggttcaggtcttttcggactcggaataccagctgccctacgtcctcggctccgcacaccagggctgcctgcctccgttcccggcggacgtcttcatgattccccagtacggctacctgactctgaacaatggcagccaatcggtgggtcgttcctctttctactgcctggaatatttcccttctcaaatgctgagaacgggcaacaacttcaccttcagctacaccttcgaggacgttcccttccacagcagctacgcacacagccagagcctggaccggctgatgaatcctcttatcgaccagtacctgtattacctggccagaacacagagcaacgcaggaggcacagctggcaatcgggaactgcagttttatcagggcgggcctaccaccatggccgaacaagccaaaaactggctgcctggaccttgcttccggcaacaaagagtctccaagacgctggatcaaaacaacaacagcaactttgcttggactggtgccaccaaataccatctaaatggaagaaattcattggttaatcccggtgtcgccatggcaacccacaaggacgacgaggaacgcttcttcccttcgagcggagtcctgatttttggaaaaactggagcagctaataagactacactggaaaatgtgttaatgacaaatgaagaggaaattcgtcctaccaacccggtagccaccgaggaatacgggactgttagcagcaacctgcaggcggctaacactgcagcccagacacaagttgtcaacaaccagggagccttacctggtatggtctggcagaaccgggacgtgtacctgcagggtcccatctgggccaagattcctcacacggacggcaactttcacccgtctccgctgatgggcggctttggactgaagcatccgcctcctcagatcctgatcaaaaacactcctgttcctgctaatcccccggaggtgtttacgcctgccaagtttgcttctttcatcacacagtacagcaccggccaggtcagcgtggagatcgagtgggagctgcagaaggagaacagcaagcgctggaacccagagattcagtatacctccaattttgacaaacagactggtgtggactttgccgttgacagccagggtgtttattctgagcctcgccccattggtactcgttacctcacccgtaatctgtaa

SEQ ID NO: 450 - protein, 738 aa, Adeno-associated virus
MAADGYLPDWLEDNLSEGIREWWDLKPGAPKPKANQQKQDDGRGLVLPGYKHLGPFNGLDKGEPVNAADAAALEHDKAYDQQLKAGDNPYLRYNHADAEFQERLQEDTSFGGNLGRAVFQAKKRVLEPLGLVEEGAKTAPGKKRPVEPSPQRSPDSSTGIGKKGQQPARKRLNFGQTGDSESVPDPQPIGEPPAAPSSVGSGTMAAGGGAPMADNNEGADGVGSSSGNWHCDSTWLGDRVITTSTRTWALPTYNNHLYKQISNGTSGGSTNDNTYFGYSTPWGYFDFNRFHCHFSPRDWQRLINNNWGFRPKRLSFKLFNIQVKEVTQNEGTKTIANNLTSTVQVFSDSEYQLPYVLGSAHQGCLPPFPADVFMIPQYGYLTLNNGSQSVGRSSFYCLEYFPSQMLRTGNNFTFSYTFEDVPFHSSYAHSQSLDRLMNPLIDQYLYYLARTQSNAGGTAGNRELQFYQGGPTTMAEQAKNWLPGPCFRQQRVSKTLDQNNNSNFAWTGATKYHLNGRNSLVNPGVAMATHKDDEERFFPSSGVLIFGKTGAANKTTLENVLMTNEEEIRPTNPVATEEYGTVSSNLQAANTAAQTQVVNNQGALPGMVWQNRDVYLQGPIWAKIPHTDGNFHPSPLMGGFGLKHPPPQILIKNTPVPANPPEVFTPAKFASFITQYSTGQVSVEIEWELQKENSKRWNPEIQYTSNFDKQTGVDFAVDSQGVYSEPRPIGTRYLTRNL

SEQ ID NO: 451 - protein, 737 aa, Adeno-associated virus
MAADGYLPDWLEDNLSEGIREWWDLKPGAPKPKANQQKQDDGRGLVLPGYKYLGPFNGLDKGEPVNAADAAALEHDKAYDQQLKAGDNPYLRYNHADAEFQERLQEDTSFGGNLGRAVFQAKKRVLEPLGLVEEAAKTAPGKKRPVEPSPQRSPDSSTGIGKKGQQPARKRLNFGQTGDSESVPDPQPIGEPPAGPSGLGSGTMAAGGGAPMADNNKGADGVGNASGNWHCDSTWLGDRVITTSTRTWALPTYNNHLYKQISSQSAGSTNDNVYFGYSTPWGYFDFNRFHCHFSPRDWQRLINSNWGFRPKKLNFKLFNIQVKEVTTNDGVTTIANNLTSTVQVFSDSEYQLPYVLGSAHQGCLPPFPADVFMIPQYGYLTLNNGSQSVGRSSFYCLEYFPSQMLRTGNNFTFSYTFEDVPFHSSYAHSQSLDRLMNPLIDQYLYYLARTQSNAGGTAGNRELQFYQGGPTTMAEQAKNWLPGPCFRQQRVSKTLDQNNNSNFAWTGATKYHLNGRNSLVNPGVAMATHKDDEERFFPSSGVLIFGKTGAANKTTLENVLMTNEEEIRPTNPVATEEYGTVSSNLQAANTAAQTQVVNNQGALPGMVWQNRDVYLQGPIWAKIPHTDGNFHPSPLMGGFGLKHPPPQILIKNTPVPANPPEVFTPAKFASFITQYSTGQVSVEIEWELQKENSKRWNPEIQYTSNFDKQTGVDFAVDSQGVYSEPRPIGTRYLTRNL

SEQ ID NO: 452 - protein, 737 aa, Adeno-associated virus
MAADGYLPDWLEDNLSEGIREWWDLKPGAPKPKANQQKQDDGRGLVLPGYKYLGPFNGLDKGEPVNAADAAALEHDKAYDQQLKAGDNPYLRYNHADAEFQERLQEDTSFGGNLGRAVFQAKKRVLEPLGLVEEAAKTAPGKKRPVEPSPQRSPDSSTGIGKKGQQPARKRLNFGQTGDSESVPDPQPIGEPPAGPSGLGSGTMAAGGGAPMADNNEGADGVGNASGNWHCDSTWLGDRVITTSTRTWALPTYNNHLYKQISSQSAGSTNDNVYFGYSTPWGYFDFNRFHCHFSPRDWQRLINSNWGFRPKKLNFKLFNIQVKEVTTNDGVTTIANNLTSTVQVFSDSEYQLPYVLGSAHQGCLPPFPADVFMIPQYGYLTLNNGSQSVGRSSFYCLEYFPSQMLRTGNNFTFSYTFEDVPFHSSYAHSQSLDRLMNPLIDQYLYYLARTQSNAGGTAGNRELQFYQGGPTTMAEQAKNWLPGPCFRQQRVSKTLDQNNNSNFAWTGATKYHLNGRNSLVNPGVAMATHKDDEERFFPSSGVLIFGKTGAANKTTLENVLMTNEEEIRPTNPVATEEYGTVSSNLQAANTAAQTQVVNNQGALPGMVWQNRDVYLQGPIWAKIPHTDGNFHPSPLMGGFGLKHPPPQILIKNTPVPANPPEVFTPAKFASFITQYSTGQVSVEIEWELQKENSKRWNPEIQYTSNFDKQTGVDFAVDSQGVYSEPRPIGTRYLTRNL

SEQ ID NO: 453 - protein, 737 aa, Adeno-associated virus
MAADGYLPDWLEDNLSEGIREWWDLKPGAPKPKANQQKQDDGRGLVLPGYKYLGPFNGLDKGEPVNAADAAALEHDKAYDQQLKAGDNPYLRYNHADAEFQERLQEDTSFGGNLGRAVFQAKKRVLEPLGLVEEAAKTAPGKKRPVEPSPQRSPDSSTGIGKKGQQPARKRLNFGQTGDSESVPDPQPIGEPPAGPSGLGSGTMAAGGGAPMADNNEGADGVGNASGNWHCDSTWLGDRVITTSTRTWALPTYNNHLYKQISSQSAGSTNDNVYFGYSTPWGYFDFNRFHCHFSPRDWQRLINNNWGFRPKKLNFKLFNIQVKEVTTNDGVTTIANNLTSTVQVFSDSEYQLPYVLGSAHQGCLPPFPADVFMIPQYGYLTLNNGSQSVGRSSFYCLEYFPSQMLRTGNNFTFSYTFEDVPFHSSYAHSQSLDRLMNPLIDQYLYYLARTQSNAGGTAGNRELQFYQGGPTTMAEQAKNWLPGPCFRQQRVSKTLDQNNNSNFAWTGATKYHLNGRNSLVNPGVAMATHKDDEERFFPSSGVLIFGKTGAANKTTLENVLMTNEEEIRPTNPVATEEYGTVSSNLQAANTAAQTQVVNNQGALPGMVWQNRDVYLQGPIWAKIPHTDGNFHPSPLMGGFGLKHPPPQILIKNTPVPANPPEVFTPAKFASFITQYSTGQVSVEIEWELQKENSKRWNPEIQYTSNFDKQTGVDFAVDSQGVYSEPRPIGTRYLTRNL

SEQ ID NO: 454 - protein, 737 aa, Adeno-associated virus
MAADGYLPDWLEDNLSEGIREWWDLKPGAPKPKANQQKQDDGRGLVLPGYKYLGPFNGLDKGEPVNAADAAALEHDKAYDQQLKAGDNPYLRYNHADAEFQERLQEDTSFGGNLGRAVFQAKKRVLEPLGLVEEAAKTAPGKKRPVEPSPQRSPDSSTGIGKKGQQPARKRLNFGQTGDSESVPDPQPIGEPPAGPSGLGSGTMAAGGGAPMADNNKGADGVGNASGNWHCDSTWLGDRVITTSTRTWALPTYNNHLYKQISSQSAGSTNDNVYFGYSTPWGYFDFNRFHCHFSPRDWQRLINNNWGFRPKKLNFKLFNIQVKEVTTNDGVTTIANNLTSTVQVFSDSEYQLPYVLGSAHQGCLPPFPADVFMIPQYGYLTLNNGSQSVGRSSFYCLEYFPSQMLRTGNNFTFSYTFEDVPFHSSYAHSQSLDRLMNPLIDQYLYYLARTQSNAGGTAGNRELQFYQGGPTTMAEQAKNWLPGPCFRQQRVSKTLDQNNNSNFAWTGATKYHLNGRNSLVNPGVAMATHKDDEERFFPSSGVLIFGKTGAANKTTLENVLMTNEEEIRPTNPVATEEYGTVSSNLQAANTAAQTQVVNNQGALPGMVWQNRDVYLQGPIWAKIPHTDGNFHPSPLMGGFGLKHPPPQILIKNTPVPANPPEVFTPAKFASFITQYSTGQVSVEIEWELQKENSKRWNPEIQYTSNFDKQTGVDFAVDSQGVYSEPRPIGTRYLTRNL

SEQ ID NO: 455 - DNA, 2214 bp, Adeno-associated virus
  source 1..2214: mol_type = unassigned DNA
atggctgctgacggttatcttccagattggctcgaggacaacctctctgagggcattcgcgagtggtgggacctgaaacctggagcccccaagcccaaggccaaccagcagaagcaggacgacggccggggtctggtgcttcctggctacaagtacctcggacccttcaacggactcgacaagggggagcccgtcaacgcggcggacgcagcggccctcgagcacgacaaggcctacgaccagcagctcaaagcgggtgacaatccgtacctgcggtataaccacgccgacgccgagtttcaggagcgtctgcaagaagatacgtcttttgggggcaacctcgggcgagcagtcttccaggccaagaagcgggttctcgaacctctcggtctggttgaggaagctgctaagacggctcctggaaagaagagaccggtagaaccgtcacctcagcgttcccccgactcctccacgggcatcggcaagaaaggccagcagcccgctagaaagagactgaactttgggcagactggcgactcagagtcagtccccgaccctcaaccaatcggagaaccaccagcaggcccctctggtctgggatctggtacaatggctgcaggcggtggcgcaccaatggctgacaataacaagggcgccgacggagtgggtaatgcctcaggaaattggcattgcgattccacatggctgggcgacagagtcatcaccaccagcacccgaacctgggctttgcccacctacaacaaccacctctacaagcaaatctccagtcagtcagcaggtagcaccaacgacaacgtctacttcggctacagcaccccctgggggtattttgacttcaacagattccactgtcacttctcaccacgtgactggcagcggctcatcaacagcaactggggattccggcccaagaagctcaacttcaagctgttcaacatccaggtcaaggaggtcacaacgaatgacggcgtcacgaccatcgccaataaccttaccagcacggttcaggtcttttcggactcggaataccagctgccctacgtcctcggctccgcacaccagggctgcctgcctccgttcccggcggacgtcttcatgattccccagtacggctacctgactctgaacaatggcagccaatcggtgggtcgttcctctttctactgcctggaatatttcccttctcaaatgctgagaacgggcaacaacttcaccttcagctacaccttcgaggacgttcccttccacagcagctacgcacacagccagagcctggaccggctgatgaatcctcttatcgaccagtacctgtattacctggccagaacacagagcaacgcaggaggcacagctggcaatcgggaactgcagttttatcagggcgggcctaccaccatggccgaacaagccaaaaactggctgcctggaccttgcttccggcaacaaagagtctccaagacgctggatcaaaacaacaacagcaactttgcttggactggtgccaccaaataccatctaaatggaagaaattcattggttaatcccggtgtcgccatggcaacccacaaggacgacgaggaacgcttcttcccttcgagcggagtcctgatttttggaaaaactggagcagctaataagactacactggaaaatgtgttaatgacaaatgaagaggaaattcgtcctaccaacccggtagccaccgaggaatacgggactgttagcagcaacctgcaggcggctaacactgcagcccagacacaagttgtcaacaaccagggagccttacctggtatggtctggcagaaccgggacgtgtacctgcagggtcccatctgggccaagattcctcacacggacggcaactttcacccgtctccgctgatgggcggctttggactgaagcatccgcctcctcagatcctgatcaaaaacactcctgttcctgctaatcccccggaggtgtttacgcctgccaagtttgcttctttcatcacacagtacagcaccggccaggtcagcgtggagatcgagtgggagctgcagaaggagaacagcaagcgctggaacccagagattcagtatacctccaattttgacaaacagactggtgtggactttgccgttgacagccagggtgtttattctgagcctcgccccattggtactcgttacctcacccgtaatctgtaa

SEQ ID NO: 456 - DNA, 2217 bp, Adeno-associated virus
  source 1..2217: mol_type = unassigned DNA
atggctgccgatggttatcttccagattggctcgaggacaacctctctgagggcattcgcgagtggtgggacctgaaacctggagccccgaaacccaaagccaaccagcaaaagcaggacgacggccggggtctggtgcttcctggctacaagtacctcggacccttcaacggactcgacaagggggagcccgtcaacgcggcggacgcagcggccctcgagcacgacaaggcctacgaccagcagctcaaagcgggtgacaatccgcacctgcggtataatcacgccgacgccgagtttcaggagcgtctgcaagaagatacgtcttttgggggcaacctcgggcgagcagtcttccaggccaagaagcgggttctcgaacctctcggtctggttgaggaaggcgctaagacggctcctggaaagaagagaccggtagagccgtcaccacagcgttcccccgactcctccacgggcatcggcaagaaaggccagcagcccgccagaaagagactcaatttcggtcagactggcgactcagagtcagtccccgaccctcaacttatcggagaacctccagcagcgccctctagtgtgggatctggtacaatggctgcaggcggtggcgcaccaatggcagacaataacgaaggtgccgacggagtgggtagttcctcgggaaattggcattgcgattccacatggctgggcgacagagtcatcaccaccagcacccgaacctgggccctgcccacctacaacaaccacctctacaagcaaatctccaacgggacctcgggaggcagcaccaacgacaacacctactttggctacagcaccccctgggggtattttgactttaacagattccactgccacttctcaccacgtgactggcagcgactcatcaacaacaactggggattccggcccaagagactcagcttcaagctcttcaacatccaggtcaaagaggtcacgcagaatgaaggcaccaagaccatcgccaataacctcaccagcaccatccaggtgtttacggactcggagtaccagctgccgtacgtcctcggctctgcccaccagggctgcctgcctccgttcccggcggacgtcttcatgattcctcagtacggcaacctgactctcaacaacggtagtcaggccgtgggacgttcctccttctactgcctggagtacttcccctctcagatgctgagaacgggcaacaacttttccttcagctacactttcgaggacgtgcctttccacagcagctacgcgcacagccagagtttggacaggctgatgaatcctctcatcgaccagtacctgtactacctgtcaagaacccagtctacgggaggcacagcgggaacccagcagttgctgttttctcaggccgggcctagcaacatgtcggctcaggccagaaactggctgcctggaccctgctacagacagcagcgcgtctccacgacactgtcgcaaaacaacaacagcaactttgcctggactggtgccaccaagtatcatctgaacggcagagactctctggtgaatccgggcgtcgccatggcaaccaacaaggacgacgaggaccgcttcttcccatccagcggcatcctcatgtttggcaagcagggagctggaaaagacaacatgggctatagcaacgtgatgctaaccagcgaggaagaaatcaagaccaccaaccccgtggccacagaacagtatggcgtggtggctgataacctacagcagcaaaacaccgctcctattgtgggggccgtcaacagccagggagccttacctggcatggtctggcagaaccgggacgtgtacctgcagggtcctatttgggccaagattcctcacacagatggcaactttcacccgtctcctttaatgggcggctttggacttaaacatccgcctcctcagatcctcatcaaaaacactcctgttcctgcggatcctccaacagcgttcaaccaggccaagctgaattctttcatcacgcagtacggcaccggacaagtcagcgtggagatcgagtgggagctgcagaaggagaacagcaagcgctggaacccagagattcagtatacttccaactactacaaatctacaaatgtggactttgctgttaatactgagggtgtttactctgagcctcgccccattggcactcgttacctcacccgtaatctgtaa

SEQ ID NO: 457 - protein, 738 aa, Adeno-associated virus
MAADGYLPDWLEDNLSEGIREWWDLKPGAPKPKANQQKQDDGRGLVLPGYKYLGPFNGLDKGEPVNAADAAALEHDKAYDQQLKAGDNPHLRYNHADAEFQERLQEDTSFGGNLGRAVFQAKKRVLEPLGLVEEGAKTAPGKKRPVEPSPQRSPDSSTGIGKKGQQPARKRLNFGQTGDSESVPDPQLIGEPPAAPSSVGSGTMAAGGGAPMADNNEGADGVGSSSGNWHCDSTWLGDRVITTSTRTWALPTYNNHLYKQISNGTSGGSTNDNTYFGYSTPWGYFDFNRFHCHFSPRDWQRLINNNWGFRPKRLSFKLFNIQVKEVTQNEGTKTIANNLTSTIQVFTDSEYQLPYVLGSAHQGCLPPFPADVFMIPQYGNLTLNNGSQAVGRSSFYCLEYFPSQMLRTGNNFSFSYTFEDVPFHSSYAHSQSLDRLMNPLIDQYLYYLSRTQSTGGTAGTQQLLFSQAGPSNMSAQARNWLPGPCYRQQRVSTTLSQNNNSNFAWTGATKYHLNGRDSLVNPGVAMATNKDDEDRFFPSSGILMFGKQGAGKDNMGYSNVMLTSEEEIKTTNPVATEQYGVVADNLQQQNTAPIVGAVNSQGALPGMVWQNRDVYLQGPIWAKIPHTDGNFHPSPLMGGFGLKHPPPQILIKNTPVPADPPTAFNQAKLNSFITQYGTGQVSVEIEWELQKENSKRWNPEIQYTSNYYKSTNVDFAVNTEGVYSEPRPIGTRYLTRNL

SEQ ID NO: 458 - DNA, 2217 bp, Adeno-associated virus
  source 1..2217: mol_type = unassigned DNA
atggctgccgatggttatcttccagattggctcgaggacaacctctctgagggcattcgcgagtggtgggacctgaaacctggagccccgaaacccaaagccaaccagcaaaagcaggacgacggccggggtctggtgcttcctggctacaagtacctcggacccttcaacggactcgacaagggggagcccgtcaacgcggcggacgcagcggccctcgagcacgacaaggcctacgaccagcagctcaaagcgggtgacaatccgtacctgcggtataatcacgccgacgccgagtttcaggagcgtctgcaagaagatacgtcttttgggggcaacctcgggcgagcagtcttccaggccaagaagcgggttctcgaacctctcggtctggttgaggaaggcgctaagacggctcctggaaagaagagaccggtagagccgtcaccacagcgttcccccgactcctccacgggcatcggcaagaaaggccagcagcccgccggaaagagactcaatttcggtcagactggcgactcagagtcagtccccgaccctcaacctatcggagaacctccagcagcgccctctagtgtgggatctggtacaatggctgcaggcggtggcgcaccaatggcagacaataacgaaggtgccgacggagtgggtagttcctcgggaaattggcattgcgattccacatggctgggcgacagagtcatcaccaccagcacccgaacctgggccctgcccacctacaacaaccacctctacaagcaaatctccaacgggacctcgggaggcagcaccaacgacaacacctactttggctacagcaccccctgggggtattttgactttaacagattccactgccacttctcaccacgtgactggcagcgactcatcaacaacaactggggattccggcccaagagactcagcttcaagctcttcaacatccaggtcaaagaggtcacgcagaatgaaggcaccaagaccatcgccaataacctcaccagcaccatccaggtgtttacggactcggaataccagctgccgtacgtcctcggctctgcccaccagggctgcctgcctccgttcccggcggacgtcttcatgattcctcagtacggctacctgactctcaacaacggtagtcaggccgtgggacgttcctccttctactgcctggagtacttcccctctcagatgctgagaacgggcaacaacttttccttcagctacactttcgaggacgtgcctttccacagcagctacgcgcacagccagagtttggacaggctgatgaatcctctcgtcgaccagtacctgtactacctgtcaagaacccagtctacgggaggcacagcgggaacccagcagttgctgttttctcaggccgggcctagcaacatgtcggctcaggccagaaactggctgcctggaccctgctacagacagcagcgcgtctccacgacactgtcgcaaaacaacaacagcaactttgcctggactggtgccaccaagtatcatctgaacggcagagactctctggtgaatccgggcgtcgccatggcaaccaacaaggacgacgaggaccgcttcttcccatccagcggcatcctcatgtttggcaagcagggagctggaaaagacaacgtggactatagcaacgtgatgctaaccagcgaggaagaaatcaagaccaccaaccccgtggccacagaacagtatggcgtggtggctgataacctacagcagcaaaacaccgctcctattgtgggggccgtcaacagccagggagccttacctggcatggtctggcagaaccgggacgtgtacctgcagggtcctatttgggccaagattcctcacacagatggcaactttcacccgtctcctttaatgggcggctttggacttaaacatccgcctcctcagatcctcatcaaaaacactcctgttcctgcggatcctccaacagcgttcaaccaggccaagctgaattctttcatcacgcagtacagcaccggacaagtcagcgtggagatcgagtgggagctgcagaaggagaacagcaagcgctggagcccagagattcagtatacttccaactactacaaatctacaaatgtggactttgctgttaatactgagggtgtttactctgagcctcgccccattggcactcgttacctcacccgtaatctgtaa

SEQ ID NO: 459 - protein, 738 aa, Adeno-associated virus
MAADGYLPDWLEDNLSEGIREWWDLKPGAPKPKANQQKQDDGRGLVLPGYKYLGPFNGLDKGEPVNAADAAALEHDKAYDQQLKAGDNPYLRYNHADAEFQERLQEDTSFGGNLGRAVFQAKKRVLEPLGLVEEGAKTAPGKKRPVEPSPQRSPDSSTGIGKKGQQPAGKRLNFGQTGDSESVPDPQPIGEPPAAPSSVGSGTMAAGGGAPMADNNEGADGVGSSSGNWHCDSTWLGDRVITTSTRTWALPTYNNHLYKQISNGTSGGSTNDNTYFGYSTPWGYFDFNRFHCHFSPRDWQRLINNNWGFRPKRLSFKLFNIQVKEVTQNEGTKTIANNLTSTIQVFTDSEYQLPYVLGSAHQGCLPPFPADVFMIPQYGYLTLNNGSQAVGRSSFYCLEYFPSQMLRTGNNFSFSYTFEDVPFHSSYAHSQSLDRLMNPLVDQYLYYLSRTQSTGGTAGTQQLLFSQAGPSNMSAQARNWLPGPCYRQQRVSTTLSQNNNSNFAWTGATKYHLNGRDSLVNPGVAMATNKDDEDRFFPSSGILMFGKQGAGKDNVDYSNVMLTSEEEIKTTNPVATEQYGVVADNLQQQNTAPIVGAVNSQGALPGMVWQNRDVYLQGPIWAKIPHTDGNFHPSPLMGGFGLKHPPPQILIKNTPVPADPPTAFNQAKLNSFITQYSTGQVSVEIEWELQKENSKRWSPEIQYTSNYYKSTNVDFAVNTEGVYSEPRPIGTRYLTRNL

SEQ ID NO: 460 - DNA, 2217 bp, Adeno-associated virus
  source 1..2217: mol_type = unassigned DNA
atggttgccgatggttatcttccagattggctcgaggacaacctctctgagggcattcgcgagtggtgggacctgaaacctggagccccgaaacccaaagccaaccagcaaaagcagggcgacggccggggtctggtgcttcctggctacaagtacctcggacccttcaacggactcgacaagggggagcccgtcaacgcggcggacgcagcggccctcgagcacgacaaggcctacgaccagcagcttaaagcgggtgacaatccgtacctgcggtataatcacgccgacgccgagcttcaggagcgtctgcaagaagatacgtcttttgggggcaacctcgggcgagcagtcttccaggccaagaagcgggttctcgaacctctcggtctggttgaggaaggcgctaagacggctcctggaaagaagagaccggtagagccgtcaccacagcgttcccccgactcctccacgggcatcggcaagaaaggccagcagcccgccagaaagagactcaatttcggtcagactggcgactcagagtcagtccccgaccctcaacctatcggagaacctccagcagcgccctctagtgtgggatctggtacaatggctgcaggcggtggcgcgccaatggcagacaataacgaaggtgccgacggagtgggtagttcctcgggaaattggcattgcgattccacatggctgggcgacagagtcatcaccaccagcacccgaacctgggccctgcccacctacaacaaccacctctacaagcaaatctccaacgggacctcgggaggcagcaccaacgacaacacctactttggctacagcaccccctgggggtattttgactttaacagattccactgccacttctcaccacgtgactggcagcgactcatcaacaacaactggggattccggcccaagagactcagcttcaagctcttcaacatccaggtcaaagaggtcacgcagaatgaaggcaccaagaccatcgccaataacctcaccagcaccatccaggtgtttacggactcggaataccagctgccgtacgtcctcggctctgcccaccagggctgccagcctccgttcccggcggacgtcttcatgattcctcagtacggctacctgactctcaacaacggtagtcaggccgtgggacgttcctccttctactgcctggagtacttcccctctcagatgctgagaacgggcaacaacttttccttcagctacactttcgaggacgtgcctttccacagcagctacgcgcacagccagagtttggacaggctgatgaatcctctcatcgaccagtacctgtactacctgtcaagaacccagtctacgggaggcacagcgggaacccagcagttgctgttttctcaggccgggcctagcaacatgtcggctcaggccagaaactggctgcctggaccctgctacagacagcagcgcgtctccacgacactgtcgcaaaacaacaacagcaactttgcctggactggtgccaccaagtatcatctgaacggcagagactctctggtgaatccgggcgtcgccatggcaaccaacaaggacgacgaggaccgcttcttcccatccagcggcatcctcatgtttggcaagcagggagctggaaaagacaacgtggactatagcaacgtgatgctaaccagcgaggaagaaatcaagaccaccaaccccgtggccacagaacagtatggcgtggtggctgataacctacagcagcaaaacaccgctcctattgtgggggccgtcaacagccagggagccttacctggcatggtctggcagaaccgggacgtgtacctgcagggtcctatttgggccaagattcctcacacagatggcaactttcacccgtctcctttaatgggcggctttggacttaaacatccgcctcctcagatcctcatcaaaaacactcctgttcctgcggatcctccaacagcgttcaaccaggccaagctgaattctttcatcacgcagtacagcaccggacaagtcagcgtggagatcgagtgggagccgcagaaggagaacagcaagcgctggaacccagagattcagtatacttccaactactacaaatctacaaatgtggactttgctgttaatactgagggtgtttactctgagcctcgccccattggcactcgttacctcacccgtaatctgtaa

SEQ ID NO: 461 - protein, 738 aa, Adeno-associated virus
MVADGYLPDWLEDNLSEGIREWWDLKPGAPKPKANQQKQGDGRGLVLPGYKYLGPFNGLDKGEPVNAADAAALEHDKAYDQQLKAGDNPYLRYNHADAELQERLQEDTSFGGNLGRAVFQAKKRVLEPLGLVEEGAKTAPGKKRPVEPSPQRSPDSSTGIGKKGQQPARKRLNFGQTGDSESVPDPQPIGEPPAAPSSVGSGTMAAGGGAPMADNNEGADGVGSSSGNWHCDSTWLGDRVITTSTRTWALPTYNNHLYKQISNGTSGGSTNDNTYFGYSTPWGYFDFNRFHCHFSPRDWQRLINNNWGFRPKRLSFKLFNIQVKEVTQNEGTKTIANNLTSTIQVFTDSEYQLPYVLGSAHQGCQPPFPADVFMIPQYGYLTLNNGSQAVGRSSFYCLEYFPSQMLRTGNNFSFSYTFEDVPFHSSYAHSQSLDRLMNPLIDQYLYYLSRTQSTGGTAGTQQLLFSQAGPSNMSAQARNWLPGPCYRQQRVSTTLSQNNNSNFAWTGATKYHLNGRDSLVNPGVAMATNKDDEDRFFPSSGILMFGKQGAGKDNVDYSNVMLTSEEEIKTTNPVATEQYGVVADNLQQQNTAPIVGAVNSQGALPGMVWQNRDVYLQGPIWAKIPHTDGNFHPSPLMGGFGLKHPPPQILIKNTPVPADPPTAFNQAKLNSFITQYSTGQVSVEIEWEPQKENSKRWNPEIQYTSNYYKSTNVDFAVNTEGVYSEPRPIGTRYLTRNL

SEQ ID NO: 462 - DNA, 2217 bp, Adeno-associated virus
  source 1..2217: mol_type = unassigned DNA
atggctgccgatggttatcttccagattggctcgaggacaacctctctgagggcattcgcgagtggtgggacctgaaacctggagccccgaaacccaaagccaaccagcaaaagcaggacgacggccggggtctggtgcttcctggctacaagtacctcggacccttcaacggactcgacaagggggagcccgtcaacgcggcggacgcagcggccctcgagcacgacaaggcctacgaccagcagctcaaagcgggtgacaatccgtacctgcggtataatcacgccgacgccgagtttcaggagcgtctgcaagaagatacgtcttttgggggcaacctcgggcgagcagtcttccaggccaagaagcgggttctcgaacctctcggtctggttgaggaaggcgctaagacggctcctggaaagaagagaccggtagagccgtcaccacagcgttcccccgactcctccacgggcatcggcaagaaaggccagcagcccgccagaaagagactcaatttcggtcagactggcgactcagagtcagtccccgaccctcaacctatcggagaacctccagcagcgccctctagtgtgggatctggtacaatggctgcaggcggtggcgcaccaatggcagacaataacgaaggtgccgacggagtgggtagttcctcgggaaattggcattgcgattccacatggctgggcgacagagtcatcaccaccagcacccgaacctgggccctgcccacctacaacaaccacctctacaagcaaatctccaacgggacctcgggaggcagcaccaacgacaacacctactttggctacagcaccccctgggggtattttgactttaacagattccactgccacttctcaccacgtgactggcagcgactcatcaacaacaactggggattccggcccaagagactcagcttcaagctcttcaacatccaggtcaaagaggtcacgcagaatgaaggcaccaagaccatcgccaatagcctcaccagcaccatccaggtgtttacggactcggaataccagctgccgtacgtcctcggctctgcccaccagggctgcctgcctccgttcccggcggacgtcttcatgattcctcagtacggctacctgactcccaacaacggtagtcaggccgtgggacgttcctccttctactgcctggagtacttcccctctcagatgctgagaacgggcaacaacttttccttcagctacactttcgaggacgtgcctttccacagcagctacgcgcacagccagagtttggacaggctgatgaatcctctcatcgaccagtacctgtactacctgtcaagaacccagtctacgggaggcacagcgggaacccagcagttgctgtcttctcaggccgggcctagcaacatgtcggctcaggccagaaactggctgcctggaccctgctacagacagcagcgcgtctccacgacactgtcgcaaaacaacaacagcaactttgcctggactggtgccaccaagtatcatctgaacggcagagactctctggtgaatccgggcgtcgccatggcaaccaacaaggacgacgaggaccgcttcttcccatccagcggcatcctcatgtttggcaagcagggagctggaaaagacaacgtggactatagcaacgtgatgctaaccagcgaggaagaaatcaagaccaccaaccccgtggccacagaacagtatggcgtggtggctgataacctacagcagcaaaacaccgctcctattgtgggggccgtcaacagccagggagccttacctggcatggtctggcagaaccgggacgtgtacttgcagggtcctatttgggccaagattcctcacacagatggcaactttcacccgtctcctttaatgggcggctttggacttaaacatccgcctcctcagatcctcatcaaaaacactcctgttcctgcggatcctccaacagcgttcaaccaggccaagctgaattctttcatcacgcagtacagcaccggacaagtcagcgtggagatcgagtgggagctgcagaaggagaacagcaagcgctggaacccagagattcagtatacttccaactactacaaatctacaaatgtggactttgctgttaatactgagggtgtttactctgagcctcgccccattggcactcgttacctcacccgtaatctgtaa

SEQ ID NO: 463 - protein, 738 aa, Adeno-associated virus
MAADGYLPDWLEDNLSEGIREWWDLKPGAPKPKANQQKQDDGRGLVLPGYKYLGPFNGLDKGEPVNAADAAALEHDKAYDQQLKAGDNPYLRYNHADAEFQERLQEDTSFGGNLGRAVFQAKKRVLEPLGLVEEGAKTAPGKKRPVEPSPQRSPDSSTGIGKKGQQPARKRLNFGQTGDSESVPDPQPIGEPPAAPSSVGSGTMAAGGGAPMADNNEGADGVGSSSGNWHCDSTWLGDRVITTSTRTWALPTYNNHLYKQISNGTSGGSTNDNTYFGYSTPWGYFDFNRFHCHFSPRDWQRLINNNWGFRPKRLSFKLFNIQVKEVTQNEGTKTIANSLTSTIQVFTDSEYQLPYVLGSAHQGCLPPFPADVFMIPQYGYLTPNNGSQAVGRSSFYCLEYFPSQMLRTGNNFSFSYTFEDVPFHSSYAHSQSLDRLMNPLIDQYLYYLSRTQSTGGTAGTQQLLSSQAGPSNMSAQARNWLPGPCYRQQRVSTTLSQNNNSNFAWTGATKYHLNGRDSLVNPGVAMATNKDDEDRFFPSSGILMFGKQGAGKDNVDYSNVMLTSEEEIKTTNPVATEQYGVVADNLQQQNTAPIVGAVNSQGALPGMVWQNRDVYLQGPIWAKIPHTDGNFHPSPLMGGFGLKHPPPQILIKNTPVPADPPTAFNQAKLNSFITQYSTGQVSVEIEWELQKENSKRWNPEIQYTSNYYKSTNVDFAVNTEGVYSEPRPIGTRYLTRNL

SEQ ID NO: 464 - protein, 738 aa, Adeno-associated virus
MAADGYLPDWLEDNLSEGIREWWDLKPGAPKPKANQQKQDDGRGLVLPGYKYLGPFNGLDKGEPVNAADAAALEHDKAYDQQLKAGDNPYLRYNHADAEFQERLQEDTSFGGNLGRAVFQAKKRVLEPLGLVEEGAKTAPGKKRPVEPSPQRSPDSSTGIGKKGQQPARKRLNFGQTGDSESVPDPQPIGEPPAAPSSVGSGTMAAGGGAPMADNNEGADGVGSSSGNWHCDSTWLGDRVITTSTRTWALPTYNNHLYKQISNGTSGGSTNDNTYFGYSTPWGYFDFNRFHCHFSPRDWQRLINNNWGFRPKRLSFKLFNIQVKEVTQNEGTKTIANNLTSTIQVFTDSEYQLPYVLGSAHQGCLPPFPADVFMIPQYGYLTLNNGSQAVGRSSFYCLEYFPSQMLRTGNNFSFSYTFEDVPFHSSYVHSQSLDRLMNPLIDQYLYYLSRTQSTGGTAGTQQLLFSQAGPSNMSAQARNWLPGPCYRQQRVSTTLSQNNNSNFAWTGATKYHLNGRDSLVNSGVAMATNKDDEDRFFPSSGILMFGKQGAGKDNVDYSNVMLTSEEEIKTTNPVATEQYGVVADNLQQQNTAPIVGAVNSQGALPGMVWQNRDVYLQGPIWAKIPHTDGNFHPSPLMGGFGLKHPPPQILIKNTPVPADPPTAFNQAKLNSFITQYSTGQVSVEIEWELQKENSKRWNPEIQYTSNYYKSTNVDFAVNTEGVYSEPRPIGTRYPTRNL

SEQ ID NO: 465 - DNA, 2217 bp, Adeno-associated virus
  source 1..2217: mol_type = unassigned DNA
atggctgccgatggttatcttccagattggctcgaggacaacctctctgagggcattcgcgagtggtgggacctgaaacctggagccccgaaacccaaagccaaccagcaaaagcaggacgacggccggggtctggtgcttcctggctacaagtacctcggacccttcaacggactcgacaagggggagcccgtcaacgcggcggacgcagcggccctcgagcacgacaaggcctacgaccagcagctcaaagcgggtgacaatccgtacctgcggtataatcacgccgacgccgagtttcaggagcgtctgcaagaagatacgtcttttgggggcaacctcgggcgagcagtcttccaggccaagaagcgggttctcgaacctctcggtctggttgaggaaggcgctaagacggctcctggaaagaagagaccggtagagccgtcaccacagcgttcccccgactcctccacgggcatcggcaagaaaggccagcagcccgccagaaagagactcaatttcggtcagactggcgactcagagtcagtccccgaccctcaacctatcggagaacctccagcagcgccctctagtgtgggatctggtacaatggctgcaggcggtggcgcaccaatggcagacaataacgaaggtgccgacggagtgggtagttcctcgggaaattggcattgcgattccacatggctgggcgacagagtcatcaccaccagcacccgaacctgggccctgcccacctacaacaaccacctctacaagcaaatctccaacgggacctcgggaggcagcaccaacgacaacacctactttggctacagcaccccctgggggtattttgactttaacagattccactgccacttctcaccacgtgactggcagcgactcatcaacaacaactggggattccggcccaagagactcagcttcaagctcttcaacatccaggtcaaagaggtcacgcagaatgaaggcaccaagaccatcgccaataacctcaccagcaccatccaggtgtttacggactcggaataccagctgccgtacgtcctcggctctgcccaccagggctgcctgcctccgttcccggcggacgtcttcatgattcctcagtacggctacctgactctcaacaacggtagtcaggccgtgggacgttcctccttctactgcctggagtacttcccctctcagatgctgagaacgggcaacaacttttccttcagctacactttcgaggacgtgcctttccacagcagctacgtgcacagccagagtttggacaggctgatgaatcctctcatcgaccagtacctgtactacctgtcaagaacccagtctacgggaggcacagcgggaacccagcagttgctgttttctcaggccgggcctagcaacatgtcggctcaggccagaaactggctgcctggaccctgctacagacagcagcgcgtctccacgacactgtcgcaaaacaacaacagcaactttgcctggactggtgccaccaagtatcatctgaacggcagagactctctggtgaattcgggcgtcgccatggcaaccaacaaggacgacgaggaccgcttcttcccatccagcggcatcctcatgtttggcaagcagggagctggaaaagacaacgtggactatagcaacgtgatgctaaccagcgaggaagaaatcaagaccaccaaccccgtggccacagaacagtatggcgtggtggctgataacctacagcagcaaaacaccgctcctattgtgggggccgtcaacagccagggagccttacctggcatggtctggcagaaccgggacgtgtacctgcagggtcctatttgggccaagattcctcacacagatggcaactttcacccgtctcctttaatgggcggctttggacttaaacatccgcctcctcagatcctcatcaaaaacactcctgttcctgcggatcctccaacagcgttcaaccaggccaagctgaattctttcatcacgcagtacagcaccggacaagtcagcgtggagatcgagtgggagctgcagaaggagaacagcaagcgctggaacccagagattcagtatacttccaactactacaaatctacaaatgtggactttgctgttaatactgagggtgtttactctgagcctcgccccattggcactcgttaccccacccgtaatctgtaa

SEQ ID NO: 466 - protein, 734 aa, Adeno-associated virus; identical to SEQ ID NO: 291

SEQ ID NO: 467 - DNA, 2214 bp, Adeno-associated virus
  source 1..2214: mol_type = unassigned DNA
atggctgctgacggttatcttccagattggctcgaggacaacctctctgagggcattcgcgagtggtgggacctgaaacctggagccccgaaacccaaagccaaccagcagaagcaggacgacggccggggtctggtgcttcctggctacaagtacctcggacccttcaacggactcgacaagggggagcccgtcaacgcggcggacgcagcggccctcgagcacgacaaggcctacgaccagcagctcaaagcgggtgacaatccgtacctgcggtataaccacgccgacgccgagtttcaggagcgtctgcaagaagatacgtcttttgggggcaacctcgggcgagcagtcttccaggccaagaagcgggttctcgaacctctcggtctggttgaggaagctgctaagacggctcctggaaagaagagaccggtagaaccgtcacctcagcgttcccccgactcctccacgggcatcggcaagaaaggccagcagcccgctagaaagagactgaactttgggcagactggcgactcagagtcagtccccgaccctcaacctctcggagaaccaccagcaggcccctctggtctgggatctggtacaatggctgcaggcggtggcgctccaatggcagacaataacgaaggcgccgacggagtgggtaatgcctcaggaaattggcattgcgattccacatggctgggcgacagagtcatcaccaccagcacccgaacctgggctttgcccacctacaacaaccacctctacaagcaaatctccagtcagtcagcaggtagcaccaacgacaacgtctacttcggctacagcaccccctgggggtattttgacttcaacagattccactgtcacttctcaccacgtgactggcagcgactcatcaacaacaactggggattccggcccaagaagctcaacttcaagctcttcaacatccaagtcaaggaggtcacgacgaatgacggcgtcacgaccatcgctaataaccttaccagcacggttcaggtcttttcggactcggagtaccagctgccgtacgtcctcggctctgcccaccagggctgcctgcctccgttcccggcggacgtcttcatgattcctcagtacggctacctgactctgaacaatggcagccaatcggtgggacgttcatccttctactgcctggaatacttcccttctcaggtgctgagaacgggtaacaacttcaccttcagttacaccttcgaggacgtgcctttccacagcagctacgcgcacagccagagcctagaccggctgatgaatcccctcatcgaccagtacctgtattacctggctagaacacagagtaacccaggaggcacatctggcaatcgggaactgcagttttaccagggcgggccttccaccatggccgaacaagccaagaactggttacctggaccttgcttccggcaacaaagagtttccaaaacactggatcaaaacaacaacagcaactttgcttggactggtgccaccaaatatcacctgaacggcagaaactcattggtgaatcctggtgtcgccatggcaactcacaaggacgacgaggaccgctttttcccatccagcggagtcctgatttttggaaaaactggagcaaccaacaagactacattggaaaacgtgttaatgacaaatgaagaagaaattcgtcctactaatcctgtggccacagaagaatacgggatagtcagcagcaatttacaagcggccaatactgcagcccagacacaagttgtcaacaaccagggagccttacctggcatggtctggcagaaccgggacgtgtacctgcagggtcccatctgggccaaaattcctcacacagacggcaactttcacccgtctccgctgatgggcggctttggactgaagcatccgcctcctcagatcctgatcaaaaacactcctgttcctgctaatcccccggaggtgtttacgcctgccaagtttgcttctttcatcacacagtacagcaccggccaggtcagcgtggagatcgagtgggagctgcagaaggagaacagcaagcgctggaacccagagattcagtatacctccaattttgacaaacagactggtgtggactttgccgttgacagccagggtgtttattctgagcctcgccccattggtactcgttacctcacccgtaatctgtaa

SEQ ID NO: 468 - protein, 737 aa, Adeno-associated virus
MAADGYLPDWLEDNLSEGIREWWDLKPGAPKPKANQQKQDDGRGLVLPGYKYLGPFNGLDKGEPVNAADAAALEHDKAYDQQLKAGDNPYLRYNHADAEFQERLQEDTSFGGNLGRAVFQAKKRVLEPLGLVEEAAKTAPGKKRPVEPSPQRSPDSSTGIGKKGQQPARKRLNFGQTGDSESVPDPQPLGEPPAGPSGLGSGTMAAGGGAPMADNNEGADGVGNASGNWHCDSTWLGDRVITTSTRTWALPTYNNHLYKQISSQSAGSTNDNVYFGYSTPWGYFDFNRFHCHFSPRDWQRLINNNWGFRPKKLNFKLFNIQVKEVTTNDGVTTIANNLTSTVQVFSDSEYQLPYVLGSAHQGCLPPFPADVFMIPQYGYLTLNNGSQSVGRSSFYCLEYFPSQVLRTGNNFTFSYTFEDVPFHSSYAHSQSLDRLMNPLIDQYLYYLARTQSNPGGTSGNRELQFYQGGPSTMAEQAKNWLPGPCFRQQRVSKTLDQNNNSNFAWTGATKYHLNGRNSLVNPGVAMATHKDDEDRFFPSSGVLIFGKTGATNKTTLENVLMTNEEEIRPTNPVATEEYGIVSSNLQAANTAAQTQVVNNQGALPGMVWQNRDVYLQGPIWAKIPHTDGNFHPSPLMGGFGLKHPPPQILIKNTPVPANPPEVFTPAKFASFITQYSTGQVSVEIEWELQKENSKRWNPEIQYTSNFDKQTGVDFAVDSQGVYSEPRPIGTRYLTRNL

SEQ ID NO: 469 - DNA, 2214 bp, Adeno-associated virus
  source 1..2214: mol_type = unassigned DNA
atggctgccgatggttatcttccagattggctcgaggacaacctctctgagggcattcgcgagtggtgggacctgaaacctggagccccgaaacccaaagccaaccagcaaaagcaggacgacggccggggtctggtgcttcctggctacaagtacctcggacccttcaacggactcgacaagggggagcccgtcaacgcggcggacgcagcggccctcgagcacgacaaggcctacgaccagcagctcaaagcgggtgacaatccgtacctgcggtataatcacgccgacgccgagtttcaggagcgtctgcaagaagatacgtcttttgggggcaacctcgggcgagcagtcttccaggccaagaagcgggttctcgaacctctcggtctggttgaggaaggcgctaagacggctcctggaaagaagagaccggtagagccgtcaccacagcgttcccccgactcctccacgggcatcggcaagaaaggccagcagcccgccagaaagagactcaatttcggtcagactggcgactcagagtcagtccccgaccctcaacctatcggagaacctccagcagcgccctctagtgtgggatctggtacaatggctgcaggcggtggcgcaccaatggcagacaataacgaaggtgccgacggagtgggtagttcctcgggaaattggcattgcgattccacacggctgggcgacagagtcatcaccaccagcacccggacctgggctttgcccacctacaacaaccacctctacaagcaaatctccagtcagtcagcaggtagcaccaacgacaacgtctacttcggctacagcaccccctgggggtattttgacttcaacagattccactgtcacttctcaccacgtgactggcagcggctcatcaacaacaactggggattccggcccaagaagctcaacttcaagctgttcaacatccaggtcaaggaggtcacaacgaatgacggcgtcacgaccatcgccaataaccttaccagcacggttcaggtcttttcggactcggaataccagctgccctacgtcctcggctccgcacaccagggctgcctgcctccgttcccggcggacgtcttcatgattccccagtacggctacctgactctgaacaatggcagccaatcggtgggtcgttcctctttctactgcctggaatatttcccttctcaaatgctgagaacgggcaacaacttcaccttcagctacaccttcgaggacgttcccttccacagcagctacgcacacagccagagcctggaccggctgatgaatcctcttatcgaccagtacctgtattacctggccagaacacagagcaacgcaggaggcacagctggcaatcgggaactgcagttttatcagggcgggcctaccaccatggccgaacaagccaaaaactggctgcctggaccttgcttccggcaacgaagagtctccaagacgctggatcaaaacaacaacagcaactttgcttggactggtgccaccaaataccatctaaatggaagaaattcattggttaatcccggtgtcgccatggcaacccacaaggacgacgaggaacgcttcttcccttcgagcggagtcctgatttttggaaaaactggagcagctaataagactacactggaaaatgtgttaatgacaaatgaagaggaaattcgtcctaccaacccggtagccaccgaggaatacgggactgttagcagcaacctgcaggcggctaacactgcagcccagacacaagttgtcaacaaccagggagccttacctggtatggtctggcagaaccgggacgtgtacctgcagggtcccatctgggccaagattcctcacacggacggcaactttcacccgtctccgctgatgggcggctttggactgaagcatccgcctcctcagatcctgatcaaaaacactcctgttcctgctaatcccccggaggtgtttacgcctgccaagtttgcttctttcatcacacagtacagcaccggccaggtcagcgtggagatcgagtgggagctgcagaaggagaacagcaagcgctggaacccagagattcagtatacctccaattttgacaaacagactggtgtggactttgccgttgacagccagggtgtttattctgagcctcgccccattggtactcgttacctcacccgtaatctgtaa

SEQ ID NO: 470 - protein, 737 aa, Adeno-associated virus
MAADGYLPDWLEDNLSEGIREWWDLKPGAPKPKANQQKQDDGRGLVLPGYKYLGPFNGLDKGEPVNAADAAALEHDKAYDQQLKAGDNPYLRYNHADAEFQERLQEDTSFGGNLGRAVFQAKKRVLEPLGLVEEGAKTAPGKKRPVEPSPQRSPDSSTGIGKKGQQPARKRLNFGQTGDSESVPDPQPIGEPPAAPSSVGSGTMAAGGGAPMADNNEGADGVGSSSGNWHCDSTRLGDRVITTSTRTWALPTYNNHLYKQISSQSAGSTNDNVYFGYSTPWGYFDFNRFHCHFSPRDWQRLINNNWGFRPKKLNFKLFNIQVKEVTTNDGVTTIANNLTSTVQVFSDSEYQLPYVLGSAHQGCLPPFPADVFMIPQYGYLTLNNGSQSVGRSSFYCLEYFPSQMLRTGNNFTFSYTFEDVPFHSSYAHSQSLDRLMNPLIDQYLYYLARTQSNAGGTAGNRELQFYQGGPTTMAEQAKNWLPGPCFRQRRVSKTLDQNNNSNFAWTGATKYHLNGRNSLVNPGVAMATHKDDEERFFPSSGVLIFGKTGAANKTTLENVLMTNEEEIRPTNPVATEEYGTVSSNLQAANTAAQTQVVNNQGALPGMVWQNRDVYLQGPIWAKIPHTDGNFHPSPLMGGFGLKHPPPQILIKNTPVPANPPEVFTPAKFASFITQYSTGQVSVEIEWELQKENSKRWNPEIQYTSNFDKQTGVDFAVDSQGVYSEPRPIGTRYLTRNL

SEQ ID NO: 471 - DNA, 2208 bp, Adeno-associated virus
  source 1..2208: mol_type = unassigned DNA
atggctgccgatggttatcttccagattggctcgaggacactctctctgaaggaataagacagtggtggaagctcaaacctggcccaccaccaccaaagcccgcagagcggcataaggacgacagcaggggtcttgtgcttcctgggtacaagtacctcggacccttcaacggactcgacaagggggagccggtcaacgaggcagacgccgcggccctcgagcacgacaaggcctacgaccggcagctcgacagcggagacaacccgtacctcaagtacaaccacgccgacgcggagtttcaggagcgtcttaaagaagatacgtcttttgggggcaacctcggacgagcagtcttccaggcgaaaaagagggttcttgaacctctgggcctggttgaggaacctgttaagacggctccgggaaaaaagaggccggtagagcactctcctgcggagccagactcctcctcgggaaccggaaaagcgggccagcagcctgcaagaaaaagattgaattttggtcagactggagacgcagactccgtacctgacccccagcctctcggacagccaccagcagccccctctggtttgggatctactacaatggctacaggcagtggcgcaccaatggcagacaataacgagggtgccgatggagtgggtaattcttcaggaaattggcattgcgattcccaatggctgggcgacagagtcatcaccaccagcacccgaacctgggcccagcccacctacaacaaccacctctacaagcaaatctcaagccaatcaggagcctcaaacgacaaccactactttggctacagcaccccttgggggtattttgacttcaacagattccactgccacttttcaccacgtgactggcaaagactcatcaacaacaactggggattccgacccaagagactcaacttcaagctctttaacattcaagtcaaagaggtcacgcagaatgacggtacgacgacgattgccaataaccttaccagcacggttcaggtgtttactgactcggagtaccagctcccgtacgtcctcgggtcggcgcatcaaggatgcctcccgccgtttccagcggacgtcttcatggtcccacagtatggatacctcaccctgaacaacgggagtcaggcggtaggacgctcttccttttactgcctggagtactttccttctcagatgcttcgtactggaaacaactttcagttcagctacacctttgaagacgttcctttccacagcagctacgctcacagccagagtctggatcggctgatgaatcctctgatcgaccagtacctgtattatctgaacaaaacacaatcaaatagtggagctcttcagcagtctcggctactgtttagtcaagctggacccaccagcatgtctcttcaagctaaaaactggctacctggaccttgctacagacagcagcgtctgtcaaagcaggcaaacgacaacaacaacagcaactttccctggactgcggctacaaagtaccacctaaatggccgggactcgttggttaatccaggaccagctatggccagtcacaaagacgatgaagaaaagtttttccccatgcatggaaccctgatatttggtaaacaaggaacaaatgctaacgacgcggatttggacaatgtcatgattacagatgaagaagaaatccgcaccaccaatcccgtggctacggagcagtacggatatgtgtcaaataatttgcaaaactcaaatactggtccaactactggaactgtcaatcaccgaggagcgttacctggcatggtgtggcaggatcgagacgtgtacctgcagggacccatttgggccaagattcctcacaccgatggacactttcatccttctccactgatgggaggttttgggctcaaacacccgcctcctcagatcatgatcaaaaacactcccgttccagccaatcctcccacaaacttcagttctgccaagtttgcttctttcatcacacagtattccacggggcaggtcagcgtggagatcgagtgggagctgcagaaagagaacagcaaacgctggaatcccgaaattcagtacacttccaactacaacaaatctgttaatgtggactttactgtggacactaatggcgtgtattcagagcctcgccccattggcaccagatacctgactcgtaatctgtaa

SEQ ID NO: 472 - protein, 735 aa, Adeno-associated virus
MAADGYLPDWLEDTLSEGIRQWWKLKPGPPPPKPAERHKDDSRGLVLPGYKYLGPFNGLDKGEPVNEADAAALEHDKAYDRQLDSGDNPYLKYNHADAEFQERLKEDTSFGGNLGRAVFQAKKRVLEPLGLVEEPVKTAPGKKRPVEHSPAEPDSSSGTGKAGQQPARKRLNFGQTGDADSVPDPQPLGQPPAAPSGLGSTTMATGSGAPMADNNEGADGVGNSSGNWHCDSQWLGDRVITTSTRTWAQPTYNNHLYKQISSQSGASNDNHYFGYSTPWGYFDFNRFHCHFSPRDWQRLINNNWGFRPKRLNFKLFNIQVKEVTQNDGTTTIANNLTSTVQVFTDSEYQLPYVLGSAHQGCLPPFPADVFMVPQYGYLTLNNGSQAVGRSSFYCLEYFPSQMLRTGNNFQFSYTFEDVPFHSSYAHSQSLDRLMNPLIDQYLYYLNKTQSNSGALQQSRLLFSQAGPTSMSLQAKNWLPGPCYRQQRLSKQANDNNNSNFPWTAATKYHLNGRDSLVNPGPAMASHKDDEEKFFPMHGTLIFGKQGTNANDADLDNVMITDEEEIRTTNPVATEQYGYVSNNLQNSNTGPTTGTVNHRGALPGMVWQDRDVYLQGPIWAKIPHTDGHFHPSPLMGGFGLKHPPPQIMIKNTPVPANPPTNFSSAKFASFITQYSTGQVSVEIEWELQKENSKRWNPEIQYTSNYNKSVNVDFTVDTNGVYSEPRPIGTRYLTRNL

SEQ ID NO: 473 - DNA, 2217 bp, Adeno-associated virus
  source 1..2217: mol_type = unassigned DNA
atggctgccgatggttatcttccagattggctcgaggacaacctctctgagggcattcgcgagtggtgggcgctgaaacctggagccccgaagcccaaagccaaccagcaaaagcaggacgacggccggggtctggtgcttcctggctacaagtacctcggacccttcaacggactcgacaagggggagcccgtcaacgcggcggacgcagcggccctcgagcacgacaaggcctacgaccagcagctgcaggcgggtgacaatccgtacctgcggtataatcacgccgacgccgagtttcaggagcgtctgcaagaagatacgtcttttgggggcaacctcgggcgagcagtcttccaggccaagaagcgggttctcgaacctctcggtctggttgaggaaggcgctaagacggctcctggaaagaagagaccggtagagccgtcaccacagcgttcccccgactcctccacgggcatcggcaagaaaggccagcagcccgccagaaagagactcaatttcggtcagactggcgactcagagtcagtccccgaccctcaacctatcggagaacctccagcagcgccctctagtgtgggatctggtacaatggctgcaggcggtggcgcgccaatggcagacaataacgaaggtgccgacggagtgggtagttcctcgggaaattggcattgcgattccacatggctgggcgacagagtcatcaccaccagcacccgaacctgggccctgcccacctacaacaaccacctctacaagcaaacctccaacgggacctcgggaggcagcaccaacgacaacacctactttggctacagcaccccctgggggtattttgactttaacagattccactgccacttctcaccacgtgactggcagcgactcatcaacaacaactggggattccggcccaagagactcagcttcaagctcttcaacatccaggtcaaagaggtcacgcagaatgaaggcaccaagaccatcgccaataacctcaccagcaccatccaggtgtttacggactcggaataccagctgccgtacgtcctcggctctgcccaccagggctgcctgcctccgttcccggcggacgtcttcatgattcctcagtacggctacctgactctcaacaacggtagtcaggccgtgggacgttcctccttctactgcctggagtacttcccctctcagatgctgagaacgggcaacaacttttccttcagctacactttcgaggacgtgcctttccacagcagctacgcgcacagccagagtttggacaggctgatgaatcctctcatcgaccagtacctgtactacctgtcaagaacccagtctacgggaggcacagcgggaacccagcagttgctgttttctcaggccgggcctagcaacatgtcggctcaggccagaaactggctgcctggaccctgctacagacagcagcgcgtctccacgacactgtcgcaaaacaacaacagcaactttgcctggactggtgccaccaagtatcatctgaacggcagagactctctggtgaatccgggcgtcgccatggcaaccaacaaggacgacgaggaccgcttcttcccatccagcggcatcctcatgtttggcaagcagggagctggaaaagacaacgtggactatagcaacgtgatgctaaccagcgaggaagaaatcaagaccaccaaccccgtggccacagaacagtatggcgtggtggctgataacctacagcagcaaaacaccgctcctattgtgggggccgtcaacagccagggagccttacctggcatggtctggcagaaccgggacgtgtacctgcagggtcctatttgggccaagattcctcacacagatggcaactttcacccgtctcctttaatgggcggctttggacttaaacatccgcctcctcagatcctcatcaaaaacactcctgttcctgcggatcctccaacagcgttcaaccaggccaagctgaattctttcatcacgcagtacagcaccggacaagtcagcgcggagatcgagtgggagctgcagaaggagaacagcaagcgctggaacccagagattcagtatacttccaactactacaaatctacaaatgtggactttgctgttaatactgagggtgtttactctgagcctcgccccattggcactcgttacctcacccgtaatctgtaa

SEQ ID NO: 474 - protein, 738 aa, Adeno-associated virus
MAADGYLPDWLEDNLSEGIREWWALKPGAPKPKANQQKQDDGRGLVLPGYKYLGPFNGLDKGEPVNAADAAALEHDKAYDQQLQAGDNPYLRYNHADAEFQERLQEDTSFGGNLGRAVFQAKKRVLEPLGLVEEGAKTAPGKKRPVEPSPQRSPDSSTGIGKKGQQPARKRLNFGQTGDSESVPDPQPIGEPPAAPSSVGSGTMAAGGGAPMADNNEGADGVGSSSGNWHCDSTWLGDRVITTSTRTWALPTYNNHLYKQTSNGTSGGSTNDNTYFGYSTPWGYFDFNRFHCHFSPRDWQRLINNNWGFRPKRLSFKLFNIQVKEVTQNEGTKTIANNLTSTIQVFTDSEYQLPYVLGSAHQGCLPPFPADVFMIPQYGYLTLNNGSQAVGRSSFYCLEYFPSQMLRTGNNFSFSYTFEDVPFHSSYAHSQSLDRLMNPLIDQYLYYLSRTQSTGGTAGTQQLLFSQAGPSNMSAQARNWLPGPCYRQQRVSTTLSQNNNSNFAWTGATKYHLNGRDSLVNPGVAMATNKDDEDRFFPSSGILMFGKQGAGKDNVDYSNVMLTSEEEIKTTNPVATEQYGVVADNLQQQNTAPIVGAVNSQGALPGMVWQNRDVYLQGPIWAKIPHTDGNFHPSPLMGGFGLKHPPPQILIKNTPVPADPPTAFNQAKLNSFITQYSTGQVSAEIEWELQKENSKRWNPEIQYTSNYYKSTNVDFAVNTEGVYSEPRPIGTRYLTRNL

SEQ ID NO: 475 - DNA, 2217 bp, Adeno-associated virus
  source 1..2217: mol_type = unassigned DNA
atggctgctgacggttatcttccagattggctcgaggacaacctctctgagggcattcgcgagtggtgggacctgaaacctggagcccccaagcccaaggccaaccagcagaagcaggacgacggccggggtctggtgcttcctggctacaagtacctcggacccttcaacggactcgacaagggggagcccgtcaacgcggcggacgcagcggccctcgagcacgacaaggcctacgaccagcagctcaaagcgggtgacaatccgtacctgcggtataatcacgccgacgccgagtttcaggagcgtctgcaagaagatacgtcttttgggggcaacctcgggcgagcagtcttccaggccaagaagcgggttctcgaacctctcggtctggttgaggaagctgctaagacggctcctggaaagaagagaccggtagaaccgtcacctcagcgttcccccgactcctccacgggcatcggcaagaaaggccagcagcccgctagaaagagactgaactttgggcagactggcgactcagagtcagtccccgaccctcaaccaatcggagaacctccagcagcgccctctagtgtgggatctggtacaatggccgcaggcggtggcgcaccaatggcagacaataacgaaggtgccgacggagtgggtagttcctcgggaaattggcattgcgattccacatggctgggcgacagagtcatcaccaccagcacccgaacctgggccctgcccacctacaacaaccacctctacaagcaaatctccaacgggacctcgggaggcagcaccaacgacaacacctactttggctacagcaccccctgggggtattttgactttaacagattccactgccacttctcaccacgtgactggcagcgactcatcaacaacaactggggattccggcccaagagactcagcttcaagctcttcaacatccaggtcaaagaggtcacgcagaatgaaggcaccaagaccatcgccaataacctcaccagcaccatccaggtgtttacggactcggaataccagctgccgtacgtcctcggctctgcccaccagggctgcctgcctccgttcccggcggacgtcttcatgattcctcagtacggctacctgactctcaacaacggtagtcaggccgtgggacgttcctccttctactgcctggagtacttcccctctcagatgctgagaacgggcaacaacttttccttcagctacactttcgaggacgtgcctttccacagcagctacgcgcacagccagagtttggacaggctgatgaatcctctcatcgaccagtacctgtactacctgtcaagaacccagtctacgggaggcacagcgggaacccagcagctgctgttttctcaggccgggcctagcaacatgtcggctcaggccagaaactggctgcctggaccctgctacagacagcagcgcgtctccacgacactgtcgcaaaacaacaacagcaactttgcctggactggtgccaccaagtatcatctgaacggcagagactctctggtgaatccgggcgtcgccatggcaaccaacaaggacgacgaggaccgcttcttcccatccagcggcatcctcatgtttggcaagcagggagctggaaaagacaacgtggactatagcaacgtgatgctaaccagcgaggaagaaatcaagaccaccaaccccgtggccacagaacagtatggcgtggtggctgataacctacagcagcaaaacaccgctcctattgtgggggccgtcaacagccagggagccttacctggcatggtctggcagaaccgggacgtgtacctgcagggtcctatttgggccaagattcctcacacagatggcaactttcacccgtctcctttaatgggcggctttggacttaaacatccgcctcctcagatcctcatcaaaagcactcctgttcctgcggatcctccaacagcgttcaaccaggccaagctgaattctttcatcacgcagtacagcaccggacaagtcagcgtggagatcgagtgggagctgcagaaggagaacagcaagtgctggaacccagagattcagtatacttccaactactacaaatctacaaatgtggactttgctgttaatactgagggtgtttactctgagcctcgccccattggcactcgttacctcacccgtaatctgtaa

SEQ ID NO: 476 - protein, 738 aa, Adeno-associated virus
MAADGYLPDWLEDNLSEGIREWWDLKPGAPKPKANQQKQDDGRGLVLPGYKYLGPFNGLDKGEPVNAADAAALEHDKAYDQQLKAGDNPYLRYNHADAEFQERLQEDTSFGGNLGRAVFQAKKRVLEPLGLVEEAAKTAPGKKRPVEPSPQRSPDSSTGIGKKGQQPARKRLNFGQTGDSESVPDPQPIGEPPAAPSSVGSGTMAAGGGAPMADNNEGADGVGSSSGNWHCDSTWLGDRVITTSTRTWALPTYNNHLYKQISNGTSGGSTNDNTYFGYSTPWGYFDFNRFHCHFSPRDWQRLINNNWGFRPKRLSFKLFNIQVKEVTQNEGTKTIANNLTSTIQVFTDSEYQLPYVLGSAHQGCLPPFPADVFMIPQYGYLTLNNGSQAVGRSSFYCLEYFPSQMLRTGNNFSFSYTFEDVPFHSSYAHSQSLDRLMNPLIDQYLYYLSRTQSTGGTAGTQQLLFSQAGPSNMSAQARNWLPGPCYRQQRVSTTLSQNNNSNFAWTGATKYHLNGRDSLVNPGVAMATNKDDEDRFFPSSGILMFGKQGAGKDNVDYSNVMLTSEEEIKTTNPVATEQYGVVADNLQQQNTAPIVGAVNSQGALPGMVWQNRDVYLQGPIWAKIPHTDGNFHPSPLMGGFGLKHPPPQILIKSTPVPADPPTAFNQAKLNSFITQYSTGQVSVEIEWELQKENSKCWNPEIQYTSNYYKSTNVDFAVNTEGVYSEPRPIGTRYLTRNL

SEQ ID NO: 477 - protein, 738 aa, Adeno-associated virus
MAADGYLPDWLEDNLSEGIREWWDLKPGAPKPKANQQKQDDGRGLVLPGYKYLGPFNGLDKGEPVNAADAAALEHDKAYDQQLKAGDNPYLRYNHADAEFQERLQEDTSFGGNLGRAVFQAKKRVLEPLGLVEEAAKTAPGKKRPVEPSPQRSPDSSTGIGKKGQQPARKRLNFGQTGDSESVPDPQPIGEPPAAPSSVGSGTMAAGGGAPMADNNEGADGVGSSSGNWHCDSTWLGDRVITTSTRTWALPTYNNHLYKQISNGTSGGSTNDNTYFGYSTPWGYFDFNRFHCHFSPRDWQRLINNNWGFRPKRLSFKLFNIQVKEVTQNEGTKTIANNLTSTIQVFTDSEYQLPYVLGSAHQGCLPPFPADVFMIPQYGYLTLNNGSQAVGRSSFYCLEYFPSQMLRTGNNFSFSYTFEDVPFHSSYAHSQSLDRLMNPLIDQYLYYLSRTQSTGGTAGTQQLLFSQAGPSNMSAQARNWLPGPCYRQQRVSTTLSQNNNSNFAWTGATKYHLNGRDSLVNPGVAMATNKDDEDRFFPSSGILMFGKQGAGKDNVDYSNVMLTSEEEIKTTNPVATEQYGVVADNLQQQNTAPIVGAVNSQGALPGMVWQNRDVYLQGPIWAKIPHTDGNFHPSPLMGGFGLKHPPPQILIKSTPVPADPPTAFNQAKLNSFITQYSTGQVSVEIEWELQKENSKRWNPEIQYTSNYYKSTNVDFAVNTEGVYSEPRPIGTRYLTRNL

SEQ ID NO: 478 - DNA, 2217 bp, Adeno-associated virus
  source 1..2217: mol_type = unassigned DNA
atggctgctgacggttatcttccagattggctcgaggacaacctctctgagggcattcgcgagtggtgggacctgaaacctggagcccccaagcccaaggccaaccagcagaagcaggacgacggccggggtctggtgcttcctggctacaagtacctcggacccttcaacggactcgacaagggggagcccgtcaacgcggcggacgcagcggccctcgagcacgacaaggcctacgaccagcagctcaaagcgggtgacaatccgtacctgcggtataaccacgccgacgccgagtttcaggagcgtctgcaagaagatacgtcttttgggggcaacctcgggcgagcagtcttccaggccaagaagcgggttctcgaacctctcggtctggttgaggaagctgctaagacggctcctggaaagaagagaccggtagaaccgtcacctcagcgttcccccgactcctccacgggcatcggcaagaaaggccagcagcccgctagaaagagactgaactttgggcagactggcgactcagagtcagtccccgaccctcaaccaatcggagaaccaccagcaggcccctctggtctgggatctggtacaatggctgcaggcggtggcgcaccaatggctgacaataacgagggcgccgacggagtgggtaatgcctcaggaaattggcattgcgattccacatggctgggcgacagagtcatcaccaccagcacccgaacctgggctttgcccacctacaacaaccacctctacaagcaaatctccagtcagtcagcaggtagcaccaacgacaacgtctacttcggctacagcaccccctgggggtattttgacttcaacagattccactgtcacttctcaccacgtgactggcagcggctcatcaacaacaactggggattccggcccaagaagctcaacttcaagctgttcaacatccaggtcaaggaggtcacaacgaatgacggcgtcacgaccatcgccaataaccctaccagcacggttcaggtcttttcggactcggaataccagctgccctacgtcctcggctccgcacaccagggctgcctgcctccgttcccggcggacgtcttcatgattccccagtacggctacctgactctgaacaatggcagccaatcggtgggtcgttcctctttctactgcctggaatatttcccttctcaaatgctgagaacgggcaacaacttcaccttcagctacaccttcgaggacgttcccttccacagcagctacgcacacagccagagcctggaccggctgatgaatcctcttatcgaccagtacctgtattacctggccagaacacagagcaacgcaggaggcacagctggcaatcgggaactgcagttttatcagggcgggcctaccaccatggccgaacaagccaaaaactggctgcctggaccctgctacagacagcagcgcgtctccacgacactgtcgcaaaacaacaacagcaactttgcctggactggtgccaccaagtatcatctgaacggcagagactctctggtgaatccgggcgtcgccatggcaaccaacaaggacgacgaggaccgcttcttcccatccagcggcatcctcatgtttggcaagcagggagctggaaaagacaacgtggactatagcaacgtgatgctaaccagcgaggaagaaatcaagaccaccaaccccgtggccacagaacagtatggcgtggtggctgataacctacagcagcaaaacaccgctcctattgtgggggccgtcaacagccagggagccttacctggcatggtctggcagaaccgggacgtgtacctgcagggtcctatttgggccaagattcctcacacagatggcaactttcacccgtctcctttaatgggcggctttggacttaaacatccgcctcctcagatcctcatcaaaaacactcctgttcctgcggatcctccaacagcgttcaaccaggccaagctgaattctttcatcacgcagtacagcaccggacaagtcagcgtggagatcgagtgggagctgcagaaggagaacagcaagcgctggaacccagagattcagtatacttccaactactacaaatctacaaatgtggactttgctgttaatactgagggtgtttactctgagcctcgccccattggcactcgttacctcacccgtaatctgtaa

SEQ ID NO: 479 - protein, 738 aa, Adeno-associated virus
MAADGYLPDWLEDNLSEGIREWWDLKPGAPKPKANQQKQDDGRGLVLPGYKYLGPFNGLDKGEPVNAADAAALEHDKAYDQQLKAGDNPYLRYNHADAEFQERLQEDTSFGGNLGRAVFQAKKRVLEPLGLVEEAAKTAPGKKRPVEPSPQRSPDSSTGIGKKGQQPARKRLNFGQTGDSESVPDPQPIGEPPAGPSGLGSGTMAAGGGAPMADNNEGADGVGNASGNWHCDSTWLGDRVITTSTRTWALPTYNNHLYKQISSQSAGSTNDNVYFGYSTPWGYFDFNRFHCHFSPRDWQRLINNNWGFRPKKLNFKLFNIQVKEVTTNDGVTTIANNPTSTVQVFSDSEYQLPYVLGSAHQGCLPPFPADVFMIPQYGYLTLNNGSQSVGRSSFYCLEYFPSQMLRTGNNFTFSYTFEDVPFHSSYAHSQSLDRLMNPLIDQYLYYLARTQSNAGGTAGNRELQFYQGGPTTMAEQAKNWLPGPCYRQQRVSTTLSQNNNSNFAWTGATKYHLNGRDSLVNPGVAMATNKDDEDRFFPSSGILMFGKQGAGKDNVDYSNVMLTSEEEIKTTNPVATEQYGVVADNLQQQNTAPIVGAVNSQGALPGMVWQNRDVYLQGPIWAKIPHTDGNFHPSPLMGGFGLKHPPPQILIKNTPVPADPPTAFNQAKLNSFITQYSTGQVSVEIEWELQKENSKRWNPEIQYTSNYYKSTNVDFAVNTEGVYSEPRPIGTRYLTRNL

SEQ ID NO: 480 - DNA, 2208 bp, Adeno-associated virus
  source 1..2208: mol_type = unassigned DNA
atggctgccgatggttatcttccagattggctcgaggacaacctctctgagggcattcacgagtggtgggacccgaaacctggagccccgaaacccaaagccaaccagcaaaagcaggacgacggccggggtctggtgcttcctggctacaagtacctcggacccttcaacggactcgacaagggggagcccgtcaacgcggcggacgcagcggccctcgagcacgacaaggcctacgaccagcagctcaaagcgggtgacaatccgtacctgcggtataatcacgccgacgccgagtttcaggagcgtctgcaagaagatacgtcttttgggggcaacctcgggcgagcagtcttccaggccaagaagcgggttctcgaacctctcggtctggttgaggaaggcgctaagacggctcctggaaagaagagaccggtagagccgtcaccacagcgttcccccgactcctccacgggcatcggcaagaaaggccagcagcccgccagaaagagactcaatttcggtcagactggcgactcagagtcagtccccgaccctcaacctatcggagaacctccagcagcgccctctagtgtgggatctggtacaatggctgcaggcggtggcgcaccaatggcagacaataacgaaggtgccgacggagtgggtagttcctcgggaaattggcattgcgattccacatggctgggcgacagagtcatcaccaccagcacccgaacctgggccctgcccacccacaacaaccacctctacaagcaaatctccaacgggacctcgggaggcagcaccaacgacaacgtctacttcggctacagcaccccctgggggtattttgacttcaacagattccactgtcacttctcaccacgtgaccggcagcgactcatcaacaacaactggggattccggcccaagagactcagcttcaagctcttcaacatccaggtcaaagaggtcacgcagaatgaaggcaccaagaccatcgccaataacctcaccagcaccatccaggtgtttacggactcggaataccagctgccgtacgtcctcggctctgcccaccagggctgcctgcctccgttcccggcggacgtcttcatgattcctcagtacggctacctgactctcaacaacggtagtcaggccgtgggacgttcctccttctactgcctggagtacttcccctctcagatgctgagaacgggcaacaacttttccttcagctacactttcgaggacgtgcctttccacagcagctacgcgcacagccagagtttggacaggctgatgaatcctctcatcgaccagtacctgtactacctgtcaagaacccagtctacggaaggcacagcgggaacccagcagttgctgttttctcaggccgggcctagcaacatgtcggctcaggccagaaactggctgcctggaccctgctacagacagcagcgcgtctccacgacactgtcgcaaaacaacaacagcaactttgcctggactggtgccaccaagtatcatctgaacggcagagactctctggtgaatccgggcgtcgccatggcaacccacaaggacgacgaggaacgcttcttcccttcgagcggagtcctgatttttggaaaaactggagcagctaataagactacactggaaaatgtgttaatgacaaatgaagaggaaattcgtcctaccaacccggtagccaccgaggaatacgggactgttagcagcaacctgcaggcggctaacactgcagcccagacacaagttgtcaacaaccagggagccttacctggtatggtctggcagaaccgggacgtgtacctgcagggtcccatctgggccaagattcctcacacggacggcaactttcacccgtctccgctgatgggcggctttggactgaagcatcctcagatcctgatcaaaaacactcctgttcctgctaatcccccggaggtgtttacgcctgccaagtttgcttctttcatcacacagtacagcaccggccaggtcagcgtggagatcgagtgggagctgcagaaggagaacagcaagcgctggaacccagagattcagtatacctccaattttgacaaacagactggtgtggactttgccgttgacagccagggtgtttattctgagcctcgccccattggtactcgttacctcacccgtaatctgtaa

SEQ ID NO: 481 - protein, 735 aa, Adeno-associated virus
MAADGYLPDWLEDNLSEGIHEWWDPKPGAPKPKANQQKQDDGRGLVLPGYKYLGPFNGLDKGEPVNAADAAALEHDKAYDQQLKAGDNPYLRYNHADAEFQERLQEDTSFGGNLGRAVFQAKKRVLEPLGLVEEGAKTAPGKKRPVEPSPQRSPDSSTGIGKKGQQPARKRLNFGQTGDSESVPDPQPIGEPPAAPSSVGSGTMAAGGGAPMADNNEGADGVGSSSGNWHCDSTWLGDRVITTSTRTWALPTHNNHLYKQISNGTSGGSTNDNVYFGYSTPWGYFDFNRFHCHFSPRDRQRLINNNWGFRPKRLSFKLFNIQVKEVTQNEGTKTIANNLTSTIQVFTDSEYQLPYVLGSAHQGCLPPFPADVFMIPQYGYLTLNNGSQAVGRSSFYCLEYFPSQMLRTGNNFSFSYTFEDVPFHSSYAHSQSLDRLMNPLIDQYLYYLSRTQSTEGTAGTQQLLFSQAGPSNMSAQARNWLPGPCYRQQRVSTTLSQNNNSNFAWTGATKYHLNGRDSLVNPGVAMATHKDDEERFFPSSGVLIFGKTGAANKTTLENVLMTNEEEIRPTNPVATEEYGTVSSNLQAANTAAQTQVVNNQGALPGMVWQNRDVYLQGPIWAKIPHTDGNFHPSPLMGGFGLKHPQILIKNTPVPANPPEVFTPAKFASFITQYSTGQVSVEIEWELQKENSKRWNPEIQYTSNFDKQTGVDFAVDSQGVYSEPRPIGTRYLTRNL

SEQ ID NO: 482 - protein, 738 aa, Adeno-associated virus
MAADGYLPDWLEDNLSEGIREWWDLKPGAPKPKANQQKQDDGRGLVLPGYKYLGPFNGLDKGEPVNAADAAALEHDKAYDQQLKAGDNPYLRYNHADAEFQERLQEDTSFGGNLGRAVFQAKKRVLEPLGLVEEGAKTAPGKKRPVEPSPQRSPDSSTGIGKKGQQPARKRLNFGQTGDSESVPDPQPIGEPPAAPSSVGSGTMAAGGGAPMADNNEGADGVGSSSGNWHCDSTWLGDRVITTSTRTWALPTYNNHLYKQISNGTSGGSTNDNTYFGYSTPWGYFDFNRFHCHFSPRDWQRPINNNWGFRPKRLSFKLFNIQVKEVTQNEGTKTIANNLTSTIQVFTDSEYQLPYVLGSAHQGCLPPFPADVFMIPQYGYLTLNNGSQAVGRSSFYCLEYFPSQMLRTGNNFSFSYPFEDVPFHSSYAHSQSLDRLMNPLIDQYLYYLSRTQSTGGTAGTQQLLFSQAGPSNMSAQARNWLPGPCYRQQRVSTTLSQNNNSNFAWTGATKYHLNGRDSLVNPGVAMATNKDDEDRFFPSSGILMFGKQGAGKDNVDYSNVMLTSEEEIKTTNPVATEQYGVVADNLQQQDTAPIVGAVNSQGALPGMVWQNRDVYLQGPIWAKIPHTDGNFHPSPLMGGFGLKHPPPQVLIKNTPVPADPPTAFNQAKLNSFITQYSTGQVSVEIEWELQKENSKRWNPEIQYTSNYYKSTNVDFAVNTEGVYSEPRPIGTRYLTRNL

SEQ ID NO: 483 - DNA, 2217 bp, Adeno-associated virus
  source 1..2217: mol_type = unassigned DNA
atggctgccgatggttatcttccagattggctcgaggacaacctctctgagggcattcgcgagtggtgggacctgaaacctggagccccgaaacccaaggccaaccagcaaaagcaggacgacggccggggtctggtgcttcctggctacaagtacctcggacccttcaacggactcgacaagggggagcccgtcaacgcggcggacgcagcggccctcgagcacgacaaggcctacgaccagcagctcaaagcgggtgacaatccgtacctgcggtataatcacgccgacgccgagtttcaggagcgtctgcaagaagatacgtcttttgggggcaacctcgggcgagcagtcttccaggccaagaagcgggttctcgaacctctcggtctggttgaggaaggcgctaagacggctcctggaaagaagagaccggtagagccgtcaccacagcgttcccccgactcctccacgggcatcggcaagaaaggccagcagcccgccagaaagagactcaatttcggtcagactggcgactcagagtcagtccccgaccctcaacctatcggagaacctccagcagcgccctctagtgtgggatctggtacaatggctgcaggcggtggcgcaccaatggcagacaataacgaaggtgccgacggagtgggtagttcctcgggaaattggcattgcgattccacatggctgggcgacagagtcatcaccaccagcacccgaacctgggccctgcccacctacaacaaccacctctacaagcaaatctccaacgggacctcgggaggcagcaccaacgacaacacctactttggctacagcaccccctgggggtattttgactttaacagattccactgccacttctcaccacgtgactggcagcgacccatcaacaacaactggggattccggcccaagagactcagcttcaagctcttcaacatccaggtcaaagaggtcacgcagaatgaaggcaccaagaccatcgccaataacctcaccagcaccatccaggtgtttacggactcggaataccagctgccgtacgtcctcggctctgcccaccagggctgcctgcctccgttcccggcggacgtcttcatgattcctcagtacggctacctgactctcaacaacggtagtcaggccgtgggacgttcctccttctactgcctggagtacttcccctctcagatgctgagaacgggcaacaacttttccttcagctaccctttcgaggacgtgcctttccacagcagctacgcgcacagccagagtttggacaggctgatgaatcctctcatcgaccagtacctgtactacctgtcaagaacccagtctacgggaggcacagcgggaacccagcagttgctgttttctcaggccgggcctagcaacatgtcggctcaggccagaaactggctgcctggaccctgctacagacagcagcgcgtctccacgacactgtcgcaaaacaacaacagcaactttgcctggactggtgccaccaagtatcatctgaacggcagagactctctggtgaatccgggcgtcgccatggcaaccaacaaggacgacgaggaccgcttcttcccatccagcggcatcctcatgtttggcaagcagggagctggaaaagacaacgtggactatagcaacgtgatgctaaccagcgaggaagaaatcaagaccaccaaccccgtggccacagaacagtatggcgtggtggctgataacctacagcagcaagacaccgctcctattgtgggggccgtcaacagccagggagccttacctggcatggtctggcagaaccgggacgtgtacctgcagggtcctatttgggccaagattcctcacacagatggcaactttcacccgtctcctttaatgggcggctttggacttaaacatccgcctcctcaggtcctcatcaaaaacactcctgttcctgcggatcctccaacagcgttcaaccaggccaagctgaattctttcatcacgcagtacagcaccggacaagtcagcgtggagatcgagtgggagctgcagaaggagaacagcaagcgctggaacccagagattcagtatacttccaactactacaaatctacaaatgtggactttgctgttaatactgagggtgtttactctgagcctcgccccattggcactcgttacctcacccgtaatctgtaa

SEQ ID NO: 484 - DNA, 2214 bp, Adeno-associated virus
  source 1..2214: mol_type = unassigned DNA
atggctgctgacggttatcttccagattggctcgaggacaacctctctgagggcattcgcgagtggtgggacctgaaacctggagcccccaagcccaaggccaaccagcagaagcaggacgacggccggggtctggtgcttcctggctacaagtacctcggacccttcaacggactcgacaagggggagcccgtcaacgcggcggacgcagcggccctcgagcacgacaaggcctacgaccagcagctcaaagcgggtgacaatccgtacctgcggtataaccacgccgacgccgagttccaggagcgtctgcaagaagatacgtcttttgggggcaacctcgggcgagcagtcttccaggccaagaagcgggttctcgaacctctcggtctggctgaggaagctgctaagacggctcctggaaagaagagaccggtagaaccgtcacctcagcgttcccccgactcctccacgggcatcggcaagaaaggccagcagcccgctagaaagagactgaactttgggcagactggcgactcagagtcagtccccgaccctcaaccaatcggagagccaccagcaggcccctctggtctgggatctggtacaatggctgcaggcggtggcgcaccaatggctgacaataacaagggcgccgacggagtgggtaatgcctcaggaaattggcattgcgattccacatggctgggcgacagagtcatcaccaccagcacccgaacctgggctttgcccacctacaacaaccacctctacaagcaaatctccagtcagtcagcaggtagcaccaacgacaacgtctacttcggctacagcaccccctgggggtattttgacttcaacagattccactgtcacttctcaccacgtgactggcagcggctcatcaacaacaactggggattccggcccaagaagctcaacttcaagctgttcaacatccaggtcaaggaggtcacaacgggtgacggcgtcacgaccatcgccaataaccttaccagcacggttcaggtcttttcggactcggaataccagctgccctacgtcctcggctccgcacaccagggctgcctgcctccgttcccggcggacgtcttcatgattccccagtacggctacctgactctgaacaatgacagccaatcggtgggtcgttcctctttctactgcctggaatatttcccttctcaaatgctgagaacgggcaacaacttcaccttcagctacaccttcgaggacgttcccttccacagcagctacgcacacagccagagcctggaccggctgatgaatcctcttatcgaccagtacctgtattacctggccagaacacagagcaacgcaggaggcacagctggcaatcgggaactgcagttttatcagggcgggcctaccaccatggccgaacaagccaaaaactggctgcctggaccttgcttccggcaacaaagagtctccaagacgctggatcaaaacaacaacagcaactttgcttggactggtgccaccaaataccatctaaatggaagaaattcattggttaatcccggtgtcgccatggcaacccacaaggacgacgaggaacgcttcttcccttcgagcggagtcctgatttttggaaaaactggagcagctaataagactacactggaaaatgtgttaatgacaaatgaagaggaaattcgtcctaccaacccggtagccaccgaggaatacgggactgttagcagcaacctgcaggcggctaacactgcagcccagacacaagttgtcaacaaccagggagccttacctggtatggtctggcagaaccgggacgtgtacctgcagggtcccatctgggccaagattcctcacacggacggcaactttcacccgtctccgctgatgggcggctttggactgaagcatccgcctcctcagatcctgatcaaaaacactcctgttcctgctaatcccccggaggtgtttacgcctgccaagtttgcttctttcatcacacagtacagcaccggccaggtcagcgtggagatcgagtgggagctgcagaaggagaacagcaagcgctggaacccagagattcagtatacctccaattttgacaaacagactggtgtggactttgccgttgacagccagggtgtttattctgagcctcgccccattggtactcgttacctcacccgtaatctgtaa

SEQ ID NO: 485 - protein, 737 aa, Adeno-associated virus
MAADGYLPDWLEDNLSEGIREWWDLKPGAPKPKANQQKQDDGRGLVLPGYKYLGPFNGLDKGEPVNAADAAALEHDKAYDQQLKAGDNPYLRYNHADAEFQERLQEDTSFGGNLGRAVFQAKKRVLEPLGLAEEAAKTAPGKKRPVEPSPQRSPDSSTGIGKKGQQPARKRLNFGQTGDSESVPDPQPIGEPPAGPSGLGSGTMAAGGGAPMADNNKGADGVGNASGNWHCDSTWLGDRVITTSTRTWALPTYNNHLYKQISSQSAGSTNDNVYFGYSTPWGYFDFNRFHCHFSPRDWQRLINNNWGFRPKKLNFKLFNIQVKEVTTGDGVTTIANNLTSTVQVFSDSEYQLPYVLGSAHQGCLPPFPADVFMIPQYGYLTLNNDSQSVGRSSFYCLEYFPSQMLRTGNNFTFSYTFEDVPFHSSYAHSQSLDRLMNPLIDQYLYYLARTQSNAGGTAGNRELQFYQGGPTTMAEQAKNWLPGPCFRQQRVSKTLDQNNNSNFAWTGATKYHLNGRNSLVNPGVAMATHKDDEERFFPSSGVLIFGKTGAANKTTLENVLMTNEEEIRPTNPVATEEYGTVSSNLQAANTAAQTQVVNNQGALPGMVWQNRDVYLQGPIWAKIPHTDGNFHPSPLMGGFGLKHPPPQILIKNTPVPANPPEVFTPAKFASFITQYSTGQVSVEIEWELQKENSKRWNPEIQYTSNFDKQTGVDFAVDSQGVYSEPRPIGTRYLTRNL

SEQ ID NO: 486 - DNA, 2217 bp, Adeno-associated virus
  source 1..2217: mol_type = unassigned DNA
atggctgccgatggttatcttccagattggctcgaggacaacctctctgagggcattcgcgagtggtgggacctgaaacctggagccccgaaacccaaagccaaccagcaaaagcaggacgacggccggggtctggtgcttcctggctacaagtacctcggacccttcaacggactcgacaagggggagcccgtcaacgcggcggacgcagcggccctcgagcacgacaaggcctacgaccagcagctcaaagcgggtgacaatccgtacctgcggtataatcacgccgacgccgagtttcaggagcgtctgcaagaagatacgtcttttgggggcaacctcgggcgagcagtcttccaggccaagaagcgggttctcgaacctctcggtctggttgaggaaggcgctaagacggctcctggaaagaagagaccggtagagccgtcaccacagcgttcccccgactcctccacgggcatcggcaagaaaggccagcagcccgccagaaagagactcaatttcggtcagactggcgactcagagtcagtccccgaccctcaacctatcggagaacctccagcagcgccctctagtgtgggatctggtacaatggctgcaggcggtggcgcaccaatggcagacaataacgaaggtgccgacggagtgggtagttcctcgggaaattggcattgcgattccacatggctgggcgacagagtcatcaccaccagcacccgaacctgggccctgcccacctacaacaaccacctctacaagcaaatctccaacgggacctcgggaggcagcaccaacgacaacacctactttggctacagcaccccctgggggtattttgactttaacagattccactgccacttctcaccacgtgactggcagcgactcatcaacaacaactggggattccggcccaagagactcagcttcaagctcttcaacatccaggtcaaagaggtcacgcagaatgaaggcaccaagaccatcgccaataacctcaccagcaccatccaggtgtttacggactcggaataccagctgccgtacgtcctcggctctgcccaccagggctgcctgcctccgttcccggcggacgtcttcatgattcctcagtacggctacctgactctcaacaacggtagtcaggccgtgggacgttcctccttctactgcctggagtacttcccctctcagatgctgagaacgggcaacaacttttccttcagctacactttcgaggacgtgcctttccacagcagctacgcgcacagccagagtttggacaggctgatgaatcctctcatcgaccagtacctgtactacctgtcaagaacccagtctacgggaggcacagcgggaacccagcagttgctgttttctcaggccgggcctagcaacatgtcggctcaggccagaaactggctgcctggaccctgctacagacagcagcgcgtctccacgacactgtcgcaaaacaacaacagcaactttgcctggactggtgccaccaagtatcatctgaacggcagagactctctggtgaatccgggcgtcgccatggcaaccaacaaggacgacgaggaccgcttcttcccatccagcggcatcctcatgtttggcaagcagggagctggaaaagacaacgtggactatagcaacgtgatgctaaccagcgaggaagaaatcaagaccaccaaccccgtggccacagaacagtatggcgtggtggctgataacctacagcagcaaaacaccgctcctattgtgggggccgtcaacagccagggagccttacctggcatggtctggcagaaccgggacgtgtacctgcagggtcctatttgggccaagattcctcacacagatggcaactttcacccgtctcctttaatgggcggctttggacttaaacatccgcctcctcagatcctcatcaaaaacactcctgttcctgcggatcctccaacagcgttcaaccaggccaagctgaattctttcatcacgcagtacagcaccggacaagtcagcgtggagatcgtgtgggagctgcagaaggagaacagcaagcgcaggaacccagagattcagtatacttccaactactacaaatctacaaatgtggactttgctgttaatactgagggtgtttactctgagcctcgccccattggcactcgttacctcacccgtaatctgtaa

SEQ ID NO: 487 - protein, 738 aa, Adeno-associated virus
MAADGYLPDWLEDNLSEGIREWWDLKPGAPKPKANQQKQDDGRGLVLPGYKYLGPFNGLDKGEPVNAADAAALEHDKAYDQQLKAGDNPYLRYNHADAEFQERLQEDTSFGGNLGRAVFQAKKRVLEPLGLVEEGAKTAPGKKRPVEPSPQRSPDSSTGIGKKGQQPARKRLNFGQTGDSESVPDPQPIGEPPAAPSSVGSGTMAAGGGAPMADNNEGADGVGSSSGNWHCDSTWLGDRVITTSTRTWALPTYNNHLYKQISNGTSGGSTNDNTYFGYSTPWGYFDFNRFHCHFSPRDWQRLINNNWGFRPKRLSFKLFNIQVKEVTQNEGTKTIANNLTSTIQVFTDSEYQLPYVLGSAHQGCLPPFPADVFMIPQYGYLTLNNGSQAVGRSSFYCLEYFPSQMLRTGNNFSFSYTFEDVPFHSSYAHSQSLDRLMNPLIDQYLYYLSRTQSTGGTAGTQQLLFSQAGPSNMSAQARNWLPGPCYRQQRVSTTLSQNNNSNFAWTGATKYHLNGRDSLVNPGVAMATNKDDEDRFFPSSGILMFGKQGAGKDNVDYSNVMLTSEEEIKTTNPVATEQYGVVADNLQQQNTAPIVGAVNSQGALPGMVWQNRDVYLQGPIWAKIPHTDGNFHPSPLMGGFGLKHPPPQILIKNTPVPADPPTAFNQAKLNSFITQYSTGQVSVEIVWELQKENSKRRNPEIQYTSNYYKSTNVDFAVNTEGVYSEPRPIGTRYLTRNL

SEQ ID NO: 488 - protein, 738 aa, Adeno-associated virus
MAADGYLPDWLEDNLSEGIREWWDLKPGAPKPKANQQKQDDGRGLVLPGYKYLGPFNGLDKGEPVNAADAAALEHDKAYDQQLKAGDNPYLRYNHADAEFQERLQEDTSFGGNLGRAVFQAKKRVLEPLGLVEEGAKTAPGKKRPVEPSPQRSPDSSTGIGKKGQQPARKRLNFGQTGDSESVPDPQPIGEPPAAPSSVGSGTMAAGGGAPMADNNEGADGVGSSSGNWHCDSTWLGDRVITTSTRTWALPTYNNHLYKQISNGTSGGSTNDNTYFGYSTPWGYFDFNRFHCHFSPRDWQRLINNNWGFRPKRLSFKLFNIQVKEVTQNEGTKTIANNLTSTIQVFTDSEYQLPYVLGSAHQGCLPPFPADVFMIPQYGYLTLNNGSQAVGRSSFYCLEYFPSQMLRTGNNFSFSYTFEDVPFHSSYAHSQSLDRLMNPLIDQYLYYLSRTQSTGGTAGTQQLLFSQAGPSNMSAQARNWLPGPCYRQQRVSTTLSQNNNSNFAWTGATKYHLNGRDSLVNPGVAMATNKDDEDRFFPSSGILMFGKQGAGKDNVDYSNVMLTSEEEIKTTNPVATEQYGVVADNLQQQNTAPIVGAVNSQGALPGMVWQNRDVYLQGPIWAKIPHTDGNFHPSPLMGGFGLKHPPPQILIKNTPVPADPPTAFNQAKLNSFITQYSTGQVSVEIEWELQKENSKRWNPEIQYTSNYYKSTNVDFAVNTEGVYSEPRPIGTRYLTRNL

SEQ ID NO: 489 - protein, 738 aa, Adeno-associated virus
MAADGYLPDWLEDNLSEGIREWWDLKPGAPKPKANQQKQDDGRGLVLPGYKYLGPFNGLDKGEPVNAADAAALEHDKAYDQQLKAGDNPYLRYNHADAEFQERLQEDTSFGGNLGRAVFQAKKRVLEPLGLVEEGAKTAPGKKRPVEPSPQRSPDSSTGIGKKGQQPARKRLNFGQTGDSESVPDPQPIGEPPAAPSSVGSGTMAAGGGAPMADNNEGADGVGSSSGNWHCDSTWLGDRVITTSTRTWALPTYNNHLYKQISNGTSGGSTNDNTYFGYSTPWGYFDFNRFHCHFSPRDWQRLINNNWGFRPKRLSFKLFNIQVKEVTQNEGTKTIANNLTSTIQVFTDSEYQLPYVLGSAHQGCLPPFPADVFMIPQYGYLTLNNGSQAVGRSSFYCLEYFPSQMLRTGNNFSFSYTFEDVPFHSSYAHSQSLDRLMNPLIDQYLYYLSRTQSTGGTAGTQQLLFSQAGPSNMSAQARNWLPGPCYRQQRVSTTLSQNNNSNFAWTGATKYHLNGRDSLVNPGVAMATNKDDEDRFFPSSGILMFGKQGAGKDNVDYSNVMLTSEEEIKTTNPVATEQYGVVADNLQQQNTAPIVGAVNSQGALPGMVWQNRDVYLQGPIWAKIPHTDGNFHPSPLMGGFGLKHPPPQILIKNTPVPADPPTAFNQAKLNSFITQYSTGQVSVEIVWELQKENSKRWNPEIQYTSNYYKSTNVDFAVNTEGVYSEPRPIGTRYLTRNL

SEQ ID NO: 490 - protein, 738 aa, Adeno-associated virus; identical to SEQ ID NO: 488

SEQ ID NO: 491 - DNA, 2214 bp, Adeno-associated virus
  source 1..2214: mol_type = unassigned DNA
atggctgctgacggttatcttccagattggctcgaggacaacctctctgagggcattcgcgagtggtgggacctgaaacctggagcccccaagcccaaggccaaccagcagaagcaggacgacggccggggtctggtgcttcctggctacaagtacctcggacccttcaacggactcgacaagggggagcccgtcaacgcggcggacgcagcggccctcgagcacgacaaggcctacgaccagcagctcaaagcgggtgacaatccgtacctgcggtataaccacgccgacgccgagtttcaggagcgtctgcaagaagatacgtcttttgggggcaacctcgggcgagcagtcttccaggccaagaagcgggttctcgaacctctcggtctggttgaggaagctgctaagacggctcctggaaagaagagaccggtagaaccgtcacctcagcgttcccccgactcctccacgggcatcggcaagaaaggccagcagcccgctagaaagagactgaactttgggcagactggcgactcagagtcagtccccgaccctcaaccaatcggagaaccaccagcaggcccctctggtctgggatctggtacaatggctgcaggcggtggcgctccaatggcagacaataacgaaggcgccgacggagtgggtaatgcctcaggaaattggcattgcgattccacatggctgggcgacagagtcatcaccaccagcacccgaacctgggctttgcccacctacaacaaccacctctacaagcaaatctccagtcagtcagcaggtagcaccaacgacaacgtctacttcggctacagcaccccctgggggtattttgacttcaacagattccactgtcacttctcaccacgtgactggcagcggctcatcaacaacaactggggattccggcccaagaagctcaacttcaagctgttcaacatccaggtcaaggaggtcacaacgaatgacggcgtcacgaccatcgccaataaccttaccagcacggttcaggtcttttcggactcggaataccagctgccctacgtcctcggctccgcacaccagggctgcctgcctccgttcccggcggacgtcttcatgattccccagtacggctacctgactctgaacaatggcagccaatcggtgggtcgttcctctttctactgcctggaatatttcccttctcaaatgctgagaacgggcaacaacttcaccttcagctacaccttcgaggacgttcccttccacagcagctacgcacacagccagagcctggaccggctgatgaatcctcttatcgaccagtacctgtattacctggccagaacacagagcaacgcaggaggcacagctggcaatcgggaactgcagttttatcagggcgggcctaccaccatggccgaacaagccaaaaactggctgcctagaccttgcttccggcaacaaagagtctccaagacgctggatcaaaacaacaacagcaactttgcttggactggtgccaccaaataccatctaaatggaagaaattcattggttaatcccggtgtcgccatggcaacccacaaggacgacgaggaacgcttcttcccttcgagcggagtcctgatttttggaaaaactggagcagctaataagactacactggaaaatgtgttaatgacaaatgaagaggaaattcgtcctaccaacccggtagccaccgaggaatacgggactgttagcagcaacctgcaggcggctaacactgcagcccagacacaagttgtcaacaaccagggagccttacctggtatggtctggcagaaccgggacgtgtacctgcagggtcccatctgggccaagattcctcacacggacggcaactttcacccgtctccgctgatgggcggctttggactgaagcatccgcctcctcagatcctgatcaaaaacactcctgttcctgctaatcccccggaggtgtttacgcctgccaagtttgcttctttcatcacacagtacagcaccggccaggtcagcgtggagatcgagtgggagctgcagaaggagaacagcaagcgctggaacccagagattcagtatacctccaattttgacaaacagactggtgtggactttgccgttgacagccagggtgtttattctgagcctcgccccattggtactcgttacctcacccgtaatctgtaa

SEQ ID NO: 492 - protein, 737 aa, Adeno-associated virus
MAADGYLPDWLEDNLSEGIREWWDLKPGAPKPKANQQKQDDGRGLVLPGYKYLGPFNGLDKGEPVNAADAAALEHDKAYDQQLKAGDNPYLRYNHADAEFQERLQEDTSFGGNLGRAVFQAKKRVLEPLGLVEEAAKTAPGKKRPVEPSPQRSPDSSTGIGKKGQQPARKRLNFGQTGDSESVPDPQPIGEPPAGPSGLGSGTMAAGGGAPMADNNEGADGVGNASGNWHCDSTWLGDRVITTSTRTWALPTYNNHLYKQISSQSAGSTNDNVYFGYSTPWGYFDFNRFHCHFSPRDWQRLINNNWGFRPKKLNFKLFNIQVKEVTTNDGVTTIANNLTSTVQVFSDSEYQLPYVLGSAHQGCLPPFPADVFMIPQYGYLTLNNGSQSVGRSSFYCLEYFPSQMLRTGNNFTFSYTFEDVPFHSSYAHSQSLDRLMNPLIDQYLYYLARTQSNAGGTAGNRELQFYQGGPTTMAEQAKNWLPRPCFRQQRVSKTLDQNNNSNFAWTGATKYHLNGRNSLVNPGVAMATHKDDEERFFPSSGVLIFGKTGAANKTTLENVLMTNEEEIRPTNPVATEEYGTVSSNLQAANTAAQTQVVNNQGALPGMVWQNRDVYLQGPIWAKIPHTDGNFHPSPLMGGFGLKHPPPQILIKNTPVPANPPEVFTPAKFASFITQYSTGQVSVEIEWELQKENSKRWNPEIQYTSNFDKQTGVDFAVDSQGVYSEPRPIGTRYLTRNL

SEQ ID NO: 493 - DNA, 2214 bp, Adeno-associated virus
  source 1..2214: mol_type = unassigned DNA
atggctgctgacggttatcttccagattggctcgaggacaacctctctgagggcattcgcgagtggtgggacctgaaacctggagcccccaagcccaaggccaaccagcagaagcaggacgacggccggggtctggtgcttcctggctacaagtacctcggacccttcaacggactcgacaagggggagcccgtcaacgcggcggacgcagcggccctcgagcacgacaaggcctacgaccagcagctcaaagcgggtgacaatccgtacctgcggtataaccatgccgacgccgagtttcaggagcgtctgcaagaagatacgtcttttgggggcaacctcgggcgagcagtcctccaggccaagaagcgggttctcgaacctctcggtctggttgaggaagctgctaagacggctcctggaaagaagagaccggtagaaccgtcacctcagcgttcccccgactcctccacgggcatcggcaagaaaggccagcagcccgctagaaagagactgaactttgggcagactggcgactcagagtcagtccccgaccctcaaccaatcggagaaccaccagcaggcccctctggtctgggatctggtacaatggctgcaggcggtggcgctccaatggcagacaataacgaaggcgccgacggagtgggtaatgcctcaggaaattggcattgcgattccacatggctgggcgacagagtcatcaccaccagcacccgaacctgggctttgcccacctacaacaaccacctctacaagcaaatctccagtcagtcagcaggtagcaccaacgacaacgtctacttcggctacagcaccccctgggggtattttgacttcaacagattccactgtcacttctcaccacgtgactggcagcggctcatcaacaacaactggggattccggcccaagaagctcaacttcaagctgttcaacatccaggtcaaggaggtcacaacgaatgacggcgtcacgaccatcgccaataaccttaccagcacggttcaggtcttttcggactcggaataccagctgccctacgtcctcggctccgcacaccagggctgcctgcctccgttcccggcggacgtcttcatgattccccagtacggctacctgactctgaacaatggcagccaatcggtgggtcgttcctctttctactgcctggaatatttcccttctcaaatgctgagaacgggcaacaacttcaccttcagctacaccttcgaggacgttcccttccacagcagctacgcacacagccagagcctggaccggctgatgaatcctcttatcgaccagtacctgtattacctggccagaacacagagcaacgcaggaggcacagctggcaatcgggaactgcagttttatcagggcgggcctaccaccatggccgaacaagccaaaaactggctgcctggaccttgcttccggcaacaaagagtctccaagacgctggatcaaaacaacaacagcaactttgcttggactggtgccaccaaataccatctaaatggaagaaattcattggttaatcccggtgtcgccatggcaacccacaaggacgacgaggaacgcttcttcccttcgagcggagtcctgatttttggaaaaactggagcagctaataagactacactggaaaatgtgttaatgacaaatgaagaggaaattcgtcctaccaacccggtagccaccgaggaatacgggactgttagcagcaacctgcaggcggctaacactgcagcccagacacaagttgtcaacaaccagggagccttacctggtatggtctggcagaaccgggacgtgtacctgcagggtcccatctgggccaagattcctcacacggacggcaactttcacccgtctccgctgatgggcggctttggactgaagcatccgcctcctcagatcctgatcaaaaacactcctgttcctgctaatcccccggaggtgtttacgcctgccaagtttgcttctttcatcacacagtacagcaccggccaggtcagcgtggagatcgagtgggagctgcagaaggagaacagcaagcgctggaacccagagattcagtatacctccaattttgacaaacagactggtgtggactttgccgttgacagccagggtgtttattctgagcctcgccccattggtactcgttacctcacccgtaatctgtaa

SEQ ID NO: 494 - protein, 737 aa, Adeno-associated virus; identical to SEQ ID NO: 453

SEQ ID NO: 495 - protein, 737 aa, Adeno-associated virus
MAADGYLPDWLEDNLSEGIREWWDLKPGAPKPKANQQKQDDGRGLVLPGYKYLGPFNGLDKGEPVNAADAAALEHDKAYDQQLKAGDNPYLRYNHADAEFQERLQEDTSFGGNLGRAVLQAKKRVLEPLGLVEEAAKTAPGKKRPVEPSPQRSPDSSTGIGKKGQQPARKRLNFGQTGDSESVPDPQPIGEPPAGPSGLGSGTMAAGGGAPMADNNEGADGVGNASGNWHCDSTWLGDRVITTSTRTWALPTYNNHLYKQISSQSAGSTNDNVYFGYSTPWGYFDFNRFHCHFSPRDWQRLINNNWGFRPKKLNFKLFNIQVKEVTTNDGVTTIANNLTSTVQVFSDSEYQLPYVLGSAHQGCLPPFPADVFMIPQYGYLTLNNGSQSVGRSSFYCLEYFPSQMLRTGNNFTFSYTFEDVPFHSSYAHSQSLDRLMNPLIDQYLYYLARTQSNAGGTAGNRELQFYQGGPTTMAEQAKNWLPGPCFRQQRVSKTLDQNNNSNFAWTGATKYHLNGRNSLVNPGVAMATHKDDEERFFPSSGVLIFGKTGAANKTTLENVLMTNEEEIRPTNPVATEEYGTVSSNLQAANTAAQTQVVNNQGALPGMVWQNRDVYLQGPIWAKIPHTDGNFHPSPLMGGFGLKHPPPQILIKNTPVPANPPEVFTPAKFASFITQYSTGQVSVEIEWELQKENSKRWNPEIQYTSNFDKQTGVDFAVDSQGVYSEPRPIGTRYLTRNL

SEQ ID NO: 496 - DNA, 2217 bp, Adeno-associated virus
  source 1..2217: mol_type = unassigned DNA
atggctgccgatggttatcttccagattggctcgaggacaacctctctgagggcattcgcgagtggtgggacctgaaacctggagccccgaaacccaaagccaaccagcaaaagcaggacgacggccggggtctggtgcttcctggctacaagtacctcggacccttcaacggactcgacaagggggagcccgtcaacgcggcggacgcagcggccctcgagcacgacaaggcctacgaccagcagctcaaagcgggtgacaatccgtacctgcggtataatcacgccgacgccgagtttcaggagcgtctgcaagaagatacgtcttttgggggcaacctcgggcgagcagtcttccaggccaagaagcgggttctcgaacctctcggtctggttgaggaaggcgctaagacggctcctggaaagaagagaccggtagagccgtcaccacagcgttcccccgactcctccacgggcatcggcaagaaaggccagcagcccgccagaaagagactcaatttcggtcagactggcgactcagagtcagtccccgaccctcaacctatcggagaacctccagcagcgccctctagtgtgggatctggtacaatggctgcaggcggtggcgcaccaatggcagacaataacgaaggtgccgacggagtgggtagttcctcgggaaattggcattgcgattccacatggctgggcgacagagtcatcaccaccagcacccgaacctgggccctgcccacctacaacaaccacctctacaagcaaatctccaacgggacctcgggaggcagcaccaacgacaacacctactttggctacagcaccccctgggggtattttgactttaacagattccactgccacttctcaccacgtgactggcagcgactcatcaacaacaactggggattccggcccaagagactcagcttcaagctcttcaacatccaggtcaaagaggtcacgcagaatgaaggcaccaagaccatcgccaataacctcaccagcaccatccaggtgtttacggactcggaataccagctgccgtacgtcctcggctctgcccaccagggctgcctgcctccgttcccggcggacgtcttcatgattcctcagtacggctacctgactctcaacaacggtagtcaggccgtgggacgttcctccttctactgcctggagtacttcccctctcagatgctgagaacgggcaacaacttttccttcagctacactttcgaggacgtgcctttccacagcagctacgcgcacagccagagtttggacaggctgatgaatcctctcatcgaccagtacctgtactacctgtcaagaacccagtctacgggaggcacagcgggaacccagcagttgctgttttctcaggccgggcctagcaacatgtcggctcaggccagaaactggctgcctggaccctgctacagacagcagcgcgtctccacgacactgtcgcaaaacaacaacagcaactttgcctggactggtgccaccaagtatcatctgaacggcagagactctctggtgaatccgggcgtcgccatggcaaccaacaaggacgacgaggaccgcttcttcccacccagcggcatcctcatgtttggcaagcagggagctggaaaagacaacgtggactatagcaacgtgatgctaaccagcgaggaagaaatcaagaccaccaaccccgtggccacagaacagtatggcgtggtggctgataacctacagcagcaaaacaccgctcctattgtgggggccgtcaacagccagggagccttacctggcatggtctggcagaaccgggacgtgtacctgcagggtcctatttgggccaagattcctcacacagatggcaactttcacccgtctcctttaatgggcggctttggacttaaacatccgcctcctcagatcctcatcaaaaacactcctgttcctgcggatcctccaacagcgttcaaccaggccaagctgaattctttcatcacgcagtacagcaccggacaagtcagcgtggtgatcgagtgggagctgcagaaggagaacagcaagcgctggaacccagagattcagtatacttccaactactacaaatctacaaatgtggactttgctgttaatactgagggtgtttactctgagcttcgccccattggcactcgttacctcacccgtaatctgtaa

SEQ ID NO: 497 - protein, 738 aa, Adeno-associated virus
MAADGYLPDWLEDNLSEGIREWWDLKPGAPKPKANQQKQDDGRGLVLPGYKYLGPFNGLDKGEPVNAADAAALEHDKAYDQQLKAGDNPYLRYNHADAEFQERLQEDTSFGGNLGRAVFQAKKRVLEPLGLVEEGAKTAPGKKRPVEPSPQRSPDSSTGIGKKGQQPARKRLNFGQTGDSESVPDPQPIGEPPAAPSSVGSGTMAAGGGAPMADNNEGADGVGSSSGNWHCDSTWLGDRVITTSTRTWALPTYNNHLYKQISNGTSGGSTNDNTYFGYSTPWGYFDFNRFHCHFSPRDWQRLINNNWGFRPKRLSFKLFNIQVKEVTQNEGTKTIANNLTSTIQVFTDSEYQLPYVLGSAHQGCLPPFPADVFMIPQYGYLTLNNGSQAVGRSSFYCLEYFPSQMLRTGNNFSFSYTFEDVPFHSSYAHSQSLDRLMNPLIDQYLYYLSRTQSTGGTAGTQQLLFSQAGPSNMSAQARNWLPGPCYRQQRVSTTLSQNNNSNFAWTGATKYHLNGRDSLVNPGVAMATNKDDEDRFFPPSGILMFGKQGAGKDNVDYSNVMLTSEEEIKTTNPVATEQYGVVADNLQQQNTAPIVGAVNSQGALPGMVWQNRDVYLQGPIWAKIPHTDGNFHPSPLMGGFGLKHPPPQILIKNTPVPADPPTAFNQAKLNSFITQYSTGQVSVVIEWELQKENSKRWNPEIQYTSNYYKSTNVDFAVNTEGVYSELRPIGTRYLTRNL

SEQ ID NO: 498 - DNA, 2214 bp, Adeno-associated virus
  source 1..2214: mol_type = unassigned DNA
atggctgctgacggttatcttccagattggctcgaggacaacctctctgagggcattcgcgagtggtgggacctgaaacctggagcccccaagcccaaggccaaccagcagaagcaggacgacggccggggtctggtgcttcctggctacaagtacctcggacccttcaacggactcgacaagggggagcccgtcaacgcggcggacgcagcggccctcgagcacgacaaggcctacgaccagcagctcaaagcgggtgacaatccgtacctgcggtataaccacgccgacgccgagtttcaggagcgtctgcaagaagatacgtcttttgggggcaacctcgggcgagcagtcttccaggccaagaagcgggttctcgaacctctcggtctggttgaggaagctgctaagacggctcctggaaagaagagaccggtagaaccgtcacctcagcgttcccccgactcctccacgggcatcggcaagaaaggccagcagcccgctagaaagagactgaactttgggcagactggcgactcagagtcagtccccgaccctcaaccaatcggagaaccaccagcaggcccctctggtctgggatctggtacaatggctgcaggcggtggcgccccaatggcagacaataacgaaggcgccgacggagtgggtaatgcctcaggaaattggcattgcgattccacatggctgggcgacagagtcatcaccaccagcacccgaacctgggctttgcccacctacaacaaccacctctacaagcaaatctccagtcagtcagcaggtagcaccaacgacaacgtctacttcggctacagcaccccctgggggtattttgacttcaacagattccactgtcacttctcaccacgtgactggcagcggctcatcaacaacaactggggattccggcccaagaagctcaacttcaagctgttcaacatccaggtcaaggaggtcacaacgaatgacggcgtcacgaccatcgccaataaccttaccagcacggttcaggtcttttcggactcggaataccagctgccctacgtcctcggctccgcacaccagggctgcctgcctccgttcccggcggacgtcttcatgattccccagtacggctacctgactctgaacaatggcagccaatcggtgggtcgttcctctttctactgcctggaatatttcccttctcaaatgctgagaacgggcaacaacttcaccatcagctacaccttcgaggacgttcccttccacagcagctacgcacacagccagagcctggaccggctgatgaatcctcttatcgaccagtacctgtattacctggccagaacacagagcaacgcaggaggcacagctggcaatcaggaactgcagttttatcagggcgggcctaccaccatggccgaacaagccaaaaactggctgcctggaccttgcttccggcaacaaagagtctccaagacgctggatcaaaacaacaacagcaactttgcttggactggtgccaccaaataccatctaaatggaagaaattcattggttaatcccggtgtcgccatggcaacccacaaggacgacgaggaacgcttcttcccttcgagcggagtcctgatttttggaaaaactggagcagctaataagactacactggaaaatgtgttaatgacaaatgaagaggaaattcgtcctaccaacccggtagccaccgaggaatacgggactgttagcagcaacctgcaggcggctaacactgcagcccagacacaagttgtcaacaaccagggagccttacctggtatggtctggcagaaccgggacgtgtacctgcagggtcccatctgggccaagattcctcacacagatggcaactttcacccgtctcctttaatgggcggctttggacttaaacatccgcctcctcagatcctcatcaaaaacactcctgttcctgcggatcctccaacagcgttcaaccaggccaagctgaattctttcatcacgcagtacagcaccggacaagtcagcgtggagatcgagtgggagctgcagaaggagaacagcaagcgctggaacccagagattcagtatacttccaactactacaaatctacaaatgtggactttgctgttaatactgagggtgtttactctgagcctcgccccattggcactcgttacctcacccgtaatctgtaa

SEQ ID NO: 499 - protein, 737 aa, Adeno-associated virus
MAADGYLPDWLEDNLSEGIREWWDLKPGAPKPKANQQKQDDGRGLVLPGYKYLGPFNGLDKGEPVNAADAAALEHDKAYDQQLKAGDNPYLRYNHADAEFQERLQEDTSFGGNLGRAVFQAKKRVLEPLGLVEEAAKTAPGKKRPVEPSPQRSPDSSTGIGKKGQQPARKRLNFGQTGDSESVPDPQPIGEPPAGPSGLGSGTMAAGGGAPMADNNEGADGVGNASGNWHCDSTWLGDRVITTSTRTWALPTYNNHLYKQISSQSAGSTNDNVYFGYSTPWGYFDFNRFHCHFSPRDWQRLINNNWGFRPKKLNFKLFNIQVKEVTTNDGVTTIANNLTSTVQVFSDSEYQLPYVLGSAHQGCLPPFPADVFMIPQYGYLTLNNGSQSVGRSSFYCLEYFPSQMLRTGNNFTISYTFEDVPFHSSYAHSQSLDRLMNPLIDQYLYYLARTQSNAGGTAGNQELQFYQGGPTTMAEQAKNWLPGPCFRQQRVSKTLDQNNNSNFAWTGATKYHLNGRNSLVNPGVAMATHKDDEERFFPSSGVLIFGKTGAANKTTLENVLMTNEEEIRPTNPVATEEYGTVSSNLQAANTAAQTQVVNNQGALPGMVWQNRDVYLQGPIWAKIPHTDGNFHPSPLMGGFGLKHPPPQILIKNTPVPADPPTAFNQAKLNSFITQYSTGQVSVEIEWELQKENSKRWNPEIQYTSNYYKSTNVDFAVNTEGVYSEPRPIGTRYLTRNL

SEQ ID NO: 500 - DNA, 2217 bp, Adeno-associated virus
  source 1..2217: mol_type = unassigned DNA
atggctgccgatggttatcttccagattggctcgaggacaacctctctgagggcattcgcgagtggtgggacctgaaacctggagccccgaaacccaaagccaaccagcaaaagcaggacgacggccggggtctggtgcttcctggctacaagtacctcggacccttcaacggactcgacaagggggagcccgtcaacgcggcggacgcagcggccctcgagcacgacaaggcctacgaccagcagctcaaagcgggtgacaatccgtacctgcggtataatcacgccgacgccgagtttcaggagcgtctgcaagaagatacgtcttttgggggcaacctcgggcgagcagtcttccaggccaagaagcgggttctcgaacctctcggtctggttgaggaaggcgctaagacggctcctggaaagaagagaccggtagagccgtcaccacagcgttcccccgactcctccacgggcatcggcaagaaaggccagcagcccgccagaaagagactcaatttcggtcagactggcgactcagagtcagtccccgaccctcaacctatcggagaacctccagcagcgccctctagtgtgggatctggtacaatggctgcaggcggtggcgcaccaatggcagacaataacgaaggtgccgacggagtgggtagttcctcgggaaattggcattgcgattccacatggctgggcgacagagtcatcaccaccagcacccgaacctgggccctgcccgcctacaacaaccacctctacaagcaaatctccaacgggacctcgggaggcagcaccaacgacaacacctactttggctacagcaccccctgggggtattttgactttaacagattccactgccacttctcaccacgtgactggcagcgactcatcaacaacaactggggattccggcccaagagactcagcttcaagctcttcaacatccaggtcaaagaggtcacgcagaatgaaggcaccaagaccatcgccaataacctcaccagcaccatccaggtgtttacggactcggaataccagctgccgtacgtcctcggctctgcccaccagggctgcctgcctccgttcccggcggatgtcttcatgattcctcagtacggctacctgactctcaacaacggtagtcaggccgtgggacgttcctccttctactgcctggagtacttcccctctcagatgctgagaacgggcaacaacttttccttcagctacactttcgaggacgtgcctttccacagcagctacgcgcacagccagagtttggacaggctgatgaatcctctcatcgaccagtacctgtactacctgtcaagaacccagtctacgggaggcacagcgggaacccagcagttgctgttttctcaggccgggcctagcaacatgtcggctcaggccagaaactggctgcctggaccctgctacagacagcagcgcgtctccacgacactgtcgcaaaacaacaacagcaactttgcctggactggtgccaccaagtatcatctgagcggcagagactctctggtgaatccgggcgtcgccatggcaaccaacaaggacgacgaggaccgcttcttcccatccagcggcatcctcatgtttggcaagcagggagctggaaaagacaacgtggactatagcaacgtgatgctaaccagcgaggaagaaatcaagaccaccaaccccgtggccacagaacagtatggcgtggtggctgataacctacagcagcaaaacaccgctcctattgtgggggccgtcaacagccagggagccttacctggcatggtctggcagaaccgggacgtgtacctgcagggtcctatttgggccaagattcctcacacagatggcaactttcacccgtctcctttaatgggcggctttggacttaaacatccgcctcctcagatcctcatcaaaaacactcctgttcctgcggatcctccaacagcgttcaaccaggccaagctgaattcttccatcacgcagtacagcaccggacaagtcagcgtggagatcgagtgggagctgcagaaggagaacagcaagcgctggaacccagagattcagtatacttccaactactacaaatctacaaatgtggactttgctgttaatactgagggtgtttactctgagcctcgccccattggcactcgttacctcacccgtaatttgtaa

SEQ ID NO: 501 - protein, 738 aa, Adeno-associated virus
MAADGYLPDWLEDNLSEGIREWWDLKPGAPKPKANQQKQDDGRGLVLPGYKYLGPFNGLDKGEPVNAADAAALEHDKAYDQQLKAGDNPYLRYNHADAEFQERLQEDTSFGGNLGRAVFQAKKRVLEPLGLVEEGAKTAPGKKRPVEPSPQRSPDSSTGIGKKGQQPARKRLNFGQTGDSESVPDPQPIGEPPAAPSSVGSGTMAAGGGAPMADNNEGADGVGSSSGNWHCDSTWLGDRVITTSTRTWALPAYNNHLYKQISNGTSGGSTNDNTYFGYSTPWGYFDFNRFHCHFSPRDWQRLINNNWGFRPKRLSFKLFNIQVKEVTQNEGTKTIANNLTSTIQVFTDSEYQLPYVLGSAHQGCLPPFPADVFMIPQYGYLTLNNGSQAVGRSSFYCLEYFPSQMLRTGNNFSFSYTFEDVPFHSSYAHSQSLDRLMNPLIDQYLYYLSRTQSTGGTAGTQQLLFSQAGPSNMSAQARNWLPGPCYRQQRVSTTLSQNNNSNFAWTGATKYHLSGRDSLVNPGVAMATNKDDEDRFFPSSGILMFGKQGAGKDNVDYSNVMLTSEEEIKTTNPVATEQYGVVADNLQQQNTAPIVGAVNSQGALPGMVWQNRDVYLQGPIWAKIPHTDGNFHPSPLMGGFGLKHPPPQILIKNTPVPADPPTAFNQAKLNSSITQYSTGQVSVEIEWELQKENSKRWNPEIQYTSNYYKSTNVDFAVNTEGVYSEPRPIGTRYLTRNL

SEQ ID NO: 502 - protein, 736 aa, Adeno-associated virus; identical to SEQ ID NO: 2

SEQ ID NO: 503 - DNA, 2217 bp, Adeno-associated virus
  source 1..2217: mol_type = unassigned DNA
atggctgctgacggttatcttccagattggctcgaggacaacctctctgagggcattcgcgagtggtgggacctgaaacctggagcccccaagcccaaggccaaccagcagaagcaggacgacggccggggtctggtgcttcctggctacaagtacctcggacccttcaacggactcgacaagggggagcccgtcaacgcggcggacgcagcggccctcgagcacgacaaggcctacgaccagcagctcaaagcgggtgacaatccgtacctgcggtataaccacgccgacgccgagtttcaggagcgtctgcaagaagatacgtcttttgggggcaacctcgggcgagcagtcttccaggccaagaagcgggttctcgaacctctcggtctggttgaggaagctgctaagacggctcctggaaagaagagaccggtagaaccgtcacctcagcgttcccccgactcctccacgggcatcggcaagaaaggccagcagcccgctaaaaagagactgaactttggtcagactggcgactcagagtcagtccccgaccctcaaccaatcggagaaccaccagcaggcccctctggtctgggatctggtacaatggctgcaggcggtggcgctccaatggcagacaataacgaaggcgccgacggagtgggtagttcctcaggaaattggcattgcgattccacatggctgggcgacagagtcatcaccaccagcacccgaacctgggccctgcccacctacaacaaccacctctacaagcaaatatccaatgggacatcgggaggaagcaccaacgacaacacctacttcggctacagcaccccctgggggtattttgacttcaacagattccactgccacttctcaccacgtgactggcagcgactcatcaacaacaactggggattccggccaaaaagactcagcttcaagctcttcaacatccaggtcaaggaggtcacgcagaatgaaggcaccaagaccatcgccaataaccttaccagcacgattcaggtatttacggactcggaataccagctgccgtacgtcctcggctccgcgcaccagggctgcctgcctccgttcccggcggacgtcttcatgattccccagtacggctaccttacactgaacaatggaagtcaagccgtaggccgttcctccttctactgcctggaatattttccatctcaaatgctgcgaactggaaacaattttgaattcagctacaccttcgaggacgtgcctttccacagcagctacgcacacagccagagcttggaccgactgatgaatcctctcatcgaccagtacctgtactacttatccagaactcagtccacaggaggaactcaaggtacccagcaattgttattttctcaagctgggcctgcaaacatgtcggctcaggctaagaactggctacctggaccttgctaccggcagcagcgagtctctacgacactgtcgcaaaacaacaacagcaactttgcttggactggtgccaccaaatatcacctgaacggaagagactctttggtaaatcccggtgtcgccatggcaacccacaaggacgacgaggaacgcttcttcccgtcgagtggagtcctgatgtttggaaaacagggtgctggaagagacaatgtggactacagcagcgttatgctaaccagcgaagaagaaattaaaaccactaaccctgtagccacagaacaatacggtgtggtggctgacaacttgcagcaaaccaatacagggcctattgtgggaaatgtcaacagccaaggagccttacctggcatggtctggcagaaccgagacgtgtacctgcagggtcccatctgggccaagattcctcacacggacggcaacttccacccttcaccgctaatgggaggatttggactgaagcacccacctcctcagatcctgatcaagaacacgccggtacctgcggatcctccaacaacgttcagccaggcgaaattggcttccttcattacgcagtacagcaccggacaggtcagcgtggaaatcgagtgggagctgcagaaggagaacagcaaacgctggaacccagagattcagtacacttcaaactactacaaatctacaaatgtggactttgctgtcaatacagagggaacttattctgagcctcgccccattggtactcgttacctcacccgtaatctgtaa

SEQ ID NO: 504 - protein, 738 aa, Adeno-associated virus
MAADGYLPDWLEDNLSEGIREWWDLKPGAPKPKANQQKQDDGRGLVLPGYKYLGPFNGLDKGEPVNAADAAALEHDKAYDQQLKAGDNPYLRYNHADAEFQERLQEDTSFGGNLGRAVFQAKKRVLEPLGLVEEGAKTAPGKKRPVEPSPQRSPDSSTGIGKKGQQPARKRLNFGQTGDSESVPDPQPLGEPPAAPSSVGSGTMAAGGGAPMADNNEGADGVGSSSGNWHCDSTWLGDRVITTSTRTWALPTYNNHLYKQISNGTSGGSTNDNTYFGYSTPWGYFDFNRFHCHFSPRDWQRLINNNWGFRPKRLSFKLFNIQVKEVTQNEGTKTIANNLTSTIQVFTDSEYQLPYVLGSAHQGCLPPFPADVFMIPQYGYLTLNNGSQAVGRSSFYCLEYFPSQMLRTGNNFSFSYTFEDVPFHSSYAHSQSLDRLMNPLIDQYLYYLSRTQSTGGTAGTQQLLFSQAGPSNMSAQARNWLPGPCYRQQRVSTTLSQNNNSNFAWTGATKYHLNGRDSLVNPGVAMATNKDDEDRFFPSSGILMFGKQGAGKDNVDYSNVMLTSEEEIKTTNPVATEQYGVVADNLQRQNTAPIVGAVNSQGALPGMVWQNRDVYLQGPIWAKIPHTDGNFHPSPLMGGFGLKHPPPQILIKNTPVPADPPTAFNQAKLNSFITQYSTGQVSVEIEWELQKENSKRWNPEIQYTSNYYKSTNVDFAVNTEGVYSEPRPIGTRYLTRNL

SEQ ID NO: 505 - protein, 736 aa, Adeno-associated virus
MAADGYLPDWLEDNLSEGIREWLNLKPGAPQPKANQQKQDNARGLVLPGYKYLGPFNGLDKGDPVNEADAAALEHDKAYGQQLKAGDNPYLKYNHADAEFQERLQKDTSFGGNLGKAVFQAKKRILEPLGLVETPAKTAPGKKRPVDPSPQRSPDSSSGIGKKSPHPARKRLNFGQTGEAESVPDPQPIGEPPSDPSSVGSGTMAAGGGAPMADNNEGADGVGNSSGNWHCDSTWLGDRVITTSTRTWALPTYNNHLYKQISSQSGATNDNHYFGYSTPWGYFDFNRFHCHFSPRDWQRLINNNWGFRPKRLSFKLFNIQVKEVTQNDGTTTIANNLTSTVQVFTDSEYQLPYVLGSAHQGCLPPFPADVFMIPQYGYLTLNNGSQAVGRSSFYCLEYFPSQMLRTGNNFQFSYTFEDVPFHSSYAHSQSLDRLMNPLIDQYLYYLSKTQGTNATVQGAKLQFSQAGPSNMRDQARNWLPGPCYRQQRVSKTANDNNNSEYAWTGATKYHLNGRDSLVNPGPAMASHKDDEEKFFPMNGTLVFGKNGAGNSNVDIENVMITDEEEIRTTNPVATEQYGVVSDNLQSSNTRPITGDVDSQGVLPGMVWQDRDVYLQGPIWAKIPHTDGHFHPSPLMGGFGLKHPPPQILIKNTPVPANPATTFTPGKFASFITQYSTGQVSVQIEWELQKENSKRWNPEIQYTSNYNKSVNVDFTVDTNGVYSEPRPIGTRYLTRNL

SEQ ID NO: 506 - protein, 736 aa, Adeno-associated virus; identical to SEQ ID NO: 81

SEQ ID NO: 507 - protein, 736 aa, Adeno-associated virus
MAADGYLPDWLEDNLSEGIREWWDLKPGAPKPKANQQKQDDGRGLVLPGYKYLGPFNGLDKGEPVNAADAAALEHDKAYDQQLKAGDNPYLRYNHADAEFQERLQEDTSFGGNLGRAVFQAKKRVLEPLGLVEEGAKTAPGKKRPVEQSPQEPDSSSGIGKTGQQPAKKRLNFGQTGDSESVPDPQPLGEPPAAPSGLGPNTMASGGGAPMADNNEGADGVGNSSGNWHCDSTWLGDRVITTSTRTWALPTYNNHLYKQISNGTSGGSTNDNTYFGYSTPWGYFDFNRFHCHFSPRDWQRLINNNWGFRPKRLNFKLFNIQVKEVTTNEGTKTIANNLTSTVQVFTDSEYQLPYVLGSAHQGCLPPFPADVFMVPQYGYLTLNNGSQALGRSSFYCLEYFPSQMLRTGNNFQFSYTFEDVPFHSSYAHSQSLDRLMNPLIDQYLYYLVRTQTTGTGGTQTLAFSQAGPSSMANQARNWVPGPCYRQQRVSTTTNQNNNSNFAWTGAAKFKLNGRDSLMNPGVAMASHKDDEDRFFPSSGVLIFGKQGAGNDGVDYSQVLITDEEEIKATNPVATEEYGAVAINNQAANTQAQTGLVHNQGVIPGMVWQNRDVYLQGPIWAKIPHTDGNFHPSPLMGGFGLKHPPPQILIKNTPVPADPPLTFNQAKLNSFITQYSTGQVSVEIEWELQKENSKRWNPEIQYTSNYYKSTNVDFAVNTEGVYSEPRPIGTRYLTRNL

SEQ ID NO: 508 - protein, 736 aa, synthetic construct; identical to SEQ ID NO: 507
  source 1..736: note = Description of Artificial Sequence: Synthetic polypeptide

SEQ ID NO: 509 - protein, 736 aa, synthetic construct
  source 1..736: note = Description of Artificial Sequence: Synthetic polypeptide
MAADGYLPDWLEDNLSEGIREWWDLKPGAPKPKANQQKQDDGRGLVLPGYKYLGPFNGLDKGEPVNAADAAALEHDKAYDQQLKAGDNPYLRYNHADAEFQERLQEDTSFGGNLGRAVFQAKKRVLEPLGLVEEGAKTAPGKKRPVEQSPQEPDSSSGIGKTGQQPAKKRLNFGQTGDSESVPDPQPLGEPPAAPSGLGPNTMASGGGAPMADNNEGADGVGNSSGNWHCDSTWLGDRVITTSTRTWALPTYNNHLYKQISNGTSGGSTNDNTYFGYSTPWGYFDFNRFHCHFSPRDWQRLINNNWGFRPKRLNFKLFNIQVKEVTTNEGTKTIANNLTSTVQVFTDSEYQLPYVLGSAHQGCLPPFPADVFMVPQYGYLTLNNGSQALGRSSFYCLEYFPSQMLRTGNNFQFSYTFEDVPFHSSYAHSQSLDRLMNPLIDQYLYYLVRTQTTGTGGTQTLAFSQAGPSSMANQARNWVPGPCYRQQRVSTTTNQNNNSNFAWTGAAKFKLNGRDSLMNPGVAMASHKDDEDRFFPSSGVLIFGKQGAGNDGVDYSQVLITDEEEIKATNPVATEEYGAVAINNQRANTQAQTGLVHNQGVIPGMVWQNRDVYLQGPIWAKIPHTDGNFHPSPLMGGFGLKHPPPQILIKNTPVPADPPLTFNQAKLNSFITQYSTGQVSVEIEWELQKENSKRWNPEIQYTSNYYKSTNVDFAVNTEGVYSEPRPIGTRYLTRNL

SEQ ID NO: 510 - protein, 736 aa, synthetic construct
  source 1..736: note = Description of Artificial Sequence: Synthetic polypeptide
MAADGYLPDWLEDNLSEGIREWWDLKPGAPKPKANQQKQDDGRGLVLPGYKYLGPFNGLDKGEPVNAADAAALEHDKAYDQQLKAGDNPYLRYNHADAEFQERLQEDTSFGGNLGRAVFQAKKRVLEPLGLVEEGAKTAPGKKRPVEQSPQEPDSSSGIGKTGQQPAKKRLNFGQTGDSESVPDPQPLGEPPAAPSGLGPNTMASGGGAPMADNNEGADGVGNSSGNWHCDSTWLGDRVITTSTRTWALPTYNNHLYKQISNGTSGGSTNDNTYFGYSTPWGYFDFNRFHCHFSPRDWQRLINNNWGFRPKRLNFKLFNIQVKEVTTNEGTKTIANNLTSTVQVFTDSEYQLPYVLGSAHQGCLPPFPADVFMVPQYGYLTLNNGSQALGRSSFYCLEYFPSQMLRTGNNFQFSYTFEDVPFHSSYAHSQSLDRLMNPLIDQYLYYLVRTQTTGTGGTQTLAFSQAGPSSMANQARNWVPGPCYRQQRVSTTTNQNNNSNFAWTGAAKFKLNGRDSLMNPGVAMASHKDDEDAFFPSSGVLIFGKQGAGNDGVDYSQVLITDEEEIKATNPVATEEYGAVAINNQAANTQAQTGLVHNQGVIPGMVWQNRDVYLQGPIWAKIPHTDGNFHPSPLMGGFGLKHPPPQILIKNTPVPADPPLTFNQAKLNSFITQYSTGQVSVEIEWELQKENSKRWNPEIQYTSNYYKSTNVDFAVNTEGVYSEPRPIGTRYLTRNL

SEQ ID NO: 511 - DNA, 1803 bp, unidentified
  source 1..1803: mol_type = unassigned DNA; note = Bovine adeno-associated virus
acggcgcctgcggcaaaaaagaggcctctagagcagagtcctcaagagccagactcctcgagcggagttggcaagaaaggcaaacagcctgccagaaagagactcaactttgacgacgaacctggagccggagacgggcctcccccagaaggaccatcttccggagctatgtctactgagactgaaatgcgtgcagcagctggcggaaatggtggcgatgcgggacaaggtgccgagggagtgggtaatgcctccggtgattggcattgcgattccacttggtcagagagccacgtcaccaccacctcaacccgcacctgggtcctgccgacctacaacaaccacctgtacctgcggctcggctcgagcaacgccagcgacaccttcaacggattctccaccccctggggatactttgactttaaccgcttccactgccacttctcgccaagagactggcaaaggctcatcaacaaccactggggactgcgccccaaaagcatgcaagtccgcatcttcaacatccaagttaaggaggtcacgacgtctaacggggagacgaccgtatccaacaacctcaccagcacggtccagatctttgcggacagcacgtacgagctcccgtacgtgatggatgcaggtcaggagggcagcttgcctcctttccccaacgacgtgttcatggtgcctcagtacgggtactgcggactggtaaccggaggcagctctcaaaaccagacagacagaaatgccttctactgtctggagtactttcccagccagatgctgagaaccggaaacaactttgagatggtgtacaagtttgaaaacgtgcccttccactccatgtacgctcacagccagagcctggataggctgatgaacccgctgctggaccagtacctgtgggagctccagtctaccacctctggaggaactctcaaccagggcaattcagccaccaactttgccaagctgaccaaaacaaacttttctggctaccgcaaaaactggctcccggggcccatgatgaagcagcagagattctccaagactgccagtcaaaactacaagattccccagggaagaaacaacagtctgctccattatgagaccagaactaccctcgacggaagatggagcaattttgccccgggaacggccatggcaaccgcagccaacgacgccaccgacttctctcaggcccagctcatctttgcggggcccaacatcaccggcaacaccaccacagatgccaataacctgatgttcacttcagaagatgaacttagggccaccaacccccgggacactgacctgtttggccacctggcaaccaaccagcaaaacgccaccaccgttcctaccgtagacgacgtggacggagtcggcgtgtacccgggaatggtgtggcaggacagagacatttactaccaagggcccatttgggccaaaattccacacacggatggacactttcacccgtctcctctcattggcggatttggactgaaaagcccgcctccacaaatattcatcaaaaacactcctgtacccgccaatcccgcaacgaccttctctccggccagaatcaacagcttcatcacccagtacagcaccggacaggtggctgtcaaaatagaatgggaaatccagaaggagcggtccaagagatggaacccagaggtccagttcacgtccaactacggagcacaggactcgcttctctgggctcccgacaacgccggagcctacaaagagcccagggccattggatcccgatacctcaccaaccacctctag

SEQ ID NO: 512 - DNA, 1617 bp, unidentified
  source 1..1617: mol_type = unassigned DNA; note = Bovine adeno-associated virus
atgcgtgcagcagctggcggaaatggtggcgatgcgggacaaggtgccgagggagtgggtaatgcctccggtgattggcattgcgattccacttggtcagagagccacgtcaccaccacctcaacccgcacctgggtcctgccgacctacaacaaccacctgtacctgcggctcggctcgagcaacgccagcgacaccttcaacggattctccaccccctggggatactttgactttaaccgcttccactgccacttctcgccaagagactggcaaaggctcatcaacaaccactggggactgcgccccaaaagcatgcaagtccgcatcttcaacatccaagttaaggaggtcacgacgtctaacggggagacgaccgtatccaacaacctcaccagcacggtccagatctttgcggacagcacgtacgagctcccgtacgtgatggatgcaggtcaggagggcagcttgcctcctttccccaacgacgtgttcatggtgcctcagtacgggtactgcggactggtaaccggaggcagctctcaaaaccagacagacagaaatgccttctactgtctggagtactttcccagccagatgctgagaaccggaaacaactttgagatggtgtacaagtttgaaaacgtgcccttccactccatgtacgctcacagccagagcctggataggctgatgaacccgctgctggaccagtacctgtgggagctccagtctaccacctctggaggaactctcaaccagggcaattcagccaccaactttgccaagctgaccaaaacaaacttttctggctaccgcaaaaactggctcccggggcccatgatgaagcagcagagattctccaagactgccagtcaaaactacaagattccccagggaagaaacaacagtctgctccattatgagaccagaactaccctcgacggaagatggagcaattttgccccgggaacggccatggcaaccgcagccaacgacgccaccgacttctctcaggcccagctcatctttgcggggcccaacatcaccggcaacaccaccacagatgccaataacctgatgttcacttcagaagatgaacttagggccaccaacccccgggacactgacctgtttggccacctggcaaccaaccagcaaaacgccaccaccgttcctaccgtagacgacgtggacggagtcggcgtgtacccgggaatggtgtggcaggacagagacatttactaccaagggcccatttgggccaaaattccacacacggatggacactttcacccgtctcctctcattggcggatttggactgaaaagcccgcctccacaaatattcatcaaaaacactcctgtacccgccaatcccgcaacgaccttctctccggccagaatcaacagcttcatcacccagtacagcaccggacaggtggctgtcaaaatagaatgggaaatccagaaggagcggtccaagagatggaacccagaggtccagttcacgtccaactacggagcacaggactcgcttctctgggctcccgacaacgccggagcctacaaagagcccagggccattggatcccgatacctcaccaaccacctctag

SEQ ID NO: 513 - DNA, 1173 bp, unidentified
  source 1..1173: mol_type = unassigned DNA; note = Bovine adeno-associated virus
atggcgctggtaagctggctggtggaacatggcatcacttccgagaagcagtggattcaggagaatcaggagagctacctgtccttcaactccacgggaaactctcggagccagattaaagccgcgcttgacaacgcgtcaaaaattatgagtctgaccaaatctgcctcagactatctcgtgggacagactgttccagaggacatttctgaaaacagaatctggcagatttttgatctcaacggctacgacccggcatacgcgggctctgttctctacggctggtgcactcgcgcctttggaaagaggaacaccgtctggctgtatggacccgcgaccaccggaaagaccaacatcgcggaagccatctctcacaccgtgcccttttatggctgtgtgaactggactaatgagaactttccctttaatgactgtgtggaaaaaatgttgatctggtgggaggagggaaagatgaccagcaaggtggtggaacccgccaaggccatcttgggggggtctagagtacgagtggatcaaaaatgtaaatcctctgtacaagtagactctaccccggtgattatcacctccaatactaacatgtgtgtggtggtggatgggaactccacgacctttgaacaccagcagccgctggaagaccgcatgttcagatttgaactcatgcggcggctcccgccagattttggcaagattaccaagcaggaagtcaaagacttttttgcttgggcaaaggtcaaccaggtgccggtgactcacgagtttatggttcccaagaaagtggcgggaactgagagggcggagacttctagaaaacgcccactggatgacgtcaccaataccaactataaaagtccggagaagcgggcccggctctcagttgttcctgagacgcctcgcagttcagacgtgcctgtagagcccgctcctctgcgacctctcaactggtcttccaggtatgaatgcagatgtgactatcatgctaaatttgactctgtaacgggggaatgtgacgagtgtgaatatttgaatcggggcaaaaatggctgtatctttcataatgctacacattgtcaaatttgtcacgctgttcctccatgggaaaaggaaaatgtgtcagattttaatgattttgatgactgtaataaagagcagtaa

SEQ ID NO: 514 - DNA, 1833 bp, unidentified
  source 1..1833: mol_type = unassigned DNA; note = Bovine adeno-associated virus
atggctaccttctatgaagtcattgttcgcgttccatttgatgtggaagagcacctgcctggaatttctgacaactttgtagactgggtaactggtcaaatttgggagctgcctcccgagtcagatttgaatttgactctgattgagcagcctcagctgacggtggctgacagaattcgccgcgtgttcctgtacgagtggaacaaattttccaagcaggagagcaaattctttgtgcagtttgaaaagggatctgaatattttcatctgcacacgctcgtggagacctccggcatctcttctatggtccttggccgctacgtgagtcagattcgcgcccagctggtgaaggtggtgttccagaacattgagccgcggattaacgactgggtcgccatcaccaaggtaaagaagggcggagccaataaggtggtggattctgggtatattcccgcctacctgctgccgaaggtccaaccagagcttcagtgggcgtggactaacctcgaagagtataaattggccgccctcaatctggaggagcgcaaacggctcgtcgctcagtttcagcttgagtcctcgcagcgctcgcaagaggcatcttcccagagggacgtttcggctgacccggtcatcaagagcaagacttcccagaaatacatggcgctggtaagctggctggtggaacatggcatcacttccgagaagcagtggattcaggagaatcaggagagctacctgtccttcaactccacgggaaactctcggagccagattaaagccgcgcttgacaacgcgtcaaaaattatgagtctgaccaaatctgcctcagactatctcgtgggacagactgttccagaggacatttctgaaaacagaatctggcagatttttgatctcaacggctacgacccggcatacgcgggctctgttctctacggctggtgcactcgcgcctttggaaagaggaacaccgtctggctgtatggacccgcgaccaccggaaagaccaacatcgcggaagccatctctcacaccgtgcccttttatggctgtgtgaactggactaatgagaactttccctttaatgactgtgtggaaaaaatgttgatctggtgggaggagggaaagatgaccagcaaggtggtggaacccgccaaggccatcttgggggggtctagagtacgagtggatcaaaaatgtaaatcctctgtacaagtagactctaccccggtgattatcacctccaatactaacatgtgtgtggtggtggatgggaactccacgacctttgaacaccagcagccgctggaagaccgcatgttcagatttgaactcatgcggcggctcccgccagattttggcaagattaccaagcaggaagtcaaagacttttttgcttgggcaaaggtcaaccaggtgccggtgactcacgagtttatggttcccaagaaagtggcgggaactgagagggcggagacttctagaaaacgcccactggatgacgtcaccaataccaactataaaagtccggagaagcgggcccggctctcagttgttcctgagacgcctcgcagttcagacgtgcctgtagagcccgctcctctgcgacctctcaactggtcttccaggtatgaatgcagatgtgactatcatgctaaatttgactctgtaacgggggaatgtgacgagtgtgaatatttgaatcggggcaaaaatggctgtatctttcataatgctacacattgtcaaatttgtcacgctgttcctccatgggaaaaggaaaatgtgtcagattttaatgattttgatgactgtaataaagagcagtaa

SEQ ID NO: 515 - DNA, 2211 bp, unidentified
  source 1..2211: mol_type = unassigned DNA; note = Bovine adeno-associated virus
atgtcttttgttgaccaccctccagattggttggaatcgatcggcgacggctttcgtgaatttctcggccttgaggcgggtcccccgaaacccaaggccaatcaacagaagcaagataacgctcgaggtcttgtgcttcctgggtacaagtatcttggtcctgggaacggccttgataagggcgatcctgtcaattttgctgacgaggttgcccgagagcacgacctctcctaccagaaacagcttgaggcgggcgataacccttacctcaagtacaaccacgcggacgcagagtttcaggagaaactcgcttctgacacttcttttgggggaaaccttgggaaggctgttttccaggctaaaaagaggattctcgaacctcttggcctggttgagacgccggataaaacggcgcctgcggcaaaaaagaggcctctagagcagagtcctcaagagccagactcctcgagcggagttggcaagaaaggcaaacagcctgccagaaagagactcaactttgacgacgaacctggagccggagacgggcctcccccagaaggaccatcttccggagctatgtctactgagactgaaatgcgtgcagcagctggcggaaatggtggcgatgcgggacaaggtgccgagggagtgggtaatgcctccggtgattggcattgcgattccacttggtcagagagccacgtcaccaccacctcaacccgcacctgggtcctgccgacctacaacaaccacctgtacctgcggctcggctcgagcaacgccagcgacaccttcaacggattctccaccccctggggatactttgactttaaccgcttccactgccacttctcgccaagagactggcaaaggctcatcaacaaccactggggactgcgccccaaaagcatgcaagtccgcatcttcaacatccaagttaaggaggtcacgacgtctaacggggagacgaccgtatccaacaacctcaccagcacggtccagatctttgcggacagcacgtacgagctcccgtacgtgatggatgcaggtcaggagggcagcttgcctcctttccccaacgacgtgttcatggtgcctcagtacgggtactgcggactggtaaccggaggcagctctcaaaaccagacagacagaaatgccttctactgtctggagtactttcccagccagatgctgagaaccggaaacaactttgagatggtgtacaagtttgaaaacgtgcccttccactccatgtacgctcacagccagagcctggataggctgatgaacccgctgctggaccagtacctgtgggagctccagtctaccacctctggaggaactctcaaccagggcaattcagccaccaactttgccaagctgaccaaaacaaacttttctggctaccgcaaaaactggctcccggggcccatgatgaagcagcagagattctccaagactgccagtcaaaactacaagattccccagggaagaaacaacagtctgctccattatgagaccagaactaccctcgacggaagatggagcaattttgccccgggaacggccatggcaaccgcagccaacgacgccaccgacttctctcaggcccagctcatctttgcggggcccaacatcaccggcaacaccaccacagatgccaataacctgatgttcacttcagaagatgaacttagggccaccaacccccgggacactgacctgtttggccacctggcaaccaaccagcaaaacgccaccaccgttcctaccgtagacgacgtggacggagtcggcgtgtacccgggaatggtgtggcaggacagagacatttactaccaagggcccatttgggccaaaattccacacacggatggacactttcacccgtctcctctcattggcggatttggactgaaaagcccgcctccacaaatattcatcaaaaacactcctgtacccgccaatcccgcaacgaccttctctccggccagaatcaacagcttcatcacccagtacagcaccggacaggtggctgtcaaaatagaatgggaaatccagaaggagcggtccaagagatggaacccagaggtccagttcacgtccaactacggagcacaggactcgcttctctgggctcccgacaacgccggagcctacaaagagcccagggccattggatcccgatacctcaccaaccacctctag

SEQ ID NO: 516 - DNA, 4694 bp, unidentified
  source 1..4694: mol_type = unassigned DNA; note = Bovine adeno-associated virus
gtggcactcccccccctgtcgcgttcgctcgttcgctggctcgattgggggggtggcagctcaaagagctgccagacgacggccctctgggccgtcgcccccccaatcgagccagcgaacgagcgaacgcgacaggggggggagtgccacactctctagcaagggggttttgtaggtggtgatgtcattgttgatgtcattatagttgtcacgcgatagttaatgattaacagtcatgtgatgtgtgttatccaataggatgaaagcgcgcgaatgagatctcgcgagacttccggggtataaaaggggtgagtgaacgagcccgccgccattctctgctctggactgctagaggaccctcgctgccatggctaccttctatgaagtcattgttcgcgttccatttgatgtggaagagcacctgcctggaatttctgacaactttgtagactgggtaactggtcaaatttgggagctgcctcccgagtcagatttgaatttgactctgattgagcagcctcagctgacggtggctgacagaattcgccgcgtgttcctgtacgagtggaacaaattttccaagcaggagagcaaattctttgtgcagtttgaaaagggatctgaatattttcatctgcacacgctcgtggagacctccggcatctcttctatggtccttggccgctacgtgagtcagattcgcgcccagctggtgaaggtggtgttccagaacattgagccgcggattaacgactgggtcgccatcaccaaggtaaagaagggcggagccaataaggtggtggattctgggtatattcccgcctacctgctgccgaaggtccaaccagagcttcagtgggcgtggactaacctcgaagagtataaattggccgccctcaatctggaggagcgcaaacggctcgtcgctcagtttcagcttgagtcctcgcagcgctcgcaagaggcatcttcccagagggacgtttcggctgacccggtcatcaagagcaagacttcccagaaatacatggcgctggtaagctggctggtggaacatggcatcacttccgagaagcagtggattcaggagaatcaggagagctacctgtccttcaactccacgggaaactctcggagccagattaaagccgcgcttgacaacgcgtcaaaaattatgagtctgaccaaatctgcctcagactatctcgtgggacagactgttccagaggacatttctgaaaacagaatctggcagatttttgatctcaacggctacgacccggcatacgcgggctctgttctctacggctggtgcactcgcgcctttggaaagaggaacaccgtctggctgtatggacccgcgaccaccggaaagaccaacatcgcggaagccatctctcacaccgtgcccttttatggctgtgtgaactggactaatgagaactttccctttaatgactgtgtggaaaaaatgttgatctggtgggaggagggaaagatgaccagcaaggtggtggaacccgccaaggccatcttgggggggtctagagtacgagtggatcaaaaatgtaaatcctctgtacaagtagactctaccccggtgattatcacctccaatactaacatgtgtgtggtggtggatgggaactccacgacctttgaacaccagcagccgctggaagaccgcatgttcagatttgaactcatgcggcggctcccgccagattttggcaagattaccaagcaggaagtcaaagacttttttgcttgggcaaaggtcaaccaggtgccggtgactcacgagtttatggttcccaagaaagtggcgggaactgagagggcggagacttctagaaaacgcccactggatgacgtcaccaataccaactataaaagtccggagaagcgggcccggctctcagttgttcctgagacgcctcgcagttcagacgtgcctgtagagcccgctcctctgcgacctctcaactggtcttccaggtatgaatgcagatgtgactatcatgctaaatttgactctgtaacgggggaatgtgacgagtgtgaatatttgaatcggggcaaaaatggctgtatctttcataatgctacacattgtcaaatttgtcacgctgttcctccatgggaaaaggaaaatgtgtcagattttaatgattttgatgactgtaataaagagcagtaaataaagtgagtagtcatgtcttttgttgaccaccctccagattggttggaatcgatcggcgacggctttcgtgaatttctcggccttgaggcgggtcccccgaaacccaaggccaatcaacagaagcaagataacgctcgaggtcttgtgcttcctgggtacaagtatcttggtcctgggaacggccttgataagggcgatcctgtcaattttgctgacgaggttgcccgagagcacgacctctcctaccagaaacagcttgaggcgggcgataacccttacctcaagtacaaccacgcggacgcagagtttcaggagaaactcgcttctgacacttcttttgggggaaaccttgggaaggctgttttccaggctaaaaagaggattctcgaacctcttggcctggttgagacgccggataaaacggcgcctgcggcaaaaaagaggcctctagagcagagtcctcaagagccagactcctcgagcggagttggcaagaaaggcaaacagcctgccagaaagagactcaactttgacgacgaacctggagccggagacgggcctcccccagaaggaccatcttccggagctatgtctactgagactgaaatgcgtgcagcagctggcggaaatggtggcgatgcgggacaaggtgccgagggagtgggtaatgcctccggtgattggcattgcgattccacttggtcagagagccacgtcaccaccacctcaacccgcacctgggtcctgccgacctacaacaaccacctgtacctgcggctcggctcgagcaacgccagcgacaccttcaacggattctccaccccctggggatactttgactttaaccgcttccactgccacttctcgccaagagactggcaaaggctcatcaacaaccactggggactgcgccccaaaagcatgcaagtccgcatcttcaacatccaagttaaggaggtcacgacgtctaacggggagacgaccgtatccaacaacctcaccagcacggtccagatctttgcggacagcacgtacgagctcccgtacgtgatggatgcaggtcaggagggcagcttgcctcctttccccaacgacgtgttcatggtgcctcagtacgggtactgcggactggtaaccggaggcagctctcaaaaccagacagacagaaatgccttctactgtctggagtactttcccagccagatgctgagaaccggaaacaactttgagatggtgtacaagtttgaaaacgtgcccttccactccatgtacgctcacagccagagcctggataggctgatgaacccgctgctggaccagtacctgtgggagctccagtctaccacctctggaggaactctcaaccagggcaattcagccaccaactttgccaagctgaccaaaacaaacttttctggctaccgcaaaaactggctcccggggcccatgatgaagcagcagagattctccaagactgccagtcaaaactacaagattccccagggaagaaacaacagtctgctccattatgagaccagaactaccctcgacggaagatggagcaattttgccccgggaacggccatggcaaccgcagccaacgacgccaccgacttctctcaggcccagctcatctttgcggggcccaacatcaccggcaacaccaccacagatgccaataacctgatgttcacttcagaagatgaacttagggccaccaacccccgggacactgacctgtttggccacctggcaaccaaccagcaaaacgccaccaccgttcctaccgtagacgacgtggacggagtcggcgtgtacccgggaatggtgtggcaggacagagacatttactaccaagggcccatttgggccaaaattccacacacggatggacactttcacccgtctcctctcattggcggatttggactgaaaagcccgcctccacaaatattcatcaaaaacactcctgtacccgccaatcccgcaacgaccttctctccggccagaatcaacagcttcatcacccagtacagcaccggacaggtggctgtcaaaatagaatgggaaatccagaaggagcggtccaagagatggaacccagaggtccagttcacgtccaactacggagcacaggactcgcttctctgggctcccgacaacgccggagcctacaaagagcccagggccattggatcccgatacctcaccaaccacctctagcccaattctgttgcataccctcaataaaccgtgtattcgtttcagtaaaatactgcctcttgtggtcattcggcgtacaacagcttacaacaacaacaaaacccccttgctagagagtgtggcactcccccccctgtcgcgttcgctcgttcgctggctcgattgggggggtggcagctcaaagagctgccagacgacggccctctgggccgtcgcccccccaatcgagccagcgaacgagcgaacgcgacaggggggggagtgccac

SEQ ID NO: 517 - protein, 390 aa, unidentified
  source 1..390: note = Bovine adeno-associated virus
MALVSWLVEHGITSEKQWIQENQESYLSFNSTGNSRSQIKAALDNASKIMSLTKSASDYLVGQTVPEDISENRIWQIFDLNGYDPAYAGSVLYGWCTRAFGKRNTVWLYGPATTGKTNIAEAISHTVPFYGCVNWTNENFPFNDCVEKMLIWWEEGKMTSKVVEPAKAILGGSRVRVDQKCKSSVQVDSTPVIITSNTNMCVVVDGNSTTFEHQQPLEDRMFRFELMRRLPPDFGKITKQEVKDFFAWAKVNQVPVTHEFMVPKKVAGTERAETSRKRPLDDVTNTNYKSPEKRARLSVVPETPRSSDVPVEPAPLRPLNWSSRYECRCDYHAKFDSVTGECDECEYLNRGKNGCIFHNATHCQICHAVPPWEKENVSDFNDFDDCNKEQ

SEQ ID NO: 518 - protein, 610 aa, unidentified
  source 1..610: note = Bovine adeno-associated virus
MATFYEVIVRVPFDVEEHLPGISDNFVDWVTGQIWELPPESDLNLTLIEQPQLTVADRIRRVFLYEWNKFSKQESKFFVQFEKGSEYFHLHTLVETSGISSMVLGRYVSQIRAQLVKVVFQNIEPRINDWVAITKVKKGGANKVVDSGYIPAYLLPKVQPELQWAWTNLEEYKLAALNLEERKRLVAQFQLESSQRSQEASSQRDVSADPVIKSKTSQKYMALVSWLVEHGITSEKQWIQENQESYLSFNSTGNSRSQIKAALDNASKIMSLTKSASDYLVGQTVPEDISENRIWQIFDLNGYDPAYAGSVLYGWCTRAFGKRNTVWLYGPATTGKTNIAEAISHTVPFYGCVNWTNENFPFNDCVEKMLIWWEEGKMTSKVVEPAKAILGGSRVRVDQKCKSSVQVDSTPVIITSNTNMCVVVDGNSTTFEHQQPLEDRMFRFELMRRLPPDFGKITKQEVKDFFAWAKVNQVPVTHEFMVPKKVAGTERAETSRKRPLDDVTNTNYKSPEKRARLSVVPETPRSSDVPVEPAPLRPLNWSSRYECRCDYHAKFDSVTGECDECEYLNRGKNGCIFHNATHCQICHAVPPWEKENVSDFNDFDDCNKEQ

SEQ ID NO: 519 - protein, 538 aa, unidentified
  source 1..538: note = Bovine adeno-associated virus
MRAAAGGNGGDAGQGAEGVGNASGDWHCDSTWSESHVTTTSTRTWVLPTYNNHLYLRLGSSNASDTFNGFSTPWGYFDFNRFHCHFSPRDWQRLINNHWGLRPKSMQVRIFNIQVKEVTTSNGETTVSNNLTSTVQIFADSTYELPYVMDAGQEGSLPPFPNDVFMVPQYGYCGLVTGGSSQNQTDRNAFYCLEYFPSQMLRTGNNFEMVYKFENVPFHSMYAHSQSLDRLMNPLLDQYLWELQSTTSGGTLNQGNSATNFAKLTKTNFSGYRKNWLPGPMMKQQRFSKTASQNYKIPQGRNNSLLHYETRTTLDGRWSNFAPGTAMATAANDATDFSQAQLIFAGPNITGNTTTDANNLMFTSEDELRATNPRDTDLFGHLATNQQNATTVPTVDDVDGVGVYPGMVWQDRDIYYQGPIWAKIPHTDGHFHPSPLIGGFGLKSPPPQIFIKNTPVPANPATTFSPARINSFITQYSTGQVAVKIEWEIQKERSKRWNPEVQFTSNYGAQDSLLWAPDNAGAYKEPRAIGSRYLTNHL

SEQ ID NO: 520 - protein, 736 aa, synthetic construct
  source 1..736: note = Description of Artificial Sequence: Synthetic polypeptide
MSFVDHPPDWLESIGDGFREFLGLEAGPPKPKANQQKQDNARGLVLPGYKYLGPGNGLDKGDPVNFADEVAREHDLSYQKQLEAGDNPYLKYNHADAEFQEKLASDTSFGGNLGKAVFQAKKRILEPLGLVETPDKTAPAAKKRPLEQSPQEPDSSSGVGKKGKQPARKRLNFDDEPGAGDGPPPEGPSSGAMSTETEMRAAAGGNGGDAGQGAEGVGNASGDWHCDSTWSESHVTTTSTRTWVLPTYNNHLYLRLGSSNASDTFNGFSTPWGYFDFNRFHCHFSPRDWQRLINNHWGLRPKSMQVRIFNIQVKEVTTSNGETTVSNNLTSTVHIFADSTYELPYVMDAGQEGSLPPFPNDVFMVPQYGYCGLVTGGSSQNQTDRNAFYCLEYFPSQMLRTGNNFEMVYKFENVPFHSMYAHSQSLDRLMNPLLDQYLWELQSTTSGGTLNQGNSATNFAKLTNKNFSGYRKNWLPGPMMKQQRFSKTASQNYKIPQGGNNSLLHYETRTTLDRRWSNFAPGTAMATAANDATDFSQAQLIFAGPNITGNTTTDANNLMFTSEDELRATNPRDTDLFGHLATNQQNATTVPTVDDVDGVGVYPGMVWQDRDIYYQGPIWAKIPHTDGHFHPSPLIGGFGLKSPPPQIFIKNTPVPANPATTFSPARINSFITQYSTGQVAVKIEWEIQKERSKRWNPEVQFTSNYGAQDSLLWAPDNAGAYKEPRAIGSRYLTNHL

SEQ ID NO: 521 - protein, 736 aa, synthetic construct
  source 1..736: note = Description of Artificial Sequence: Synthetic polypeptide
MSFVDHPPDWLESIGDGFREFLGLEAGPPKPKANQQKQDNARGLVLPGYKYLGPGNGLDKGDPVNFADEVAREHDLSYQKQLEAGDNPYLKYNHADAEFQEKLASDTSFGGNLGKAVFQAKKRILEPLGLVETPDKTAPAAKKRPLEQSPQEPDSSSGVGKKGKQPARKRLNFDDEPGAGDGPPPEGPSSGAMSTETEMRAAAGGNGGDAGQGAEGVGNASGDWHCDSTWSESHVTTTSTRTWVLPTYNNHLYLRLGSSNASDTFNGFSTPWGYFDFNRFHCHFSPRDWQRLINNHWGLRPKSMQVRIFNIQVKEVTTSNGETTVSNNLTSTVQIFADSTYELPYVMDAGQEGSLPPFPNDVFMVPQYGYCGLVTGGSSQNQTDRNAFYCLEYFPSQMLRTGNNFEMVYKFENVPFHSMYAHSQSLDRLMNPLLDQYLWELQSTTSGGTLNQGNSATNFAKLTKTNFSGYRKNWLPGPMMKQQRFSKTASQNYKIPQGRNNSLLHYETRTTLDGRWSNFAPGTAMATAANDATDFSQAQLIFAGPNITGNTTTDANNLMFTSEDELRATNPRDTDLFGHLATNQQNATTVPTVDDVDGVGVYPGMVWQDRDIYYQGPIWAKIPHTDGHFHPSPLIGGFGLKSPPPQIFIKNTPVPANPATTFSPARINSFITQYSTGQVAVKIEWEIQKERSKRWNPEVQFTSNYGAQDSLLWAPDNAGAYKEPRAIGSRYLTNHL

SEQ ID NO: 522 - protein, 736 aa, unidentified; identical to SEQ ID NO: 521
  source 1..736: note = Bovine adeno-associated virus

SEQ ID NO: 523 - protein, 600 aa, unidentified
  source 1..600: note = Bovine adeno-associated virus
TAPAAKKRPLEQSPQEPDSSSGVGKKGKQPARKRLNFDDEPGAGDGPPPEGPSSGAMSTETEMRAAAGGNGGDAGQGAEGVGNASGDWHCDSTWSESHVTTTSTRTWVLPTYNNHLYLRLGSSNASDTFNGFSTPWGYFDFNRFHCHFSPRDWQRLINNHWGLRPKSMQVRIFNIQVKEVTTSNGETTVSNNLTSTVQIFADSTYELPYVMDAGQEGSLPPFPNDVFMVPQYGYCGLVTGGSSQNQTDRNAFYCLEYFPSQMLRTGNNFEMVYKFENVPFHSMYAHSQSLDRLMNPLLDQYLWELQSTTSGGTLNQGNSATNFAKLTKTNFSGYRKNWLPGPMMKQQRFSKTASQNYKIPQGRNNSLLHYETRTTLDGRWSNFAPGTAMATAANDATDFSQAQLIFAGPNITGNTTTDANNLMFTSEDELRATNPRDTDLFGHLATNQQNATTVPTVDDVDGVGVYPGMVWQDRDIYYQGPIWAKIPHTDGHFHPSPLIGGFGLKSPPPQIFIKNTPVPANPATTFSPARINSFITQYSTGQVAVKIEWEIQKERSKRWNPEVQFTSNYGAQDSLLWAPDNAGAYKEPRAIGSRYLTNHL

SEQ ID NO: 524 - DNA, 2214 bp, synthetic construct
  source 1..2214: mol_type = other DNA; note = Description of Artificial Sequence: Synthetic polynucleotide
atggctgccgatggttatcttccagattggctcgaggacactctctctgaaggaataagacagtggtggaagctcaaacctggcccaccaccaccaaagcccgcagagcggcataaggacgacagcaggggtcttgtgcttcctgggtacaagtacctcggacccttcaacggactcgacaagggagagccggtcaacgaggcagacgccgcggccctcgagcacgacaaagcctacgaccggcagctcgacagcggagacaacccgtacctcaagtacaaccacgccgacgcggagtttcaggagcgccttaaagaagatacgtcttttgggggcaacctcgggcgagcagtcttccaggccaaaaagaggcttcttgaacctcttggtctggttgaggaagcggctaagacggctcctggaaagaagaggcctgtagagcagtctcctcaggaaccggactcctcctcgggcatcggcaagacaggccagcagcccgctaaaaagagactcaatttcggtcagactggcgacacagagtcagtcccagaccctcaaccaatcggagaacctcccgcagccccctcaggtgtgggatctcttacaatggcttcaggtggtggcgcaccagtggcagacaataacgaaggtgccgatggagtgggtagttcctcgggaaattggcattgcgattcccaatggctgggggacagagtcatcaccaccagcacccgaacctgggccctgcccacctacaacaatcacctctacaagcaaatctccaacgggacatcgggaggagccaccaacgacaacacctacttcggctacagcaccccctgggggtattttgactttaacagattccactgccacttttcaccacgtgactggcagcgactcatcaacaacaactggggattccggcccaagagactcagcttcaagctcttcaacatccaggtcaaggaggtcacgcagaatgaaggcaccaagaccatcgccaataaccttaccagcacggtccaggtcttcacggactcggagtaccagctgccgtacgttctcggctctgcccaccagggctgcctgcctccgttcccggcggacgtgttcatgattccccagtacggctacctaacactcaacaacggtagtcaggccgtgggacgctcctccttctactgcctggaatactttccttcgcagatgctgagaaccggcaacaacttccagtttacttacaccttcgaggacgtgcctttccacagcagctacgcccacagccagagcttggaccggctgatgaatcctctgattgaccagtacctgtactacttgtctcggactcaaacaacaggaggcacggcaaatacgcagactctgggcttcagccaaggtgggcctaatacaatggccaatcaggcaaagaactggctgccaggaccctgttaccgccaacaacgcgtctcaacgacaaccgggcaaaacaacaatagcaactttgcctggactgctgggaccaaataccatctgaatggaagaaattcattggctaatcctggcatcgctatggcaacacacaaagacgacaaggagcgtttttttcccagtaacgggatcctgatttttggcaaacaaaatgctgccagagacaatgcggattacagcgatgtcatgctcaccagcgaggaagaaatcaaaaccactaaccctgtggctacagaggaatacggtatcgtggcagataacttgcagcagcaaaacacggctcctcaaattggaactgtcaacagccagggggccttacccggtatggtttggcagaaccgggacgtgtacctgcagggtcccatctgggccaagattcctcacacggacggcaacttccacccgtctccgctgatgggcggctttggcctgaaacatcctccgcctcagatcctgatcaagaacacgcctgtacctgcggatcctccgaccaccttcaaccagtcaaagctgaactctttcatcacgcaatacagcaccggacaggtcagcgtggaaattgaatgggagctgcagaaggaaaacagcaagcgctggaaccccgagatccagtacacctccaactactacaaatctacaagtgtggactttgctgttaatacagaaggcgtgtactctgaaccccaccccattggcacccgttacctcacccgtcccctgtaa

SEQ ID NO: 525 - protein, 737 aa, synthetic construct
  source 1..737: note = Description of Artificial Sequence: Synthetic polypeptide
MAADGYLPDWLEDTLSEGIRQWWKLKPGPPPPKPAERHKDDSRGLVLPGYKYLGPFNGLDKGEPVNEADAAALEHDKAYDRQLDSGDNPYLKYNHADAEFQERLKEDTSFGGNLGRAVFQAKKRLLEPLGLVEEAAKTAPGKKRPVEQSPQEPDSSSGIGKTGQQPAKKRLNFGQTGDTESVPDPQPIGEPPAAPSGVGSLTMASGGGAPVADNNEGADGVGSSSGNWHCDSQWLGDRVITTSTRTWALPTYNNHLYKQISNGTSGGATNDNTYFGYSTPWGYFDFNRFHCHFSPRDWQRLINNNWGFRPKRLSFKLFNIQVKEVTQNEGTKTIANNLTSTVQVFTDSEYQLPYVLGSAHQGCLPPFPADVFMIPQYGYLTLNNGSQAVGRSSFYCLEYFPSQMLRTGNNFQFTYTFEDVPFHSSYAHSQSLDRLMNPLIDQYLYYLSRTQTTGGTANTQTLGFSQGGPNTMANQAKNWLPGPCYRQQRVSTTTGQNNNSNFAWTAGTKYHLNGRNSLANPGIAMATHKDDKERFFPSNGILIFGKQNAARDNADYSDVMLTSEEEIKTTNPVATEEYGIVADNLQQQNTAPQIGTVNSQGALPGMVWQNRDVYLQGPIWAKIPHTDGNFHPSPLMGGFGLKHPPPQILIKNTPVPADPPTTFNQSKLNSFITQYSTGQVSVEIEWELQKENSKRWNPEIQYTSNYYKSTSVDFAVNTEGVYSEPHPIGTRYLTRPL

SEQ ID NO: 526 - protein, 736 aa, synthetic construct
  source 1..736: note = Description of Artificial Sequence: Synthetic polypeptide
MAADGYLPDWLEDNLSEGIREWWDLKPGAPKPKANQQKQDDGRGLVLPGYKYLGPFNGLDKGEPVNAADAAALEHDKAYDQQLKAGDNPYLRYNHADAEFQERLQEDTSFGGNLGRAVFQAKKRVLEPLGLVEEGAKTAPGKKRPVEQSPQEPDSSSGIGKTGQQPAKKRLNFGQTGDTESVPDPQPIGEPPAAPSGVGSLTMASGGGAPVADNNEGADGVGSSSGNWHCDSQWLGDRVITTSTRTWALPTYNNHLYKQISSASTGASNDNHYFGYSTPWGYFDFNRFHCHFSPRDWQRLINNNWGFRPKRLNFKLFNIQVKEVTDNNGVKTIANNLTSTVQVFTDSDYQLPYVLGSAHQGCLPPFPADVFMIPQYGYLTLNNGSQAVGRSSFYCLEYFPSQMLRTGNNFQFTYTFEDVPFHSSYAHSQSLDRLMNPLIDQYLYYLSRTQTTGGTANTQTLGFSQGGPNTMANQAKNWLPGPCYRQQRVSTTTGQNNNSNFAWTAGTKYHLNGRNSLANPGIAMATHKDDKERFFPSNGILIFGKQNAARDNADYSDVMLTSEEEIKTTNPVATEEYGIVADNLQQQNTAPQIGTVNSQGALPGMVWQNRDVYLQGPIWAKIPHTDGNFHPSPLMGGFGLKHPPPQILIKNTPVPADPPTTFNQSKLNSFITQYSTGQVSVEIEWELQKENSKRWNPEIQYTSNYYKSTSVDFAVNTEGVYSEPHPIGTRYLTRPL

SEQ ID NO: 527 - protein, 736 aa, synthetic construct
  source 1..736: note = Description of Artificial Sequence: Synthetic polypeptide
MAADGYLPDWLEDTLSEGIRQWWKLKPGPPPPKPAERHKDDSRGLVLPGYKYLGPFNGLDKGEPVNEADAAALEHDKAYDRQLDSGDNPYLKYNHADAEFQERLQGDTSFGGNLGRAVFQAKKRVLEPLGLVEEGAKTAPGKKRPVEQSPQEPDSSSGIGETGQQPAKKRLNFGQTGDSESVPDPQPLGEPPATPAAVGPTTMASGGGAPMADNNEGADGVGSSSGNWHCDSQWLGDRVITTSTRTWALPTYNNHLYKQISSASTGASNDNHYFGYSTPWGYFDFNRFHCHFSPRDWQRLINNNWGFRPKRLSFKLFNIQVKEVTDNNGVKTIANNLTSTVQVFTDSEYQLPYVLGSAHQGCLPPFPADVFMIPQYGYLTLNNGSQAVGRSSFYCLEYFPSQMLRTGNNFTFSYTFEDVPFHSSYAHSQSLDRLMNPLIDQYLYYLSRTQTTGGTANTQTLGFSQGGPNTMANQAKNWLPGPCYRQQRVSTTTGQNNNSNFAWTAGTKYHLNGRNSLANPGIAMATHKDDKERFFPSNGILIFGKQNAARDNADYSDVMLTSEEEIKTTNPVATEEYGIVADNLQQQNTAPQIGTVNSQGALPGMVWQNRDVYLQGPIWAKIPHTDGNFHPSPLMGGFGLKHPPPQILIKNTPVPADPPTTFNQSKLNSFITQYSTGQVSVEIEWELQKENSKRWNPEIQYTSNYYKSTSVDFAVNTEGVYSEPHPIGTRYLTRPL

SEQ ID NO: 528 - DNA, 2181 bp, synthetic construct
  source 1..2181: mol_type = other DNA; note = Description of Artificial Sequence: Synthetic polynucleotide
atgtcttttgttgatcaccctccagattggttggaagaagttggtgaaggtcttcgcgagtttttgggccttgaagcgggcccaccgaaaccaaaacccaatcagcagcatcaagatcaagcccgtggtcttgtgctgcctggttataactatctcggacccggaaacggtctcgatcgaggagagcctgtcaacagggcagacgaggtcgcgcgagagcacgacatctcgtacaacgagcagcttgaggcgggagacaacccctacctcaagtacaaccacgcggacgccgagtttcaggagaagctcgccgacgacacatccttcgggggaaacctcggaaaggcagtctttcaggccaagaaaagggttctcgaaccttttggcctggttgaagagggtgctaagacggcccctaccggaaagcggatagacgaccactttccaaaaagaaagaaggctcggaccgaagaggactccaagccttccacctcgtcagacgccgaagctggacccagcggatcccagcagctgcaaatcccagcacaaccagcctcaagtttgggagctgatacaatgtctgcgggaggtggcggcccattgggcgacaataaccaaggtgccgatggagtgggcaatgcctcgggagattggcattgcgattccacgtggatgggggacagagtcgtcaccaagtccacccgcacctgggtgctgcccagctacaacaaccaccagtaccgagagatcaaaagcggctccgtcgacggaagcaacgccaacgcctactttggatacagcaccccctgggggtactttgactttaaccgcttccacagccactggagcccccgagactggcaaagactcatcaacaactattggggcttcagaccccggtctctcagagtcaaaatcttcaacatccaagtcaaagaggtcacggtgcaggactccaccaccaccatcgccaacaacctcacctccaccgtccaagtgtttacggacgacgactaccaactcccgtacgtcgtcggcaacgggaccgagggatgcctgccggccttccccccgcaggtctttacgctgccgcagtacggctacgcgacgctgaaccgagacaacggagacaacccgacagagcggagcagcttcttttgcctagagtactttcccagcaagatgctgaggacgggcaacaactttgagtttacctacagctttgaagaggtgcccttccactgcagcttcgccccgagccagaacctctttaagctggccaacccgctggtggaccagtacctgtaccgcttcgtgagcacctcggccacgggcgccatccagttccaaaagaacctggcgggcagatacgccaacacctacaaaaactggttcccggggcccatgggccgaacccagggctggaacacgagctctggggtcagcagcaccaacagagtcagcgtcaacaacttttccgtctcaaaccggatgaacctggagggggccagctaccaagtgaacccccagcccaacgggatgacaaacacgctccaaggcagcaaccgctacgcgctggaaaacaccatgatcttcaacgctcaaaacgccacgccgggaactacctcggtgtacccagaggacaatctactgctgaccagcgagagcgagactcagcccgtcaaccgggtggcttacaacacgggcggtcagatggccaccaacgcccagaacgccaccacggctcccacggtcgggacctacaacctccaggaagtgcttcctggcagcgtatggatggagagggacgtgtacctccaaggacccatctgggccaagatcccagagacgggggcgcactttcacccctctccggccatgggcggattcggactcaaacacccgccgcccatgatgctcatcaaaaacacgccggtgcccggcaacatcaccagcttctcggacgtgcccgtcagcagcttcatcacccagtacagcaccgggcaggtcaccgtggagatggaatgggagctcaaaaaggaaaactccaagaggtggaacccagagatccagtacaccaacaactacaacgacccccagtttgtggactttgctccagacggctccggcgaatacagaaccaccagagccatcggaacccgatacctcacccgacccctt

SEQ ID NO: 529 - protein, 726 aa, synthetic construct
  source 1..726: note = Description of Artificial Sequence: Synthetic polypeptide
MSFVDHPPDWLEEVGEGLREFLGLEAGPPKPKPNQQHQDQARGLVLPGYNYLGPGNGLDRGEPVNRADEVAREHDISYNEQLEAGDNPYLKYNHADAEFQEKLADDTSFGGNLGKAVFQAKKRVLEPFGLVEEGAKTAPTGKRIDDHFPKRKKARTEEDSKPSTSSDAEAGPSGSQQLQIPAQPASSLGADTMSAGGGGPLGDNNQGADGVGNASGDWHCDSTWMGDRVVTKSTRTWVLPSYNNHQYREIKSGSVDGSNANAYFGYSTPWGYFDFNRFHSHWSPRDWQRLINNYWGFRPRSLRVKIFNIQVKEVTVQDSTTTIANNLTSTVQVFTDDDYQLPYVVGNGTEGCLPAFPPQVFTLPQYGYATLNRDNGDNPTERSSFFCLEYFPSKMLRTGNNFEFTYSFEEVPFHCSFAPSQNLFKLANPLVDQYLYRFVSTSATGAIQFQKNLAGRYANTYKNWFPGPMGRTQGWNTSSGSSTNRVSVNNFSVSNRMNLEGASYQVNPQPNGMTNTLQGSNRYALENTMIFNAQNATPGTTSVYPEDNLLLTSESETQPVNRVAYNTGGQMATNAQNATTAPTVGTYNLQEVLPGSVWMERDVYLQGPIWAKIPETGAHFHPSPAMGGFGLKHPPPMMLIKNTPVPGNITSFSDVPVSSFITQYSTGQVTVEMEWELKKENSKRWNPEIQYTNNYNDPQFVDFAPDGSGEYRTTRAIGTRYLTRPL

SEQ ID NO: 530 - protein, 735 aa, synthetic construct
  source 1..735: note = Description of Artificial Sequence: Synthetic polypeptide
MAADGYLPDWLEDTLSEGIRQWWKLKPGPPPPKPAERHKDDSRGLVLPGYKYLGPFNGLDKGEPVNEADAAALEHDKAYDRQLDSGDNPYLKYNHADAEFQERLKEDTSFGGNLGRAVFQAKKRILEPLGLVEEPVKTAPGKKRPVEHSPAEPDSSSGTGKSGQQPARKRLNFGQTGDADSVPDPQPLGQPPAAPSGLGTNTMASGSGAPMADNNEGADGVGNSSGNWHCDSTWMGDRVITTSTRTWALPTYNNHLYKQISSQSGASNDNHYFGYSTPWGYFDFNRFHCHFSPRDWQRLINNNWGFRPKRLSFKLFNIQVKEVTQNDGTTTIANNLTSTVQVFTDSEYQLPYVLGSAHQGCLPPFPADVFMVPQYGYLTLNNGSQAVGRSSFYCLEYFPSQMLRTGNNFTFSYTFEDVPFHSSYAHSQSLDRLMNPLIDQYLYYLSRTNTPSGTTTMSRLQFSQAGASDIRDQSRNWLPGPCYRQQRVSKTAADNNNSDYSWTGATKYHLNGRDSLVNPGPAMASHKDDEEKYFPQSGVLIFGKQDSGKTNVDIEKVMITDEEEIRTTNPVATEQYGSVSTNLQSGNTQAATSDVNTQGVLPGMVWQDRDVYLQGPIWAKIPHTDGHFHPSPLMGGFGLKHPPPQILIKNTPVPANPSTTFSAAKFASFITQYSTGQVSVEIEWELQKENSKRWNPEIQYTSNYNKSVNVDFTVDTNGVYSEPRPIGTRYLTRNL

SEQ ID NO: 531 - DNA, 1797 bp, synthetic construct
  source 1..1797: mol_type = other DNA; note = Description of Artificial Sequence: Synthetic polynucleotide
acggctccgaccggagacaagcggaaaggcgaagacgaacctcgtttgcccgacacttcttcacagactcccaagaaaaacaagaagcctcgcaaggaaagaccttccggcggggcagaagatccgggcgaaggcacctcttccaacgctggagcagcagcacccgcctctagtgtgggatcatctatcatggctgaaggaggtggcggcccagtgggcgatgcaggccagggtgccgatggagtgggcaattcctccggaaattggcattgcgattcccaatggctggaaaacggagtcgtcactcgaaccacccgaacctgggtcttgcccagctacaacaaccacctgtacaaacgaatccaaggacccagcggaggcgacaacaacaacaaattctttggattcagcaccccctggggatactttgactacaatcgattccactgccacttttccccgcgagactggcaacgactcatcaacaacaactggggcatccgtcccaaagcgatgcgctttagactctttaacatccaggttaaagaggtcacggtccaagacttcaacaccaccatcggcaacaacctcaccagtacggtccaggtctttgcggacaaggactaccaactgccgtacgtcctcggatcggctaccgaaggcaccttcccgccgttcccagcggatatctacacgatcccgcagtacgggtactgcacgctaaactacaacaacgaggcggtggatcgttcggccttctactgtctggactactttccctcagacatgctgcggacaggaaataactttgagtttacttacaccttcgaggacgttcctttccatagcatgtttgcccacaaccagacgctagaccggctgatgaatcccctcgtggatcagtacctctgggctttcagctccgtcagccaagcaggctcatctggacgagctcttcattactcgcgggcgactaaaaccaacatggcggctcaatataggaactggttacctgggcctttcttccgtgatcagcaaatctttacgggcgctagcaacatcactaaaaataacgtctttagcgtttgggaaaaaggcaagcaatgggaactcgacaatcggaccaacctaatgcagcccggtcctgcggcagcgaccacctttagcggagaacctgaccgtcaagccatgcaaaacacgctggcttttagcaggaccgtctacgatcaaacgaccgccacgaccgatcgtaaccagatactcatcaccaacgaagacgaaatcagacccaccaactcggtcggtatcgacgcgtggggagcagttcccaccaacaaccagtcgatcgtgacccccggcactcgcgcggccgtcaacaatcaaggggcgcttcccgggatggtgtggcaaaacagagacatttaccctacagggacccatttggccaaaattcccgacactgacaatcacttccatccgtccccgcttattgggcggtttggctgcaagcatccccctccccagattttcattaaaaacacacccgtccctgccaacccttcggaaacgttccagacggccaaagtggcctccttcatcaaccagtactcgaccggacagtgcaccgtcgaaatcttttgggaactcaagaaggaaacctccaagcgctggaaccccgaaatccagttcacctccaactttggcaacgcggccgacatccagtttgccgtctccgacacgggatcctattccgaacctcgtcccatcggtacccgttaccttaccaaacctctgtaa

SEQ ID NO: 532 - DNA, 1989 bp, synthetic construct
  source 1..1989: mol_type = other DNA; note = Description of Artificial Sequence: Synthetic polynucleotide
atgaggtcgtactacgaggtcatcgttcagctgcccaacgacgtcgagagtcaggtacctggaatctccgattcgttcgtcaactggattacgtcgcgagaatggacgttgcctgaggacgccgattgggatttggaccaggtcgatcaagttcaactgacgctcggcgacaaaatccaacgggagattcgaactcattgggggacgatggccaaagaaccggactttcactattttatccaactggaacaaggtgaggtgttctttcatttacacgtcctgctggaaacgtgttccgtaaagccgatggtactcggaagatatatccgacatattcaacaaaaaattgtgagtaaagtctactgcgccacgagcctacgatggaaggatggatgcgtggtgaccaagaccaaaaatttcgggggcgcgaacaaggtccgggccgagtcgtatattcccgcctacctgatcccgaaacagcaaccggaagtgcagtgggcgtggactaacgtgcccgagtatataaaagcgtgcttgcaccgagaactgcgtgccagtctcgcgcgacttcacttcgaggaggcgggcgtctcgcaatccaaggaaaatctcgcgagaactgcagacggcgctcccgtgatgccgacccgcgtcagcaaacgctacatggagctcgtggattggctcgtggagaaggggatcaccaccgagaaggaatggctgctggaaaacagagaaagctttcggagctttcaggcctcgagcaactcggcgcgtcagatcaagacggccctgcaaggcgccattcaggagatgcttctgaccaagacggcggaggactacctcgtcggaaaggatcccgtctcggacgacgacatccgtcagaaccgcatctacaagattctggaactgaaccactacgacccagcgtacgtggggagtattttggtcgggtggtgccagaagaaatggggcaagcgaaacacgctgtggctgttcggacatgcgaccaccggcaagaccaacatcgcggaggctattgcccatgctgtgccgttctatggatgcgttaactggaccaacgagaactttccgttcaacgactgcgtcgaaaaaatgattatctggtgggaggagggcaaaatgaccgccaaagtggtggaaacagccaaggcgattctgggaggatctcgggtgagagtggaccaaaaatgcaaagcttcggttccgatcgaaccgacgccggtcattattaccagtaacaccaacatgtgttatgtcatcgacgggaacacgaccacgttcgagcataagcagccgttggaggacaggatgtttaagctcgaattgctgactcggttgcctgatgactttggtaaggtgaccaaacaggaggtgcgtcaattcttcaggtggtctcaggatcacctgacccctgtgatcccagaattcctagtgcggaaggcggagtctcgcaaaagacccgccccttccggggaaggctatataagcccgacaaagcggcccgcgctcgcagagcagcagcaggcgtcggagagcgcggacccggttcccaccaggtatcgtatcaaatgctcgaaacattgcggtatggataaaatgttgtttccttgccaaatttgtgaatcgatgaacagagatattaatatttgtgctattcataaaacgaccgactgtaaagagtgtttccccgactacggggataaagatgatgtagaactacccccctgtacagaacacaacgtgtctcgttgttatcaatgtcattcgggcgaattgtatcgcgtgacttcggactctgacgagaaacctgcccccgagagtgatgaaggcaccgagccatcctatgctccctgcacgattcaccacctgatgggcaagagtcacgggttagtcacttgcgcggcgtgtcggttgaaaaatagtacgttgcatgatgacttggatgacggtgatctcgaacaataa

SEQ ID NO: 533 - DNA, 1626 bp, synthetic construct
  source 1..1626: mol_type = other DNA; note = Description of Artificial Sequence: Synthetic polynucleotide
atgaggtcgtactacgaggtcatcgttcagctgcccaacgacgtcgagagtcaggtacctggaatctccgattcgttcgtcaactggattacgtcgcgagaatggacgttgcctgaggacgccgattgggatttggaccaggtcgatcaagttcaactgacgctcggcgacaaaatccaacgggagattcgaactcattgggggacgatggccaaagaaccggactttcactattttatccaactggaacaaggtgaggtgttctttcatttacacgtcctgctggaaacgtgttccgtaaagccgatggtactcggaagatatatccgacatattcaacaaaaaattgtgagtaaagtctactgcgccacgagcctacgatggaaggatggatgcgtggtgaccaagaccaaaaatttcgggggcgcgaacaaggtccgggccgagtcgtatattcccgcctacctgatcccgaaacagcaaccggaagtgcagtgggcgtggactaacgtgcccgagtatataaaagcgtgcttgcaccgagaactgcgtgccagtctcgcgcgacttcacttcgaggaggcgggcgtctcgcaatccaaggaaaatctcgcgagaactgcagacggcgctcccgtgatgccgacccgcgtcagcaaacgctacatggagctcgtggattggctcgtggagaaggggatcaccaccgagaaggaatggctgctggaaaacagagaaagctttcggagctttcaggcctcgagcaactcggcgcgtcagatcaagacggccctgcaaggcgccattcaggagatgcttctgaccaagacggcggaggactacctcgtcggaaaggatcccgtctcggacgacgacatccgtcagaaccgcatctacaagattctggaactgaaccactacgacccagcgtacgtggggagtattttggtcgggtggtgccagaagaaatggggcaagcgaaacacgctgtggctgttcggacatgcgaccaccggcaagaccaacatcgcggaggctattgcccatgctgtgccgttctatggatgcgttaactggaccaacgagaactttccgttcaacgactgcgtcgaaaaaatgattatctggtgggaggagggcaaaatgaccgccaaagtggtggaaacagccaaggcgattctgggaggatctcgggtgagagtggaccaaaaatgcaaagcttcggttccgatcgaaccgacgccggtcattattaccagtaacaccaacatgtgttatgtcatcgacgggaacacgaccacgttcgagcataagcagccgttggaggacaggatgtttaagctcgaattgctgactcggttgcctgatgactttggtaaggtgaccaaacaggaggtgcgtcaattcttcaggtggtctcaggatcacctgacccctgtgatcccagaattcctagtgcggaaggcggagtctcgcaaaagacccgccccttccggggaaggctatataagcccgacaaagcggcccgcgctcgcagagcagcagcaggcgtcggagagcgcggacccggttcccaccagattggttggagcggttggtcaaaaagggagtgaatgctgcagctga

SEQ ID NO: 534 - DNA, 1323 bp, synthetic construct
  source 1..1323: mol_type = other DNA; note = Description of Artificial Sequence: Synthetic polynucleotide
atggagctcgtggattggctcgtggagaaggggatcaccaccgagaaggaatggctgctggaaaacagagaaagctttcggagctttcaggcctcgagcaactcggcgcgtcagatcaagacggccctgcaaggcgccattcaggagatgcttctgaccaagacggcggaggactacctcgtcggaaaggatcccgtctcggacgacgacatccgtcagaaccgcatctacaagattctggaactgaaccactacgacccagcgtacgtggggagtattttggtcgggtggtgccagaagaaatggggcaagcgaaacacgctgtggctgttcggacatgcgaccaccggcaagaccaacatcgcggaggctattgcccatgctgtgccgttctatggatgcgttaactggaccaacgagaactttccgttcaacgactgcgtcgaaaaaatgattatctggtgggaggagggcaaaatgaccgccaaagtggtggaaacagccaaggcgattctgggaggatctcgggtgagagtggaccaaaaatgcaaagcttcggttccgatcgaaccgacgccggtcattattaccagtaacaccaacatgtgttatgtcatcgacgggaacacgaccacgttcgagcataagcagccgttggaggacaggatgtttaagctcgaattgctgactcggttgcctgatgactttggtaaggtgaccaaacaggaggtgcgtcaattcttcaggtggtctcaggatcacctgacccctgtgatcccagaattcctagtgcggaaggcggagtctcgcaaaagacccgccccttccggggaaggctatataagcccgacaaagcggcccgcgctcgcagagcagcagcaggcgtcggagagcgcggacccggttcccaccaggtatcgtatcaaatgctcgaaacattgcggtatggataaaatgttgtttccttgccaaatttgtgaatcgatgaacagagatattaatatttgtgctattcataaaacgaccgactgtaaagagtgtttccccgactacggggataaagatgatgtagaactacccccctgtacagaacacaacgtgtctcgttgttatcaatgtcattcgggcgaattgtatcgcgtgacttcggactctgacgagaaacctgcccccgagagtgatgaaggcaccgagccatcctatgctccctgcacgattcaccacctgatgggcaagagtcacgggttagtcacttgcgcggcgtgtcggttgaaaaatagtacgttgcatgatgacttggatgacggtgatctcgaacaataa

SEQ ID NO: 535 - DNA, 960 bp, synthetic construct
  source 1..960: mol_type = other DNA; note = Description of Artificial Sequence: Synthetic polynucleotide
atggagctcgtggattggctcgtggagaaggggatcaccaccgagaaggaatggctgctggaaaacagagaaagctttcggagctttcaggcctcgagcaactcggcgcgtcagatcaagacggccctgcaaggcgccattcaggagatgcttctgaccaagacggcggaggactacctcgtcggaaaggatcccgtctcggacgacgacatccgtcagaaccgcatctacaagattctggaactgaaccactacgacccagcgtacgtggggagtattttggtcgggtggtgccagaagaaatggggcaagcgaaacacgctgtggctgttcggacatgcgaccaccggcaagaccaacatcgcggaggctattgcccatgctgtgccgttctatggatgcgttaactggaccaacgagaactttccgttcaacgactgcgtcgaaaaaatgattatctggtgggaggagggcaaaatgaccgccaaagtggtggaaacagccaaggcgattctgggaggatctcgggtgagagtggaccaaaaatgcaaagcttcggttccgatcgaaccgacgccggtcattattaccagtaacaccaacatgtgttatgtcatcgacgggaacacgaccacgttcgagcataagcagccgttggaggacaggatgtttaagctcgaattgctgactcggttgcctgatgactttggtaaggtgaccaaacaggaggtgcgtcaattcttcaggtggtctcaggatcacctgacccctgtgatcccagaattcctagtgcggaaggcggagtctcgcaaaagacccgccccttccggggaaggctatataagcccgacaaagcggcccgcgctcgcagagcagcagcaggcgtcggagagcgcggacccggttcccaccagattggttggagcggttggtcaaaaagggagtgaatgctgcagctga

SEQ ID NO: 536 - DNA, 1608 bp, synthetic construct
  source 1..1608: mol_type = other DNA; note = Description of Artificial Sequence: Synthetic polynucleotide
atggctgaaggaggtggcggcccagtgggcgatgcaggccagggtgccgatggagtgggcaattcctccggaaattggcattgcgattcccaatggctggaaaacggagtcgtcactcgaaccacccgaacctgggtcttgcccagctacaacaaccacctgtacaaacgaatccaaggacccagcggaggcgacaacaacaacaaattctttggattcagcaccccctggggatactttgactacaatcgattccactgccacttttccccgcgagactggcaacgactcatcaacaacaactggggcatccgtcccaaagcgatgcgctttagactctttaacatccaggttaaagaggtcacggtccaagacttcaacaccaccatcggcaacaacctcaccagtacggtccaggtctttgcggacaaggactaccaactgccgtacgtcctcggatcggctaccgaaggcaccttcccgccgttcccagcggatatctacacgatcccgcagtacgggtactgcacgctaaactacaacaacgaggcggtggatcgttcggccttctactgtctggactactttccctcagacatgctgcggacaggaaataactttgagtttacttacaccttcgaggacgttcctttccatagcatgtttgcccacaaccagacgctagaccggctgatgaatcccctcgtggatcagtacctctgggctttcagctccgtcagccaagcaggctcatctggacgagctcttcattactcgcgggcgactaaaaccaacatggcggctcaatataggaactggttacctgggcctttcttccgtgatcagcaaatctttacgggcgctagcaacatcactaaaaataacgtctttagcgtttgggaaaaaggcaagcaatgggaactcgacaatcggaccaacctaatgcagcccggtcctgcggcagcgaccacctttagcggagaacctgaccgtcaagccatgcaaaacacgctggcttttagcaggaccgtctacgatcaaacgaccgccacgaccgatcgtaaccagatactcatcaccaacgaagacgaaatcagacccaccaactcggtcggtatcgacgcgtggggagcagttcccaccaacaaccagtcgatcgtgacccccggcactcgcgcggccgtcaacaatcaaggggcgcttcccgggatggtgtggcaaaacagagacatttaccctacagggacccatttggccaaaattcccgacactgacaatcacttccatccgtccccgcttattgggcggtttggctgcaagcatccccctccccagattttcattaaaaacacacccgtccctgccaacccttcggaaacgttccagacggccaaagtggcctccttcatcaaccagtactcgaccggacagtgcaccgtcgaaatcttttgggaactcaagaaggaaacctccaagcgctggaaccccgaaatccagttcacctccaactttggcaacgcggccgacatccagtttgccgtctccgacacgggatcctattccgaacctcgtcccatcggtacccgttaccttaccaaacctctgtaa

SEQ ID NO: 537 - DNA, 2232 bp, synthetic construct
  source 1..2232: mol_type = other DNA; note = Description of Artificial Sequence: Synthetic polynucleotide
atgtctctcatttctgatgcgattccagattggttggagcggttggtcaaaaagggagtgaatgctgcagctgatttctaccatttggaaagcggtcctcctcgtcctaaggcaaatcagcaaactcaagaatctcttgaaaaggacgattcgagaggtctcgtgttcccaggctacaattatctaggccctttcaacggtctagataaaggagaacccgtcaacgaggcagacgctgccgccttagaacacgacaaggcttacgacctcgaaatcaaggacgggcacaacccgtactttgagtacaacgaggccgacagacgtttccaggaacgtctcaaagacgatacctcctttggaggcaatttaggtaaagccatcttccaggccaaaaagagggttctcgaaccctttggtctggtggaagactcaaagacggctccgaccggagacaagcggaaaggcgaagacgaacctcgtttgcccgacacttcttcacagactcccaagaaaaacaagaagcctcgcaaggaaagaccttccggcggggcagaagatccgggcgaaggcacctcttccaacgctggagcagcagcacccgcctctagtgtgggatcatctatcatggctgaaggaggtggcggcccagtgggcgatgcaggccagggtgccgatggagtgggcaattcctccggaaattggcattgcgattcccaatggctggaaaacggagtcgtcactcgaaccacccgaacctgggtcttgcccagctacaacaaccacctgtacaaacgaatccaaggacccagcggaggcgacaacaacaacaaattctttggattcagcaccccctggggatactttgactacaatcgattccactgccacttttccccgcgagactggcaacgactcatcaacaacaactggggcatccgtcccaaagcgatgcgctttagactctttaacatccaggttaaagaggtcacggtccaagacttcaacaccaccatcggcaacaacctcaccagtacggtccaggtctttgcggacaaggactaccaactgccgtacgtcctcggatcggctaccgaaggcaccttcccgccgttcccagcggatatctacacgatcccgcagtacgggtactgcacgctaaactacaacaacgaggcggtggatcgttcggccttctactgtctggactactttccctcagacatgctgcggacaggaaataactttgagtttacttacaccttcgaggacgttcctttccatagcatgtttgcccacaaccagacgctagaccggctgatgaatcccctcgtggatcagtacctctgggctttcagctccgtcagccaagcaggctcatctggacgagctcttcattactcgcgggcgactaaaaccaacatggcggctcaatataggaactggttacctgggcctttcttccgtgatcagcaaatctttacgggcgctagcaacatcactaaaaataacgtctttagcgtttgggaaaaaggcaagcaatgggaactcgacaatcggaccaacctaatgcagcccggtcctgcggcagcgaccacctttagcggagaacctgaccgtcaagccatgcaaaacacgctggcttttagcaggaccgtctacgatcaaacgaccgccacgaccgatcgtaaccagatactcatcaccaacgaagacgaaatcagacccaccaactcggtcggtatcgacgcgtggggagcagttcccaccaacaaccagtcgatcgtgacccccggcactcgcgcggccgtcaacaatcaaggggcgcttcccgggatggtgtggcaaaacagagacatttaccctacagggacccatttggccaaaattcccgacactgacaatcacttccatccgtccccgcttattgggcggtttggctgcaagcatccccctccccagattttcattaaaaacacacccgtccctgccaacccttcggaaacgttccagacggccaaagtggcctccttcatcaaccagtactcgaccggacagtgcaccgtcgaaatcttttgggaactcaagaaggaaacctccaagcgctggaaccccgaaatccagttcacctccaactttggcaacgcggccgacatccagtttgccgtctccgacacgggatcctattccgaacctcgtcccatcggtacccgttaccttaccaaacctctgtaa

SEQ ID NO: 538 - protein, 535 aa, synthetic construct
  source 1..535: note = Description of Artificial Sequence: Synthetic polypeptide
MAEGGGGPVGDAGQGADGVGNSSGNWHCDSQWLENGVVTRTTRTWVLPSYNNHLYKRIQGPSGGDNNNKFFGFSTPWGYFDYNRFHCHFSPRDWQRLINNNWGIRPKAMRFRLFNIQVKEVTVQDFNTTIGNNLTSTVQVFADKDYQLPYVLGSATEGTFPPFPADIYTIPQYGYCTLNYNNEAVDRSAFYCLDYFPSDMLRTGNNFEFTYTFEDVPFHSMFAHNQTLDRLMNPLVDQYLWAFSSVSQAGSSGRALHYSRATKTNMAAQYRNWLPGPFFRDQQIFTGASNITKNNVFSVWEKGKQWELDNRTNLMQPGPAAATTFSGEPDRQAMQNTLAFSRTVYDQTTATTDRNQILITNEDEIRPTNSVGIDAWGAVPTNNQSIVTPGTRAAVNNQGALPGMVWQNRDIYPTGTHLAKIPDTDNHFHPSPLIGRFGCKHPPPQIFIKNTPVPANPSETFQTAKVASFINQYSTGQCTVEIFWELKKETSKRWNPEIQFTSNFGNAADIQFAVSDTGSYSEPRPIGTRYLTKPL

SEQ ID NO: 539 - protein, 440 aa, synthetic construct
  source 1..440: note = Description of Artificial Sequence: Synthetic polypeptide
MELVDWLVEKGITTEKEWLLENRESFRSFQASSNSARQIKTALQGAIQEMLLTKTAEDYLVGKDPVSDDDIRQNRIYKILELNHYDPAYVGSILVGWCQKKWGKRNTLWLFGHATTGKTNIAEAIAHAVPFYGCVNWTNENFPFNDCVEKMIIWWEEGKMTAKVVETAKAILGGSRVRVDQKCKASVPIEPTPVIITSNTNMCYVIDGNTTTFEHKQPLEDRMFKLELLTRLPDDFGKVTKQEVRQFFRWSQDHLTPVIPEFLVRKAESRKRPAPSGEGYISPTKRPALAEQQQASESADPVPTRYRIKCSKHCGMDKMLFPCQICESMNRDINICAIHKTTDCKECFPDYGDKDDVELPPCTEHNVSRCYQCHSGELYRVTSDSDEKPAPESDEGTEPSYAPCTIHHLMGKSHGLVTCAACRLKNSTLHDDLDDGDLEQ

SEQ ID NO: 540 - protein, 319 aa, synthetic construct
  source 1..319: note = Description of Artificial Sequence: Synthetic polypeptide
MELVDWLVEKGITTEKEWLLENRESFRSFQASSNSARQIKTALQGAIQEMLLTKTAEDYLVGKDPVSDDDIRQNRIYKILELNHYDPAYVGSILVGWCQKKWGKRNTLWLFGHATTGKTNIAEAIAHAVPFYGCVNWTNENFPFNDCVEKMIIWWEEGKMTAKVVETAKAILGGSRVRVDQKCKASVPIEPTPVIITSNTNMCYVIDGNTTTFEHKQPLEDRMFKLELLTRLPDDFGKVTKQEVRQFFRWSQDHLTPVIPEFLVRKAESRKRPAPSGEGYISPTKRPALAEQQQASESADPVPTRLVGAVGQKGSECCS

SEQ ID NO: 541 - protein, 662 aa, synthetic construct
  source 1..662: note = Description of Artificial Sequence: Synthetic polypeptide
MRSYYEVIVQLPNDVESQVPGISDSFVNWITSREWTLPEDADWDLDQVDQVQLTLGDKIQREIRTHWGTMAKEPDFHYFIQLEQGEVFFHLHVLLETCSVKPMVLGRYIRHIQQKIVSKVYCATSLRWKDGCVVTKTKNFGGANKVRAESYIPAYLIPKQQPEVQWAWTNVPEYIKACLHRELRASLARLHFEEAGVSQSKENLARTADGAPVMPTRVSKRYMELVDWLVEKGITTEKEWLLENRESFRSFQASSNSARQIKTALQGAIQEMLLTKTAEDYLVGKDPVSDDDIRQNRIYKILELNHYDPAYVGSILVGWCQKKWGKRNTLWLFGHATTGKTNIAEAIAHAVPFYGCVNWTNENFPFNDCVEKMIIWWEEGKMTAKVVETAKAILGGSRVRVDQKCKASVPIEPTPVIITSNTNMCYVIDGNTTTFEHKQPLEDRMFKLELLTRLPDDFGKVTKQEVRQFFRWSQDHLTPVIPEFLVRKAESRKRPAPSGEGYISPTKRPALAEQQQASESADPVPTRYRIKCSKHCGMDKMLFPCQICESMNRDINICAIHKTTDCKECFPDYGDKDDVELPPCTEHNVSRCYQCHSGELYRVTSDSDEKPAPESDEGTEPSYAPCTIHHLMGKSHGLVTCAACRLKNSTLHDDLDDGDLEQ

SEQ ID NO: 542 - protein, 541 aa, synthetic construct
  source 1..541: note = Description of Artificial Sequence: Synthetic polypeptide
MRSYYEVIVQLPNDVESQVPGISDSFVNWITSREWTLPEDADWDLDQVDQVQLTLGDKIQREIRTHWGTMAKEPDFHYFIQLEQGEVFFHLHVLLETCSVKPMVLGRYIRHIQQKIVSKVYCATSLRWKDGCVVTKTKNFGGANKVRAESYIPAYLIPKQQPEVQWAWTNVPEYIKACLHRELRASLARLHFEEAGVSQSKENLARTADGAPVMPTRVSKRYMELVDWLVEKGITTEKEWLLENRESFRSFQASSNSARQIKTALQGAIQEMLLTKTAEDYLVGKDPVSDDDIRQNRIYKILELNHYDPAYVGSILVGWCQKKWGKRNTLWLFGHATTGKTNIAEAIAHAVPFYGCVNWTNENFPFNDCVEKMIIWWEEGKMTAKVVETAKAILGGSRVRVDQKCKASVPIEPTPVIITSNTNMCYVIDGNTTTFEHKQPLEDRMFKLELLTRLPDDFGKVTKQEVRQFFRWSQDHLTPVIPEFLVRKAESRKRPAPSGEGYISPTKRPALAEQQQASESADPVPTRLVGAVGQKGSECCS

SEQ ID NO: 543 - protein, 743 aa, synthetic construct
  source 1..743: note = Description of Artificial Sequence: Synthetic polypeptide
MSLISDAIPDWLERLVKKGVNAAADFYHLESGPPRPKANQQTQESLEKDDSRGLVFPGYNYLGPFNGLDKGEPVNEADAAALEHDKAYDLEIKDGHNPYFEYNEADRRFQERLKDDTSFGGNLGKAIFQAKKRVLEPFGLVEDSKTAPTGDKRKGEDEPRLPDTSSQTPKKNKKPRKERPSGGAEDPGEGTSSNAGAAAPASSVGSSIMAEGGGGPVGDAGQGADGVGNSSGNWHCDSQWLENGVVTRTTRTWVLPSYNNHLYKRIQGPSGGDNNNKFFGFSTPWGYFDYNRFHCHFSPRDWQRLINNNWGIRPKAMRFRLFNIQVKEVTVQDFNTTIGNNLTSTVQVFADKDYQLPYVLGSATEGTFPPFPADIYTIPQYGYCTLNYNNEAVDRSAFYCLDYFPSDMLRTGNNFEFTYTFEDVPFHSMFAHNQTLDRLMNPLVDQYLWAFSSVSQAGSSGRALHYSRATKTNMAAQYRNWLPGPFFRDQQIFTGASNITKNNVFSVWEKGKQWELDNRTNLMQPGPAAATTFSGEPDRQAMQNTLAFSRTVYDQTTATTDRNQILITNEDEIRPTNSVGIDAWGAVPTNNQSIVTPGTRAAVNNQGALPGMVWQNRDIYPTGTHLAKIPDTDNHFHPSPLIGRFGCKHPPPQIFIKNTPVPANPSETFQTAKVASFINQYSTGQCTVEIFWELKKETSKRWNPEIQFTSNFGNAADIQFAVSDTGSYSEPRPIGTRYLTKPL

SEQ ID NO: 544 - protein, 598 aa, synthetic construct
  source 1..598: note = Description of Artificial Sequence: Synthetic polypeptide
TAPTGDKRKGEDEPRLPDTSSQTPKKNKKPRKERPSGGAEDPGEGTSSNAGAAAPASSVGSSIMAEGGGGPVGDAGQGADGVGNSSGNWHCDSQWLENGVVTRTTRTWVLPSYNNHLYKRIQGPSGGDNNNKFFGFSTPWGYFDYNRFHCHFSPRDWQRLINNNWGIRPKAMRFRLFNIQVKEVTVQDFNTTIGNNLTSTVQVFADKDYQLPYVLGSATEGTFPPFPADIYTIPQYGYCTLNYNNEAVDRSAFYCLDYFPSDMLRTGNNFEFTYTFEDVPFHSMFAHNQTLDRLMNPLVDQYLWAFSSVSQAGSSGRALHYSRATKTNMAAQYRNWLPGPFFRDQQIFTGASNITKNNVFSVWEKGKQWELDNRTNLMQPGPAAATTFSGEPDRQAMQNTLAFSRTVYDQTTATTDRNQILITNEDEIRPTNSVGIDAWGAVPTNNQSIVTPGTRAAVNNQGALPGMVWQNRDIYPTGTHLAKIPDTDNHFHPSPLIGRFGCKHPPPQIFIKNTPVPANPSETFQTAKVASFINQYSTGQCTVEIFWELKKETSKRWNPEIQFTSNFGNAADIQFAVSDTGSYSEPRPIGTRYLTKPL

SEQ ID NO: 545 - DNA, 4694 bp, synthetic construct
  source 1..4694: mol_type = other DNA; note = Description of Artificial Sequence: Synthetic polynucleotide
tggccagtttccaagacaggctcgctcgctcactcgggccggggccccaaaggggcccctagcgaccgcttcgcggtcgcggcccgagtgagcgagcgagcctgtcttggaaactggccagcactccggtgaggtaatgccgtcacgtggtcgggaatgggaacgggaaatctcgcgagaacgtaaacaaatataagacggcgccacacggcgctgcgtcatacgcgcgcgcgcaccggcgagatgaggtcgtactacgaggtcatcgttcagctgcccaacgacgtcgagagtcaggtacctggaatctccgattcgttcgtcaactggattacgtcgcgagaatggacgttgcctgaggacgccgattgggatttggaccaggtcgatcaagttcaactgacgctcggcgacaaaatccaacgggagattcgaactcattgggggacgatggccaaagaaccggactttcactattttatccaactggaacaaggtgaggtgttctttcatttacacgtcctgctggaaacgtgttccgtaaagccgatggtactcggaagatatatccgacatattcaacaaaaaattgtgagtaaagtctactgcgccacgagcctacgatggaaggatggatgcgtggtgaccaagaccaaaaatttcgggggcgcgaacaaggtccgggccgagtcgtatattcccgcctacctgatcccgaaacagcaaccggaagtgcagtgggcgtggactaacgtgcccgagtatataaaagcgtgcttgcaccgagaactgcgtgccagtctcgcgcgacttcacttcgaggaggcgggcgtctcgcaatccaaggaaaatctcgcgagaactgcagacggcgctcccgtgatgccgacccgcgtcagcaaacgctacatggagctcgtggattggctcgtggagaaggggatcaccaccgagaaggaatggctgctggaaaacagagaaagctttcggagctttcaggcctcgagcaactcggcgcgtcagatcaagacggccctgcaaggcgccattcaggagatgcttctgaccaagacggcggaggactacctcgtcggaaaggatcccgtctcggacgacgacatccgtcagaaccgcatctacaagattctggaactgaaccactacgacccagcgtacgtggggagtattttggtcgggtggtgccagaagaaatggggcaagcgaaacacgctgtggctgttcggacatgcgaccaccggcaagaccaacatcgcggaggctattgcccatgctgtgccgttctatggatgcgttaactggaccaacgagaactttccgttcaacgactgcgtcgaaaaaatgattatctggtgggaggagggcaaaatgaccgccaaagtggtggaaacagccaaggcgattctgggaggatctcgggtgagagtggaccaaaaatgcaaagcttcggttccgatcgaaccgacgccggtcattattaccagtaacaccaacatgtgttatgtcatcgacgggaacacgaccacgttcgagcataagcagccgttggaggacaggatgtttaagctcgaattgctgactcggttgcctgatgactttggtaaggtgaccaaacaggaggtgcgtcaattcttcaggtggtctcaggatcacctgacccctgtgatcccagaattcctagtgcggaaggcggagtctcgcaaaagacccgccccttccggggaaggctatataagcccgacaaagcggcccgcgctcgcagagcagcagcaggcgtcggagagcgcggacccggttcccaccaggtatcgtatcaaatgctcgaaacattgcggtatggataaaatgttgtttccttgccaaatttgtgaatcgatgaacagagatattaatatttgtgctattcataaaacgaccgactgtaaagagtgtttccccgactacggggataaagatgatgtagaactacccccctgtacagaacacaacgtgtctcgttgttatcaatgtcattcgggcgaattgtatcgcgtgacttcggactctgacgagaaacctgcccccgagagtgatgaaggcaccgagccatcctatgctccctgcacgattcaccacctgatgggcaagagtcacgggttagtcacttgcgcggcgtgtcggttgaaaaatagtacgttgcatgatgacttggatgacggtgatctcgaacaataaatgattgaaatgtagccatgtctctcatttctgatgcgattccagattggttggagcggttggtcaaaaagggagtgaatgctgcagctgatttctaccatttggaaagcggtcctcctcgtcctaaggcaaatcagcaaactcaagaatctcttgaaaaggacgattcgagaggtctcgtgttcccaggctacaattatctaggccctttcaacggtctagataaaggagaacccgtcaacgaggcagacgctgccgccttagaacacgacaaggcttacgacctcgaaatcaaggacgggcacaacccgtactttgagtacaacgaggccgacagacgtttccaggaacgtctcaaagacgatacctcctttggaggcaatttaggtaaagccatcttccaggccaaaaagagggttctcgaaccctttggtctggtggaagactcaaagacggctccgaccggagacaagcggaaaggcgaagacgaacctcgtttgcccgacacttcttcacagactcccaagaaaaacaagaagcctcgcaaggaaagaccttccggcggggcagaagatccgggcgaaggcacctcttccaacgctggagcagcagcacccgcctctagtgtgggatcatctatcatggctgaaggaggtggcggcccagtgggcgatgcaggccagggtgccgatggagtgggcaattcctccggaaattggcattgcgattcccaatggctggaaaacggagtcgtcactcgaaccacccgaacctgggtcttgcccagctacaacaaccacctgtacaaacgaatccaaggacccagcggaggcgacaacaacaacaaattctttggattcagcaccccctggggatactttgactacaatcgattccactgccacttttccccgcgagactggcaacgactcatcaacaacaactggggcatccgtcccaaagcgatgcgctttagactctttaacatccaggttaaagaggtcacggtccaagacttcaacaccaccatcggcaacaacctcaccagtacggtccaggtctttgcggacaaggactaccaactgccgtacgtcctcggatcggctaccgaaggcaccttcccgccgttcccagcggatatctacacgatcccgcagtacgggtactgcacgctaaactacaacaacgaggcggtggatcgttcggccttctactgtctggactactttccctcagacatgctgcggacaggaaataactttgagtttacttacaccttcgaggacgttcctttccatagcatgtttgcccacaaccagacgctagaccggctgatgaatcccctcgtggatcagtacctctgggctttcagctccgtcagccaagcaggctcatctggacgagctcttcattactcgcgggcgactaaaaccaacatggcggctcaatataggaactggttacctgggcctttcttccgtgatcagcaaatctttacgggcgctagcaacatcactaaaaataacgtctttagcgtttgggaaaaaggcaagcaatgggaactcgacaatcggaccaacctaatgcagcccggtcctgcggcagcgaccacctttagcggagaacctgaccgtcaagccatgcaaaacacgctggcttttagcaggaccgtctacgatcaaacgaccgccacgaccgatcgtaaccagatactcatcaccaacgaagacgaaatcagacccaccaactcggtcggtatcgacgcgtggggagcagttcccaccaacaaccagtcgatcgtgacccccggcactcgcgcggccgtcaacaatcaaggggcgcttcccgggatggtgtggcaaaacagagacatttaccctacagggacccatttggccaaaattcccgacactgacaatcacttccatccgtccccgcttattgggcggtttggctgcaagcatccccctccccagattttcattaaaaacacacccgtccctgccaacccttcggaaacgttccagacggccaaagtggcctccttcatcaaccagtactcgaccggacagtgcaccgtcgaaatcttttgggaactcaagaaggaaacctccaagcgctggaaccccgaaatccagttcacctccaactttggcaacgcggccgacatccagtttgccgtctccgacacgggatcctattccgaacctcgtcccatcggtacccgttaccttaccaaacctctgtaaattaaacccttcaataaaccgtttatgcgtaactgtatttccgtctcctgtcgttattcagtcacatgatgcggcattacctcaccggagtgctggccagtttccaagacaggctcgctcgctcactcgggccggggccccaaaggggcccctagcgaccgcttcgcggtcgcggcccgagtgagcgagcgagcctgtcttggaaactggcca

SEQ ID NO: 546 - DNA, 2211 bp, synthetic construct
  source 1..2211: mol_type = other DNA; note = Description of Artificial Sequence: Synthetic polynucleotide
atggctgctgatggttatcttccagattggctcgaggacactctctctgaaggaataagacagtggtggaagctcaaacctggcccaccaccaccaaagcccgcagagcggcataaggacgacagcaggggtcttgtgcttcctgggtacaagtacctcggacccttcaacggactcgacaagggagagccggtcaacgaggcagacgcagcggccctcgagcacgacaaggcctacgaccagcagctcaaggccggtgacaacccctacctcaagtacaaccacgccgacgcggagttccagcagcggcttcagggcgacacatcgtttgggggcaacctcggcagagcagtcttccaggccaaaaagagggttcttgaacctcttggtctggttgagcaagcgggtgagacggctcctggaaagaagagaccgttgattgaatccccccagcagcccgactcctccacgggtatcggcaaaaaaggcaagcagccggctaaaaagagactcaattttggtcagactggcgactcagagtcagtccccgacccacaacctctcggagaacctccagcaacccccgctgctgtgggacctactacaatggcttcaggtggtggcgcaccaatggcagacaataacgaaggcgccgacggagtgggtaatgcctcaggaaattggcattgcgattccacatggctgggcgacagagtcatcaccaccagcacccgcacctgggccttgcccacctacaataaccacctctacaagcaaatctccagtgcttcaacgggggccagcaacgacaaccactacttcggctacagcaccccctgggggtattttgacttcaacagattccactgccacttttcaccacgtgactggcagcgactcatcaacaacaattggggattccggcccaagagactcaacttcaaactcttcaacatccaagtcaaggaggtcacgacgaatgatggcgtcacaaccatcgctaataaccttaccagcacggttcaagtcttctcggactcagactatcagctcccgtacgtgctcgggtcggctcacgagggctgcctcccgccgttcccagcagacgtcttcatggtgccacagtatggatacctcaccctgaacaacgggagtcaggcagtaggacgctcttcattttactgcctggagtactttccttctcagatgctgcgtaccggaaacaactttaccttcagctacacttttgaggacgttcctttccacagcagctacgctcacagccagagtctggaccgtctcatgaatcctctcatcgaccagtacctgtattacctgaacagaactcagaatcagtccggaagtgcccaaaacaaggacttgctgtttagccgggggtctccagctggcatgtctgttcagcccaaaaactggctacctggaccctgttatcggcagcagcgcgtttctaaaacaaaaacagacaacaacaacagcaactttacctggactggtgcttcaaaatataaccttaatgggcgtgaatctataatcaaccctggcactgctatggcctcacacaaagacgacaaagacaagttctttcccatgagcggtgtcatgatttttggaaaggagagcgccggagcttcaaacactgcattggacaatgtcatgatcacagacgaagaggaaatcaaagccactaaccccgtggccaccgaaagatttgggactgtggcagtcaatctccagagcagcagcacagaccctgcgaccggagatgtgcatgttatgggagccttacctggaatggtgtggcaagacagagacgtatacctgcagggtcccatttgggccaaaattcctcacacagatggacactttcacccgtctcctcttatgggcggctttggactcaagaacccgcctcctcagatcctcatcaaaaacacgcctgttcctgcgaatcctccggcggagttttcagctacaaagtttgcttcattcatcacccaatactccacaggacaagtgagtgtggaaattgaatgggagctgcagaaagaaaacagcaagcgctggaatcccgaagtgcagtacacatccaattatgcaaaatctgccaacgttgattttactgtggacaacaatggactttatactgagcctcgccccattggcacccgttacctcacccgtcccctgtaa

SEQ ID NO: 547 - protein, 736 aa, synthetic construct
  source 1..736: note = Description of Artificial Sequence: Synthetic polypeptide
MAADGYLPDWLEDTLSEGIRQWWKLKPGPPPPKPAERHKDDSRGLVLPGYKYLGPFNGLDKGEPVNEADAAALEHDKAYDQQLKAGDNPYLKYNHADAEFQQRLQGDTSFGGNLGRAVFQAKKRVLEPLGLVEQAGETAPGKKRPLIESPQQPDSSTGIGKKGKQPAKKRLNFGQTGDSESVPDPQPLGEPPATPAAVGPTTMASGGGAPMADNNEGADGVGNASGNWHCDSTWLGDRVITTSTRTWALPTYNNHLYKQISSASTGASNDNHYFGYSTPWGYFDFNRFHCHFSPRDWQRLINNNWGFRPKRLNFKLFNIQVKEVTTNDGVTTIANNLTSTVQVFSDSDYQLPYVLGSAHEGCLPPFPADVFMVPQYGYLTLNNGSQAVGRSSFYCLEYFPSQMLRTGNNFTFSYTFEDVPFHSSYAHSQSLDRLMNPLIDQYLYYLNRTQNQSGSAQNKDLLFSRGSPAGMSVQPKNWLPGPCYRQQRVSKTKTDNNNSNFTWTGASKYNLNGRESIINPGTAMASHKDDKDKFFPMSGVMIFGKESAGASNTALDNVMITDEEEIKATNPVATERFGTVAVNLQSSSTDPATGDVHVMGALPGMVWQDRDVYLQGPIWAKIPHTDGHFHPSPLMGGFGLKNPPPQILIKNTPVPANPPAEFSATKFASFITQYSTGQVSVEIEWELQKENSKRWNPEVQYTSNYAKSANVDFTVDNNGLYTEPRPIGTRYLTRPL

SEQ ID NO: 548 - DNA, 2211 bp, synthetic construct
  source 1..2211: mol_type = other DNA; note = Description of Artificial Sequence: Synthetic polynucleotide
atggcttccgatggttatcttccagattggctcgaggacaacctctctgagggcatccgcgagtggtgggacttgaaacctggagccccgaaacccaaagccaaccagcaaaagcaggacgacggccggggtctggtgcttcctggctacaagtacctcggacccttcaacggactcgacaagggggagcccgtcaacgcggcggatgcagcggccctcgagcacgacaaggcctacgaccagcagctcagagcgggtgacaatccgtacctgcggtataaccacgccgacgccgagtttcaggagcgtctgcaagaagatacgtcttttgggggcaacctcgggcgagcagtcttccaggccaagaagagggttctcgaaccttttggtctggttgaggaaggtgctaagacggctcctggaaagaaacgtccggtagagcagtcgccacaagagccagactcctcctcgggcattggcaagacaggccagcagcccgctaaaaagagactcaattttggtcagactggcgactcagagtcagtccccgacccacaacctctcggagaacctccagcaacccccgctgctgtgggacctactacaatggcttcaggcggtggcgcaccaatggcagacaataacgaaggcgccgacggagtgggtaatgcctcaggaaattggcattgcgattccacatggctgggcgacagagtcatcaccaccagcacccgaacatgggccttgcccacctataacaaccacctctacaagcaaatctccagtgcttcaacgggggccagcaacgacaaccactacttcggctacagcaccccctgggggtattttgatttcaacagattccactgccatttctcaccacgtgactggcagcgactcatcaacaacaattggggattccggcccaagagactcaacttcaaactcttcaacatccaagtcaaggaggtcacgacgaatgatggcgtcacaaccatcgctaataaccttaccagcacggttcaagtcttctcggactcggagtaccagcttccgtacgtcctcggctctgcgcaccagggctgcctccctccgttcccggcggacgtgttcatgattccgcagtacggctacctaacgctcaacaatggcagccaggcagtgggacggtcatccttttactgcctggaatatttcccatcgcagatgctgagaacgggcaataactttaccttcagctacaccttcgaggacgtgcctttccacagcagctacgcgcacagccagagcctggaccggctgatgaatcctctcatcgaccagtacctgtattacctgaacagaactcagaatcagtccggaagtgcccaaaacaaggacttgctgtttagccgggggtctccagctggcatgtctgttcagcccaaaaactggctacctggaccctgttaccggcagcagcgcgtttctaaaacaaaaacagacaacaacaacagcaactttacctggactggtgcttcaaaatataaccttaatgggcgtgaatctataatcaaccctggcactgctatggcctcacacaaagacgacaaagacaagttctttcccatgagcggtgtcatgatttttggaaaggagagcgccggagcttcaaacactgcattggacaatgtcatgatcacagacgaagaggaaatcaaagccactaaccccgtggccaccgaaagatttgggactgtggcagtcaatctccagagcagcagcacagaccctgcgaccggagatgtgcatgttatgggagccttacctggaatggtgtggcaagacagagacgtatacctgcagggtcccatttgggccaaaattcctcacacagatggacactttcacccgtctcctcttatgggcggctttggacttaagcacccgcctcctcagatcctcatcaaaaacacgcctgttcctgcgaatcctccggcagagttttcggctacaaagtttgcttcattcatcacccagtattctactggccaagtcagcgtggagattgaatgggagctgcagaaagaaaacagcaaacgctggaatcccgaagtgcagtatacatctaactatgcaaaatctgccaacgttgatttcactgtggacaacaatggactttatactgagcctcgtcccattggcacccgttacctcacccgtcccctgtaa

SEQ ID NO: 549 - protein, 736 aa, synthetic construct
  source 1..736: note = Description of Artificial Sequence: Synthetic polypeptide
MASDGYLPDWLEDNLSEGIREWWDLKPGAPKPKANQQKQDDGRGLVLPGYKYLGPFNGLDKGEPVNAADAAALEHDKAYDQQLRAGDNPYLRYNHADAEFQERLQEDTSFGGNLGRAVFQAKKRVLEPFGLVEEGAKTAPGKKRPVEQSPQEPDSSSGIGKTGQQPAKKRLNFGQTGDSESVPDPQPLGEPPATPAAVGPTTMASGGGAPMADNNEGADGVGNASGNWHCDSTWLGDRVITTSTRTWALPTYNNHLYKQISSASTGASNDNHYFGYSTPWGYFDFNRFHCHFSPRDWQRLINNNWGFRPKRLNFKLFNIQVKEVTTNDGVTTIANNLTSTVQVFSDSEYQLPYVLGSAHQGCLPPFPADVFMIPQYGYLTLNNGSQAVGRSSFYCLEYFPSQMLRTGNNFTFSYTFEDVPFHSSYAHSQSLDRLMNPLIDQYLYYLNRTQNQSGSAQNKDLLFSRGSPAGMSVQPKNWLPGPCYRQQRVSKTKTDNNNSNFTWTGASKYNLNGRESIINPGTAMASHKDDKDKFFPMSGVMIFGKESAGASNTALDNVMITDEEEIKATNPVATERFGTVAVNLQSSSTDPATGDVHVMGALPGMVWQDRDVYLQGPIWAKIPHTDGHFHPSPLMGGFGLKHPPPQILIKNTPVPANPPAEFSATKFASFITQYSTGQVSVEIEWELQKENSKRWNPEVQYTSNYAKSANVDFTVDNNGLYTEPRPIGTRYLTRPL

SEQ ID NO: 550 - DNA, 2211 bp, synthetic construct
  source 1..2211: mol_type = other DNA; note = Description of Artificial Sequence: Synthetic polynucleotide
atggctgctgatggttatcttccagattggctcgaggacactctctctgaaggaataagacagtggtggaagctcaaacctggcccaccaccaccaaagcccgcagagcggcataaggacgacagcaggggtcttgtgcttcctgggtacaagtacctcggacccttcaacggactcgacaagggagagccggtcaacgaggcagacgcagcggccctcgagcacgacaaggcctacgaccagcagctcaaggccggtgacaacccctacctcaagtacaaccacgccgacgcggagttccagcagcggcttcagggcgacacatcgtttgggggcaacctcggcagagcagtcttccaggccaaaaagagggttcttgaacctcttggtctggttgagcaagcgggtgagacggctcctggaaagaagagaccgttgattgaatccccccagcagcccgactcctccacgggtatcggcaaaaaaggcaagcagccggctaaaaagagactcaattttggtcagactggcgactcagagtcagtccccgacccacaacctctcggagaacctccagcaacccccgctgctgtgggacctactacaatggcttcaggtggtggcgcaccaatggcagacaataacgaaggcgccgacggagtgggtaatgcctcaggaaattggcattgcgattccacatggctgggcgacagagtcatcaccaccagcacccgcacctgggccttgcccacctacaataaccacctctacaagcaaatctccagtgcttcaacgggggccagcaacgacaaccactacttcggctacagcaccccctgggggtattttgacttcaacagattccactgccacttttcaccacgtgactggcagcgactcatcaacaacaattggggattccggcccaagagactcaacttcaaactcttcaacatccaagtcaaggaggtcacgacgaatgatggcgtcacaaccatcgctaataaccttaccagcacggttcaagtcttctcggactcagactatcagctcccgtacgtgctcgggtcggctcacgagggctgcctcccgccgttcccagcagacgtcttcatggtgccacagtatggatacctcaccctgaacaacgggagtcaggcagtaggacgctcttcattttactgcctggagtactttccttctcagatgctgcgtaccggaaacaactttaccttcagctacacttttgaggacgttcctttccacagcagctacgctcacagccagagtctggaccgtctcatgaatcctctcatcgaccagtacctgtattacctgaacagaactcagaatcagtccggaagtgcccaaaacaaggacttgctgtttagccgggggtctccaactggcatgtctgttcagcccaaaaactggctacctggaccctgttatcggcagcagcgcgtttctaaaacaaaaacagacaacaacaacagcaactttacctggactggtgcttcaaaatataaccttaatgggcgtgaatctataatcaaccctggcactgctatggcctcacacaaagacgacaaagacaagttctttcccatgagcggtgtcatgatttttggaaaggagagcgccggagcttcaaacactgcattggacaatgtcatgatcacagacgaagaggaaatcaaagccactaaccccgtggccactgaaagatttgggactgtggcagtcaatctccagagcagcagcacagaccctgcgaccggagatgtgcatgccatgggagccttacctggaatggtgtggcaagacagagacgtatacctgcagggtcctatttgggccaaaattcctcacacggatggacactttcacccgtctcctctcatgggcggctttggactcaagaacccgcctcctcagatcctcatcaaaaacacgcctgttcctgcgaatcctccggcggagttttcagctacaaagtttgcttcattcatcacccagtattccacaggacaagtgagcgtggagattgaatgggagctgcagaaagaaaacagcaaacgctggaatcccgaagtgcagtatacatctaactatgcaaaatctgccaacgttgatttcactgtggacaacaatggactttatactgagcctcgccccattggcacccgttacctcacccgtcccctgtaa

SEQ ID NO: 551 - protein, 736 aa, synthetic construct
  source 1..736: note = Description of Artificial Sequence: Synthetic polypeptide
MAADGYLPDWLEDTLSEGIRQWWKLKPGPPPPKPAERHKDDSRGLVLPGYKYLGPFNGLDKGEPVNEADAAALEHDKAYDQQLKAGDNPYLKYNHADAEFQQRLQGDTSFGGNLGRAVFQAKKRVLEPLGLVEQAGETAPGKKRPLIESPQQPDSSTGIGKKGKQPAKKRLNFGQTGDSESVPDPQPLGEPPATPAAVGPTTMASGGGAPMADNNEGADGVGNASGNWHCDSTWLGDRVITTSTRTWALPTYNNHLYKQISSASTGASNDNHYFGYSTPWGYFDFNRFHCHFSPRDWQRLINNNWGFRPKRLNFKLFNIQVKEVTTNDGVTTIANNLTSTVQVFSDSDYQLPYVLGSAHEGCLPPFPADVFMVPQYGYLTLNNGSQAVGRSSFYCLEYFPSQMLRTGNNFTFSYTFEDVPFHSSYAHSQSLDRLMNPLIDQYLYYLNRTQNQSGSAQNKDLLFSRGSPTGMSVQPKNWLPGPCYRQQRVSKTKTDNNNSNFTWTGASKYNLNGRESIINPGTAMASHKDDKDKFFPMSGVMIFGKESAGASNTALDNVMITDEEEIKATNPVATERFGTVAVNLQSSSTDPATGDVHAMGALPGMVWQDRDVYLQGPIWAKIPHTDGHFHPSPLMGGFGLKNPPPQILIKNTPVPANPPAEFSATKFASFITQYSTGQVSVEIEWELQKENSKRWNPEVQYTSNYAKSANVDFTVDNNGLYTEPRPIGTRYLTRPL

SEQ ID NO: 552 - DNA, 2211 bp, synthetic construct
  source 1..2211: mol_type = other DNA; note = Description of Artificial Sequence: Synthetic polynucleotide
atggctgccgatggttatcttccagattggctcgaggacaacctctctgagggcattcgcgagtggtgggcgctgaaacctggagccccgaagcccaaagccaaccagcaaaagcaggacgacggccggggtctggtgcttcctggctacaagtacctcggacccttcaacggactcgacaagggggagcccgtcaacgcggcggatgcagcggccctcgagcacgacaaggcctacgaccagcagctcaaagcgggtgacaatccgtacctgcggtataaccacgccgacgccgagtttcaggagcgtctgcaagaagatacgtcttttgggggcaacctcgggcgagcagtcttccaggccaagaagcgggttctcgaacctctcggtctggttgaggaaggcgctaagacggctcctggaaagaaacgtccggtagagcaatcgccacaagagccagactcctcctcgggcatcggcaagacaggccagcagcccgctaaaaagagactcaattttggtcagactggcgactcagagtcagtccccgacccacaacctctcggagaacctccagcaacccccgctgctgtgggacctactacaatggcttcaggcggtggcgcaccaatggcagacaataacgaaggcgccgacggagtgggtaatgcctcaggaaattggcattgcgattccacatggctgggcgacagagtcatcaccaccagcacccgaacatgggccttgcccacctataacaaccacctctacaagcaaatctccagtgcttcgacgggggccagcaacgacaaccactacttcggctacagcaccccctgggggtattttgactttaacagattccactgccacttttcaccacgtgactggcagcgactcatcaacaacaactggggattccggcccaagagactcagcttcaagctcttcaacatccaggtcaaggaggtcacgacgaatgatggcgtcacaaccatcgctaataaccttaccagcacggttcaagtcttctcggactcggagtaccagcttccgtacgtcctcggctctgcgcaccagggctgcctccctccgttcccggcggacgtgttcatgattccgcaatacggctacctgacgctcaacaatggcagccaagccgtgggacgttcatccttttactgcctggaatatttcccttctcagatgctgagaacgggcaacaactttaccttcagctacacctttgaggaagtgcctttccacagcagctacgcgcacagccagagcctggaccggctgatgaatcctctcatcgatcaatacctgtattacctgaacagaactcaaaatcagtccggaagtgcccaaaacaaggacttgctgtttagccgtgggtctccagctggcatgtctgttcagcccaaaaactggctacctggaccctgttatcggcagcagcgcgtttctaaaacaaaaacagacaacaacaacagcaattttacctggactggtgcttcaaaatataacctcaatgggcgtgaatccatcatcaaccctggcactgctatggcctcacataaagacgacgaagacaagttctttcccatgagcggtgtcatgatttttggaaaagagagcgccggagcttcaaacactgcattggacaatgtcatgattacagacgaagaggaaattaaagccactaaccctgtggccaccgaaagatttgggaccgtggcagtcaatttccagagcagcagcacagaccctgcgaccggagatgtgcatgctatgggagcattacctggcatggtgtggcaagatagagacgtgtacctgcagggtcccatttgggccaaaattcctcacacagatggacactttcacccgtctcctcttatgggcggctttggactcaagaacccgcctcctcagatcctcatcaaaaacacgcctgttcctgcgaatcctccggcggagttttcagctacaaagtttgcttcattcatcacccaatactccacaggacaagtgagcgtggagattgaatgggagctgcagaaagaaaacagcaaacgctggaatcccgaagtgcagtatacatctaactatgcaaaatctgccaacattgatttcactgtggacaacaatggactttatactgagcctcgccccattggcacccgttacctcacccgtccccagtaa

SEQ ID NO: 553 - protein, 736 aa, synthetic construct
  source 1..736: note = Description of Artificial Sequence: Synthetic polypeptide
MAADGYLPDWLEDNLSEGIREWWALKPGAPKPKANQQKQDDGRGLVLPGYKYLGPFNGLDKGEPVNAADAAALEHDKAYDQQLKAGDNPYLRYNHADAEFQERLQEDTSFGGNLGRAVFQAKKRVLEPLGLVEEGAKTAPGKKRPVEQSPQEPDSSSGIGKTGQQPAKKRLNFGQTGDSESVPDPQPLGEPPATPAAVGPTTMASGGGAPMADNNEGADGVGNASGNWHCDSTWLGDRVITTSTRTWALPTYNNHLYKQISSASTGASNDNHYFGYSTPWGYFDFNRFHCHFSPRDWQRLINNNWGFRPKRLSFKLFNIQVKEVTTNDGVTTIANNLTSTVQVFSDSEYQLPYVLGSAHQGCLPPFPADVFMIPQYGYLTLNNGSQAVGRSSFYCLEYFPSQMLRTGNNFTFSYTFEEVPFHSSYAHSQSLDRLMNPLIDQYLYYLNRTQNQSGSAQNKDLLFSRGSPAGMSVQPKNWLPGPCYRQQRVSKTKTDNNNSNFTWTGASKYNLNGRESIINPGTAMASHKDDEDKFFPMSGVMIFGKESAGASNTALDNVMITDEEEIKATNPVATERFGTVAVNFQSSSTDPATGDVHAMGALPGMVWQDRDVYLQGPIWAKIPHTDGHFHPSPLMGGFGLKNPPPQILIKNTPVPANPPAEFSATKFASFITQYSTGQVSVEIEWELQKENSKRWNPEVQYTSNYAKSANIDFTVDNNGLYTEPRPIGTRYLTRPQ

SEQ ID NO: 554 - DNA, 2211 bp, synthetic construct
  source 1..2211: mol_type = other DNA; note = Description of Artificial Sequence: Synthetic polynucleotide
atggctgccgatggttatcttccagattggctcgaggacaacctctctgagggcattcgcgagtggtgggacttgaaacctggagccccgaaacccaaagccaaccagcaaaagcaggacgacggccggggtctggtgcttcctggctacaagtacctcggacccttcaacggactcgacaagggggagcccgtcaacgcggcggatgcagcggccctcgagcacgacaaggcctacgaccagcagctcaaagcgggtgacaatccgtaccttcggtataaccacgccgacgccgagtttcaggagcgtctgcaagaagatacgtcttttgggggcaacctcgggcgagcagtcttccaggccaaaaagagggttctcgaacctctcggtctggttgaggaagcggctaagacggctcctggaaagaaacgtccggtagagcagtcgccacaagagccagactcctcctcgggcattggcaagacaggccagcagcccgctaaaaagagactcaattttggtcagactggcgactcagagtcagtccccgacccacaacctctcggagaacctcccgcagccccctcaggtgtgggatctcttacaatggcttcaggtggtggcgcaccaatggcagacaataacgaaggcgccgacggagtgggtaatgcctcaggaaattggcattgcgattccacatggctgggcgacagagtcatcaccaccagcacccgcacctgggccttgcccacctacaataaccacctctacaagcaaatctccagtgcttcaacgggggccagcaacgacaaccactacttcggctacagcaccccctgggggtattttgacttcaacagattccactgccacttttcaccacgtgactggcaaagactcatcaacaacaattggggattccggcccaagagactcaacttcaagctcttcaacatccaagtcaaggaggtcacgacgaatgatggcgtcacgaccatcgctaataaccttaccagcacggttcaagtcttctcggactcggagtaccagttgccgtacgtcctcggctctgcgcaccagggctgcctccctccgttcccggcggacgtgttcatgattccgcagtacggctacctaacgctcaacaatggcagccaggcagtgggacggtcatccttttactgcctggaatatttcccatcgcagatgctgagaacgggcaacaactttaccttcagctacacctttgaggaagtgcctttccacagcagctacgcgcacagccagagcctggaccggctgatgaatcctctcatcgaccagtacctgtattacctgaacagaactcaaaatcagtccggaagtgcccaaaacaaggacttgctgtttagccgtgggtctccagctggcatgtctgttcagcccaaaaactggctacctggaccctgttaccggcagcagtgcgtttctaaaacaaaaacagacaacaacaacagcaactttacctggactggtgcttcaaaatataaccttaatgggcgtgaatctataatcaaccctggcactgctatggcctcacacaaagacgacaaagacaagttctttcccatgagcggtgtcatgatttttggaaaggagagcgccggagcttcaaacactgcattggacaatgtcatgatcacagacgaagaggaaatcaaagccactaaccccgtggccaccgaaagatttgggactgtggcagtcaatctccagagcagcagcacagaccctgcgaccggagatgtgcatgttatgggagccttacctggaatggtgtggcaagacagagacgtatacctgcagggtcctatttgggccaaaattcctcacacagatggacactttcacccgtctcctcttatgggcggctttggactcaagaacccgcctcctcagatcctcatcaaaaacacgcctgttcctgcgaatcctccggcggagttttcagctacaaagtttgcttcattcatcacccaatactccacaggacaagtgagcgtggagattgaatgggagctgcagaaagaaaacagcaagcgctggaatcccgaagtgcagtacacatccaattatgcaaaatctgccaacgttgatttcactgtggacaacaatggactttatactgagcctcgccccattggcacccgttacctcacccgtcccctgtaa

SEQ ID NO: 555 - protein, 736 aa, synthetic construct
  source 1..736: note = Description of Artificial Sequence: Synthetic polypeptide
MAADGYLPDWLEDNLSEGIREWWDLKPGAPKPKANQQKQDDGRGLVLPGYKYLGPFNGLDKGEPVNAADAAALEHDKAYDQQLKAGDNPYLRYNHADAEFQERLQEDTSFGGNLGRAVFQAKKRVLEPLGLVEEAAKTAPGKKRPVEQSPQEPDSSSGIGKTGQQPAKKRLNFGQTGDSESVPDPQPLGEPPAAPSGVGSLTMASGGGAPMADNNEGADGVGNASGNWHCDSTWLGDRVITTSTRTWALPTYNNHLYKQISSASTGASNDNHYFGYSTPWGYFDFNRFHCHFSPRDWQRLINNNWGFRPKRLNFKLFNIQVKEVTTNDGVTTIANNLTSTVQVFSDSEYQLPYVLGSAHQGCLPPFPADVFMIPQYGYLTLNNGSQAVGRSSFYCLEYFPSQMLRTGNNFTFSYTFEEVPFHSSYAHSQSLDRLMNPLIDQYLYYLNRTQNQSGSAQNKDLLFSRGSPAGMSVQPKNWLPGPCYRQQCVSKTKTDNNNSNFTWTGASKYNLNGRESIINPGTAMASHKDDKDKFFPMSGVMIFGKESAGASNTALDNVMITDEEEIKATNPVATERFGTVAVNLQSSSTDPATGDVHVMGALPGMVWQDRDVYLQGPIWAKIPHTDGHFHPSPLMGGFGLKNPPPQILIKNTPVPANPPAEFSATKFASFITQYSTGQVSVEIEWELQKENSKRWNPEVQYTSNYAKSANVDFTVDNNGLYTEPRPIGTRYLTRPL

SEQ ID NO: 556 - DNA, 2211 bp, synthetic construct
  source 1..2211: mol_type = other DNA; note = Description of Artificial Sequence: Synthetic polynucleotide
atggctgccgatggttatcttccagattggctcgaggacaacctctctgagggcattcgcgaatggtgggacttgaaacctggagccccgaaacccaaagtcaaccagcaaaagcaggacaacgctcggggtcttgtgcttccgggttacaaatacctcggacccttcaacggactcgacaagggggagcccgtcaacgcggcggacgcagcggccctcgagcacgacaaggcctacgaccagcagctcaaagcgggtgacaatccgtaccttcggtataaccacgccgacgccgagtttcaggagcgtctgcaagaagatacgtcttttgggggcaaccttggacgagcagtcttccaggccaagaagagggttctcgaaccttttggtctggttgaggaaggtgctaagacggctcctggaaagaaacgtccggtagagcagtcgccacaagagccagactcctcctcgggcattggcaagacaggccagcagcccgctaaaaagagactcaattttggtcagactggcgactcagagtcagtccccgacccacaacctctcggagaacctccagcaacccccgctgctgtgggacctactacaatggcttcaggcggtggcgcaccaatggcagacaataacgaaggcgccgacggagtgggtaatgcctcaggaaattggcattgcgattccacatggctgggcgacagagtcatcaccaccagcacccgcacctgggccttgcccacctacaataaccacctctacaagcaaatctccagtgcttcaacgggggccagcaacgacaaccactacttcggctacagcaccccctgggggtattttgacttcaacagattccactgccacttttcaccacgtgactggcaaagactcatcaacaacaattggggattccggcccaagagactcaacttcaagctcttcaacatccaagtcaaggaggtcacgacgaatgatggcgtcacgaccatcgctaataaccttaccagcacggttcaagtcttctcggactcggagtaccagttgccgtacgtcctcggctctgcgcaccagggctgcctccctccgttcccggcggacgtgttcatgattccgcaatacggctacctgacgctcaacaatggcagccaggcagtgggacggtcatccttttactgcctggaatatttcccatcgcagatgctgagaacgggcaataactttaccttcagctacacttttgaggacgttcctttccacagcagctacgctcacagccagagcctggaccggctgatgaatcctctcatcgaccagtacctgtattacctgaacagaactcagaatcagtccggaagtgcccaaaacaaggacttgctgtttagccgtgggtctccaactggcatgtctgttcagcccaaaaactggctacctggaccctgttatcggcagcagcgcgtttctaaaacaaaaacagacaacaacaacagcaactttacctggactggtgcttcaaaatataaccttaatgggcgtgaatctataatcaaccctggcactgctatggcctcacacaaagacgacgaagacaagttctttcccatgagcggtgtcatgatttttggaaaggagagcgccggagcttcaaacactgcattggacaatgtcatgatcacagacgaagaggaaatcaaagccactaaccccgtggccactgaaagatttgggactgtggcagtcaatctccagagcagcagcacagaccctgcgaccggagatgtgcatgccatgggagccttacctggaatggtgtggcaagacagagacgtatacctgcagggtcctatttgggccaaaattcctcacacggatggacactttcacccgtctcctctcatgggcggctttggacttaagcacccgcctcctcagatcctcatcaaaaacacgcctgttcctgcgaatcctccggcagagttttcggctacaaagtttgcttcattcatcacccagtattccacaggacaagtgagcgtggagattgaatgggagctgcagaaagaaaacagcaaacgctggaatcccgaagtgcagtatacatctaactatgcaaaatctgccaacgttgatttcactgtggacaacaatggactttatactgagcctcgccccattggcacccgttacctcacccgtcccctgtaa

SEQ ID NO: 557 - protein, 736 aa, synthetic construct
  source 1..736: note = Description of Artificial Sequence: Synthetic polypeptide
MAADGYLPDWLEDNLSEGIREWWDLKPGAPKPKVNQQKQDNARGLVLPGYKYLGPFNGLDKGEPVNAADAAALEHDKAYDQQLKAGDNPYLRYNHADAEFQERLQEDTSFGGNLGRAVFQAKKRVLEPFGLVEEGAKTAPGKKRPVEQSPQEPDSSSGIGKTGQQPAKKRLNFGQTGDSESVPDPQPLGEPPATPAAVGPTTMASGGGAPMADNNEGADGVGNASGNWHCDSTWLGDRVITTSTRTWALPTYNNHLYKQISSASTGASNDNHYFGYSTPWGYFDFNRFHCHFSPRDWQRLINNNWGFRPKRLNFKLFNIQVKEVTTNDGVTTIANNLTSTVQVFSDSEYQLPYVLGSAHQGCLPPFPADVFMIPQYGYLTLNNGSQAVGRSSFYCLEYFPSQMLRTGNNFTFSYTFEDVPFHSSYAHSQSLDRLMNPLIDQYLYYLNRTQNQSGSAQNKDLLFSRGSPTGMSVQPKNWLPGPCYRQQRVSKTKTDNNNSNFTWTGASKYNLNGRESIINPGTAMASHKDDEDKFFPMSGVMIFGKESAGASNTALDNVMITDEEEIKATNPVATERFGTVAVNLQSSSTDPATGDVHAMGALPGMVWQDRDVYLQGPIWAKIPHTDGHFHPSPLMGGFGLKHPPPQILIKNTPVPANPPAEFSATKFASFITQYSTGQVSVEIEWELQKENSKRWNPEVQYTSNYAKSANVDFTVDNNGLYTEPRPIGTRYLTRPL

SEQ ID NO: 558 - DNA, 2208 bp, synthetic construct
  source 1..2208: mol_type = other DNA; note = Description of Artificial Sequence: Synthetic polynucleotide
  misc_difference 955: note = misc_feature - n is a, c, t, or g
  misc_difference 971..972: note = misc_feature - n is a, c, t, or g
  misc_difference 981: note = misc_feature - n is a, c, t, or g
  misc_difference 986: note = misc_feature - n is a, c, t, or g
  misc_difference 1235: note = misc_feature - n is a, c, t, or g
  misc_difference 1694..1696: note = misc_feature - n is a, c, t, or g
  misc_difference 1698: note = misc_feature - n is a, c, t, or g
  misc_difference 1763..1765: note = misc_feature - n is a, c, t, or g
  misc_difference 1778: note = misc_feature - n is a, c, t, or g
  misc_difference 2204: note = misc_feature - n is a, c, t, or g
atggctgccgatggttatcttccagattggctcgaggacaacctctctgagggcattcgcgaatggtgggacttgaaacctggagccccgaaacccaaagtcaaccagcaaaagcaggacaacgctcggggtcttgtgcttccgggttacaaatacctcggacccttcaacggactcgacaagggggagcccgtcaacgcggcggacgcagcggccctcgagcacgacaaggcctacgaccagcagctcaaagcgggtgacaatccgtaccttcggtataaccacgccgacgccgagtttcaggagcgtctgcaagaagatacgtcttttgggggcaaccttggacgagcagtcttccaggccaagaagagggttctcgaaccttttggtctggttgaggaaggtgctaagacggctcctggaaagaaacgtccggtagagcagtcgccacaagagccagactcctcctcgggcattggcaagacaggccagcagcccgctaaaaagagactcaattttggtcagactggcgactcagagtcagtccccgacccacaacctctcggagaacctccagcaacccccgctgctgtgggacctactacaatggcttcaggcggtggcgcaccaatggcagacaataacgaaggcgccgacggagtgggtaatgcctcaggaaattggcattgcgattccacatggctgggcgacagagtcatcaccaccagcacccgaacatgggccttgcccacctataacaaccacctctacaagcaaatctccagtgcttcaacgggggccagcaacgacaaccactacttcggctacagcaccccctgggggtattttgatttcaacagattccactgccacttttcaccacgtgactggcagcgactcatcaataacaattggggattccggcccaagagactcaacttcaaactcttcaacntccaagtcaaggaggnnacgacgaangatgncgtcacaaccatcgctaataaccttaccagcacggttcaagtcttctcggactcggagtaccagcttccgtacgtcctcggctctgcgcaccagggctgcctccctccgttcccggcggacgtgttcatgattccgcaatacggctacctgacgctcaacaatggcagccaggcagtgggacggtcatccttttactgcctggaatatttcccatcgcagatgctgagaacgggcaataactttacctncagctacacttttgaggacgttcctttccacagcagctacgctcacagccagagcctggaccggctgatgaatcctctcatcgaccagtacctgtattacctgaacagaactcagaatcagtccggaagtgcccaaaacaaggacttgctgtttagccgtgggtctccaactggcatgtctgttcagcccaaaaactggctacctggaccctgttatcggcagcagcgcgtttctaaaacaaaaacagacaacaacaacagcaactttacctggactggtgcttcaaaatataaccttaatgggcgtgaatctataatcaaccctggcactgctatggcctcacacaaagacgacgaagacaagttctttcccatgagcggtgtcatgatttttggaaaggagagcgccggagcttcaaacactgcattggacaatgtcatgatcacagacgaagagannncnaagccactaaccccgtggccactgaaagatttgggactgtggcagtcaatctccaagcagcacannnaccctgcgaccgnagatgtgcatgccatgggagccttacctggaatggtgtggcaagacagagacgtatacctgcagggtcctatttgggccaaaattcctcacacggatggacactttcacccgtctcctctcatgggcggctttggacttaagcacccgcctcctcagatcctcatcaaaaacacgcctgttcctgcgaatcctccggcagagttttcggctacaaagtttgcttcattcatcacccagtattccacaggacaagtgagcgtggagattgaatgggagctgcagaaagaaaacagcaaacgctggaatcccgaagtgcagtatacatctaactatgcaaaatctgccaacgttgatttcactgtggacaacaatggactttatactgagcctcgccccattggcacccgttacctcacccgtccccngtaa

SEQ ID NO: 559 - protein, 723 aa, synthetic construct
  source 1..723: note = Description of Artificial Sequence: Synthetic polypeptide
MAADGYLPDWLEDNLSEGIREWWDLKPGAPKPKVNQQKQDNARGLVLPGYKYLGPFNGLDKGEPVNAADAAALEHDKAYDQQLKAGDNPYLRYNHADAEFQERLQEDTSFGGNLGRAVFQAKKRVLEPFGLVEEGAKTAPGKKRPVEQSPQEPDSSSGIGKTGQQPAKKRLNFGQTGDSESVPDPQPLGEPPATPAAVGPTTMASGGGAPMADNNEGADGVGNASGNWHCDSTWLGDRVITTSTRTWALPTYNNHLYKQISSASTGASNDNHYFGYSTPWGYFDFNRFHCHFSPRDWQRLINNNWGFRPKRLNFKLFNQVKETTDVTTIANNLTSTVQVFSDSEYQLPYVLGSAHQGCLPPFPADVFMIPQYGYLTLNNGSQAVGRSSFYCLEYFPSQMLRTGNNFTSYTFEDVPFHSSYAHSQSLDRLMNPLIDQYLYYLNRTQNQSGSAQNKDLLFSRGSPTGMSVQPKNWLPGPCYRQQRVSKTKTDNNNSNFTWTGASKYNLNGRESIINPGTAMASHKDDEDKFFPMSGVMIFGKESAGASNTALDNVMITDEEATNPVATERFGTVAVNLQSSPATDVHAMGALPGMVWQDRDVYLQGPIWAKIPHTDGHFHPSPLMGGFGLKHPPPQILIKNTPVPANPPAEFSATKFASFITQYSTGQVSVEIEWELQKENSKRWNPEVQYTSNYAKSANVDFTVDNNGLYTEPRPIGTRYLTRP

SEQ ID NO: 560 - DNA, 2208 bp, synthetic construct
  source 1..2208: mol_type = other DNA; note = Description of Artificial Sequence: Synthetic polynucleotide
atggctgccgatggttatcttccagattggctcgaggacactctctctgaaggaataagacagtggtggaagctcaaacctggcccaccaccaccaaagcccgcagagcggcataaggacgacagcaggggtcttgtgcttcctgggtacaagtacctcggacccttcaacggactcgacaagggagagccggtcaacgaggcagacgccgcggccctcgagcacgacaaagcctatgaccggcagctcgacagcggagacaacccgtacctcaagtacaaccacgccgacgcggagtttcaggagcgccttaaagaagatacgtcttttgggggcaacctcggacgagcagtcttccaggcgaaaaagagggttcttgaacctctgggcctggttgaggaacctgttaagacggctccgggaaaaaagaggccggtagagcactctcctgtggagccagactcctcctcgggaaccggaaaggcgggtcagcagcctgcaagaaaaagattgaattttggtcagactggagacgcagactcagtacctgacccccagcctctcggacagccaccagcagccccctctggtctgggaactaatacgatggctacaggcagtggcgcaccaatggcagacaataacgagggcgccgacggagtgggtaattcctcgggaaattggcattgcgattccacatggatgggcgacagagtcatcaccaccagcacccgaacctgggccctgcccacctacaacaaccacctctacaaacaaatttccagccaatcaggagcctcgaacgacaatcactactttggctacagcaccccttgggggtattttgacttcaacagattccactgccacttttcaccacgtgactggcaaagactcatcaacaacaactggggattccgacccaagagactcaagttcaagctctttaacattcaagtcaaagaggtcacgcagaatgacggtacgacgacgattgccaataaccttaccagcacggttcaggtgtttactgactcggagtaccagctcccgtacgtcctcggctcggcgcatcaaggatgcctcccgccgttcccagcagacgtcttcatggtgccacagtatggatacctcaccctgaacaacgggagtcaggcagtaggacgctcttcattttactgcctggagtactttccttctcagatgctgcgtaccggtaacaactttaccttcagctacacttttgaggacgttcctttccacagcagctacgctcacagccagagtctggaccgtctcatgaatcctctcatcgaccagtacctgtattacttgagcagaacagacgctccaagtggaaccaccacgcagtcaaggcttcagttttctcaggccggagcgagtgacattcgggaccagtctaggaactggcttcctggaccctgttaccgccagcagcgagtatcaaagacatctgcggataacaacaacagtgaatactcgtggactggagctaccaagtaccacctcaatggcagagactctctggtgaatccgggcccggccatggcaagccacaaggacgatgaagaaaagttttttcctcagagcggggttctcatctttgggaagcaaggctcagagaaaacaagtgtggacattgaaaaggtcatgattacagacgaagaggaaatcaggacaaccaatcccgtggctacggagcagtatggttctgtatctaccaacctccagagaggcaacagacaagcagctaccgcagatgtcaacacacaaggcgttcttccaggcatggtctggcaggacagagatgtgtaccttcaggggcccatctgggcaaagattccacacacggacggacattttcacccctctcccctcatgggtggattcggacttaaacaccctcctccacagattctcatcaagaacaccccggtacctgcgaatccttcgaccaccttcagtgcggcaaagtttgcttccttcatcacacagtactccacgggacaggtcagcgtggagatcgagtgggagctgcagaaggaaaacagcaaacgctggaatcccgaagttcagtacacttccaactacaacaagtctgttaatgtggactttactgtggacactaatggcgtgtattcagagcctcgccccattggcaccagatacctgactcgtaatctgtaa

SEQ ID NO: 561 - protein, 735 aa, synthetic construct
  source 1..735: note = Description of Artificial Sequence: Synthetic polypeptide
MAADGYLPDWLEDTLSEGIRQWWKLKPGPPPPKPAERHKDDSRGLVLPGYKYLGPFNGLDKGEPVNEADAAALEHDKAYDRQLDSGDNPYLKYNHADAEFQERLKEDTSFGGNLGRAVFQAKKRVLEPLGLVEEPVKTAPGKKRPVEHSPVEPDSSSGTGKAGQQPARKRLNFGQTGDADSVPDPQPLGQPPAAPSGLGTNTMATGSGAPMADNNEGADGVGNSSGNWHCDSTWMGDRVITTSTRTWALPTYNNHLYKQISSQSGASNDNHYFGYSTPWGYFDFNRFHCHFSPRDWQRLINNNWGFRPKRLKFKLFNIQVKEVTQNDGTTTIANNLTSTVQVFTDSEYQLPYVLGSAHQGCLPPFPADVFMVPQYGYLTLNNGSQAVGRSSFYCLEYFPSQMLRTGNNFTFSYTFEDVPFHSSYAHSQSLDRLMNPLIDQYLYYLSRTDAPSGTTTQSRLQFSQAGASDIRDQSRNWLPGPCYRQQRVSKTSADNNNSEYSWTGATKYHLNGRDSLVNPGPAMASHKDDEEKFFPQSGVLIFGKQGSEKTSVDIEKVMITDEEEIRTTNPVATEQYGSVSTNLQRGNRQAATADVNTQGVLPGMVWQDRDVYLQGPIWAKIPHTDGHFHPSPLMGGFGLKHPPPQILIKNTPVPANPSTTFSAAKFASFITQYSTGQVSVEIEWELQKENSKRWNPEVQYTSNYNKSVNVDFTVDTNGVYSEPRPIGTRYLTRNL

SEQ ID NO: 562 - DNA, 2208 bp, synthetic construct
  source 1..2208: mol_type = other DNA; note = Description of Artificial Sequence: Synthetic polynucleotide
atggctgccgatggttatcttccagattggctcgaggacactctctctgaaggaataagacagtggtggaagctcaaacctggcccaccaccaccaaagcccgcagagcggcataaggacgacagcaggggtcttgtgcttcctgggtacaagtacctcggacccttcaacggactcgacaagggagagccggtcaacgaggcagacgccgcggccctcgagcacgacaaagcctatgaccggcagctcgacagcggagacaacccgtacctcaagtacaaccacgccgacgcggagtttcaggagcgccttaaagaagatacgtcttttgggggcaacctcggacgagcagtcttccaggcgaaaaagagggttcttgaacctctgggcctggttgaggaacctgttaagacggctccgggaaaaaagaggccggtagagcactctcctgtggagccagactcctcctcgggaaccggaaaggcgggccagcagcctgcaagaaaaagattgaattttggtcagactggagacgcaaactcagtacctgacccccagcctctcggacagccaccagcagccccctctggtctgggaactaatacgatggctacaggcagtggcgcaccaatggcagacaataacgagggcgccgacggagtgggtaattcctcgggaaattggcattgcgattccacatggatgggcgacagagtcatcaccaccagcacccgaacctgggccctgcccacctacaacaaccacctctacaaacaaatttccagccaatcaggagcctcgaacgacaatcactactttggctacagcaccccttgggggtattttgacttcaacagattccactgccacttttcaccacgtgactggcaaagactcatcaacaacaactggggattccgacccaagagactcaagttcaagctctttaacattcaagtcaaagaggtcacgcagaatgacggtacgacgacgattgccaataaccttaccagcacggttcaggtgtttactgactcggagtaccagctcccgtacgtcctcggctcggcgcatcaaggatgcctcccgccgttcccagcagacgtcttcatggtgccacagtatggatacctcaccctgaacaacgggagtcgggcagtaggacgctcttcattttactgcctggagtactttccttctcagatgctgcgtaccggtaacaactttaccttcagctacacttttgaggacgttcctttccacagcagctacgctcacagccagagtctggaccgtctcatgaatcctctcatcgaccagtacctgtattacttgagcagaacagacactccaagtggaaccaccacgcagtcaaggcttcagttttctcaggccggagcgagtgacattcgggaccagtctaggaactggcttcctggaccctgttaccgccagcagcgagtatcaaagacatctgcggataacaacaacagtgaatactcgtggactggagctaccaagtaccacctcaatggcagagactctctggtgaatccgggcccggccatggcaagccacaaggacgatgaagaaaagttttttcctcagagcggggttctcatctttgggaagcaaggctcagagaaaacaagtgtggacattgaaaaggtcatgattacagacgaagaggaaatcaggacgaccaatcccgtggctacggagcagtatggttctgtatctaccaacctccagagaggcaacagacaagcagctaccgcagatgtcaacacacaaggcgttcttccaggcatggtctggcaggacagagatgtgtaccttcaggggcccatctgggcaaagattccacacacggacggacattttcacccctctcccctcatgggtggattcggacttaaacaccctcctccacagattctcatcaagaacaccccggtacctgcgaatccttcgaccaccttcagtgcggcaaagtttgcttccttcatcacacagtactccacgggacaggtcagcgtggagatcgagtgggagctgcagaaggaaaacagcaaacgctggaatcccgaagttcagtacacttccaactacaacaagtctgttaatgtggactttactgtggacactaatggcgtgtatacagagcctcgccccattggcaccagatacctgactcgtaatctgtaa

SEQ ID NO: 563 - protein, 735 aa, synthetic construct
  source 1..735: note = Description of Artificial Sequence: Synthetic polypeptide
MAADGYLPDWLEDTLSEGIRQWWKLKPGPPPPKPAERHKDDSRGLVLPGYKYLGPFNGLDKGEPVNEADAAALEHDKAYDRQLDSGDNPYLKYNHADAEFQERLKEDTSFGGNLGRAVFQAKKRVLEPLGLVEEPVKTAPGKKRPVEHSPVEPDSSSGTGKAGQQPARKRLNFGQTGDANSVPDPQPLGQPPAAPSGLGTNTMATGSGAPMADNNEGADGVGNSSGNWHCDSTWMGDRVITTSTRTWALPTYNNHLYKQISSQSGASNDNHYFGYSTPWGYFDFNRFHCHFSPRDWQRLINNNWGFRPKRLKFKLFNIQVKEVTQNDGTTTIANNLTSTVQVFTDSEYQLPYVLGSAHQGCLPPFPADVFMVPQYGYLTLNNGSRAVGRSSFYCLEYFPSQMLRTGNNFTFSYTFEDVPFHSSYAHSQSLDRLMNPLIDQYLYYLSRTDTPSGTTTQSRLQFSQAGASDIRDQSRNWLPGPCYRQQRVSKTSADNNNSEYSWTGATKYHLNGRDSLVNPGPAMASHKDDEEKFFPQSGVLIFGKQGSEKTSVDIEKVMITDEEEIRTTNPVATEQYGSVSTNLQRGNRQAATADVNTQGVLPGMVWQDRDVYLQGPIWAKIPHTDGHFHPSPLMGGFGLKHPPPQILIKNTPVPANPSTTFSAAKFASFITQYSTGQVSVEIEWELQKENSKRWNPEVQYTSNYNKSVNVDFTVDTNGVYTEPRPIGTRYLTRNL

SEQ ID NO: 564 - DNA, 2211 bp, synthetic construct
  source 1..2211: mol_type = other DNA; note = Description of Artificial Sequence: Synthetic polynucleotide
atggctgccgatggttatcttccagattggctcgaggacactctctctgaaggaataagacagtggtggaagctcaaacctggcccaccaccaccaaagcccgcagagcggcataaggacgacagcaggggtcttgtgcttcctgggtacaagtacctcggacccttcaacggactcgacaagggagagccggtcaacgaggcagacgccgcggccctcgagcacgacaaggcctacgaccagcagctcaaagcgggtgacaatccgtacctgcggtataaccacgccgacgccgagtttcaggagcgtctgcaagaagatacgtcttttgggggcaacctcgggcgagcagtcttccaggccaagaagcgggttctcgaacctctcggtctggttgaggaaggcgctaagacggctcctggaaagaaacgtccggtagagcagtcgccacaagagccagactcctcctcgggcatcggcaagacaggccagcagcccgctaaaaagagactcaattttggtcagactggcgactcagagtcagtccccgacccacaacctctcggagaacctccagcaacccccgctgctgtgggacctactacaatggcttcaggcggtggcgcaccaatggcagacaataacgaaggcgccgacggagtgggtaatgcctcaggaaattggcattgcgattccacatggctgggcgacagagtcatcaccaccagcacccgaacatgggccttgcccacctataacaaccacctctacaagcaaatctccagtgcttcgacgggggccagcaacgacaaccactacttcggctacagcaccccctgggggtattttgactttaacagattccactgccacttttcaccacgtgactggcagcgactcatcaacaataactggggattccggcccaagagactcagcttcaagctcttcaacatccaggtcaaggaggtcacgacgaatgatggcgtcacaaccatcgctaataaccttaccagcacggttcaagtcttctcggactcggagtaccagcttccgtacgtcctcggctctgcgcaccagggctgcctccctccgttcccggcggacgtgttcatgattccgcaatacggctacctgacgctcaacaatggcagccaagccgtgggacgttcatccttttactgcctggaatatttcccttctcagatgctgagaacgggcaacaactttaccttcagctacacctttgaggaagtgcctttccacagcagctacgcgcacagccagagcctggaccggctgatgaatcctctcatcgatcaatacctgtattacctgaacagaactcaaaatcagtccggaagtgcccaaaacaaggacttgctgtttagccgtgggtctccagctggcatgtctgttcagcccaaaaactggctacctggaccctgttatcggcagcagcgcgtttctaaaacaaaaacagacaacaacaacagcaattttacctggactggtgcttcaaaatataacctcaatgggcgtgaatccatcatcaaccctggcactgctatggcctcacacaaagacgacgaagacaagttctttcccatgagcggtgtcatgatttttggaaaagagagcgccggagcttcaaacactgcattggacaatgtcatgattacggacgaagaggaaattaaagccactaaccctgtggccaccgaaagatttgggaccgtggcagtcaatttccagagcagcagcacagaccctgcgaccggagatgtgcatgctatgggagcattacctggcatggtgtggcaagatagagacgtgtacctgcagggtcccatttgggccaaaattcctcacacagatggacactttcacccgtctcctcttatgggcggctttggactcaagaacccgcctcctcagatcctcatcaaaaacacgcctgttcctgcgaatcctccggcggagttttcagctacaaagtttgcttcattcatcactcaatactccacaggacaagtgagcgtggaaattgaatgggagctgcagaaagaaaacagcaaacgctggaatcccgaagtgcagtatacatctaactatgcaaaatctgccaacgttgatttcactgtggacaacaatggactttatactgagcctcgccccattggcacccgttacctcacccgtcccctgtaa

SEQ ID NO: 565 - protein, 736 aa, synthetic construct
  source 1..736: note = Description of Artificial Sequence: Synthetic polypeptide
MAADGYLPDWLEDTLSEGIRQWWKLKPGPPPPKPAERHKDDSRGLVLPGYKYLGPFNGLDKGEPVNEADAAALEHDKAYDQQLKAGDNPYLRYNHADAEFQERLQEDTSFGGNLGRAVFQAKKRVLEPLGLVEEGAKTAPGKKRPVEQSPQEPDSSSGIGKTGQQPAKKRLNFGQTGDSESVPDPQPLGEPPATPAAVGPTTMASGGGAPMADNNEGADGVGNASGNWHCDSTWLGDRVITTSTRTWALPTYNNHLYKQISSASTGASNDNHYFGYSTPWGYFDFNRFHCHFSPRDWQRLINNNWGFRPKRLSFKLFNIQVKEVTTNDGVTTIANNLTSTVQVFSDSEYQLPYVLGSAHQGCLPPFPADVFMIPQYGYLTLNNGSQAVGRSSFYCLEYFPSQMLRTGNNFTFSYTFEEVPFHSSYAHSQSLDRLMNPLIDQYLYYLNRTQNQSGSAQNKDLLFSRGSPAGMSVQPKNWLPGPCYRQQRVSKTKTDNNNSNFTWTGASKYNLNGRESIINPGTAMASHKDDEDKFFPMSGVMIFGKESAGASNTALDNVMITDEEEIKATNPVATERFGTVAVNFQSSSTDPATGDVHAMGALPGMVWQDRDVYLQGPIWAKIPHTDGHFHPSPLMGGFGLKNPPPQILIKNTPVPANPPAEFSATKFASFITQYSTGQVSVEIEWELQKENSKRWNPEVQYTSNYAKSANVDFTVDNNGLYTEPRPIGTRYLTRPL

SEQ ID NO: 566 - protein, 735 aa, synthetic construct
  source 1..735: note = Description of Artificial Sequence: Synthetic polypeptide
MAADGYLPDWLEDTLSEGIRQWWKLKPGPPPPKPAERHKDDSRGLVLPGYKYLGPFNGLDKGEPVNEADAAALEHDKAYDRQLDSGDNPYLKYNHADAEFQERLKEDTSFGGNLGRAVFQAKKRVLEPLGLVEEPVKTAPGKKRPVEHSPVEPDSSSGTGKAGQQPARKRLNFGQTGDADSVPDPQPLGQPPAAPSGLGTNTMATGSGAPMADNNEGADGVGNSSGNWHCDSTWMGDRVITTSTRTWALPTYNNHLYKQISSQSGASNDNHYFGYSTPWGYFDFNRFHCHFSPRDWQRLINNNWGFRPKRLKFKLFNIQVKEVTQNDGTTTIANNLTSTVQVFTDSEYQLPYVLGSAHQGCLPPFPADVFMVPQYGYLTLNNGSQAVGRSSFYCLEYFPSQMLRTGNNFTFSYTFEDVPFHSSYAHSQSLDRLMNPLIDQYLYYLSRTDTPSGTTTQSRLQFSQAGASDIRNQSRNWLPGPCYRQQRVSKTSADNNNSEYSWTGATKYHLNGRDSLVNPGPAMASHKDDEEKFFPQSGVLIFGKQGSEKTSVDIEKVMITDEEEIRTTNPVATEQYGSVSTNLQRGNRQAATADVNTQGVLPGMVWQDRDVYLQGPIWAKIPHTDGHFHPSPLMGGFGLKHPPPQILIKNTPVPANPSTTFSAAKFASFITQYSTGQVSVEIEWELQKENSKRWNPEVQYTSNYNKSVNVDFTVDTNGVYSEPRPIGTRYLTRNQ

SEQ ID NO: 567 - DNA, 2208 bp, synthetic construct
  source 1..2208: mol_type = other DNA; note = Description of Artificial Sequence: Synthetic polynucleotide
atggctgccgatggttatcttccagattggctcgaggacactctctctgaaggaataagacagtggtggaagctcaaacctggcccaccaccaccaaagcccgcagagcggcataaggacgacagcaggggtcttgtgcttcctgggtacaagtacctcggacccttcaacggactcgacaagggagagccggtcaacgaggcagacgccgcggccctcgagcacgacaaagcctatgaccggcagctcgacagcggagacaacccgtacctcaagtacaaccacgccgacgcggagtttcaggaacgccttaaagaagatacgtcttttgggggcaacctcggacgagcagtcttccaggcgaaaaagagggttcttgaacctctgggcctggttgaggaacctgttaagacggctccgggaaaaaagaggccggtagagcactctcctgtggagccagactcctcctcgggaaccggaaaggcgggccagcagcctgcaagaaaaagattgaattttggtcagactggagacgcagactcagtacctgacccccagcctctcggacagccaccagcagccccctctggtctgggaactaatacgatggctacaggcagtggcgcaccaatggcagacaataacgagggcgccgacggagtgggtaattcctcgggaaattggcattgcgattccacatggatgggcgacagagtcatcaccaccagcacccgaacctgggccctgcccacctacaacaaccacctctacaaacaaatttccagccaatcaggagcctcgaacgacaatcactactttggctacagcaccccttgggggtattttgacttcaacagattccactgccacttttcaccacgtgactggcaaagactcatcaacaacaactggggattccgacccaagagactcaagttcaagctctttaacattcaagtcaaagaggtcacgcagaatgacggtacgacgacgattgccaataaccttaccagcacggttcaggtgtttactgactcggagtaccagctcccgtacgtcctcggctcggcgcatcaaggatgcctcccgccgttcccagcagacgtcttcatggtgccacagtatggatacctcaccctgaacaacgggagtcaggcagtaggacgctcttcattttactgcctggagtactttccttctcagatgctgcgtaccggtaacaactttaccttcagctacacttttgaggacgttcctttccacagcagctacgctcacagccagagtctggaccgtctcatgaatcctctcatcgaccagtacctgtattacttgagcagaacagacactccaagtggaaccaccacgcagtcaaggcttcagttttctcaggccggagcgagtgacattcggaaccagtctaggaactggcttcctggaccctgttaccgccagcagcgagtatcaaagacatctgcggataacaacaacagtgaatactcgtggactggagctaccaagtaccacctcaatggcagagactctctggtgaatccgggcccggccatggcaagccacaaggacgatgaagaaaagttttttcctcagagcggggttctcatctttgggaagcaaggctcagagaaaacaagtgtggacattgaaaaggtcatgattacagacgaagaggaaatcaggacaaccaatcccgtggctacggagcagtatggttctgtatctaccaacctccagagaggcaacagacaagcagctaccgcagatgtcaacacacaaggcgttcttccaggcatggtctggcaggacagagatgtgtaccttcaggggcccatctgggcaaagattccacacacggacggacattttcacccctctcccctcatgggtggattcggacttaaacaccctcctccacagattctcatcaagaacaccccggtacctgcgaatccttcgaccaccttcagtgcggcaaagtttgcttccttcatcacacagtactccacgggacaggtcagcgtggagatcgagtgggagctgcagaaggaaaacagcaaacgctggaatcccgaagttcagtacacttccaactacaacaagtctgttaatgtggactttactgtggacactaatggcgtgtattcagagcctcgccccattggcaccagatacctgactcgtaatcagtaa

SEQ ID NO: 568 - DNA, 2208 bp, synthetic construct
  source 1..2208: mol_type = other DNA; note = Description of Artificial Sequence: Synthetic polynucleotide
atggctgccgatggttatcttccagattggctcgaggacactctctctgaaggaataagacagtggtggaagctcaaacctggcccaccaccaccaaagcccgcagagcggcataaggacgacagcaggggtcttgtgcttcctgggtacaagtacctcggacccttcaacggactcgacaagggagagccggtcaacgaggcagacgccgcggccctcgagcacgacaaagcctatgaccggcagctcgacagcggagacaacccgtacctcaagtacaaccacgccgacgcggagtttcaggagcgccttaaagaagatacgtcttttgggggcaacctcggacgagcagtcttccaggcgaaaaagagggttcttgaacctctgggcctggttgaggaacctgttaagacggctccgggaaaaaagaggccggtagagcactctcctgtggagccagactcctcctcgggaaccggaaaggcgggccagcagcctgcaagaaaaagattgaattttggtcagactggagacgcagactcagtacctgatccccagcctctcggacagccaccagcagccccctctggtctgggaactaatacgatggctacaggcagtggcgcaccaatggcagacaataacgagggcgccgacggagtgggtaattcctcgggaaattggcattgcgattccacatggatgggcgacagagtcatcaccaccagcacccgaacctgggccctgcccacctacaacaaccacctctacaaacaaatttccagccaatcaggagcctcgaacgacaatcactactttggctacagcaccccttgggggtattttgacttcaacagattccactgccacttttcaccacgtgactggcaaagactcatcaacaacaactggggattccgacccaagagactcaagttcaagctctttaacattcaagtcaaagaggtcacgcagaatgacggtacgacgacgattgccaataaccttaccagcacggttcaggtgtttactgactcggagtaccagctcccgtatgtcctcggctcggcgcatcaaggatgcctcccgccgttcccagcagacgtcttcatggtgccacagtatggatacctcaccctgaacaacgggagtcaggcagtaggacgctcttcattttactgcctggagtactttccttctcagatgctgcgtaccggtaacaactttaccttcagctacacttttgaggacgttcctttccacagcagctacgctcacagccagagtctggaccgtctcatgaatcctctcatcgaccagtacctgtattacttgagcagaacagacactccaagtggaaccaccacgcagtcaaggcttcagttttctcaggccggagcgagtgacattcgggaccagtctaggaactggcttcctggaccctgttaccgccagcagcgagtatcaaagacatctgcggataacaacaacagtgaatactcgtggactggagctaccaagtaccacctcaatggcagagactctctggtgaatccgggcccggccatggcaagccacaaggacgatgaagaaaagttttttcctcagagcggggttctcatctttgggaagcaaggctcagagaaaacaagtgtggacattgaaaaggtcatgattacagacgaagaggaaatcaggacaaccaatcccgtggctacggagcagtatggttctgtatctaccaacctccagagaggcaacagacaagcagctaccgcagatgtcaacacacaaggcgttcttccaggcatggtctggcaggacagagatgtgtaccttcaggggcccatctgggcaaagattccacacacggacggacattttcacccctctcccctcatgggtggattcggacttaaacaccctcctccacagattctcatcaagaacaccccggtacctgcgaatccttcgaccaccttcagtgcggcaaagtttgcttccttcatcacacagtactccacgggacaggtcagcgtggagatcgagtgggagctgcagaaggaaaacagcaaacgctggaatcccgaagttcagtacacttccaactacaacaagtctgttaatgtggactttactgtggacactaatggcgtgtattcagagcctcgccccattggcaccagatacctgactcgtaatctgtaa

SEQ ID NO: 569 - protein, 735 aa, synthetic construct
  source 1..735: note = Description of Artificial Sequence: Synthetic polypeptide
MAADGYLPDWLEDTLSEGIRQWWKLKPGPPPPKPAERHKDDSRGLVLPGYKYLGPFNGLDKGEPVNEADAAALEHDKAYDRQLDSGDNPYLKYNHADAEFQERLKEDTSFGGNLGRAVFQAKKRVLEPLGLVEEPVKTAPGKKRPVEHSPVEPDSSSGTGKAGQQPARKRLNFGQTGDADSVPDPQPLGQPPAAPSGLGTNTMATGSGAPMADNNEGADGVGNSSGNWHCDSTWMGDRVITTSTRTWALPTYNNHLYKQISSQSGASNDNHYFGYSTPWGYFDFNRFHCHFSPRDWQRLINNNWGFRPKRLKFKLFNIQVKEVTQNDGTTTIANNLTSTVQVFTDSEYQLPYVLGSAHQGCLPPFPADVFMVPQYGYLTLNNGSQAVGRSSFYCLEYFPSQMLRTGNNFTFSYTFEDVPFHSSYAHSQSLDRLMNPLIDQYLYYLSRTDTPSGTTTQSRLQFSQAGASDIRDQSRNWLPGPCYRQQRVSKTSADNNNSEYSWTGATKYHLNGRDSLVNPGPAMASHKDDEEKFFPQSGVLIFGKQGSEKTSVDIEKVMITDEEEIRTTNPVATEQYGSVSTNLQRGNRQAATADVNTQGVLPGMVWQDRDVYLQGPIWAKIPHTDGHFHPSPLMGGFGLKHPPPQILIKNTPVPANPSTTFSAAKFASFITQYSTGQVSVEIEWELQKENSKRWNPEVQYTSNYNKSVNVDFTVDTNGVYSEPRPIGTRYLTRNL

SEQ ID NO: 570 - DNA, 2601 bp, synthetic construct
  source 1..2601: mol_type = other DNA; note = Description of Artificial Sequence: Synthetic polynucleotide
ccatcgacgtcagacgcggaagcttcgatcaactacgcggacaggtaccaaaacaaatgttctcgtcacgtgggcatgaatctgatgctgtttccctgcagacaatgcgagagactgaatcagaattcaaatatctgcttcactcacggtgtcaaagactgtttagagtgctttcccgtgtcagaatctcaacccgtttctgtcgtcaaaaaggcgtatcagaaactgtgctacattcatcacatcatgggaaaggtgccagacgcttgcactgcttgcgacctggtcaatgtggacttggatgactgtgtttctgaacaataaatgacttaaaccaggtatgactgccgatggttatcttccagattggctcgaggacaaccttagtgaaggaattcgcgagtggtgggctttgaaacctggagcccctcaacccaaggcaaatcaacaacatcaagacaacgctcgaggtcttgtgcttccgggttacaaataccttggacccggcaacggactcgacaagggggagccggtcaacgcagcagacgcggcggccctcgagcacgacaaggcctacgaccagcagctcaaggccggagacaacccgtacctcaagtacaaccacgccgacgccgagttccaggagcggctcaaagaagatacgtcttttgggggcaacctcgggcgagcagtcttccaggccaaaaagaggcttcttgaacctcttggtctggttgaggaagcggctaagacggctcctggaaagaagaggcctgtagagcagtctcctcaggaaccggactcctccgcgggtattggcaaatcgggtgcacagcccgctaaaaagagactcaatttcggtcagactggcgacacagagtcagtcccagaccctcaaccaatcggagaacctcccgcagccccctcaggtgtgggatctcttacaatggcttcaggtggtggcgcaccagtggcagacaataacgaaggtgccgatggagtgggtagttcctcgggaaattggcattgcgattcccaatggctgggggacagagtcatcaccaccagcacccgaacctgggccctgcccacctacaacaatcacctctacaagcaaatctccaacagcacatctggaggatcttcaaatgacaacgcctacttcggctacagcaccccctgggggtattttgacttcaacagattccactgccacttctcaccacgtgactggcagcgactcatcaacaacaactggggattccggcctaagcaactcaacttcaagctcttcaacattcaggtcaaagaggttacggacaacaatggagtcaagaccatcgccaataaccttaccagcacggtccaggtcttcacggactcagactatcagctcccgtacgtgctcgggtcggctcacgagggctgcctcccgccgttcccagcggacgttttcatgattcctcagtacgggtatctgacgcttaatgatggaagccaggccgtgggtcgttcgtccttttactgcctggaatatttcccgtcgcaaatgctaagaacgggtaacaacttccagttcagctacgagtttgagaacgtacctttccatagcagctacgctcacagccaaagcctggaccgactaatgaatccactcatcgaccaatacttgtactatctctcaaagactattaacggttctggacagaatcaacaaacgctaaaattcagtgtggccggacccagcaacatggctgtccagggaagaaactacatacctggacccagctaccgacaacaacgtgtctcaaccactgtgactcaaaacaacaacagcgaatttgcttggcctggagcttcttcttgggctctcaatggacgtaatagcttgatgaatcctggacctgctatggccagccacaaagaaggagaggaccgtttctttcctttgtctggatctttaatttttggcaaacaaggaactggaagagacaacgtggatgcggacaaagtcatgataaccaacgaagaagaaattaaaactactaacccggtagcaacggagtcctatggacaagtggccacaaaccaccagagtgcccaagcacaggcgcagaccggctgggttcaaaaccaaggaatacttccgggtatggtttggcaggacagagatgtgtacctgcaaggacccatttgggccaaaattcctcacacggacggcaactttcacccttctccgctgatgggagggtttggaatgaagcacccgcctcctcagatcctcatcaaaaacacacctgtacctgcggatcctccaacggccttcaacaaggacaagctgaactctttcatcacccagtattctactggccaagtcagcgtggagatcgagtgggagctgcagaaggaaaacagcaagcgctggaacccggagatccagtacacttccaactattacaagtctaataatgttgaatttgctgttaatactgaaggtgtatatagtgaaccccgccccattggcaccagatacctgactcgtaatctgtaattgcttgttaatcaataaaccgtttaattcgtttcagttgaactgcggcc

SEQ ID NO: 571 - DNA, 2601 bp, synthetic construct
  source 1..2601: mol_type = other DNA; note = Description of Artificial Sequence: Synthetic polynucleotide
ccatcgacgtcagacgcggaagcttcgatcaactacgcggacaggtaccaaaacaaatgttctcgtcacgtgggcatgaatctgatgctgtttccctgcagacaatgcgagagactgaatcagaattcaaatatctgcttcactcacggtgtcaaagactgtttagagtgctttcccgtgtcagaatctcaacccgtttctgtcgtcaaaaaggcgtatcagaaactgtgctacattcatcacatcatgggaaaggtgccagacgcttgcactgcttgcgacctggtcaatgtggacttggatgactgtgtttctgaacaataaatgacttaaaccaggtatggctgccgatggttatcttccagattggctcgaggacaaccttagtgaaggaattcgcgagtggtgggctttgaaacctggagcccctcaacccaaggcaaatcaacaacatcaagacaacgctcgaggtcttgtgcttccgggttacaaataccttggacccggcaacggactcgacaagggggagccggtcaacgcagcagacgcggcggccctcgagcacgacaaggcctacgaccagcagctcaaggccggagacaacccgtacctcaagtacaaccacgccgacgccgagttccaggagcggctcaaagaagatacgtcttttgggggcaacctcgggcgagcagtcttccaggccaaaaagaggcttcttgaacctcttggtctggttgaggaagcggctaagacggctcctggaaagaagaggcctgtagagcagtctcctcaggaaccggactcctccgcgggtattggcaaatcgggtgcacagcccgctaaaaagagactcaatttcggtcagactggcgacacagagtcagtcccagaccctcaaccaatcggagaacctcccgcagccccctcaggtgtgggatctcttacaatggcttcaggtggtggcgcaccagtggcagacaataacgaaggtgccgatggagtgggtagttcctcgggaaattggcattgcgattcccaatggctgggggacagagtcatcaccaccagcacccgaacctgggccctgcccacctacaacaatcacctctacaagcaaatctccaacagcacatctggaggatcttcaaatgacaacgcctacttcggctacagcaccccctgggggtattttgacttcaacagattccactgccacttctcaccacgtgactggcagcgactcatcaacaacaactggggattccggcctaagcgactcaacttcaagctcttcaacattcaggtcaaagaggttacggacaacaatggagtcaagaccatcgccaataaccttaccagcacggtccaggtcttcacggactcagactatcagctcccgtacgtgctcgggtcggctcacgagggctgcctcccgccgttcccagcggacgttttcatgattcctcagtacgggtatctgacgcttaatgatggaagccaggccgtgggtcgttcgtccttttactgcctggaatatttcccgtcgcaaatgctaagaacgggtaacaacttccagttcagctacgagtttgagaacgtacctttccatagcagctacgctcacagccaaagcctggaccgactaatgaatccactcatcgaccaatacttgtactatctctcaaagactattaacggttctggacagaatcaacaaacgctaaaattcagtgtggccggacccagcaacatggctgtccagggaagaaactacatacctggacccagctaccgacaacaacgtgtctcaaccactgtgactcaaaacaacaacagcgaatttgcttggcctggggcttcttcttgggctctcaatggacgtaatagcttgatgaatcctggacctgctatggccagccacaaagaaggagaggaccgtttctttcctttgtctggatctttaatttttggcaaacaaggaactggaagagacaacgtggatgcggacaaagtcatgataaccaacgaagaagaaattaaaactactaacccggtagcaacggagtcctatggacaagtggccacaaaccaccagagtgcccaagcacaggcgcagaccggctgggttcaaaaccaaggaatacttccgggtatggtttggcaggacagagatgtgtacctgcaaggacccatttgggccaaaattcctcacacgggcggcaactttcacccttctccgctgatgggagggtttggaatgaagcacccgcctcctcagatcctcatcaaaaacacacctgtacctgcggatcctccaacggccttcaacaaggacaagctgaactctttcatcacccagtattctactggccaagtcagcgtggagatcgagtgggagctgcagaaggaaaacagcaagcgctggaacccggagatccagtacacttccaactattacaagtctaataatgttgaatttgctgttaatactggaggtgtatatagtgaaccccgccccattggcaccagatacctgactcgtaatctgtaattgcttgttaatcaataaaccgtttaattcgtttcagttgaactgcggcc

SEQ ID NO: 572 - DNA, 2601 bp, synthetic construct
  source 1..2601: mol_type = other DNA; note = Description of Artificial Sequence: Synthetic polynucleotide
ccatcgacgtcagacgcggaagcttcgatcaactacgcggacaggtaccaaaacaaatgttctcgtcacgtgggcatgaatctgatgctgtttccctgcagacaatgcgagagactgaatcagaattcaaatatctgcttcactcacggtgtcaaagactgtttagagtgctttcccgtgtcagaatctcaacccgtttctgtcgtcaaaaaggcgtatcagaaactgtgctacattcatcacatcatgggaaaggtgccagacgcttgcactgcttgcgacctggtcaatgtggactcggatgactgtgtttctgaacaataaatgacttaaaccaggtatggctgccgatggttatcttccagattggctcgaggacaaccttagtgaaggaattcgcgagtggtgggctttgaaacctggagcccctcaacccaaggcaaatcaacaacatcaagacaacgctcgaggtcttgtgcttccgggttacaaataccttggacccggcaacggactcgacaagggggagccggtcaacgcagcagacgcggcggccctcgagcacgacaaggcctacgaccagcagctcaaggccggagacaacccgtacctcaagtacaaccacgccgacgccgagttccaggagcggctcaaagaagatacgtcttttgggggcaacctcgggcgagcagtcttccaggccaaaaagaggcttcttgaacctcttggtctggttgaggaagcggctaagacggctcctggaaagaagaggcctgtagagcagtctcctcaggaaccggactcctccgcgggtattgacaaatcgggtgcacagcccgctaaaaagagactcaatttcggtcagactggcgacacagagtcagtcccagaccctcaaccaatcggagaacctcccgcagccccctcaggtgtgggatctcttacaatggcttcaggtggtggcgcaccagtggcagacaataacgaaggtgccgatggagtgggtagttcctcgggaaattggcattgcgattcccaatggctgggggacagagtcatcaccaccagcacccgaacctgggccctgcccacctacaacaatcacctctacaagcaaatctccaacagcacatctggaggatcttcaaatgacaacgcctacttcggctacagcaccccctgggggtattttgacttcaacagattccactgccacttctcaccacgtgactggcagcgactcatcaacaacaactggggattccggcctaagcgactcaacttcaagctcttcaacattcaggtcaaagaggttacggacaacaatggagtcaagaccatcgccaataaccttaccagcacggtccaggtcttcacggactcggactatcagctcccgtacgtgctcgggtcggctcacgagggctgcctcccgccgttcccagcggacgttttcatgattcctcagtacgggtatctgacgcttaatgatggaagccaggccgtgggtcgttcgtccttttactgcctggaatatttcccgtcgcaaatgctaagaacgggtaacaacttccagttcagctacgagtttgagaacgtacctttccatagcagctacgctcacagccaaagcctggaccgactaatgaatccactcatcgaccaatacttgtactatctctcaaagactattaacggttctggacagaatcaacaaacgctaaaattcagtgtggccggacccagcaacatggctgtccagggaagaaactacatacctggacccagctaccgacaacaacgtgtctcaaccactgtgactcaaaacaacaacagcgaatttgcttggcctggagcttcttcttgggctctcaatggacgtaatagcttgatgaatcctggacctgctatggccagccacaaagaaggagaggaccgtttctttcctttgtctggatctttaatttttggcaaacaaggaactggaagagacaacgtggatgcggacaaagtcatgataaccaacgaagaagaaattaaaactactaacccggtagcaacggagtcctatggacaagtggccacaaaccaccagagtgcccaagcacaggcgcagaccggctgggttcaaaaccaaggaatacttccgggtatggtttggcaggacagagatgtgtacctgcaaggacccatttgggccaaaattcctcacacggacggcaactttcacccttctccgctgatgggagggtttggaatgaagcacccgcctcctcagatcctcatcaaaaacacacctgtacctgcggatcctccaacggccttcaacaaggacaagctgaactctttcatcacccagtattctactggccaagtcagcgtggagatcgagtgggagctgcagaaggaaaacagcaagcgctggaacccggagatccagtacacttccaactattacaagtctaataatgttgaatttgctgttaatactgaaggtgtatatagtgaaccccgccccattggcaccagatacctgactcgtaatctgtaattgcttgttaatcaataaaccgtttaattcgtttcagttgaactgcggcc

SEQ ID NO: 573 - DNA, 2601 bp, synthetic construct
  source 1..2601: mol_type = other DNA; note = Description of Artificial Sequence: Synthetic polynucleotide
ccatcgacgtcagacgcggaagcttcgatcaactacgcggacaggtaccaaaacaaatgttctcgtcacgtgggcatgaatctgatgctgtttccctgcagacaatgcgagagactgaatcagaattcaaatatctgcttcactcacggtgtcaaagactgtttagagtgctttcccgtgtcagaatctcaacccgtttctgtcgtcaaaaaggcgtatcagaaactgtgctacattcatcacatcatgggaaaggtgccagacgcttgcactgcttgcgacctggtcaatgtggacttggatgactgtgtttctgaacaataaatgacttaaaccaggtatggctgccgatggttatcttccagattggctcgaggacaaccttagtgaaggaattcgcgagtggtgggctttgaaacctggagcccctcaacccaaggcaaatcaacaacatcaagacaacgctcgaggtcttgtgcttccgggttacaaataccttggacccggcaacggactcgacaagggggagccggtcaacgcagcagacgcggcggccctcgagcacgacaaggcctacgaccagcagctcaaggccggagacaacccgtacctcaagtacaaccacgccgacgccgagttccaggagcggctcaaagaagatacgtcttttgggggcaacctcgggcgagcagtcctccaggccaaaaagaggcttcttgaacctcttggtctggttgaggaagcggctaagacggctcctggaaagaagaggcctgtagagcagtctcctcaggaaccggactcctccgcgggtattggcaaatcgggtgcacagcccgctaaaaagagactcaatttcggtcagactggcgacacagagtcagtcccagaccctcaaccaatcggagaacctcccgcagccccctcaggtgtgggatctcttacaatggcttcaggtggtggcgcaccagtggcagacaataacgaaggtgccgatggagtgggtagttcctcgggaaattggcattgcgattcccaatggctgggggacagagtcatcaccaccagcacccgaacctgggccctgcccacctacaacaatcacctctacaagcaaatctccaacagcacatctggaggatcttcaaatgacaacgcctacttcggctacagcaccccctgggggtattttgacttcaacagattccactgccacttctcaccacgtgactggcagcgactcatcaacaacaactggggattccggcctaagcgactcaacttcaagctcttcaacattcaggtcaaagaggttacggacaacaatggagtcaagaccatcgccaataaccttaccagcacggtccaggtcttcacggactcagactatcagctcccgtacgtgctcgggtcggctcacgagggctgcctcccgccgttcccagcggacgttttcatgattcctcagtacgggtatctgacgcttaatgatggaagccaggccgtgggtcgttcgtccttttactgcctggaatatttcccgtcgcaaatgctaagaacgggtaacaacttccagttcagctacgagtttgagaacgtacctttccatagcagctacgctcacagccaaagcctggaccgactaatgaatccactcatcgaccaatacttgtactatctctcaaagactattaacggttctggacagaatcaacaaacgctaaaattcagtgtggccggatccagcaacatggctgtccagggaagaaactacatacctggacccagctaccgacaacaacgtgtctcaaccactgtgactcaaaacaacaacagcgaatttgcttggcctggagcttcttcttgggctctcaatggacgtaatagcttgatgaatcctggacctgctatggccagccacaaagaaggagaggaccgtttctttcctttgtctggatctttaatttttggcaaacaaggaactggaagagacaacgtggatgcggacaaagtcatgataaccaacgaagaagaaattaaaactactaacccggtagcaacggagtcctatggacaagtggccacaaaccaccagagtgcccaagcacaggcgcagaccggctgggttcaaaaccaaggaatacttccaggtatggtttggcaggacagagatgtgtacctgcaaggacccatttgggccaaaattcctcacacggacggcaactttcacccttctccgctgatgggagggtttggaatgaagcacccgcctcctcagatcctcatcaaaaacacacctgtacctgcggatcctccaacggccttcaacaaggacaagctgaactctttcatcacccagtattctactggccaagtcagcgtggagatcgagtgggagctgcagaaggaaaacagcaagcgctggaacccggagatccagtacacttccaactattacaagtctaataatgttgaatttgctgttaatactgaaggtgtatatagtgaaccccgccccattggcaccagatacctgactcgtaatctgtaattgcttgttaatcaataaaccgtttaattcgtttcagttgaactgcggcc

SEQ ID NO: 574 - DNA, 2601 bp, synthetic construct
  source 1..2601: mol_type = other DNA; note = Description of Artificial Sequence: Synthetic polynucleotide
ccatcgacgtcagacgcggaagcttcgatcaactacgcggacaggtaccaaaacaaatgttctcgtcacgtgggcatgaatctgatgctgtttccctgcagacaatgcgagagactgaatcagaattcaaatatctgcttcactcacggtgtcaaagactgtttagagtgctttcccgtgtcagaatctcaacccgtttctgtcgtcaaaaaggcgtatcagaaactgtgctacattcatcacatcatgggaaaggtgccagacgcttgcactgcttgcgacctggtcaatgtggacttggatgactgtgtttctgaacaataaatgacttaaaccaggtatggctgccgatggttatcttccagattggctcgaggacaaccttagtgaaggaattcgcgagtggtgggctttgaaacctggagcccctcaacccaaggcaaatcaacaacatcaagacaacgctcgaggtcttgtgcttccgggttacaaataccttggacccggcaacggactcgacaagggggagccggtcaacgcagcagacgcggcggccctcgagcacgacagggcctacgaccagcagctcaaggccggagacaacccgtacctcaagtacaaccacgccgacgccgagttccaggagcggctcaaagaagatacgtcttttgggggcaacctcgggcgagcagtcttccaggccaaaaagaggcttcttgaacctcttggtctggttgaggaagcggctaagacggctcctggaaagaagaggcctgtagagcagtctcctcaggaaccggactcctccgcgggtattggcaaatcgggtgcacagcccgctaaaaagagactcaatttcggtcagactggcgacacagagtcagtcccagaccctcaaccaatcggagaacctcccgcagccccctcaggtgtgggatctcttacaatggcttcaggtggtggcgcaccagtggcagacaataacgaaggtgccgatggagtgggtagttcctcgggaaattggcattgcgattcccaatggctgggggacagagtcatcaccaccagcacccgaacctgggccctgcccacctacaacaatcacctctacaagcaaatctccaacagcacatctggaggatcttcaaatgacaacgcctacttcggctacagcaccccctgggggtattttgacttcaacagattccactgccacttctcaccacgtgactggcagcgactcatcaacaacaactggggattccggcctaagcgactcaacttcaagctcttcaacattcaggtcaaagaggttacggacaacaatggagtcaagaccatcgccaataaccttaccagcacggtccaggtcttcacggactcagactatcagctcccgtacgtgctcgggtcggctcacgagggctgcctcccgccgttcccagcggacgttttcatgattcctcagtacgggtatctgacgcttaatgatggaagccaggccgtgggtcgttcgtccttttactgcctggaatatttcccgtcgcaaatgctaagaacgggtaacaacttccagttcagctacgagtttgagaacgtacctttccatagcagctacgctcacagccaaagcctggaccgactaatgaatccactcatcgaccaatacttgtactatctctcaaagactattaacggttctggacagaatcaacaaacgctaaaattcagtgtggccggacctagcaacatggctgtccagggaagaaactacatacctggacccagctaccgacaacaacgtgtctcaaccactgtgactcaaaacaacaacagcgaatttgcttggcctggagcttcttcttgggctctcaatggacgtaatagcttgatgaatcctggacctgctatggccagccacaaagaaggagaggaccgtttctttcctttgtctggatctttaatttttggcaaacaaggaactggaagagacaacgtggatgcggacaaagtcatgataaccaacgaagaagaaattaaaactactaacccggtagcaacggagtcctatggacaagtggccacaaaccaccagagtgcccaagcacaggcgcagaccggctgggttcaaaaccaaggaatacttccgggtatggtttggcaggacagagatgtgtacctgcaaggacccatttgggccaaaattcctcacacggacggcaactttcacccttctccgctgatgggagggtttggaatgaagcacccgcctcctcagatcctcatcaaaaacacacctgtacctgcggatcctccaacggccttcaacaaggacaagctgaactctttcatcacccagtattctactggccaagtcagcgtggagatcgagtgggagctgcagaagaaaaacagcaagcgctggaacccggagatccagtacacttccaactattacaagtctaataatgttgaatttgctgttaacactgaaggtgtatatagtgaaccccgccccattggcaccagatacctgactcgtaatctgtaattgcttgttaatcaataaaccgtttaattcgtttcagttgaactgcggcc

SEQ ID NO: 575 - DNA, 2601 bp, synthetic construct
  source 1..2601: mol_type = other DNA; note = Description of Artificial Sequence: Synthetic polynucleotide
ccatcgacgtcagacgcggaagcttcgatcaactacgcggacaggtaccaaaacaaatgttctcgtcacgtgggcatgaatctgatgctgtttccctgcagacaatgcgagagactgaatcagaattcaaatatctgcttcactcacggtgtcaaagactgtttagagtgctttcccgtgtcagaatctcaacccgtttctgtcgtcaaaaaggcgtatcagaaactgtgctacattcatcacatcatgggaaaggtgccagacgcttgcactgcttgcgacctggtcaatgtggacttggatgactgtgtttctgaacaataaatgacttaaaccaggtatggctgccgatggttatcttccagattggctcgaggacaaccttagtgaaggaattcgcgagtggtgggctttgaaacctggagcccctcaacccaaggcaaatcaacaacatcaagacaacgctcgaggtcttgtgcttccgggttacaaataccttggacccggcaacggactcgacaagggggagccggtcaacgcagcagacgcggcggccctcgagcacgacaaggcctacgaccagcagctcaaggccggagacaacccgtacctcaagtacaaccacgccgacgccgagttccaggagcggctcaaagaagatacgtcttttgggggcaacctcgggcgagcagtcttccaggccaaaaagaggcttcttgaacctcttggtctggttgaggaagcggctaagacggctcctggaaagaagaggcctgtagagcagtctcctcaggaaccggactcctccgcgggtattggcaaatcgggtgcacagcccgctaaaaagagactcaatttcggtcagactggcgacacagagtcagtcccagaccctcaaccaatcggagaacctcccgcagccccctcaggtgtgggatctcttacaatggcttcaggtggtggcgcaccagtggcagacaataacgaaggtgccgatggagtgggtagttcctcgggaaattggcattgcgattcccaatggctgggggacagagtcatcaccaccagcacccgaacctgggccctgcccacctacaacaatcacctctacaagcaaatctccaacagcacatctggaggatcttcaaatgacaacgcctacttcggctacagcaccccctgggggtattttgacttcaacagattccactgccacttctcaccacgtgactggcagcgactcatcaacaacaactggggattccggcctaagcgactcaacttcaagctcttcaacattcaggtcaaagaggttacggacaacaatggagtcaagaccatcgccaataaccttaccagcacggtccaggtcttcacggactcagactatcagctcccgtacgtgctcgggtcggctcacgagggctgcctcccgccgttcccagcggacgttttcatgattcctcagtacgggtatctgacgcttaatgatggaagccaggccgtgggtcgttcgtccttttactgcctggaatatttcccgtcgcaaatgctaagaacgggtaacaacttccagttcagctacgagtttgagaacgtacctttccatagcagctacgctcacagccaaagcctggaccgactaatgaatccactcatcgaccaatacttgtactatctctcaaagactattaacggttctggacagaatcaacaaacgctaaaattcagtgtggccggacccagcaacatggctgtccagggaagaaactacatacctggacccagctaccgacaacaacgtgtctcaaccactgtgactcaaaacaacaacagcgaatttgcttggcctggagcttcttcttgggctctcaatggacgtaatagcttgatgaatcctggacctgctatggccagccacaaagaaggagaggaccgtttctttcctttgtctggatctttaatttttggcaaacaaggaactggaagagacaacgtggatgcggacaaagtcatgataaccaacgaagaagaaattaaaactactaacccggtagcaacggagtcctatggacaagtggccacaaaccaccagagtgcccaagcacgggcgcagaccggctgggttcaaaaccaaggaatacttccgggtatggtttggcaggacagagatgtgtacctgcaaggacccatttgggccaaaattcctcacacggacggcaactttcacccttctccgctgatgggagggtttggaatgaagcacccgcctcctcagatcctcatcaaaaacacacctgtacctgcggatcctccaacggccttcaacaaggacaagctgaactctttcatcacccagtattctactggccaagtcagcgtggagatcgagtgggagctgcagaaggaaaacagcaagcgctggaacccggagatccagtacacttccaactattacaagtctaataatgttgaatttgctgttaatactgaaggtgtatatagtgaaccccgccccattggcaccagatacctgactcgtaatctgtaattgcttgttaatcaataaaccgtttaattcgtttcagttgaactgcggcc

SEQ ID NO: 576 - DNA, 2601 bp, synthetic construct
  source 1..2601: mol_type = other DNA; note = Description of Artificial Sequence: Synthetic polynucleotide
ccatcgacgtcagacgcggaagcttcgatcaactacgcggacaggtaccaaaacaaatgttctcgtcacgtgggcatgaatctgatgctgtttccctgcagacaatgcgagagactgaatcagaattcaaatatctgcttcactcacggtgtcaaagactgtttagagtgctttcccgtgtcagaatctcaacccgtttctgtcgtcaaaaaggcgtatcagaaactgtgctacattcatcacatcatgggaaaggtgccagacgcttgcactgcttgcgacctggtcaatgtggacttggatgactgtgtttctgaacaataaatgacttaaaccaggtatggctgccgatggttatcttccagattggctcgaggacaaccttagtgaaggaattcgcgagtggtgggctttgaaacctggagcccctcaacccaaggcaaatcaacaacatcaagacaacgctcgaggtcttgtgcttccgggttacaaataccttggacccggcaacggactcgacaagggggagccggtcaacgcagtagacgcggcggccctcgagcacgacaaggcctacgaccagcagctcaaggccggagacaacccgtacctcaagtacaaccacgccgacgccgagttccaggagcggctcaaagaagatacgtcttttgggggcaacctcgggcgagcagtcttccaggccaaaaagaggcttcttgaacctcttggtctggttgaggaagcggctaagacggctcctggaaagaagaggcctgtagagcagtctcctcaggaaccggactcctccgcgggtattggcaaatcgggtgcacagcccgctaaaaagagactcaatttcggtcagactggcgacacagagtcagtcccagaccctcaaccaatcggagaacctcccgcagccccctcaggtgtgggatctcttacaatggcttcaggtggtggcgcaccagtggcagacaataacgaaggtgccgatggagtgggtagttcctcgggaaattggcattgcgattcccaatggctgggggacagagtcatcaccaccagcacccgaacctgggccctgcccacctacaacaatcacctctacaagcaaatctccaacagcacatctggaggatcttcaaatgacaacgcctacttcggctacagcaccccctgggggtattttgacttcaacagattccactgccacttctcaccacgtgactggcagcgactcatcaacaacaactggggatttcggcctaagcgactcaacttcaagctcttcaacattcaggtcaaagaggttacggacaacaatggagtcaagaccatcgccaataaccttaccagcacggtccaggtcttcacggactcagactatcagctcccgtacgtgctcgggtcggctcacgagggctgcctcccgccgttcccagcggacgttttcatgattcctcagtacgggtatctgacgcttaatgatggaagccaggccgtgggtcgttcgtccttttactgcctggaatatttcccgtcgcaaatgctaagaacgggtaacaacttccagttcagctacgagtttgagaacgtacctttccatagcagctacgctcacagccaaagcctggaccgactaatgaatccactcatcgaccaatacttgtactatctctcaaagactattaacggttctggacagaatcaacaaacgctaaaattcagtgtggccggacccagcaacatggctgtccagggaagaaactacatacctggacccagctaccgacaacaacgtgtctcaaccactgtgactcaaaacaacaacagcgaatttgcttggcctggagcttcttcttgggctctcaatggacgtaatagcttgatgaatcctggacctgctatggccagccacaaagaaggagaggaccgtttctttcctttgtctggatctttaatttttggcaaacaaggaactggaagagacaacgtggatgcggacaaagtcatgataaccaacgaagaagaaattaaaactactaacccggtagcaacggagtcctatggacaagtggccacaaaccaccagagtgcccaagcacaggcgcagaccggctgggttcaaaaccaaggaatacttccgggtatggtttggcaggacagagatgtgtacctgcaaggacccatttgggccaaaattcctcacacggacggcaactttcacccttctccgctgatgggagggtttggaatgaagcacccgcctcctcagatcctcatcaaaaacacacctgtacctgcggatcctccaacggccttcaacaaggacaagctgaactctttcatcacccagtattctactggccaagtcagcgtggagatcgagtgggagctgcagaaggaaaacagcaagcgctggaacccggagatccagtacacttccaactattacaagtctaataatgttgaatttgctgttaatactgaaggtgtatatagtgaaccccgccccattggcaccagatacctgactcgtaatctgtaattgcttgttaatcaataaaccgtttaattcgtttcagttgaactgcggcc

SEQ ID NO: 577 - DNA, 2580 bp, synthetic construct
  source 1..2580: mol_type = other DNA; note = Description of Artificial Sequence: Synthetic polynucleotide
ccatcgacgtcagacgcggaagcttcgatcaactacgcggacaggtaccaaaacaaatgttctcgtcacgtgggcatgaatctgatgctgtttccctgcagacaatgcgagagactgaatcagaattcaaatatctgcttcactcacggtgtcaaagactgtttagagtgctttcccgtgtcagaatctcaacccgtttctgtcgtcaaaaaggcgtatcagaaactgtgctacattcatcacatcatgggaaaggtgccagacgcttgcactgcttgcgacctggtcaatgtggacttggatgactgtgtttctgaacaataaatgacttaaaccaggtatggctgccgatggttatcttccagattggctcgaggacaaccttagtgaaggaattcgcgagtggtgggctttgaaacctggagcccctcaacccaaggcaaatcaacaacatcaagacaacgctcgaggtcttgtgcttccgggttacaaataccttggacccggcaacggactcgacaagggggagccggtcaacgcagcagacgcggcggccctcgagcacgacaaggcctacgaccagcagctcaaggccggagacaacccgtacctcaagtacaaccacgccgacgccgagttccaggagcggctcaaagaagatacgtcttttgggggcaacctcgggcgagcagtcttccaggccaaaaagaggcttcttgaacctcttggtctggttgaggaagcggctaagacggctcctggaaagaagaggcctgtagagcagtctcctcgggaaccggactcctccgcgggtattggcaaatcgggtgcacagcccgctaaaaagagactcaatttcggtcagactggcgacacagagtcagtcccagaccctcaaccaatcggagaacctcccgcagccccctcaggtgtgggatctcttacaatggcttcaggtggtggcgcaccagtggcagacaataacgaaggtgccgatggagtgggtagttcctcgggaaattggcattgcgattcccaatggctgggggacagagtcatcaccaccagcacccgaacctgggccctgcccacctacaacaatcacctctacaagcaaatctccaacagcacatctggaggatcttcaaatgacaacgcctacttcggctacagcaccccctgggggtattttgacttcaacagattccactgccacttctcaccacgtgactggcagcgactcatcaacaacaactggggattccggcctaagcgactcaacttcaagctcttcaacattcaggtcaaagaggttacggacaacaatggagtcaagaccatcgccaataaccttaccagcacggtccaggtcttcacggactcagactatcagctcccgtacgtgctcgggtcggctcacgagggctgcctcccgccgttcccagcggacgttttcatgattcctcagtacgggtatctgacgcttaatgatggaagccaggccgtgggtcgttcgtccttttactgcctggaatatttcccgtcgcaaatgctaagaacgggtaacaacttccagttcagctacgagtttgagaacgtacctttccatagcagctacgctcacagccaaagcctggaccgactaatgaatccactcatcgaccaatacttgtactatctctcaaagactattaacggttctggacagaatcaacaaacgctaaaattcagtgtggccggacccagcaacatggctgtccagggaagaaactacatacctggacccagctaccgacaacaacgtgtctcaaccactgtgactcaaaacaacaacagcgaatttgcttggcctggagcttcttcttgggctctcaatggacgtaatagcttgatgaatcctggacctgctatggccagccacaaagaaggagaggaccgtttctttcctttgtctggatctttaatttttggcaaacaaggaactggaagagacaacgtggatgcggacaaagtcatgataaccaacgaagaagaaattaaaactactaacccggtagcaacggagtcctatggacaagtggccacaaaccaccagagtgcccaagcacaggcgcagaccggctgggttcaaaaccaaggaatacttccgggtatggtttggcaggacagagatgtgtacctgcaaggacccatttgggccaaaattcctcacacggacggcaactttcacccttctccgctgatgggagggtttggaatgaagcacccgcctcctcagatcctcatcaaaaacacacctgtacctgcggatcctccaacggccttcaacaaggacaagctgaactctttcatcacccagtattctactggccaagtcagcgtggagatcgagtgggaactgcagaaggaaaacagcaagcgctggaacccggagatccagtacacttccaactattacaagtctaataatgttgaatttgctgttaatactgaaggtgtatatagtgaaccccgccccattggcaccagatacctgactcgtaatctgtaattgcttgttaatcaataaaccgtttaatt

SEQ ID NO: 578 - DNA, 2601 bp, synthetic construct
  source 1..2601: mol_type = other DNA; note = Description of Artificial Sequence: Synthetic polynucleotide
ccatcgacgtcagacgcggaagcttcgatcaactacgcggacaggtaccaaaacaaatgttctcgtcacgtgggcatgaatctgatgctgtttccctgcagacaatgcgagagactgaatcagaattcaaatatctgcttcactcacggtgtcaaagactgtttagagtgctttcccgtgtcagaatctcaacccgtttctgtcgtcaaaaaggcgtatcagaaactgtgctacattcatcacatcatgggaaaggtgccagacgcttgcactgcttgcgacctggtcaatgtggacttggatgactgtgtttctgaacaataaatgacttaaaccaggtatggctgccgatggttatcttccagattggctcgaggacaaccttagtgaaggaattcgcgagtggtgggctttgaaacctggagcccctcaacccaaggcaaatcaacaacatcaagacaacgctcgaggtcttgtgcttccgggttacaaataccttggacccggcaacggactcgacaagggggagccggtcaacgcagcagacgcggcggccctcgagcacgacaaggcctacgaccagcagctcaaggccggagacaacccgtacctcaagtacaaccacgccgacgccgagttccaggagcggctcaaagaagatacgtcttttgggggcaacctcgggcgagcagtctttcaggccaaaaagaggcttcttgaacctcttggtctggttgaggaagcggctaagacggctcctggaaagaagaggcctgtagagcagtctcctcaggaaccggactcctccgcgggtattggcaaatcgggtgcacagcccgctaaaaagagactcaatttcggtcagactggcgacacagagtcagtcccagaccctcaaccaatcggagaacctcccgcagccccctcaggtgtgggatctcttacaatggcttcatgtggtggcgcaccagtggcagacaataacgaaggtgccgatggagtgggtagttcctcgggaaattggcattgcgattcccaatggctgggggacagagtcatcaccaccagcacccgaacctgggccctgcccacctacaacaatcacctctacaagcaaatctccaacagcacatctggaggatcttcaaatgacaacgcctacttcggctacagcaccccctgggggtattttgacttcaacagattccactgccacttctcaccacgtgactggcagcgactcatcaacaacaactggggattccggcctaagcgactcaacttcaagctcttcaacattcaggtcaaagaggttacggacaacaatggagtcaagaccatcgccaataaccttaccagcacggtccaggtcttcacggactcagactatcagctcccgtacgtgctcgggtcggctcacgagggctgcctcccgccgttcccagcggacgttttcatgattcctcagtacgggtatctgacgcttaatgatggaagccaggccgtgggtcgttcgtccttttactgcctggaatatttcccgtcgcaaatgctaagaacgggtaacaacttccagttcagctacgagtttgagaacgtacctttccatagcagctacgctcacagccaaagcctggaccgactaatgaatccactcatcgaccaatacttgtactatctctcaaagactattaacggttctggacagaatcaacaaacgctaaaattcagtgtggccggacccagcaacatggctgtccagggaagaaactacatacctggacccagctaccgacaacaacgtgtctcaaccactgtgactcaaaacaacaacagcgaatttgcttggcctggagcttcttcttgggctctcaatggacgtaatagcttgatgaatcctggacctgctatggccagccacaaagaaggagaggaccgtttctttcctttgtctggatctttaatttttggcaaacaaggaactggaagagacaacgtggatgcggacaaagtcatgataaccaacgaagaagaaattaaaactactaacccggtagcaacggagtcctatggacaagtggccacaaaccaccagagtgcccaagcacaggcgcagaccggctgggttcaaaaccaaggaatacttccgggtatggtttggcaggacagagatgtgtacctgcaaggacccatttgggccaaaattcctcacacggacggcaactttcacccttctccgctgatgggagggtttggaatgaagcacccgcctcctcagatcctcatcaaaaacacacctgtacctgcggatcctccaacggccttcaacaaggacaagctgaactctttcatcacccagtattctactggccaagtcagcgtggagatcgagtgggagctgcagaaggaaaacagcaagcgctggaacccggagatccagtacacttccaactattacaagtctaataatgttgaatttgctgttaatactgaaggtgtatatagtgaaccccgccccattggcaccagatacctgactcgtaatctgtaattgcttgttaatcaataaaccgtttaattcgtttcagttgaactgcggcc

SEQ ID NO: 579 - DNA, 2601 bp, synthetic construct
  source 1..2601: mol_type = other DNA; note = Description of Artificial Sequence: Synthetic polynucleotide
ccatcgacgtcagacgcggaagcttcgatcaactacgcggacaggtaccaaaacaaatgttctcgtcacgtgggcatgaatctgatgctgtttccctgcagacaatgcgagagactgaatcagaattcaaatatctgcttcactcacggtgtcaaagactgtttagagtgctttcccgtgtcagaatctcaacccgtttctgtcgtcaaaaaggcgtatcagaaactgtgctacattcatcacatcatgggaaaggtgccagacgcttgcactgcttgcgacctggtcaatgtggacttggatgactgtgtttctgaacaataaatgacttaaaccaggtatggctgccgatggttatcttccagattggctcgaggacaaccttagtgaaggaattcgcgagtggtgggctttgaaacctggagcccctcaacccaaggcaaatcaacaacatcaagacaacgctcgaggtcttgtgcttccgggttacaaataccttggacccggcaacggactcgacaagggggagccgatcaacgcagcagacgcggcggccctcgagcacgacaaggcctacgaccagcagctcaaggccggagacaacccgtacctcaagtacaaccacgccgacgccgagttccaggagcggctcaaagaagatacgtcttttgggggcaacctcgggcgagcagtcttccaggccaaaaagaggcttcttgaacctcttggtctggttgaggaagcggctaagacggctcctggaaagaagaggcctgtagagcagtctcctcaggaaccggactcctccgcgggtattggcaaatcgggtgcacagcccgctaaaaagagactcaatttcggtcagactggcgacacagagtcagtcccagaccctcaaccaatcggagaacctcccgcagccccctcaggtgtgggatctcttacaatggcttcaggtggtggcgcaccagtggcagacaataacgaaggtgccgatggagtgggtagttcctcgggaaattggcattgcgattcccaatggctgggggacagagtcatcaccaccagcacccgaacctgggccctgcccacctacaacaatcacctctacaagcaaatctccaacagcacatctggaggatcttcaaatgacaacgcctacttcggctacagcaccccctgggggtattttgacttcaacagattccactgccacttctcaccacgtgactggcagcgactcatcaacaacaactggggattccggcctaagcgactcaacttcaagctcttcaacattcaggtcaaagaggttacggacaacaatggagtcaagaccatcgccaataaccttaccagcacggtccaggtcttcacggactcagactatcagctcccgtacgtgctcgggtcggctcacgagggctgcctcccgccgttcccagcggacgttttcatgattcctcagtacgggtatctgacgcttaatgatggaagccaggccgtgggtcgttcgtccttttactgcctggaatatttcccgtcgcaaatgctaagaacgggtaacaacttccagttcagctacgagtttgagaacgtacctttccatagcagctacgctcacagccaaagcctggaccgactaatgaatccactcatcgaccaatacttgtactatctctcaaagactattaacggttctggacagaatcaacaaacgctaaaattcagtgtggccggacccagcaacatggctgtccagggaagaaactacatacctggacccagctaccgacaacaacgtgtctcaaccactgtgactcaaaacaacaacagcgaatttgcttggcctggagcttcttcttgggctctcaatggacgtaatagcttgatgaatcctggacctgctatggccagccacaaagaaggagaggaccgtttctttcctttgtctggatctttaatttttggcaaacaaggaactggaagagacaacgtggatgcggacaaagtcatgataaccaacgaagaagaaattaaaactactaacccggtagcaacggagtcctatggacaagtggccacaaaccaccagagtgcccaagcacaggcgcagaccggctgggttcaaaaccaaggaatacttccgggtatggtttggcaggacagagatgtgtacctgcaaggacccatttgggccaaaattcctcacacgtacggcaactttcacccttctccgctgatgggagggtttggaatgaagcacccgcctcctcagatcctcatcaaaaacacacctgtacctgcggatcctccaacggccttcaacaaggacaagctgaactctttcatcacccagtattctactggccaagtcagcgtggagatcgagtgggagctgcagaaggaaaacagcaagcgctggaacccggagatccagtacacttccaactattacaagtctaataatgttgaatttgctgttaatactgaaggtgtatatagtgaaccccgccccattggcaccagatacctgactcgtaatctgtaattgcttgttaatcaataaaccgtttaattcgtttcagttgaactgcggcc

SEQ ID NO: 580 - DNA, 2601 bp, synthetic construct
  source 1..2601: mol_type = other DNA; note = Description of Artificial Sequence: Synthetic polynucleotide
ccatcgacgtcagacgcggaagcttcgatcaactacgcggacaggtaccaaaacaaatgttctcgccacgtgggcatgaatctgatgctgtttccctgcagacaatgcgagagactgaatcagaattcaaatatctgcttcactcacggtgtcaaagactgtttagagtgctttcccgtgtcagaatctcaacccgtttctgtcgtcaaaaaggcgtatcagaaactgtgctacattcatcacatcatgggaaaggtgccagacgcttgcactgcttgcgacctggtcaatgtggacttggatgactgtgtttctgaacaataaatgacttaaaccaggtatggctgccgatggttatcttccagattggctcgaggacaaccttagtgaaggaattcgcgagtggtgggctttgaaacctggagcccctcaacccaaggcaaatcaacaacatcaagacaacgctcgaggtcttgtgcttccgggttacaaataccttggacccggcaacggactcgacaagggggagccggtcaacgcagcagacgcggcggccctcgagcacgacaaggcctacgaccagcagctcaaggccggagacaacccgtacctcaagtacaaccacgccgacgccgagttccaggagcggctcaaagaagatacgtcttttgggggcaacctcgggcgagcagtcttccaggccaaaaagaggcttcttgaacctcttggtctggttgaggaagcggctaagacggctcctggaaagaagaggcctgtagagcagtctcctcaggaaccggactcctccgcgggtattggcaaatcgggtgcacagcccgctaaaaagagactcaatttcggtcagactggcgacacagagtcagtcccagaccctcaaccaatcggagaacctcccgctgccccctcaggtgtgggatctcttacaatggcttcaggtggtggcgcaccagtggcagacaataacgaaggtgccgatggagtgggtagttcctcgggaaattggcattgcgattcccaatggctgggggacagagtcatcaccaccagcacccgaacctgggccctgcccacctacaacaatcacctctacaagcaaatctccaacagcacatctggaggatcttcaaatgacaacgcctacttcggctacagcaccccctgggggtattttgacttcaacagattccactgccacttctcaccacatgactggcagcgactcatcaacaacaactggggattccggcctaagcgactcaacttcaagctcttcaacattcaggtcaaagaggttacggacaacaatggagtcaagaccatcgccaataaccttaccagcacggtccaggtcttcacggactcagactatcagctcccgtacgtgctcgggtcggctcacgagggctgcctcccgccgttcccagcggacgttttcatgattcctcagtacgggtatctgacgcttaatgatggaagccaggccgtgggtcgttcgtccttttactgcctggaatatttcccgtcgcaaatgctaagaacgggtaacaacttccagttcagctacgagtttgagaacgtacctttccatagcagctacgctcacagccaaagcctggaccgactaatgaatccactcatcgaccaatacttgtactatctctcaaagactattaacggttctggacagaatcaacaaacgctaaaattcaatgtggccggacccagcaacatggctgtccagggaagaaactacatacctggacccagctaccgacaacaacgtgtctcaaccactgtgactcaaaacaacaacagcgaatttgcctggcctagagcttcttcttgggctctcaatggacgtaatagcttgatgaatcctggacctgctatggccagccacaaagaaggagaggaccgtttctttcctttgtctggatctttaatttttggcaaacaaggaactggaagagacaacgtggatgcggacaaagtcatgataaccaacgaagaagaaattaaaactactaacccggtagcaacggagtcctatggacaagtggccacaaaccaccagagtgcccaagcacaggcgcagaccggctgggttcaaaaccaaggaatacttccgggtatggtttggcaggacagagatgtgtacctgcaaggacccatttgggccaaaattcctcacacggacggcaactttcacccttctccgctgatgggagggtttggaatgaagcacccgcctcctcagatcctcatcaaaaacacacctgtacctgcggatcctccaacggccttcaacaaggacaagctgaactctttcatcacccagtattctactggccaagtcagcatggagatcgagtgggagctgcagaaggaaaacagcaagcgctggaacccggagatccagtacacttccaactattacaagtctaataatgttgaatttgctgttaatactgaaggtgtatatagtgaaccccgccccattggcaccagatacctgactcgtaatctgtaattgcttgttaatcaataaaccgtttaattcgtttcagttgaactgcggcc

SEQ ID NO: 581 - DNA, 2601 bp, synthetic construct
  source 1..2601: mol_type = other DNA; note = Description of Artificial Sequence: Synthetic polynucleotide
ccatcgacgtcagacgcggaagcttcgatcaactacgcggacaggtaccaaaacaaatgttctcgtcacgtgggcatgaatctgatgctgtttccctgcagacaatgcgagagactgaatcagaattcaaatatctgcttcactcacggtgtcaaagactgtttagagtgctttcccgtgtcagaatctcaacccgtttctgtcgtcaaaaaggcgtatcagaaactgtgctacattcatcacatcatgggaaaggtgccagacgcttgcactgcttgcgacctggtcaatgtggacttggatgactgtgtttctgaacaataaatgacttaaaccaggtatggctgccgatggttatcttccagattggctcgaggacaaccttagtgaaggaattcgcgagtggtgggctttgaaacctggagcccctcaacccaaggcaaatcaacaacatcaagacaacgctcgaggtcttgtgcttccgggttacaaataccttggacccggcaacggactcgacaagggggagccggtcaacgcagcagacgcggcggccctcgagcacgacaaggcctacgaccagcagctcaaggccggagacaacccgtacctcaagtacaaccacgccgacgccgagttccaggagcggctcaaagaagatacgtcttttgggggcaacctcgggcgagcagtcttccaggccaaaaagaggcttcttgaacctcttggtctggttgaggaagcggctaagacggctcctggaaagaagaggcctgtagagcagtctcctcaggaaccggactcctccgcgggtattggcaaatcgggtgcacagcccgctaaaaagagactcaatttcggtcagactggcgacacagagtcagtcccagaccctcaaccaatcggagaacctcccgcagccccctcaggtgtgggatctcttacaatggcttcaggtggtggcgcaccagtggcagacaataacgaaggtgccgatggagtgggtagttcctcgggaaattggcattgcgattcccaatggctgggggacagagtcatcaccaccagcacccgaacctgggccctgcccacctacaacaatcacctctacaagcaaatctccaacagcacatctggaggatcttcaaatgacaacgcctacttcggctacagcaccccctgggggtattttgacttcaacagattccactgccacttctcaccacgtgactggcagcgactcatcaacaacaactggggattccggcctaagcgactcaacttcaagctcttcaacattcaggtcaaagaggttacggacaacaatggagtcaagaccatcgccaataaccttaccagcacggtccaggtcttcacggactcagactatcagctcccgtacgtgctcgggtcggctcacgagggctgcctcccgccgttcccagcggacgttttcatgattcctcagtacgggtatctgacgcttaatgatggaagccaggccgtgggtcgttcgtccttttactgcctggaatatttcccgtcgcaaatgctaagaacgggtaacaacttccagttcagctacgagtttgagaacgtacctttccatagcagctacgctcacagccaaagcctggaccgactaatgaatccactcatcgaccaatacttgtactatctctcaaagactattaacggttctggacagaatcaacaaacgctaaaattcagtgtggccggacccagcaacatggctgtccagggaagaaactacatacctggacccagctaccgacaacaacgtgtctcaaccactgtgactcaaaacaacaacagcgaatttgcttggcctagagcttcttcttgggctctcaatggacgtaatagcttgatgaatcctggacctgctatggccagccacaaagaaggagaggaccgtttctttcctttgtctggatctttaatttttggcaaacaaggaactggaagagacaacgtggatgcggacaaagtcatgataaccaacgaagaagaaattaaaactactaacccggtagcaacggagtcctatggacaagtggccacaaaccaccagagtgcccaagcacaggcgcagaccggctgggttcaaaaccaaggaatacttccgggtatggtttggcaggacagagatgtgtacctgcaaggacccatttgggccaaaattcctcacacggacggcaactttcacccttctccgctgatgggagggtttggaatgaagcacccgcctcctcagatcctcatcaaaaacacacctgtacctgcggatcctccaacggccttcaacaaggacaagctgaactctttcatcacccagtattctactggccaagtcagcgtggagatcgagtgggagctgcagaaggaaaacagcaagcgctggaacccggagatccagtacacttccaactattacaagtctaataatgttgaatttgctgttaatactgaaggtgtatatagtgaaccccgccccattggcaccagatacctgactcgtaatctgtaattgcttgttaatcaataaaccgtttaattcgtttcagttgaactgcggcc

SEQ ID NO: 582 - DNA, 2601 bp, synthetic construct
  source 1..2601: mol_type = other DNA; note = Description of Artificial Sequence: Synthetic polynucleotide
ccatcgacgtcagacgcggaagcttcgatcaactacgcggacaggtaccaaaacaaatgttctcgtcacgtgggcatgaatctgatgctgtttccctgcagacaatgcgagagactgaatcagaattcaaatatctgcttcactcacggtgtcaaagactgtttagagtgctttcccgtgtcagaatctcaacccgtttctgtcgtcaaaaaggcgtatcagaaactgtgctacattcatcacatcatgggaaaggtgccagacgcttgcactgcttgcgacctggtcaatgtggacttggatgactgtgtttctgaacaataaatgacttaaaccaggtatggctgccgatggttatcttccagattggctcgaggacaaccttagtgaaggaattcgcgagtggtgggctttgaaacctggagcccctcaacccaaggcaaatcaacaacatcaagacaacgctcgaggtcttgtgcttccgggttacaaataccttggacccggcaacggactcgacaagggggagccggtcaacgcagcagacgcggcggccctcgagcacgacaaggcctacgaccagcagctcaaggccggagacaacccgtacctcaagtacaaccacgccgacgccgagttccaggagcggctcaaagaagatacgtcttttgggggcaacctcgggcgagcagtcttccaggccaaaaagaggcttcttgaacctcttggtctggttgaggaagcggctaagacggctcctggaaagaagaggcctgtagagcagtctcctcaggaaccggactcctccgcgggtattggcaaatcgggtgcacagcccgctaaaaagagactcaatttcggtcagactggcgacacagagtcagtcccagaccctcaaccaatcggagaacctcccgcagccccctcaggtgtgggatctcttacaatggcttcaggtggtggcgcaccagtggcagacaataacgaaggtgccgatggagtgggtagttcctcgggaaattggcattgcgattcccaatggctgggggacagagtcatcaccaccagcacccgaacctgggccctgcccacctacaacaatcacctctacaagcaaatctccaacagcacatctggaggatcttcaaatgacaacgcctacttcggctacagcaccccctgggggtattttgacttcaacagattccactgccacttctcaccacgtgactggcagcgactcatcaacaacaactggggattccggcctaagcgactcaacttcaagctcttcaacattcaggtcaaagaggttacggacaacaatggagtcaagaccatcgccaataaccttaccagcacggtccaggtcttcacggactcagactatcagctcccgtacgtgctcgggtcggctcacgagggctgcctcccgccgttcccagcggacgttttcatgattcctcagtacgggtatctgacgcttaatgatggaagccaggccgtgggtcgttcgtccttttactgcctggaatatttcccgtcgcaaatgctaagaacgggtaacaacttccagttcagctacgagtttgagaacgtacctttccatagcagctacgctcacagccaaagcctggaccgactaatgaatccactcatcgaccaatacttgtactatctctcaaagactattaacggttctggacagaatcaacaaacgctaaaattcagtgtggccggacccagcaacatggctgtccagggaagaaactacatacctggacccagctaccgacaacaacgtgtctcaaccactgtgactcaaaacaacaacagcgaatttgcttggcctagagcttcttcttgggctctcaatggacgtaatagcttgatgaatcctggacctgctatggccagccacaaagaaggagaggaccgtttctttcctttgtctggatctttaatttttggcaaacaaggaactggaagagacaacgtggatgcggacaaagtcatgataaccaacgaagaagaaattaaaactactaacccggtagcaacggagtcctatggacaagtggccacaaaccaccagagtgcccaagcacaggcgcagaccggctgggttcaaaaccaaggaatacttccgggtatggtttggcaggacagagatgtgtacctgcaaggacccatttgggccaaaattcctcacacggacggcaactttcacccttctccgctgatgggagggtttggaatgaagcacccgcctcctcagatcctcatcaaaaacacacctgtacctgcggatcctccaacggccttcaacaaggacaagctgaactctttcatcacccagtattctactggccaagtcagcgtggagatcgagtgggagcggcagaaggaaaacagcaagcgctggaacccggagatccagtacacttccaactattacaagtctaataatgttgaatttgctgttaatactgaaggtgtatatagtgaaccccgccccattggcaccagatacctgactcgtaatctgtaattgcttgttaatcaataaaccgtttaattcgtttcagttgaactgcggcc

SEQ ID NO: 583 - DNA, 2601 bp, synthetic construct
  source 1..2601: mol_type = other DNA; note = Description of Artificial Sequence: Synthetic polynucleotide
ccatcgacgtcagacgcggaagcttcgatcaactacgcggacaggtaccaaaacaaatgttctcgtcacgtgggcatgaatctgatgctgtttccctgcagacaatgcgagagactgaatcagaattcaaatatctgcttcactcacggtgtcaaagactgtttagagtgctttcccgtgtcagaatctcaacccgtttctgtcgtcaaaaaggcgtatcagaaactgtgctacattcatcacatcatgggaaaggtgccagacgcttgcactgcttgcgacctggtcaatgtggacttggatgactgtgtttctgaacaataaatgacttaaaccaggtatggctgccgatggttatcttccagattggctcgaggacaaccttagtgaaggaattcgcgagtggtgggctttgaaacctggagcccctcaacccaaggcaaatcaacaacatcaagacaacgctcgaggtcttgtgcttccgggttacaaataccttggacccggcaacggactcgacaagggggagccggtcaacgcagcagacgcggcggccctcgagcacgacaaggcctacgaccagcagctcaaggccggagacaacccgtacctcaagtacaaccacgccgacgccgagttccaggagcggctcaaagaagatacgtcttttgggggcaacctcgggcgagcagtcttccaggccaaaaagaggcttcttgaacctcttggtctggttgaggaagcggctaagacggctcctggaaagaagaggcctgtagagcagtctcctcaggaaccggactcctccgcgggtattggcaaatcgggtgcacagcccgctaaaaagagactcaatttcggtcagactggcgacacagagtcagtcccagaccctcaaccaatcggagaacctcccgcagccccctcaggtgtgggatctcttacaatggcttcaggtggtggcgcaccagtggcagacaataacgaaggtgccgatggagtgggtagttcctcgggaaattggcattgcgattcccaatggctgggggacagagtcatcaccaccagcacccgaacctgggccctgcccacctacaacaatcacctctacaagcaaatctccaacagcacatctggaggatcttcaaatgacaacgcctacttcggctacagcaccccctgggggtattttgacttcaacagattccactgccacttctcaccacgtgactggcagcgactcatcaacaacaactggggattccggcctaagcgactcaacttcaagctcttcaacattcaggtcaaagaggttacggacaacaatggagtcaagaccatcgccaataaccttaccagcacggtccaggtcttcgcggactcagactatcagctcccgtacgtgctcgggtcggctcacgagggctgcctcccgccgttcccagcggacgttttcatgattcctcagtacgggtatctgacgcttaatgatggaagccaggccgtgggtcgttcgtccttttactgcctggaatatttcccgtcgcaaatgctaagaacgggtaacaacttccagttcagctacgagtttgagaacgtacctttccatagcagctacgctcacagccaaagcctggaccgactaatgaatccactcatcgaccaatacttgtactatctctcaaagactattaacggttctggacagaatcaacaaacgctaaaattcagtgtggccggacccagcaacatggctgtccagggaagaaactacatacctggacccagctaccgacaacaacgtgtctcaaccactgtgactcaaaacaacaacagcgaatttgcttggcctagagcttcttcttgggctctcaatggacgtaatagcttgatgaatcctggacctgctatggccagccacaaagaaggagaggaccgtttctttcctttgtctggatctttaatttttggcaaacaaggaactggaagagacaacgtggatgcggacaaagtcatgataaccaacgaagaagaaattaaaactactaacccggtagcaacggagtcctatggacaagtggccacaaaccaccagagtgcccaagcacaggcgcagaccggctgggttcaaaaccaaggaatacttccgggtatggtttggcaggacagagatgtgtacctgcaaggacccatttgggccaaaattcctcacacggacggcaactttcacccttctccgctgatgggagggtttggaatgaagcacccgcctcctcagatcctcatcaaaaacacacctgtacctgcggatcctccaacggccttcaacaaggacaagctgaactctttcatcacccagtattctactggccaagtcagcgtggagatcgagtgggagctgcagaaggaaaacagcaagcgctggaacccggagatccagtacacttccaactattacaagtctaataatgttgaatttgctgttaatactgaaggtgtatatagtgaaccccgccccattggcaccagatacctgactcgtaatctgtaattgcttgttaatcaataaaccgtttaattcgtttcagttgaactgcggcc

SEQ ID NO: 584 - DNA, 2601 bp, synthetic construct
  source 1..2601: mol_type = other DNA; note = Description of Artificial Sequence: Synthetic polynucleotide
ccatcgacgtcagacgcggaagcttcgatcaactacgcggacaggtaccaaaacaaatgttctcgtcacgtgggcatgaatctgatgctgtttccctgcagacaatgcgagagactgaatcagaattcaaatatctgcttcactcacggtgtcaaagactgtttagagtgctttcccgtgtcagaatctcaacccgtttctgtcgtcaaaaaggcgtatcagaaactgtgctacattcatcacatcatgggaaaggtgccagacgcttgcactgcttgcgacctggtcaatgtggacttggatgactgtgtttctgaacaataaatgacttaaaccaggtatggctgccgatggttatcttccagattggctcgaggacaaccttagtgaaggaattcgcgagtggtgggctttgaaacctggagcccctcaacccaaggcaaatcaacaacatcaagacaacgctcgaggtcttgtgcttccgggttacaaataccttggacccggcaacggactcgacaagggggagccggtcaacgcagcagacgcggcggccctcgagcacgacaaggcctacgaccagcagctcaaggccggagacaacccgtacctcaagtacaaccacgccgacgccgagttccaggagcggctcaaagaagatacgtcttttgggggcaacctcgggcgagcagtcttccaggccaaaaagaggcttcttgaacctcttggtctggttgaggaagcggctaagacggctcctggaaagaagaggcctgtagagcagtctcctcaggaaccggactcctccgcgggtattggcaaatcgggtgcacagcccgctaaaaagagactcaatttcggtcagactggcgacacagagtcagtcccagaccctcaaccaatcggagaacctcccgcagccccctcaggtgtgggatctcttacaatggcttcaggtggtggcgcaccagtggcagacaataacgaaggtgccgatggagtgggtagttcctcgggaaattggcattgcgattcccaatggctgggggacagagtcatcaccaccagcacccgaacctgggccctgcccacctacaacaatcacctctacaagcaaatctccaacagcacatctggaggatcttcaaatgacaacgcctacttcggctacagcaccccctgggggtattttgacttcaacagattccactgccacttctcaccacgtgactggcagcgactcatcaacaacaactggggattccggcctaagcgactcaacttcaagctcttcaacattcaggtcaaagaggttacggacaacaatggagtcaagaccatcgccaataaccttaccagcacggtccaggtcttcacggactcagactatcagctcccgtacgtgctcgggtcggctcacgagggctgcctcccgccgttcccagcggacgttttcatgattcctcagtacgggtatctgacgcttaatgatggaagccaggccgtgggtcgttcgtccttttactgcctggaatatttcccgtcgcaaatgctaagaacgggtaacaacttccagttcagctacgagtttgagaacgtacctttccatagcagctacgctcacagccaaagcctggaccgactaatgaatccactcatcgaccaatacttgtactatctctcaaagactattaacggttctggacagaatcaacaaacgctaaaattcagtgtggccggacccagcaacatggctgtccagggaagaaactacatacctggacccagctaccgacaacaacgtgtctcaaccactgtgactcaaaacaacaacagcgaaattgcttggcctagagcttcttcttgggctctcaatggacgtaatagcttgatgaatcctggacctgctatggccagccacaaagaaggagaggaccgtttctttcctttgtctggatctttaatttttggcaaacaaggaactggaagagacaacgtggatgcggacaaagtcatgataaccaacgaagaagaaattaaaactactaacccagtagcaacggagtcctatggacaagtggccacaaaccaccagagtgcccaagcacaggcgcagaccggctgggttcaaaaccaaggaatacttccgggtatggtttggcaggacagagatgtgtacctgcaaggacccatttgggccaaaattcctcacacggacggcaactttcacccttctccgctgatgggagggtttggaatgaagcacccgcctcctcagatcctcatcaaaaacacacctgtacctgcggatcctccaacggccttcaacaaggacaagctgaactctttcatcacccagtattctactggccaagtcagcgtggagatcgagtgggagctgcagaaggaaaacagcaagcgctggaacccggagatccagtacacttccaactattgcaagtctaataatgttgaatttgctgttaatactgaaggtgtatatagtgaaccccgccccattggcaccagatacctgactcgtaatctgtaattgcttgttaatcaataaaccgtttaattcgtttcagttgaactgcggcc

SEQ ID NO: 585 - DNA, 2601 bp, synthetic construct
  source 1..2601: mol_type = other DNA; note = Description of Artificial Sequence: Synthetic polynucleotide
ccatcgacgtcagacgcggaagcttcgatcaactacgcggacaggtaccaaaacaaatgttctcgtcacgtgggcatgaatctgatgctgtttccctgcagacaatgcgagagactgaatcagaattcaaatatctgcttcactcacggtgtcaaagactgtttagagtgctttcccgtgtcagaatctcaacccgtttctgtcgtcaaaaaggcgtatcagaaactgtgctacattcatcacatcatgggaaaggtgccagacgcttgcactgcttgcgacctggtcaatgtggacttggatgtctgtgtttctgaacaataaatgacttaaaccaggtatggctgccgatggttatcttccagattggctcgaggacaaccttagtgaaggaattcgcgagtggtgggctttgaaacctggagcccctcaacccaaggcaaatcaacaacatcaagacaacgctcgaggtcttgtgcttccgggttacaaataccttggacccggcaacggactcgataagggggagccggtcaacgcagcagacgcggcggccctcgagcacgacaaggcctacgaccagcagctcaaggccggagacaacccgtacctcaagtacaaccacgccgacgccgagttccaggagcggctcaaagaagatacgtcttttgggggcaacctcgggcgagcagtcttccaggccaaaaagaggcttcttgaacctcttggtctggttgaggaagcggctaagacggctcctggaaagaagaggcctgtagagcagtctcctcaggaaccggactcctccgcgggtattggcaaatcgggtgcacagcccgctaaaaagagactcaatttcggtcagactggcgacacagagtcagtcccagaccctcaaccaatcggagaacctcccgcagccccctcaggtgtgggatctcttacaatggcttcaggtggtggcgcaccagtggcagacaataacgaaggtgccgatggagtgggtagttcctcgggaaattggcattgcgattcccaatggctgggggacagagtcatcaccaccagcacccgaacctgggccctgcccacctacaacaatcacctctacaagcaaatctccaacagcacatctggaggatcttcaaatgacaacgcctacttcggctacagcaccccctgggggtattttgacttcaacagattccactgccacttctcaccacgtgactggcagcgactcatcaacaacaactggggattccggcctaagcgactcaacttcaagctcttcaacattcaggtcaaagaggttacggacaacaatggagtcaagaccatcgccaataaccttaccagcacggtccaggtcttcacggactcagactatcagctcccgtacgtgctcgggtcggctcacgagggctgcctcccgccgttcccagcggacgttttcatgattcctcagtacgggtatctgacgcttaatgatggaagccaggccgtgggtcgttcgtccttttactgcctggaatatttcccgtcgcaaatgctaagaacgggtaacaacttccagttcagctacgagtttgagaacgtacctttccatagcagctacgctcacagccaaagcctggaccgactaatgaatccactcatcgaccaatacttgtactatctctcaaagactattaacggttctggacagaatcaacaaacgctaaaattcagtgtggccggacccagcaacatggctgtccagggaagaaactacatacctggacccagctaccgacaacaacgtgtctcaaccactgtgactcaaaacaacaacagcgaatttgcttggcctagagcttcttcttgggctctcaatggacgtaatagcttgatgaatcctggacctgctatggccagccacaaagaaggagaggaccgtttctttcctttgtctggatctttaatttttggcaaacaaggaactggaagagacaacgtggatgcggacaaagtcatgataaccaacgaagaagaaattaaaactactaacccggtagcaacggagtcctatggacaagtggccacaaaccaccagagtgcccaagcacaggcgcagaccggctgggttcaaaaccaaggaatacttccgggtatggtttggcaggacagagatgtgtacctgcaaggacccatttgggccaaaattcctcacacggacggcaactttcacccttctccgctgatgggagggtttggaatgaagcacccgcctcctcagatcctcatcaaaaacacacctgtacctgcggatcctccaacggccttcaacaaggacaagctgaactctttcatcacccagtattctactggccaagtcagcgtggagatcgagtgggagctgcagaaggaaaacagcaagcgctggaacccggagatccagtacacttccaactattacaagtctaataatgttgaatttgctgttaatactgaaggtgtatatagtgaaccccgccccattggcaccagatacctgactcgtaatctgtaattgcttgttaatcaataaaccgtttaattcgtttcagttgaactgcggcc

SEQ ID NO: 586 - protein, 736 aa, synthetic construct
  source 1..736: note = Description of Artificial Sequence: Synthetic polypeptide
MTADGYLPDWLEDNLSEGIREWWALKPGAPQPKANQQHQDNARGLVLPGYKYLGPGNGLDKGEPVNAADAAALEHDKAYDQQLKAGDNPYLKYNHADAEFQERLKEDTSFGGNLGRAVFQAKKRLLEPLGLVEEAAKTAPGKKRPVEQSPQEPDSSAGIGKSGAQPAKKRLNFGQTGDTESVPDPQPIGEPPAAPSGVGSLTMASGGGAPVADNNEGADGVGSSSGNWHCDSQWLGDRVITTSTRTWALPTYNNHLYKQISNSTSGGSSNDNAYFGYSTPWGYFDFNRFHCHFSPRDWQRLINNNWGFRPKQLNFKLFNIQVKEVTDNNGVKTIANNLTSTVQVFTDSDYQLPYVLGSAHEGCLPPFPADVFMIPQYGYLTLNDGSQAVGRSSFYCLEYFPSQMLRTGNNFQFSYEFENVPFHSSYAHSQSLDRLMNPLIDQYLYYLSKTINGSGQNQQTLKFSVAGPSNMAVQGRNYIPGPSYRQQRVSTTVTQNNNSEFAWPGASSWALNGRNSLMNPGPAMASHKEGEDRFFPLSGSLIFGKQGTGRDNVDADKVMITNEEEIKTTNPVATESYGQVATNHQSAQAQAQTGWVQNQGILPGMVWQDRDVYLQGPIWAKIPHTDGNFHPSPLMGGFGMKHPPPQILIKNTPVPADPPTAFNKDKLNSFITQYSTGQVSVEIEWELQKENSKRWNPEIQYTSNYYKSNNVEFAVNTEGVYSEPRPIGTRYLTRNL

SEQ ID NO: 587 - protein, 736 aa, synthetic construct
  source 1..736: note = Description of Artificial Sequence: Synthetic polypeptide
MAADGYLPDWLEDNLSEGIREWWALKPGAPQPKANQQHQDNARGLVLPGYKYLGPGNGLDKGEPVNAADAAALEHDKAYDQQLKAGDNPYLKYNHADAEFQERLKEDTSFGGNLGRAVFQAKKRLLEPLGLVEEAAKTAPGKKRPVEQSPQEPDSSAGIGKSGAQPAKKRLNFGQTGDTESVPDPQPIGEPPAAPSGVGSLTMASGGGAPVADNNEGADGVGSSSGNWHCDSQWLGDRVITTSTRTWALPTYNNHLYKQISNSTSGGSSNDNAYFGYSTPWGYFDFNRFHCHFSPRDWQRLINNNWGFRPKRLNFKLFNIQVKEVTDNNGVKTIANNLTSTVQVFTDSDYQLPYVLGSAHEGCLPPFPADVFMIPQYGYLTLNDGSQAVGRSSFYCLEYFPSQMLRTGNNFQFSYEFENVPFHSSYAHSQSLDRLMNPLIDQYLYYLSKTINGSGQNQQTLKFSVAGPSNMAVQGRNYIPGPSYRQQRVSTTVTQNNNSEFAWPGASSWALNGRNSLMNPGPAMASHKEGEDRFFPLSGSLIFGKQGTGRDNVDADKVMITNEEEIKTTNPVATESYGQVATNHQSAQAQAQTGWVQNQGILPGMVWQDRDVYLQGPIWAKIPHTGGNFHPSPLMGGFGMKHPPPQILIKNTPVPADPPTAFNKDKLNSFITQYSTGQVSVEIEWELQKENSKRWNPEIQYTSNYYKSNNVEFAVNTGGVYSEPRPIGTRYLTRNL

SEQ ID NO: 588 - protein, 736 aa, synthetic construct
  source 1..736: note = Description of Artificial Sequence: Synthetic polypeptide
MAADGYLPDWLEDNLSEGIREWWALKPGAPQPKANQQHQDNARGLVLPGYKYLGPGNGLDKGEPVNAADAAALEHDKAYDQQLKAGDNPYLKYNHADAEFQERLKEDTSFGGNLGRAVFQAKKRLLEPLGLVEEAAKTAPGKKRPVEQSPQEPDSSAGIDKSGAQPAKKRLNFGQTGDTESVPDPQPIGEPPAAPSGVGSLTMASGGGAPVADNNEGADGVGSSSGNWHCDSQWLGDRVITTSTRTWALPTYNNHLYKQISNSTSGGSSNDNAYFGYSTPWGYFDFNRFHCHFSPRDWQRLINNNWGFRPKRLNFKLFNIQVKEVTDNNGVKTIANNLTSTVQVFTDSDYQLPYVLGSAHEGCLPPFPADVFMIPQYGYLTLNDGSQAVGRSSFYCLEYFPSQMLRTGNNFQFSYEFENVPFHSSYAHSQSLDRLMNPLIDQYLYYLSKTINGSGQNQQTLKFSVAGPSNMAVQGRNYIPGPSYRQQRVSTTVTQNNNSEFAWPGASSWALNGRNSLMNPGPAMASHKEGEDRFFPLSGSLIFGKQGTGRDNVDADKVMITNEEEIKTTNPVATESYGQVATNHQSAQAQAQTGWVQNQGILPGMVWQDRDVYLQGPIWAKIPHTDGNFHPSPLMGGFGMKHPPPQILIKNTPVPADPPTAFNKDKLNSFITQYSTGQVSVEIEWELQKENSKRWNPEIQYTSNYYKSNNVEFAVNTEGVYSEPRPIGTRYLTRNL

SEQ ID NO: 589 - protein, 736 aa, synthetic construct
  source 1..736: note = Description of Artificial Sequence: Synthetic polypeptide
MAADGYLPDWLEDNLSEGIREWWALKPGAPQPKANQQHQDNARGLVLPGYKYLGPGNGLDKGEPVNAADAAALEHDKAYDQQLKAGDNPYLKYNHADAEFQERLKEDTSFGGNLGRAVLQAKKRLLEPLGLVEEAAKTAPGKKRPVEQSPQEPDSSAGIGKSGAQPAKKRLNFGQTGDTESVPDPQPIGEPPAAPSGVGSLTMASGGGAPVADNNEGADGVGSSSGNWHCDSQWLGDRVITTSTRTWALPTYNNHLYKQISNSTSGGSSNDNAYFGYSTPWGYFDFNRFHCHFSPRDWQRLINNNWGFRPKRLNFKLFNIQVKEVTDNNGVKTIANNLTSTVQVFTDSDYQLPYVLGSAHEGCLPPFPADVFMIPQYGYLTLNDGSQAVGRSSFYCLEYFPSQMLRTGNNFQFSYEFENVPFHSSYAHSQSLDRLMNPLIDQYLYYLSKTINGSGQNQQTLKFSVAGSSNMAVQGRNYIPGPSYRQQRVSTTVTQNNNSEFAWPGASSWALNGRNSLMNPGPAMASHKEGEDRFFPLSGSLIFGKQGTGRDNVDADKVMITNEEEIKTTNPVATESYGQVATNHQSAQAQAQTGWVQNQGILPGMVWQDRDVYLQGPIWAKIPHTDGNFHPSPLMGGFGMKHPPPQILIKNTPVPADPPTAFNKDKLNSFITQYSTGQVSVEIEWELQKENSKRWNPEIQYTSNYYKSNNVEFAVNTEGVYSEPRPIGTRYLTRNL

SEQ ID NO: 590 - protein, 736 aa, synthetic construct
  source 1..736: note = Description of Artificial Sequence: Synthetic polypeptide
MAADGYLPDWLEDNLSEGIREWWALKPGAPQPKANQQHQDNARGLVLPGYKYLGPGNGLDKGEPVNAADAAALEHDRAYDQQLKAGDNPYLKYNHADAEFQERLKEDTSFGGNLGRAVFQAKKRLLEPLGLVEEAAKTAPGKKRPVEQSPQEPDSSAGIGKSGAQPAKKRLNFGQTGDTESVPDPQPIGEPPAAPSGVGSLTMASGGGAPVADNNEGADGVGSSSGNWHCDSQWLGDRVITTSTRTWALPTYNNHLYKQISNSTSGGSSNDNAYFGYSTPWGYFDFNRFHCHFSPRDWQRLINNNWGFRPKRLNFKLFNIQVKEVTDNNGVKTIANNLTSTVQVFTDSDYQLPYVLGSAHEGCLPPFPADVFMIPQYGYLTLNDGSQAVGRSSFYCLEYFPSQMLRTGNNFQFSYEFENVPFHSSYAHSQSLDRLMNPLIDQYLYYLSKTINGSGQNQQTLKFSVAGPSNMAVQGRNYIPGPSYRQQRVSTTVTQNNNSEFAWPGASSWALNGRNSLMNPGPAMASHKEGEDRFFPLSGSLIFGKQGTGRDNVDADKVMITNEEEIKTTNPVATESYGQVATNHQSAQAQAQTGWVQNQGILPGMVWQDRDVYLQGPIWAKIPHTDGNFHPSPLMGGFGMKHPPPQILIKNTPVPADPPTAFNKDKLNSFITQYSTGQVSVEIEWELQKKNSKRWNPEIQYTSNYYKSNNVEFAVNTEGVYSEPRPIGTRYLTRNL

SEQ ID NO: 591 - protein, 736 aa, synthetic construct
  source 1..736: note = Description of Artificial Sequence: Synthetic polypeptide
MAADGYLPDWLEDNLSEGIREWWALKPGAPQPKANQQHQDNARGLVLPGYKYLGPGNGLDKGEPVNAADAAALEHDKAYDQQLKAGDNPYLKYNHADAEFQERLKEDTSFGGNLGRAVFQAKKRLLEPLGLVEEAAKTAPGKKRPVEQSPQEPDSSAGIGKSGAQPAKKRLNFGQTGDTESVPDPQPIGEPPAAPSGVGSLTMASGGGAPVADNNEGADGVGSSSGNWHCDSQWLGDRVITTSTRTWALPTYNNHLYKQISNSTSGGSSNDNAYFGYSTPWGYFDFNRFHCHFSPRDWQRLINNNWGFRPKRLNFKLFNIQVKEVTDNNGVKTIANNLTSTVQVFTDSDYQLPYVLGSAHEGCLPPFPADVFMIPQYGYLTLNDGSQAVGRSSFYCLEYFPSQMLRTGNNFQFSYEFENVPFHSSYAHSQSLDRLMNPLIDQYLYYLSKTINGSGQNQQTLKFSVAGPSNMAVQGRNYIPGPSYRQQRVSTTVTQNNNSEFAWPGASSWALNGRNSLMNPGPAMASHKEGEDRFFPLSGSLIFGKQGTGRDNVDADKVMITNEEEIKTTNPVATESYGQVATNHQSAQARAQTGWVQNQGILPGMVWQDRDVYLQGPIWAKIPHTDGNFHPSPLMGGFGMKHPPPQILIKNTPVPADPPTAFNKDKLNSFITQYSTGQVSVEIEWELQKENSKRWNPEIQYTSNYYKSNNVEFAVNTEGVYSEPRPIGTRYLTRNL

SEQ ID NO: 592 - protein, 736 aa, synthetic construct
  source 1..736: note = Description of Artificial Sequence: Synthetic polypeptide
MAADGYLPDWLEDNLSEGIREWWALKPGAPQPKANQQHQDNARGLVLPGYKYLGPGNGLDKGEPVNAVDAAALEHDKAYDQQLKAGDNPYLKYNHADAEFQERLKEDTSFGGNLGRAVFQAKKRLLEPLGLVEEAAKTAPGKKRPVEQSPQEPDSSAGIGKSGAQPAKKRLNFGQTGDTESVPDPQPIGEPPAAPSGVGSLTMASGGGAPVADNNEGADGVGSSSGNWHCDSQWLGDRVITTSTRTWALPTYNNHLYKQISNSTSGGSSNDNAYFGYSTPWGYFDFNRFHCHFSPRDWQRLINNNWGFRPKRLNFKLFNIQVKEVTDNNGVKTIANNLTSTVQVFTDSDYQLPYVLGSAHEGCLPPFPADVFMIPQYGYLTLNDGSQAVGRSSFYCLEYFPSQMLRTGNNFQFSYEFENVPFHSSYAHSQSLDRLMNPLIDQYLYYLSKTINGSGQNQQTLKFSVAGPSNMAVQGRNYIPGPSYRQQRVSTTVTQNNNSEFAWPGASSWALNGRNSLMNPGPAMASHKEGEDRFFPLSGSLIFGKQGTGRDNVDADKVMITNEEEIKTTNPVATESYGQVATNHQSAQAQAQTGWVQNQGILPGMVWQDRDVYLQGPIWAKIPHTDGNFHPSPLMGGFGMKHPPPQILIKNTPVPADPPTAFNKDKLNSFITQYSTGQVSVEIEWELQKENSKRWNPEIQYTSNYYKSNNVEFAVNTEGVYSEPRPIGTRYLTRNL

SEQ ID NO: 593 - protein, 736 aa, synthetic construct
  source 1..736: note = Description of Artificial Sequence: Synthetic polypeptide
MAADGYLPDWLEDNLSEGIREWWALKPGAPQPKANQQHQDNARGLVLPGYKYLGPGNGLDKGEPVNAADAAALEHDKAYDQQLKAGDNPYLKYNHADAEFQERLKEDTSFGGNLGRAVFQAKKRLLEPLGLVEEAAKTAPGKKRPVEQSPREPDSSAGIGKSGAQPAKKRLNFGQTGDTESVPDPQPIGEPPAAPSGVGSLTMASGGGAPVADNNEGADGVGSSSGNWHCDSQWLGDRVITTSTRTWALPTYNNHLYKQISNSTSGGSSNDNAYFGYSTPWGYFDFNRFHCHFSPRDWQRLINNNWGFRPKRLNFKLFNIQVKEVTDNNGVKTIANNLTSTVQVFTDSDYQLPYVLGSAHEGCLPPFPADVFMIPQYGYLTLNDGSQAVGRSSFYCLEYFPSQMLRTGNNFQFSYEFENVPFHSSYAHSQSLDRLMNPLIDQYLYYLSKTINGSGQNQQTLKFSVAGPSNMAVQGRNYIPGPSYRQQRVSTTVTQNNNSEFAWPGASSWALNGRNSLMNPGPAMASHKEGEDRFFPLSGSLIFGKQGTGRDNVDADKVMITNEEEIKTTNPVATESYGQVATNHQSAQAQAQTGWVQNQGILPGMVWQDRDVYLQGPIWAKIPHTDGNFHPSPLMGGFGMKHPPPQILIKNTPVPADPPTAFNKDKLNSFITQYSTGQVSVEIEWELQKENSKRWNPEIQYTSNYYKSNNVEFAVNTEGVYSEPRPIGTRYLTRNL

SEQ ID NO: 594 - protein, 736 aa, synthetic construct
  source 1..736: note = Description of Artificial Sequence: Synthetic polypeptide
MAADGYLPDWLEDNLSEGIREWWALKPGAPQPKANQQHQDNARGLVLPGYKYLGPGNGLDKGEPVNAADAAALEHDKAYDQQLKAGDNPYLKYNHADAEFQERLKEDTSFGGNLGRAVFQAKKRLLEPLGLVEEAAKTAPGKKRPVEQSPQEPDSSAGIGKSGAQPAKKRLNFGQTGDTESVPDPQPIGEPPAAPSGVGSLTMASCGGAPVADNNEGADGVGSSSGNWHCDSQWLGDRVITTSTRTWALPTYNNHLYKQISNSTSGGSSNDNAYFGYSTPWGYFDFNRFHCHFSPRDWQRLINNNWGFRPKRLNFKLFNIQVKEVTDNNGVKTIANNLTSTVQVFTDSDYQLPYVLGSAHEGCLPPFPADVFMIPQYGYLTLNDGSQAVGRSSFYCLEYFPSQMLRTGNNFQFSYEFENVPFHSSYAHSQSLDRLMNPLIDQYLYYLSKTINGSGQNQQTLKFSVAGPSNMAVQGRNYIPGPSYRQQRVSTTVTQNNNSEFAWPGASSWALNGRNSLMNPGPAMASHKEGEDRFFPLSGSLIFGKQGTGRDNVDADKVMITNEEEIKTTNPVATESYGQVATNHQSAQAQAQTGWVQNQGILPGMVWQDRDVYLQGPIWAKIPHTDGNFHPSPLMGGFGMKHPPPQILIKNTPVPADPPTAFNKDKLNSFITQYSTGQVSVEIEWELQKENSKRWNPEIQYTSNYYKSNNVEFAVNTEGVYSEPRPIGTRYLTRNL

SEQ ID NO: 595 - protein, 736 aa, synthetic construct
  source 1..736: note = Description of Artificial Sequence: Synthetic polypeptide
MAADGYLPDWLEDNLSEGIREWWALKPGAPQPKANQQHQDNARGLVLPGYKYLGPGNGLDKGEPINAADAAALEHDKAYDQQLKAGDNPYLKYNHADAEFQERLKEDTSFGGNLGRAVFQAKKRLLEPLGLVEEAAKTAPGKKRPVEQSPQEPDSSAGIGKSGAQPAKKRLNFGQTGDTESVPDPQPIGEPPAAPSGVGSLTMASGGGAPVADNNEGADGVGSSSGNWHCDSQWLGDRVITTSTRTWALPTYNNHLYKQISNSTSGGSSNDNAYFGYSTPWGYFDFNRFHCHFSPRDWQRLINNNWGFRPKRLNFKLFNIQVKEVTDNNGVKTIANNLTSTVQVFTDSDYQLPYVLGSAHEGCLPPFPADVFMIPQYGYLTLNDGSQAVGRSSFYCLEYFPSQMLRTGNNFQFSYEFENVPFHSSYAHSQSLDRLMNPLIDQYLYYLSKTINGSGQNQQTLKFSVAGPSNMAVQGRNYIPGPSYRQQRVSTTVTQNNNSEFAWPGASSWALNGRNSLMNPGPAMASHKEGEDRFFPLSGSLIFGKQGTGRDNVDADKVMITNEEEIKTTNPVATESYGQVATNHQSAQAQAQTGWVQNQGILPGMVWQDRDVYLQGPIWAKIPHTYGNFHPSPLMGGFGMKHPPPQILIKNTPVPADPPTAFNKDKLNSFITQYSTGQVSVEIEWELQKENSKRWNPEIQYTSNYYKSNNVEFAVNTEGVYSEPRPIGTRYLTRNL

SEQ ID NO: 596 - protein, 736 aa, synthetic construct
  source 1..736: note = Description of Artificial Sequence: Synthetic polypeptide
MAADGYLPDWLEDNLSEGIREWWALKPGAPQPKANQQHQDNARGLVLPGYKYLGPGNGLDKGEPVNAADAAALEHDKAYDQQLKAGDNPYLKYNHADAEFQERLKEDTSFGGNLGRAVFQAKKRLLEPLGLVEEAAKTAPGKKRPVEQSPQEPDSSAGIGKSGAQPAKKRLNFGQTGDTESVPDPQPIGEPPAAPSGVGSLTMASGGGAPVADNNEGADGVGSSSGNWHCDSQWLGDRVITTSTRTWALPTYNNHLYKQISNSTSGGSSNDNAYFGYSTPWGYFDFNRFHCHFSPHDWQRLINNNWGFRPKRLNFKLFNIQVKEVTDNNGVKTIANNLTSTVQVFTDSDYQLPYVLGSAHEGCLPPFPADVFMIPQYGYLTLNDGSQAVGRSSFYCLEYFPSQMLRTGNNFQFSYEFENVPFHSSYAHSQSLDRLMNPLIDQYLYYLSKTINGSGQNQQTLKFNVAGPSNMAVQGRNYIPGPSYRQQRVSTTVTQNNNSEFAWPRASSWALNGRNSLMNPGPAMASHKEGEDRFFPLSGSLIFGKQGTGRDNVDADKVMITNEEEIKTTNPVATESYGQVATNHQSAQAQAQTGWVQNQGILPGMVWQDRDVYLQGPIWAKIPHTDGNFHPSPLMGGFGMKHPPPQILIKNTPVPADPPTAFNKDKLNSFITQYSTGQVSMEIEWELQKENSKRWNPEIQYTSNYYKSNNVEFAVNTEGVYSEPRPIGTRYLTRNL

SEQ ID NO: 597 - protein, 736 aa, synthetic construct
  source 1..736: note = Description of Artificial Sequence: Synthetic polypeptide
MAADGYLPDWLEDNLSEGIREWWALKPGAPQPKANQQHQDNARGLVLPGYKYLGPGNGLDKGEPVNAADAAALEHDKAYDQQLKAGDNPYLKYNHADAEFQERLKEDTSFGGNLGRAVFQAKKRLLEPLGLVEEAAKTAPGKKRPVEQSPQEPDSSAGIGKSGAQPAKKRLNFGQTGDTESVPDPQPIGEPPAAPSGVGSLTMASGGGAPVADNNEGADGVGSSSGNWHCDSQWLGDRVITTSTRTWALPTYNNHLYKQISNSTSGGSSNDNAYFGYSTPWGYFDFNRFHCHFSPRDWQRLINNNWGFRPKRLNFKLFNIQVKEVTDNNGVKTIANNLTSTVQVFTDSDYQLPYVLGSAHEGCLPPFPADVFMIPQYGYLTLNDGSQAVGRSSFYCLEYFPSQMLRTGNNFQFSYEFENVPFHSSYAHSQSLDRLMNPLIDQYLYYLSKTINGSGQNQQTLKFSVAGPSNMAVQGRNYIPGPSYRQQRVSTTVTQNNNSEFAWPRASSWALNGRNSLMNPGPAMASHKEGEDRFFPLSGSLIFGKQGTGRDNVDADKVMITNEEEIKTTNPVATESYGQVATNHQSAQAQAQTGWVQNQGILPGMVWQDRDVYLQGPIWAKIPHTDGNFHPSPLMGGFGMKHPPPQILIKNTPVPADPPTAFNKDKLNSFITQYSTGQVSVEIEWELQKENSKRWNPEIQYTSNYYKSNNVEFAVNTEGVYSEPRPIGTRYLTRNL

SEQ ID NO: 598 - protein, 736 aa, synthetic construct
  source 1..736: note = Description of Artificial Sequence: Synthetic polypeptide
MAADGYLPDWLEDNLSEGIREWWALKPGAPQPKANQQHQDNARGLVLPGYKYLGPGNGLDKGEPVNAADAAALEHDKAYDQQLKAGDNPYLKYNHADAEFQERLKEDTSFGGNLGRAVFQAKKRLLEPLGLVEEAAKTAPGKKRPVEQSPQEPDSSAGIGKSGAQPAKKRLNFGQTGDTESVPDPQPIGEPPAAPSGVGSLTMASGGGAPVADNNEGADGVGSSSGNWHCDSQWLGDRVITTSTRTWALPTYNNHLYKQISNSTSGGSSNDNAYFGYSTPWGYFDFNRFHCHFSPRDWQRLINNNWGFRPKRLNFKLFNIQVKEVTDNNGVKTIANNLTSTVQVFTDSDYQLPYVLGSAHEGCLPPFPADVFMIPQYGYLTLNDGSQAVGRSSFYCLEYFPSQMLRTGNNFQFSYEFENVPFHSSYAHSQSLDRLMNPLIDQYLYYLSKTINGSGQNQQTLKFSVAGPSNMAVQGRNYIPGPSYRQQRVSTTVTQNNNSEFAWPRASSWALNGRNSLMNPGPAMASHKEGEDRFFPLSGSLIFGKQGTGRDNVDADKVMITNEEEIKTTNPVATESYGQVATNHQSAQAQAQTGWVQNQGILPGMVWQDRDVYLQGPIWAKIPHTDGNFHPSPLMGGFGMKHPPPQILIKNTPVPADPPTAFNKDKLNSFITQYSTGQVSVEIEWERQKENSKRWNPEIQYTSNYYKSNNVEFAVNTEGVYSEPRPIGTRYLTRNL

SEQ ID NO: 599 - protein, 736 aa, synthetic construct
  source 1..736: note = Description of Artificial Sequence: Synthetic polypeptide
MAADGYLPDWLEDNLSEGIREWWALKPGAPQPKANQQHQDNARGLVLPGYKYLGPGNGLDKGEPVNAADAAALEHDKAYDQQLKAGDNPYLKYNHADAEFQERLKEDTSFGGNLGRAVFQAKKRLLEPLGLVEEAAKTAPGKKRPVEQSPQEPDSSAGIGKSGAQPAKKRLNFGQTGDTESVPDPQPIGEPPAAPSGVGSLTMASGGGAPVADNNEGADGVGSSSGNWHCDSQWLGDRVITTSTRTWALPTYNNHLYKQISNSTSGGSSNDNAYFGYSTPWGYFDFNRFHCHFSPRDWQRLINNNWGFRPKRLNFKLFNIQVKEVTDNNGVKTIANNLTSTVQVFADSDYQLPYVLGSAHEGCLPPFPADVFMIPQYGYLTLNDGSQAVGRSSFYCLEYFPSQMLRTGNNFQFSYEFENVPFHSSYAHSQSLDRLMNPLIDQYLYYLSKTINGSGQNQQTLKFSVAGPSNMAVQGRNYIPGPSYRQQRVSTTVTQNNNSEFAWPRASSWALNGRNSLMNPGPAMASHKEGEDRFFPLSGSLIFGKQGTGRDNVDADKVMITNEEEIKTTNPVATESYGQVATNHQSAQAQAQTGWVQNQGILPGMVWQDRDVYLQGPIWAKIPHTDGNFHPSPLMGGFGMKHPPPQILIKNTPVPADPPTAFNKDKLNSFITQYSTGQVSVEIEWELQKENSKRWNPEIQYTSNYYKSNNVEFAVNTEGVYSEPRPIGTRYLTRNL

SEQ ID NO: 600 - protein, 736 aa, synthetic construct
  source 1..736: note = Description of Artificial Sequence: Synthetic polypeptide
MAADGYLPDWLEDNLSEGIREWWALKPGAPQPKANQQHQDNARGLVLPGYKYLGPGNGLDKGEPVNAADAAALEHDKAYDQQLKAGDNPYLKYNHADAEFQERLKEDTSFGGNLGRAVFQAKKRLLEPLGLVEEAAKTAPGKKRPVEQSPQEPDSSAGIGKSGAQPAKKRLNFGQTGDTESVPDPQPIGEPPAAPSGVGSLTMASGGGAPVADNNEGADGVGSSSGNWHCDSQWLGDRVITTSTRTWALPTYNNHLYKQISNSTSGGSSNDNAYFGYSTPWGYFDFNRFHCHFSPRDWQRLINNNWGFRPKRLNFKLFNIQVKEVTDNNGVKTIANNLTSTVQVFTDSDYQLPYVLGSAHEGCLPPFPADVFMIPQYGYLTLNDGSQAVGRSSFYCLEYFPSQMLRTGNNFQFSYEFENVPFHSSYAHSQSLDRLMNPLIDQYLYYLSKTINGSGQNQQTLKFSVAGPSNMAVQGRNYIPGPSYRQQRVSTTVTQNNNSEIAWPRASSWALNGRNSLMNPGPAMASHKEGEDRFFPLSGSLIFGKQGTGRDNVDADKVMITNEEEIKTTNPVATESYGQVATNHQSAQAQAQTGWVQNQGILPGMVWQDRDVYLQGPIWAKIPHTDGNFHPSPLMGGFGMKHPPPQILIKNTPVPADPPTAFNKDKLNSFITQYSTGQVSVEIEWELQKENSKRWNPEIQYTSNYCKSNNVEFAVNTEGVYSEPRPIGTRYLTRNL

SEQ ID NO: 601 - protein, 736 aa, synthetic construct; identical to SEQ ID NO: 597
  source 1..736: note = Description of Artificial Sequence: Synthetic polypeptide

SEQ ID NO: 602 - DNA, 2208 bp, synthetic construct
  source 1..2208: mol_type = other DNA; note = Description of Artificial Sequence: Synthetic polynucleotide
atggctgccgatggttatcttccagattggctcgaggacaaccttagtgaaggaattcgcgagtggtgggctttgaaacctggagcccctcaacccaaggcaaatcaacaacatcaagacaacgctcgaggtcttgtgcttccgggttacaaataccttggacccggcaacggactcgacaagggggagccggtcaacgcagcagacgcggcggccctcgagcacgacaaggcctacgaccagcagctcaaggccggagacaacccgtacctcaagtacaaccacgccgacgccgagttccaggagcggctcaaagaagatacgtcttttgggggcaacctcgggcgagcagtcttccaggccaaaaagaggcttcttgaacctcttggtctggttgaggaagcggctaagacggctcctggaaagaagaggcctgtagagcagtctcctcaggaaccggactcctccgcgggtattggcaaatcgggtgcacagcccgctaaaaagagactcaatttcggtcagactggcgacacagagtcagtcccagaccctcaaccaatcggagaacctcccgcagccccctcaggtgtgggatctcttacaatggcttcaggtggtggcgcaccagtggcagacaataacgaaggtgccgatggagtgggtagttcctcgggaaattggcattgcgattcccaatggctgggggacagagtcatcaccaccagcacccgaacctgggccctgcccacctacaacaatcacctctacaagcaaatctccaacagcacatctggaggatcttcaaatgacaacgcctacttcggctacagcaccccctgggggtattttgacttcaacagattccactgccacttctcaccacgtgactggcagcgactcatcaacaacaactggggattccggcctaagcgactcaacttcaagctcttcaacattcaggtcaaagaggttacggacaacaatggagtcaagaccatcgccaataaccttaccagcacggtccaggtcttcacggactcagactatcagctcccgtacgtgctcgggtcggctcacgagggctgcctcccgccgttcccagcggacgttttcatgattcctcagtacgggtatctgacgcttaatgatggaagccaggccgtgggtcgttcgtccttttactgcctggaatatttcccgtcgcaaatgctaagaacgggtaacaacttccagttcggctacgagtttgagaacgtacctttccatagcagctacgctcacagccaaagcctggaccgactaatgaatccactcatcgaccaatacttgtactatctctcaaagactattaacggttctggacagaatcaacaaacgctaaaattcagtgtggccggacccagcaacatggctgtccagggaagaaactacatacctggacccagctaccgacaacaacgtgtctcaaccactgtgactcaaaacaacaacagcgaatttgcttggcctggagcttcttcttgggctctcaatggacgtaatagcttgatgaatcctggacctgctatggccagccacaaagaaggagaggaccgtttctttcctttgtctggatctttaatttttggcaaacaaggaactggaagagacaacgtggatgcggacaaagtcatgataaccaacgaagaagaaattaaaactactaacccggtagcaacggagtcctatggacaagtggccacaaaccaccagagtgcccaagcacaggcgcagaccggctgggttcaaaaccaaggaatacttccgggtatggtttggcaggacagagatgtgtacctgcaaggacccatttgggccaaaattcctcacacggacggcaactttcacccttctccgctgatgggagggtttggaatgaagcacccgcctcctcagatcctcatcaaaaacacacctgtacctgcggatcctccaacggccttcaacaaggacaagctgaactctttcatcacccagtattctactggccaagtcagcgtggagatcgagtgggagctgcagaaggaaaacagcaagcgctgggacccggagatccagtacacttccaactattacaagtctaataatgttgaatttgctgttaatactgaaggtgtatatagtgaaccccgccccattggcaccagatacctgactcgtaatctg

SEQ ID NO: 603 - DNA, 2208 bp, synthetic construct
  source 1..2208: mol_type = other DNA; note = Description of Artificial Sequence: Synthetic polynucleotide
atggctgccgatggttatcttccagattggctcgaggacaaccttagtgaaggaattcgcgagtggtgggctttgaaacctggagcccctcaacccaaggcaaatcaacaacatcaagacaacgctcgaggtcttgtgcttccgggttacaaataccttggacccggcaacggactcgacaagggggagccggtcaacgcagcagacgcggcggccctcgagcacgacaaggcctacgaccagcagctcaaggccggagacaacccgtacctcaagtacaaccacgccgacgccgagttccaggagcggctcaaagaagatacgtcttttgggggcaacctcgggcgagcagtcttccaggccaaaaagaggcttcttgaacctcttggtctggttgaggaagcggctaagacggctcctggaaagaagaggcctgtagagcagtctcctcaggaaccggactcctccgcgggtattggcaaatcgggtgcacagcccgctaaaaagagactcaatttcggtcagactggcgacacagagtcagtcccagaccctcaaccaatcggagaacctcccgcagccccctcaggtgtgggatctcttacaatggcttcaggtggtggcgcaccagtggcagacaataacgaaggtgccgatggagtgggtagttcctcgggaaattggcattgcgattcccaatggctgggggacagagtcatcaccaccagcacccgaacctgggccctgcccacctacaacaatcacctctacaagcaaatctccaacagcacatctggaggatcttcaaatgacaacgcctacttcggctacagcaccccctgggggtattttgacttcaacagattccactgccgcttctcaccacgtgactggcagcgactcatcaacaacaactggggattccggcctaagcgactcaacttcaagctcttcaacattcaggtcaaagaggttacggacaacaatggagtcaagaccatcgccaataaccttaccagcacggtccaggtcttcacggactcagactatcagctcccgtacgtgctcgggtcggctcacgagggctgcctcccgccgttcccagcggacgttttcatgattcctcagtacgggtatctgacgcttaatgatggaagccaggccgtgggtcgttcgtccttttactgcctggaatatttcccgtcgcaaatgctaagaacgggtaacaacttccagttcagctacgagtttgagaacgtacctttccatagcagctacgctcacagccaaagcctggaccgactaatgaatccactcatcgaccaatacttgtactatctctcaaagactattaacggttctggacagaatcaacaaacgctaaaattcagtgtggccggacccagcaacatggctgtccagggaagaaactacatacctggacccagctaccgacaacaacgtgtctcaaccactgtgactcaaaacaacaacagcgaatttgcttggcctggagcttcttcttgggctctcaatggacgtaatagcttgatgaatcctggacctgctatggccagccacaaagaaggagaggaccgtttctttcctttgtctggatctttaatttttggcaaacaaggaactggaagagacaacgtggatgcggacaaagtcatgataaccaacgaagaagaaattaaaactactaacccggtagcaacggagtcctatggacaagtggccacaaaccaccagagtgcccaagcacaggcgcagaccggctgggttcaaaaccaaggaatacttccgggtatggtttggcaggacagagatgtgtacctgcaaggacccatttgggccaaaattcctcacacggacggcaactttcacccttctccgctgatgggagggtttggaatgaagcacccgcctcctcagatcctcatcaaaaacgcccctgtacctgcggatcctccaacggccttcaacaaggacaagctgaactctttcatcacccagtattctactggccaagtcagcgtggagatcgagtgggagctgcagaaggaaaacagcaagcgctggaacccggagatccagtacacttccaactattacaagtctaataatgttgaatttgctgttaatactgaaggtgtatatagtgaaccccgccccattggcaccagatacctgactcgtaatctg

SEQ ID NO: 604 - DNA, 2208 bp, synthetic construct
  source 1..2208: mol_type = other DNA; note = Description of Artificial Sequence: Synthetic polynucleotide
atggctgccgatggttatcttccagattggctcgaggacaaccttagtgaaggaattcgcgagtggtgggctttgaaacctggagcccctcaacccaaggcaaatcaacaacatcaagacaacgctcgaggtcttgtgcttccgggttacaaataccttggacccggcaacggactcgacaagggggagccggtcagcgcagcagacgcggcggccctcgagcacgacaaggcctacgaccagcagctcaaggccggagacaacccgtacctcaagtacaaccacgccgacgccgagttccaggagcggctcaaagaagatacgtcttttgggggcaacctcgggcgagcagtcttccaggccaaaaagaggcttcttgaacctcttggtctggttgaggaagcggctaagacggctcctggaaagaagaggcctgtagagcagtctcctcaggaaccggactcctccgcgggtattggcaaatcgggtgcacagcccgctaaaaagagactcaatttcggtcagactggcgacacagagtcagtcccagaccctcaaccaatcggagaacctcccgcagccccctcaggtgtgggatctcttacaatggcttcaggtggtggcgcaccagtggcagacaataacgaaggtgccgatggagtgggtagttcctcgggaaattggcattgcgattcccaatggctgggggacagagtcatcaccaccagcacccgaacctgggccctgcccacctacaacaatcacctctacaagcaaatctccaacagcacatctggaggatcttcaaatgacaacgcctacttcggctacagcaccccctgggggtattttgacttcaacagattccactgccacttctcaccgcgtgactggcagcgactcatcaacaacaactggggattccggcctaagcgactcaacttcaagctcttcaacattcaggtcaaagaggttacggacaacaatggagtcaagaccatcgccaataaccttaccagcacggtccaggtcttcacggactcagactatcagctcccgtacgtgctcgggtcggctcacgagggctgcctcccgccgttcccagcggacgttttcatgattcctcagtacgggtatctgacgcttaatgatggaagccaggccgtgggtcgttcgtccttttactgcctggaatatttcccgtcgcaaatgctaagaacgggtaacaacttccagttcagctacgagtttgagaacgtacctttccatagcagctacgctcacagccaaagcctggaccgactaatgaatccactcatcgaccaatacttgtactatctctcaaagactattaacggttctggacagaatcaacaaacgctaaaattcagtgtggccggacccagcaacatggctgtccagggaagaaactacatacctggacccagctaccgacaacaacgtgtctcaaccactgtgactcaaaacaacaacagcgaatttgcttggcctggagcttcttcttgggctctcaatggacgtaatagcttgatgaatcctggacctgctatggccagccacaaagaaggagaggaccgtttctttcctttgtctggatctttaatttttggcaaacaaggaactggaagagacaacgtggatgcggacaaagtcatgataaccaacgaagaagaaattaaaactactaacccggtagcaacggagtcctatggacaagtggccacaaaccaccagagtgcccaagcacaggcgcagaccggctgggttcaaaaccaaggaatacttccgggtatggtttggcaggacagagatgtgtacctgcaaggacccatttgggccaaaattcctcacacggacggcaactttcacccttctccgctgatgggagggtttggaatgaagcacccgcctcctcagatcctcatcaaaaacacacctgtacctgcggatcctccaacggccttcaacaaggacaagctgaactctttcatcacccagtattctactggccaagtcagcgtggagatcgagtgggagctgcagaaggaaaacagcaagcgctggaacccggagatccagtacacttccaactattacaagtctaataatgttgaatttgctgttaatactgaaggtgtatatagtgaaccccgccccattggcaccagatacctgactcgtaatctg

SEQ ID NO: 605 - DNA, 2208 bp, synthetic construct
  source 1..2208: mol_type = other DNA; note = Description of Artificial Sequence: Synthetic polynucleotide
atggctgccgatggttatcttccagattggctcgaggacaaccttagtgaaggaattcgcgagtggtgggctttgaaacctggagcccctcaacccaaggcaaatcaacaacatcaagacaacgctcgaggtcttgtgcttccgggttacaaataccttggacccggcaacggactcgacaagggggagccggtcaacgcagcagacgcggcggccctcgagcacgacaaggcctacgaccagcagctcaaggccggagacaacccgtacctcaagtacaaccacgccgacgccgagttccaggagcggctcaaagaagatacgtcttttgggggcaacctcgggcgagcagtcttccaggccaaaaagaggcttcttgaacctcttggtctggttgaggaagcggctaagacggctcctggaaagaagaggcctgtagagcagtctcctcaggaaccggactcctccgcgggtattggcaaatcgggtgcacagcccgctaaaaagagactcaatttcggtcagactggcgacacagagtcagtcccagaccctcaaccaatcggagaacctcccgcagccccctcaggtgtgggatctcttacaatggcttcaggtggtggcgcaccagtggcagacaataacgaaggtgccgatggagtgggtagttcctcgggaaattggcattgcgattcccaatggctgggggacagagtcatcaccaccagcacccgaacctgggccctgcccacctacaacaatcacctctacaagcaaatctccaacagcacatctggaggatcttcaaatgacaacgcctacttcggctacagcaccccctgggggtattttgacttcaacagattccactgccacttctcaccacgtgactggcagcgactcatcaacaacaactggggattccggcctaagcgactcaacttcaagctcttcaacattcaggtcaaagaggttacggacaacaatggagtcaagaccatcgccaataaccttaccagcacggtccaggtcttcacggactcagactatcagctcccgtacgtgctcgggtcggctcacgagggctgcctcccgccgttcccagcggacgttttcatgattcctcagtacgggtatctgacgcttaatgatggaagccaggccgtgggtcgttcgtccttttactgcctggaatatttcccgtcgcaaatgctaagaacgggtaacaacttccagttcagctacgagtttgagaacgtacctttccatagcagctacgctcacagccaaagcctggaccgactaatgaatccactcatcgaccaatacttgtactatctctcaaagactattaacggttctggacagaatcaacaaacgctaaaattcagtgtggccggacccagcaacacggctgtccagggaagaaactacatacctggacccagctaccgacaacaacgtgtctcaaccactgtgactcaaaacaacaacagcgaatttgcttggcctggagcttcttcttgggctctcaatggacgtaatagcttgatgaatcctggacctgctatggccagccacaaagaaggagaggaccgtttctttcctttgtctggatctttaatttttggcaaacaaggaactggaagagacaacgtggatgcggacaaagtcatgataaccaacgaagaagaaattaaaactactaacccggtagcaacggagtcctatggacaagtggccacaaaccaccagagtgcccaagcacaggcgcagaccggctgggttcaaaaccaaggaatacttccgggtatggtttggcaggacagagatgtgtacctgcaaggacccatttgggccaaaattcctcacacggacggcaactttcacccttctccgctgatgggagggtttggaatgaagcacccgcctcctcagatcctcatcaaaaacacacctgtacctgcggatcctccaacggccttcaacaaggacaagctgaactctttcatcacccagtattctactggccaagtcagcgtggagatcgagtgggagctgcagaaggaaaacagcaagcgctggaacccggagatccagtacacttccaactattacaagtctaataatgttgaatttgctgttaatactgaaggtgtatatagtgaaccccgccccattggcaccagatacctgactcgtaatctg

SEQ ID NO: 606 - DNA, 2208 bp, synthetic construct
  source 1..2208: mol_type = other DNA; note = Description of Artificial Sequence: Synthetic polynucleotide
atggctgccgatggttatcttccagattggctcgaggacaaccttagtgaaggaattcgcgagtggtgggctttgaaacctggagcccctcaacccaaggcaaatcaacaacatcaagacaacgctcgaggtcttgtgcttccgggttacaaataccttggacccggcaacggactcgacaagggggagccggtcaacgcagcagacgcggcggccctcgagcacgacaaggcctacgaccagcagctcaaggccggagacaacccgtacctcaagtacaaccacgccgacgccgagttccaggagcggctcaaagaagatacgtcttttgggggcaacctcgggcgagcagtcttccaggccaaaaagaggcttcttgaacctcttggtctggttgaggaagcggctaagacggctcctggaaagaagaggcctgtagagcagtctcctcaggaaccggactcctccgcgggtattggcaaatcgggtgcacagcccgctaaaaagagactcaatttcggtcagactggcgacacagagtcagtcccagaccctcaaccaatcggagaacctcccgcagccccctcaggtgtgggatctcttacaatggcttcaggtggtggcgcaccagtggcagacaataacgaaggtgccgatggagtgggtagttcctcgggaaattggcattgcgattcccaatggctgggggacagagtcatcaccaccagcacccgaacctgggccctgcccacctacaacaatcacctctacaagcaaatctccaacagcacatctggaggatcttcaaatgacaacgcctacttcggctacagcaccccctgggggtattttgacttcaacagattccactgccacttctcaccacgtgactggcagcgactcatcaacaacaactggggattccggcctaagcggctcaacttcaagctcttcaacattcaggtcaaagaggttacggacaacaatggagtcaagaccatcgccaataaccttaccagcacggtccaggtcttcacggactcagactatcagctcccgtacgtgctcgggtcggctcacgagggctgcctcccgccgttcccagcggacgttttcatgattcctcagtacgggtatctgacgcttaatgatggaagccaggccgtgggtcgttcgtccttttactgcctggaatatttcccgtcgcaaatgctaagaacgggtagcaacttccagttcagctacgagtttgagaacgtacctttccatagcagctacgctcacagccaaagcctggaccgactaatgaatccactcatcgaccaatacttgtactatctctcaaagactattaacggttctggacagaatcaacaaacgctaaaattcagtgtggccggacccagcaacatggctgtccagggaagaaactacatacctggacccagctaccgacaacaacgtgtctcaaccactgtgactcaaaacaacaacagcgaatttgcttggcctggagcttcttcttgggctctcaatggacgtaatagcttgatgaatcctggacctgctatggccagccacaaagaaggagaggaccgtttctttcctttgtctggatctttaatttttggcaaacaaggaactggaagagacaacgtggatgcggacaaagtcatgataaccaacgaagaagaaattaaaactactaacccggcagcaacggagtcctatggacaagtggccacaaaccaccagagtgcccaagcacaggcgcagaccggctgggttcaaaaccaaggaatacttccgggtatggtttggcaggacagagatgtgtacctgcaaggacccatttgggccaaaattcctcacacggacggcaactttcacccttctccgctgatgggagggtttggaatgaagcacccgcctcctcagatcctcatcaaaaacacacctgtacctgcggatcctccaacggccttcaacaaggacaagctgaactctttcatcacccagtattctactggccaagtcagcgtggagatcgagtgggagctgcagaaggaaaacagcaagcgctggaacccggagatccagcacacttccaactattacaagtctaataatgttgaatttgctgttaatactgaaggtgtatatagtgaaccccgccccattggcaccagatacctgactcgtaatctg

SEQ ID NO: 607 - DNA, 2208 bp, synthetic construct
  source 1..2208: mol_type = other DNA; note = Description of Artificial Sequence: Synthetic polynucleotide
atggctgccgatggttatcttccagattggctcgaggacaaccttagtgaaggaattcgcgagtggtgggctttgaaacctggagcccctcaacccaaggcaaatcaacaacatcaagacaacgctcgaggtcttgtgcttccgggttacaaataccttggacccggcaacggactcgacaagggggagccggtcaacgcagcagacgcggcggccctcgagcacgacaaggcctacgaccagcagctcaaggccggagacaacccgtacctcaagtacaaccacgccgacgccgagttccaggagcggctcaaagaagatacgtcttttgggggcaacctcgggcgagcagtcttccaggccaaaaagaggcttcttgaacctcttggtctggttgaggaagcggctaagacggctcctggaaagaagaggcctgtagagcagtctcctcaggaaccggactcctccgcgggtattggcaaatcgggtgcacagcccgctaaaaagagactcaatttcggtcagactggcgacacagagtcagtcccagaccctcaaccaatcggagaacctcccgcagccccctcaggtgtgggatctcttacaatggcttcaggtggtggcgcaccagtggcagacaataacgaaggtgccgatggagtgggtagttcctcgggaaattggcattgcgattcccaatggctgggggacagagtcatcaccaccagcacccgaacctgggccctgcccacctacaacaatcacctctacaagcaaatctccaacagcacatctggaggatcttcaaatgacaacgcctacttcggctacagcaccccctgggggtattttgacttcaacagattccactgccacttctcaccacgtgactggcagcgactcatcaacaacaactggggattccggcctaagcgactcaacttcaggctcttcaacattcaggtcaaagaggttacggacaacaatggagtcaagaccatcgccaataaccttaccagcacggtccaggtcttcacggactcagactatcagctcccgtacgtgctcgggtcggctcacgagggctgcctcccgccgttcccagcggacgttttcatgattcctcagtacgggtatctgacgcttaatgatggaagccaggccgtgggtcgttcgtccttttactgcctggaatatttcccgtcgcaaatgctaagaacgggtaacaacttccagttcagctacgagtttgagaacgtacctttccatagcagctacgctcacagccaaagcctggaccgactaatgaatccactcatcgaccaatacttgtactatctctcaaagactattaacggttctggacagaatcaacaaacgctaaaattcagtgtggccggacccagcaacatggctgtccagggaagaaactacatacctggacccagctaccgacaacaacgtgtctcaaccactgtgactcaaaacaacaacagcgaatttgcttggcctggagcttcttcttgggctctcaatggacgtaatagcttgatgaatcctggacctgctatggccagccacaaagaaggagaggaccgtttctttcctttgtctggatctttaatttttggcaaacaaggaactggaagagacaacgtggatgcggacaaagtcatgataaccaacgaagaagaaattaaaactactaacccggtagcaacggagtcctatggacaagtggccacaaaccaccagagtgcccaagcacaggcgcagaccggctgggttcaaagccaaggaatacttccgggtatggtttggcaggacagagatgtgtacctgcaaggacccatttgggccaaaattcctcacacggacggcaactttcacccttctccgctgatgggagggtttggaatgaagcacccgcctccccagatcctcatcaaaaacacacctgtacctgcggatcctccaacggccttcaacaaggacaagctgaactctttcatcacccagtattctactggccaagtcagcgtggagatcgagtgggagctgcagaaggaaaacagcaagcgctggaacccggagatccagtacacttccaactattacaagtctaataatgttgaatttgctgttaatactgaaggtgtatatagtgaaccccgccccattggcaccagatacctgactcgtaatctg

SEQ ID NO: 608 - DNA, 2205 bp, synthetic construct
  source 1..2205: mol_type = other DNA; note = Description of Artificial Sequence: Synthetic polynucleotide
atggctgccgatggttatcttccagattggctcgaggacaaccttagtgaaggaattcgcgagtggtgggctttgaaacctggagcccctcaacccaaggcaaatcaacaacatcaagacaacgcccgaggtcttgtgcttccgggttacaaataccttggacccggcaacggactcgacaagggggagccggtcaacgcagcagacgcggcggccctcgagcacgacaaggcctacgaccagcagctcaaggccggagacaacccgtacctcaagtacaaccacgccgacgccgagttccaggagcggctcaaagaagatacgtcttttgggggcaacctcgggcgagcagtcttccaggccaaaaagaggcttcttgaacctcttggtctggttgaggaagcggctaagacggctcctggaaagaagaggcctgtagagcagtctcctcaggaaccggactcctccgcgggtattggcaaatcgggtgcacagcccgctaaaaagagactcaatttcggtcagactggcgacacagagtcagtcccagaccctcaaccaatcggagaacctcccgcagccccctcaggtgtgggatctcttacaatggcttcaggtggtggcgcaccagtggcagacaataacgaaggtgccgatggagtgggtagttcctcgggaaattggcattgcgattcccaatggctgggggacagagtcatcaccaccagcacccgaacctgggccctgcccacctacaacaatcacctctacaagcaaatctccaacagcacatctggaggatcttcaaatgacaacgcctacttcggctacagcaccccctggaggtattttgacttcaacagattccactgccacttctcaccacgtgactggcagcgactcatcaacaactggggattccggcctaagcgactcaacttcaagctcttcaacattcaggtcaaagaggttacggacaacaatggagtcaagaccatcgccaataaccttaccagcacggtccaggccttcacggactcagactatcagctcccgtacgtgctcgggtcggctcacgagggctgcctcccgccgttcccagcggacgttttcatgattcctcagtacgggtatctgacgcttaatgatggaagccaggccgtgggtcgttcgtccttttactgcctggaatatttcccgtcgcaaatgctaagaacgggtaacaacttccagttcagctacgagtttgagaacgtacctttccatagcagctacgctcacagccaaagcctggaccgactaatgaatccactcatcgaccaatacttgtactatctctcaaagactattaacggttctggacagaatcaacaaacgctaaaattcagtgtggccggacccagcaacatggctgtccagggaagaaactacatacctggacccagctaccgacaacaacgtgtctcaaccactgtgactcaaaacaacaacagcgaatttgcttggcctggagcttcttcttgggctctcaatggacgtaatagcttgatgaatcctggacctgctatggccagccacaaagaaggagaggaccgtttctttcctttgtctggatctttaatttttggcaaacaaggaactggaagagacaacgtggatgcggacaaagtcatgataaccaacgaagaagaaattaaaactactaacccggtagcaacggagtcctatggacaagtggccacaaaccaccagagtgcccaagcacaggcgcagaccggctgggttcaaaaccaaggaatacttccgggtatggtttggcaggacagagatgtgtacctgcaaggacccatttgggccaaaattcctcacacggacggcaactttcacccttctccgctgatgggagggtttggaatgaagcacccgcctcctcagatcctcatcaaaaacacacctgtacctgcggatcctccaacggccttcaacaaggacgagctgaactctttcatcacccagtattctactggccaagtcagcgtggagatcgagtgggagctgcagaaggaaaacagcaagcgctggaacccggagatccagtacacttccaactattacaagtctaataatgttgaatttgctgttaatactgaaggtgtatatagtgaaccccgccccattggcaccagatacctgactcgtaatctg

SEQ ID NO: 609 - DNA, 2205 bp, synthetic construct
  source 1..2205: mol_type = other DNA; note = Description of Artificial Sequence: Synthetic polynucleotide
atggctgccgatggttatcttccagattggctcgaggacaaccttagtgaaggaattcgcgagtggtgggctttgaaacctggagcccctcaacccaaggcaaatcaacaacatcaagacaacgctcgaggtcttgtgcttccgggttacaaataccttggacccggcaacggactcgacaagggggagccggtcaacgcagcagacgcggcggccctcgagcacgacaaggcctacgaccagcagctcaaggccggagacaacccgtacctcaagtacaaccacgccgacgccgagttccaggagcggctcaaagaagatacgtcttttgggggcaacctcgggcgagcagtcttccaggacaaaaagaggcttcttgaacctcttggtctggttgaggaagcggctaagacggctcctggaaagaagaggcctgtagagcagtctcctcaggaaccggactcctccgcgggtattggcaaatcgggtgcacagcccgctaaaaagagactcaatttcggtcagactggcgacacagagtcagtcccagaccctcaaccaatcggagaacctcccgcagccccctcaggtgtgggatctcttacaatggcttcaggtggtggcgcaccagtggcagacaataacgaaggtgccgatggagtgggtagttcctcgggaaattggcattgcgattcccaatggctgggggacagagtcatcaccaccagcacccgaacctgggccctgcccacctacaacaatcacctctacaagcaaatctccaacagcacatctggaggatcttcaaatgacaacgcctacttcggctacagcaccccctgggggtattttgacttcaacagattccactgccacttctcaccacgtgactggcagcgactcatcaacaactggggattccggcctaagcgactcaacttcaagctcttcaacattcaggtcaaagaggttacggacaacaatggagtcaagaccatcgccaataaccttaccagcacggtccaggtcttcacggactcagactatcagctcccgtacgtgctcgggtcggctcacgagggctgcctcccgccgttcccagcggacgttttcatgattcctcagtacgggtatctgacgcttaatgatggaagccaggccgtgggtcgttcgtccttttactgcctggaatatttcccgtcgcaaatgctaagaacgggtaacaacttccaattcagctacgagtttgagaacgtacctttccatagcagctacgctcacagccaaagcctggaccgactaatgaatccactcatcgaccaatacttgtactatctctcaaagactattaacggttctggacagaatcaacaaacgctaaaattcagtgtggccggacccagcaacatggctgtccagggaagaaactacatacctggacccagctaccgacaacaacgtgtctcaaccactgtgactcaaaacaacaacagcgaatttgcttggcctggagcttcttcttgggctctcaatggacgtaatagcttgatgaatcctggacctgctatggccagccacaaagaaggagaggaccgtttctttcctttgtctggatctttaatttttggcaaacaaggaactggaagagacaacgtggatgcggacaaagtcatgataaccaacgaagaagaaattaaaactactaacccggtagcaacggagtcctatggacaagtggccacaaaccaccagagtgcccaagcacaggcgcagaccggctgggttcaaaaccaaggaatacttccgggtatggtttggcaggacagagatgtgtacctgcaaggacccatttgggccaaaattcctcacacggacggcaactttcacccttctccgctgatgggagggtttggaatgaagcacccgcctcctcagatcctcatcaaaaacacacctgtacctgcggatcctccaacggccttcaacaaggacaagctgaactctttcatcacccagtattctactggccaagtcagcgtggagatcgagtgggagctgcagaaggaaaacagcaagcgctggaacccggagatccagtacacttccaactattacaagtctaataatgttgaatttgctgttaatactgaaggtgtatatagtgaaccccgccccattggcaccagatacctgactcgtaatctg

SEQ ID NO: 610 - DNA, 2208 bp, synthetic construct
  source 1..2208: mol_type = other DNA; note = Description of Artificial Sequence: Synthetic polynucleotide
atggctgccgatggttatcttccagattggctcgaggacaaccttagtgaaggaattcgcgagtggtgggctttgaaacctggagcccctcaacccaaggcaaatcaacaacatcaagacaacgctcgaggtcttgtgcttccgggttacaaataccttggacccggcaacggactcgacaagggggagccggtcaacgcagcagacgcggcggccctcgagcacgacaaggcctacgaccagcagctcaaggccggagacaacccgtacctcaagtacaaccacgccgacgccgagttccaggagcggctcaaagaagatacgtcttttgggggcaacctcgggcgagcagtcttccaggccaaaaagaggcttcttgaacctcttggtctggttgaggaagcggctaagacggctcctggaaagaagaggcctgtagagcagtctcctcaggaaccggactcctccgcgggtattggcaaatcgggtgcacagcccgctaaaaagagactcaatttcggtcagactggcgacacagagtcagtcccagaccctcaaccaatcggagaacctcccgcagccccctcaggtgtgggatctcttacaatggcttcaggtggtggcgcaccagtggcagacaataacgaaggtgccgatggagtgggtagttcctcgggaaattggcattgcgattcccaatggctgggggacagagccatcaccaccagcacccgaacctgggccctgcccacctacaacaatcacctctacaagcaaatctccaacagcacatctggaggatcttcaaatgacaacgcctacttcggctacagcaccccctgggggtattttgacttcaacagattccactgccacttctcaccacgtgactggcagcggctcatcaacaacaactggggattccggcctaagcgactcaacttcaagctcttcaacattcaggtcaaagaggttacggacaacaatggagtcaagaccatcgccaataaccttaccagcacggtccaggtcttcacggactcagactatcagctcccgtacgtgctcgggtcggctcacgagggctgcctcccgccgttcccagcggacgttttcatgattcctcagtacgggtatctgacgcttaatgatggaagccaggccgtgggtcgttcgtccttttactgcctggaatatttcccgtcgcaaatgctaagaacgggtaacaacttccagttcagctacgagtttgagaacgtacctttccatagcagctacgctcacagccaaagcctggaccgactaatgaatccactcatcgaccaatacttgtactatctctcaaagactattaacggttctggacagaatcaacaaacgctaaaattcagtgtggccggacccagcaacatggctgtccagggaagaaactacatacctggacccagctaccgacaacaacgtgtctcaaccactgtgactcaaaacaacaacagcgaatttgcttggcctggagcttcttcttgggctctcaatggacgtaatagcttgatgaatcctggacctgctatggccagccacaaagaaggagaggaccgtttctttcctttgtctggatctttaatttttggcaaacaaggaactggaagagacaacgtggatgcggacaaagtcatgacaaccaacgaagaagaaattaaaactactaacccggtagcaacggagtcctatggacaagtggccacaaaccaccagagtgcccaagcacaggcgcagaccggctgggttcaaaaccaaggaatacttccgggtatggtttggcaggacagagatgtgtacctgcaaggacccatttgggccaaaattcctcacacggacggcaactttcacccttctccgctgatgggagggtttggaatgaagcacccgcctcctcagatcctcatcaaaaacacacctgtacctgcggatcctccaacggccttcaacaaggacaagctgaactctttcatcacccagtattctactggccaagtcagcgtggagatcgagtgggagctgcagaaggaaaacagcaagcgctggaacccggagatccagtacacttccaactattacaagtctaataatgttgaatttgctgttaatactgaaggtgtatatagtgaaccccgccccattggcaccagatacctgactcgtaatctg

SEQ ID NO: 611 - DNA, 2208 bp, synthetic construct
  source 1..2208: mol_type = other DNA; note = Description of Artificial Sequence: Synthetic polynucleotide
atggctgccgatggttatcttccagattggctcgaggacaaccttagtgaaggaattcgcgagtggtgggctttgaaacctggagcccctcaacccaaggcaaatcaacaacatcaagacaacgctcgaggtcttgtgcttccgggttacaaataccttggacccggcaacggactcgacaagggggagccggtcaatgcagcagacgcggcggccctcgagcacgacaaggcctacgaccagcagctcaaggccggagacaacccgtacctcaagtacaaccacgccgacgccgagttccaggagcggctcaaagaagatacgtcttttgggggcaacctcgggcgagcagtcttccagaccaaaaagaggcttcttgaacctcttggtctggttgaggaagcggctaagacggctcctggaaagaagaggcctgtagagcagtctcctcaggaaccgggctcctccgcgggtattggcaaatcgggtgcacagcccgctaaaaagagactcaatttcggtcagactggcgacacagagtcagtcccagaccctcaaccaatcggagaacctcccgcagccccctcaggtgtgggatctcttacaatggcttcaggtggtggcgcaccagtggcagacaataacgaaggtgccgatggagtgggtagttcctcgggaaattggcattgcgattcccaatggctgggggacagagtcatcaccaccagcacccgaacctgggccctgcccacctacaacaatcacctctacaagcaaatctccaacagcacatctggaggatcttcaaatgacaacgcctacttcggctacagcaccccctgggggtattttgacttcaacagattccactgccacttctcaccacgtgactggcagcgactcatcaacaacaactggggattccggcctaagcgactcaacttcaagctcttcaacattcaggtcaaagaggttacggacaacaatggagtcaagaccatcgccaataaccttaccagcacggtccaggtcttcacggactcagactatcagctcccgtacgtgctcgggtcggctcacgagggctgcctcccgccgttcccagcggacgttttcatgattcctcagtacgggtatctgacgcttaatgatggaagccaggccgtgggtcgttcgtccttttactgcctggaatatttcccgtcgcaaatgctaagaacgggtaacaacttccagttcagctacgagtttgagaacgtacctttccatagcagctacgctcacagccaaagcctggaccgactaatgaatccactcatcgaccaatacttgcactatctctcaaagactattaacggttctggacagaatcaacaaacgctaaaattcagtgtggccggacccagcaacatggctgtccagggaagaaactacatacctggacccagctaccgacaacaacgtgtctcaaccactgtgactcaaaacaacaacagcgaatttgcttggcctggagcttcttcttgggctctcaatggacgtaatagcttgatgaatcctggacctgctatggccagccacaaagaaggagaggaccgtttctttcctttgtctggatctttaatttttggcaaacaaggaactggaagagacaacgtggatgcggacaaagtcatgataaccaacgaagaagaaattaaaactactaacccggtagcaacggagtcctatggacaagtggccacaaaccaccagagtgcccaagcacaggcgcagaccggctgggttcaaaaccaaggaatacttccgggtatggtttggcaggacagagatgtgtacctgcaaggacccatttgggccaaaattcctcacacggacggcaactttcacccttctccgctgatgggagggtttggaatgaagcacccgcctcctcagatcctcatcaaaaacacacctgtacctgcggatcctccaacggccttcaacaaggacaagctgaactctttcatcacccagtattctactggccaagtcagcgtggagatcgagtgggagctgcagaaggaaaacagcaagcgctggaacccggagatccagtacacttccaactattacaagtctaataatgttgaatttgctgttaatactgaaggtgtatatagtgaaccccgccccattggcaccagatacctgactcgtaatctg

SEQ ID NO: 612 - DNA, 2208 bp, synthetic construct
  source 1..2208: mol_type = other DNA; note = Description of Artificial Sequence: Synthetic polynucleotide
atggctgccgatggttattttccagattggctcgaggacaaccttagtgaaggaattcgcgagtggtgggctttgaaacctggagcccctcaacccaaggcaaatcaacaacatcaagacaacgctcgaggtcttgtgcttccgggttacaaataccttggacccggcaacggactcgacaagggggagccggtcaacgcagcagacgcggcggccctcgagcacgacaaggcctacgaccagcagctcaaggccggagacaacccgtacctcaagtacaaccacgccgacgccgagttccaggagcggctcaaagaagatacgtcttttgggggcaacctcgggcgagcagtcttccaggccaaaaagaggcttcttgaacctcttggtctggttgaggaagcggctaagacggctcctggaaagaagaggcctgtagagcagtctcctcaggaaccggactcctccgcgggtattggcaaatcgggtgcacagcccgctaaaaagagactcaatttcggtcagactggcgacacagagtcagtcccagaccctcaaccaatcggagaatctcccgcagccccctcaggtgtgggatctcttacaatggcttcaggtggtggcgcaccagtggcagacaataacgaaggtgccgatggagtgggtagttcctcgggaaattggcattgcgattcccaatggctgggggacagagtcatcaccaccagcacccgaacctgggccctgcccacctacaacaatcacctctacaagcaaatctccaacagcacatctggaggatcttcaaatgacaacgcctacttcggctacagcaccccctgggggtattttgacttcaacagattccactgccacttctcaccacgtgactggcagcgactcatcaacaacaactggggattccggcctaagcgactcaacttcaagctcttcaacattcaggtcaaagaggttacggacaacaatggagtcaagaccatcgccaataaccttaccagcacggtccaggtcttcacggactcagactatcagctcccgtacgtgctcgggtcggctcacgagggctgcctcccgccgttcccagcggacgttttcatgattcctcagtacgggtatctgacgcttaatgatggaagccaggccgtgggtcgttcgtccttttactgcctggaatatctcccgtcgcaaatgctaagaacgggtaacaacttccagttcagctacgagtttgagaacgtacctttccatagcagctacgctcacagccaaagcctggaccgactaatgaatccactcatcgaccaatacttgcactatctctcaaagactattaacggttctggacagaatcaacaaacgctaaaattcagtgtggccggacccagcaacatggctgtccagggaagaaactacatacctggacccagctaccgacaacaacgtgtctcaaccactgtgactcaaaacaacaacagcgaatttgcttggcctggagcttcttcttgggctctcaatggacgtaatagcttgatgaatcctggacctgctgtggccagccacaaagaaggagaggaccgtttctttcctttgtctggatctttaatttttggcaaacaaggaactggaagagacaacgtggatgcggacaaagtcatgataaccaacgaagaagaaattaaaactactaacccggtagcaacggagtcctatggacaagtggccacaaaccaccagagtgcccaagcacaggcgcagaccggctgggttcaaaaccaaggaatacttccgggtatggtttggcaggacagagatgtgtacctgcaaggacccatttgggccaaaattcctcacacggacggcaactttcacccttctccgctgatgggagggtttggaatgaagcacccgcctcctcagatcctcatcaaaaacacacctgtacctgcggatcctccaacggccttcaacaaggacaagctgaactctttcatcacccagtattctactggccaagtcagcgtggagatcgagtgggagctgcagaaggaaaacagcaagcgctggaacccggagatccagtacacttccaactattacaagtctaataatgttgaatttgctgttaatactgaaggtgtatatagtgaaccccgccccattggcaccagatacctgactcgtaatctg

SEQ ID NO: 613 - DNA, 2208 bp, synthetic construct
  source 1..2208: mol_type = other DNA; note = Description of Artificial Sequence: Synthetic polynucleotide
atggctgccgatggttatcttccagattggctcgaggacaaccttagtgaaggaattcgcgagtggtgggctttgaaacctggagcccctcaacccaaggcaaatcaacaacatcaagacaacgctcgaggtcttgtgcttccgggttacaaataccttggacccggcaacggactcgacaagggggagccggtcaacgcagcagacgcggcggccctcgagcacgacaaggcctacgaccagcagctcaaggccggagacaacccgtacctcaagtacaaccacgccgacgccgagttccaggagcggctcaaagaagatacgtcttttgggggcaacctcgggcgagcagtcttccaggccaaaaagaggcttcttgaacctcttggtccggttgaggaagcggctaagacggctcctggaaagaagaggcctgtagagcagtctcctcaggaaccggactcctccgcgggtattggcaaatcgggtgcacagcccgctaaaaagagactcaatttcggtcagactggcgacacagagtcagtcccagaccctcaaccaatcggagaacctcccgcagccccctcaggtgtgggatctcttacaatggcttcaggtggtggcgcaccagtggcagacaataacgaaggtgccgatggagtgggtagttcctcgggaaattggcattgcgattcccaatggctgggggacagagtcatcaccaccagcacccgaacctgggccctgcccacctacaacaatcacctctacaagcaaatctccaacagcacatctggaggatcttcaaatgacaacgcctacttcggctacagcaccccctgggggtattttgacttcaacagattccactgccacttctcaccacgtgactggcagcgactcatcaacaacaactggggattccggcctaagcgactcaacttcaagctcttcaacattcaggtcaaagaggttacggacaacaatggagtcaagaccatcgccaataaccttaccagcacggtccaggtcttcacggactcagactatcagctcccgtacgtgctcgggtcggctcacgagggctgcctcccgccgttcccagcggacgttttcatgattcctcagtacgggtatctgacgcttaatgatggaagccaggccgtgggtcgttcgtccttttactgcctggaatatttcccgtcgcaaatgctaagaacgggtaacaacttccagttcagctacgagtttgagaacgtacctttccatagcagctacgctcacagccaaagcctggaccgactaatgaatccactcatcgaccaatacttgtactatctctcaaagactattaacggttctggacagaatcaacaaacgctaaaattcagtgtggccggacccagcaacatggctgtccagggaagaaactacatacctggacccagctaccgacaacaacgtgtctcaaccactgtgactcaaaacaacaacagcgaatttgcttggcctggagcttcttcttgggctctcaatggacgtaatagcttgatgaatcctggacctgctatggccagccacaaagaaggagaggaccgtttctttcctttgtctggatctttaatttttggcaaacaaggaactggaagagacaacgtggatgcggacaaagtcatgataaccaacgaagaagaaattaaaactactaacccggtagcaacggagtcctatggacaagcggccacaaaccaccagagtgcccaagcacaggcgcagaccggctgggttcaaaaccaaggaatacttccgggtatggtttggcaggacagagatgtgtacctgcaaggacccatttgggccaaaattcctcacacggacggcaactttcacccttctccgctgatgggagggtttggaatgaagcacccgcctcctcagatcctcatcaaaaacacacctgtacctgcggatcctccaacggccttcaacaaggacaagctgaactctttcatcacccagtattctactggccaagtcagcgtggagatcgagtgggagctgcagaaggaaaacagcaagcgctggaacccggagatccagtacacttccaactattacaagtctaataatgttgaatttgctgttaatactgaaggtgtatatagtgaaccccgccccattggcaccagatacctgactcgtaatctg

SEQ ID NO: 614 - DNA, 2208 bp, synthetic construct
  source 1..2208: mol_type = other DNA; note = Description of Artificial Sequence: Synthetic polynucleotide
atggctgccgatggttatcttccagattggctcgaggacaaccttagtgaaggaattcgcgagtggtgggctttgaaacctggagcccctcaacccaaggcaaatcaacaacatcaagacaacgctcggggtcttgtgcttccgggttacaaataccttggacccggcaacggactcgacaagggggagccggtcaacgcagcagacgcggcggccctcgagcacgacaaggcctacgaccagcagctcaaggccggagacaacccgtacctcaagtacaaccacgccgacgccgagttccaggagcggctcaaagaagatacgtcttttgggggcaacctcgggcgagcagtcttccaggccaaaaagaggcttcttgaacctcttggtccggttgaggaagcggctaagacggctcctggaaagaagaggcctgtagagcagtctcctcaggaaccggactcctccgcgggtattggcaaatcgggtgcacagcccgctaaaaagagactcaatttcggtcagactggcgacacagagtcagtcccagaccctcaaccaatcggagaacctcccgcagccccctcaggtgtgggatctcttacaatggcttcaggtggtggcgcaccagtggcagacaataacgaaggtgccgatggagtgggtagttcctcgggaaattggcattgcgattcccaatggctgggggacagagtcatcaccaccagcacccgaacctgggccctgcccacctacaacaatcacctctacaagcaaatctccaacagcacatctggaggatcttcaaatgacaacgcctacttcggctacagcaccccctgggggtattttgacttcaacagattccactgccacttctcaccacgtgactggcggcgactcatcaacaacaactggggattccggcctaagcgactcaacttcaagctcttcaacattcaggtcaaagaggttacggacaacaatggagtcaagaccatcgccaataaccttaccagcacggtccaggtcttcacggactcagactatcagctcccgtacgtgctcgggtcggctcacgagggctgcctcccgccgttcccagcggacgttttcatgattcctcagtacgggtatctgacgcttaatgatggaagccaggccgtgggtcgttcgtccttttactgcctggaatatttcccgtcgcaaatgctaagaacgggtaacaacttccagttcagctacgagtttgagaacgtacctttccatagcagctacgctcacagccaaagcctggaccgactaatgaatccactcatcgaccaatacttgtactatctctcaaagactattaacggttctggacagaatcaacaaacgctaaaattcagtgtggccggacccagcaacatggctgtccagggaagaaactacatacctggacccagctaccgacaacaacgtgtctcaaccactgtgactcaaaacaacaacagcgaatttgcttggcctggagcttcttcttgggctctcaatggacgtaatagcttgatgaatcctggacctgctatggccagccacaaagaaggagaggaccgtttctttcctttgtctggatctttaatttttggcaaacaaggaactggaagagacaacgtggatgcggacaaagtcatgataaccaacgaagaagaaattaaaactactaacccggtagcaacggagtcctatggacaagtggccacaaaccaccagagtgcccaagcacaggcgcagaccggctgggttcaaaaccaaggaatacttccgggtatggtttggcaggacagagatgtgtacctgcaaggacccatttgggccaaaattcctcacacggacggcaactttcacccttctccgctgatgggagggtttggaatgaagcacccgcctcctcagatcctcatcaaaaacacacctgtacctgcggatcctccaacggccttcaacaaggacaagctgaactctttcatcacccagtattctactggccaagtcagcgtggagatcgagtgggagctgcagaaggaaaacagcaagcgctggaacccggagatccagtacacttccaactattacaagtctaataatgttgaatttgctgttaatactgaaggtgtatatagtgaaccccgccccattggcaccagatacctgactcgtaatctg

SEQ ID NO: 615 - DNA, 2208 bp, synthetic construct
  source 1..2208: mol_type = other DNA; note = Description of Artificial Sequence: Synthetic polynucleotide
atggctgccgatggttatcttccagattggctcgaggacaaccttagtgaaggaattcgcgagtggtgggctttgaaacctggagcccctcaacccaaggcaaatcaacaacatcaagacaacgctcgaggtcttgtgcttccgggttacaaataccttggacccggcaacggactcgacaagggggagccggtcaacgcagcagacgcggcggccctcgagcacgacaaggcctacgaccagcagctcaaggccggagacaacctgtacctcaagtacaaccacgccgacgccgagttccaggagcggctcaaagaagatacgtcttttgggggcaacctcgggcgagcagtcttccaggccaaaaagaggcttcttgaacctcttggtctggttgaggaagcggctaagacggctcctggaaagaagaggcctgtagagcagtctcctcaggaaccggactcctccgcgggtattggcaaatcgggtgcacagcccgctaaaaagagactcaatttcggtcagactggcgacacagagtcagtcccagaccctcaaccaatcggagaacctcccgcagccccctcaggtgtgggatctcttacaatggcttcaggtggtggcgcaccagtggcagacaataacgaaggtgccgatggagtgggtagttcctcgggaaattggcattgcgattcccaatggctgggggacagagtcatcaccaccagcacccgaacctgggccctgcccacctacaacaatcacctctacaagcaaatctccaacagcacatctggaggatcttcaaatgacaacgcctacttcggctacagcaccccctgggggtattttgacttcaacagattccactgccacttctcaccacgtgactggcagcgactcatcaacaacaactggggattccggcctaagcgactcaacttcaagctcttcaacattcaggtcaaagaggttacggacaacaatggagtcaagaccatcgccaataaccttaccagcacggtccaggtcttcacggactcagactatcagctcccgtacgtgctcgggtcggctcacgagggctgcctcccgccgttcccagcggacgttttcatgattcctcagtacgggtatctgacgcttaatgatggaagccaggccgtgggtcgttcgtccttttactgcctggaatatttcccgtcgcaaatgctaagaacgggtaacaacttccagttcagctacgagtttgagaacgtacctttccatagcagctacgctcacagccaaagcctggaccgactaatgaatccactcatcgaccaatacttgcactatctctcaaagactattaacggttctggacagaatcaacaaacgctaaaattcagtgtggccggacccagcaacatggctgtccagggaagaaactacatacctggacccagctaccgacaacaacgtgtctcaaccactgtgactcaaaacaacaacagcgaatttgcttggcctggagcttcttcttgggctctcaatggacgtaatagcttgatgaatcctggacctgctatggccagccacaaagaaggagaggaccgtttctttcctttgtctggatctttaatttttggcaaacaaggaactggaagagacaacgtggatgcggacaaagtcatgataaccaacgaagaagaaattaaaactactaacccggtagcaacggagtcctatggacaagtggccacaaaccaccagagtgcccaagcacaggcgcagaccggctgggttcaaaaccaaggaatacttccgggtatggtttggcaggacagagatgtgtacctgcaaggacccatttgggccaaaattcctcacacggacggcaactttcacccttctccgctgatgggagggtttggaatgaagcacccgcctcctcagatcctcatcaaaaacacacctgtacctgcggatcctccaacggccttcaacaaggacaagctgaactctttcatcacccagtattctactggccaagtcagcgtggagatcgagtgggagctgcagaaggaaaacagcaagcgctggaacccggagatccagtacacttccaactattacaagtctaataatgttgaatttgctgttaatactgaaggtgtatatagtgaaccccgccccattggcaccagatacctgactcgtaatctg

SEQ ID NO: 616 - DNA, 2208 bp, synthetic construct
  source 1..2208: mol_type = other DNA; note = Description of Artificial Sequence: Synthetic polynucleotide
atggctgccgatggttatcttccagattggctcgaggacaaccttagtgaaggaattcgcgagtggtgggctttgaaacctggagcccctcaacccaaggcaaatcaacaacatcaagacaacgctcgaggtcttgtgcttccgggttacaaataccttggacccggcaacggactcgacaagggggagccggtcaacgcagcagacgcggcggccctcgagcacgacaaggcctacgaccagcagctcaaggccggagacaacccgtacctcaagtacaaccacgccgacgccgagttccaggagcggctcaaagaagatacgtcttttgggggcaacctcgggcgagcagtcttccaggccaaaaagaggcttcttgaacctcttggtctggttgaggaagcggctaagacggctcctggaaagaagaggcctgtagagcagtctcctcaagaaccggactcctccgcgggtattggcaaatcgggtgcacagcccgctaaaaagagactcaatttcggtcagactggcgacacagagtcagtcccagaccctcaaccaatcggagaacctcccgcagccccctcaggtgtgggatctcttacaatggcttcaggtggtggcgcaccagtggcagacaataacgaaggtgccgatggagtgggtagttcctcgggaaattggcattgcgattcccaatggctgggggacagagtcatcaccaccagcacccgaacctgggccctgcccacctacaacaatcacctctacaagcaaatctccaacagcacatctggaggatcttcaaatgacaacgcctacttcggctacagcaccccctgggggtattttgacttcaacagattccactgccacttctcaccacgtgactggcagcgactcatcaacaacaactggggattccggcctaagcgactcaacttcaagctcttcaacattcaggtcaaagaggttacggacaacaatggagtcaagaccatcgccaataaccttaccagcacggtccaggtcttcacggactcagactatcagctcccgtacgtgctcgggtcggctcacgagggctgcctcccgccgttcccagcggacgttttcatgattcctcagtacgggtatctgacgcttaatgatggaagccaggccgtgggtcgttcgtccttttactgcctggaatatttcccgtcgcaaatgctaagaacgggtaacaacttccagttcagctacgagtttgagaacgtacctttccatagcagctacgctcacagccaaagcctggaccgactaatgaatccactcatcgaccaatacttgcactatctctcaaagactattaacggttctggacagaatcaacaaacgctaaaattcagtgtggccggacccagcaacatggctgtccagggaagaaactacatacctggacccagctaccgacaacaacgtgtctcaaccactgtgactcaaaacaacaacagcgaatttgcttggcctggagcttcttcttgggctctcaatggacgtaatagcttgatgaatcctggacctgctatggccagccacaaagaaggagaggaccgtttctttcctttgtctggatctttaatttttggcaaacaaggaactggaagagacaacgtggatgcggacaaagtcatgataaccaacgaagaagaaattaaaactactaacccggtagcaacggagtcctatggacaagtggccacaaaccaccagagtgcccaagcacaggcgcagaccggctgggttcaaaaccaaggaatacttccgggtatggtttggcaggacagagatgtgtacctgcaaggacccatttgggccaaaattcctcacacggacggcaactttcacccttctccgctgatgggagggtttggaatgaagcacccgcctcctcagatcctcatcaaaaacacacctgtacctgcggatcctccaacggccttcaacaaggacaagctgaactctttcatcacccagtattctactggccaagtcagcgtggagatcgagtgggagctgcagaaggaaaacagcaagcgctggaacccggagatccagtacacttccaactattacaagtctaataatgttgaatttgctgttaatactgaaggtgtatatagtgaaccccgccccattggcaccagatacctgactcgtaatctg

SEQ ID NO: 617 - DNA, 2208 bp, synthetic construct
  source 1..2208: mol_type = other DNA; note = Description of Artificial Sequence: Synthetic polynucleotide
  misc_difference 1325: note = misc_feature - n is a, c, t, or g
atggctgccgatggttatcttccagattggctcgaggacaaccttagtgaaggaattcgcgagtggtgggctttgaaacctggagcccctcaacccaaggcaaatcaacaacatcaagacaacgctcgaggtcttgtgcttccgggttacaaataccttggacccggcaacggactcgacaagggggagccggtcaacgcagcagacgcggcggccctcgagcacgacaaggcctacgaccagcagctcaaggccggagacaacccgtacctcaagtacaaccacgccgacgccgagttccaggagcggctcaaagaagatacgtcttttgggggcaacctcgggcgagcagtcttccaggccaaaaagaggcttcttgaacctcttggtctggttgaggaagcggctaagacggctcctggaaagaagaggcctgtagagcagtctcctcaggaaccggactcctccgcgggtattggcaaatcgggtgcacagcccgctaaaaagagactcaatttcggtcagactggcgacacagagtcagtcccagaccctcaaccaatcggagaacctcccgcagccccctcaggtgtgggatctcttacaatggcttcaggtggtggcgcaccagtggcagacaataacgaaggtgccgatggagtgggtagttcctcgggaaattggcattgcgattcccaatggctgggggacagagtcatcaccaccagcacccgaacctgggccctgcccacctacaacaatcacctctacaagcaaatctccaccagcacatctggaggatcttcaaatgacaacgcctacttcggctacagcaccccctgggggtattttgacttcaacagattccactgccacttctcaccacgtgactggcagcgactcatcaacaacaactggggattccggcctaagcgactcaacttcaagctcttcaacattcaggtcaaagaggttacggacaacaatggagtcaagaccatcgccaataaccttaccagcacggtccaggtcttcacggactcagactatcagctcccgtacgtgctcgggtcggctcacgagggctgcctcccgccgttcccagcggacgttttcatgattcctcagtacgggtatctgacgcttaatgatggaagccaggccgtgggtcgttcgtccttttactgcctggaatatttcccgtcgcaaatgctaagaacgggtaacaacttccagttcagctacgagtttgagaacgtacctttccatagcagctacgctcacagccaaagcctggaccgactaatgaatccactcatcgaccnatacttgcactatctctcaaagactattaacggttctggacagaatcaacaaacgctaaaattcagtgtggccggacccagcaacatggctgtccagggaagaaactacatacctggacccagctaccgacaacaacgtgtctcaaccactgtgactcaaaacaacaacagcgaatttgcttggcctggagcttcttcttgggctctcaatggacgtaatagcttgatgaatcctggacctgctatggccagccacaaagaaggagaggaccgtttctttcctttgtctggatctttaatttttggcaaacaaggaactggaagagacaacgtggatgcggacaaagtcatgataaccaacgaagaagaaattaaaactactaacccggtagcaacggagtcctatggacaagtggccacaaaccaccagagtgcccaagcacaggcgcagaccggctgggttcaaaaccaaggaatacttccggatatggtttggcaggacagagatgtgtacctgcaaggacccatttgggccaaaattcctcacacggacggcaactttcacccttctccgctgatgggagggtttggaatgaagcacccgcctcctcagatcctcatcaaaaacacacctgtacctgcggatcctccaacggccttcaacaaggacaagctgaactctttcatcacccagtattctactggccaagtcagcgtggagatcgagtgggagctgcagaaggaaaacagcaagcgctggaacccggagatccagtacacttccaactattacaagtctaataatgttgaatttgctgttaatactgaaggtgtatatagtgaaccccgccccattggcaccagatacctgactcgtaatctg

SEQ ID NO: 618 - DNA, 2208 bp, synthetic construct
  source 1..2208: mol_type = other DNA; note = Description of Artificial Sequence: Synthetic polynucleotide
atggctgccgatggttatcttccagattggctcgaggacaaccttagtgaaggaattcgcgagtggtgggctttgaaacctggagcccctcaacccaaggcaaatcaacaacatcaagacaacgctcgaggtcttgtgcttccgggttacaaataccttggacccggcaacggactcgacaagggggagccggtcaacgcagcagacgcggcggccctcgagcacgacaaggcctacgaccagcagctcaaggccggagacaacccgtacctcaagtacaaccacgccgacgccgagttccaggagcggctcaaagaagatacgtcttttgggggcaacctcgggcgagcagtcttccaggccaaaaagaggcttcttgaacctcttggtctggttgaggaagcggctaagacggctcctggaaagaagaggcctgtagagcagtctcctcaggaaccggactcctccgcgggtattggcaaatcgggtgcacagcccgctaaaaagagactcaatttcggtcagactggcgacacagagtcagtcccagaccctcaaccaatcggagaacctcccgcagccccctcaggtgtgggatctcttacaatggcttcaggtggtggcgcaccagtggcagacaataacgaaggtgccgatggagtgggtagttcctcgggaaattggcattgcgattcccaatggctgggggacagagtcatcaccaccagcacccgaacctgggccctgcccacctacaacaatcacctctacaagcaaatctccaacagcacatctggaggatcttcaaatgacaacgcctacttcggctacagcaccccctgggggtattttgacttcaacagattccactgccacttctcaccacgtgactggcagcgactcatcaacaacaactggggattccggcctaagcgactcaacttcaagctcttcaacattcaggtcaaagaggttacggacaacaatggagtcaagaccatcgccaataaccttaccagcacggtccaggtcttcacggactcagactatcagctcccgtacgtgctcgggtcggctcacgagggctgcctcccgccgttcccagcggacgttttcatgattcctcagtacgggtatctgacgcttaatgatggaagccaggccgtgggtcgttcgtccttttactgcctggaatatttcccgtcgcaaatgctaagaacgggtaacaacttccagttcagctacgagtttgagaacgtacctttccatagcagctacgctcacagccaaagcctggaccgactaatgaatccactcatcgaccaatacttgcactatctctcaaagactattaacggttctggacagaatcaacaaacgctaaaattcagtgtggccggacccagcaacatggctgtccagggaagaaactacatacctggacccagctaccgacaacaacgtgtctcaaccactgtgactcaaaacaacaacagcgaatttgcttggcctggagcttcttcttgggctctcaatggacgtaatagcttgatgaatcctggacctgctatggccagctacaaagaaggagaggacagtttctttcctttgtctggatctttaatttttggcaaacaaggaactggaagagacaacgtggatgcggacaaagtcatgataaccaacgaagaagaaattaaaactactaacccggtagcaacggagtcctatggacaagtggccacaaaccaccagagtgcccaagcacaggcgcagaccggctgggttcaaaaccaaggaatacttccgggtatggtttggcaggacagagatgtgtacctgcaaggacccatttgggccaaaattcctcacacggacggcaactttcacccttctccgctgatgggagggtttggaatgaagcacccgcctcctcagaccctcatcaaaaacacacctgtacctgcggatcctccaacggccttcaacaaggacaagctgaactctttcatcacccagtattctactggccaagtcagcgtggagatcgagtgggagctgcagaaggaaaacagcaagcgctggaacccggagatccagtacacttccaactattacaagtctaataatgttgaatttgctgttaatactgaaggtgtatatagtgaaccccgccccattggcaccagatacctgactcgtaatctg

SEQ ID NO: 619 - DNA, 2208 bp, synthetic construct; identical to SEQ ID NO: 602
  source 1..2208: mol_type = other DNA; note = Description of Artificial Sequence: Synthetic polynucleotide

SEQ ID NO: 620 - DNA, 2208 bp, synthetic construct
  source 1..2208: mol_type = other DNA; note = Description of Artificial Sequence: Synthetic polynucleotide
atggctgccgatggttatcttccagattggctcgaggacaaccttagtgaaggaattcgcgagtggtgggctttgaaacctggagcccctcaacccagggcaaatcaacaacatcaagacaacgctcgaggtcttgtgcttccgggttacaaataccttggacccggcaacggactcgacaagggggagccggtcaacgcagccgacgcggcggccctcgagcacgacaaggcctacgaccagcagctcaaggccggagacaacccgtacctcaagtacaaccacgccgacgccgagttccaggagcggctcaaagaagatacgtcttttgggggcaacctcgggcgagcagtcttccaggccaaaaagaggcttcttgaacctcttggtctggttgaggaagcggctaagacggctcctggaaagaagaggcctgtagagcagtctcctcaggaaccggactcctccgcgggtattggcaaatcgggtgcacagcccgctaaaaagagactcaatttcggtcagactggcgacacagagtcagtcccagaccctcaaccaatcggagaacctcccgcagccccctcaggtgtgggatctcttacaatggcttcaggtggtggcgcaccagtggcagacaataacgaaggtgccgatggagtgggtagttcctcgggaaattggcattgcgattcccaatggctgggggacagagtcatcaccaccagcacccgaacctgggccctgcccacctacaacaatcacctctacaagcaaatctccaacagcacatctggaggatcttcaaatgacaacgcctacttcggctacagcaccccctgggggtattttgacttcaacagattccactgccacttctcaccacgtgactggcagcgactcatcaacaacaactggggattccggcctaagcgactcaacttcaagctcttcaacattcaggtcaaagaggttacggacaacaatggagtcaagaccatcgccaataaccttaccagcacggtccaggtcttcacggactcagactgtcagctcccgtacgtgctcgggtcggctcacgagggctgcctcccgccgttcccagcggacgttttcatgattcctcagtacgggtatctgacgcttaatgatggaagccaggccgtgggtcgttcgtccttttactgcctggaatatttcccgtcgcaaatgctaagaacgggtaacaacttccagttcagctacgagtttgagaacgtacctttccatagcagctacgctcacagccaaagcctggaccgactaacgaatccactcatcgaccaatacttgtactatctctcaaagactattaacggttctggacagaatcaacaaacgctaaaattcagtgtggccggacccagcaacatggctgtccagggaagaaactacatacctggacccagctaccgacaacaacgtgtctcaaccactgtgactcaaaacaacaacagcgaatttgcttggcctggagcttcttcttgggctctcaatggacgtaatagcttgatgaatcctggacctgctatggccagccacaaagaaggagaggaccgtttctttcctttgtctggatctttaatttttggcaaacaaggaactggaagagacaacgtggatgcggacaaagtcatgataaccaacgaagaagaaattaaaactactaacccggtagcaacggagtcccatggacaagtggccacaaaccaccagagtgcccaagcacaggcgcagaccggctgggttcaaaaccaaggaatacttccgggtatggtttggcaggacagagatgtgtacctgcaaggacccatttgggccaaaattcctcacacggacggcaactttcacccttctccgctgatgggagggtttggaatgaagcacccgcctcctcagatcctcatcaaaaacacacctgtacctgcggatcctccaacggccttcaacaaggacaagctgaactctttcatcacccagtattctactggccaagtcagcgtggagatcgagtgggagctgcagaaggaaaacagcaagcgctggaacccggagatccagtacacttccaactattacaagtctaataatgttgaatttgctgttaatactgaaggtgtatatagtgaaccccgccccattggcaccagatacctgactcgtaatctg

SEQ ID NO: 621 - DNA, 2208 bp, synthetic construct
  source 1..2208: mol_type = other DNA; note = Description of Artificial Sequence: Synthetic polynucleotide
atggctgccgatggttatcttccagattggctcgaggacaaccttagtgaaggaattcgcgagtggtgggctttgaaacctggagcccctcaacccaaggcaaatcaacaacatcaagacaacgctcgaggtcttgtgcttccgggttacaaataccttggacccggcaacggactcgacaagggggagccggtcaacgcagcagacgcggcggccctcgagcacgacaaggcctacgaccagcagctcaaggccggagacaacccgtacctcaagtacaaccacgccgacgccgagttccaggagcggctcaaagaagatacgtcttttgggggcaacctcgggcgagcagtcttccaggccaaaaagaggcttcttgaacctcttggtctggttgaggaagcggctaagacggctcctggaaagaagaggcctgtagagcagtctcctcaggaaccggactcctccgcgggtattggcaaatcgggtgcacagcccgctaagaagagactcaatttcggtcagactggcgacacagagtcagtcccagaccctcaaccaatcggagaacctcccgcagccccctcaggtgtgggatctcttacaatggcttcaggtggtggcgcaccagtggcagacaataacgaaggtgccgatggagtgggtagttcctcgggaaattggcattgcgattcccaatggctgggggacagagtcatcaccaccagcacccgaacctgggccctgcccacctacaacaatcacctctacaagcaaatctccaacagcacatctggaggatcttcaaatgacaacgcctacttcggctacagcaccccctgggggtattttgacttcaacagattccactgccacttctcaccacgtgactggcagcgactcatcaacaacaactggggattccggcctaagcgactcaacttcaagctcttcaacattcaggtcaaagaggttacggacaacaatggagtcaagaccatcgccaataaccttaccagcacggtccaggtcttcacggactcagactatcagctcccgtacgtgctcgggtcggctcacgagggctgcctcccgccgttcccagcggacgttttcatgattcctcagtacgggtatctgacgcttaatgatggaagccaggccgtgggtcgttcgtccttttactgcctggaatatttcccgtcgcaaatgctaagaacgggtaacaacttccagttcagctacgagtttgagaacgtacctttccatagcagctacgctcacagccaaagcctggaccgactaatgaatccacccatcgaccaatacttgtactatctctcaaagactattaacggttctggacagaatcaacaaacgctaaaattcagtgtggccggacccagcaacatggctgtccagggaagaaactacatacctggacccagctaccgacaacaacgtgtctcaaccactgtgactcaaaacaacaacagcgaatttgcttggcctggagcttcttcttgggctctcaatggacgtaatagcttgatgaatcctggacctgctatggccagccacaaagaaggagaggaccgtttctttcctttgtctggatctttaatttttggcaaacaaggaactggaagagacaacgtggatgcggacaaagtcatgataaccaacgaagaagaaattaaaactactaacccggtagcaacggagtcctatggacaagtggccacaaaccaccagagtgcccaagcacaggcgcagaccggctgggttcaaaaccaaggaatacttccgggtatggtttggcaggacagagatgtgtacctgcaaggacccatttgggccaaaattcctcacacggacggcaactttcacccttctccgctgatgggagggtttggaatgaagcacccgcctcctcagatcctcatcaaaaacacacctgtacctgcggatcctccaacggccttcaacaaggacaagctgaactctttcatcacccagtattctactggccaagtcagcgtggagatcgagtgggagctgcagaaggaaaacagcaagcgctggaacccggagatccagtacacttccaactattacaagtctaataatgttgaatttgctgttaatactgaaggtgtatatggtgaaccccgccccattggcaccagatacctgactcgtaatctg

SEQ ID NO: 622 - DNA, 2208 bp, synthetic construct
  source 1..2208: mol_type = other DNA; note = Description of Artificial Sequence: Synthetic polynucleotide
atggctgccgatggttatcttccagattggctcgaggacaaccttagtgaaggaattcgcgagtggtgggctttgaaacctggagcccctcaacccaaggcaaatcaacaacatcaagacaacgctcgaggtcttgtgcttccgggttacaaataccttggacccggcaacggactcgacaagggggagccggtcaacgcagcagacgcggcggccctcgagcacgacaaggcctacgaccagcagctcaaggccggagacaacccgtacctcaagtacaaccacgccgacgccgagttccaggagcggctcaaagaagatacgtcttttgggggcaacctcgggcgagcagtcttccaggccaaaaagaggcttcttgaacctcttggtctggttgaggaagcggctaagacggctcctggaaagaagaggcctgtagagcagtctcctcaggaaccggactcctccgcgggtattggcaaatcgggtgcacagcccgctaaaaagagactcaatttcggtcagactggcgacacagagtcagtcccagaccctcaaccaatcggagaacctcccgcagccccctcaggtgtgggatctcttacaatggcttcaggtggtggcgcaccagtggcagacaataacgaaggtgccgatggagtgggtagttcctcgggaaattggcattgcgattcccaatggctgggggacagagtcatcaccaccagcacccgaacctgggccctgcccacctacaacaatcacctctacaagcaaatctccaacagcacatctggaggatcttcaaatgacaacgcctacttcggctacagcaccccctgggggtattttgacttcaacagattccactgccacttctcaccacgtgaccggcagcgactcatcaacaacaactggggattccggcctaagcgactcaacttcaagctcttcaacattcaggtcaaagaggttacggacaacaatggagtcaagaccatcgccaataaccttaccagcacggtccaggtcttcacggactcagactatcagctcccgtacgtgctcgggtcggctcacgagggctgcctcccgccgttcccagcggacgttttcatgattcctcagtacgggtatctgacgcttaatgatggaagccaggccgtgggtcgttcgtccttttactgcctggaatatttcccgtcgcaaatgctaagaacgggtaacaacttccagttcagctacgagtttgagaacgtacctttccatagcagctacgctcacagccaaagcctggaccgactaatgaatccactcatcgaccaatacttgtactatctctcaaagactattaacggttctggacagaatcaacaaacgctaaaattcagtgtggccggacccagcaacatggctgtccagggaagaaactacatacctggacccagctaccgacaacaacgtgtctcaaccactgtgactcaaaacaacaacagcgaatttgcttggcctggagcttcttcttgggctctcaatggacgtaatagcttgatgaatcctggacctgctatggccagccacaaagaaggagaggaccgtttctttcctttgtctggatctttaatttttggcaaacaaggaactggaagagacaacgtggatgcggacaaagtcatgataaccaacgaagaagaaattaaaactactaacccggtagcaacggagtcctatggacaagtggccacaaaccaccagagtgcccaagcacaggcgcagaccggctgggttcaaaaccaaggaatacttccgggtatggtttggcaggacagagatgtgtacctgcaaggacccatttgggccaaaattcctcacacggacggcaactttcacccttctccgctgatgggagggtttggaatgaagcacccgcctcctcagatcctcatcaaaaacacacctgtacctgcggatcctccaacggccttcaacaaggacaagctgaactctttcatcacccagtattctactggccaagtcagcgtggagatcgagtgggagctgcagaaggaaaacagcaagcgctggaacccggagatccagtacacttccaactattacaagtctaataatgttgaatttgctgttaatactgaaggtgtatatagtgaaccccgccccattggcaccagatacctgactcgtaatctg

SEQ ID NO: 623 - DNA, 2208 bp, synthetic construct
  source 1..2208: mol_type = other DNA; note = Description of Artificial Sequence: Synthetic polynucleotide
atggctgccgatggttatcttccagattggctcgaggacaaccttagtgaaggaattcgcgagtggtgggctttgaaacctggagcccctcaacccaaggcaaatcaacaacatcaagacaacgctcgaggtcttgtgcttccgggttacaaataccttggacccggcaacggactcgacaagggggagccggtcaacgcagcagacgcggcagccctcgagcacgacaaggcctacgaccagcagctcaaggccggagacaacccgtacctcaagtacaaccacgccgacgccgagttccaggagcggctcaaagaagatacgtcttttgggggcaacctcgggcgagcagtcttccaggccaaaaagaggcttcttgaacctcttggtctggttgaggaagcggctaagacggctcctggaaagaagaggcctgtagagcagtctcctcaggaaccggactcctccgcgggtattggcaaatcgggtgcacagcccgctaaaaagagactcaatttcggtcagactggcgacacagagtcagtcccagaccctcaaccaatcggagaacctcccgcagccccctcaggtgtgggatctcttacaatggcttcaggtggtggcgcaccagtggcagacaataacgaaggtgccgatggagtgggtagttcctcgggaaattggcattgcaattcccaatggctgggggacagagtcatcaccaccagcacccgaacctgggccctgcccacctacaacaatcacctctacaagcaaatctccaacagcacatctggaggatcttcaaatgacaacgcctacttcggctacagcaccccctgggggtattttgacttcaacagattccactgccacttctcaccacgtgactggcagcgactcatcaacaacaactggggattccggcctaagcgactcaacttcaagctcttcaacattcaggtcaaagaggttacggacaacaatggagtcaagaccatcgccaataaccttaccagcacggtccaggtcttcacggactcagactatcagctcccgtacgtgctcgggtcggctcacgagggctgcctcccgccgttcccagcggacgttttcatgattcctcagtacgggtatctgacgcttaatgatggaagccaggccgtgggtcgttcgtccttttactgcctggaatatttcccgtcgcaaatgctaagaacgggtaacaacttccagttcagctacgagtttgagaacgtacctttccatagcagctacgctcacagccaaagcctggaccgactaatgaatccactcatcgaccaatacttgtactatctctcaaagactattaacggttctggacagaatcaacaaacgctaaaattcagtgtggccggacccggcaacatggctgtccagggaagaaactacatacctggacccagctaccgacaacaacgtgtctcaaccactgtgactcaaaacaacaacagcgaatttgcttggcctggagcttcttcttgggctctcaatggacgtaatagcttgatgaatcctggacctgctatggccagccacaaagaaggagaggaccgtttctttcctttgtctggatctttaatttttggcaaacaaggaactggaagagacaacgtggatgcggacaaagtcatgataaccaacgaagaagaaattaaaactactaacccggtagcaacggagtcctatggacaagtggccacaaaccaccagagtgcccaagcacaggcgcagaccggctgggttcaaaaccaaggaatacttccgggtatggtttggcaggacagagatgtgtacctgcaaggacccatttgggccaaaattcctcacacggacggcaactttcacccttctccgctgatgggagggtttggaatgaagcacccgcctcctcagatcctcatcaagaacacacctgtacctgcggatcctccaacggccttcaacaaggacaagctgaactctttcatcacccagtattctactggccaagtcagcgtggagatcgagtgggagctgcagaaggaaaacagcaagcgctggaacccggagatccagtacacttccaactattacaagtctaataatgttgaatttgctgttaatactgaaggtgtatatagtgaaccccgccccattggcaccagatacctgactcgtaatctg

SEQ ID NO: 624 - DNA, 2208 bp, synthetic construct
  source 1..2208: mol_type = other DNA; note = Description of Artificial Sequence: Synthetic polynucleotide
atggctgccgatggttatcttccagattggctcgaggacaaccttagtgaaggaattcgcgagtggtgggctttgaaacctggagcccctcaacccaaggcaaatcaacaacatcaagacaacgctcgaggtcttgtgcttccgggttacagataccttggacccggcaacggactcgacaagggggagccggtcaacgcagcagacgcggcggccctcgagcacgacaaggcctacgaccagcagctcaaggccggagacaacccgtacctcaagtacaaccacgccgacgccgagttccaggagcggctcaaagaagatacgtcttttgggggtaacctcgggcgagcagtcttccaggccaaaaagaggcttcttgaacctcttggtctggttgaggaagcggctaagacggctcctggaaagaagaggcctgtagagcagtctcctcaggaaccggactcctccgcgggtatcggcaaatcgggtgcacagcccgctaaaaagagactcaatttcggtcagactggcgacacagagtcagtcccagaccctcaaccaatcggagaacctcccgcagccccctcaggtgtgggatctcttacaatggcttcaggtggtggcgcaccagtggcagacaataacgaaggtgccgatggagtgggtagttcctcgggaaattggcattgcgattcccaatggctgggggacagagtcatcaccaccagcacccgaacctgggccctgcccacctacaacaatcacctctacaagcaaatctccaacagcacatctggaggatcttcaaatgacaacgcctacttcggctacagcaccccctgggggtattttgacttcaacagattccactgccacttctcaccacgtgactggcagcgactcatcaacaacaactggggattccggcctaagcgactcaacttcaagctcttcaacattcaggtcaaagaggttacggacaacaatggagtcaagaccgtcgccaataaccttaccagcacggtccaggtcttcacggactcagactatcagctcccgtacgtgctcgggtcggctcacgagggctgcctcccgccgttcccagcggacgttttcatgattcctcagtacgggtatctgacgcttaatgatggaagccaggccgtgggtcgttcgtccttttactgcctggaatatttcccgtcgcaaatgctaagaacgggtaacaacttccagttcagctacgagtttgagaacgtacctttccatagcagctacgctcacagccaaagcctggaccgactaatgaatccactcatcgaccaatacttgtactatctctcaaagactattaacggttctggacagaatcaacaaacgctaaaattcagtgtggccggacccagcaacatggctgtccagggaagaaactacatacctggacccagctaccgacaacaacgtgtctcaaccactgtgactcaaaacaacaacagcgaatttgcttggcctggagcttcttcttgggctctcaatggacgtaatagcttgatgaatcctggacctgctatggccagccacaaagaaggagaggaccgtttctttcctttgtctggatctttaatttttggcaaacaaggaactggaagagacaacgtggatgcggacaaagtcatgataaccaacgaagaagaaattaaaactactaacccggtagcaacggagtcctatggacaagtggccacaaaccaccagagtgcccaagcacaggcgcagaccggctgggttcaaaaccaaggaatacttccgggtatggtttggcaggacagagatgtgtacctgcaaggacccatttgggccaaaattcctcacacggacggcaactttcacccttctccgctgatgggagggtttggaatgaagcacccgcctcctcagatcctcatcaaaaacacacctgtacctgcggatcctccaacggccttcaacaaggacaagctgaactctttcatcacccagtattctactggccaagtcagcgtggagatcgagtgggagctgcagaaggaaaacagcaagcgctggaacccggagatccagtacacttccaactattacaagtctaataatgttgaatttgctgttaatactgaaggtgtatatagtggaccccgccccattggcaccagatacctgactcgtaatctg

SEQ ID NO: 625 - DNA, 2208 bp, synthetic construct
  source 1..2208: mol_type = other DNA; note = Description of Artificial Sequence: Synthetic polynucleotide
atggctgccgatggttatcttccagattggctcgaggacaaccttagtgaaggaattcgcgagtggtgggctttgaaacctggagcccctcaacccaaggcaaatcaacaacatcaagacaacgctcgaggtcttgtgcttccgggttacaaataccttggacccggcaacggactcgacaagggggagccggtcaacgcagcagacgcggcggccctcgagcacgacaaggcctacgaccagcagctcaaggccggagacaacccgtacctcaagtacaaccacgccgacgccgagttccaggagcggctcaaagaagatacgtcttttgggggcaacctcgggcgagcagtcttccaggccaaaaagaggcttcttgaacctcttggtctggttgaggaagcggctaagacggctcctggaaagaagaggcctgtagagcagtctcctcaggaaccggactcctccgcgggtattggcaaatcgggtgcacagcccgctaaaaagagactcaatttcggtcagactggcgacacagagtcagtcccagaccctcaaccaatcggagaacctcccgcagccccctcaggtgtgggatctcttacaatggcttcaggtggtggcgcaccagtggcagacaataacgaaggtgccgatggagtgggtagttcctcgggaaattggcattgcgattcccaatggctgggggacagagtcatcaccaccagcacccgaacctgggccctgcccacctacaacaatcacctctacaagcaaatctccaacagcacatctggaggatcttcaaatgacaacgcctacttcggctacagcaccccctgggggtattttgacttcaacagattccactgccacttctcaccacgtgactggcagcgactcatcaacaacaactggggattccggcctaagcgactcaacttcaagctcttcaacattcaggtcaaagaggttacggacaacaatggagtcaagaccatcgccaataaccttaccagcacggtccaggtcttcacggactcagactatcagctcccgtacgtgctcgggtcggctcacgagggctgcctcccgccgttcccagcggacgttttcatgattcctcagtacgggtatctgacgcttaatgatggaagccaggccgtgggtcgttcgtccttttactgcctggaatatttcccgtcgcaaatgctaagaacgggtaacaacttccagttcagctacgagtttgagaacgtacctttccatagcagctacgctcacagccaaagcctggaccgactaatgaatccactcatcgaccaatacttgtactatctctcaaagactattaacggttctggacagaatcaacaaacgctaaaattcagtgtggccggacccagcaacatggctgtccagggaagaaactacatacctggacccagctaccgacaacaacgtgtctcaaccactgtgactcaaaacaacaacagcgaatttgcttggcctggagcttcttcttgggctctcaatggacgtaatagcttgatgaatcctggacctgctatggccagccacaaagaaggagaggaccgtttctttcctttgtctggatctttaatttttggcaaacaaggaactggaagagacaacgtggatgcggacaaagtcatgataaccaacgaagaagaaattaaaactactaacccggtagcaacggagtcctatggacaagtggccacaaaccaccagagtgcccaagcacaggcgcagaccggctgggttcaaaaccaaggaatacttccgggtatggtttggcaggacagagatgtgtacctgcaaggacccatttgggccaaaattcctcacacggacggcaactttcacccttctccgctgatgggagggtttggaatgaagcacccgcctcctcagatcctcatcaaaaacacacctgtacctgcggatcctccaacggccttcaacaaggacaagctgaactctttcatcacccagtattctactggccaagtcagcgtggagatcgagtgggagctgcagaaggaaaacagcaagcgctggaacccggagatccagtacacttccaactattacaagtctaataatgttgaatttgctgttaatactgaaggtgtatatagtgaaccccgccccattggcaccagatacctgactcgtaatctg

SEQ ID NO: 626 - DNA, 2208 bp, synthetic construct
  source 1..2208: mol_type = other DNA; note = Description of Artificial Sequence: Synthetic polynucleotide
atggctgccgatggttatcttccagattggctcgaggacaaccttagtgaaggaattcgcgagtggtgggctttgaaacctggagcccctcaacccaaggcaaatcaacaacgtcaagacaacgctcgaggtcttgtgcttccgggttacaaataccttggacccggcaacggactcgacaagggggagccggtcaacgcagcagacgcggcggccctcgagcacgacaaggcctacgaccagcagctcaaggccggaggcaacccgtgcctcaagtacaaccacgccgacgccgagttccaggagcggctcaaagaagatacgtcttttgggggcaacctcgggcgagcagtcttccaggccaaaaagaggcttcttgaacctcttggtctggttgaggaagcggctaagacggctcctggaaagaagaggcctgtagagcagtctcctcaggaaccggactcctccgcgggtattggcagatcgggtgcacagcccgctaaaaagagactcaatttcggtcagactggcgacacagagtcagtcccagaccctcaaccaatcggagaacctcccgcagccccctcaggtgtgggatctcttacaatggcttcaggtggtggcgcaccagtggcagacaataacgaaggtgccgatggagtgggtagttcctcgggaaattggcattgcgattcccaatggctgggggacagagtcatcaccaccagcacccgaacctgggccctgcccacctacaacaatcacctctacaagcaaatctccaacagcacatctggaggatcttcaaatgacaacgcctacttcggctacagcaccccctgggggtattttgacttcaacagattccactgccacttctcaccacgtgactggcagcgactcatcaacaacaactggggattccggcctaagcgactcaacttcaagctcttcaacattcaggtcaaagaggttacggacaacaatggagtcaaggccatcgccaataaccttaccagcacggtccaggtcttcacggactcagactatcagctcccgtacgtgctcgggtcggctcacgagggctgcctcccgccgttcccagcggacgttttcatgattcctcagtacgggtatctgacgcttaatgatggaagccaggccgtgggtcgttcgtccttttactgcctggaatatttcccgtcgcaaatgctaagaacgggtaacaacttccagttcagctacgagtttgagaacgtacctttccatagcagctacgctcacagccaaagcctggaccgactaatgaatccactcatcgaccaatacttgtactatctctcaaagactattgacggttctggacagaatcaacaaacgctaaaattcagtgtggccggacccagcaacatggctgtccagggaagaaactacatacctggacccagctaccgacaacaacgtgtctcaaccactgtgactcaaaacaacaacagcgaatttgcttggcctggagcttcttcttgggctctcaatggacgtaatagcttgatggatcctggacctgctatggccagccacaaagaaggagaggaccgtttctttcctttgtctggatctttaatttttggcaaacaaggaactggaagagacaacgtggatgcggacaaagtcatgataaccaacgaagaagaaattaaaactactaacccggtagcaacggagtcctatggacaagtggccacaaaccaccagagtgcccaagcacaggcgcagaccggctgggttcaaaaccaaggaatacttccgggtatggtttggcaggacagagatgtgtacctgcaaggacccatttgggccaaaattcctcacacgggcggcaactttcacccttctccgctgatgggagggtttggaatgaagcacccgcctcctcagatcctcatcaaaaacacacctgtacctgcggatcctccaacggccttcaacaaggacaagctgaactctttcatcacccagtattctactggccaagtcagcgtggagatcgagtgggagctgcagaaggaaaacagcaagcgctggaacccggagatccagtacacttccaactattacaagtctaataatgttgaatttgctgttaatactgaaggtgtatatagtgaaccccgccccattggcaccagatacctgactcgtaatctg

SEQ ID NO: 627 - DNA, 2208 bp, synthetic construct
  source 1..2208: mol_type = other DNA; note = Description of Artificial Sequence: Synthetic polynucleotide
atggctgccgatggttatcttccagattggctcgaggacaaccttagtgaaggaattcgcgagtggtgggctttgaaacctggagcccctcaacccaaggcaaatcaacaacatcaagacaacgctcgaggtcttgtgcttccgggttacaaataccttggacccggcaacggactcgacaagggggagccggtcaacgcagcagacgcggcggccctcgagcacgacaaggcctacgaccagcagctcaaggccggagacaacccgtacctcaagtacaaccacgccgacgccgagttccaggagcggctcaaagaagatacgtcttttgggggcaacctcgggcgagcagtcttccaggccaaaaagaggcttcttgaacctcttggtctggttgaggaagcggctaagacggctcctggaaagaagaggcctgtagagcagtctcctcaggaaccggactcctccgcgggtattggcaaatcgggtgcacagcccgctaaaaagagactcaatttcggtcagactggcgacacagagtcagtcccagaccctcaaccaatcggagaacctcccgcagccccctcaggtgtgggatctcttacaatggcttcaggtggtggcgcaccagtggcagacaataacgaaggtgccgatggagtgggtagttcctcgggaaattggcattgcgattcccaatggctgggggacagagtcatcaccaccagcacccgaacctgggccctgcccacctacaacaatcacctctacaagcaaatctccaacagcacatctggaggatcttcaaatgacaacgcctacttcggctacagcaccccctgggggtattttgacttcaacagattccactgccacttctcaccacgtgactggcagcgactcatcaacaacaactggggattccggcctaagcgactcaacttcaagctcttcaacattcaggtcaaagaggttacggacaacaatggagtcaagaccatcgccaataaccttaccagcacggtccaggtcttcacggactcagactatcagctcccgtacgtgctcgggtcggctcacgagggctgcctcccgccgttcccagcggacgttttcatgattcctcagtacgggtatctgacgcttaatgatggaagccaggccgtgggtcgttcgtccttttactgcctggaatatttcccgtcgcaaatgctaagaacgggtaacaacttccagttcagctacgagtttgagaacgtacctttccatagcagctacgctcacagccaaagcctggaccgactaatgaatccactcatcgaccaatacttgtactatctctcaaagactattaacggttctggacagaatcaacaaacgctaaaattcagtgtggccggacccagcaacatggctgtccagggaagaaactacatacctggacccagctaccgacaacaacgtgtctcaaccactgtgactcaaaacaacaacagcgaatttgcttggcctggagcttcttcttgggctctcaatggacgtaatagcttgatgaatcctggacctgctatggccagccacaaagaaggagaggaccgtttctttcctttgtctggatctttaatttttggcaaacaaggaactggaagagacaacgtggatgcggacaaagtcatgataaccaacgaagaagaaattaaaactactaacccggtagcaacggagtcctatggacaagtggccacaaaccaccagagtgcccaagcacaggcgcagaccggctgggttcaaaaccaaggaatacttccgggtatggtttggcaggacagagatgtgtacctgcaaggacccatttgggccaaaattcctcacacggacggcaactttcacccttctccgctgatgggagggtttggaatgaagcacccgcctcctcagatcctcatcaaaaacacacctgtacctgcggatcctccaacggccttcaacaaggacaagctgaactctttcatcacccagtattctactggccaagtcagcgtggagatcgagtgggagctgcagaaggaaaacagcaagcgctggaacccggagatccagtacacttccaactattacaagcctaataatgttgaatttgctgttaatactgaaggtgtatatagtgaaccccgccccattggcaccagatacctgactcgtaatctg

SEQ ID NO: 628 - DNA, 2208 bp, synthetic construct
  source 1..2208: mol_type = other DNA; note = Description of Artificial Sequence: Synthetic polynucleotide
atggctgccgatggttatcttccagattggctcgaggacaaccttagtgaaggaattcgcgagtggtgggctttgaaacctggagcccctcaacccaaggcaaatcaacaacatcaagacaacgctcgaggtcttgtgcttccgggttacaaataccttggacccggcaacggactcgacaagggggagccggtcaacgcagcagacgcggcggccctcgagcacaacaaggcctacgaccagcagctcaaggccggagacaacccgtacctcaagtgcaaccacgccgacgccgagttccaggagcggctcaaagaagatacgtcttttgggggcaacctcgggcgagcagtcttccaggccaaaaagaggcctcttgaacctcttggtctggttgaggaagcggctaagacggctcctggaaagaagaggcctgtagagcagtctcctcaggaaccggactcctccgcgggtattggcaaatcgggtgcacagcccgctaaaaagagactcaatttcggtcagactggcgacacagagtcagtcccagaccctcaaccaatcggagaacctcccgcagccccctcaggtgtgagatctcttacaatggcttcaggtggtggcgcaccagtggcagacaataacgaaggtgccgatggagtgggtagttcctcgggaaattggcattgcgattcccaatggctgggggacagagtcatcaccaccagcacccgaacctgggccctgcccacctacaacaatcacctctacaagcaaatctccaacagcacatctggaggatcttcaaatgacaacgcctacctcggctacagcaccccctgggggtattttgacttcaacagattccactgccacttctcaccacgtgactggcagcgactcatcaacaacaactggggattccggcctaagcgactcaacttcaagctcttcaacattcaggtcaaagaggttacggacaacaatggagtcaagaccatcgccaataaccttaccagcacggtccaggtcttcacggactcagactatcagctcccgtacgtgctcgggtcggctcacgagggctgcctcccgccgttcccagcggacgttttcatgattcctcagtacgggtatctgacgcttaatgatggaagccaggccgtgggtcgttcgtccttttactgcctggaatatttcccgtcgcaaatgctaagaacgggtaacaacttccagttcagctacgagtttgagaacgtacctttccatagcagctacgctcacagccaaagcctggaccgactaatgaatccactcatcgaccaatacttgtactatctctcaaagactattaacggttctggacagaatcaacaaacgctaaaattcagtgtggccggacccagcaacatggctgtccagggaagaaactacatacctggacccagctaccgacaacaacgtgtctcaaccactgtgactcaaaacaacaacagcgaatttgcttggcctggagcttcttcttgggctctcaatggacgtaatagcttgatgaatcctggacctactatggccagccacaaagaaggagaggaccgtttctttcctttgtctggatctttaatttttggcaaacaaggaactggaagagacaacgtggatgcggacaaagtcatgataaccaacgaagaagaaattaaaactactaacccggtagcaacggagtcctatggacaagtggccacaaaccaccagagtgcccaagcacaggcgcagaccggctgggttcaaaaccaaggaatacttccgggtatggtttggcaggacagagatgtgtacctgcaaggacccatttgggccaaaattcctcacacggacggcaactttcacccttctccgctgatgggagggtttggaatgaagcacccgcctcctcagatcctcatcaaaaacacacctgtacctgcggatcctccaacggccttcaacaaggacaagctgaactctttcatcacccagtattctactggccaagtcagcgtggagatcgagtgggagctgcagaaggaaaacagcaagcgctggaacccggagatccagtacacttccaactattacaagtctaataatgttgaatttgctgttaatactgaaggtgtatatagtgaaccccgccccattggcaccagatacctgactcgtaatctg

SEQ ID NO: 629 - DNA, 2208 bp, synthetic construct
  source 1..2208: mol_type = other DNA; note = Description of Artificial Sequence: Synthetic polynucleotide
atggctgccgatggttatcttccagattggctcgaggacaaccttagtgaaggaattcgcgagtggtgggctttgaaacctggagcccctcaacccaaggcaaatcaacaacatcaagacaacgctcgaggtcttgtgcttccgggttacaaataccttggacccggcaacggactcgacaagggggagccggtcaacgcagcagacgcggcggccctcgtgcacgacaaggcctacgaccagcagctcaaggccggagacaacccgtacctcaagtgcaaccacgccgacgccgagttccaggagcggctcaaagaagatacgtcttttgggggcaacctcgggcgagcagtcttccaggccaaaaagaggcttcttgaacctcttggtctggttgaggaagcggctaagacggctcctggaaagaagaggcctgtagagcagtctcctcaggaaccggactcctccgcgggtattggcaaatcgggtgcacagcccgctaaaaagagactcaatttcggtcagactggcgacacagagtcagtcccagaccctcaaccaatcggagaacctcccgcagccccctcaggtgtgggatctcttacaatggcttcaggtggtggcgcaccagtggcagacaataacgaaggtgccgatggagtgggtagttcctcgggaaattggcattgcgattcccaatggctgggggacagagtcatcaccaccagcacccgaacctgggccctgcccacctacaacaatcacctctacaagcaaatctccaacagcacatctggaggatcttcaaatgacaacgcctacctcggctacagcaccccctgggggtattttgacttcaacagattccactgccacttctcaccacgtgactggcagcgactcatcaacaacaactggggattccggcctaagcgactcaacttcaagctcttcaacattcaggtcaaagaggttacggacaacaatggagtcaagaccatcgccaataaccttaccagcacggtccaggtcttcacggactcagactatcagctcccgtacgtgctcgggtcggctcacgagggctgcctcccgccgttcccagcggacgttttcacgattcctcagtacgggtatctgacgcttaatgatggaagccaggccgtgggtcgttcgtccttttactgcctggaatatttcccgtcgcaaatgctaagaacgggtaacaacttccagttcagctacgagtttgagaacgtacctttccatagcagctacgctcacagccaaagcctggaccgactaatgaatccactcatcgaccaatacttgtactatctctcaaagactattaacggttctggacagaatcaacaaacgctaaaattcagtgtggccggacccagcaacatggctgtccagggaagaaactacatacctggacccagctaccgacaacaacgtgtctcaaccactgtgactcaaaacaacaacagcgaatttgcttggcctggagcttcttcttgggctctcaatggacgtaatagcttgatgaatcctggacctgctatggccagccacaaagaaggagaggaccgtttctttcctttgtctggatctttaatttttggcaaacaaggaactggaagagacaacgtggatgcggacaaagtcatgataaccaacgaagaagaaattaaaactactaacccggtagcaacggagtcctatggacaagtggccacaaaccaccagagtgcccaagcacaggcgcagaccggctgggttcaaaaccaaggaatacttccgggtatggtttggcaggacagagatgtgtacctgcaaggacccatttgggccaaaattcctcacacggacggcaactttcacccttctccgctgatgggagggtttggaatgaagcacccgcctcctcagatcctcatcaaaaacacacctgtacctgcggatcctccaacggccttcaacaaggacaagctgaactctttcatcacccagtattctactggccaagtcagcgtggagatcgagtgggagctgcagaaggaaaacagcaagcgctggaacccggagatccagtacacttccaactattacaagtctaataatgttgaatttgctgttaatactgaaggtgtatatagtgaaccccgccccattgggccccgatacctgactcgtaatttt

SEQ ID NO: 630 - DNA, 2208 bp, synthetic construct
  source 1..2208: mol_type = other DNA; note = Description of Artificial Sequence: Synthetic polynucleotide
atggctgccgatggttatcttccagattggctcgaggacaaccttagtgaaggaattcgcgagtggtgggctttgaaacctggagcccctcaacccaaggcaaatcaacaacatcaagacaacgctcgaggtcttgtgcttccgggttacaaataccttggacccggcaacggactcgacaagggggagccggtcaacgcagcagacgcggcggccctcgagcacaacaaggcctacgaccagcagctcaaggccggagacaacccgtacctcaagtgcaaccacgccgacgccgagttccaggagcggctcaaagaagatacgtcttttgggggcaacctcgggcgagcagtcttccaggccaaaaagaggcttcttgaacctcttggtctggttgaggaagcggctaagacggctcctggaaagaagaggcctgtagagcagtctcctcaggaaccggactcctccgcgggtattggcaaatcgggtgcacagcccgctaaaaagagactcaatttcggtcagactggcgacacagagtcagtcccagaccctcaaccaatcggagaacctcccgcagccccctcaggtgtgagatctcttacaatggcttcaggtggtggcgcaccagtggcagacaataacgaaggtgccgatggagtgggtagttcctcgggaaattggcattgcgattcccaatggctgggggacagagtcatcaccaccagcacccgaacctgggccctgcccacctacaacaatcacctctacaagcaaatctccaacagcacatctggaggatcttcaaatgacaacgcctacctcggctacagcaccccctgggggtattttgacttcaacagattccactgccacttctcaccacgtgactggcagcgactcatcaacaacaactggggattccggcctaagcgactcaacttcaagctcttcaacattcaggtcaaagaggttacggacaacaatggagtcaagaccatcgccaataaccttaccagcacggtccaggtcttcacggactcagactatcagctcccgtacgtgctcgggtcggctcacgagggctgcctcccgccgttcccagcggacgttttcatgattcctcagtacgggtatctgacgcttaatgatggaagccaggccgtgggtcgttcgtccttttactgcctggaatatttcccgtcgcaaatgctaagaacgggtaacaacttccagttcagctacgagtttgagaacgtacctttccatagcagctacgctcacagccaaagcctggaccgactaatgaatccactcatcgaccaatacttgtactatctctcaaagactattaacggttctggacagaatcaacaaacgctaaaattcagtgtggccggacccagcaacatggctgtccagggaagaaactacatacctggacccagctaccgacaacaacgtgtctcaaccactgtgactcaaaacaacaacagcgaatttgcttggcctggagcttcttcttgggctctcaatggacgtaatagcttgatgaatcctggacctgctatggccagccacaaagaaggagaggaccgtttctttcctttgtctggatctttaatttttggcaaacaaggaactggaagagacaacgtggatgcggacaaagtcatgataaccaacgaagaagaaattaaaactactaacccggtagcaacggagtcctatggacaagtggccacaaaccaccagagtgcccaagcacaggcgcagaccggctgggttcaaaaccaaggaatacttccgggtatggtttggcaggacagagatgtgtacctgcaaggacccatttgggccaaaattcctcacacggacggcaactttcacccttctccgctgatgggagggtttggaatgaagcacccgcctcctcagatcctcatcaaaaacacacctgtacctgcggatcctccaacggccttcaacaaggacaagctgaactctttcatcacccagtattctactggccaagtcagcgtggagatcgagtgggagctgcagaaggaaaacagcaagcgctggaacccggagatccagtacacttccaactattacaagtctaataatgttgaatttgctgttaatactgaaggtgtatatagtgaaccccgccccattggcaccagatacctgactcgtaatctg

SEQ ID NO: 631 - DNA, 2208 bp, synthetic construct
  source 1..2208: mol_type = other DNA; note = Description of Artificial Sequence: Synthetic polynucleotide
atggctgccgatggttatcttccagattggctcgaggacaaccttagtgaaggaattcgcgagtggtgggctttgaaacctggagcccctcaacccaaggcaaatcaacaacatcaagacaacgctcgaggtcttgtgcttccgggttacaaataccttggacccggcaacggactcgacaagggggagccggtcaacgcagcagacgcggcggccctcgagcacgacaaggcctacgaccagcagctcaaggccggagacaacccgtacctcaagtgcaaccacgccgacgccgagttccaggagcggctcaaagaagatacgtcttttgggggcaacctcgggcgagcagtcttccaggccaaaaagaggcttcttgaacctcttggtctggttgaggaagcggctaagacggctcctggaaagaagaggcctgtagagcagtctcctcaggaaccggactcctccgcgggtattggcaaatcgggtgcacagcccgctaaaaagagactcaatttcggtcagactggcgacacagagtcagtcccagaccctcaaccaatcggagaacctcccgcagccccctcaggtgtgggatctcttacaatggcttcaggcggtggcgcaccagtggcagacaataacgaaggtgccgatggagtgggtagttcctcgggaaattggcattgcgattcccaatggctgggggacagagtcatcaccaccagcacccgaacctgggccctgcccacctacaacaatcacctctacaagcaaatctccaacagcacatctggaggatcttcaaatgacaacgcctacctcggctacagcaccccctgggggtattttgacttcaacagattccactgccacttctcaccacgtgactggcagcgactcatcaacaacaactggggattccggcctaagcgactcaacttcgagctcttcaacattcaggtcaaagaggttacggacaacaatggagtcaagaccatcgccaataaccttaccagcacggtccaggtcttcacggactcagactatcagctcccgtacgtgctcgggtcggctcacgagggctgcctcccgccgttcccagcggacgttttcatgattcctcagtacgggtatctgacgcttaatgatggaagccaggccgtgggtcgttcgtccttttactgcctggaatatttcccgtcgcaaatgctaagaacgggtaacaacttccagtccagctacgagtttgagaacgtacctttccatagcagctacgctcacagccaaagcctggaccgactaatgaatccactcatcgaccaatacttgtactatctctcaaagactattaacggttctggacagaatcaacaaacgctaaaattcagtgtggccggacccagcaacatggctgtccagggaagaaactacatacctggacccagctaccgacaacaacgtgcctcaaccactgtgactcaaaacaacaacagcgaatttgcttggcctggagcttcttcttgggctctcaatggacgtaatagcttgatgaatcctggacctgctatggccagccacaaagaaggggaggaccgtttctttcctttgtctggatctttaatttttggcaaacaaggaactggaagagacaacgtggatgcggacaaagtcatgataaccaacgaagaagaaattaaaactactaacccggtagcaacggagtcctatggacaagtggccacaaaccaccagagtgcccaagcacaggcgcagaccggctgggttcaaaaccaaggaatacttccgggtatggtttggcaggacagagatgtgtacctgcaaggacccatttgggccaaaattcctcacacggacggcaactttcacccttctccgctgatgggagggtttggaatgaagcacccgcctcctcagatcctcatcaaaaacacacctgtacctgcggatcctccaacggccttcaacaaggacaagctgaactctttcatcacccagtattctactggccaagtcagcgtggagatcgagtgggagctgcagaaggaaaacagcaagcgctggaacccggagatccagtacacttccaactattacaagtctaataatgttgaatttgctgttaatactgaaggtgtatatagtgaaccccgccccattggcaccagatacctgactcgtaatctg

SEQ ID NO: 632 - DNA, 2208 bp, synthetic construct
  source 1..2208: mol_type = other DNA; note = Description of Artificial Sequence: Synthetic polynucleotide
atggctgccgatggttatcttccagattggctcgaggacaaccttagtgaaggaattcgcgagtggtgggctttgaaacctggagcccctcaacccaaggcaaatcaacaacatcaagacaacgctcgaggtcttgtgcttccgggttacaaataccttggacccggcaacggactcgacaagggggagccggtcaacgcagcagacgcggcggccctcgagcacgacaaggcctacgaccagcagctcaaggccggagacaacccgtacctcaagtgcaaccacgccgacgccgagttccaggagcggctcaaagaagatacgtcttttgggggcaacctcgggcgagcagtcttccaggccaaaaagaggcttcttgaacctcttggtctggttgaggaagcggctaagacggctcctggaaagaagaggcctgtagagcagtctcctcaggaaccggactcctccgcgggtattggcaaatcgggtgcacagcccgctaaaaagagactcaatttcggtcagactggcgacacagagtcagtcccagaccctcaaccaatcggagaacctcccgcagcccccccaggtgtgggatctcttacaatggcttcaggtggtggcgcaccagtggcggacaataacgaaggtgccgatggagtgggtagttcctcgggaaattggcattgcgattcccaatggctgggggacagagtcatcaccaccagcacccgaacctgggccctgcccacctacaacaatcacctctacaagcaaatctccaacagcacatctggaggatcttcaaatgacaacgcctacctcggctacagcaccccctgggggtattttgacttcaacagattccactgccacttctcaccacgtgactggcagcgactcatcaacaacaactggggattccggcctaagcgactcaacttcaagctcttcaacattcaggtcaaagaggttacggacaacaatggagtcaagaccatcgccaataaccttaccagcacggtccaggtcttcacggactcagactatcagctcccgtacgtgctcgggtcggctcacgagggctgcctcccgccgttcccagcggacgttttcatgattcctcagtacgggtatctgacgcttaatgatggaagccaggccgtgggtcgttcgtccttttactgcctggaatatttcccgtcgcaaatgctaagaacgggtaacaacttccagttcagctacgagtttgagaacgtacctttccatagcagctacgctcacagccaaagcctggaccgactaatgaatccactcatcgaccaatacttgtactatctctcaaagactattagcggttctggacagaatcaacaaacgctaaaattcagtgtggccggacccagcaacatggctgtccagggaagaaactacatacctggacccagctaccgacaacaacgtgtctcaaccactgtgactcaaaacaacagcagcgaatttgcttggcctggagcttcttcttgggctctcaatggacgtaatagcttgatgaatcctggacctgctatggccagccacaaagaaggagaggaccgtttctttcctttgtctggatctttaatttttggcaaacaaggaactggaagagacaacgtggatgcggacaaagtcatgataaccaacgaagaagaaattaaaactactaacccggtagcaacggagtcctatggacaagtggccacaaaccaccagagtgcccaagcacaggcgcagaccggctgggttcaaaaccaaggaatactttcgggtatggtttggcaggacagagatgtgtacctgcaaggacccatttgggccaaaattcctcacacggacggcaactttcacccttctccgctgatgggagggtttggaatgaagcacccgcctcctcagatcctcatcaaaaacacacctgtacctgcggatcctccaacggccttcaacaaggacaagctgaactctttcatcacccagtattctactggccaagtcagcgtggagatcgagtgggagctgcagaaggaaaacagcaagcgctggaacccggagatccagtacacttccaactattacaagtctaataatgttgaatttgctgttaatactgaaggtgtatatagtgaaccccgccccattggcaccagatacctgactcgtaatctg

SEQ ID NO: 633 - DNA, 2208 bp, synthetic construct
  source 1..2208: mol_type = other DNA; note = Description of Artificial Sequence: Synthetic polynucleotide
atggctgccgatggttatcttccagattggctcgaggacaaccttagtgaaggaattcgcgagtggtgggctttgaaacctggagcccctcaacccaaggcaaatcaacaacatcaagacaacgctcgaggtcttgtgcttccgggttacaaataccttggacccggcaacggactcgacaagggggagccggtcaacgcagcagacgcggcggccctcgagcacgacaaggcctacgaccagcagctcaaggccggagacaacccgtacctcaagtgcaaccacgccgacgccgagttccaggagcggctcaaagaagatacgtcttttgggggcaacctcgggcgagcagtcttccaggccaaaaagaggcttcttgaacctcttggtctggttgaggaagcggctaagacggctcctggaaagaagaggcctgtagagcagtctcctcaggaaccggactcctccgcgggtattggcaaatcgggtgcacagcccgctaaaaagagactcaatttcggtcagactggcgacacagagtcagtcccagaccctcaaccaatcggagaacctcccgcagccccctcaggtgtgggatctcttacaatggcttcaggtggtggcgcaccagtggcagacaataacgaaggtgccgatggagtgggtagttcctcgggaaattggcattgcgattcccaatggctgggggacagagtcatcaccaccagcacccgaacctgggccctgcccacctacaacaatcacctctacaagcaaatctccaacagcacatctggaggatcttcaaatgacaacgcctacctcggctacagcaccccctgggggtattttgacttcaacagattccactgccacttctcaccacgtgactggcagcgactcatcaacaacaactggggattccggcctaagcgactcaacttcaagctcttcaacattcaggtcaaagaggttacggacaacaatggagtcaagaccatcgccaataaccttaccagcacggtccaggtcttcacggactcagactatcagctcccgtacgtgctcgggtcggctcacgagggctgcctcccgccgttcccagcggacgttttcatgattcctcagtacgggtatctgacgcttaatgatggaagccaggccgtgggtcgttcgtccttttactgcctggaatatttcccgtcgcaaatgctaagaacgggtaacaacttccagttcagctacgagtttgagaacgtacctttccatagcagctacgctcacagccaaagcctggaccgactaatgaatccactcatcgaccaatacttgtactatctctcaaagactattaacggttctggacagaatcaacaaacgctaaaattcagtgtggccggacccagcaacatggctgtccagggaagaaactacatacctggacccagctaccgacaacaacgtgtctcaaccactgtgactcaaaacaacaacagcgaatttgcttggcctggagcttcttcttgggctctcaatggacgtaatagcttgatgaatcctggacctgctatggccagccacaaagaaggagaggaccgtttctttcctttgtctggatctttaatttttggcaaacaaggaactggaagagacaacgtggatgcggacaaagtcatgataaccaacgaagaagaaattaaaactactaacccggtagcaacggagtcctatggacaagtggccacaaaccaccagagtgcccaagcacaggcgcagaccggctgggttcaaaaccaaggaatacttccgggtatggtttggcaggacagagatgtgtacctgcaaggacccatttgggccaaaattcctcacacggacggcaactttcacccttctccgctgatgggagggtttggaatgaagcacccgcctcctcagatcctcatcaaaaacacacctgtacctgcggatcctccaacggccttcaacaaggacaagctgaactctttcatcacccagtattctactggccaagtcagcgtggagatcgagtgggagctgcagaaggaaaacagcaagcgctggaacccggagatccagtacacttccaactattacaagtctaataatgttgaatttgctgttaatactgaaggtgtatatagtgaaccccgccccattggcaccagatacctgactcgtaatctg

SEQ ID NO: 634 - DNA, 2208 bp, synthetic construct; identical to SEQ ID NO: 633
  source 1..2208: mol_type = other DNA; note = Description of Artificial Sequence: Synthetic polynucleotide

SEQ ID NO: 635 - DNA, 2208 bp, synthetic construct
  source 1..2208: mol_type = other DNA; note = Description of Artificial Sequence: Synthetic polynucleotide
atggctgccgatggttatcttccagattggctcgaggacaaccttagtgaaggaattcgcgagtggtgggctttgaaacctggagcccctcaacccaaggcaaatcaacaacatcaagacaacgctcgaggtcttgtgcttccgggttacaaataccttggacccggcaacggactcgacaagggggagccggtcaacgcagcagacgcggcggccctcgagcacgacaaggcctacgaccagcagctcaaggccggagacaacccgtacctcaagtgcaaccacgccgacgccgagttccaggagcggctcaaagaagatacgtcttttgggggcaacctcgggcgagcagtcttccaggccaaaaagaggcttcttgaacctcttggtctggttgaggaagcggctaagacggctcctggaaagaagaggcctgtagagcagtctcctcaggaaccggactcctccgcgggtattggcaaatcgggtgcacagcccgctaaaaagagactcaatttcggtcagactggcgacacagagtcagtcccagaccctcaaccaatcggagaacctcccgcagccccctcaggtgtgggatctcttacaatggcttcaggtggtggcgcaccagtggcagacaataacgaaggtgccgatggagtgggtagttcctcgggaaattggcattgcgattcccaatggctgggggacagagtcatcaccaccagcacccgaacctgggccctgcccacctacaacaatcacctctacaagcaaatctccaacagcacatctggaggatcttcaaatgacaacgcctacctcgactacagcaccccctgggggtattttgacttcaacagattccactgccacttctcaccacgtgactggcagcggctcatcaacaacaactggggattccggcctaagcgactcaacttcaagctcttcaacattcaggtcaaagaggttacggacaacaatggagtcaagaccatcgccaataaccttaccagcacggtccaggtcttcacggactcagactatcagctcccgtacgtgctcgggtcggctcacgagggctgcctcccgccgttcccagcggacgttttcatgattcctcagtacgggtatctgacgcttaatgatggaagccaggccgtgggtcgttcgtccttttactgcctggaatatttcccgtcgcaaatgctaagaacgggtaacaacttccagttcagctacgagtttgagaacgtacctttccatagcagctacgctcacagccaaagcctggaccgactaatgaatccactcatcgaccaatacttgtactatctctcaaagactattaacggttctggacagaatcaacaaacgctaaaattcagtgtggccggacccagcaacatggctgtccagggaagaaactacatacctggacccagctaccgacaacaacgtgtctcaaccactgtgactcaaaacaacaacagcgaatttgcttggcctggagcttcttcttgggctctcaatggacgtaatagcttgatgaatcctggacctgctatggccagccacaaagaaggagaggaccgtttctttcctttgtctggatctttaatttttggcaaacaaggaactggaagagacaacgtggatgcggacaaagtcatgataaccaacgaagaagaaattaaaactactaacccggtagcaacggagtcctatggacaagtggccacaaaccaccagagtgcccaagcacaggcgcagaccggctgggttcaaaaccaaggaatacttccgggtatggtttggcagggcagagatgtgtacctgcaaggacccatttgggccaaaattcctcacacggacggcaactttcacccttctccgctgatgggagggtttggaatgaagcacccgcctcctcagatcctcatcaaaaacacacctgtacctgcggatcctccaacggccttcaacaaggacaagctgaactctttcatcacccagtattctactggccaagtcagcgtggagatcgagtgggagctgcagaaggaaaacagcaagcgctggaacccggagatccagtacacttccaactattacaagtctaataatgttgaatttgctgttaatactgaaggtgtatatagtgaaccccgccccattggcaccagatacctgactcgtaatctg

SEQ ID NO: 636 - DNA, 2208 bp, synthetic construct; identical to SEQ ID NO: 633
  source 1..2208: mol_type = other DNA; note = Description of Artificial Sequence: Synthetic polynucleotide

SEQ ID NO: 637 - DNA, 2208 bp, synthetic construct
  source 1..2208: mol_type = other DNA; note = Description of Artificial Sequence: Synthetic polynucleotide
atggctgccgatggttatcctccagattggctcgaggacaaccttagtgaaggaattcgcgagtggtgggctttgaaacctggagcccctcaacccaaggcaaatcaacaacatcaagacaacgctcgaggtcttgtgcttccgggttacaaataccttggacccggcaacggactcgacaagggggagccggtcaacgcagcagacgcggcggccctcgagcacgacaaggcctacgaccagcagctcaaggccggggacaacccgcacctcaagtacaaccacgccgacgccgagttccaggagcggctcaaagaagatacgtcttttgggggcaacctcgggcgagcagtcttccaggccaaaaagaggcttcttgaacctcttggtctggttgaggaagcggctaagacggctcctggaaagaagaggcccgtagagcagtctcctcaggaaccggactcctccgcgggtattggcaaatcgggtgcacagcccgctaagaagagactcaatttcggtcagactggcgacactgagtcagtcccagaccctcaaccaatcggagaacctcccgcagccccctcaggtgtgggatctcttacaatggcttcaggtggtggcgcaccagtggcagacaataacgaaggtgccgatggagtgggtagttcctcgggaaattggcattgcgattcccaatggctgggggacagagtcatcaccaccagcacccgaacctgggccctgcccacctacaacaatcacctctacaagcaaatctccaacagcacatctggaggatcttcaaatgacaacgcctacttcggctacagcaccccctgggggtattttgacttcaacagattccactgccacttctcaccacgtgactggcagcgactcatcaacaacaactggggattccggcctaagcgactcaacttcaagctcttcaacattcaggtcaaagaggttacggacaacaatggagtcaagaccatcgccaataaccttaccagcacggtccaggtcttcacggactcagactatcagctcccgtacgtgctcgggtcggctcacgagggctgcctcccgccgttcccagcggacgttttcatgattcctcagtacgggtatctgacgcttaatgatggaagccaggccgtgggtcgttcgtccttttactgcctggaatatttcccgtcgcaaatgctaagaacgggtaacaacttccagttcagctacgagtttgagaacgtacctttccatagcagctacgctcacagccaaagcctggaccgactaatgaatccactcatcgaccaatacttgtactatctctcaaagactattaacggttctggacagaatcaacaaacgctaaaattcagtgtggccggacccagcaacatggctgtccagggaagaaactacatacctggacccagctaccgacaacaacgtgtctcaaccactgtgactcaaaacaacaacagcgaatttgcttggcctggagcttcttcttgggctctcaatggacgtaatagcttgatgaatcctggacctgctatggccagccacaaagaaggagaggaccgtttctttcctttgtctggatctttaatttttggcaaacaaggaactggaagagacaacgtggatgcggacaaagtcatgataaccaacgaagaagaaattaaaactactaacccggtagcaacggagtcctatggacaagtggccacaaaccaccagagtgcccaagcacaggcgcagaccggctgggttcaaaaccaaggaatacttccgggtatggtttggcaggacagagatgtgtacctgcaaggacccatttgggccaaaattcctcacacggacggcaactttcacccttctccgctgatgggagggtttggagtgaagcacccgcctcctcagatcctcatcaaaaacacacctgtacctgcggatcctccaacggccttcaacaaggacaggctgaactctttcatcacccagtattctactggccaagtcagcgtggagatcgagtgggagctgcagaaggaaaacagcaagcgctggaacccggagatccagtacacttccaactattacaagtctaataatgttgaatttgctgttaatactgaaggtgtatatagtgaaccccgccccattggcaccagatacctgactcgtaatctg

SEQ ID NO: 638 - DNA, 2208 bp, synthetic construct
  source 1..2208: mol_type = other DNA; note = Description of Artificial Sequence: Synthetic polynucleotide
atggctgccgatggttatcttccagattggctcgaggacaaccttagtgaaggaattcgcgagtggtgggctttgaaacctggagcccctcaacccaaggcaaatcaacaacatcaagacaacgctcgaggtcttgtgcttccgggttacaaataccttggacccggcaacggactcgacaagggggagccggtcaacgcagcagacgcggcggccctcgagcacgacaaggcctacgaccagcagctcaaggccggagacaacccgtacctcaagtacaaccacgccgacgccgagttccaggagcggctcaaagaagatacgtcttttgggggcaacctcgggcgagcagtcttccaggccaaaaagaggcttcttgaacctcttggtctggttgaggaagcggctaagacggctcctggaaagaagaggcctgtagagcagtctcctcaggaaccggactcctccgcgggtattggcaaatcgggtgcacagcccgctaaaaagagactcaatttcggtcagactggcgacacagagtcagtcccagaccctcaaccaatcggagaacctcccgcagccccctcaggtgtgggatctcttacaatggcttcaggtggtggcgcaccagtggcggacaataacgaaggtgccgatggagtgggtagttcctcgggaaattggcattgcgattcccaatggctgggggacagagtcatcaccaccagcacccgaacctgggccctgcccacctacaacaatcacctctacaagcaaatctccaacagcacatctggaggatcttcaaatgacaacgcctacttcggctacagcaccccctgggggtattttgacttcaacagattccactgccacttctcaccacgtgactggcagcgactcatcaacaacaactggggattccggcctaagcgactcaacttcaagctcttcaacattcaggtcaaagaggttacggacaacaatggagtcaagaccatcgccaataaccttaccagcacggtccaggtcttcacggactcagactatcagctcccgtacgtgctcgggtcggctcacgagggctgcctcccgccgttcccagcggacgttttcatgattcctcagtacgggtatctgacgcttaatgatggaagccaggccgtgggtcgttcgtccttttactgcctggaatatttcccgtcgcaaatgctaagaacgggtaacaacttccagttcagctacgagtttgagaacgtacctttccatagcagctacgctcacagccaaagcctggaccgactaatgaatccactcatcgaccaatacttgtactatctctcaaagactattaacggttctggacagaatcaacaaacgctaaaattcagtgtggccggacccagcaacatggctgtccagggaagaaactacatacctggacccagctaccgacaacaacgtgtctcaaccactgtgactcaaaacaacaacagcgaatttgcttggcctggagcttcttcttgggctctcaatggacgtaatagtttgatgaatcctggacctgctatggccagccacaaagaaggagaggaccgtttctttcctttgtctggatctttaatttttggcaaacaaggaactggaagagacaacgtggatgcggacaaagtcatgataaccaacgaagaagaaattaaaactactaacccggtagcaacggagtcctatggacaagtggccacaaaccaccagagtgcccaagcacaggcgcagaccggctgggttcaaaaccaaggaatacttccgggtatggtttggcaggacagagatgtgtacctgcaaggacccatttgggccaaaattcctcacacggacggcaactttcacccttctccgctgatgggagggtttggagtgaagcacccgcctcctcagatcctcatcaaaaacacacctgtacctgcggatcctccaacggccttcaacaaggacaagctgaactctttcatcacccagtattctactggccaagtcagcgtggagatcgagtgggagctgcagaaggaaaacagcaagcgctggaacccggagatccagtacacttccaactattacaagtctaataatgttgaatttgctgttaatactgaaggtgtatatagtgaaccccgccccattggcaccagatacctgactcgtaatctg

SEQ ID NO: 639 - DNA, 2208 bp, synthetic construct
  source 1..2208: mol_type = other DNA; note = Description of Artificial Sequence: Synthetic polynucleotide
atggctgccgatggttatcttccagattggctcgaggacaaccttagtgaaggaattcgcgagtggtgggctttgaaacctggagcccctcaacccaaggcaaatcaacaacatcaagacaacgctcgaggtcttgtgcttccgggttacaaataccttggacccggcaacggactcgacaagggggagccggtcaacgcagcagacgcggcggccctcgagcacgacaaggcctacgaccagcagctcaaggccggagacaacccgtacctcaagtacaaccacgccgacgccgagttccaggagcggctcaaagaagatacgtcttttgggggcaacctcgggcgagcagtcttccaggccaaaaagaggcttcttgaacctcttggtctggttgaggaagcggctaagacggctcctggaaagaagaggcctgtagagcagtctcctcaggaaccggactcctccgcgggtattggcaaatcgggtgcacagcccgctaaaaagagactcaatttcggtcagactggcgacacagagtcagtcccagaccctcaaccaatcggagaacctcccgcagccccctcaggtgtgggatctcttacaatggcttcaggtggtggcgcaccagtggcagacaataacgaaggtgccgatggagtgggtagttcctcgggaaattggcattgcgattcccaatggctgggggacagagtcatcaccaccagcacccgaacctgggccctgcccacttacaacaatcacctctacaagcaaatctccaacagcacatctggaggatcttcaaatgacaacgcctacttcggctacagcaccccctgggggtattttgacttcaacagattccactgccacttctcaccacgtgactggcagcgactcaccaacaacaactggggattccggcctaagcgactcaacttcaagctcttcaacattcaggtcaaagaggttacggacaacaatggagtcaagaccatcgccaataaccttaccagcacggtccaggtcttcacggactcagactatcagctcccgtacgtgctcgggtcggctcacgagggctgcctcccgccgttcccagcggacgttttcatgattcctcagtacgggtatctgacgcttaatgatggaagccaggccgtgggtcgttcgtccttttactgcctggaatatatcccgtcgcaaatgctaagaacgggtaacaacttccagttcagctacgagtttgagaacgtacctttccatagcagctacgctcacagccaaagcctggaccgactaatgaatccactcatcgaccaatacttgtactatctctcaaagactattaacggttctggacagaatcaacaaacgctaaaattcagtgtggccggacccagcaacatggctgtccagggaagaaactacatacctggacccagctaccgacaacaacgtgtctcaaccactgtgactcaaaacaacaacagcgaatttgcttggcctggagcttcttcttgggctctcaatggacgtaatagcttgatgaatcctggacctgctatggccagccacaaagaaggagaggaccgtttctttcctttgtctggatctttaatttttggcaaacaaggaactggaagagacaacgtggatgcggacaaagtcatgataaccaacgaagaagaaattaaaactactaacccggtagcaacggagtcctatggacaagtggccacaaaccaccagagtgcccaagcacaggcgcagaccggctgggttcaaaaccaaggaatacttccgggtatggtttggcaggacagagatgtgtacctgcaaggacccatttgggccaaaattcctcacacggacggcaactttcacccttctccgctgatgggagggtttggagtgaagcacccgcctcctcagatcctcatcaaaaacacacctgtacctgcggatcctccaacggccttcaacaaggacaagctgaactctttcatcacccagtattctactggccaagtcagcgtggagatcgagtgggagctgcagaaggaaaacagcaagcgctggaacccggagatccagtacacttccaactattacaagtctaataatgttgaatttgctgttaatactgaaggtgtatatagtgaaccccgccccattggcaccagatacctgactcgtaatctg

SEQ ID NO: 640 - DNA, 2208 bp, synthetic construct
  source 1..2208: mol_type = other DNA; note = Description of Artificial Sequence: Synthetic polynucleotide
atggctgccgatggttatcttccagattggctcgaggacaaccttagtgaaggaattcgcgagtggtgggctttgaaacctggagcccctcaacccaaggcaaatcaacaacatcaagacaacgctcgaggtcttgtgcttccgggttacaaataccttggacccggcaacggactcgacaagggggagccggtcaacgcagcagacgcggcggccctcgagcacgacaaggcctacgaccagcagctcaaggccggagacaacccgtacctcaagtacaaccacgccgacgccgagttccaggagcggctcaaagaagatacgtcttttgggggcaacctcgggcgagcagtcttccaggccaaaaagaggcttcttgaacctcttggtctggttgaggaagcggctaagacggctcctggaaagaagaggcctgtagagcagtctcctcaggaaccggactcctccgcgggtattggcaaatcgggtgcacagcccgctaaaaagagactcaatttcggtcagactggcgacacagagtcagtcccagaccctcaaccaatcggagaacctcccgcagccccctcaggtgtgggatctcttacaatggcttcaggtggtggcgcaccagtggcagacaataacgaaggtgccgatggagtgggtagttcctcgggaaattggcattgcgattcccaatggctgggggacagagtcatcaccaccagcacccgaacctgggccctgcccacctacaacaatcacctctacaagcaaatctccaacagcacatctggaggatcttcaaatgacaacgcctacttcggctacagcaccccctgggggtattttgacttcaacagattccactgccacttctcaccacgtgactggcagcgactcatcaacaacaactggggattccggcctaagcgactcaacttcaagctcttcaacattcaggtcaaagaggttacggacaacaatggagtcaagaccatcgccaataaccttaccagcacggtccaggtcttcacggactcagactatcagctcccgtacgtgctcgggtcggctcacgagggctgcctcccgccgttcccagcggacgttttcatgattcctcagtacgggtatctgacgcttaatgatggaagccaggccgtgggtcgttcgtccttttactgcctggaatatttcccgtcgcaaatgctaagaacgggtaacaacttccagtttagctacgagtttgagaacgtacctttccatagcagctacgctcacagccaaagcctggaccgactaatgaatccactcatcgaccaatacttgtactatctctcaaagactattaacggttctggacagaatcaacaaacgctaaaattcagtgtggccggacccagcaacatggctgtccagggaagaaactacatacctggacccagctaccgacaacaacgtgtctcaaccactgtgactcaaaacaacaacagcgaatttgcttggcctggagcttcttcttgggctctcaatggacgtaatagcttgatgaatcctggacctgctatggccagccacaaagaaggagaggaccgtttctttcctttgtctggatctttaatttctggcaaacaaggaactggaagagacaacgtggatgcgaacaaagtcatgataaccaacgaagaagaaattaaaactactaacccggtagcaacggagtcctatggacaagtggccacaaaccaccagagtgcccaagcacaggcgcagaccggctgggttcaaaaccaaggaatacttccgggtatggtttggcaggacagagatgtgtacctgcaaggacccatttgggccaaaattcctcacacggacggcaactttcacccttctccgctgatgggagggtttgaaatgaagcacccgcctcctcagatcctcatcaaaaacacacctgtacctgcggatcctccaacggccttcaacaaggacaagctgaactctttcatcacccagtattctactggccaagtcagcgtggagatcgagtgggagctgcagaaggaaaacagcaagcgctggaacccggagatccagtacacttccaactattacaagtctaataatgttgaatttgctgttaatactgaaggtgtatatagtgaaccccgccccattggcaccagatacctgactcgtaatctg

SEQ ID NO: 641 - DNA, 2208 bp, synthetic construct
  source 1..2208: mol_type = other DNA; note = Description of Artificial Sequence: Synthetic polynucleotide
atggctgccgatggttatcttccagattggctcgaggacaaccttagtgaaggaattcgcgagtggtgggctttgaaacctggagcccctcaacccaaggcaaatcaacaacatcaagacaacgctcgaggtcttgtgcttccgggttacaaataccttggacccggcaacggactcgacaagggggagccggtcaacgcagcagacgcggcggccctcgagcacgacaaggcctacgaccagcagctcaaggccggagacaacccgtacctcaagtacaaccacgccgacgccgagttccaggagcggctcaaagaagatacgtcttttgggggcaacctcgggcgagcagtcttccaggccaaaaagaggcttcttgaacctcttggtctggttgaggaagcggctaagacggctcctggaaagaagaggcctgtagagcagtctcctcaggaaccggactcctccgcgggtattggcaaatcgggtgcacagcccgctaaaaagagactcaatttcggtcagactggcgacacagagtcagtcccagaccctcaaccaatcggagaacctcccgcagccccctcaggtgtgggatctcttacaatagcttcaggtggtggcgcaccagtggcagacaataacgaaggtgccgatggagtgggtagttcctcgggaaattggcattgcgattcccaatggctgggggacagagtcatcaccaccagcacccgaacctgggccctgcccacctacaacaatcacctctacaagcgaatctccaacagcacatctggaggatcttcaaatgacaacgcctacttcggctacagcaccccctgggggtattttgacttcaacagattccactgccacttctcaccacgtgactggcagcgactcatcaacaacaactggggattccggcctaagcgactcaacttcaagcttttcaacattcgggtcaaagaggttacggacaacaatggagtcaagaccatcaccaataaccttaccagcacggtccaggtcttcacggactcagactatcagctcccgtacgtgcttgggtcggctcacgagggctgcctcccgccgttcccagcggacgttttcatgattcctcagtacgggtatctgacgcttaatgatggaagccaggccgtgggtcgttcgtccttttactgcctggaatatttcccgtcgcaaatgctaagaacgggtaacaacttccagttcagctacgagtttgagaacgtacctttccatagcagctacgctcacagccaaagcctggaccgactaatgaatccactcatcgaccaatacttgtactatctctcaaagactattaacggttctggacagaatcaacaaacgctaaaattcagtgtggccggacccagcaacatggctgtccagggaagaaactacatacctggacccagctaccgacaacaacgtgtctcaaccactgtgactcgaaacaacaacagcgaatttgcttggcctggagcttcttcttgggctctcaatggacgtaatagcttgatgaatcctggacctgctatggccagccacaaagaaggagaggaccgtttctttcctttgtctggatctttaatttttggcaaacaaggaactggaagagacaacgtggatgcggacaaagtcatgataaccaacgaagaagaaattaaaactactaacccggtagcaacggagtcctatggacaagtggccacaaaccaccagagtgcccaagcacaggcgcagaccggctgggttcaaaaccaaggaatacttccgggtatggtttggcaggacagagatgtgtacctgcaaggacccatttgggccaaaattcctcacacggacggcaactttcacccttctccgctgatgggagggtttggagtgaagcacccgcctcctcagatcctcatcaaaaacacacctgtacctgcggatcctccaacggccttcaacaaggacaagctgaactctttcatcacccagtattctactggccaagtcagcgtggagatcgagtgggagctgcagaaggaaaacagcaagcgctggaacccggagatccagtacacttccaactattacaagtctaataatgttgaatttgctgttaatactgaaggtgtatatagtgaaccccgccccattggcaccagatacctgactcgtaatctg

SEQ ID NO: 642 - DNA, 2208 bp, synthetic construct
  source 1..2208: mol_type = other DNA; note = Description of Artificial Sequence: Synthetic polynucleotide
atggctgccgatggttatcttccagattggctcgaggacaaccttagtgaaggaattcgcgagtggtgggctttgaaacctggagcccctcaacccaaggcaaatcaacaacatcaagacaacgctcgaggtcttgtgcttccgggttacaaataccttggacccggcaacggactcgacaagggggagccggtcaacgcagcagacgcggcggccctcgagcacgacaaggcctacgaccagcagctcaaggccggagacaacccgtacctcaagtacaaccacgccgacgccgagttccaggagcggctcaaagaagatacgtcttttgggggcaacctcgggcgagcagtcttccaggccaaaaagaggcttcttgaacctcttggtctggttgaggaagcggctaagacggctcctggaaagaagaggcctgtagagcagtctcctcaggaaccggactcctccgcgggtattggcaaatcgggcgcacagcccgctaaaaagagactcaatttcggtcagactggcgacacagagccagtcccagaccctcaaccaatcggagaacctcccgcagccccctcaggtgtgggatctcttacaatggcttcaggtggtggcgcaccagtggcagacaataacgaaggtgccgatggagtgggtagttcctcgggaaattggcattgcgattcccaatggctgggggacagagtcatcaccaccagcacccgaacctgggccctgcccacctacaacaatcacctctacaagcaaatctccaacagcacatctggaggatcttcaaatgacaacgcctacttcggctacagcaccccctgggggtattttgacttcaacagattccactgccacttctcaccacgtgactggcagcgactcatcaacaacaactggggattccggcctaagcgactcaacttcaagctcttcaacattcaggtcaaagaggttacggacaacaatggagtcaagaccatcgccaataaccttaccagcacggtccaggtcttcacggactcagactatcagctcccgtacgtgctcgggtcggctcacgagggctgcctcccgccgttcccagcgggcgttttcatgattcctcagtacgggtatctgacgcttaatgatggaagccaggccgtgggtcgttcgtccttttactgcctggaatatttcccgtcgcaaatgctaagaacgggtaacaacttccagttcagctacgagtttgagaacgtacctttccatagcagctacgctcacagccaaagcctggaccgactaatgaatccactcatcgaccaatacttgtactatctctcaaagactattaacggttctggacagaatcaacaaacgctaaaattcagtgtggccggacccagcaacatggctgtccagggaagaaactacatacctggacccagctaccgacaacaacgtgtctcaaccactgcgactcaaaacaacaacagcgaatttgcttggcctggagcttcttcttgggctctcaatggacgtaatagcttgatgaatcctggacctgctatggccagccacaaagaaggagaggaccgtttctttcctttgtctggatctttaatttttggcaaacaaggaactggaagagacaacgtggatgcggacaaagtcatgataaccaacgaagaagaaattaaaactactaacccggtagcaacggagtcctatggacaagtggccacaaaccaccagagtgcccaagcacaggcgcagaccggctgggttcaaaaccaaggaatacttccgggtatggtttggcaggacagagatgtgtacctgcaaggacccatttgggccaaaattcctcacacggacggcaactttcacccttctccgctgatgggagggtttggaatgaagcacccgcctcctcagatcctcatcaaaaacacacctgtacctgcggatcctccaacggccttcaacaaggacaagctgaactctttcatcacccagtattctactggccaagtcagcgtggagatcgagtgggagctgcagaaggaaaacagcaagcgctggaacccggagatccagtacacttccaactattacaagtctaataatgttgaatttgctgttaatactgaaggtgtatatagtgaaccccgccccattggcaccagatacctgactcgtaatctg

SEQ ID NO: 643 - DNA, 2208 bp, synthetic construct
  source 1..2208: mol_type = other DNA; note = Description of Artificial Sequence: Synthetic polynucleotide
atggctgccgatggttatcttccagattggctcgaggacaaccttagtgaaggaattcgcgagtggtgggctttgaaacctggagcccctcaacccaaggcaaatcaacaacatcaagacaacgctcgaggtcttgtgcttccgggttacaaataccttggacccggcaacggactcgacaagggggagccggtcaacgcagcagacgcggcggccctcgagcacgacaaggcctacgaccagcagctcaaggccggagacaacccgtacctcaagtacaaccacgccgacgccgggttccaggagcggctcaaagaagatacgtcttttgggggcaacctcgggcgagcagtcttccaggccaaaaagaggcttcttgaacctcttggtctggttgaggaagcggctaagacggctcctggaaagaagaggcctgtagagcagtctcctcaggaaccggactcctccgcgggtattggcaaatcgggtgcacagcccgctaaaaagagactcaatttcggtcagactggcgacacagagtcagtcccagtccctcaaccaatcggagaacctcccgcagccccctcaggtgtgggatctcttacaatggcttcaggtggtggcgcaccagtggcagacaataacgaaggtgccgatggagtgggtagttcctcgggaaattggcattgcgattcccaatggctgggggacagagtcatcaccaccagcacccgaacctgggccctgcccacctacaacaatcacctctacaagcaaatctccaacagcacatctggaggatcttcaaatgacaacgcctacttcggctacagcaccccctgggggtattttgacttcaacagattccactgccacttctcaccacgtgactggcagcgactcatcaacaacaactggggattccggcctaagcgactcaacttcaagctcttcaacattcaggtcaaagaggttacggacaacaatggagtcaagaccatcgccaataaccttaccagcacggtccaggtcttcacggactcagactatcagctcccgtacgtgctcgggtcggctcacgagggctgcctcccgccgttcccagcggacgttttcatgattcctcagtacgggtatctgacgcttaatgatggaagccaggccgtgggtcgttcgtccttttactgcctggaatatttcccgtcgcaaatgctaagaacgggtaacaacttccagttcagctacgagtttgagaacgtacctttccatagcagctacgctcacagccaaagcctggaccgactaatgaatccactcatcgaccaatacttgtactatctctcaaagactattaacggttctggacagaatcaacaaacgctaaaattcagtgtggccggacccagcaacatggctgtccagggaagaaactacatacctggacccagctaccgacaacaacgtgtctcaaccactgtgactcaaaacaacaacagcgaatttgcttggcctggagcttcttcttgggctctcaatggacgtaatagcttgatgaatcctggacctgctatggccagccacaaagaaggagaggaccgtttctttcctttgtctggatctttaatttttggcaaacaaggagctggaagagacaacgtggatgcggacaaagtcatgataaccaacgaagaagaaattaaaactactaacccggtagcaacggagtcctatggacaagtggccacaaaccaccagagtgcccaagcacaggcgcagaccggctgggttcaaaaccaaggaatacttccgggtatggtttggcaggacagagatgtgtacctgcaaggacccatttgggccaaaattcctcacacggacggcaactttcacccttctccgctgatgggagggtttggaatgaagcacccgcctcctcagatcctcatcaaaaacacacctgtacctgcggatcctccaacggccttcaacaaggacaagctgaactctttcatcacccagtattctactggccaagtcagcgtggagatcgagtgggagctgcagaaggaaaacagcaagcgctggaacccggagatccagtacacttccaactattacaagtctaataatgttgaatttgctgttaatactgaaggtgtatatagtgaaccccgccccattggcaccagatacctgactcgtaatctg

SEQ ID NO: 644 - DNA, 2208 bp, synthetic construct
  source 1..2208: mol_type = other DNA; note = Description of Artificial Sequence: Synthetic polynucleotide
  misc_difference 377: note = misc_feature - n is a, c, t, or g
atggctgccgatggttatcttccagattggctcgaggacaaccttagtgaaggaattcgcgagaggtgggctttgaaacctggagcccctcaacccaaggcaaatcaacaacatcaagacaacgctcgaggtcttgtgcttccgggttacaaataccttggacccggcaacggactcgacaagggggagccggtcaacgcagcagacgcggcggccctcgagcacgacaaggcctacgaccagcagctcaaggccggagacaacccgtacctcaagtacaaccacgccgacgccgagttccaggagcggctcaaagaagatacgtcttttgggggcaacctcgggcgagcagtcttccaggccaaaaagaggcttcntgaacctcttggtctggttgaggaagcggctaagacggctcctggaaagaagaggcctgtagagcagtctcctcaggaaccggactcctccgcgggtattggcaaatcgggtgcacagcccgctaaaaagagactcaatttcggtcagactggcgacacagagtcagtcccagaccctcaaccaatcggagaacctcccgcagccccctcaggtgtgggatctcttacaatggcttcaggtggtggcgcaccagtggcagacaataacgaaggtgccgatggagtgggtagttcctcggggaattggcattgcgattcccaatggctgggggacagagtcatcaccaccagcacccgaacctgggccctgcccacctacaacaatcacctctacaagcaaatctccaacagcacatctggaggatcttcaaatgacaacgcctacttcggctacagcaccccctgggggtattttgacttcaacagattccactgccacttctcaccacgtgactggcagcgactcatcaacaacaactggggattccggcctaagcgactcaacttcaagctcttcaacattcaggtcaaagaggttacggacaacaatggagtcaagaccatcgccaataaccttaccagcacggtccaggtcttcacggactcagactatcagctcccgtacgtgctcgggtcggctcacgagggctgcctcccgccgttcccagcggacgttttcatgattcctcagtacgggtatctgacgcttaatgatggaagccaggccgtgggtcgttcgtccttttactgcctggaatatttcccgtcgcaaatgctaagaacgggtaacaacttccagttcagctacgagtttgagaacgtacctttccatagcagctacgctcacagccaaagcccggaccgactaatgaatccactcatcgaccaatacttgtactatctctcaaagactattaacggttctggacagaatcaacaaacgctaaaattcagtgtggccggacccagcaacatggctgtccagggaagaaactacatacctggacccagctaccgacaacaacgtgtctcaaccactgtgactcaaaacaacaacagcgaatttgcttggcctggagcttcttcttgggctctcaatggacgtaatagcttgatgaatcctggacctgctatggccagccacaaagaaggagaggaccgtttctttcctttgtctggatctttaatttttggcaaacaaggaactggaagagacaacgtggatgcggacaaagtcatgataaccaacgaagaagaaattaaaactactaacccggtagcaacggagtcctatggacaagtggccacaaaccaccagagtgcccaagcacaggcgcagaccggctgggttcaaaaccaaggaatacttccgggtatggtttggcaggacagagatgtgtacctgcaaggacccatttgggccaaaattcctcacacggacggcaactttcacccttctccgctgatgggagggtttggagtgaagcacccgcctcctcagatcctcatcaaaaacacacctgtacctgcggatcctccaacggccttcaacaaggacaagctgaactctttcatcacccagtattctactggccaagtcagcgtggagatcgagtgggagctgcagaaggaaaacagcaagcgctggaacccggagatccagtacacttccaactattacaagtctaataatgttgaatttgctgttaatactgaaggtgtatatagtgaaccccgccccattggcaccagatacctgactcgtaatctg

SEQ ID NO: 645 - DNA, 2208 bp, synthetic construct
  source 1..2208: mol_type = other DNA; note = Description of Artificial Sequence: Synthetic polynucleotide
atggctgccgatggttatcttccagattggctcgaggacaaccttagtgaaggaattcgcgagtggtgggctttgaaacctggagcccctcaacccaaggcaaatcaacaacatcaagacaacgctcgaggtcttgtgcttccgggttacaaataccttggacccggcaacggactcgacaagggggagccggtcaacgcagcagacgcggcggccctcgagcacgacaaggcctacgaccagcagctcaaggccggagacaacccgtacctcaagtacaaccacgccgacgccgagttccaggagcggctcaaagaagatacgtcttttgggggcaacctcgggcgagcagtcttccaggccaaaaagaggcttcttgaacctcttggtctggttgaggaagcggctaagacggctcctggaaagaagaggcctgtagagcagtctcctcaggaaccggactcctccgcgggtattggcaaatcgggtgcacagcccgctaaaaagagactcaatttcggtcagactggcgacacagagtcagtcccagaccctcaaccaatcggagaacctcccgcagccccctcaggtgtgggatctcttacaatggcttcaggtggtggcgcaccagtggcagacaataacgaaggtgccgatggagtgggtagttcctcgggaaattggcattgcgattcccaatggctgggggacagagtcatcaccaccagcacccgaacctgggccctgcccacctacaacaatcacctctacaagcaaatctccaacagcacatctggaggatcttcaaatgacaacgcctacctcggctacagcaccccctgggggtattttgacttcaacagattccactgccacttctcaccacgtgactggcagcgactcatcaacaacaactggggattccggcctaagcgactcaacttcaagctcttcaacattcaggtcaaagaggttacggacaacaatggagtcaagaccatcgccaataaccttaccagcacggtccaggtcttcacggactcagactatcagctcccgtacgtgctcgggtcggctcacgagggctgcctcccgccgttcccagcggacgttttcatgattcctcagtacgggtatctgacgcttaatgatggaagccaggccgtgggtcgttcgtccttttactgcctggaatatttcccgtcgcaaatgctaagaacgggtaacaacttccagttcagctacgagtttgagaacgtacctttccatagcagctacgctcacagccaaagcctggaccgactaatgaatccactcatcgaccaatacttgtactatctctcaaagactattaacggttctggacagaatcaacaaacgctaaaattcagtgtggccggacccagcaacatggctgtccagggaagaaactacatacctggacccagctaccgacaacaacgtgtctcaaccactgtgactcaaaacaacaacagcgaatttgcttggcctggagcttcttcttgggctctcaatggacgtaatagcttgatgaatcctggacctgctatggccagccacaaagaaggagaggaccgtttctttcctttgtctggatctttaatttttggcaaacaaggaactggaagagacaacgtggatgcggacaaagtcatgataaccaacgaagaagaaattaaaactactaacccggtagcaacggagtcctatggacaagtggccacaaaccaccagagtgcccaagcacaggcgcagaccggctgggttcaaaaccaaggaatacttccgggtatggtttggcaggacagagatgtgtacctgcaaggacccatttgggccaaaattcctcacacggacggcaactttcacccttctccgctgatgggagggtttggaatgaagcacccgcctcctcagatcctcatcaaaaacacacctgtacctgcggatcctccaacggccttcaacaaggacaagctgaactctttcatcacccagtattctactggccaagtcagcgtggagatcgagtgggagctgcagaaggaaaacagcaagcgctggaacccggagatccagtacacttccaactattacaagtctaataatgttgaatttgctgttaatactgaaggtgtatatagtgaaccccgccccattggcaccagatacctgactcgtaatctg

SEQ ID NO: 646 - DNA, 2208 bp, synthetic construct
  source 1..2208: mol_type = other DNA; note = Description of Artificial Sequence: Synthetic polynucleotide
atggctgccgatggttatcttccagattggctcgaggacaaccttagtgaaggaattcgcgagtggtgggctttgaaacctggagcccctcaacccaaggcaaatcaacaacatcaagacaacgctcgaggtcttgtgcttccgggttacaaataccttggacccggcaacggactcgacaagggggagccggtcaacgcagcagacgcggcggccctcgagcacgacaaggcctacgaccagcagctcaaggccggagacaacccgtacctcaagtacaaccacgccgacgccgagttccaggagcggctcaaagaagatacgtcttttgggggcaacctcgggcgagcagtcttccaggccaaaaagaggcttcttgaacctcttggtctggttgaggaagcggctaagacggctcctggaaagaagaggcctgtagagcagtctcctcaggaaccggactcctccgcgggtattggcaaatcgggtgcacagcccgctaaaaagagactcaatttcggtcagactggcgacacagagtcagtcccagaccctcaaccaatcggagaacctcccgcagccccctcaggtgtgggatctcttacaatggcttcaggtggtggcgcaccagtggcagacaataacgaaggtgccgatggagtgggtagttcctcgggaaattggcattgcgattcccaatggctgggggacagagtcatcaccaccagcacccgaacctgggccctgcccacctacaacaatcacctctacaagcaaatctccaacagcacatctggaggatcttcaaatgacaacgcctacttcggctacagcaccccctgggggtattttgacttcaacagattccactgccacttctcaccacgtgactggcagcgactcatcaacaacaactggggattccggcctaagcgactcaacttcaagctcttcaacattcaggtcaaagaggttacggacaacaatggagtcaagaccatcgccaataaccttaccagcacggtccaggtcttcacggactcagactatcagctcccgtacgtgctcgggtcggctcacgagggctgcctcccgccgttcccagcggacgttttcatgattcctcagtacgggtatctgacgcttaatgatggaagccaggccgtgggtcgttcgtccttttactgcctggaatatttcccgtcgcaaatgctaagaacgggtaacaacttccagttcagctacgagtttgagaacgtacctttccatagcagctacgctcacagccagagcctggaccgactaatgaatccactcatcgaccaatacttgtactatctctcaaagactattaacggttctggacagaatcaacaaacgctaaaattcagtgtggccggacccagcaacatggctgtccagggaagaaactacatacctggacccagctaccgacaacaacgtgtctcaaccactgtgactcaaaacaacaacagcgaatttgcttggcctggagcttcttcttgggctctcaatggacgtaatagcttgatgaatcctggacctgctatggccagccacaaagaaggagaggaccgtttctttcctttgtctggatctttaatttttggcaaacaaggaactggaagagacaacgtggatgcggacaaagtcatgataaccaacgaagaagaaattaaaactactaacccggtagcaacggagtcctatggacaagtggccacaaaccaccagagtgcccaagcacaggcgcagaccggctgggttcaaaaccaaggaatacttccgggtatggtttggcaggacagagatgtgtacctgcaaggacccatttgggccaaaattcctcacacggacggcaactttcacccttctccgctgatgggagggtttggaatgaagcacccgcctcctcagatcctcatcaaaaacacacctgtacctgcggatcctccaacggccttcaacaaggacaagctggactctttcatcacccagtattctactggccaagtcagcgtggagatcgagtgggagctgcagaaggaaaacagcaagcgctggaacccggtgatccagtacacttccaactattacaagtctaataatgttgaatttgctgttaatactgaaggtgtatatagtgaaccccgccccattggcaccagatacctgactcgtaatctg

SEQ ID NO: 647 - DNA, 2208 bp, synthetic construct
  source 1..2208: mol_type = other DNA; note = Description of Artificial Sequence: Synthetic polynucleotide
atggctgccgatggttatcttccagattggctcgaggacaacctctctgagggcattcgcgagtggtgggacttgaaacctggagccccgaagcccaaagccaaccagcaaaagcaggacgacggccggggtctggtgcttcctggctacaagtacctcggacccttcaacggactcgacaagggggagcccgtcaacgcggcggacgcagcggccctcgagcacgacaaggcctacgaccagcagctcaaagcgggtgacaatccgtacctgcggtataaccacgccgacgccgagtttcaggagcgtctgcaagaagatacgtcttttgggggcaacctcgggcgagcagtcttccaggccaagaagcgggttctcgaacctctcggtctggttgaggaaggcgctaagacggctcctggaaagaaacgtccggtagagcagtcgccacaagagccagactcctcctcgggcatcggcaagacaggccagcagcccgctaaaaagagactcaattttggtcagactggcgactcagagtcagtccccgatccacaacctctcggagaacctccagcaacccccgctgctgtggggcctactacaatggcttcaggcggtggcgcaccaatggcagacaataacgaaggcgtcgacggagtgggtaatgcctcaggaaattggcattgcgattccacatggctgggcgacagagtcatcaccaccagcacccgcacctgggccttgcccacctacaataaccacctctacaagcaaatctccagtgcttcaacgggggccagcaacgacaaccactacttcggctacagcaccccctgggggtattttgatttcaacagattccactgccacttttcaccacgtgactggcagcgactcatcaacaacaattggggattccggcccaagagactcaacttcaaactcttcaacatccaagtcaaggaggtcacgacgaatgatggcgttacaaccatcgctaataaccttaccagcacggttcaagtcttctcggactcggagtaccagcttccgtacgtcctcggctctgcgcaccagggctgcctccctccgttcccggcggacgtgttcatgattccgcaatacggctacctgacgctcaacaatggcagccaagccgtgggacgttcatccttttactgcctggaatatttcccttctcagatgctgagaacgggcaacaactttaccttcagctacacctttgaggaagtgcctttccacagcagctacgcgcacagccagagcctggaccggctgatgaatcctctcatcgaccaatacctgtattacctgaacagaactcaaaatcagtccggaagtgcccaaaacaaggacttgctgtttagccgtgggtctccagctggcatgtctgttcagcccaaaaactggctacctggaccctgttatcggcagcagcgcgtttctaaaacaaaaacagacaacaacaacagcaattttacctggactggtgcttcaaaatataacctcaatgggcgtgaatccatcatcaaccctggcactgctatggcctcacacaaagacgacgaagacaagttctttcccatgagcggtgtcatgatttttggaaaagagagcgccggagcttcaaacactgcattggacaatgtcatgattacagacgaagaggaaattaaagccactaaccctgtggccaccgaaagatttgggaccgtggcagtcaatttccagagcagcagcacagaccctgcgaccggagatgtgcatgctatgggagcattacctggcatggtgtggcaagatagagacgtgtacctgcagggtcccatttgggccaaaattcctcacacagatggacactttcacccgtctcctcttatgggcggctttggactcaagaacccgcctcctcagatcctcatcaaaaacacgcctgttcctgcgaatcctccggcggagttttcagccacaaagcttgcttcattcatcacccaatactccacaggacaagtgagtgtggaaattgaatgggagctgcagaaagaaaacagcaagcgctggaatcccgaagtgcagtacacatccaattatgcaaaatctgccaacgttgattttactgtggacaacaatggactttatactgagcctcgccccattggcacccgttaccttacccgtcccctg

SEQ ID NO: 648 - DNA, 2208 bp, synthetic construct
  source 1..2208: mol_type = other DNA; note = Description of Artificial Sequence: Synthetic polynucleotide
atggctgccgatggttatcttccagattggctcgaggacaacctctctgagggcattcgcgagtggtgggacttgaaacctggagccccgaagcccaaagccaaccagcaaaagcaggacgacggccggggtctggtgcttcctggctacaagtacctcggacccttcaacggactcgacaagggggagcccgtcaacgcggcggacgcagcggccctcgagcacgacaaggcctacgaccagcagctcaaagcgggtgacaatccgtacctgcggtataaccacgccgacgccgagtttcaggagcgtctgcaagaagatacgtcttttgggggcaacctcgggcgagcagtcttccaggccaagaagcgggttctcgaacctctcggtctggttgaggaaggcgctaagacggctcctggaaagagacgtccggtagagcagtcgccacaagagccagactcctcctcgggcatcggcaagacaggccagcagcccgctaaaaagagactcaattttggtcagactggcgactcagagtcagtccccgatccacaacctctcggagaacctccagcaacccccgctgctgtgggacctactacaatggcttcaggcggtggcgcaccaatggcagacaataacgaaggcgccgacggagtgggtaatgcctcaggaaattggcattgcgattccacatggctgggcgacagagtcatcaccaccagcacccgcacctgggccttgcccacctacaataaccacctctacaagcaaatctccagtgcttcaacgggggccagcaacgacaaccactacttcggctacagcaccccctgggggtattttgatttcaacagattccactgccacttttcaccacgtgactggcagcgactcatcaacaacaattggggattccggcccaagagactcaacttcaaactcttcaacatccaagtcaaggaggtcacgacgaatgatggcgtcacaaccatcgctaataaccttaccagcacggttcaagtcttctcggactcggagtaccagcttccgtacgtcctcggctctgcgcaccagggctgcctccctccgttcccggcggacgtgttcatgattccgcaatacggctacctgacgctcaacaatggcagccaagccgtgggacgttcatccttttactgcctggaatatttcccttctcagatgctgagaacgggcaacaactttaccttcagctacacctttgaggaagtgcctttccacagcagctacgcgcacagccagagcctggaccggctgatgaatcctctcatcgaccaatacctgtattacctgaacagaactcaaaatcagtccggaagtgcccaaaacaaggacttgctgtttagccgtgggtctccagctggcatgtctgttcagcccaaaaactggctacctggaccctgttatcggcagcagcgcgtttctaaaacaaaaacagacaacaacaacagcaattttacctggactggtgcttcaaaatataacctcaatgggcgtgaatccatcatcaaccctggcactgctatggcctcacacaaagacgacgaagacaagttctttcccatgagcggtgtcatgatttttggaaaagagagcgccggagcttcaaacactgcattggacaatgtcatgattacagacgaagaggaaattaaagccactaaccctgtggccaccgaaagatttgggaccgtggcagtcaatttccagagcagcagcacagaccctgcgaccggagatgtgcatgctatgggagcattacctggcatggtgtggcaagatagagacgtgtacctgcagggtcccatttgggccaaaattcctcacacagatggacactttcacccgtctcctcttatgggcggctttggactcaagaacccgcctcctcagatcctcatcaaaaacacgcctgttcctgcgaatcctccggcggagttttcagctacaaagtttgcttcgttcatcacccaatactccacaggacaagtgagtgtggaaattgaatgggagctgcagaaagaaaacagcaagcgctggaatcccgaagtgcagtacacatccaattatgcaaaatctgccaacgttgattttactgtggacaacaatggactttatactgagcctcgccccattggcacccgttaccttacccgtcccctg

SEQ ID NO: 649 - DNA, 2208 bp, synthetic construct
  source 1..2208: mol_type = other DNA; note = Description of Artificial Sequence: Synthetic polynucleotide
atggctgccgatggttatcttccagattggctcgaggacaacctctctgagggcattcgcgagtggtgggacttgaaacctggagccccgaagcccaaagccaaccagcaaaagcaggacgacggccggggtctggtgcttcctggctacaagtacctcggacccttcaacggactcgacaagggggagcccgtcaacgcggcggacgcagcggccctcgagcacgacaaggcctacgaccagcagctcaaagcgggtgacaatccgtacccgcggtataaccacgccgacgccgagtttcaggagcgtctgcaagaagatacgtcttttgggggcaacctcgggcgagcagtcttccaggccaagaagcgggttctcgaacctctcggtctggttggggaaggcgctaagacggctcctggaaagaaacgtccggtagagcagtcgccacaagagccagactcctcctcgggcatcggcaagacaggccagcagcccgctaaaaagagactcaattttggtcagactggcgactcagagtcagtccccgatccacaacctctcggagaacctccagcaacccccgctgctgtgggacctactacaatggcttcaggcggtggcgcaccaatggcagacaataacgaaggcgccgacggagtgggtaatgcctcaggaaattggcattgcgattccacatggctgggcgacagagtcatcaccaccagcacccgcacctgggccttgcccacctacaataaccacctctacaagcaaatctccagtgcttcaacgggggccagcaacgacaaccactacttcggctacagcaccccctgggggtattttgatttcaacagattccactgccacttttcaccacgtgactggcagcgactcatcaacaacaattggggattccggcccaagagactcaacttcaaactcttcaacatccaagtcaaggaggtcacgacgaatgatggcgtcacaaccatcgctaataaccttaccagcacggttcaagtcttctcggactcggagtaccagcttccgtacgtcctcggctctgcgcaccagggctgcctccctccgttcccggcggacgtgttcatgattccgcaatacggctacctgacgctcaacaatggcagccaagccgtgggacgttcatccttttactgcctggaatatttcccttctcagatgctgagaacgggcaacaactttaccttcagctacacctttgaggaagtgcctttccacagcagctacgcgcacagccagagcctggaccggctgatgaatcctcccatcgaccaatacctgtattacctgaacagaactcaaaatcagtccggaagtgcccaaaacaaggacttgctgtttagccgtgggtctccagctggcatgtctgttcagcccaaaaactggctacctggaccctgttatcggcagcagcgcgtttctaaaacaaaaacagacaacaacaacagcaattttacctggactggtgcttcaaaatataacctcaatgggcgtgaatccatcatcaaccctggcactgctatggcctcacacaaagacgacgaagacaagttctttcccatgagcggtgtcatgatttttggaaaagagagcgccggagcttcaaacactgcattggacaatgtcatgattacagacgaagaggaaattaaagccactaaccctgtggccaccgaaagatttgggaccgtggcagtcaatttccagagcagcagcacagaccctgcgaccggagatgtgcatgctatgggagcattacctggcatggtgtggcaagatagagacgtgtacctgcagggtcccatttgggccaaaattcctcacacagatggacactttcacccgtctcctcttatgggcggctttggactcaagaacccgcctcctcagatcctcatcaaaaacacgcctgttcctgcgaatcctccggcggagttttcagctacaaagtttgcttcattcatcacccaatactccacaggacaagtgagtgtggaaattgaatgggagctgcagaaagaaaacagcaagcgctggaatcccgaagtgcagtacacatccaattatgcaaaatctgccaacgttgattttactgtggacaacaatggactttatactgagcctcgccccattggcacccgttaccttacccgtcccctg

SEQ ID NO: 650 - DNA, 2208 bp, synthetic construct
  source 1..2208: mol_type = other DNA; note = Description of Artificial Sequence: Synthetic polynucleotide
atggctgccgatggttatcttccagattggctcgaggacaacctctctgagggcattcgcgagtggtgggacttgaaacctggagccccgaagcccaaagccaaccagcaaaagcaggacgacggccggggtctggtgcttcctggctacaagtacctcggacccttcaacggactcgacaagggggagcccgtcaacgcggcggacgcagcggccctcgagcacgacaaggcctacgaccagcagctcaaagcgggtgacaatccgtacctgcggtataaccacgccgacgccgagtttcaggagcgtctgcaagaagatacgtcttttgggggcaacctcgggcgagcagtcttccaggccaagaagcgggttctcgaacctctcggtctggttgaggaaggcgctaagacggctcctggaaagaaacgtccggtagagcagtcgccacaagagccagactcctcctcgggcatcggcaagacaggccagcagcccgctaaaaagagactcaattttggtcagactggcgactcagagtcagtccccgatccacgacctctcggagaacctccagcaacccccgctgctgtgggacctactacaatggcttcaggcggtggcgcaccaatggcagacaataacgaaggcgccgacggagtgggtaatgcctcaggaaattggcattgcgattccacatggctgggcgacagagtcatcaccaccagcacccgcacctgggccttgcccacctacaataaccacctctacaagcaaatctccagtgcttcaacgggggccagcaacgacaaccactacttcggctacagcaccccctgggggtattttgatttcaacagattccactgccacttttcaccacgcgactggcagcgactcatcaacaacaattggggattccggcccaagagactcaacttcaaactcttcaacatccaagtcaaggaggtcacgacgaatgatggcgtcacaaccatcgctaataaccttaccagcacggttcaagtcttctcggactcggagtaccagcttccgtacgtcctcggctctgcgcaccagggctgcctccctccgttcccggcggacgtgttcatgattccgcaatacggctacctgacgctcaacaatggcagccaagccgtgggacgttcatccttttactgcctggaatatttcccttctcagatgctgagaacgggcaacaactttaccttcagctacacctttgaggaagtgcctttccacagcagctacgcgcacagccagagcctggaccggctgatgaatcctctcatcgaccaatacctgtattacctgaacagaactcaaaatcagtccggaagtgcccaaaacaaggacttgctgtttagccgtgggcctccagctggcatgtctgttcagcccaaaaactggctacctggaccctgttatcggcagcagcgcgtttctaaaacaaaaacagacaacaacaacagcaattttacctggactggtgcttcaaaatataacctcaatgggcgtgaatccatcatcaaccctggcactgctatggcctcacacaaagacgacgaagacaagttctttcccatgagcggtgtcatgatttttggaaaagagagcgccggagcttcaaacactgcattggacaatgtcatgattacggacgaagaggaaattaaagccactaaccctgtggccaccgaaagatttgggaccgtggcagtcaatttccagagcagcagcacagaccctgcgaccggagatgtgcatgctatgggagcattacctggcatggtgtggcaagatagagacgtgtacctgcagggtcccatttgggccaaaattcctcacacagatggacactttcacccgtctcctcttatgggcggctttggactcaagaacccgcctcctcagatcctcatcaaaaacacgcctgttcctgcgaatcctccggcggagttttcagctacaaagtttgcttcattcatcacccaatactccacaggacaagtgagtgtggaaattgaatgggagctgcagaaagaaaacagcaagcgctggaatcccgaagtgcagtacacatccaattatgcaaaatctgccaacgttgattttactgtggacaacaatggactttatactgagcctcgccccattggcacccgttaccttacccgtcccctg

SEQ ID NO: 651 - DNA, 2208 bp, synthetic construct
  source 1..2208: mol_type = other DNA; note = Description of Artificial Sequence: Synthetic polynucleotide
atggctgccgatggttatcttccagattggctcgaggacaacctctctgagggcattcgcgagtggtgggacttgaaacctggagccccgaagcccaaagccaaccagcaaaagcaggacgacggccggggtctggtgcttcctggctacaagtacctcggacccttcaacggactcgacaagggggagcccgtcaacgcggcggacgcagcggccctcgagcacgacaaggcctacgaccagcagctcaaagcgggtgacaatccgtacctgcggtataaccacgccgacgccgagtttcaggagcgtctgcaagaagatacgtcttttgggggcaacctcgggcgagcagtcttccaggccaagaagcgggttctcgaacctctcggtctggttgaggaaggcgctaagacggctcctggaaagaaacgtccggtagagcagtcgccacaagagccagactcctcctcgggcatcggcaagacaggccagcagcccgctaaaaagagactcaattttggtcagactggcggctcagagtcagtccccgatccacaacctctcggagaacctccagcaacccccgctgctgtgggacctactacaatggcttcaggcggtggcgcaccaatggcagacaataacgaaggcgccgacggagtgggtaatgcctcaggaaattggcattgcgattccacatggctgggcgacagagtcatcaccaccagcacccgcacctgggccttgcccacctacaataaccacctctacaagcaaatctccagtgcttcaacgggggccagcaacgacaaccactacttcggctacagcaccccctgggggtattttgatttcaacagattccactgccacttttcaccacgtgactggcagcgactcatcaacaacaattggggattccggcccaagagactcaacttcaaactcttcaacatccaagtcaaggaggtcacgacgaatgatggcgtcacaaccatcgctaataaccttaccagcacggttcaagtcttctcggactcggagtaccagcttccgtacgtcctcggctctgcgcaccagggctgcctccctccgttcccggcggacgtgttcatgattccgcaatacggctacctgacgctcaacaatggcagccaagccgtgggacgttcatccttttactgcctggaatatttcccttctcagatgctgagaacgggcaacaactttaccttcagctacacctttgaggaagtgcctttccacagcagctacgcgcacagccagagcctggaccggctgatgaatcctcccatcgaccaatacctgtattacctgaacagaactcaaaatcagtccgggagtgcccaaaacaaggacttgctgtttagccgtgggtctccagctggcatgtctgttcagcccaaaaactggctacctggaccctgttatcggcagcagcgcgtttctaaaacaaaaacagacaacaacaacagcaattttacctggactggtgcttcaaaatataacctcaatgggcgtgaatccatcatcaaccctggcactgctatggcctcacacaaagacgacgaagacaagttctttcccatgagcggtgtcatgatttttggaaaagagagcgccggagcttcaaacactgcattggacaatgtcatgattacagacgaagaggaaattaaagccactaaccctgtggccaccgaaagatttgggaccgtggcagtcaatttccagagcagcagcacagaccctgcgaccggagatgtgcatgctatgggagcattacctggcatggtgtggcaagatagagacgtgtacctgcagggtcccatttgggccaaaattcctcacacagatggacactttcacccgtctcctcttatgggcggctttggactcaagaacccgcctcctcagatcctcatcaaaaacacgcctgttcctgcgaatcctccggcggagttttcagctacaaagtttgcttcattcatcacccaatactccacaggacaagtgagtgtggaaattgaatgggagctgcagaaagaaaacagcaagcgctggaatcccgaagtgcagtacacatccaattatgcaaaatctgccaacgttgactttactgtggacaacaatggactttatactgagcctcgccccattggcacccgttaccttacccgtcccctg

SEQ ID NO: 652 - DNA, 2208 bp, synthetic construct
  source 1..2208: mol_type = other DNA; note = Description of Artificial Sequence: Synthetic polynucleotide
atggctgccgatggttatcttccagattggctcgaggacaacctctctgagggcattcgcgagtggtgggacttgaaacctggagccccgaagcccaaagccaaccagcaaaagcaggacgacggccggggtctggtgcttcctggctacaagtacctcggacccttcaacggactcgacaagggggagcccgtcaacgcggcggacgcagcggccctcgagcacgacaaggcctacgaccagcagctcaaagcgggtgacaatccgtacctgcggtataaccacgccgacgccgagtttcaagagcgtctgcaagaagatacgtcttttgggggcaacctcgggcgagcagtcttccaggccaagaagcgggttctcgaacctctcggtctggttgaggaaggcgctaagacggctcctggaaagaaacgtccggtagagcagtcgccacaagagccagactcctcctcgggcatcggcaagacaggccagcagcccgctaaaaagagactcaattttggtcagactggcgactcagagtcagtccccgatccgcaacctctcggagaacctccagcaacccccgctgctgtgggacctactacaatggcttcaggcggtggcgcaccaatggcagacaataacgaaggcgccgacggagtgggtaatgcctcaggaaattggcattgcgattccacatggctgggcgacagagtcatcaccaccagcacccgcacctgggccttgcccacctacaataaccacctctacaagcaaatctccagtgcttcaacgggggccagcaacgacaaccactacttcggctacagcaccccctgggggtattttgatttcaacagattccactgccacttttcaccacgtgactggcagcgactcatcaacaacaattggggattccggcccaagagactcaacttcaaactcttcaacatccaagtcaaggaggtcacgacgaatgatggcgtcacaaccatcgctaataaccttaccagcacggttcaagtcttctcggactcggagtaccagcttccgtacgtcctcggctctgcgcaccagggctgcctccctccgttcccggcggacgtgttcatgattccgcaatacggctacctgacgctcaacaatggcagccaagccgtgggacgttcatccttttactgcctggaatatttcccttctcagatgctgagaacgggcaacaactttaccttcagctacacctttgaggaagtgcctttccacagcagctacgcgcacagccagagcctggaccggctgatgaatcctctcatcgaccaatacctgtattacctgaacagaactcaaaatcagtccggaagtgcccaaaacaaggacttgctgtttagccgtgggtctccagctggcatgtctgttcagcccaaaaactggctacctggaccctgttatcggcagcagcgcgtttctaaaacaaaaacagacaacaacaacagcaattttacctggactggtgcttcaaaatataacctcaatgggcgtgaatccatcatcaaccctggcactgctgtggcctcacacaaagacgacgaagacaagttctttcccatgagcggtgtcatgatttttggaaaagagagcgccggagcttcaaacactgcattggacaatgtcatgattacagacgaagaggaaattaaagccactaaccctgtggccaccgaaagatttgggaccgtggcagtcaatttccagagcagcagcacagaccctgcgaccggagatgtgcatgctatgggagcattacctggcatggtgtggcaagatagagacgtgtacctgcagggtcccatttgggccaaaattcctcacacagatggacactttcacccgtctcctcttatgggcggctttggactcaagaacccgcctcctcagatcctcatcaaaaacacgcctgttcctgcgaatcctccggcggagttttcagctacaaagtttgcttcattcatcacccaatactccacaggacaagtgagtgtggaaattgaatgggagctgcagaaagaaaacagcaagcgctggaatcccgaagtgcagtacacatccaattatgcaaaatctgccaacgttgattttactgtggacaacaatggactttatactgagcctcgccccattggcacccgttaccttacccgtcccctg

SEQ ID NO: 653 - DNA, 2208 bp, synthetic construct
  source 1..2208: mol_type = other DNA; note = Description of Artificial Sequence: Synthetic polynucleotide
atggctgccgatggttatcttccagattggctcgaggacaacctctctgagggcattcgcgagtggtgggacttgaaacctggagccccgaagcccaaagccaaccagcaaaagcaggacgacggccggggtctggtgcttcctggctacaagtacctcggacccttcaacggactcgacaagggggagcccgtcaacgcggcggacgcagcggccctcgagcacgacaaggcctacgaccagcagctcaaagcgggtgacaatccgtacctgcggtataaccacgccgacgccgagtttcaggagcgtctgcaagaagatacgtcttttgggggcaacctcgggcgagcagtcttccaggccaagaagcgggttctcgaacctctcggtctggttgaggaaggcgctaagacggctcctggaaagaaacgtccggtagagcagtcgccacaagagccagactcctcctcgggcatcggcaagacaggccagcagcccgctaaaaagagactcaattttggtcagactggcgactcagagtcagtccccgatccacaacctctcggagaacctccagcaacccccgctgctgtgggacctactacaatggcttcaggcggtggcgcaccaatggcagacaataacgaaggcgccgacggagtgggtaatgcctcaggaaattggcattgcgattccacatggctgggcgacagagtcatcaccaccagcacccgcacctgggccttgcccacctacaataaccacctctacaagcaaatctccagtgcttcaacgggggccagcaacgacaaccactacttcggctacagcaccccctgggggtattttgatttcaacagattccactgccacttttcaccacgtgactggcagcaactcatcaacaacaattggggattccggcccaagagactcaacttcaaactcttcaacatccaagtcaaggaggtcacgacgaatgatggcgtcacaaccatcgctaataaccttaccagcacggttcaagtcttctcggactcggagtaccagcttccgtacgtcctcggctctgcgcaccagggctgcctccctccgttcccggcggacgtgttcatgattccgcaatacggctacctgacgctcaacaatggcagccaagccgtgggacgttcatccttttactgcctggaatatttcccttctcagatgctgagaacgggcaacaactttaccttcagctacacctttgaggaagtgcctttccacagcagctacgcgcacagccagagcctggaccggctgatgaatcctctcatcgaccaatacctgtattacctgaacagaactcaaaatcagtccggaagtgcccaaaacaaggacttgctgtttagccgtgggtctccagctggcatgtctgttcagcccaaaaactggctacctggaccctgttatcggcagcagcgcgtttctaaaacaaaaacagacaacaacaacagcaattttacctggactggtgcttcaaaatataacctcaatgggcgtgaatccatcatcaaccctggcactgctatggcctcacacaaagacgacgaagacaagttctttcccatgagcggtgtcatgatttttggaaaagagagcgccggagcttcaaacactgcattggacaatgtcatgattacagacgaagaggaaattaaagccactaaccctgtggccaccgaaagatttgggaccgtggcagtcaatttccagagcaccagcacagaccctgcgaccggagatgtgcatgctatgggagcattacctggcatggtgtggcaagatagagacgtgtacctgcagggtcccatttgggccaaaattcctcacacagatggacactttcacccgtctcctcttatgggcggctttggactcaagaacccgcctcctcagatcctcatcaaaaacacgcctgttcctgcgaatcctccggcggagttttcagctacaaagtttgcttcattcatcacccaatactccacaggacaagtgagtgtggaaattgaatgggagctgcagaaagaaaacagcaagcgctggaatcccgaagtgcagtacacatccaattatgcaaaatctgccgacgttgattttactgtggacaacaatggactttatactgagcctcgccccattggcacccgttaccttacccgtcccctg

SEQ ID NO: 654 - DNA, 2208 bp, synthetic construct
  source 1..2208: mol_type = other DNA; note = Description of Artificial Sequence: Synthetic polynucleotide
atggctgccgatggttatcttccagattggctcgaggacaacctctctgagggcattcgcgagtggtgggacttgaaacctggagccccgaagcccaaagccaaccagcaaaagcaggacgacggccggggtctggtgcttcctggctacaagtacctcggacccttcaacggactcgacaagggggagcccgtcaacgcggcggacgcagcggccctcgagcacgacaaggcctacgaccagcagctcaaagcgggtgacaatccgtacctgcggtataaccacgccgacgccgagtttcaagagcgtctgcaagaagatacgtcttttgggggcaacctcgggcgagcagtcttccaggccaagaagcgggttctcgaacctctcggtctggttgaggaaggcgctaagacggctcctggaaagaaacgtccggtagagcagtcgccacaagagccagactcctcctcgggcatcggcaagacaggccagcagcccgctaaaaagagactcaattttggtcagactggcgactcagagtcagtccccgatccgcaacctctcggagaacctccagcaacccccgctgctgtgggacctactacaatggcttcaggcggtggcgcaccaatggcagacaataacgaaggcgccgacggagtgggtaatgcctcaggaaattggcattgcgattccacatggctgggcgacagagtcatcaccaccagcacccgcacctgggccttgcccacctacaataaccacctctacaagcaaatctccagtgcttcaacgggggccagcaacgacaaccactacttcggctacagcaccccctgggggtattttgatttcaacagattccactgccacttttcaccacgtgactggcagcgactcatcaacaacaattggggattccggcccaagagactcaacttcaaactcttcaacatccaagtcaaggaggtcacgacgaatgatggcgtcacaaccatcgctaataaccttaccagcacggttcaagtcttctcggactcggagtaccagcctccgtacgtcctcggctctgcgcaccagggctgcctccctccgttcccggcggacgtgttcatgattccgcaatacggccacctgacgctcaacaatggcagccaagccgtgggacgttcatccttttactgcctggaatatttcccttctcagatgctgagaacgggcaacaactttaccttcagctacacctttgaggaagtgcctttccacagcagctacgcgcacagccagagcctggaccggctgacgaatcctctcatcgaccaatacctgtattacctgaacagaactcaaaatcagtccggaagtgcccaaaacaaggacttgctgtttagccgtgggtctccagctggcatgtctgttcagcccaaaaactggctacctggaccctgttatcggcagcagcgcgtttctaaaacaaaaacagacaacaacaacagcaattttacctggactggtgcttcaaaatataacctcaatgggcgtgaatccatcatcaaccctggcactgctatggcctcacacaaagacgacgaagacaagttctttcccatgagcggtgtcatgatttttggaaaagagagcgccggagcttcaaacactgcattggacaatgtcatgattacagacgaagaggaaattaaagccactaaccctgtggccaccgaaagatttgggaccgtggcagtcaatttccagagcagcagcacagaccctgcgaccggagatgtgcatgctatgggagcattacctggcatggtgtggcaagatagagacgtgtacctgcagggtcccatttgggccaaaattcctcacacagatggacactttcacccgtctcctcttatgggcggctttggactcaagaacccgcctcctcagatcctcatcaaaaacacgcctgttcctgcgaatcctccggcggagttttcagctacaaagtttgcttcattcatcacccaatactccacaggacaagtgagtgtggaaattgaatgggagctgcagaaagaaaacagcaagcgctggaatcccgaagtgcagtacacatccaattatgcaaaatctgccaacgttgattttactgtggacaacaatggactttatactgagcctcgccccattggcacccgttaccttacccgtcccctg

SEQ ID NO: 655 - DNA, 2208 bp, synthetic construct
  source 1..2208: mol_type = other DNA; note = Description of Artificial Sequence: Synthetic polynucleotide
atggctgccgatggttatcttccagattggctcgaggacaacctctctgagggcattcgcgagtggtgggacttgaaacctggagccccgaagcccaaagccaaccagcaagagcaggacgacggccggggtctggtgcttcctggctacaagtacctcggacccttcaacggactcgacaagggggagcccgtcaacgcggcggacgcagcggccctcgagcacgacaaggcctacgaccagcagctcaaagcgggtgacaatccgtacctgcggtataaccacgccgacgccgagtttcaggagcgtctgcaagaagatacgtcttttgggggcaacctcgggcgagcagtcttccaggccaagaagcgggttctcgaacctctcggtctggttgaggaaggcgctaagacggctcctggaaagaaacgtccggtagagcagtcgccacaagagccagactcctcctcgggcatcggcaagacaggccagcagcccgctaaaaagagactcaattttggtcagactggcgactcagagtcagtccccgatccacaacctctcggagaacctccagcaacccccgctgctgtgggacctactacaatggcttcaggcggtggcgcaccaatggcagacaataacgaaggcgccgacggagtgggtaatgcctcaggaaattggcattgcgattccacatggctgggcgacagagtcatcaccaccagcacccgcacctgggccttgcccacctacaataaccacctctacaagcaaatctccagtgcttcaacgggggccagcaacgacaaccactacttcggctacagcaccccctgggggtattttgatttcaacagattccactgccacttttcaccacgtgactggcagcgactcatcaacaacaattggggattccggcccaagagactcaacttcaaactcttcaacatccaagtcaaggaggtcacgacgaatgatggcgtcacaaccatcgctaataaccttaccagcacggttcaagtcttctcggactcggagtaccagcttccgtacgtcctcggctctgcgcaccagggctgcctccctccgttcccggcggacgtgttcatgattccgcaatacggctacctgacgctcaacaatggcagccaagccgtgggacgttcatccttttactgcctggaatatttcccttctcagatgctgagaacgggcaacaactttaccttcagctacacctttgaggaagtgcctttccacagcagctacgcgcacagccagagcctggaccggctgatgaatcctctcatcgaccaatacctgtattacctgaacagaactcaaaatcagtccggaagtgcccaaaacaaggacttgctgtttagccgtgggtctccagctggcatgtctgttcagcccaaaaactggctacctggaccctgttatcggcagcagcgcgtttctaaaacaaaaacagacaacaacaacagcaattttacctggactggtgcttcaaaatataacctcaatgggcgtgaatccatcatcaaccctggcactgctatggcctcacacaaagacgacgaagacaagttctttcccatgagcggtgtcatgatttttggaaaagagagcgccggagcttcaaacactgcattggacaatgtcatgattacagacgaagaggaaattaaagccactaaccctgtggccaccgaaagatttgggaccgtggcagtcaatttccagagcagcagcacagaccctgcgaccggagatgtgcatgctacgggaacattacctggcatggtgtggcaagatagagacgtgtacctgcagggtcccatttgggccaaaattcctcacacagatggacactttcacccgtctcctcttatgggcggctttggactcaagaacccgcctcctcagatcctcatcaaaaccacgcctgttcctgcgaatcctccggcggagttttcagctacaaagtttgcttcattcatcacccagtactccacaggacaagtgagtgtggaaattgaatgggagctgcagaaagaaaacagcaagcgctggaatcccgaagtgcagtacacatccaattatgcaaaatctgccaacgttgattttactgtggacgacaatggactttatactgagcctcgccccattggcacccgttaccttacccgtcccctg

SEQ ID NO: 656 - DNA, 2208 bp, synthetic construct
  source 1..2208: mol_type = other DNA; note = Description of Artificial Sequence: Synthetic polynucleotide
atggctgccgatggttatcttccagattggctcgaggacaacctctctgagggcattcgcgagtggtgggacttgaaacctggagccccgaagcccaaagccaaccagcaaaagcaggacgacggccggggtctggtgcttcctggctacaagtacctcggacccttcaacggactcgacaagggggagcccgtcaacgcggcggacgcagcggccctcgagcacgacaaggcctacgaccagcagctcaaagcgggtgacaatccgtacctgcggtataaccacgccgacgccgagtttcaggagcgtctgcaagaagatacgtcttttgggggcaacctcgggcgagcagtcttccaggccaagaagcgggttctcgaacctctcggtctggttgaggaaggcgctaagacggctcctggaaagaaacgtccggtagagcagtcgctacaagagccagactcctcctcgggcatcggcaagacaggccagcagcccgctaaaaagagactcaattttggtcagactggcgactcagagtcagtccccgatccacaacctctcggagaacctccagcaacccccgctgctgtgggacctactacaatggcttcaggcggtggcgcaccaatggcagacaataacgaaggcgccgacggagtgggtaatgcctcaggaaattggcattgcgattccacatggctgggcgacagagtcatcaccaccagcacccgcacctgggccttgcccacctacaataaccacctctacaagcaaatctccagtgcttcaacgggggccagcaacgacaaccactacttcggctacagcaccccctgggggtattttgatttcaacagattccactgccacttttcaccacgtgactggcagcgactcatcaacaacaattggggattccggcccaagagactcaacttcaaactcttcaacatccaagtcaaggaggtcacgacgaatgatggcgtcacaaccatcgctaataaccttaccagcacggttcaagtcttctcggactcggagtaccagcttccgtacgtcctcggctctgcgcaccagggctgcctccctccgttcccggcggacgtgttcatgattccgcaatacggctacctgacgctcaacaatggcagccaagccgtgggacgttcatccttttactgcctggaatatttcccttctcagatgctgagaacgggcaacaactttaccttcagctacacctttgaggaagtgcctttccacagcagctacgcgcacagccagagcctggaccggctgatgaatcctctcatcgaccaatacctgtattacctgaacagaactcaaaatcagtccggaagtgcccaaaacaaggacttgctgtttagccgtgggtctccagctggcatgtctgttcagcccaaaaactggctacctggaccctgttatcggcagcagcgcgtttctaaaacaaaaacagacaacgacaacagcaattttacctggactggtgcttcaaaatataacctcaatgggcgtgaatccatcatcaaccctggcactgctatggcctcacacaaagacgacgaagacaagttctttcccatgagcggtgtcatgatttttggaaaagagagcgccggagcttcaaacactgcattggacaatgtcatgattacagacgaagaggaaattaaagccactaaccctgtggccaccgaaagatttgggaccgtggcagtcaatttccagagcagcagcacagaccctgcgaccggagatgtgcatgctatgggagcattacctggcatggtgtggcaagatagagacgtgtacctgcagggtcccatttgggccaaaattcctcacacagatggacactttcacccgtctcctcttatgggcggctttggactcaagaacccgcctcctcagatcctcatcaaaaacacgcctgttcctgcgaatcctccggcggagttttcagctacaaagtttgcttcattcatcacccaatactccacaggacaagtgagtgtggaaattgaatgggagctgcagaaagaaaacagcaagcgctggaatcccgaagtgcagtacacatccaattatgcaaaatctgccaacgttgattttactgtggacaacaatggactttatactgagcctcgccccattggcacccgttaccttacccgtcccctg

SEQ ID NO: 657 - DNA, 2208 bp, synthetic construct
  source 1..2208: mol_type = other DNA; note = Description of Artificial Sequence: Synthetic polynucleotide
atggctgccgatggttatcttccagattggctcgaggacaacctctctgagggcattcgcgagtggtgggacttgaaacctggagctccgaagcccaaagccaaccagcaaaagcaggacgacggccggggtctggtgcttcctggctacaagtacctcggacccttcaacggactcgacaagggggagcccgtcaacgcggcggacgcagcggccctcgagcacgacaaggcctacgaccagcagctcaaagcgggtgacaatccgtacctgcggtataaccacgccgacgccgagtttcaggagcgtctgcaagaagatacgtcttttgggggcaacctcgggcgagcagtcttccaggccaagaagcgggttctcgaacctctcggtctggttgaggaaggcgctaagacggctcctggaaagaaacgtccggtagagcagtcgccacaagagccagactcctcctcgggcatcggcaagacaggccagcagcccgctaaaaagagactcaattttggtcagactggcgactcagagtcagtccccgatccacaacctctcggagaacctccagcaacccccgctgctgtgggacctactacaatggcttcaggcggtggcgcaccaatggcagacaataacgaaggcgccgacggagtgggtaatgcctcaggaaattggcattgcgattccacatggctgggcgacagagtcatcaccaccagcacccgcacctgggccttgcccacctacaataaccacctctacaagcaaatctccagtgcttcaacgggggccagcaacgacaaccactacttcggctacagcaccccctgggggtattttgatttcaacagattccactgccacttttcaccacgtgactggcagcgactcatcaacaacaattggggattccggcccaagagactcaacttcaaactcttcaacatccaagtcaaggaggtcacgacgaatgatggcgtcacaaccatcgctaataaccttaccagcacggttcaagtcttctcggactcggagtaccagcttccgtacgtcctcggctctgcgcaccagggctgcctccctccgttcccggcggacgtgttcatgattccgcaatacggctacctgacgctcaacaatggcagccaagccgtgggacgttcatccttttactgcctggaatatttcccttctcagatgctgagaacgggcaacaactttaccttcagctacacctttgaggaagcgcctttccacagcagctacgcgcacagccagagcctggaccggctgatgaatcctctcatcgaccaatacctgtattacctgaacagaactcaaaatcagtccggaagtgcccaaaacaaggacttgctgtttagccgtgggtctccagctggcatgtctgttcagcccaaaaactggctacctggaccctgttatcggcagcagcgcgtttctaaaacaaaaacagacaacaacaacagcaattttacctggactggtgcttcaaaatataacctcaatgggcgtgaatccatcatcaaccctggcactgctatggcctcacacaaagacgacgaagacaagttctttcccatgagcggtgtcatgatttttggaaaagagagcgccggagcttcaaacactgcattggacaatgtcatgattacagacgaagaggaaattaaagccactaaccctgtggccaccgaaagatttgggaccgtggcagtcaatttccagagcagcagcacagaccctgcgaccggagatgtgcatgctatgggagcattacctggcatggtgtggcaagatagagacgtgtacctgcagggtcccatttgggccaaaattcctcacacagatggacactttcacccgtctcctcttatgggcggctttggactcaagaacccgcctcctcagatcctcatcaaaaacacgcctgttcctgcgaatcctccggcggagttttcagctacaaagtttgcttcattcatcacccaatactccacaggacaagtgagtgtggaaattgaatgggagctgcagaaagaaaacagcaagcgctggaatcccgaagtgcagtacacatccaattatgcgaaatctgccaacgttgattttactgtggacaacaatggactttatactgagcctcgccccgttggcacccgttaccttacccgtcccctg

SEQ ID NO: 658 - DNA, 2208 bp, synthetic construct
  source 1..2208: mol_type = other DNA; note = Description of Artificial Sequence: Synthetic polynucleotide
atggctgccgatggttatcttccagattggctcgaggacaacctctctgagggcattcgcgagtggtgggacttgaaacctggagccccgaagcccaaagccaaccagcaaaagcaggacgacggccggggtctggtgcttcctggctacaagtacctcggacccttcaacggactcgacaagggggagcccgtcaacgcggcggacgcagcggccctcgagcacgacaaggcctacgaccagcagctcaaagcgggtgacaatccatacctgcggtataaccacgccgacgccgagtttcaggagcgtctgcaagaaaatacgtcttttgggggcaacctcgggcgagcagtcttccaggccaagaagcgggttctcgaacctctcggtctggttgaggaaggcgctaagacggctcctggaaagaaacgtccggtagagcagtcgccacaagagccagactcctcctcgggcatcggcaagacaggccagcagcccgctaaaaagagactcaattttggtcagactggcgactcagagtcagtccccgatccacaacctctcggagaacctccagcaacccccgctgctgtgggacctactacaatggcttcaggcggtggcgcaccaatggcagacaataacgaaggcgccgacggagtgggtaatgcctcaggaaattggcattgcgattccacatggctgggcgacagagtcatcaccaccagcacccgcacctgggccttgcccacctacaataaccacctctacaagcaaatctccagtgcttcaacgggggccagcaacgacaaccactacttcggctacagcaccccctgggggtattttgatttcaacagattccactgccactttccaccacgtgactggcagcgactcatcaacaacaattggggattccggcccaagagactcaacttcaaactcttcaacatccaagtcaaggaggtcacgtcgaatgatggcgtcacaaccatcgctaataaccttaccagcacggttcaagtcttctcggactcggagtaccagcttccgtacgtcctcggctctgcgcaccagggctgcctccctccgttcccggcggacgtgttcatgattccgcaatacggctacctgacgctcaacaatggcagccaagccgtgggacgttcatccttttactgcctggaatatttcccttctcagatgctgagaacgggcaacaactttaccttcagctacacctttgaggaagtgcctttccacagcagctacgcgcacagccagagcctggaccggctgatgaatcctctcatcgaccaatacctgtattacctgaacagaactcaaaatcagtccggaagtgcccaaaacaaggacttgctgtttagccgtgggtctccagctggcatgtctgttcagcccaaaaactggctacctggtccctgttatcggcagcagcgcgtttctaaaacaaaaacagacaacaacaacagcaattttacctggactggtgcttcaaaatataacctcaatgggcgtgaatccatcatcaaccctggcactgctatggcctcacacaaagacgacgaagacaagttctttcccatgagcggtgtcatgatttttggaaaagagagcgccggagcttcaaacactgcattggacaatgtcatgattacagacgaagaggaaattaaagccactaaccctgtggccaccgaaagatttgggaccgtggcagtcaatttccagagcagcagcacagaccctgcgaccggagatgtgcatgctatgggagcattacctggcatggtgtggcaagatagagacgtgtacctgcagggtcccatttgggccaaaattcctcacacagatggacactttcacccgtctcctcttatgggcggctttggactcaagaacccgcctcctcagatcctcatcaaaaacacgcctgttcctgcgaatcctccggcggagttttcagctacaaagtttgcttcattcatcacccaatactccacaggacaagtgagtgtggaaattgaatgggagctgcagaaagaaaacagcaagcgctggaatcccgaagtgcagtacacatccaattatgcaaaatctgccaacgttgattttactgtggacaacaatggactttatactgagcctcgccccattggcacccgttaccttacccgtcccctg

SEQ ID NO: 659 - DNA, 2208 bp, synthetic construct
  source 1..2208: mol_type = other DNA; note = Description of Artificial Sequence: Synthetic polynucleotide
atggctgccgatggttatcttccagattggctcgaggacaacctctctgagggcattcgcgagtggtgggacttgaaacctggagccccgaagcccaaagccaaccagcaaaagcaggacgacggccggggtctggtgcttcctggctacaagtacctcggacccttcaacggactcgacaagggggagcccgtcaacgcggcggacgcagcggccctcgagcacgacaaggcctacgaccagcagctcaaagcgggtgacaatccgtacctgcggtataaccacgccgacgccgagtttcaggagcgtctgcaagaagatacgtcttttgggggcaacctcgggcgagcagtcttccaggccaagaagcgggttctcgaacctctcggtctggttgaggaaggcgctaagacggctcctggaaagaaacgtccggtagagcagtcgccacaagagccagactcctcctcgggcatcggcaagacaggccagcagcccgctaaaaagagactcaattttggtcagactggcgactcagagtcagtccccgatccacaacctctcggagaacctccagcaacccccgctgctgtgggacctactacaatggcttcaggcggtggcgcaccaatggcagacaataacgaaggcgccgacggagtgggtaatgcctcaggaaattggcattgcgattccacatggctgggcgacagagtcatcaccaccagcacccgcacctgggccttgcccacctacaataaccacctctacaagcaaatctccagtgcttcaacgggggccagcaacgacaaccactacttcggctacagcaccccctgggggtattttgatttcaacagattccactgccacttttcaccacgtgactggcagcgactcatcaacaacaattggggattccggcccaagagactcaacttcaaactcttcaacatccaagtcaaggaggtcacgacgaatgatggcgtcacaaccatcgctaataaccttaccagcacggttcaagtcttctcggactcggagtaccagcttccgtacgtcctcggctctgcgcaccagggctgcctccctccgttcccggcggacgtgttcatgattccgcaatacggctacctgacgctcaacaatggcagccaagccgtgggacgttcatccttttactgcctggaatatttcccttctcagatgctgagaacgggcaacaactttaccttcagctacacctttgaggaagtgcctttccacagcagctacgcgcacagccagagcctggaccggctgatgaatcctctcatcgaccaatacctgtattacctgaacagaactcaaaatcagtccggaagtgcccaaaacaaggacttgctgtttagccgtgggtctccagctggcacgtctgttcagcccaaaaactggctacctggaccctgttatcggcagcagcgcgtttctaaaacaaaaacagacaacaacaacagcaattttacctggactggtgcttcaaaatataacctcaatgggcgtgaatccatcatcaaccctggcactgctatggcctcacacaaagacgacgaagacaagttctttcccatgagcggtgtcatgatttttggaaaagagagcgccggagcttcaaacactgcattggacaatgtcatgattacagacgaagaggaaattaaagccactaaccctgtggccaccgaaagatttgggaccgtggcagtcaatttccagagcagcagcacagaccctgcgaccggagatgtgcatgctatgggagcattacctggcatggtgtggcaagatagagacgtgtacctgcagggtcccatttgggccaaaattcctcacacagatggacactttcacccgtctcctcttatgggcggctttggactcaagaacccgcctcctcagatcctcatcaaaaacacgcctgttcctgcgaatcctccggcggagttttcagctacaaagtttgcttcattcatcacccaatactccacaggacaagtgagtgtggaaattgaatgggagctgcagaaagaaaacagcaagcgctggaatcccgaagtgcagtacacatccaattatgcaaaatctgccaacgttgattttactgtggacaacaatggactttatactgggcctcgccccattggcacccgttaccttacccgtcccctg

SEQ ID NO: 660 - DNA, 2208 bp, synthetic construct
  source 1..2208: mol_type = other DNA; note = Description of Artificial Sequence: Synthetic polynucleotide
atggctgccgatggttatcttccagattggctcgaggacaacctctctgagggcattcgcgagtggtgggacttgaaacctggagccccgaagcccaaagccaaccagcaaaagcaggacgacggccggggtctggtgcttcctggctacaagtacctcggacccttcaacggactcgacaagggggagcccgtcaacgcggcggacgcagcggccctcgagcacgacaaggcctacgaccagcagctcaaagcgggtgacaatccgtacctgcggtataaccacgccgacgccgagtttcaggagcgtctgcaagaagatacgtcttttgggggcaacctcgggcgagcagtcttccaggccaagaagcgggttctcgaacctctcggtctggttgaggaaggcgctaagacggctcctggaaagaaacgtccggtagagcagtcgccacaagagccagactcctcctcgggcatcggcaagacaggccagcagcccgctaaaaagagactcaattttggtcagactggcgactcagagtcagtccccgatccacaacctctcggagaacctccagcaacccccgctgctgtgggacctactacaatggcttcaggcggtggcgcaccaatggcagacaataacgaaggcgccgacggagtgggtaatgccccaggaaattggcattgcgactccacatggctgggcgacagagtcatcaccaccagcacccgcacctgggccttgcccacctacaataaccacctctacaagcaaatctccagtgcttcaacgggggccagcaacgacaaccactacttcggctacagcaccccctgggggtattttgatttcaacagattccactgccacttttcaccacgtgactggcagcgactcatcaacaacaattggggattccggcccaagagactcaacttcaaactcttcaacatccaagtcaaggaggtcacgacgaatgatggcgtcacaaccatcgctaataaccttaccagcacggttcaagtcttctcggactcggagtaccagcttccgtacgtcctcggctctgcgcaccagggctgcctccctccgttcccggcggacgtgttcatgattccgcaatacggctacctgacgctcaacaatggcagccaagccgtgggacgttcatccttttactgcctggaatatttcccttctcagatgctgagaacgggcaacaactttaccttcagctacacctttgaggaagtgcctttccacagcagctacgcgcacagccagagcctggaccggctgatgaatcctctcatcgaccaatacctgtattacctgaacagaactcaaaatcagtccggaagtgcccaaaacaaggacttgctgtttagccgtgggtctccagctggcatgtctgttcagcccaaaaactggctacctggaccctgttatcggcagcagcgcgtttctaaaacaaaaacagacaacaacaacagcaattttacctggactggtgcttcaaaatataacctcaatgggcgtgaatccatcatcaaccctggcacagctatggcctcacacaaagacgacgaagacaagttctttcccatgagcggtgtcatgatttttggaaaagagagcgccggagcttcaaacactgcattggacaatgtcatgattacaggcgaagaggaaattaaagccactaaccctgtggccaccgaaagatttgggaccgtggcagtcaatttccagagcagcagcacagaccctgcgaccggagatgtgcatgctatgggagcattacctggcatggtgtggcaagatagagacgtgtacctgcagggtcccatttgggccaaaattcctcacacagatggacactttcacccgtctcctcttatgggcggctttggactcaagaacccgcctcctcagatcctcatcaaaaacacgcctgttcctgcgaatcctccggcggagttttcagctacaaagtttgcttcattcatcacccaatactccacaggacaagtgagtgtggaaattgaatgggagctgcagaaagaaaacagcaagcgctggaatcccgaagtgcagtacacatccaattatgcaaaatctgccaacgttgattttactgtggacaacaatggactttatactgagcctcgccccattggcacccgttaccttacccgtcccctg

SEQ ID NO: 661 - DNA, 2208 bp, synthetic construct
  source 1..2208: mol_type = other DNA; note = Description of Artificial Sequence: Synthetic polynucleotide
atggctgccgatggttatcttccagattggctcgaggacaacctctctgagggcattcgcgagtggtgggacttgaaacctggagccccgaagcccaaagccaaccagcaaaagcaggacgacggccggggtctggtgcttcctggctacaagtacctcggacccttcaacagactcgacaagggggagcccgtcaacgcggcggacgcagcggccctcgagcacgacaaggcctacgaccagcagctcaaagcgggtgacaatccgtacctgcggtataaccacgccgacgccgagtttcaggagcgtctgcaagaagatacgtcttttgggggcaacctcgggcgagcagtcttccaggccaagaagcgggttctcgaacctctcggtctggttgaggaaggcgctaagacggctcctggaaggaaacgtccggtagagcagtcgccacaagagccagactcctcctcgggcatcggcaagacaggccagcagcccgctaaaaagagactcaattttggtcagactggcgactcagagtcagtccccgatccacaacctctcggagaacctccagcaacccccgctgctgtgggacctactacaatggcttcaggcggtggcgcgccaatggcagacaataacgaaggcgccgacggagtgggtaatgcctcaggaaattggcattgcgattccacatggctgggcgacagagtcatcaccaccagcacccgcacctgggccttgcccacctacaataaccacctctacaagcaaatctccagtgcttcaacgggggccagcaacgacaaccactacttcggctacagcaccccctgggggtattttgatttcaacagattccactgccacttttcaccacgtgactggcagcgactcatcaacaacaattggggattccggcccaagagactcaacttcaaactcttcaacatccaagtcaaggaggtcacgacgaatgatggcgtcacaaccatcgctaataaccttaccagcacggttcaagtcttctcggactcggagtaccagcttccgtacgtcctcggctctgcgcaccagggctgcctccctccgttcccggcggacgtgttcatgattccgcaatacggctacctgacgctcaacaatggcggccaagccgtgggacgttcatccttttactgcctggaatatttcccttctcagatgctgagaacgggcaacaactttaccttcagctacacctttgaggaagtgcctttccacagcagctacgcgcacagccagagcctggaccggctgatgaatcctctcatcgaccaatacctgtattacctgaacagaactcaaaatcagtccggaagtgcccaaaacaaggacttgctgtttagccgtgggtctccagctggcatgtctgttcagcccaaaaactggctacctggaccctgttatcggcagcagcgcgtttctaaaacaaaaacagacaacaacaacagcaattttacctggactggtgcttcaaaatatagcctcaatgggcgtgaatccatcatcaaccctggcactgctatggcctcacacaaagacgacgaagacaagttctttcccatgggcggtgtcatgatttttggaaaagagagcgccggagcttcaaacactgcattggacaatgccatgattacagacgaagaggaaattaaagccactaaccctgtggccaccgaaagatttgggaccgtggcagtcaatttccagagcagcagcacagaccctgcgaccggagatgtgcatgctatgggagcattacctggcatggtgtggcaagatagagacgtgtacctgcagggtcccatttgggccaaaattcctcacacagatggacactttcacccgtctcctcttatgggcggctttggactcaagaacccgcctcctcagatcctcatcaaaaacacgcctgttcctgcgaatcctccggcggagttttcagctacaaagtttgcttcattcatcacccaatactccacaggacaagtgagtgtggaaattgaatgggagctgcagaaagaaaacagcaagcgctggaatcccgaagtgcagtacacatccaattatgcaaaatctgccaacgttgattttactgtggacaacaatggactttatactgagcctcgccccattggcacccgttaccttacccgtcccctg

SEQ ID NO: 662 - DNA, 2208 bp, synthetic construct
  source 1..2208: mol_type = other DNA; note = Description of Artificial Sequence: Synthetic polynucleotide
atggctgccgatggttatcttccagattggctcgaggacaacctctctgagggcattcgcgagtggtgggacttgaaacctggagccccgaagcccaaagccaaccagcaaaagcaggacgacggccggggtctggtgcttcctggctacaagtacctcggacccttcaacggactcgacaagggggagcccgtcaacgcggcggacgcagcggccctcgagcacgacaaggcctacgaccagcagctcaaagcgggtgacaatccgtacctgcggtataaccacgccgacgccgagtttcaggagcgtctgcaagaagatacgtcttttgggggcaacctcgggcgagcagtcttccaggccaagaagcgggttctcgaacctctcggtctggttgaggaaggcgctaagacggctcctggaaagaaacgtccggtagagcagtcgccacaagagccagactcctcctcgggcatcggcaagacaggccagcagcccgctaaaaagagactcaattttggtcagactggcgactcagagtcagtccccgatccacaacctctcggagaacctccagcaacccccgctgctgtgggacctactacaatggcttcaggcggtggcgcaccaatggcagacaataacgaaggcgccgacggagtgggtaatgcctcaggaaattggcattgcgattccacatggctgggcggcagagtcatcaccaccagcacccgcacctgggccttgcccacctacaataaccacctctacaagcaaatctccagtgcttcaacgggggccagcaacgacaaccactacttcggctacagcaccccctgggggtattttgatttcaacagattccactgccacttttcaccacgtgactggcagcgactcatcaacaacaattggggattccggcccaagagactcaacttcaaactcttcaacatccaagtcaaggaggtcacgacgaatgatggcgtcacaaccatcgctaataaccttaccagcacggttcaagtcttctcggactcggagtaccagcttccgtacgtcctcggctctgcgcaccagggctgcctccctccgttcccggcggacgtgttcatgattccgcaatacggctacctgacgctcaacaatggcagccaagccgtgggacgttcatccttttactgcctggaatatttcccttctcagatgctgagaacgggcaacaactctaccttcagctacacctttgaggaagtgcctttccacagcagctacgcgcacagccagagcctggaccggctgatgaatcctctcatcgaccaatacctgtattacctgaacagaactcaaaatcagtccggaagtgcccaaaacaaggacttgctgtttagccgtgggtctccagctggcatgtctgttcagcccaaaaactggctacctggaccctgttatcggcagcagcgcgtttctaaaacaaaaacagacaacaacaacagcaattttacctggactggtgcttcaaaatataacctcaatgggcgtgaatccatcatcaaccctggcactgctatggcctcacacaaagacgacgaagacaagttctttcccatgagcggtgtcatgatttttggaaaagagagcgccggagcttcaaacactgcattggacaatgtcatgattacagacgaagaggaaattaaagccactaaccctgtggccaccgaaagatttgggaccgtggcagtcaatttccagagcagcagcacagaccctgcgaccggagatgtgcatgctatgggaacattacctggcatggtgtggcaagatagagacgtgtacctgcagggtcccatttgggccaaaattcctcacacagatggacactttcacccgtctcctcttatgggcggctttggactcaagaacccgcctcctcagatcctcatcaaaaacacgcctgttcctgcgaatcctccggcggagttttcagctacaaagtttgcttcattcatcacccaatactccacaggacaagtgagtgtggaaattgaatgggagctgcagaaagaaaacagcaagcgctggaatcccgaagtgcagtacacatccaattatgcaaaatctgccaacgttgattttactgtggacaacaatggactttatactgagcctcgccccattggcacccgttaccttacccgtcccctg

SEQ ID NO: 663 - DNA, 2208 bp, synthetic construct
  source 1..2208: mol_type = other DNA; note = Description of Artificial Sequence: Synthetic polynucleotide
atggctgccgatggttatctcccagattggctcgaggacaacctctctgagggcattcgcgagtggtgggacttgaaacctggagccccgaagcccaaagccaaccagcaaaagcaggacgacggccggggtctggtgcttcctggctacaagtacctcggacccttcaacggactcgacaagggggagcccgtcagcgcggcggacgcagcggccctcgagcacgacaaggcctacgaccagcagctcaaagcgggtgacaatccgtacctgcggtataaccacgccgacgccgagtttcaggagcgtctgcaagaagatacgtcttttgggggcaacctcgggcgagcagtcttccaggccaagaagcgggttctcgaacctctcggtctggttgaggaaggcgctaagacggctcctggaaagaaacgtccggtagagcagtcgccacaagagccagactcctcctcgggcatcggcaagacaggccagcagcccgctaaagagagactcaattttggtcagactggcgactcagagtcagtccccgatccacaacctctcggagaacctccagcaacccccgctgctgtgggacctactacaatggcttcaggcggtggcgcaccaatggcagacaataacgaaggcgccgacggagtgggtaatgcctcaggaaattggcattgcgattccacatggctgggcgacagagtcatcaccaccagcacccgcacctgggccttgcccacctacaataaccacctctacaagcaaatctccagtgcttcaacgggggccagcaacgacaaccactacttcggctacagcaccccctgggggtattttgatttcaacagattccactgccacttttcaccacgtgactggcagcgactcatcaacaacaattggggattccggcccaagagactcaacttcaaactcttcaacatccaagtcaaggaggtcacgacgaatgatggcgtcacaaccatcgccaataaccttaccagcacggttcaagtcttctcggactcggagtaccagcttccgtacgtcctcggctctgcgcaccagggctgcctccctccgttcccggcggacgtgttcatgattccgcaatacggctacctgacgctcaacaatggcagccaagccgtgggacgttcatccttttactgcctggaatatttcccttctcagatgctgagaacgggcaacaactttaccttcagctacacctttgaggaagtgcctttccacagcagctacgcgcacagccagagcctggaccggctgatgaatcctctcatcgaccaatacctgtattacctgaacagaactcaaaatcagtccggaagtgcccaaaacaaggacttgctgtttagccgtgggtctccagctggcatgtctgttcagcccaaaaactggctacctggaccctgttatcggcagcagcgcgtttctaaaacaaaaacagacaacaacaacagcaattttacctggactggtgcttcaaaatataacctcaatgggcgtgaatccatcatcaaccctggcactgctatggcctcacacaaagacgacgaagacaagttctttcccatgagcggtgtcatgatttttggaaaagagagcgccggagcttcaaacactgcattggacaatgtcatgattacagacgaagaggaaattaaagccactaaccctgtggccaccgaaagatttgggaccgtggcagtcaatttccagagcagcagcacagaccctgcgaccggagatgtgcatgctatgggagcattacctggcatggtgtggcaagatagagacgtgtacctgcagggtcccatttgggccaaaattcctcacacagatggacactttcacccgtctcctcttatgggcggctttggactcaagaacccgcctcctcagatcctcatcaaaaacacgcctgttcctgcgaatcctccggcggagttttcagctacaaagtttgcttcattcatcacccaatactccacaggacaagtgagtgtggaaattgaatgggagctgcagaaagaaaacagcaagcgctggaatcccgaagtgcagtacacatccaattatgcaaaatctgccaacgttgattttactgtggacaacaatggactttatactgagcctcgccccattggcacccgttaccttacccgtcccctg

SEQ ID NO: 664 - DNA, 2208 bp, synthetic construct
  source 1..2208: mol_type = other DNA; note = Description of Artificial Sequence: Synthetic polynucleotide
atggctgccgatggttatcttccagattggctcgaggacaacctctctgagggcattcgcgagtggtgggacttgaaacctggagccccgaagcccaaagccaaccagcaaaagcaggacgacggccggggtctggtgcttcctggctacaagtacctcggacccttcaacggactcgacaagggggagcccgtcaacgcggcggacgcagcggccctcgagcacgacaaggcctacgaccagcagctcaaagcgggtgacaatccgtacctgcggtataaccacgccgacgccgagtttcaggagcgtctgcaagaagatacgtcttttgggggcaacctcgggcgagcagtcttccaggccaagaagcgggttctcgaacctctcggtctggttgaggaaggcgctaagacggctcctggaaagaaacgtccggtagagcagtcgccacaagagccagactcctcctcgggcatcggcaagacaggccagcagcccgctaaaaagagactcaattttggtcagactggcgactcagagtcagtccccgatccacaacctctcggagaacctccagcaacccccgctgctgtgggacctactacaatggcttcaggcggtggcgcaccaatggcagacaataacgaaggcgccgacggagtgggtaatgcctcaggaaattggcattgcgattccacatggctgggcgacagagtcatcaccaccagcacccgcacctgggccttgcccacctacaataaccacctctacaagcaaatctccagtgcttcaacgggggccagcaacgacaaccactacttcggctacagcaccccctgggggtattttgatttcaacagattccactgccacttttcaccacgtgactggcagcgactcatcaacaacaattggggattccggcccaagagactcaacttcaaactcttcaacatccaagtcaaggaggtcacgacgaatgatggcgtcacaaccatcgctaataaccttaccagcacggttcaagtcttctcggactcggagtaccagcttccgtacgtcctcggctctgcgcaccagggctgcctccctccgttcccggcggacgtgttcatgattccgcaatacggctacctgacgctcaacaatggcagccaagccgtgggacgttcatccttttactgcctggaatatttcccttctcagatgctgagaacgggcaacaactttaccttcagctacacctttgaggaagtgcctttccacagcagctacgcgcacagccagagcctggaccggctgatgaatcctctcatcgaccaatacctgtattacctgaacagaactcaaaatcagtccggaagtgcccaaaacaaggacttgctgtttagccgtgggtctccagctggcatgtctgttcagcccaaaaactggctacctggaccctgttatcggcagcagcgcgtttctaaaacaaaaacagacaacaacaacagcaattttacctggactggtgcttcaaaatataacctcaatgggcgtgaatccatcatcaaccctggcactgctatggcctcacacaaagacgacgaagacaagttctttcccatgagcggtgtcatgatttttggaaaagagagcgccggagcttcaaacactgcattggacaatgtcatgattacagacgaaggggaaattaaagccactaaccctgtggccaccgaaagatttgggaccgtggcagtcaatttccagagcagcagcacagaccctgcgaccggagatgtgcatgctatgggagcattacctggcatggtgtggcaagatagagacgtgtacctgcagggtcccatttgggccaaaattcctcacacagatggacactttcacccgtctcctcttatgggcggctttggactcaagaacccgcctcctcagatcctcatcaaaaacacgcctgttcctgcgaatcctccggcggagttttcagctacaaagtttgcttcattcatcacccaatactccacaggacaagtgagtgtggaaattgaatgggagctgcagaaagaaaacagcaagcgctggaatcccgaagtgcagtacacatccaattatgcaaaatctgccaacgttgattttactgtggacaacaatggactttatactgagcctcgccccattggcacccgttaccttacccgtcccctg

SEQ ID NO: 665 - DNA, 2208 bp, synthetic construct
  source 1..2208: mol_type = other DNA; note = Description of Artificial Sequence: Synthetic polynucleotide
atggctgccgatggttatcttccagattggctcgaggacaacctctctgagggcattcgcgagtggtgggacttgaaacctggagccccgaaacctaaagccaaccagcaaaagcaggacgacggccggggtctggtgcttcctggctacaagtacctcggacccttcaacggactcgacaagggggagcccgtcaacgcggcggacgcagcggccctcgagcacgacaaggcctacgaccagcagctcaaagcgggtgacaatccgtacctgcggtataaccacgccgacgccgagtttcaggagcgtctgcaagaagatacgtcttttgggggcaacctcgggcgagcagtcttccaggccaagaagcgggttctcgaaccttttggtctggttgaggaaggcgctaagacggctcctggaaagaaacgtccggtagagcagtcgccacaagagccagactcctcctcgggcatcggcaagacaggccagcagcccgctaaaaagagactcaattttggtcagactggcgactcagagtcagtccccgacccacaacctctcggagaacctccagcaacccccgctgctgtgggacctactacaatggcttcaggcggtggcgcaccaatggcagacaataacgaaggcgccgacggagtgggtaatgcctcaggaaattggcattgcgattccacatggctgggcgacagagtcatcaccaccagcacccgcacctgggccttgcccacctacaataaccacctctacaagcaaatctccagtgcttcaacgggggccagcaacgacaaccactacttcggctacagcaccccctgggggtattttgatttcaacagattccactgccacttttcaccacgtgactggcagcgactcatcaacaacaattggggattccggcccaagagactcaacttcaagctcttcaacatccaagtcaaggaggtcacgacgaacgatggcgtcacgaccatcgctaataaccttaccagcacggttcaagtcttctcggattcagagtaccaactgccgtacgtcctcggctctgcgcaccagggctgcctccctccgttcccggcggacgtgtttatgattccgcagtacggctacctaacgctcaacaatggcagccaggccgtgggacgttcatccttttactgcccggaatatttcccttctcagatgctgagaacgggcaacaactttaccttcagctacacctttgaggaagtgcctttccacagcagctacgcgcacagccagagcctggaccggctgatgaatcctctcatcgaccaatacctgtattacctgaacagaactcaaaatcagtccggaagtgcccaaaacaaggacttgctgtttagccgtgggtctccagctggcatgtctgttcagcccaaaaactggctacctggaccctgttatcggcagcagcgcgtttctaaaacaaaaacagacaacaacaacagcaattttacctggactggtgcttcaaaatataacctcaatgggcgtgaatccatcatcaaccctggcactgctatggcctcacacaaagacgacaaagacaagttctttcccatgagcggtgtcatgatttttggaaaagagagcgccggagcttcaaatactgcattggacaatgtcatgatcacagatgaagaggaaattaaagccactaaccctgtggccaccgaaagatttgggaccgtggcagtcaatttccagagcagcaacacagaccccgcgaccggagatgtgcatgttatgggagccttacctggcatggtgtggcaagacagagacgtatacctgcagggtcccatttgggccaaaattcctcacacggatggacactttcacccgtctcctctcatgggcggctttggacttaagcacccgcctcctcaaatcctcatcaaaaacacgcctgttcctgcgaatcctccggcagagttttcggctacaaagtttgcttcattcatcacccagtactccacaggacaagtgagtgtggaaattgaatgggagctgcagaaagaaaacagcaagcgctggaatcccgaagtgcagtacacatccaattatgcaaaatctgccaacgttgatttcactgtggacaacaatggactttatactgagcctcgccccattggcacccgttaccttacccgtcccttg

SEQ ID NO: 666 - DNA, 2208 bp, synthetic construct
  source 1..2208: mol_type = other DNA; note = Description of Artificial Sequence: Synthetic polynucleotide
atggctgccgatggttatcttccagattggctcgaggacaacctctctgagggcattcgcgagtggtgggacttgaaacctggagccccgaaacctaaagccaaccagcaaaagcaggacgacggccggggtctggtgcttcctggctacaagtacctcggacccttcaacggactcgacaagggggagcccgtcaacgcggcggacgcagcggccctcgagcacgacaaggcctacgaccagcagctcaaagcgggtgacaatccgtacctgcggtataaccacgccgacgccgagtttcaggagcgtctacaagaagatacgtcttttgggggcaacctcgggcgagcagtcttccaggccaagaagcgggttctcgaaccttttggtctggttgaggaaggcgctaagacggctcctggaaagaaacgtccggtagagcagtcgccacaagagccagactcctcctcgggcatcggcaagacaggccagcagcccgctaaaaagagactcaattttggtcagactggcgactcagagtcagtccccgacccacaacctctcggagaacctccagcaacccccgctgctgtgggacctactacaatggcttcaggcggtggcgcaccaatggcagacaataacgaaggcgccgacggagtgggtaatgcctcaggaaattggcattgcgattccacatggctgggcgacagagtcatcaccaccagcacccgcacctgggccttgcccacctacaataaccacctctacaagcaaatctccagtgcttcaacgggggccagcaacgacaaccactacttcggctacagcaccccctgggggtattttgatttcaacagattccactgccacttttcaccacgtgactggcagcgactcatcaacaacaattggggattccggcccaagagactcaacttcaagctcttcaacatccaagtcaaggaggtcacgacgaacgatggcgtcacgaccatcgctaataaccttaccagcacggttcaagtcttctcggattcagagtaccaactgccgtacgtcctcggctctgcgcaccagggctgcctccctccgttcccggcggacgtgttcatgattccgcagtacggctacctaacgctcaacaatggcagccaggccgtgggacgttcatccttttactgcctggaatatttcccttctcagatgctgagaacgggcaacaactttaccttcagctacacctttgaggaagtgcctttccacagcagctacgcgcacagccagagcctggaccggctgatgaatcctctcatcgaccaatacctgtattacctgaacagaactcaaaatcagtccggaagtgcccaaaacaaggacttgctgtttagccgtgggtctccagctggcatgtctgttcagcccaaaaactggctacctggaccctgttatcggcagcagcgcgtttctaaaacaaaaacagacaacaacaacagcaattttacctggactggtgcttcaaaatataacctcaatgggcgtgaatccatcatcaaccctggcactgctatggcctcacacaaagacgacaaagacaagttctttcccatgagcggtgtcatgatttttggaaaagagagcgccggagcttcaaatactgcattggacaatgtcatgatcacagatgaagaggaaattaaagccactaaccctgtggccaccgaaagatttgggaccgtggcagtcaatttccagagcagcgacacagaccccgcgaccggagatgtgcatgttatgggagccttacctggcatggtgtggcaagacagagacgtatacctgcagggtcccatttgggccaaaattcctcacacggatggacactttcacccgtctcctctcatgggcggctttggacttaagcacccgcctcctcaaatcctcatcaaaaacacgcctgttcctgcgaatcctccggcagagttttcggctacaaagtttgcttcattcatcacccagtactccacaggacaagtgagtgtggaaattgaatgggagctgcagaaagaaaacagcaagcgctggaatcccgaagtgcagtacacatccaattatgcaaaatctgccaacgttgatttcactgtggacaacaatggactttatactgagcctcgccccattggcacccgttaccttacccgtcccttg

SEQ ID NO: 667 - DNA, 2208 bp, synthetic construct
  source 1..2208: mol_type = other DNA; note = Description of Artificial Sequence: Synthetic polynucleotide
atggctgccgatggttatcttccagattggctcgaggacaacctctctgagggcattcgcgagtggtgggacttgaaacctggagccccgaaacctaaagccaaccagcaaaagcagggcgacggccggggtctggtgcttcctggctacaagtacctcggacccttcaacggactcgacaagggggagcccgtcaacgcggcggacgcagcggccctcgagcacgacaaggcctacgaccagcagctcaaagcgggtgacaatccgtacctgcggtataaccacgccgacgccgagtttcaggagcgtctgcaagaagatacgtcttttgggggcaacctcgggcgagcagtcttccaggccaagaagcgggttctcgaaccttttggtctggttgaggaaggcgctaagacggctcctggaaagaaacgtccggtagagcagtcgccacaagagccagactcctcctcgggcatcggcaagacaggccagcagcccgctaaaaagagactcaattttggtcagactggcgactcagagtcagtccccgacccacaacctctcggagaacctccagcaacccccgctgctgtgggacctactacaatggcttcaggcggtggcgcaccaatggcagacaataacgaaggcgccgacggagtgggtaatgcctcaggaaattggcattgcgattccacatggctgggcgacagagtcatcaccaccaacactcgcacctgggccttgcccacctacaataaccacctctacaagcaaatctccagtgcttcaacgggggccagcaacgacaaccactacttcggctacagcaccccctgggggtattttgatttcaacagattccactgccacttttcaccacgtgactggcagcgactcatcaacaacaattggggattccggcccaagagactcaacttcaagctcttcaacatccaagtcaaggaggtcacgacgaacgatggcgtcacgaccatcgctaataaccttaccagcacggttcaagtcttctcggattcagagtaccaactgccgtacgtcctcggctctgcgcaccagggctgcctccctccgttcccggcggacgtgttcatgattccgcagtacggctacctaacgctcaacaatggcagccaggccgtgggacgttcatccttttactgcctggaatatttcccttctcagatgctgagaacgggcaacaactttaccttcagctacacctttgaggaagtgcctttccacagcagttacgggcacagccagagcctggaccggctgatgaatcttctcatcgaccaatacctgtattacctgaacagaactcaaaatcagtccggaagtgcccaaaacaaggacttgctgtttagccgtgggtctccagctggcatgtttgttcagcccaaaaactggctacctggaccctgttatcggcagcagcgcgtttctaaaacaaaaacagacaacaacaacagcaattttacctggactggtgcttcaaaatataacctcaatgggcgtgaatccatcatcaaccctggcactgctatggcctcacacaaagacgacgaagacaagttctttcccatgagcggtgtcatgatttttggaaaagagagcgccggagcttcaaatactgcattggacaatgtcatgatcacagatgaagaggaaattaaagccactaaccctgtggccaccgaaagatttgggaccgtggcagtcaatttccagagcagcagcacagaccccgcgaccggagatgtgcatgttatgggagccttacctggcatggtgtggcaagacagagacgtatacctgcagggtcccatttgggccaaaattcctcacacggatggacactttcacccgtctcctctcatgggcggctttggacttaagcacccgcctcctcaaatcctcatcaaaaacacgcctgttcctgcgaatcctccggcagagttttcggctacaaagtttgcttcattcatcacccagtactccacaggacaagtgagtgtggaaattgaatgggagctgcagaaagaaaacagcaagcgctggaatcccgaagtgcagtacacatccaattatgcaaaatctgccaacgttgatttcactgtggacaacaatggactttatactgagcctcgccccattggcacccgttaccttacccgtcccttg

SEQ ID NO: 668 - DNA, 2208 bp, synthetic construct
  source 1..2208: mol_type = other DNA; note = Description of Artificial Sequence: Synthetic polynucleotide
atggctgccgatggttatcttccagattggctcgaggacaacctctctgagggcattcgcgagtggtgggacttgaaacctggagccccgaaacctaaagccaaccagcaaaagcaggacgacggccggggtctggtgcttcctggctacaagtacctcggacccttcaacggactcgacaagggggagcccgtcaacgcggcggacgcagcggccctcgagcacgacaaggcctacgaccagcagctcaaagcgggtgacaatccgtacctgcggtataaccacgccgacgccgagtttcaggagcgtctgcaagaagatacgtcttttgggggcaacctcgggcgagcagtcttccaggccaagaagcgggttctcgaaccttttggtctggttgaggaaggcgctaagacggctcctggaaagaaacgtccggtagagcagtcgccacaagagccagactcctcctcgggcatcggcaagacaggccagcagcccgctaaaaagagactcaattttggtcagactggcgactcagagtcagtccccgacccacaacctctcggagaacctccagcaacccccgctgctgtgggacctactacaatggcttcaggcggtggcgcaccaatggcagacaataacgaaggcgccgacggagtgggtaatgcctcaggaaattggcattgcgattccacatggctgggcgacagagtcatcaccaccaacacccgcacctgggccttgcccacctacaataaccacctctacaagcaaatctccagtgcttcaacgggggccagcaacgacaaccactacttcggctacagcaccccctgggggtattttgatttcaacagattccactgccacttttcaccacgtgactggcagcgactcatcaacaacaattggggattccggcccaagagactcaacttcaagctcttcaacatccaagtcaaggaggtcacgacgaacgatggcgtcacgaccatcgctaataaccttaccagcacggttcaagtcttctcggattcagagtaccaactgccgtacgtcctcggctctgcgcaccagggctgcctccctccgttcccggcggacgtgttcatgattccgcagtacggctacctaatgctcaacaatggcagccaggccgtgggacgttcatccttttactgcctggaatatttcccttctcagatgctgagaacgggcaacaactttaccttcagctacacctttgaggaagtgcctttccacagcagctacgcgcacagccagagcctggaccggctgatgaatcctctcatcgaccaatacctgtattacctgaacagaactcaaaatcagtccggaagtgcccaaaacaaggacttgctgtttagccgtgggtctccagctggcatgtctgttcagcccaaaaactggctacctggaccctgttatcggcagcagcgcgtttctaaaacaaaaacagacaacaacaacagcaattttacctggactggtgcttcaaaatataacctcaatgggcgtgaatccatcatcaaccctggcactgctatggcctcacacaaagacgacgaagacaagttctttcccatgagcggtgtcatgatttttggaaaagagagcgccggagcttcaaatactgcattggacaatgtcatgatcacagatgaagaggaaattaaagccactaaccctgcggccaccgaaagatttgggaccgtggcagtcaatttccagagcagcagcacagaccccgcgaccggagatgtgcatgttatgggagccttacctggcatggtgtggcaagacagagacgtatacctgcagggtcccatttgggccaaaattcctcacacggatggacactttcacccgtctcctctcatgggcggctttggacttaagcacccgcctcctcaaatcctcatcaaaaacacgcctgttcctgcgaatcctccggcagagttttcggctacaaagtttgcttcattcatcacccagtactccacaggacaagtgagtgtggaaattgaatgggagctgcagaaagaaaacagcaagcgctggaatcccgaagtgcagtacacatccaattatgcaaaatctgccaacgttgatttcactgtggacaacaatggactttatactgagcctcgccccattggcacccgttaccttacccgtcccttg

SEQ ID NO: 669 - DNA, 2208 bp, synthetic construct
  source 1..2208: mol_type = other DNA; note = Description of Artificial Sequence: Synthetic polynucleotide
atggctgccgatggttatcttccagattggctcgaggacaacctctctgagggcattcgcgagtggtgggacttgaaacctggagccccgaaacctaaagccaaccagcaaaagcaggacgacggccggggtctggtgcttcctggctacaagtacctcggacccttcaacggactcgacaagggggagcccgtcaacgcggcggacgcagcggccctcgagcacgacaaggcctacgaccagcagctcaaagcgggtgacaatccgtacctgcggtataaccacgccgacgccgagtttcaggagcgtctgcaagaagatacgtcttttgggggcaacctcgggcgagcagtcttccaggccaagaagcgggttctcgaaccttttggtctggttgaggaaggcgctaagacggctcctggaaagaaacgtccggtagagcagtcgccacaagagccagactcctcctcgggcatcggcaagacgggccagcagcccgctaaaaagagactcaattttggtcagactggcgactcagagtcagtccccgacccacaacctctcggagaacctccagcaacccccgctgctgtgggacctactacaatggcttcaggcggtggcgcaccaatggcagacaataacgaaggcgccgacggagtgggtaatgcctcaggaaattggcattgcgattccacatggctgggcgacagagtcatcaccaccagcacccgcacctgggccttgcccacctacaataaccacctctacaagcaaatctccagtgcttcaacgggggccagcaacgacaaccactacttcggctacagcaccccctgggggtattttgatttcaacagattccactgccacttttcaccacgtgactggcagcgactcatcaacaacaattggggattccggcccaagagactcaacttcaagctcttcaacatccaagtcaaggaggtcacgacgaacgatggcgtcacgaccatcgctaataaccttaccagcacggttcaagtcttctcggattcagagtaccaactgccgtacgtcctcggctctgcgcaccagggctgcctccctccgttcccggcggacgtgttcatgattccgcagtacggctacctaacgctcaacaatggcagccaggccgtgggacgttcatccttttactgcctggaatatttcccttctcagatgctgagaacgggcaacaactttaccttcagctacacctttgaggaagtgcctttccacagcagctacgcgcacagccagagcctggaccggctgatgaatcctctcatcgaccaatacctgtattacctgaacagaactcaaaatcagtccggaagtgcccaaaacaaggacttgctgtttagccgtgggtctccagctggcatgtccgttcagcccaaaaactggctacctggaccctgttatcggcagcagcgcgtttctaaaacaaaaacagacaacaacaacagcaattttacctggactggtgcttcaaaatataacctcaatgggcgtgaatccatcatcaaccctggcactgctatggcctcacacaaagacgacgaagacaagttctttcccatgagcggtgtcatgatttttggaaaagagagcgccggagcttcaaatactgcattggacaatgtcatgatcacagatgaagaggaaattaaagccactaaccctgtggccaccgaaagatttgggaccgtggcagtcaatttccagagcagcagcacagaccccgcgaccggagatgtgcatgttatgggagccttacctggcatggtgtggcaagacagagacgtatacctgcagggtcccatttgggccaaaattcctcacacggatggacactttcacccgtctcctctcatgggcggctttggacttaagcacccgcctcctcaaatcctcatcaaaaacacgcctgttcctgcgaatcctccggcagagttttcggctacaaagtttgcttcattcatcacccagtactccacaggacaagtgagtgtggaaattgaatgggagctgcagaaagaaaacagcaagcgctggaatcccgaagtgcagtacacatccaattatgcaaaatctgccaacgttgatttcactgtggacaacaatggactttatactgagcctcgccccattggcacccgttaccttacccgtcccttg

SEQ ID NO: 670 - DNA, 2208 bp, synthetic construct
  source 1..2208: mol_type = other DNA; note = Description of Artificial Sequence: Synthetic polynucleotide
  misc_difference 305: note = misc_feature - n is a, c, t, or g
atggctgccgatggttatcttccagattggctcgaggacaacctctctgagggcattcgcgagtggtgggacttgaaacctggagccccgaaacctaaagccaaccagcaaaagcaggacgacggccggggtctggtgcttcctggctacaagtacctcggacccttcaacggactcgacaagggggagcccgtcaacgcggcggacgcagcggccctcgagcacgacaaggcctacgaccagcagctcaaagcgggtgacaatccgtacctgcggtataaccacgccgacgccgagtttcaggngcgtctgcaagaagatacgtcttttgggggcaacctcgggcgagcagtcttccaggccaagaagcgggttctcgaaccttttggtctggttgaggaaggcgctaagacggctcctggaaagaaacgtccggtagagcagtcgccacaagagccagactcctcctcgggcatcggcaagacaggccagcagcccgctaaaaagagactcaattttggtcagactggcgactcagagtcagtccccgacccacaacctctcggagaacctccagcaacccccgctgctgtgggacctactacaatggcttcaggcggtggcgcaccaatggcagacaataacgaaggcgccgacggagtgggtaatgcctcaggaaattggcattgcgattccacatggctgggcggcagagtcatcaccaccagcacccgcacctgggccttgcccacctacaataaccacctctacaagcaaatctccagtgcttcaacgggggccagcaacgacaaccactacttcggccacagcaccccctgggggtattttgatttcaacagattccactgccacttttcaccacgtgactggcagcgactcatcaacaacaattggggattccggcccaagagactcaacttcaagctcttcaacatccaagtcaaggaggtcacgacgaacgatggcgtcacgaccatcgctaataaccttaccagcacggttcaagtcttctcggattcagagtaccaactgccgtacgtcctcggctctgcgcaccagggctgcctccctccgtccccggcggacgtgttcatgattccgcagtacggctacctaacactcaacaatggcagccaggccgtgggacgttcatccttttactgcctggaatatttcccttctcagatgctgagaacgggcaacaactttaccttcagctacacctttgaggaagtgcctttccacagcagctacgcgcacagccagagcctggaccggctgatgaatcctctcatcgaccaatacctgtattacctgaacagaactcaaaatcagtccggaagtgcccaaaacaaggacttgctgtttagccgtgggtctccagctggcatgtctgttcagcccaaaaactggctacctggaccctgttatcggcagcagcgcgtttctaaaacaaaaacagacaacaacaacagcaattttacctggactggtgcttcaaaatataacctcaatgggcgtgaatccatcatcaaccctggcactgctatggcctcacacaaagacgacaaagacaagttctttcccatgagcggtgtcatgatttttggaaaagagagcgccggagcttcaaatactgcattggacaatgtcatgatcacagatgaagaggaaattaaagccactaaccctgtggccaccgaaagatttgggaccgtggcagtcaatttccagagcagcaacacagaccccgcgaccggagatgtgcatgttatgggagccttacctggcatggtgtggcaagacagagacgtatacctgcagggtcccatttgggccaaaattcctcacacggatggacactttcacccgtctcctctcatgggcggctttggacttaagcacccgcctcctcaaatcctcatcaaaaacacgcctgttcctgcgaatcctccggcagagttttcggctacaaagtttgcttcattcatcacccagtactccacaggacaagtgagtgtggaaattgaatgggagctgcagaaagaaaacagcaagcgctggaatcccgaagtgcagtacacatccaattatgcaaaatctgccaacgttgatttcactgtggacaacaatggactttatactgagcctcgccccattggcacccgttaccttacccgtcccttg

SEQ ID NO: 671 - DNA, 2208 bp, synthetic construct
  source 1..2208: mol_type = other DNA; note = Description of Artificial Sequence: Synthetic polynucleotide
atggctgccgatggttattttccagattggctcgaggacaacctttctgagggcattcgcgagtggtgggacttgaaacctggagccccgaaacctaaagccaaccagcaaaagcaggacgacggccggggtctggtgcttcctggctacaagtacctcggacccttcaacggactcgacaagggggagcccgtcaacgcggcggacgcagcggccctcgagcacgacaaggcctacgaccagcagctcaaagcgggtgacaatccgtacctgcggtataaccacgccgacgccgagtttcaggagcgtctgcaagaagatacgtcttttgggggcaacctcgggcgagcagtcttccaggccaagaagcgggttctcgaaccttttggtctggttgaggaaggcgctaagacggctcctggaaagaaacgtccggtagagcagtcgccacaagagccagactcctcctcgggcatcggcaggacaggccagcagcccgctaaaaagagactcaattttggtcagactggcgactcagagtcagtccccgacccacaacctctcggagaacctccagcgacccccgctgctgtgggacctactacaatggcttcaggcggtggcgcaccaatggcagacaataacgaaggtgccgacggagtgggtaatgcctcaggaaattggcattgcgattccacatggctgggcgacagagtcatcaccaccagcacccgcacctgggccttgcccacctacaataaccacctctacaagcaaatctccagtgcttcaacgggggccagcaacgacaaccactacttcggctacagcaccccctgggggtattttgatttcaacagattccactgccacttttcaccacgtgactggcagcgactcatcaacaacaattggggattccggcccaagagactcaacttcaagctcttcaacatccaagtcaaggaggtcacgacgaacgatggcgtcacgaccatcgctaataaccttaccagcacggttcaagtcttctcggattcagagtaccaactgccgtacgtcctcggctctgcgcaccagggctgcctccctccgttcccggcggacgtgttcatgattccgcagtacggctacctaacgctcaacaatggcagccaggccgtgggacgttcatccttttactgcctggaatatttcccttctcagatgctgagaacgggcaacaactttaccttcagctacacctttgaggaagtgcctttccacagcagctacgcgcacagccagagcctggaccggctgatgaatcctctcatcgaccaatacctgtattacctgaacagaactcaaaatcagtccggaagtgcccaaaacaaggacttgctgtttagccgtgggtctccagctggcatgtctgttcagcccaaaaactggctacctggaccctgttatcggcagcagcgcgtttctaaaacaaaaacagacaacaacaacagcaattttacctggactggtgcttcaaaatataacctcaatgggcgtgaatccatcatcaaccctggcactgctatggcctcacacaaagacgacgaagacaagttctttcccatgagcggtgtcatgatttttggaaaagagagcgccggagcttcaaatactgcattggacaatgtcatgatcacagatgaagaggaaattaaagccactaaccctgtggccaccgaaagatttgggaccgtggcagtcaatttccagagcagcagcccagaccccgcgaccggagatgtgcatgttatgggagccttacctggcatggtgtggcaagacagagacgtatacctgcagggtcccatttgggccaaaattcctcacacggatggacactttcacccgtctcctctcatgggcggctttggacttaagcacccgcctcctcaaatcctcatcaaaaacacgcctgttcctgcgaatcctccggcagagttttcggctacaaagtttgcttcattcatcacccagtactccacaggacaagtgagtgtggaaattgaatgggagctgcagaaagaaaacagcaagcgctggaatcccgaagtgcagtacacatccaattatgcaaaatctgccaacgttgatttcactgtggacaacaatggactttatagtgagcctcgccccattggcacccgttaccttacccgtcccttg

SEQ ID NO: 672 - DNA, 2208 bp, synthetic construct
  source 1..2208: mol_type = other DNA; note = Description of Artificial Sequence: Synthetic polynucleotide
atggctgccgatggttatcttccagattggctcgaggacaacctctctgagggcattcgcgagtggtgggacttgaaacctggagccccgaaacctaaagccaaccagcaaaagcaggacgacggccggggtctggtgcttcctggctacaagtacctcggacccttcaacggactcgacaagggggagcccgtcaacgcggcggacgcagcggccctcgagcacgacaaggcctacgaccagcagctcaaagcgggtgacaatccgtacctgcggtataaccacgccgacgccgagtttcaggagcgtctgcaagaagatacgtcttttgggggcaacctcgggcgagcagtcttccaggccaagaagcgggttctcgaaccttttggtctggttgaggaaggcgctaagacggctcctggaaagaaacgtccggtagagcagtcgccacaagagccagactcctcctcgggcatcggcaagacaggccagcagcccgctaaaaagagactcaattttggtcagactggcgactcagagtcagtccccgacccacaacctctcggagaacctccagcaacccccgctgctgtgggacctactacaatggcttcaggcggtggcgcaccaatggcagacaataacgaaggcgccgacggagtgggtaatgcctcaggaaattggcattgcgattccacatggctgggcgacagagtcatcaccaccagcacccgcacctgggccttgcccacctacaataaccacctctacaagcaaacctccagtgcttcaacgggggccagcaacgacaaccactacttcggctacagcaccccctgggggtattttgatttcaacagattccactgccacttttcaccacgtgactggcagcgactcatcaacaacaattggggattccggcccaagagactcaacttcaagctcttcaacatccaagtcaaggaggtcacgacgaacgatggcgtcacgaccatcgctaataaccttaccagcacggttcaagtcttctcggattcagagtaccaactgccgtacgtcctcggctctgcgcaccagggctgcctccctccgttcccggcggacgtgttcatgattccgcagtacggctacctaacgctcaacaatggcagccaggccgtgggacgttcatccttttactgcctggaatatttcccttctcagatgctgagaacgggcaacaactttaccttcagctacacctttgaggaagtgcctttccacagcagctacgcgcacagccagagcctggaccggctgatgaatcctctcatcgaccaatacctgtattacctgaacagaactcaaaatcagtccggaagtgcccaaaacaaggacttgctgtttagccgtgggtctccagctggcatgtctgttcagcccaaaaactggctacctggaccctgttatcggcagcagcgcgtttctaaaacaaaaacagactacaacaacagcaattttacctggactggtgcttcaaaatataacctcaatgggcgtgaatccatcatcaaccctggcactgctatggcctcacacaaagacgacgaagacaagttctttcccatgagcggtgtcatgatttttggaaaagagagcgccggagcttcaaatactgcattggacaatgtcatgatcacagatgaagaggaaattaaagccactaaccctgtggccaccgaaagatttgggaccgtggcagtcaatttccagagcagcagcacagaccccgcgaccggagatgtgcatgttatgggagccttacctggcatggtgtggcaagacagagacgtatacctgcagggtcccatttgggccaaaattcctcacacggatggacactttcacccgtctcctctcatgggcggctttggacttaagcacccgcctcctcaaatcctcatcaaaaacacgcctgttcctgcgaatcctccggcagagttttcggctacaaagtttgcttcattcatcacccagtactccacaggacaagtgagtgtggaaattgaatgggagctgcagaaagaaaacagcaagcgctggaatcccgaagtgcagtacacatccaattatgcaaaatctgccaacgttgatttcactgtggacaacaatggactttatactgagcctcgccccattggcacccgttaccttacccgtcccttg

SEQ ID NO: 673 - DNA, 2208 bp, synthetic construct
  source 1..2208: mol_type = other DNA; note = Description of Artificial Sequence: Synthetic polynucleotide
atggctgccgatggttatcctccagattggctcgaggacaacctctctgagggcattcgcgagtggtgggacttgaaacctggagtcccgaaacctaaagccaaccagcaaaagcaggacgacggccggggtctggtgcttcctggctacaagtacctcggacccttcaacggactcgacaagggggagcccgtcaacgcggcggacgcagcggccctcgagcacgacaaggcctacgaccagcagctcaaagcgggtgacaatccgtacctgcggtataaccacgccgacgccgagtttcaggagcgtctgcaagaagatacgtcttttgggggcaacctcgggcgagcagtcttccaggccaagaagcgggttctcgaaccttttggtctggttgaggaaggcgctaagacggctcctggaaagaaacgtccggtagagcagtcgccacaagagccagactcctcctcgggcatcggcaagacaggccagcagcccgctaaaaagagactcaattttggtcagactggcgactcagagtcagtccccgacccacaacctctcggagaacctccagcaacccccgctgctgtgggacctactacaatggcttcaggcggtggcgcaccaatggcagacaataacgaaggcgccgacggagtgggtaatgcctcaggaaattggcattgcgattccacatggctgggcgacagagtcatcaccaccagcacccgcacctgggccttgcccacctacaataaccacctctacaagcaaatctccagtgcttcaacgggggccagcaacgacaaccactacttcggctacagcaccccctgggggtattttgatttcaacagattccactgccacttttcaccacgtgactggcagcgactcatcaacaacaattggggattccggcccaagagactcaacttcaagctcttcaacatccaagtcaaggaggtcacgacgaacgatggcgtcacgaccatcgctaataaccttaccagcacggttcaagtcttctcggattcagagtaccaactgccgtacgtcctcggctctgcgcaccagggctgcctccctccgttcccggcggacgtgttcatgattccgcagtacggctacctaacgctcaacaatggcagccaggccgtgggacgttcatccttttactgcctggaatatttcccttctcagatgctgagaacgggcaacaactttaccttcagctacacctttgaggaagtgcctttccacagcagctacgcgcacagccagagcctggaccggctgatgaatcctctcatcgaccaatacctgtattacctgaacagaactcaaaatcagtccggaagtgcccaaaacaaggacttgctgtttagccgtgggtctccagctggcatgtctgttcagcccaaaaactggctacctggaccctgttatcggcagcagcgcgtttctaaaacaaaaacagacaacaacaacagcaattttacctggactggtgcttcaaaatataacctcaatgggcgtgaatccatcatcaaccctggcactgctatggcctcacacaaagacgacgaagacaagttctttcccatgagcggtgtcatgatttttggaaaagagagcgccggagcttcaaatactgcattggacaatgtcatgatcacagatgaagaggaaattaaagccactaaccctgtggccaccgaaagatttgggaccgtggcagtcaatttccagagcagcagcacagaccccgcgaccggagatgtgcatgttatgggagccttacctggcatggtgtggcaagacagagacgtatacctgcagggtcccatttgggccaaaattcctcacacggatggacactttcacccgtctcctctcatgggcggctttggacttaagcacccgcctcctcaaatcctcatcaaaaacacgcctgttcctgcgaatcctccggcagagttttcggctacaaagtttgcttcattcatcacccagtactccacaggacaagtgagtgtggaaattgaatgggagctgcagaaagaaaacagcaagcgctggaatcccgaagtgcagtacacatccaattatgcaaaatctgccaacgttgatttcactgtggacaacaatggactttatactgagcctcgccccattggcacccgttaccttacccgtcccttg

SEQ ID NO: 674 - DNA, 2196 bp, synthetic construct
  source 1..2196: mol_type = other DNA; note = Description of Artificial Sequence: Synthetic polynucleotide
atggctgccgatggttatcttccagattggctcgaggacaacctctctgagggcattcgcgagtggtgggacttgaaacctggagccccgaaacctaaagccaaccagcaaaagcaggacgacggccggggtctggtgcttcctggctacaagtacctcggacccttcaacggactcgacaagggggagcccgtcaacgcggcggacgcagcggccctcgagcacgacaaggcctacgaccagcagctcaaagcgggtgacaatccgtacctgcggtataaccacgccgacgccgagtttcaggagcgtctgcaagaagatacgtcttttgggggcaacctcgggcgagcagtcttccaggccaagaagcgggttctcgaaccttttggtctggttgaggaaggcgctaagacggctcctggaaagaaacgtccggtagagcagtcgccacaagagccagactcctcctcgggcatcggcaagacaggccagcagcccgctaaaaagagactcaattttggtcagactggcgactcagagtcagtccccgacccacaacctctcggagaacctccagcaacccccgctgctgtgggacctactacaatggcttcaggcggtggcgcaccaatggcagacaataacgaaggcgccgacggagtgggtaatgcctcaggaaattggcattgcgattccacatggctgggcgacagagtcatcaccaccagcacccgcacctgggccttgcccacctacaataaccacctctacaagcaaatctccagtgcttcaacgggggccagcaacgacaaccactacttcggctacagcaccccctgggggtattttgatttcaacagattccactgccacttttcaccacgtgactggcagcgactcatcaacaacaattggggattccggcccaagagactcaacttcaagctcttcaacatccaagtcaaggaggtcacgacgaacgatggcgtcacgaccatcgctaataaccttaccagcacggttcaagccttctcggattcagagtaccaactgccgtacgtcctcggctctgcgcaccagggctgcctccctccgttcccggcggacgtgttcatgattccgcagtacggctacctaacgctcaacaatggcagccaggccgtgggacgttcatccttttactgcctggaatatttcccttctcagatgctgagaacgggcaacaactttaccttcagctacacctttgaggaagtgcctttccacagcagctacgcgcacagccagagcctggaccggctgatgaatcctctcatcgacccatacctgtattacctgaacagaactcaaaatcagtccggaagtgcccaaaacaaggacttgctgtttagccgtgggtctccagctggcatgtctgttcagcccaaaaactggctacctggaccctgttatcggcagcagcgcgtttctaaaacaaaaacagacaacaacaacagcaattttacctggactggtgcttcaaaatataacctcaatgggcgtgaatccatcatcaaccctggcactgctatggcctcacacaaagacgacgaagacaagttctttcccatgagcggtgtcatgatttttggaaaagagagcgccggagcttcaaatactgcattggacaatgtcatgatcacagatgaagaggaaattaaagccactaaccctgtggccaccgaaagatttgggaccgtggcagtcaatttccagagcagcagcacagaccccgcgaccggagatgtgcatgttatgggagccttacctggcatggtgtggcaagacagagacgtatacctgcagggtcccatttgggccaaaattcctcacacggatggacactttcacccgtctcctctcatgggcggctttggacttaagcacccgcctcctcaaatcctcatcaaaaacacgcctgttcctgcgaatcctccggcagagttttcggctacaaagtttgcttcattcatcacccagtactccacaggacaagtgagtgtggaaattgaatgggagctgcagaaagaaaacagcaagcgctggaatcccgaagtgcagtacacatccaattatgcaaaatctgccaacgttgatttcactgtggacaacaatggactttatactgagcctcgccccattggcacccgttacctt

SEQ ID NO: 675 - DNA, 2208 bp, synthetic construct
  source 1..2208: mol_type = other DNA; note = Description of Artificial Sequence: Synthetic polynucleotide
atggctgccgatggttatcttccagattggctcgaggacaacctctctgagggcattcgcgagtggtgggacttgaaacctggagccccgaaacctaaagccaaccagcaaaagcaggacgacggccggggtctggtgcttcctggctacaagtacctcggacccttcaacggactcgacaagggggagcccgtcaacgcggcggacgcagcggccctcgagcacgacaaggcctacgaccagcagctcaaagcgggtgacaatccgtacctgcggtataaccacgccgacgccgagtttcaggagcgtctgcaagaagatacgtcttttgggggcaacctcgggcgagcagtcttccaggccaagaagcgggttctcgaaccttttggtctggttgaggaaggcgctaagacggctcctggaaagaaacgtccggtagagcagtcgccacaagagccagactcctcctcgggcatcggcaagacaggccagcagcccgctaaaaagagactcaattttggtcagactggcgactcagagtcagtccccgacccacaacctctcggagaacctccagcaacccccgctgctgtgggacctactacaatggcttcaggcggtggcgcaccaatggcagacaataacgaaggcgccgacggagtgggtaatgcctcaggaaattggcattgcgattccacatggctgggcgacagagtcatcaccaccagcacccgcacctgggccttgcccacctacaataaccacctctacaagcaaatctccagtgcttcaacgggggccagcaacgacaaccactacttcggctacagcaccccctgggggtattttgatttcaacagattccactgccacttttcaccacgtgactggcagcgactcatcaacaacaattggggattccggcccaagagactcaacttcaagctcttcaacatccaagtcaaggaggtcacgacgaacgatggcgtcacgaccatcgctaataaccttaccagcacggttcaagtcttctcggattcagagtaccaactgccgtacgtcctcggctctgcgcaccagggctgcctccctccgttcccggcggacgtgttcatgattccgcagtacggctacctaacgctcaacaatggcagccaggccgtgggacgttcatccttttactgcctggaatatttcccttctcagatgctgagaacgggcaacaactttaccttcagctacacctttgaggaagtgcctttccacagcagctacgcgcacagccagagcctggaccggctgatgaatcctctcatcgaccaatacctgtattacctgaacagaactcaaaatcagtccggaagtgcccaaaacaaggacttgctgtttagccgtgggtctccagctggcatgtctgttcagcccaaaaactggctacctggaccctgttatcggcagcagcgcgtttctaaaacaaaaacagacaacaacaacagcaattttacctggactggtgcttcaaaatataacctcaatgggcgtgaatccatcatcaaccctggcactgctatggcctcacacaaagacgacgaagacaagttctttcccatgagcggtgtcatgatttttggaaaagagagcgccggagcttcaaatactgcattggacaatgtcatgatcacagatgaagaggaaattaaagccactaaccctgtggccaccgaaagatttgggaccgtggcagtcaatttccagagcagcagcacagaccccgcgaccggagatgtgcatgttatgggagccttacctggcatggtgtggcaagacagagacgtatacctgcagggtcccatttgggccaaaattcctcacacggatggacactctcacccgtctcctctcatgggcggctttggacttaagcacccgcctcctcaaatcctcatcaaaaacacgcctgttcctgcgaatcctccggcagagttttcggctacaaagtttgcttcattcatcacccagtactccacaggacaagtgagtgtggaaattgaatgggagctgcagaaagaaaacagcaagcgctggaatcccgaagtgcagtacacatccaattatgcaaaatctgccaacgttgatttcactgtggacaacaatggactttatactgagcctcgccccattggcacccgttaccttacccgtcccttg

SEQ ID NO: 676 - DNA, 2208 bp, synthetic construct
  source 1..2208: mol_type = other DNA; note = Description of Artificial Sequence: Synthetic polynucleotide
atggctgccgatggttatcttccagattggctcgaggacaacctctctgagggcattcgcgagtggtgggacttgaaacctggagccccgaaacctaaagccaaccagcaaaagcaggacgacggccggggtctggtgcttcctggctacaagtacctcggacccttcaacggactcgacaagggggagcccgtcaacgcggcggacgcagcggccctcgagcacgacaaggcctacgaccagcagctcaaagcgggtgacaatccgtacctgcggtataaccacgccgacgccgagtttcaggagcgtctgcaagaagatacgtcttttgggggcaacctcgggcgagcagtcttccaggccaagaagcgggttctcgaaccttttggtctggttgaggaaggcgctaagacggctcctggaaagaaacgtccggtagagcagtcgccacaagagccagactcctcctcgggcatcggcaagacaggccagcagcccgctaaaaagagactcaattttggtcagactggcgactcagagtcagtccccgacccacaacctctcggagaacctccagcaacccccgctgctgtgggacctactacaatggcttcaggcggtggcgcaccaatggcagacaataacgaaggcgccgacggagtgggtaatgcctcaggaaattggcattgcgattccacatggctgggcgacagagtcatcaccaccagcacccgcacctgggccttgcccacctacaataaccacctctacaagcaaatctccagtgcttcaacgggggccagcaacgacaaccactacttcggctacagcaccccctgggggtattttgatttcaacagattccactgccacttttcaccacgtgactggcagcgactcatcaacaacaattggggattccggcccaagagactcaacttcaagctcttcaacatccaagtcaaggaggtcacgacgaacgatggcgtcacgaccatcgctaataaccttaccagcacggttcaagtcttctcggattcagagtaccaactgccgtacgtcctcggctctgcgcaccagggctgcctccctccgttcccggcggacgtgttcatgattccgcagtacggctacctaacgctcaacaatggcagccaggccgtgggacgttcatccttttactgcctggaatatttcccttctcagatgctgagaacgggcaacaactttaccttcagctacacctttgaggaagtgcctttccacagcagctacgcgcacagccagagcctggaccggctgatgaatcctctcatcgacctatacctgtattacctgaacagaactcaaaatcagtccggaagtgcccaaaacaaggacttgctgtttagccgtgggtctccagctggcatgtctgttcagcccaaaaactggctacctggaccctgttatcggcagcagcgcgtttctaaaacaaaaacagacaacaacaacagcaattttacctggactggtgcttcaaaatataacctcaatgggcgtgaatccatcatcaaccctggcactgctatggcctcacacaaagacgacgaagacaagttctttcccatgagcggtgtcatgatttttggaaaagagagcgccggaacttcaaatactgcattggacaatgtcatgatcacagatgaagaggaaattaaagccactaaccctgtggccaccgaaagatttgggaccgtggcagtcaatttccagagcagcagcacagaccccgcgaccggagatgtgcatgttatgggagccttacctggcatggtgtggcaagacagagacgtatacctgcagggtcccatttgggccaaaattcctcacacggatggacactttcacccgtctcctctcatgggcggctttggacttaagcacccgcctcctcaaatcctcatcaaaaacacgcctgttcctgcgaatcctccggcagagttttcggctacaaagtttgcttcattcatcacccagtactccacaggacaagtgagtgtggaaattgaatgggagctgcagaaagaaaacagcaagcgctggaatcccgaagtgcagtacacatccaattatgcaaaatctgccaacgttgatttcactgtggacaacaatggactttatactgagcctcgccccattggcacccgttaccttacccgtcccttg

SEQ ID NO: 677 - DNA, 2208 bp, synthetic construct
  source 1..2208: mol_type = other DNA; note = Description of Artificial Sequence: Synthetic polynucleotide
atggctgccgatggttatcttccagattggctcgaggacagcctctctgagggcattcgcgagtggtgggacttgaaacctggagccccgaaacctaaagccaaccagcaaaagcaggacgacggccggggtctggtgcttcctggctacaagtacctcggacccttcaacggactcgacaagggggagcccgtcaacgcggcggacgcagcggccctcgagcacgacaaggcctacgaccagcagctcaaagcgggtgacaatccgtacctgcggtataaccacgccgacgccgagtttcaggagcgtctgcaagaagatacgtcttttgggggcaacctcgggcgagcagtcttccaggccaagaagcgggttctcgaaccttttggtctggttgaggaaggcgctaagacggctcctggaaagaaacgtccggtagagcagtcgccacaagagccagactcctcctcgggcatcggcaagacaggccagcagcccgctaaaaagagactcaattttggtcagactggcgactcagagtcagtccccgacccacaacctctcggagaacctccagcaacccccgctgctgtgggacctactacgatggcttcaggcggtggcgcaccaatggcagacaataacgaaggcgccgacggagtgggtaatgcctcaggaaattggcattgcgattccacatggctgggcgacagagtcatcaccaccagcacccgcacctgggccttgcccacctacaataaccacctctacaagcaaatctccagtgcttcaacgggggccagcaacgacaaccactacttcggctacagcaccccctgggggtattttgatttcaacagattccactgccacttttcaccacgtgactggcagcgactcatcaacaacaattggggattccggcccaagagactcaacttcaagctcttcaacatccaagtcaaggaggtcacgacgaacgatggcgtcacgaccatcgctaataaccttaccagcacggttcaagtcttctcggattcagagtaccaactgccgtacgtcctcggctctgcgcaccagggctgcctccctccgttcccggcggacgtgttcatgattccgcagtacggctacctaacgcccaacaatggcagccaggccgtgggacgttcatccttttactgcctggaatatttcccttctcagatgctgagaacgggcaacaactttaccttcagctacacctttgaggaagtgcctttccacagcagctacgcgcacagccagagcctggaccggctgatgaatcctctcatcgaccaataccagtattacctgaacagaactcaaaatcagtccggaagtgcccaaaacaaggacttgctgtttagccgtgggtctccagctggcatgtctgttcagcccaaaaactggctacctggaccctgttatcggcagcagcgcgtttctaaaacaaaaacagacaacaacaacagcaattttacctggactggtgcttcaaaatataacctcaatgggcgtgaatccatcatcaaccctggcactgctatggcctcacacaaagacgacgaagacaagttctttcccatgagcggtgtcatgatttttggaaaagagagcgccggagcttcaaatactgcattggacaatgtcatgatcacagatgaagaggaaattaaagccactaaccctgtggccaccgaaagatttgggaccgtggcagtcaatttccagagcagcagcacagaccccgcgaccggagatgtgcatgttatgggagccttacctggcatggtgtggcaagacagagacgtatacctgcagggtcccatttgggccaaaattcctcacacggatggacactttcacccgtctcctctcatgggcggctttggacttaagcacccgcctcctcaaatcctcatcaaaaacacgcctgttcctgcgaatcctccggcagagttttcggctacaaagtttgcttcattcatcacccagtactccacaggacaagtgagtgtggaaattgaatgggagctgcagaaagaaaacagcaagcgctggaatcccgaagtgcagtacacatccaattatgcaaaatctgccaacgttgatttcactgtggacaacaatggactttatactgagcctcgccccattggcacccgttaccttacccgtcccttg

SEQ ID NO: 678 - DNA, 2208 bp, synthetic construct; identical to SEQ ID NO: 669
  source 1..2208: mol_type = other DNA; note = Description of Artificial Sequence: Synthetic polynucleotide

SEQ ID NO: 679 - DNA, 2205 bp, synthetic construct
  source 1..2205: mol_type = other DNA; note = Description of Artificial Sequence: Synthetic polynucleotide
atggctgccgatggttatcttccagattggctcgaggacactctctctgaaggaataagacagtggtggaagctcaaacctggcccaccaccaccaaagcccgcagagcggcataaggacgacagcaggggtcttgtgcttcctgggtacaagtacctcggacccttcaacggactcgacaagggagagccggtcaacgaggcagacgccgcggccctcgagcacgacaaagcctacgaccggcagctcgacagcggagacaacccgtacctcaagtacaaccacgccgacgcggagtttcaggagcgccttaaagaagatacgtcttttgggggcaacctcggacgagcagtcttccaggcgaaaaagagggttcttgaacctctgggcctggttgaggaacctgttaagacggctccgggaaaaaagaggccggtagagcactctcctgtggagccagactcctcctcgggaaccggaaaggcgggccagcagcctgcaagaaaaagattgaattttggtcagactggagacgcagactcagtacctgacccccagcctctcggacagccaccagcagccccctctggtctgggaactaatacgatggctacaggcagtggcgcaccaatggcagacaataacgagggcgccgacggagtgggtaattcctcgggaaattggcattgcgattccacatggatgggcgacagagtcatcaccaccagcacccgaacctgggccctgcccacctacaacaaccacctctacaaacaaatttccagccaatcaggagcctcgaacgacaatcactactttggctacagcaccccttgggggtattttgacttcaacagattccactgccacttttcaccacgtgactggcaaagactcatcaacaacaactggggattccgacccaagagactcaacttcaagctctttaacattcaagtcaaagaggtcacgcagaatgacggtacgacgacgattgccaataaccttaccagcacggttcaggtgtttactgactcggagtaccagctcccgtacgtcctcggctcggcgcatcaaggatgcctcccgccgttcccagcagacgtcttcatggtgccacagtatggatacctcaccctgaacaacgggagtcaggcagtaggacgctcttcattttactgcctggagtactttccttctcagatgctgcgtaccggaaacaactttaccttcagctacacttttgaggacgttcctttccacagcagctacgctcacagccagagtctggaccgtctcatgaatcctctcatcgaccagtacctgtattacttgagcagaacaaacactccaagtggaaccaccacgcagtcaaggcttcagttttctcgggccggagcgagtgacattcgggaccagtctaggaactggcttcctggaccctgttaccgccagcagcgagtatcaaagacatctgcggataacaacaacagtgaatactcgtggactggagctaccaagtaccacctcaatggcagagactctctggtgaatccgggcccggccatggcaagccacaaggacgatgaagaaaagttttttcctcagagcggggttctcatctttgggaagcaaggctcagagaaaacaaatgtggacattgaaaaggtcatgattacagacgaagaggaaatcaggacaaccaatcccgtggctacggagcagtatggttctgtatctaccaacctccagagaggcaacagacaagcagctaccgcagatgtcaacacacaaggcgttcttccaggcatggtctggcaggacagagatgtgtaccttcaggggcccatctgggcaaagattccacacacggacggacattttcacccctctcccctcatgggtggattcggacttaaacaccctcctccacagattctcatcaagaacaccccggtacctgcgaatccttcgaccaccttcagtgcggcaaagtttgcttccttcatcacacagtactccacgggacaggtcagcgtggagatcgagtgggagctgcagaaggaaaacagcaaacgctggaatcccgaaattcagtacacttccaactacaacaagtctgttaatgtggactttactgtggacactaatggcgtgtattcagagcctcgccccattggcaccagatacctgactcgtaatctg

SEQ ID NO: 680 - protein, 736 aa, synthetic construct
  source 1..736: note = Description of Artificial Sequence: Synthetic polypeptide
MAADGYLPDWLEDNLSEGIREWWALKPGAPQPKANQQHQDNARGLVLPDYKYLGPGNGLDKGEPVNAADVAALEHDKAYDQQLKAGDNPYLKYNHADAEFQERLKEDTSFGGNLGRAVFQAKKRLLEPLGLVEEAAKTAPGKKRPVEQSPQEPDSSAGIGKSGAQPAKKRLNFGQTGDTESVPDPQPIGEPPAAPSGVGSLTMASGGGAPVADNNEGADGVGSSSGNWHCDSQWLGDGVITTSTRTWALPTYNNHLYKQISNSTSGGSSNDNAYFGYSTPWGYFDFNRFHCHFSPRDWQRLINNNWGFRPKRLNFKLFNIQVKEVTDNNGVKTIANNLTSTVQVFTDSDYQLPYVLGSAHEGCLPPFPADVFMIPQYGYLTLNDGSQAVGRSSFYCLEYFPSQMLRTGNNFQFSYEFENVPFHSSYAHSQSLDRLMNPLIDQYLHYLPKTINGSGQNQQTLKFSVAGPSNMAVQGRNYIPGPSYRQQRVSTTVTQNNNSEFAWPGASSWALNGRNSLMNPGPAMASYKEGEDSFFPLSGSLIFGKQGTGRDNVDADKVMITNEEEIKTTNPVATESYGQVATNHQSAQAQAQTGWVQNQGILPGMVWQDRDVYLQGPIWAKIPHTDGNFHPSPLMGGFGMKHPPPQTLIKNTPVPADPPTAFNKDKLNSFITQYSTGQVSVEIEWELQKENSKRWNPEIQYTSNYYKSNNVEFAVNTEGVYSEPRPIGTRYLTRNL

SEQ ID NO: 681 - protein, 736 aa, synthetic construct
  source 1..736: note = Description of Artificial Sequence: Synthetic polypeptide
MAADGYLPDWLEDNLSEGIREWWALKPGAPQPKANQQHQDNARGLVLPGYKYLGPGNGLDKGEPVNAADAAALEHDKAYDQQLKAGDNPYLKYNHADAEFQERLKEDTSFGGNLGRAVFQAKRRLLEPLGLVEEAAKTAPGKKRPVEQSPQEPDSSAGIGKSGAQPAKKRLNFGQTGDTESVPDPQPIGEPPAAPSGVGSLTMASGGGAPVADNNEGADGVGSSSGNWHCDSQWLGDRVITTSTRTWALPTYNNHLYKQISNSTSGGSSNDNAYFGYSTPWGYFDFNRFHCHFSPRDWQRLINNNWGFRPKRLNFKLFNIQIKEVTDNNGVKTIANNLTSTVQVFTDLDYQLPYVLGSAHEGCLPPFPADVFMIPQYGYLTLNDGSQAVGRSSFYCLEYFPSQMLRTGNNFQFSYEFENVPFHSSYAHSQSLDRLMNPLIDQYLHYLSKTINGSGQNQQTLKFSVAGPSNMAVQGRNYIPGPSYRQQRVSTTVTQNNNSEFAWPGASSWALNGRNSLMNPGPAMASYKEGEDSFFPLSGSLIFGKQGTGRDNVDADKVMITNEEEIKTTNPVATESYGQVATNHQSAQAQAQTGWVQNQGILPGMVWQDRDVYLQGPIWAKIPHTDGNFHPSPLMGGFGMKHPPPQTLIKNTPVPADPPTAFNKDKLNSFITQYSTGQVSVEIEWELQKENSKRWNPEIQYTSNYYKSNNVEFAVNTEGVYSEPRPIGTRYLTRNL

SEQ ID NO: 682 - protein, 736 aa, synthetic construct
  source 1..736: note = Description of Artificial Sequence: Synthetic polypeptide
MAADGYLPDWLEDNLSEGIREWWALKPGAPQPKANQQHQDNARGLVLPGYKYLGPGNGLDKGEPVSAADAAALEHDKAYDQQLKAGDNPYLKYNHADAEFQERLKEDTSFGGNLGRAVFQAKKRLLEPLGLVEEAAKTAPGKKRPVEQSPQEPDSSAGIGKSGAQPAKKRLNFGQTGDTESVSDPQPIGEPPAAPSGVGSLTMASGGGAPVADNNEGADGVGSSSGNWHCDSQWLGDRVITTSTRTWALPTYNNHLYKQISNSTSGGSSNDNAYFGYSTPWGYFDFNRFHCHFSPRDWQRLINNNWGFRPKRLNFKLFNIQVKEVTDNNGVKTIANNLTSTVQVFTDSDYQLPYVLGSAHEGCLPPSPADVFMIPQYGYLTLNDGSQAVGRSSFYCLEYFPSQMLRTGNNFQFSYEFENVPFHSSYAHSQSLDRLMNPLIDQYLHYLSKTINGSGQNQQTLKFSVAGPSNMAVQGRNYIPGPSYRQQRVSTTVTQNNNSEFAWPGASSWALNGRNSLMNPGPAMASYKEGEDSFFPLSGSLIFGKQGTGRDDVDADKVIITNEEEIKTTNPVATESYGQVATNHQSAQAQAQTGWVQNQGILPGMVWQDRDVYLQGPIWAKIPHTDGNFHPSPLMGGFGMKHPPPQTLIKNTPVPADPPTAFNKDKLNSFITQYSTGQVSVEIEWELQKENSKRWNPEIQYTSNYYKSNNVEFAVNTEGVYSEPRPIGTRYLTRNL

SEQ ID NO: 683 - protein, 736 aa, synthetic construct
  source 1..736: note = Description of Artificial Sequence: Synthetic polypeptide
MAADGYLPDWLEDNLSEGIREWWALKPGAPQPKANQQHQDNARGLVLPGYKYLGPGNGLDKGEPVNAADAAALEHDKAYDQQLKAGDNPYLKYNHAGAEFQERLKEDTSFGGNLGRAVFQAKKRLLEPLGLVEEAAKTAPGKKRPVEQSPQEPDSSAGIGKSGAQPAKKRLNFGQTGDTESVPDPQPIGEPPAAPSGVGSLTMASGGGAPVADNNEGAGGVGSSSGNWHCDSQWLGDRVVTTSTRTWALPTYNNHLYKQISNSTSGGSSNDNAYFGYSTPWGYFDFNRFHCHFSPRDWQRLINNNWGFRPKRLNFKLFNIQVKEVTDNNGVKTIANNLTSTVQVFTDSDYQLPYVLGSAHGGCLPPFPADVFMIPQYGYLTLNDGSQAVGRSSFYCLEYFPSQMLRTGNNFQFSYEFENVPFHSSYAHSQSLDRLMNPLIDQYLHYLSKTINGSGQNQQTLKFSVAGPSNMAVQGRSYIPGPSYRQQRVSTTVTQNNNSEFAWPGASSWALNGRNSLMNPGPAMASYKEGEDSFFPLSGSLIFGKQGTGRDNVDADKVMITNEEEIKTTNPVATESYGQVATNHQSAQAQAQTGWVQNQGILPGMVWQDRDVYLQGPIWAKIPHTDGNFHPSPLMGGFGMKHPPPQTLIKNTPVPADPPTAFNKDKLNSFITQYSTGQVSVEIEWELQKENSKRWNPEIQYTSNYYKSNNVEFAVNTEGVYSEPRPIGTRYLTRNL

SEQ ID NO: 684 - protein, 736 aa, synthetic construct
  source 1..736: note = Description of Artificial Sequence: Synthetic polypeptide
MAADGYLPDWLEDNLSEGIREWWALKPGAPQPKANQQHQDNARGLVLPGYKYLGPGNGLDKGEPVNAADAAALEHDKAYDQQLKAGDNPYLKYNHADAEFQERLKEDTSFGGNLGRAVFQAKKRLLEPLGLVEEAAKTAPGKKRPVEQSPQEPDSSAGIGKSGAQPAKKRLNFGQTGDTESVPDPQPIGEPPAAPSGVGSLTMASGGGAPVADNNEGADGVGSSSGNWHCDSQWLGDRVVTTSTRTWALPTYNNHLYKQISNSTSGGSSNDNAYFGYSTPWGYFDFNRFHCHFSPRDWQRLINNNWGFRPKRLNFKLFNIQVKEVTDNNGVKTIANNLTSTVQVFTDSDYQLPYVLGSAHEGCLPPFPADVFMIPQYGYLTLNDGSQAVGRSSFYCLEYFPSQMLRTGNNFQFSYEFENVPFHSSHAHSQSLDRLMNPLIDQYLHYLSKTINGSGQNQQTLKFSVAGHSNMAVQGRNYIPGPSYRQQRVSTTVTQNNNSEFAWPGASSWALNGRNSLMNPGPAMASYKEGEDSFFPLSGSLIFGKQGTGRDNVDADKVMITNEEEIKTTNPVATESYGQVATNHQSAQAQAQTGWVQNQGILPGMVWQDRDVYLQGPIWAKIPHTDGNFHPSPLMGGFGMKHPPPQTLIKNTPVPADPPTAFNKDKLNSFITQYSTGQVSVEIGWELQKENSKRWNPEIQYTSNYYKSNNVEFAVNTEGVYSEPRPIGTRYLTRNL

SEQ ID NO: 685 - protein, 736 aa, synthetic construct
  source 1..736: note = Description of Artificial Sequence: Synthetic polypeptide
MAADGYLPDWLEDNLSEGIREWWALKPGAPQPKANQQHQDNARGLVLPGYKYLGPGNGLDKGEPVNAADAAALEHDKAYDQQLKAGDNPYLKYNHADAEFQERLKEDTSFGGNLGRAVFQAKKRLLEPLGLVEEAAKTAPGKKRPVEQSPQEPDSSAGIGKSGAQPAKKRLNFGQTGDTESVPDPQPIGEPPAAPSGVGSLTMASGGGAPVADNNEGADGVGSSSGNWHCDSQWLGDRVITTSTRTWALPTYNNRLYKQISNSTSGGSSNDNAYFGYSTPWGYFDFNRFHCHFSPRDWQRLINNNWGFRPKRLNFKPFNIQVKEVTDNNGVKTIANNLTSTVQVFTDSDYQLPYVLGSAHEGCLPPFPADVFMIPQYGYLTLNDGSQAVGRSSFYCLEYFPSQMLRTGNNFQFSYEFENVPFHSSYAHSQSLDRLMNPLIDQYLHYLSKTINGSGQNQQTLKFSVAGPSNMAVQGRNYIPGPSYRQQRVSTTVTQNNNSEFAWPGASSWALNGRNSLMNPGPAMASYKEGEDSFFPLSGSLIFGKQGTGRDNVDADKVMITNEEEIKTTNPVATESYGQVATNHQSAQAQAQTGWVQNQGILPGMVWQDRDVYLQGPIWAKIPHTDGNFHPSPLMGGFGMKHPPPQTLIKNTPVPADPPTAFNKDKLNSFITQYSTGQVSVEIEWELQKENSKRWNPEIQYTSNYYKSNNVEFAVNTEGVYSEPRPIGTRYLTRNL

SEQ ID NO: 686 - protein, 736 aa, synthetic construct
  source 1..736: note = Description of Artificial Sequence: Synthetic polypeptide
MAADGYLPDWLEDNLSEGIREWWALKPGAPQPKANQQHQDNARGLVLPGYKYLGPGNGLDKGEPVNAADAAALEHDKAYDQQLKAGDNPYLKYNHADAEFQERLKEDTSFGGNLGRAVFQAKKRLLEPLGLVEEAAKTAPGKKRPVEQSPQEPDSSAGIGKSGAQPAKKRLNFGQTGDTESVPDPQPIGEPPAAPSGVGSLTMASGGGAPVADNNEGADGVGSSSGNWHCDSQWLGDRVITTSTRTWALPTYNNHLYKQISNSTSGGSSNDNAYFGYSTPWGYFDFNRFHCHFSPRDWQRLINNNWGFRPKRLNFKLFNIQVKEVTDNNGVKTIANNLTSTVQVFTDSDYQLPYVLGSAHEGCLPPFPADVFMIPQYGYLTLNDGSQAVGRSSFYCLEYFPSQMLRTGNNFQFSYEFENVPFHSSYAHSQSLDRLMNPLIDQYLHYLSKTINGSGQNQQTLKFSVAGPSNMAVQGRNYIPGPSYRQQRVSTTVTQNNNSEFAWPGASSWALNGRNSLMNPGPAMASYKEGEDSFFPLSGSLIFGKQGTGRDNVDADKVMITNEEEIKTTNPVATESYGQVATNHQSAQAQAQTGWVQNQGILPGMVWQDRDVYLQGPIWAKIPHTDGNFHPSPLMGGFGMKHPPPQTLIKNTPVPADPPTAFNKDKLNSFITQYSTGQVSVEIEWELQKENSKRWNPEIQYTSNYYKSNNVEFAVNTEGVYSEPRPIGTRYLTRNL

SEQ ID NO: 687 - protein, 736 aa, synthetic construct; identical to SEQ ID NO: 686
  source 1..736: note = Description of Artificial Sequence: Synthetic polypeptide

SEQ ID NO: 688 - protein, 736 aa, synthetic construct
  source 1..736: note = Description of Artificial Sequence: Synthetic polypeptide
MAADGYLPDWLEDNLSEGIREWWDLKPGAPKPKANQQKQDDGRGLVLPGYKYLGPFNGLDKGEPVNAADAAALEHDKAYDQQLKAGDNPYLRYNHADAEFQERLQEDTSFGGNLGRAVFQAKKRVLEPFGLVEEGAKTAPGKKRPVEQSPQEPDSSSGIGKSGQQPAKKRLNFGQTGDSESVPDPQPLGEPPATPAALGPTTMASGGGAPMADNNEGADGVGNASGNWHCDSTWLGDRVITTSTRTWALPTYNNHLYKQISSASTGASNDNHYFGYSTPWGYFDFNRFHCHFSPRDWQRLINNNWGFRPKRLNFKLFNIQVKEVTTNDGVTTIANNLTSTVQVFSDSEYQLPYVLGSAHQGCLPPFPADVFMIPQYGYLTLNNGSKAVGRSSFYCLEYFPSQMLRTGNNFTFSYTFEEVPFHSSYAHSQSLDRLMNPLIDQYLYYLNRTQNQSGSAQNKDLLFSRGSPAGMSVQPKNWLPGPCYRQQRVSKTKTDNNNSNFTWTGASKYNLNGRESIINPGTAMASHKDDEDKFFPMSGVMIFGKESAGASNTALDNVMITDEEEIKATNPVATERFGTVAVNFQSSSTDPATGDVHVMGALPGMVWQDRDVYLQGPIWAKIPHTDGHFHPSPLMGGFGLKHPPPQILIKNTPVPANPPAEFSATKFASFITQYSTGQVSVEIEWELQKENSKRWNPEVQYTSNYAKSANVDFTVDNNGLYTEPRPIGTRYLTRPL

SEQ ID NO: 689 - protein, 736 aa, synthetic construct
  source 1..736: note = Description of Artificial Sequence: Synthetic polypeptide
MAADGYLPDWLEDNLSEGIREWWDLKPGAPKPKANQQKQDDGRGLVLPGYKYLGPFNGLDKGEPVNAADAAALEHDKAYDQQLKAGDNPYLRYNHADAEFQERLQEDTSFGGNLGRAVFQAKKRVLEPLGLVEEGAKTAPGKKRPVEQSPQEPDSSSGIGKTGQQPAKKRLNFGQTGDSESVPDPQPLGEPPATPAAVGPTTMASGGGAPMADNNEGADGVGNASGNWHCDSTWLGDRVITTSTRTWALPTYNNHLYKQISSTSTGASNDNHYFGYSTPWGYFDFNRFHCHFSPRDWQRLINNNWGFRPKRLNFKLFNIQVKEVTTNDGVTTIANNLTSTVQVFSDSEYQLPYVLGSAHQGCLPPFPADVFMIPQYGYLTLNNGSQAVGRSSFYCLEYFPSQMLRTGNNFTFSYTFEEVPFHSSYAHSQSLDRLMNPLIDQYLYYLNRTQNQSGSAQNKDLLFSRGSPAGMSVQPKNWLPGPCYRQQRVSKTKTDNNNSNFTWTGASKYNLNGRESIINPGTAVASHKDDEDKFFPMSGVMIFGKESAGASNTALDNVMITDEEEIKATNPVATERFGTVAVNFQSSSTDPATGDVHAMGALPGMVWQDRDVYLQGPIWAKIPHTDGHFHPSPLMGGFGLKNPPPQILIKNTPVPANPPAEFSATKFASFITQYSTGQVSVEIEWELQKENSKRWNPEVQYTSNYAKSANVDFTVDNNGLYTEPRPIGTRYLTRPL

SEQ ID NO: 690 - protein, 736 aa, synthetic construct
  source 1..736: note = Description of Artificial Sequence: Synthetic polypeptide
MAADGYLPDWLEDNLSEGIREWWALKPGAPQPKANQQHQDNARGLVLPGYKYLGPGNGLDKGEPVNAADAAALEHDKAYDQQLKAGDNPYLKYNHADAEFQERLKEDTSFGGNLGRAVFQAKKRLLEPLGLVEEAAKTAPGKKRPVEQSPQEPDSSAGIGKSGAQPAKKRLNFGQTGDTESVPDPQPIGEPPAAPSGVGSLTMASGGGAPVADNNEGADGVGSSSGNWHCDSQWLGDRVITTSTRTWALPTYNNHLYKQISNSTSGGSSNDNAYFGYSTPWGYFDFNRFHCHFSPRDWQRLINNNWGFRPKRLNFKLFNIQVKEVTDNNGVKTIANNLTSTVQVFTDSDYQLPYVLGSAHEGCLPPFPADVFMIPQYGYLTLNDGSQAVGRSSFYCLEYFPSQMLRTGNNFQFGYEFENVPFHSSYAHSQSLDRLMNPLIDQYLYYLSKTINGSGQNQQTLKFSVAGPSNMAVQGRNYIPGPSYRQQRVSTTVTQNNNSEFAWPGASSWALNGRNSLMNPGPAMASHKEGEDRFFPLSGSLIFGKQGTGRDNVDADKVMITNEEEIKTTNPVATESYGQVATNHQSAQAQAQTGWVQNQGILPGMVWQDRDVYLQGPIWAKIPHTDGNFHPSPLMGGFGMKHPPPQILIKNTPVPADPPTAFNKDKLNSFITQYSTGQVSVEIEWELQKENSKRWDPEIQYTSNYYKSNNVEFAVNTEGVYSEPRPIGTRYLTRNL

SEQ ID NO: 691 - protein, 736 aa, synthetic construct
  source 1..736: note = Description of Artificial Sequence: Synthetic polypeptide
MAADGYLPDWLEDNLSEGIREWWALKPGAPQPKANQQHQDNARGLVLPGYKYLGPGNGLDKGEPVNAADAAALEHDKAYDQQLKAGDNPYLKYNHADAEFQERLKEDTSFGGNLGRAVFQAKKRLLEPLGLVEEAAKTAPGKKRPVEQSPQEPDSSAGIGKSGAQPAKKRLNFGQTGDTESVPDPQPIGEPPAAPSGVGSLTMASGGGAPVADNNEGADGVGSSSGNWHCDSQWLGDRVITTSTRTWALPTYNNHLYKQISNSTSGGSSNDNAYFGYSTPWGYFDFNRFHCRFSPRDWQRLINNNWGFRPKRLNFKLFNIQVKEVTDNNGVKTIANNLTSTVQVFTDSDYQLPYVLGSAHEGCLPPFPADVFMIPQYGYLTLNDGSQAVGRSSFYCLEYFPSQMLRTGNNFQFSYEFENVPFHSSYAHSQSLDRLMNPLIDQYLYYLSKTINGSGQNQQTLKFSVAGPSNMAVQGRNYIPGPSYRQQRVSTTVTQNNNSEFAWPGASSWALNGRNSLMNPGPAMASHKEGEDRFFPLSGSLIFGKQGTGRDNVDADKVMITNEEEIKTTNPVATESYGQVATNHQSAQAQAQTGWVQNQGILPGMVWQDRDVYLQGPIWAKIPHTDGNFHPSPLMGGFGMKHPPPQILIKNAPVPADPPTAFNKDKLNSFITQYSTGQVSVEIEWELQKENSKRWNPEIQYTSNYYKSNNVEFAVNTEGVYSEPRPIGTRYLTRNL

SEQ ID NO: 692 - protein, 736 aa, synthetic construct
  source 1..736: note = Description of Artificial Sequence: Synthetic polypeptide
MAADGYLPDWLEDNLSEGIREWWALKPGAPQPKANQQHQDNARGLVLPGYKYLGPGNGLDKGEPVSAADAAALEHDKAYDQQLKAGDNPYLKYNHADAEFQERLKEDTSFGGNLGRAVFQAKKRLLEPLGLVEEAAKTAPGKKRPVEQSPQEPDSSAGIGKSGAQPAKKRLNFGQTGDTESVPDPQPIGEPPAAPSGVGSLTMASGGGAPVADNNEGADGVGSSSGNWHCDSQWLGDRVITTSTRTWALPTYNNHLYKQISNSTSGGSSNDNAYFGYSTPWGYFDFNRFHCHFSPRDWQRLINNNWGFRPKRLNFKLFNIQVKEVTDNNGVKTIANNLTSTVQVFTDSDYQLPYVLGSAHEGCLPPFPADVFMIPQYGYLTLNDGSQAVGRSSFYCLEYFPSQMLRTGNNFQFSYEFENVPFHSSYAHSQSLDRLMNPLIDQYLYYLSKTINGSGQNQQTLKFSVAGPSNMAVQGRNYIPGPSYRQQRVSTTVTQNNNSEFAWPGASSWALNGRNSLMNPGPAMASHKEGEDRFFPLSGSLIFGKQGTGRDNVDADKVMITNEEEIKTTNPVATESYGQVATNHQSAQAQAQTGWVQNQGILPGMVWQDRDVYLQGPIWAKIPHTDGNFHPSPLMGGFGMKHPPPQILIKNTPVPADPPTAFNKDKLNSFITQYSTGQVSVEIEWELQKENSKRWNPEIQYTSNYYKSNNVEFAVNTEGVYSEPRPIGTRYLTRNL

SEQ ID NO: 693 - protein, 736 aa, synthetic construct
  source 1..736: note = Description of Artificial Sequence: Synthetic polypeptide
MAADGYLPDWLEDNLSEGIREWWALKPGAPQPKANQQHQDNARGLVLPGYKYLGPGNGLDKGEPVNAADAAALEHDKAYDQQLKAGDNPYLKYNHADAEFQERLKEDTSFGGNLGRAVFQAKKRLLEPLGLVEEAAKTAPGKKRPVEQSPQEPDSSAGIGKSGAQPAKKRLNFGQTGDTESVPDPQPIGEPPAAPSGVGSLTMASGGGAPVADNNEGADGVGSSSGNWHCDSQWLGDRVITTSTRTWALPTYNNHLYKQISNSTSGGSSNDNAYFGYSTPWGYFDFNRFHCHFSPRDWQRLINNNWGFRPKRLNFKLFNIQVKEVTDNNGVKTIANNLTSTVQVFTDSDYQLPYVLGSAHEGCLPPFPADVFMIPQYGYLTLNDGSQAVGRSSFYCLEYFPSQMLRTGNNFQFSYEFENVPFHSSYAHSQSLDRLMNPLIDQYLYYLSKTINGSGQNQQTLKFSVAGPSNTAVQGRNYIPGPSYRQQRVSTTVTQNNNSEFAWPGASSWALNGRNSLMNPGPAMASHKEGEDRFFPLSGSLIFGKQGTGRDNVDADKVMITNEEEIKTTNPVATESYGQVATNHQSAQAQAQTGWVQNQGILPGMVWQDRDVYLQGPIWAKIPHTDGNFHPSPLMGGFGMKHPPPQILIKNTPVPADPPTAFNKDKLNSFITQYSTGQVSVEIEWELQKENSKRWNPEIQYTSNYYKSNNVEFAVNTEGVYSEPRPIGTRYLTRNL

SEQ ID NO: 694 - protein, 736 aa, synthetic construct
  source 1..736: note = Description of Artificial Sequence: Synthetic polypeptide
MAADGYLPDWLEDNLSEGIREWWALKPGAPQPKANQQHQDNARGLVLPGYKYLGPGNGLDKGEPVNAADAAALEHDKAYDQQLKAGDNPYLKYNHADAEFQERLKEDTSFGGNLGRAVFQAKKRLLEPLGLVEEAAKTAPGKKRPVEQSPQEPDSSAGIGKSGAQPAKKRLNFGQTGDTESVPDPQPIGEPPAAPSGVGSLTMASGGGAPVADNNEGADGVGSSSGNWHCDSQWLGDRVITTSTRTWALPTYNNHLYKQISNSTSGGSSNDNAYFGYSTPWGYFDFNRFHCHFSPRDWQRLINNNWGFRPKRLNFKLFNIQVKEVTDNNGVKTIANNLTSTVQVFTDSDYQLPYVLGSAHEGCLPPFPADVFMIPQYGYLTLNDGSQAVGRSSFYCLEYFPSQMLRTGSNFQFSYEFENVPFHSSYAHSQSLDRLMNPLIDQYLYYLSKTINGSGQNQQTLKFSVAGPSNMAVQGRNYIPGPSYRQQRVSTTVTQNNNSEFAWPGASSWALNGRNSLMNPGPAMASHKEGEDRFFPLSGSLIFGKQGTGRDNVDADKVMITNEEEIKTTNPAATESYGQVATNHQSAQAQAQTGWVQNQGILPGMVWQDRDVYLQGPIWAKIPHTDGNFHPSPLMGGFGMKHPPPQILIKNTPVPADPPTAFNKDKLNSFITQYSTGQVSVEIEWELQKENSKRWNPEIQHTSNYYKSNNVEFAVNTEGVYSEPRPIGTRYLTRNL

SEQ ID NO: 695 - protein, 736 aa, synthetic construct
  source 1..736: note = Description of Artificial Sequence: Synthetic polypeptide
MAADGYLPDWLEDNLSEGIREWWALKPGAPQPKANQQHQDNARGLVLPGYKYLGPGNGLDKGEPVNAADAAALEHDKAYDQQLKAGDNPYLKYNHADAEFQERLKEDTSFGGNLGRAVFQAKKRLLEPLGLVEEAAKTAPGKKRPVEQSPQEPDSSAGIGKSGAQPAKKRLNFGQTGDTESVPDPQPIGEPPAAPSGVGSLTMASGGGAPVADNNEGADGVGSSSGNWHCDSQWLGDRVITTSTRTWALPTYNNHLYKQISNSTSGGSSNDNAYFGYSTPWGYFDFNRFHCHFSPRDWQRLINNNWGFRPKRLNFRLFNIQVKEVTDNNGVKTIANNLTSTVQVFTDSDYQLPYVLGSAHEGCLPPFPADVFMIPQYGYLTLNDGSQAVGRSSFYCLEYFPSQMLRTGNNFQFSYEFENVPFHSSYAHSQSLDRLMNPLIDQYLYYLSKTINGSGQNQQTLKFSVAGPSNMAVQGRNYIPGPSYRQQRVSTTVTQNNNSEFAWPGASSWALNGRNSLMNPGPAMASHKEGEDRFFPLSGSLIFGKQGTGRDNVDADKVMITNEEEIKTTNPVATESYGQVATNHQSAQAQAQTGWVQSQGILPGMVWQDRDVYLQGPIWAKIPHTDGNFHPSPLMGGFGMKHPPPQILIKNTPVPADPPTAFNKDKLNSFITQYSTGQVSVEIEWELQKENSKRWNPEIQYTSNYYKSNNVEFAVNTEGVYSEPRPIGTRYLTRNL

SEQ ID NO: 696 - protein, 735 aa, synthetic construct
  source 1..735: note = Description of Artificial Sequence: Synthetic polypeptide
MAADGYLPDWLEDNLSEGIREWWALKPGAPQPKANQQHQDNARGLVLPGYKYLGPGNGLDKGEPVNAADAAALEHDKAYDQQLKAGDNPYLKYNHADAEFQERLKEDTSFGGNLGRAVFQAKKRLLEPLGLVEEAAKTAPGKKRPVEQSPQEPDSSAGIGKSGAQPAKKRLNFGQTGDTESVPDPQPIGEPPAAPSGVGSLTMASGGGAPVADNNEGADGVGSSSGNWHCDSQWLGDRVITTSTRTWALPTYNNHLYKQISNSTSGGSSNDNAYFGYSTPWRYFDFNRFHCHFSPRDWQRLINNWGFRPKRLNFKLFNIQVKEVTDNNGVKTIANNLTSTVQAFTDSDYQLPYVLGSAHEGCLPPFPADVFMIPQYGYLTLNDGSQAVGRSSFYCLEYFPSQMLRTGNNFQFSYEFENVPFHSSYAHSQSLDRLMNPLIDQYLYYLSKTINGSGQNQQTLKFSVAGPSNMAVQGRNYIPGPSYRQQRVSTTVTQNNNSEFAWPGASSWALNGRNSLMNPGPAMASHKEGEDRFFPLSGSLIFGKQGTGRDNVDADKVMITNEEEIKTTNPVATESYGQVATNHQSAQAQAQTGWVQNQGILPGMVWQDRDVYLQGPIWAKIPHTDGNFHPSPLMGGFGMKHPPPQILIKNTPVPADPPTAFNKDELNSFITQYSTGQVSVEIEWELQKENSKRWNPEIQYTSNYYKSNNVEFAVNTEGVYSEPRPIGTRYLTRNL

SEQ ID NO: 697 - protein, 735 aa, synthetic construct
  source 1..735: note = Description of Artificial Sequence: Synthetic polypeptide
MAADGYLPDWLEDNLSEGIREWWALKPGAPQPKANQQHQDNARGLVLPGYKYLGPGNGLDKGEPVNAADAAALEHDKAYDQQLKAGDNPYLKYNHADAEFQERLKEDTSFGGNLGRAVFQDKKRLLEPLGLVEEAAKTAPGKKRPVEQSPQEPDSSAGIGKSGAQPAKKRLNFGQTGDTESVPDPQPIGEPPAAPSGVGSLTMASGGGAPVADNNEGADGVGSSSGNWHCDSQWLGDRVITTSTRTWALPTYNNHLYKQISNSTSGGSSNDNAYFGYSTPWGYFDFNRFHCHFSPRDWQRLINNWGFRPKRLNFKLFNIQVKEVTDNNGVKTIANNLTSTVQVFTDSDYQLPYVLGSAHEGCLPPFPADVFMIPQYGYLTLNDGSQAVGRSSFYCLEYFPSQMLRTGNNFQFSYEFENVPFHSSYAHSQSLDRLMNPLIDQYLYYLSKTINGSGQNQQTLKFSVAGPSNMAVQGRNYIPGPSYRQQRVSTTVTQNNNSEFAWPGASSWALNGRNSLMNPGPAMASHKEGEDRFFPLSGSLIFGKQGTGRDNVDADKVMITNEEEIKTTNPVATESYGQVATNHQSAQAQAQTGWVQNQGILPGMVWQDRDVYLQGPIWAKIPHTDGNFHPSPLMGGFGMKHPPPQILIKNTPVPADPPTAFNKDKLNSFITQYSTGQVSVEIEWELQKENSKRWNPEIQYTSNYYKSNNVEFAVNTEGVYSEPRPIGTRYLTRNL

SEQ ID NO: 698 - protein, 736 aa, synthetic construct
  source 1..736: note = Description of Artificial Sequence: Synthetic polypeptide
MAADGYLPDWLEDNLSEGIREWWALKPGAPQPKANQQHQDNARGLVLPGYKYLGPGNGLDKGEPVNAADAAALEHDKAYDQQLKAGDNPYLKYNHADAEFQERLKEDTSFGGNLGRAVFQAKKRLLEPLGLVEEAAKTAPGKKRPVEQSPQEPDSSAGIGKSGAQPAKKRLNFGQTGDTESVPDPQPIGEPPAAPSGVGSLTMASGGGAPVADNNEGADGVGSSSGNWHCDSQWLGDRAITTSTRTWALPTYNNHLYKQISNSTSGGSSNDNAYFGYSTPWGYFDFNRFHCHFSPRDWQRLINNNWGFRPKRLNFKLFNIQVKEVTDNNGVKTIANNLTSTVQVFTDSDYQLPYVLGSAHEGCLPPFPADVFMIPQYGYLTLNDGSQAVGRSSFYCLEYFPSQMLRTGNNFQFSYEFENVPFHSSYAHSQSLDRLMNPLIDQYLYYLSKTINGSGQNQQTLKFSVAGPSNMAVQGRNYIPGPSYRQQRVSTTVTQNNNSEFAWPGASSWALNGRNSLMNPGPAMASHKEGEDRFFPLSGSLIFGKQGTGRDNVDADKVMTTNEEEIKTTNPVATESYGQVATNHQSAQAQAQTGWVQNQGILPGMVWQDRDVYLQGPIWAKIPHTDGNFHPSPLMGGFGMKHPPPQILIKNTPVPADPPTAFNKDKLNSFITQYSTGQVSVEIEWELQKENSKRWNPEIQYTSNYYKSNNVEFAVNTEGVYSEPRPIGTRYLTRNL

SEQ ID NO: 699 - protein, 736 aa, synthetic construct
  source 1..736: note = Description of Artificial Sequence: Synthetic polypeptide
MAADGYLPDWLEDNLSEGIREWWALKPGAPQPKANQQHQDNARGLVLPGYKYLGPGNGLDKGEPVNAADAAALEHDKAYDQQLKAGDNPYLKYNHADAEFQERLKEDTSFGGNLGRAVFQTKKRLLEPLGLVEEAAKTAPGKKRPVEQSPQEPGSSAGIGKSGAQPAKKRLNFGQTGDTESVPDPQPIGEPPAAPSGVGSLTMASGGGAPVADNNEGADGVGSSSGNWHCDSQWLGDRVITTSTRTWALPTYNNHLYKQISNSTSGGSSNDNAYFGYSTPWGYFDFNRFHCHFSPRDWQRLINNNWGFRPKRLNFKLFNIQVKEVTDNNGVKTIANNLTSTVQVFTDSDYQLPYVLGSAHEGCLPPFPADVFMIPQYGYLTLNDGSQAVGRSSFYCLEYFPSQMLRTGNNFQFSYEFENVPFHSSYAHSQSLDRLMNPLIDQYLHYLSKTINGSGQNQQTLKFSVAGPSNMAVQGRNYIPGPSYRQQRVSTTVTQNNNSEFAWPGASSWALNGRNSLMNPGPAMASHKEGEDRFFPLSGSLIFGKQGTGRDNVDADKVMITNEEEIKTTNPVATESYGQVATNHQSAQAQAQTGWVQNQGILPGMVWQDRDVYLQGPIWAKIPHTDGNFHPSPLMGGFGMKHPPPQILIKNTPVPADPPTAFNKDKLNSFITQYSTGQVSVEIEWELQKENSKRWNPEIQYTSNYYKSNNVEFAVNTEGVYSEPRPIGTRYLTRNL

SEQ ID NO: 700 - protein, 736 aa, synthetic construct
  source 1..736: note = Description of Artificial Sequence: Synthetic polypeptide
MAADGYFPDWLEDNLSEGIREWWALKPGAPQPKANQQHQDNARGLVLPGYKYLGPGNGLDKGEPVNAADAAALEHDKAYDQQLKAGDNPYLKYNHADAEFQERLKEDTSFGGNLGRAVFQAKKRLLEPLGLVEEAAKTAPGKKRPVEQSPQEPDSSAGIGKSGAQPAKKRLNFGQTGDTESVPDPQPIGESPAAPSGVGSLTMASGGGAPVADNNEGADGVGSSSGNWHCDSQWLGDRVITTSTRTWALPTYNNHLYKQISNSTSGGSSNDNAYFGYSTPWGYFDFNRFHCHFSPRDWQRLINNNWGFRPKRLNFKLFNIQVKEVTDNNGVKTIANNLTSTVQVFTDSDYQLPYVLGSAHEGCLPPFPADVFMIPQYGYLTLNDGSQAVGRSSFYCLEYLPSQMLRTGNNFQFSYEFENVPFHSSYAHSQSLDRLMNPLIDQYLHYLSKTINGSGQNQQTLKFSVAGPSNMAVQGRNYIPGPSYRQQRVSTTVTQNNNSEFAWPGASSWALNGRNSLMNPGPAVASHKEGEDRFFPLSGSLIFGKQGTGRDNVDADKVMITNEEEIKTTNPVATESYGQVATNHQSAQAQAQTGWVQNQGILPGMVWQDRDVYLQGPIWAKIPHTDGNFHPSPLMGGFGMKHPPPQILIKNTPVPADPPTAFNKDKLNSFITQYSTGQVSVEIEWELQKENSKRWNPEIQYTSNYYKSNNVEFAVNTEGVYSEPRPIGTRYLTRNL

SEQ ID NO: 701 - protein, 736 aa, synthetic construct
  source 1..736: note = Description of Artificial Sequence: Synthetic polypeptide
MAADGYLPDWLEDNLSEGIREWWALKPGAPQPKANQQHQDNARGLVLPGYKYLGPGNGLDKGEPVNAADAAALEHDKAYDQQLKAGDNPYLKYNHADAEFQERLKEDTSFGGNLGRAVFQAKKRLLEPLGPVEEAAKTAPGKKRPVEQSPQEPDSSAGIGKSGAQPAKKRLNFGQTGDTESVPDPQPIGEPPAAPSGVGSLTMASGGGAPVADNNEGADGVGSSSGNWHCDSQWLGDRVITTSTRTWALPTYNNHLYKQISNSTSGGSSNDNAYFGYSTPWGYFDFNRFHCHFSPRDWQRLINNNWGFRPKRLNFKLFNIQVKEVTDNNGVKTIANNLTSTVQVFTDSDYQLPYVLGSAHEGCLPPFPADVFMIPQYGYLTLNDGSQAVGRSSFYCLEYFPSQMLRTGNNFQFSYEFENVPFHSSYAHSQSLDRLMNPLIDQYLYYLSKTINGSGQNQQTLKFSVAGPSNMAVQGRNYIPGPSYRQQRVSTTVTQNNNSEFAWPGASSWALNGRNSLMNPGPAMASHKEGEDRFFPLSGSLIFGKQGTGRDNVDADKVMITNEEEIKTTNPVATESYGQAATNHQSAQAQAQTGWVQNQGILPGMVWQDRDVYLQGPIWAKIPHTDGNFHPSPLMGGFGMKHPPPQILIKNTPVPADPPTAFNKDKLNSFITQYSTGQVSVEIEWELQKENSKRWNPEIQYTSNYYKSNNVEFAVNTEGVYSEPRPIGTRYLTRNL

SEQ ID NO: 702 - protein, 736 aa, synthetic construct
  source 1..736: note = Description of Artificial Sequence: Synthetic polypeptide
MAADGYLPDWLEDNLSEGIREWWALKPGAPQPKANQQHQDNARGLVLPGYKYLGPGNGLDKGEPVNAADAAALEHDKAYDQQLKAGDNPYLKYNHADAEFQERLKEDTSFGGNLGRAVFQAKKRLLEPLGPVEEAAKTAPGKKRPVEQSPQEPDSSAGIGKSGAQPAKKRLNFGQTGDTESVPDPQPIGEPPAAPSGVGSLTMASGGGAPVADNNEGADGVGSSSGNWHCDSQWLGDRVITTSTRTWALPTYNNHLYKQISNSTSGGSSNDNAYFGYSTPWGYFDFNRFHCHFSPRDWRRLINNNWGFRPKRLNFKLFNIQVKEVTDNNGVKTIANNLTSTVQVFTDSDYQLPYVLGSAHEGCLPPFPADVFMIPQYGYLTLNDGSQAVGRSSFYCLEYFPSQMLRTGNNFQFSYEFENVPFHSSYAHSQSLDRLMNPLIDQYLYYLSKTINGSGQNQQTLKFSVAGPSNMAVQGRNYIPGPSYRQQRVSTTVTQNNNSEFAWPGASSWALNGRNSLMNPGPAMASHKEGEDRFFPLSGSLIFGKQGTGRDNVDADKVMITNEEEIKTTNPVATESYGQVATNHQSAQAQAQTGWVQNQGILPGMVWQDRDVYLQGPIWAKIPHTDGNFHPSPLMGGFGMKHPPPQILIKNTPVPADPPTAFNKDKLNSFITQYSTGQVSVEIEWELQKENSKRWNPEIQYTSNYYKSNNVEFAVNTEGVYSEPRPIGTRYLTRNL

SEQ ID NO: 703 - protein, 736 aa, synthetic construct
  source 1..736: note = Description of Artificial Sequence: Synthetic polypeptide
MAADGYLPDWLEDNLSEGIREWWALKPGAPQPKANQQHQDNARGLVLPGYKYLGPGNGLDKGEPVNAADAAALEHDKAYDQQLKAGDNLYLKYNHADAEFQERLKEDTSFGGNLGRAVFQAKKRLLEPLGLVEEAAKTAPGKKRPVEQSPQEPDSSAGIGKSGAQPAKKRLNFGQTGDTESVPDPQPIGEPPAAPSGVGSLTMASGGGAPVADNNEGADGVGSSSGNWHCDSQWLGDRVITTSTRTWALPTYNNHLYKQISNSTSGGSSNDNAYFGYSTPWGYFDFNRFHCHFSPRDWQRLINNNWGFRPKRLNFKLFNIQVKEVTDNNGVKTIANNLTSTVQVFTDSDYQLPYVLGSAHEGCLPPFPADVFMIPQYGYLTLNDGSQAVGRSSFYCLEYFPSQMLRTGNNFQFSYEFENVPFHSSYAHSQSLDRLMNPLIDQYLHYLSKTINGSGQNQQTLKFSVAGPSNMAVQGRNYIPGPSYRQQRVSTTVTQNNNSEFAWPGASSWALNGRNSLMNPGPAMASHKEGEDRFFPLSGSLIFGKQGTGRDNVDADKVMITNEEEIKTTNPVATESYGQVATNHQSAQAQAQTGWVQNQGILPGMVWQDRDVYLQGPIWAKIPHTDGNFHPSPLMGGFGMKHPPPQILIKNTPVPADPPTAFNKDKLNSFITQYSTGQVSVEIEWELQKENSKRWNPEIQYTSNYYKSNNVEFAVNTEGVYSEPRPIGTRYLTRNL

SEQ ID NO: 704 - protein, 736 aa, synthetic construct
  source 1..736: note = Description of Artificial Sequence: Synthetic polypeptide
MAADGYLPDWLEDNLSEGIREWWALKPGAPQPKANQQHQDNARGLVLPGYKYLGPGNGLDKGEPVNAADAAALEHDKAYDQQLKAGDNPYLKYNHADAEFQERLKEDTSFGGNLGRAVFQAKKRLLEPLGLVEEAAKTAPGKKRPVEQSPQEPDSSAGIGKSGAQPAKKRLNFGQTGDTESVPDPQPIGEPPAAPSGVGSLTMASGGGAPVADNNEGADGVGSSSGNWHCDSQWLGDRVITTSTRTWALPTYNNHLYKQISNSTSGGSSNDNAYFGYSTPWGYFDFNRFHCHFSPRDWQRLINNNWGFRPKRLNFKLFNIQVKEVTDNNGVKTIANNLTSTVQVFTDSDYQLPYVLGSAHEGCLPPFPADVFMIPQYGYLTLNDGSQAVGRSSFYCLEYFPSQMLRTGNNFQFSYEFENVPFHSSYAHSQSLDRLMNPLIDQYLHYLSKTINGSGQNQQTLKFSVAGPSNMAVQGRNYIPGPSYRQQRVSTTVTQNNNSEFAWPGASSWALNGRNSLMNPGPAMASHKEGEDRFFPLSGSLIFGKQGTGRDNVDADKVMITNEEEIKTTNPVATESYGQVATNHQSAQAQAQTGWVQNQGILPGMVWQDRDVYLQGPIWAKIPHTDGNFHPSPLMGGFGMKHPPPQILIKNTPVPADPPTAFNKDKLNSFITQYSTGQVSVEIEWELQKENSKRWNPEIQYTSNYYKSNNVEFAVNTEGVYSEPRPIGTRYLTRNL

SEQ ID NO: 705 - protein, 736 aa, synthetic construct
  source 1..736: note = Description of Artificial Sequence: Synthetic polypeptide
  VARIANT 442: note = MOD_RES - Xaa = any amino acid
MAADGYLPDWLEDNLSEGIREWWALKPGAPQPKANQQHQDNARGLVLPGYKYLGPGNGLDKGEPVNAADAAALEHDKAYDQQLKAGDNPYLKYNHADAEFQERLKEDTSFGGNLGRAVFQAKKRLLEPLGLVEEAAKTAPGKKRPVEQSPQEPDSSAGIGKSGAQPAKKRLNFGQTGDTESVPDPQPIGEPPAAPSGVGSLTMASGGGAPVADNNEGADGVGSSSGNWHCDSQWLGDRVITTSTRTWALPTYNNHLYKQISTSTSGGSSNDNAYFGYSTPWGYFDFNRFHCHFSPRDWQRLINNNWGFRPKRLNFKLFNIQVKEVTDNNGVKTIANNLTSTVQVFTDSDYQLPYVLGSAHEGCLPPFPADVFMIPQYGYLTLNDGSQAVGRSSFYCLEYFPSQMLRTGNNFQFSYEFENVPFHSSYAHSQSLDRLMNPLIDXYLHYLSKTINGSGQNQQTLKFSVAGPSNMAVQGRNYIPGPSYRQQRVSTTVTQNNNSEFAWPGASSWALNGRNSLMNPGPAMASHKEGEDRFFPLSGSLIFGKQGTGRDNVDADKVMITNEEEIKTTNPVATESYGQVATNHQSAQAQAQTGWVQNQGILPDMVWQDRDVYLQGPIWAKIPHTDGNFHPSPLMGGFGMKHPPPQILIKNTPVPADPPTAFNKDKLNSFITQYSTGQVSVEIEWELQKENSKRWNPEIQYTSNYYKSNNVEFAVNTEGVYSEPRPIGTRYLTRNL

SEQ ID NO: 706 - protein, 736 aa, synthetic construct; identical to SEQ ID NO: 686
  source 1..736: note = Description of Artificial Sequence: Synthetic polypeptide

SEQ ID NO: 707 - protein, 736 aa, synthetic construct; identical to SEQ ID NO: 690
  source 1..736: note = Description of Artificial Sequence: Synthetic polypeptide

SEQ ID NO: 708 - protein, 736 aa, synthetic construct
  source 1..736: note = Description of Artificial Sequence: Synthetic polypeptide
MAADGYLPDWLEDNLSEGIREWWALKPGAPQPRANQQHQDNARGLVLPGYKYLGPGNGLDKGEPVNAADAAALEHDKAYDQQLKAGDNPYLKYNHADAEFQERLKEDTSFGGNLGRAVFQAKKRLLEPLGLVEEAAKTAPGKKRPVEQSPQEPDSSAGIGKSGAQPAKKRLNFGQTGDTESVPDPQPIGEPPAAPSGVGSLTMASGGGAPVADNNEGADGVGSSSGNWHCDSQWLGDRVITTSTRTWALPTYNNHLYKQISNSTSGGSSNDNAYFGYSTPWGYFDFNRFHCHFSPRDWQRLINNNWGFRPKRLNFKLFNIQVKEVTDNNGVKTIANNLTSTVQVFTDSDCQLPYVLGSAHEGCLPPFPADVFMIPQYGYLTLNDGSQAVGRSSFYCLEYFPSQMLRTGNNFQFSYEFENVPFHSSYAHSQSLDRLTNPLIDQYLYYLSKTINGSGQNQQTLKFSVAGPSNMAVQGRNYIPGPSYRQQRVSTTVTQNNNSEFAWPGASSWALNGRNSLMNPGPAMASHKEGEDRFFPLSGSLIFGKQGTGRDNVDADKVMITNEEEIKTTNPVATESHGQVATNHQSAQAQAQTGWVQNQGILPGMVWQDRDVYLQGPIWAKIPHTDGNFHPSPLMGGFGMKHPPPQILIKNTPVPADPPTAFNKDKLNSFITQYSTGQVSVEIEWELQKENSKRWNPEIQYTSNYYKSNNVEFAVNTEGVYSEPRPIGTRYLTRNL

SEQ ID NO: 709 - protein, 736 aa, synthetic construct
  source 1..736: note = Description of Artificial Sequence: Synthetic polypeptide
MAADGYLPDWLEDNLSEGIREWWALKPGAPQPKANQQHQDNARGLVLPGYKYLGPGNGLDKGEPVNAADAAALEHDKAYDQQLKAGDNPYLKYNHADAEFQERLKEDTSFGGNLGRAVFQAKKRLLEPLGLVEEAAKTAPGKKRPVEQSPQEPDSSAGIGKSGAQPAKKRLNFGQTGDTESVPDPQPIGEPPAAPSGVGSLTMASGGGAPVADNNEGADGVGSSSGNWHCDSQWLGDRVITTSTRTWALPTYNNHLYKQISNSTSGGSSNDNAYFGYSTPWGYFDFNRFHCHFSPRDWQRLINNNWGFRPKRLNFKLFNIQVKEVTDNNGVKTIANNLTSTVQVFTDSDYQLPYVLGSAHEGCLPPFPADVFMIPQYGYLTLNDGSQAVGRSSFYCLEYFPSQMLRTGNNFQFSYEFENVPFHSSYAHSQSLDRLMNPPIDQYLYYLSKTINGSGQNQQTLKFSVAGPSNMAVQGRNYIPGPSYRQQRVSTTVTQNNNSEFAWPGASSWALNGRNSLMNPGPAMASHKEGEDRFFPLSGSLIFGKQGTGRDNVDADKVMITNEEEIKTTNPVATESYGQVATNHQSAQAQAQTGWVQNQGILPGMVWQDRDVYLQGPIWAKIPHTDGNFHPSPLMGGFGMKHPPPQILIKNTPVPADPPTAFNKDKLNSFITQYSTGQVSVEIEWELQKENSKRWNPEIQYTSNYYKSNNVEFAVNTEGVYGEPRPIGTRYLTRNL

SEQ ID NO: 710 - protein, 736 aa, synthetic construct
  source 1..736: note = Description of Artificial Sequence: Synthetic polypeptide
MAADGYLPDWLEDNLSEGIREWWALKPGAPQPKANQQHQDNARGLVLPGYKYLGPGNGLDKGEPVNAADAAALEHDKAYDQQLKAGDNPYLKYNHADAEFQERLKEDTSFGGNLGRAVFQAKKRLLEPLGLVEEAAKTAPGKKRPVEQSPQEPDSSAGIGKSGAQPAKKRLNFGQTGDTESVPDPQPIGEPPAAPSGVGSLTMASGGGAPVADNNEGADGVGSSSGNWHCDSQWLGDRVITTSTRTWALPTYNNHLYKQISNSTSGGSSNDNAYFGYSTPWGYFDFNRFHCHFSPRDRQRLINNNWGFRPKRLNFKLFNIQVKEVTDNNGVKTIANNLTSTVQVFTDSDYQLPYVLGSAHEGCLPPFPADVFMIPQYGYLTLNDGSQAVGRSSFYCLEYFPSQMLRTGNNFQFSYEFENVPFHSSYAHSQSLDRLMNPLIDQYLYYLSKTINGSGQNQQTLKFSVAGPSNMAVQGRNYIPGPSYRQQRVSTTVTQNNNSEFAWPGASSWALNGRNSLMNPGPAMASHKEGEDRFFPLSGSLIFGKQGTGRDNVDADKVMITNEEEIKTTNPVATESYGQVATNHQSAQAQAQTGWVQNQGILPGMVWQDRDVYLQGPIWAKIPHTDGNFHPSPLMGGFGMKHPPPQILIKNTPVPADPPTAFNKDKLNSFITQYSTGQVSVEIEWELQKENSKRWNPEIQYTSNYYKSNNVEFAVNTEGVYSEPRPIGTRYLTRNL

SEQ ID NO: 711 - protein, 736 aa, synthetic construct
  source 1..736: note = Description of Artificial Sequence: Synthetic polypeptide
MAADGYLPDWLEDNLSEGIREWWALKPGAPQPKANQQHQDNARGLVLPGYKYLGPGNGLDKGEPVNAADAAALEHDKAYDQQLKAGDNPYLKYNHADAEFQERLKEDTSFGGNLGRAVFQAKKRLLEPLGLVEEAAKTAPGKKRPVEQSPQEPDSSAGIGKSGAQPAKKRLNFGQTGDTESVPDPQPIGEPPAAPSGVGSLTMASGGGAPVADNNEGADGVGSSSGNWHCNSQWLGDRVITTSTRTWALPTYNNHLYKQISNSTSGGSSNDNAYFGYSTPWGYFDFNRFHCHFSPRDWQRLINNNWGFRPKRLNFKLFNIQVKEVTDNNGVKTIANNLTSTVQVFTDSDYQLPYVLGSAHEGCLPPFPADVFMIPQYGYLTLNDGSQAVGRSSFYCLEYFPSQMLRTGNNFQFSYEFENVPFHSSYAHSQSLDRLMNPLIDQYLYYLSKTINGSGQNQQTLKFSVAGPGNMAVQGRNYIPGPSYRQQRVSTTVTQNNNSEFAWPGASSWALNGRNSLMNPGPAMASHKEGEDRFFPLSGSLIFGKQGTGRDNVDADKVMITNEEEIKTTNPVATESYGQVATNHQSAQAQAQTGWVQNQGILPGMVWQDRDVYLQGPIWAKIPHTDGNFHPSPLMGGFGMKHPPPQILIKNTPVPADPPTAFNKDKLNSFITQYSTGQVSVEIEWELQKENSKRWNPEIQYTSNYYKSNNVEFAVNTEGVYSEPRPIGTRYLTRNL

SEQ ID NO: 712 - protein, 736 aa, synthetic construct
  source 1..736: note = Description of Artificial Sequence: Synthetic polypeptide
MAADGYLPDWLEDNLSEGIREWWALKPGAPQPKANQQHQDNARGLVLPGYRYLGPGNGLDKGEPVNAADAAALEHDKAYDQQLKAGDNPYLKYNHADAEFQERLKEDTSFGGNLGRAVFQAKKRLLEPLGLVEEAAKTAPGKKRPVEQSPQEPDSSAGIGKSGAQPAKKRLNFGQTGDTESVPDPQPIGEPPAAPSGVGSLTMASGGGAPVADNNEGADGVGSSSGNWHCDSQWLGDRVITTSTRTWALPTYNNHLYKQISNSTSGGSSNDNAYFGYSTPWGYFDFNRFHCHFSPRDWQRLINNNWGFRPKRLNFKLFNIQVKEVTDNNGVKTVANNLTSTVQVFTDSDYQLPYVLGSAHEGCLPPFPADVFMIPQYGYLTLNDGSQAVGRSSFYCLEYFPSQMLRTGNNFQFSYEFENVPFHSSYAHSQSLDRLMNPLIDQYLYYLSKTINGSGQNQQTLKFSVAGPSNMAVQGRNYIPGPSYRQQRVSTTVTQNNNSEFAWPGASSWALNGRNSLMNPGPAMASHKEGEDRFFPLSGSLIFGKQGTGRDNVDADKVMITNEEEIKTTNPVATESYGQVATNHQSAQAQAQTGWVQNQGILPGMVWQDRDVYLQGPIWAKIPHTDGNFHPSPLMGGFGMKHPPPQILIKNTPVPADPPTAFNKDKLNSFITQYSTGQVSVEIEWELQKENSKRWNPEIQYTSNYYKSNNVEFAVNTEGVYSGPRPIGTRYLTRNL

SEQ ID NO: 713 - protein, 736 aa, synthetic construct; identical to SEQ ID NO: 123
  source 1..736: note = Description of Artificial Sequence: Synthetic polypeptide

SEQ ID NO: 714 - protein, 736 aa, synthetic construct
  source 1..736: note = Description of Artificial Sequence: Synthetic polypeptide
MAADGYLPDWLEDNLSEGIREWWALKPGAPQPKANQQRQDNARGLVLPGYKYLGPGNGLDKGEPVNAADAAALEHDKAYDQQLKAGGNPCLKYNHADAEFQERLKEDTSFGGNLGRAVFQAKKRLLEPLGLVEEAAKTAPGKKRPVEQSPQEPDSSAGIGRSGAQPAKKRLNFGQTGDTESVPDPQPIGEPPAAPSGVGSLTMASGGGAPVADNNEGADGVGSSSGNWHCDSQWLGDRVITTSTRTWALPTYNNHLYKQISNSTSGGSSNDNAYFGYSTPWGYFDFNRFHCHFSPRDWQRLINNNWGFRPKRLNFKLFNIQVKEVTDNNGVKAIANNLTSTVQVFTDSDYQLPYVLGSAHEGCLPPFPADVFMIPQYGYLTLNDGSQAVGRSSFYCLEYFPSQMLRTGNNFQFSYEFENVPFHSSYAHSQSLDRLMNPLIDQYLYYLSKTIDGSGQNQQTLKFSVAGPSNMAVQGRNYIPGPSYRQQRVSTTVTQNNNSEFAWPGASSWALNGRNSLMDPGPAMASHKEGEDRFFPLSGSLIFGKQGTGRDNVDADKVMITNEEEIKTTNPVATESYGQVATNHQSAQAQAQTGWVQNQGILPGMVWQDRDVYLQGPIWAKIPHTGGNFHPSPLMGGFGMKHPPPQILIKNTPVPADPPTAFNKDKLNSFITQYSTGQVSVEIEWELQKENSKRWNPEIQYTSNYYKSNNVEFAVNTEGVYSEPRPIGTRYLTRNL

SEQ ID NO: 715 - protein, 736 aa, synthetic construct
  source 1..736: note = Description of Artificial Sequence: Synthetic polypeptide
MAADGYLPDWLEDNLSEGIREWWALKPGAPQPKANQQHQDNARGLVLPGYKYLGPGNGLDKGEPVNAADAAALEHDKAYDQQLKAGDNPYLKYNHADAEFQERLKEDTSFGGNLGRAVFQAKKRLLEPLGLVEEAAKTAPGKKRPVEQSPQEPDSSAGIGKSGAQPAKKRLNFGQTGDTESVPDPQPIGEPPAAPSGVGSLTMASGGGAPVADNNEGADGVGSSSGNWHCDSQWLGDRVITTSTRTWALPTYNNHLYKQISNSTSGGSSNDNAYFGYSTPWGYFDFNRFHCHFSPRDWQRLINNNWGFRPKRLNFKLFNIQVKEVTDNNGVKTIANNLTSTVQVFTDSDYQLPYVLGSAHEGCLPPFPADVFMIPQYGYLTLNDGSQAVGRSSFYCLEYFPSQMLRTGNNFQFSYEFENVPFHSSYAHSQSLDRLMNPLIDQYLYYLSKTINGSGQNQQTLKFSVAGPSNMAVQGRNYIPGPSYRQQRVSTTVTQNNNSEFAWPGASSWALNGRNSLMNPGPAMASHKEGEDRFFPLSGSLIFGKQGTGRDNVDADKVMITNEEEIKTTNPVATESYGQVATNHQSAQAQAQTGWVQNQGILPGMVWQDRDVYLQGPIWAKIPHTDGNFHPSPLMGGFGMKHPPPQILIKNTPVPADPPTAFNKDKLNSFITQYSTGQVSVEIEWELQKENSKRWNPEIQYTSNYYKPNNVEFAVNTEGVYSEPRPIGTRYLTRNL

SEQ ID NO: 716 - protein, 736 aa, synthetic construct
  source 1..736: note = Description of Artificial Sequence: Synthetic polypeptide
MAADGYLPDWLEDNLSEGIREWWALKPGAPQPKANQQHQDNARGLVLPGYKYLGPGNGLDKGEPVNAADAAALEHNKAYDQQLKAGDNPYLKCNHADAEFQERLKEDTSFGGNLGRAVFQAKKRPLEPLGLVEEAAKTAPGKKRPVEQSPQEPDSSAGIGKSGAQPAKKRLNFGQTGDTESVPDPQPIGEPPAAPSGVRSLTMASGGGAPVADNNEGADGVGSSSGNWHCDSQWLGDRVITTSTRTWALPTYNNHLYKQISNSTSGGSSNDNAYLGYSTPWGYFDFNRFHCHFSPRDWQRLINNNWGFRPKRLNFKLFNIQVKEVTDNNGVKTIANNLTSTVQVFTDSDYQLPYVLGSAHEGCLPPFPADVFMIPQYGYLTLNDGSQAVGRSSFYCLEYFPSQMLRTGNNFQFSYEFENVPFHSSYAHSQSLDRLMNPLIDQYLYYLSKTINGSGQNQQTLKFSVAGPSNMAVQGRNYIPGPSYRQQRVSTTVTQNNNSEFAWPGASSWALNGRNSLMNPGPTMASHKEGEDRFFPLSGSLIFGKQGTGRDNVDADKVMITNEEEIKTTNPVATESYGQVATNHQSAQAQAQTGWVQNQGILPGMVWQDRDVYLQGPIWAKIPHTDGNFHPSPLMGGFGMKHPPPQILIKNTPVPADPPTAFNKDKLNSFITQYSTGQVSVEIEWELQKENSKRWNPEIQYTSNYYKSNNVEFAVNTEGVYSEPRPIGTRYLTRNL

SEQ ID NO: 717 - protein, 736 aa, synthetic construct
  source 1..736: note = Description of Artificial Sequence: Synthetic polypeptide
MAADGYLPDWLEDNLSEGIREWWALKPGAPQPKANQQHQDNARGLVLPGYKYLGPGNGLDKGEPVNAADAAALVHDKAYDQQLKAGDNPYLKCNHADAEFQERLKEDTSFGGNLGRAVFQAKKRLLEPLGLVEEAAKTAPGKKRPVEQSPQEPDSSAGIGKSGAQPAKKRLNFGQTGDTESVPDPQPIGEPPAAPSGVGSLTMASGGGAPVADNNEGADGVGSSSGNWHCDSQWLGDRVITTSTRTWALPTYNNHLYKQISNSTSGGSSNDNAYLGYSTPWGYFDFNRFHCHFSPRDWQRLINNNWGFRPKRLNFKLFNIQVKEVTDNNGVKTIANNLTSTVQVFTDSDYQLPYVLGSAHEGCLPPFPADVFTIPQYGYLTLNDGSQAVGRSSFYCLEYFPSQMLRTGNNFQFSYEFENVPFHSSYAHSQSLDRLMNPLIDQYLYYLSKTINGSGQNQQTLKFSVAGPSNMAVQGRNYIPGPSYRQQRVSTTVTQNNNSEFAWPGASSWALNGRNSLMNPGPAMASHKEGEDRFFPLSGSLIFGKQGTGRDNVDADKVMITNEEEIKTTNPVATESYGQVATNHQSAQAQAQTGWVQNQGILPGMVWQDRDVYLQGPIWAKIPHTDGNFHPSPLMGGFGMKHPPPQILIKNTPVPADPPTAFNKDKLNSFITQYSTGQVSVEIEWELQKENSKRWNPEIQYTSNYYKSNNVEFAVNTEGVYSEPRPIGPRYLTRNF

SEQ ID NO: 718 - protein, 736 aa, synthetic construct
  source 1..736: note = Description of Artificial Sequence: Synthetic polypeptide
MAADGYLPDWLEDNLSEGIREWWALKPGAPQPKANQQHQDNARGLVLPGYKYLGPGNGLDKGEPVNAADAAALEHNKAYDQQLKAGDNPYLKCNHADAEFQERLKEDTSFGGNLGRAVFQAKKRLLEPLGLVEEAAKTAPGKKRPVEQSPQEPDSSAGIGKSGAQPAKKRLNFGQTGDTESVPDPQPIGEPPAAPSGVRSLTMASGGGAPVADNNEGADGVGSSSGNWHCDSQWLGDRVITTSTRTWALPTYNNHLYKQISNSTSGGSSNDNAYLGYSTPWGYFDFNRFHCHFSPRDWQRLINNNWGFRPKRLNFKLFNIQVKEVTDNNGVKTIANNLTSTVQVFTDSDYQLPYVLGSAHEGCLPPFPADVFMIPQYGYLTLNDGSQAVGRSSFYCLEYFPSQMLRTGNNFQFSYEFENVPFHSSYAHSQSLDRLMNPLIDQYLYYLSKTINGSGQNQQTLKFSVAGPSNMAVQGRNYIPGPSYRQQRVSTTVTQNNNSEFAWPGASSWALNGRNSLMNPGPAMASHKEGEDRFFPLSGSLIFGKQGTGRDNVDADKVMITNEEEIKTTNPVATESYGQVATNHQSAQAQAQTGWVQNQGILPGMVWQDRDVYLQGPIWAKIPHTDGNFHPSPLMGGFGMKHPPPQILIKNTPVPADPPTAFNKDKLNSFITQYSTGQVSVEIEWELQKENSKRWNPEIQYTSNYYKSNNVEFAVNTEGVYSEPRPIGTRYLTRNL

SEQ ID NO: 719 - protein, 736 aa, synthetic construct
  source 1..736: note = Description of Artificial Sequence: Synthetic polypeptide
MAADGYLPDWLEDNLSEGIREWWALKPGAPQPKANQQHQDNARGLVLPGYKYLGPGNGLDKGEPVNAADAAALEHDKAYDQQLKAGDNPYLKCNHADAEFQERLKEDTSFGGNLGRAVFQAKKRLLEPLGLVEEAAKTAPGKKRPVEQSPQEPDSSAGIGKSGAQPAKKRLNFGQTGDTESVPDPQPIGEPPAAPSGVGSLTMASGGGAPVADNNEGADGVGSSSGNWHCDSQWLGDRVITTSTRTWALPTYNNHLYKQISNSTSGGSSNDNAYLGYSTPWGYFDFNRFHCHFSPRDWQRLINNNWGFRPKRLNFELFNIQVKEVTDNNGVKTIANNLTSTVQVFTDSDYQLPYVLGSAHEGCLPPFPADVFMIPQYGYLTLNDGSQAVGRSSFYCLEYFPSQMLRTGNNFQSSYEFENVPFHSSYAHSQSLDRLMNPLIDQYLYYLSKTINGSGQNQQTLKFSVAGPSNMAVQGRNYIPGPSYRQQRASTTVTQNNNSEFAWPGASSWALNGRNSLMNPGPAMASHKEGEDRFFPLSGSLIFGKQGTGRDNVDADKVMITNEEEIKTTNPVATESYGQVATNHQSAQAQAQTGWVQNQGILPGMVWQDRDVYLQGPIWAKIPHTDGNFHPSPLMGGFGMKHPPPQILIKNTPVPADPPTAFNKDKLNSFITQYSTGQVSVEIEWELQKENSKRWNPEIQYTSNYYKSNNVEFAVNTEGVYSEPRPIGTRYLTRNL

SEQ ID NO: 720 - protein, 736 aa, synthetic construct
  source 1..736: note = Description of Artificial Sequence: Synthetic polypeptide
MAADGYLPDWLEDNLSEGIREWWALKPGAPQPKANQQHQDNARGLVLPGYKYLGPGNGLDKGEPVNAADAAALEHDKAYDQQLKAGDNPYLKCNHADAEFQERLKEDTSFGGNLGRAVFQAKKRLLEPLGLVEEAAKTAPGKKRPVEQSPQEPDSSAGIGKSGAQPAKKRLNFGQTGDTESVPDPQPIGEPPAAPPGVGSLTMASGGGAPVADNNEGADGVGSSSGNWHCDSQWLGDRVITTSTRTWALPTYNNHLYKQISNSTSGGSSNDNAYLGYSTPWGYFDFNRFHCHFSPRDWQRLINNNWGFRPKRLNFKLFNIQVKEVTDNNGVKTIANNLTSTVQVFTDSDYQLPYVLGSAHEGCLPPFPADVFMIPQYGYLTLNDGSQAVGRSSFYCLEYFPSQMLRTGNNFQFSYEFENVPFHSSYAHSQSLDRLMNPLIDQYLYYLSKTISGSGQNQQTLKFSVAGPSNMAVQGRNYIPGPSYRQQRVSTTVTQNNSSEFAWPGASSWALNGRNSLMNPGPAMASHKEGEDRFFPLSGSLIFGKQGTGRDNVDADKVMITNEEEIKTTNPVATESYGQVATNHQSAQAQAQTGWVQNQGILSGMVWQDRDVYLQGPIWAKIPHTDGNFHPSPLMGGFGMKHPPPQILIKNTPVPADPPTAFNKDKLNSFITQYSTGQVSVEIEWELQKENSKRWNPEIQYTSNYYKSNNVEFAVNTEGVYSEPRPIGTRYLTRNL

SEQ ID NO: 721 - protein, 736 aa, synthetic construct
  source 1..736: note = Description of Artificial Sequence: Synthetic polypeptide
MAADGYLPDWLEDNLSEGIREWWALKPGAPQPKANQQHQDNARGLVLPGYKYLGPGNGLDKGEPVNAADAAALEHDKAYDQQLKAGDNPYLKCNHADAEFQERLKEDTSFGGNLGRAVFQAKKRLLEPLGLVEEAAKTAPGKKRPVEQSPQEPDSSAGIGKSGAQPAKKRLNFGQTGDTESVPDPQPIGEPPAAPSGVGSLTMASGGGAPVADNNEGADGVGSSSGNWHCDSQWLGDRVITTSTRTWALPTYNNHLYKQISNSTSGGSSNDNAYLGYSTPWGYFDFNRFHCHFSPRDWQRLINNNWGFRPKRLNFKLFNIQVKEVTDNNGVKTIANNLTSTVQVFTDSDYQLPYVLGSAHEGCLPPFPADVFMIPQYGYLTLNDGSQAVGRSSFYCLEYFPSQMLRTGNNFQFSYEFENVPFHSSYAHSQSLDRLMNPLIDQYLYYLSKTINGSGQNQQTLKFSVAGPSNMAVQGRNYIPGPSYRQQRVSTTVTQNNNSEFAWPGASSWALNGRNSLMNPGPAMASHKEGEDRFFPLSGSLIFGKQGTGRDNVDADKVMITNEEEIKTTNPVATESYGQVATNHQSAQAQAQTGWVQNQGILPGMVWQDRDVYLQGPIWAKIPHTDGNFHPSPLMGGFGMKHPPPQILIKNTPVPADPPTAFNKDKLNSFITQYSTGQVSVEIEWELQKENSKRWNPEIQYTSNYYKSNNVEFAVNTEGVYSEPRPIGTRYLTRNL

SEQ ID NO: 722 - protein, 736 aa, synthetic construct; identical to SEQ ID NO: 721
  source 1..736: note = Description of Artificial Sequence: Synthetic polypeptide

SEQ ID NO: 723 - protein, 736 aa, synthetic construct
  source 1..736: note = Description of Artificial Sequence: Synthetic polypeptide
MAADGYLPDWLEDNLSEGIREWWALKPGAPQPKANQQHQDNARGLVLPGYKYLGPGNGLDKGEPVNAADAAALEHDKAYDQQLKAGDNPYLKCNHADAEFQERLKEDTSFGGNLGRAVFQAKKRLLEPLGLVEEAAKTAPGKKRPVEQSPQEPDSSAGIGKSGAQPAKKRLNFGQTGDTESVPDPQPIGEPPAAPSGVGSLTMASGGGAPVADNNEGADGVGSSSGNWHCDSQWLGDRVITTSTRTWALPTYNNHLYKQISNSTSGGSSNDNAYLDYSTPWGYFDFNRFHCHFSPRDWQRLINNNWGFRPKRLNFKLFNIQVKEVTDNNGVKTIANNLTSTVQVFTDSDYQLPYVLGSAHEGCLPPFPADVFMIPQYGYLTLNDGSQAVGRSSFYCLEYFPSQMLRTGNNFQFSYEFENVPFHSSYAHSQSLDRLMNPLIDQYLYYLSKTINGSGQNQQTLKFSVAGPSNMAVQGRNYIPGPSYRQQRVSTTVTQNNNSEFAWPGASSWALNGRNSLMNPGPAMASHKEGEDRFFPLSGSLIFGKQGTGRDNVDADKVMITNEEEIKTTNPVATESYGQVATNHQSAQAQAQTGWVQNQGILPGMVWQGRDVYLQGPIWAKIPHTDGNFHPSPLMGGFGMKHPPPQILIKNTPVPADPPTAFNKDKLNSFITQYSTGQVSVEIEWELQKENSKRWNPEIQYTSNYYKSNNVEFAVNTEGVYSEPRPIGTRYLTRNL

SEQ ID NO: 724 - protein, 736 aa, synthetic construct; identical to SEQ ID NO: 721
  source 1..736: note = Description of Artificial Sequence: Synthetic polypeptide

SEQ ID NO: 725 - protein, 736 aa, synthetic construct
  source 1..736: note = Description of Artificial Sequence: Synthetic polypeptide
MAADGYPPDWLEDNLSEGIREWWALKPGAPQPKANQQHQDNARGLVLPGYKYLGPGNGLDKGEPVNAADAAALEHDKAYDQQLKAGDNPHLKYNHADAEFQERLKEDTSFGGNLGRAVFQAKKRLLEPLGLVEEAAKTAPGKKRPVEQSPQEPDSSAGIGKSGAQPAKKRLNFGQTGDTESVPDPQPIGEPPAAPSGVGSLTMASGGGAPVADNNEGADGVGSSSGNWHCDSQWLGDRVITTSTRTWALPTYNNHLYKQISNSTSGGSSNDNAYFGYSTPWGYFDFNRFHCHFSPRDWQRLINNNWGFRPKRLNFKLFNIQVKEVTDNNGVKTIANNLTSTVQVFTDSDYQLPYVLGSAHEGCLPPFPADVFMIPQYGYLTLNDGSQAVGRSSFYCLEYFPSQMLRTGNNFQFSYEFENVPFHSSYAHSQSLDRLMNPLIDQYLYYLSKTINGSGQNQQTLKFSVAGPSNMAVQGRNYIPGPSYRQQRVSTTVTQNNNSEFAWPGASSWALNGRNSLMNPGPAMASHKEGEDRFFPLSGSLIFGKQGTGRDNVDADKVMITNEEEIKTTNPVATESYGQVATNHQSAQAQAQTGWVQNQGILPGMVWQDRDVYLQGPIWAKIPHTDGNFHPSPLMGGFGVKHPPPQILIKNTPVPADPPTAFNKDRLNSFITQYSTGQVSVEIEWELQKENSKRWNPEIQYTSNYYKSNNVEFAVNTEGVYSEPRPIGTRYLTRNL

SEQ ID NO: 726 - protein, 736 aa, synthetic construct
  source 1..736: note = Description of Artificial Sequence: Synthetic polypeptide
MAADGYLPDWLEDNLSEGIREWWALKPGAPQPKANQQHQDNARGLVLPGYKYLGPGNGLDKGEPVNAADAAALEHDKAYDQQLKAGDNPYLKYNHADAEFQERLKEDTSFGGNLGRAVFQAKKRLLEPLGLVEEAAKTAPGKKRPVEQSPQEPDSSAGIGKSGAQPAKKRLNFGQTGDTESVPDPQPIGEPPAAPSGVGSLTMASGGGAPVADNNEGADGVGSSSGNWHCDSQWLGDRVITTSTRTWALPTYNNHLYKQISNSTSGGSSNDNAYFGYSTPWGYFDFNRFHCHFSPRDWQRLINNNWGFRPKRLNFKLFNIQVKEVTDNNGVKTIANNLTSTVQVFTDSDYQLPYVLGSAHEGCLPPFPADVFMIPQYGYLTLNDGSQAVGRSSFYCLEYFPSQMLRTGNNFQFSYEFENVPFHSSYAHSQSLDRLMNPLIDQYLYYLSKTINGSGQNQQTLKFSVAGPSNMAVQGRNYIPGPSYRQQRVSTTVTQNNNSEFAWPGASSWALNGRNSLMNPGPAMASHKEGEDRFFPLSGSLIFGKQGTGRDNVDADKVMITNEEEIKTTNPVATESYGQVATNHQSAQAQAQTGWVQNQGILPGMVWQDRDVYLQGPIWAKIPHTDGNFHPSPLMGGFGVKHPPPQILIKNTPVPADPPTAFNKDKLNSFITQYSTGQVSVEIEWELQKENSKRWNPEIQYTSNYYKSNNVEFAVNTEGVYSEPRPIGTRYLTRNL

SEQ ID NO: 727 - protein, 736 aa, synthetic construct
  source 1..736: note = Description of Artificial Sequence: Synthetic polypeptide
MAADGYLPDWLEDNLSEGIREWWALKPGAPQPKANQQHQDNARGLVLPGYKYLGPGNGLDKGEPVNAADAAALEHDKAYDQQLKAGDNPYLKYNHADAEFQERLKEDTSFGGNLGRAVFQAKKRLLEPLGLVEEAAKTAPGKKRPVEQSPQEPDSSAGIGKSGAQPAKKRLNFGQTGDTESVPDPQPIGEPPAAPSGVGSLTMASGGGAPVADNNEGADGVGSSSGNWHCDSQWLGDRVITTSTRTWALPTYNNHLYKQISNSTSGGSSNDNAYFGYSTPWGYFDFNRFHCHFSPRDWQRLTNNNWGFRPKRLNFKLFNIQVKEVTDNNGVKTIANNLTSTVQVFTDSDYQLPYVLGSAHEGCLPPFPADVFMIPQYGYLTLNDGSQAVGRSSFYCLEYIPSQMLRTGNNFQFSYEFENVPFHSSYAHSQSLDRLMNPLIDQYLYYLSKTINGSGQNQQTLKFSVAGPSNMAVQGRNYIPGPSYRQQRVSTTVTQNNNSEFAWPGASSWALNGRNSLMNPGPAMASHKEGEDRFFPLSGSLIFGKQGTGRDNVDADKVMITNEEEIKTTNPVATESYGQVATNHQSAQAQAQTGWVQNQGILPGMVWQDRDVYLQGPIWAKIPHTDGNFHPSPLMGGFGVKHPPPQILIKNTPVPADPPTAFNKDKLNSFITQYSTGQVSVEIEWELQKENSKRWNPEIQYTSNYYKSNNVEFAVNTEGVYSEPRPIGTRYLTRNL

SEQ ID NO: 728 - protein, 736 aa, synthetic construct
  source 1..736: note = Description of Artificial Sequence: Synthetic polypeptide
MAADGYLPDWLEDNLSEGIREWWALKPGAPQPKANQQHQDNARGLVLPGYKYLGPGNGLDKGEPVNAADAAALEHDKAYDQQLKAGDNPYLKYNHADAEFQERLKEDTSFGGNLGRAVFQAKKRLLEPLGLVEEAAKTAPGKKRPVEQSPQEPDSSAGIGKSGAQPAKKRLNFGQTGDTESVPDPQPIGEPPAAPSGVGSLTMASGGGAPVADNNEGADGVGSSSGNWHCDSQWLGDRVITTSTRTWALPTYNNHLYKQISNSTSGGSSNDNAYFGYSTPWGYFDFNRFHCHFSPRDWQRLINNNWGFRPKRLNFKLFNIQVKEVTDNNGVKTIANNLTSTVQVFTDSDYQLPYVLGSAHEGCLPPFPADVFMIPQYGYLTLNDGSQAVGRSSFYCLEYFPSQMLRTGNNFQFSYEFENVPFHSSYAHSQSLDRLMNPLIDQYLYYLSKTINGSGQNQQTLKFSVAGPSNMAVQGRNYIPGPSYRQQRVSTTVTQNNNSEFAWPGASSWALNGRNSLMNPGPAMASHKEGEDRFFPLSGSLISGKQGTGRDNVDANKVMITNEEEIKTTNPVATESYGQVATNHQSAQAQAQTGWVQNQGILPGMVWQDRDVYLQGPIWAKIPHTDGNFHPSPLMGGFEMKHPPPQILIKNTPVPADPPTAFNKDKLNSFITQYSTGQVSVEIEWELQKENSKRWNPEIQYTSNYYKSNNVEFAVNTEGVYSEPRPIGTRYLTRNL

SEQ ID NO: 729 - protein, 736 aa, synthetic construct
  source 1..736: note = Description of Artificial Sequence: Synthetic polypeptide
MAADGYLPDWLEDNLSEGIREWWALKPGAPQPKANQQHQDNARGLVLPGYKYLGPGNGLDKGEPVNAADAAALEHDKAYDQQLKAGDNPYLKYNHADAEFQERLKEDTSFGGNLGRAVFQAKKRLLEPLGLVEEAAKTAPGKKRPVEQSPQEPDSSAGIGKSGAQPAKKRLNFGQTGDTESVPDPQPIGEPPAAPSGVGSLTIASGGGAPVADNNEGADGVGSSSGNWHCDSQWLGDRVITTSTRTWALPTYNNHLYKRISNSTSGGSSNDNAYFGYSTPWGYFDFNRFHCHFSPRDWQRLINNNWGFRPKRLNFKLFNIRVKEVTDNNGVKTITNNLTSTVQVFTDSDYQLPYVLGSAHEGCLPPFPADVFMIPQYGYLTLNDGSQAVGRSSFYCLEYFPSQMLRTGNNFQFSYEFENVPFHSSYAHSQSLDRLMNPLIDQYLYYLSKTINGSGQNQQTLKFSVAGPSNMAVQGRNYIPGPSYRQQRVSTTVTRNNNSEFAWPGASSWALNGRNSLMNPGPAMASHKEGEDRFFPLSGSLIFGKQGTGRDNVDADKVMITNEEEIKTTNPVATESYGQVATNHQSAQAQAQTGWVQNQGILPGMVWQDRDVYLQGPIWAKIPHTDGNFHPSPLMGGFGVKHPPPQILIKNTPVPADPPTAFNKDKLNSFITQYSTGQVSVEIEWELQKENSKRWNPEIQYTSNYYKSNNVEFAVNTEGVYSEPRPIGTRYLTRNL

SEQ ID NO: 730 - protein, 736 aa, synthetic construct
  source 1..736: note = Description of Artificial Sequence: Synthetic polypeptide
MAADGYLPDWLEDNLSEGIREWWALKPGAPQPKANQQHQDNARGLVLPGYKYLGPGNGLDKGEPVNAADAAALEHDKAYDQQLKAGDNPYLKYNHADAEFQERLKEDTSFGGNLGRAVFQAKKRLLEPLGLVEEAAKTAPGKKRPVEQSPQEPDSSAGIGKSGAQPAKKRLNFGQTGDTEPVPDPQPIGEPPAAPSGVGSLTMASGGGAPVADNNEGADGVGSSSGNWHCDSQWLGDRVITTSTRTWALPTYNNHLYKQISNSTSGGSSNDNAYFGYSTPWGYFDFNRFHCHFSPRDWQRLINNNWGFRPKRLNFKLFNIQVKEVTDNNGVKTIANNLTSTVQVFTDSDYQLPYVLGSAHEGCLPPFPAGVFMIPQYGYLTLNDGSQAVGRSSFYCLEYFPSQMLRTGNNFQFSYEFENVPFHSSYAHSQSLDRLMNPLIDQYLYYLSKTINGSGQNQQTLKFSVAGPSNMAVQGRNYIPGPSYRQQRVSTTATQNNNSEFAWPGASSWALNGRNSLMNPGPAMASHKEGEDRFFPLSGSLIFGKQGTGRDNVDADKVMITNEEEIKTTNPVATESYGQVATNHQSAQAQAQTGWVQNQGILPGMVWQDRDVYLQGPIWAKIPHTDGNFHPSPLMGGFGMKHPPPQILIKNTPVPADPPTAFNKDKLNSFITQYSTGQVSVEIEWELQKENSKRWNPEIQYTSNYYKSNNVEFAVNTEGVYSEPRPIGTRYLTRNL

SEQ ID NO: 731 - protein, 736 aa, synthetic construct
  source 1..736: note = Description of Artificial Sequence: Synthetic polypeptide
MAADGYLPDWLEDNLSEGIREWWALKPGAPQPKANQQHQDNARGLVLPGYKYLGPGNGLDKGEPVNAADAAALEHDKAYDQQLKAGDNPYLKYNHADAGFQERLKEDTSFGGNLGRAVFQAKKRLLEPLGLVEEAAKTAPGKKRPVEQSPQEPDSSAGIGKSGAQPAKKRLNFGQTGDTESVPVPQPIGEPPAAPSGVGSLTMASGGGAPVADNNEGADGVGSSSGNWHCDSQWLGDRVITTSTRTWALPTYNNHLYKQISNSTSGGSSNDNAYFGYSTPWGYFDFNRFHCHFSPRDWQRLINNNWGFRPKRLNFKLFNIQVKEVTDNNGVKTIANNLTSTVQVFTDSDYQLPYVLGSAHEGCLPPFPADVFMIPQYGYLTLNDGSQAVGRSSFYCLEYFPSQMLRTGNNFQFSYEFENVPFHSSYAHSQSLDRLMNPLIDQYLYYLSKTINGSGQNQQTLKFSVAGPSNMAVQGRNYIPGPSYRQQRVSTTVTQNNNSEFAWPGASSWALNGRNSLMNPGPAMASHKEGEDRFFPLSGSLIFGKQGAGRDNVDADKVMITNEEEIKTTNPVATESYGQVATNHQSAQAQAQTGWVQNQGILPGMVWQDRDVYLQGPIWAKIPHTDGNFHPSPLMGGFGMKHPPPQILIKNTPVPADPPTAFNKDKLNSFITQYSTGQVSVEIEWELQKENSKRWNPEIQYTSNYYKSNNVEFAVNTEGVYSEPRPIGTRYLTRNL

SEQ ID NO: 732 - protein, 736 aa, synthetic construct
  source 1..736: note = Description of Artificial Sequence: Synthetic polypeptide
  VARIANT 126: note = MOD_RES - Xaa = any amino acid
MAADGYLPDWLEDNLSEGIRERWALKPGAPQPKANQQHQDNARGLVLPGYKYLGPGNGLDKGEPVNAADAAALEHDKAYDQQLKAGDNPYLKYNHADAEFQERLKEDTSFGGNLGRAVFQAKKRLXEPLGLVEEAAKTAPGKKRPVEQSPQEPDSSAGIGKSGAQPAKKRLNFGQTGDTESVPDPQPIGEPPAAPSGVGSLTMASGGGAPVADNNEGADGVGSSSGNWHCDSQWLGDRVITTSTRTWALPTYNNHLYKQISNSTSGGSSNDNAYFGYSTPWGYFDFNRFHCHFSPRDWQRLINNNWGFRPKRLNFKLFNIQVKEVTDNNGVKTIANNLTSTVQVFTDSDYQLPYVLGSAHEGCLPPFPADVFMIPQYGYLTLNDGSQAVGRSSFYCLEYFPSQMLRTGNNFQFSYEFENVPFHSSYAHSQSPDRLMNPLIDQYLYYLSKTINGSGQNQQTLKFSVAGPSNMAVQGRNYIPGPSYRQQRVSTTVTQNNNSEFAWPGASSWALNGRNSLMNPGPAMASHKEGEDRFFPLSGSLIFGKQGTGRDNVDADKVMITNEEEIKTTNPVATESYGQVATNHQSAQAQAQTGWVQNQGILPGMVWQDRDVYLQGPIWAKIPHTDGNFHPSPLMGGFGVKHPPPQILIKNTPVPADPPTAFNKDKLNSFITQYSTGQVSVEIEWELQKENSKRWNPEIQYTSNYYKSNNVEFAVNTEGVYSEPRPIGTRYLTRNL

SEQ ID NO: 733 - protein, 736 aa, synthetic construct
  source 1..736: note = Description of Artificial Sequence: Synthetic polypeptide
MAADGYLPDWLEDNLSEGIREWWALKPGAPQPKANQQHQDNARGLVLPGYKYLGPGNGLDKGEPVNAADAAALEHDKAYDQQLKAGDNPYLKYNHADAEFQERLKEDTSFGGNLGRAVFQAKKRLLEPLGLVEEAAKTAPGKKRPVEQSPQEPDSSAGIGKSGAQPAKKRLNFGQTGDTESVPDPQPIGEPPAAPSGVGSLTMASGGGAPVADNNEGADGVGSSSGNWHCDSQWLGDRVITTSTRTWALPTYNNHLYKQISNSTSGGSSNDNAYLGYSTPWGYFDFNRFHCHFSPRDWQRLINNNWGFRPKRLNFKLFNIQVKEVTDNNGVKTIANNLTSTVQVFTDSDYQLPYVLGSAHEGCLPPFPADVFMIPQYGYLTLNDGSQAVGRSSFYCLEYFPSQMLRTGNNFQFSYEFENVPFHSSYAHSQSLDRLMNPLIDQYLYYLSKTINGSGQNQQTLKFSVAGPSNMAVQGRNYIPGPSYRQQRVSTTVTQNNNSEFAWPGASSWALNGRNSLMNPGPAMASHKEGEDRFFPLSGSLIFGKQGTGRDNVDADKVMITNEEEIKTTNPVATESYGQVATNHQSAQAQAQTGWVQNQGILPGMVWQDRDVYLQGPIWAKIPHTDGNFHPSPLMGGFGMKHPPPQILIKNTPVPADPPTAFNKDKLNSFITQYSTGQVSVEIEWELQKENSKRWNPEIQYTSNYYKSNNVEFAVNTEGVYSEPRPIGTRYLTRNL

SEQ ID NO: 734 - protein, 736 aa, synthetic construct
  source 1..736: note = Description of Artificial Sequence: Synthetic polypeptide
MAADGYLPDWLEDNLSEGIREWWALKPGAPQPKANQQHQDNARGLVLPGYKYLGPGNGLDKGEPVNAADAAALEHDKAYDQQLKAGDNPYLKYNHADAEFQERLKEDTSFGGNLGRAVFQAKKRLLEPLGLVEEAAKTAPGKKRPVEQSPQEPDSSAGIGKSGAQPAKKRLNFGQTGDTESVPDPQPIGEPPAAPSGVGSLTMASGGGAPVADNNEGADGVGSSSGNWHCDSQWLGDRVITTSTRTWALPTYNNHLYKQISNSTSGGSSNDNAYFGYSTPWGYFDFNRFHCHFSPRDWQRLINNNWGFRPKRLNFKLFNIQVKEVTDNNGVKTIANNLTSTVQVFTDSDYQLPYVLGSAHEGCLPPFPADVFMIPQYGYLTLNDGSQAVGRSSFYCLEYFPSQMLRTGNNFQFSYEFENVPFHSSYAHSQSLDRLMNPLIDQYLYYLSKTINGSGQNQQTLKFSVAGPSNMAVQGRNYIPGPSYRQQRVSTTVTQNNNSEFAWPGASSWALNGRNSLMNPGPAMASHKEGEDRFFPLSGSLIFGKQGTGRDNVDADKVMITNEEEIKTTNPVATESYGQVATNHQSAQAQAQTGWVQNQGILPGMVWQDRDVYLQGPIWAKIPHTDGNFHPSPLMGGFGMKHPPPQILIKNTPVPADPPTAFNKDKLDSFITQYSTGQVSVEIEWELQKENSKRWNPVIQYTSNYYKSNNVEFAVNTEGVYSEPRPIGTRYLTRNL

SEQ ID NO: 735 - protein, 736 aa, synthetic construct
  source 1..736: note = Description of Artificial Sequence: Synthetic polypeptide
MAADGYLPDWLEDNLSEGIREWWDLKPGAPKPKANQQKQDDGRGLVLPGYKYLGPFNGLDKGEPVNAADAAALEHDKAYDQQLKAGDNPYLRYNHADAEFQERLQEDTSFGGNLGRAVFQAKKRVLEPLGLVEEGAKTAPGKKRPVEQSPQEPDSSSGIGKTGQQPAKKRLNFGQTGDSESVPDPQPLGEPPATPAAVGPTTMASGGGAPMADNNEGVDGVGNASGNWHCDSTWLGDRVITTSTRTWALPTYNNHLYKQISSASTGASNDNHYFGYSTPWGYFDFNRFHCHFSPRDWQRLINNNWGFRPKRLNFKLFNIQVKEVTTNDGVTTIANNLTSTVQVFSDSEYQLPYVLGSAHQGCLPPFPADVFMIPQYGYLTLNNGSQAVGRSSFYCLEYFPSQMLRTGNNFTFSYTFEEVPFHSSYAHSQSLDRLMNPLIDQYLYYLNRTQNQSGSAQNKDLLFSRGSPAGMSVQPKNWLPGPCYRQQRVSKTKTDNNNSNFTWTGASKYNLNGRESIINPGTAMASHKDDEDKFFPMSGVMIFGKESAGASNTALDNVMITDEEEIKATNPVATERFGTVAVNFQSSSTDPATGDVHAMGALPGMVWQDRDVYLQGPIWAKIPHTDGHFHPSPLMGGFGLKNPPPQILIKNTPVPANPPAEFSATKLASFITQYSTGQVSVEIEWELQKENSKRWNPEVQYTSNYAKSANVDFTVDNNGLYTEPRPIGTRYLTRPL

SEQ ID NO: 736 - protein, 736 aa, synthetic construct
  source 1..736: note = Description of Artificial Sequence: Synthetic polypeptide
MAADGYLPDWLEDNLSEGIREWWDLKPGAPKPKANQQKQDDGRGLVLPGYKYLGPFNGLDKGEPVNAADAAALEHDKAYDQQLKAGDNPYLRYNHADAEFQERLQEDTSFGGNLGRAVFQAKKRVLEPLGLVEEGAKTAPGKRRPVEQSPQEPDSSSGIGKTGQQPAKKRLNFGQTGDSESVPDPQPLGEPPATPAAVGPTTMASGGGAPMADNNEGADGVGNASGNWHCDSTWLGDRVITTSTRTWALPTYNNHLYKQISSASTGASNDNHYFGYSTPWGYFDFNRFHCHFSPRDWQRLINNNWGFRPKRLNFKLFNIQVKEVTTNDGVTTIANNLTSTVQVFSDSEYQLPYVLGSAHQGCLPPFPADVFMIPQYGYLTLNNGSQAVGRSSFYCLEYFPSQMLRTGNNFTFSYTFEEVPFHSSYAHSQSLDRLMNPLIDQYLYYLNRTQNQSGSAQNKDLLFSRGSPAGMSVQPKNWLPGPCYRQQRVSKTKTDNNNSNFTWTGASKYNLNGRESIINPGTAMASHKDDEDKFFPMSGVMIFGKESAGASNTALDNVMITDEEEIKATNPVATERFGTVAVNFQSSSTDPATGDVHAMGALPGMVWQDRDVYLQGPIWAKIPHTDGHFHPSPLMGGFGLKNPPPQILIKNTPVPANPPAEFSATKFASFITQYSTGQVSVEIEWELQKENSKRWNPEVQYTSNYAKSANVDFTVDNNGLYTEPRPIGTRYLTRPL

SEQ ID NO: 737 - protein, 736 aa, synthetic construct
  source 1..736: note = Description of Artificial Sequence: Synthetic polypeptide
MAADGYLPDWLEDNLSEGIREWWDLKPGAPKPKANQQKQDDGRGLVLPGYKYLGPFNGLDKGEPVNAADAAALEHDKAYDQQLKAGDNPYPRYNHADAEFQERLQEDTSFGGNLGRAVFQAKKRVLEPLGLVGEGAKTAPGKKRPVEQSPQEPDSSSGIGKTGQQPAKKRLNFGQTGDSESVPDPQPLGEPPATPAAVGPTTMASGGGAPMADNNEGADGVGNASGNWHCDSTWLGDRVITTSTRTWALPTYNNHLYKQISSASTGASNDNHYFGYSTPWGYFDFNRFHCHFSPRDWQRLINNNWGFRPKRLNFKLFNIQVKEVTTNDGVTTIANNLTSTVQVFSDSEYQLPYVLGSAHQGCLPPFPADVFMIPQYGYLTLNNGSQAVGRSSFYCLEYFPSQMLRTGNNFTFSYTFEEVPFHSSYAHSQSLDRLMNPPIDQYLYYLNRTQNQSGSAQNKDLLFSRGSPAGMSVQPKNWLPGPCYRQQRVSKTKTDNNNSNFTWTGASKYNLNGRESIINPGTAMASHKDDEDKFFPMSGVMIFGKESAGASNTALDNVMITDEEEIKATNPVATERFGTVAVNFQSSSTDPATGDVHAMGALPGMVWQDRDVYLQGPIWAKIPHTDGHFHPSPLMGGFGLKNPPPQILIKNTPVPANPPAEFSATKFASFITQYSTGQVSVEIEWELQKENSKRWNPEVQYTSNYAKSANVDFTVDNNGLYTEPRPIGTRYLTRPL

SEQ ID NO: 738 - protein, 736 aa, synthetic construct
  source 1..736: note = Description of Artificial Sequence: Synthetic polypeptide
MAADGYLPDWLEDNLSEGIREWWDLKPGAPKPKANQQKQDDGRGLVLPGYKYLGPFNGLDKGEPVNAADAAALEHDKAYDQQLKAGDNPYLRYNHADAEFQERLQEDTSFGGNLGRAVFQAKKRVLEPLGLVEEGAKTAPGKKRPVEQSPQEPDSSSGIGKTGQQPAKKRLNFGQTGDSESVPDPRPLGEPPATPAAVGPTTMASGGGAPMADNNEGADGVGNASGNWHCDSTWLGDRVITTSTRTWALPTYNNHLYKQISSASTGASNDNHYFGYSTPWGYFDFNRFHCHFSPRDWQRLINNNWGFRPKRLNFKLFNIQVKEVTTNDGVTTIANNLTSTVQVFSDSEYQLPYVLGSAHQGCLPPFPADVFMIPQYGYLTLNNGSQAVGRSSFYCLEYFPSQMLRTGNNFTFSYTFEEVPFHSSYAHSQSLDRLMNPLIDQYLYYLNRTQNQSGSAQNKDLLFSRGPPAGMSVQPKNWLPGPCYRQQRVSKTKTDNNNSNFTWTGASKYNLNGRESIINPGTAMASHKDDEDKFFPMSGVMIFGKESAGASNTALDNVMITDEEEIKATNPVATERFGTVAVNFQSSSTDPATGDVHAMGALPGMVWQDRDVYLQGPIWAKIPHTDGHFHPSPLMGGFGLKNPPPQILIKNTPVPANPPAEFSATKFASFITQYSTGQVSVEIEWELQKENSKRWNPEVQYTSNYAKSANVDFTVDNNGLYTEPRPIGTRYLTRPL

SEQ ID NO: 739 - protein, 736 aa, synthetic construct
  source 1..736: note = Description of Artificial Sequence: Synthetic polypeptide
MAADGYLPDWLEDNLSEGIREWWDLKPGAPKPKANQQKQDDGRGLVLPGYKYLGPFNGLDKGEPVNAADAAALEHDKAYDQQLKAGDNPYLRYNHADAEFQERLQEDTSFGGNLGRAVFQAKKRVLEPLGLVEEGAKTAPGKKRPVEQSPQEPDSSSGIGKTGQQPAKKRLNFGQTGGSESVPDPQPLGEPPATPAAVGPTTMASGGGAPMADNNEGADGVGNASGNWHCDSTWLGDRVITTSTRTWALPTYNNHLYKQISSASTGASNDNHYFGYSTPWGYFDFNRFHCHFSPRDWQRLINNNWGFRPKRLNFKLFNIQVKEVTTNDGVTTIANNLTSTVQVFSDSEYQLPYVLGSAHQGCLPPFPADVFMIPQYGYLTLNNGSQAVGRSSFYCLEYFPSQMLRTGNNFTFSYTFEEVPFHSSYAHSQSLDRLMNPPIDQYLYYLNRTQNQSGSAQNKDLLFSRGSPAGMSVQPKNWLPGPCYRQQRVSKTKTDNNNSNFTWTGASKYNLNGRESIINPGTAMASHKDDEDKFFPMSGVMIFGKESAGASNTALDNVMITDEEEIKATNPVATERFGTVAVNFQSSSTDPATGDVHAMGALPGMVWQDRDVYLQGPIWAKIPHTDGHFHPSPLMGGFGLKNPPPQILIKNTPVPANPPAEFSATKFASFITQYSTGQVSVEIEWELQKENSKRWNPEVQYTSNYAKSANVDFTVDNNGLYTEPRPIGTRYLTRPL

SEQ ID NO: 740 - protein, 736 aa, synthetic construct
  source 1..736: note = Description of Artificial Sequence: Synthetic polypeptide
MAADGYLPDWLEDNLSEGIREWWDLKPGAPKPKANQQKQDDGRGLVLPGYKYLGPFNGLDKGEPVNAADAAALEHDKAYDQQLKAGDNPYLRYNHADAEFQERLQEDTSFGGNLGRAVFQAKKRVLEPLGLVEEGAKTAPGKKRPVEQSPQEPDSSSGIGKTGQQPAKKRLNFGQTGDSESVPDPQPLGEPPATPAAVGPTTMASGGGAPMADNNEGADGVGNASGNWHCDSTWLGDRVITTSTRTWALPTYNNHLYKQISSASTGASNDNHYFGYSTPWGYFDFNRFHCHFSPRDWQRLINNNWGFRPKRLNFKLFNIQVKEVTTNDGVTTIANNLTSTVQVFSDSEYQLPYVLGSAHQGCLPPFPADVFMIPQYGYLTLNNGSQAVGRSSFYCLEYFPSQMLRTGNNFTFSYTFEEVPFHSSYAHSQSLDRLMNPLIDQYLYYLNRTQNQSGSAQNKDLLFSRGSPAGMSVQPKNWLPGPCYRQQRVSKTKTDNNNSNFTWTGASKYNLNGRESIINPGTAVASHKDDEDKFFPMSGVMIFGKESAGASNTALDNVMITDEEEIKATNPVATERFGTVAVNFQSSSTDPATGDVHAMGALPGMVWQDRDVYLQGPIWAKIPHTDGHFHPSPLMGGFGLKNPPPQILIKNTPVPANPPAEFSATKFASFITQYSTGQVSVEIEWELQKENSKRWNPEVQYTSNYAKSANVDFTVDNNGLYTEPRPIGTRYLTRPL

SEQ ID NO: 741 - protein, 736 aa, synthetic construct
  source 1..736: note = Description of Artificial Sequence: Synthetic polypeptide
MAADGYLPDWLEDNLSEGIREWWDLKPGAPKPKANQQKQDDGRGLVLPGYKYLGPFNGLDKGEPVNAADAAALEHDKAYDQQLKAGDNPYLRYNHADAEFQERLQEDTSFGGNLGRAVFQAKKRVLEPLGLVEEGAKTAPGKKRPVEQSPQEPDSSSGIGKTGQQPAKKRLNFGQTGDSESVPDPQPLGEPPATPAAVGPTTMASGGGAPMADNNEGADGVGNASGNWHCDSTWLGDRVITTSTRTWALPTYNNHLYKQISSASTGASNDNHYFGYSTPWGYFDFNRFHCHFSPRDWQQLINNNWGFRPKRLNFKLFNIQVKEVTTNDGVTTIANNLTSTVQVFSDSEYQLPYVLGSAHQGCLPPFPADVFMIPQYGYLTLNNGSQAVGRSSFYCLEYFPSQMLRTGNNFTFSYTFEEVPFHSSYAHSQSLDRLMNPLIDQYLYYLNRTQNQSGSAQNKDLLFSRGSPAGMSVQPKNWLPGPCYRQQRVSKTKTDNNNSNFTWTGASKYNLNGRESIINPGTAMASHKDDEDKFFPMSGVMIFGKESAGASNTALDNVMITDEEEIKATNPVATERFGTVAVNFQSTSTDPATGDVHAMGALPGMVWQDRDVYLQGPIWAKIPHTDGHFHPSPLMGGFGLKNPPPQILIKNTPVPANPPAEFSATKFASFITQYSTGQVSVEIEWELQKENSKRWNPEVQYTSNYAKSADVDFTVDNNGLYTEPRPIGTRYLTRPL

SEQ ID NO: 742 - protein, 736 aa, synthetic construct
  source 1..736: note = Description of Artificial Sequence: Synthetic polypeptide
MAADGYLPDWLEDNLSEGIREWWDLKPGAPKPKANQQKQDDGRGLVLPGYKYLGPFNGLDKGEPVNAADAAALEHDKAYDQQLKAGDNPYLRYNHADAEFQERLQEDTSFGGNLGRAVFQAKKRVLEPLGLVEEGAKTAPGKKRPVEQSPQEPDSSSGIGKTGQQPAKKRLNFGQTGDSESVPDPQPLGEPPATPAAVGPTTMASGGGAPMADNNEGADGVGNASGNWHCDSTWLGDRVITTSTRTWALPTYNNHLYKQISSASTGASNDNHYFGYSTPWGYFDFNRFHCHFSPRDWQRLINNNWGFRPKRLNFKLFNIQVKEVTTNDGVTTIANNLTSTVQVFSDSEYQPPYVLGSAHQGCLPPFPADVFMIPQYGHLTLNNGSQAVGRSSFYCLEYFPSQMLRTGNNFTFSYTFEEVPFHSSYAHSQSLDRLTNPLIDQYLYYLNRTQNQSGSAQNKDLLFSRGSPAGMSVQPKNWLPGPCYRQQRVSKTKTDNNNSNFTWTGASKYNLNGRESIINPGTAMASHKDDEDKFFPMSGVMIFGKESAGASNTALDNVMITDEEEIKATNPVATERFGTVAVNFQSSSTDPATGDVHAMGALPGMVWQDRDVYLQGPIWAKIPHTDGHFHPSPLMGGFGLKNPPPQILIKNTPVPANPPAEFSATKFASFITQYSTGQVSVEIEWELQKENSKRWNPEVQYTSNYAKSANVDFTVDNNGLYTEPRPIGTRYLTRPL

SEQ ID NO: 743 - protein, 736 aa, synthetic construct
  source 1..736: note = Description of Artificial Sequence: Synthetic polypeptide
MAADGYLPDWLEDNLSEGIREWWDLKPGAPKPKANQQEQDDGRGLVLPGYKYLGPFNGLDKGEPVNAADAAALEHDKAYDQQLKAGDNPYLRYNHADAEFQERLQEDTSFGGNLGRAVFQAKKRVLEPLGLVEEGAKTAPGKKRPVEQSPQEPDSSSGIGKTGQQPAKKRLNFGQTGDSESVPDPQPLGEPPATPAAVGPTTMASGGGAPMADNNEGADGVGNASGNWHCDSTWLGDRVITTSTRTWALPTYNNHLYKQISSASTGASNDNHYFGYSTPWGYFDFNRFHCHFSPRDWQRLINNNWGFRPKRLNFKLFNIQVKEVTTNDGVTTIANNLTSTVQVFSDSEYQLPYVLGSAHQGCLPPFPADVFMIPQYGYLTLNNGSQAVGRSSFYCLEYFPSQMLRTGNNFTFSYTFEEVPFHSSYAHSQSLDRLMNPLIDQYLYYLNRTQNQSGSAQNKDLLFSRGSPAGMSVQPKNWLPGPCYRQQRVSKTKTDNNNSNFTWTGASKYNLNGRESIINPGTAMASHKDDEDKFFPMSGVMIFGKESAGASNTALDNVMITDEEEIKATNPVATERFGTVAVNFQSSSTDPATGDVHATGTLPGMVWQDRDVYLQGPIWAKIPHTDGHFHPSPLMGGFGLKNPPPQILIKTTPVPANPPAEFSATKFASFITQYSTGQVSVEIEWELQKENSKRWNPEVQYTSNYAKSANVDFTVDDNGLYTEPRPIGTRYLTRPL

SEQ ID NO: 744 - protein, 736 aa, synthetic construct
  source 1..736: note = Description of Artificial Sequence: Synthetic polypeptide
MAADGYLPDWLEDNLSEGIREWWDLKPGAPKPKANQQKQDDGRGLVLPGYKYLGPFNGLDKGEPVNAADAAALEHDKAYDQQLKAGDNPYLRYNHADAEFQERLQEDTSFGGNLGRAVFQAKKRVLEPLGLVEEGAKTAPGKKRPVEQSLQEPDSSSGIGKTGQQPAKKRLNFGQTGDSESVPDPQPLGEPPATPAAVGPTTMASGGGAPMADNNEGADGVGNASGNWHCDSTWLGDRVITTSTRTWALPTYNNHLYKQISSASTGASNDNHYFGYSTPWGYFDFNRFHCHFSPRDWQRLINNNWGFRPKRLNFKLFNIQVKEVTTNDGVTTIANNLTSTVQVFSDSEYQLPYVLGSAHQGCLPPFPADVFMIPQYGYLTLNNGSQAVGRSSFYCLEYFPSQMLRTGNNFTFSYTFEEVPFHSSYAHSQSLDRLMNPLIDQYLYYLNRTQNQSGSAQNKDLLFSRGSPAGMSVQPKNWLPGPCYRQQRVSKTKTDNDNSNFTWTGASKYNLNGRESIINPGTAMASHKDDEDKFFPMSGVMIFGKESAGASNTALDNVMITDEEEIKATNPVATERFGTVAVNFQSSSTDPATGDVHAMGALPGMVWQDRDVYLQGPIWAKIPHTDGHFHPSPLMGGFGLKNPPPQILIKNTPVPANPPAEFSATKFASFITQYSTGQVSVEIEWELQKENSKRWNPEVQYTSNYAKSANVDFTVDNNGLYTEPRPIGTRYLTRPL

SEQ ID NO: 745 - protein, 736 aa, synthetic construct
  source 1..736: note = Description of Artificial Sequence: Synthetic polypeptide
MAADGYLPDWLEDNLSEGIREWWDLKPGAPKPKANQQKQDDGRGLVLPGYKYLGPFNGLDKGEPVNAADAAALEHDKAYDQQLKAGDNPYLRYNHADAEFQERLQEDTSFGGNLGRAVFQAKKRVLEPLGLVEEGAKTAPGKKRPVEQSPQEPDSSSGIGKTGQQPAKKRLNFGQTGDSESVPDPQPLGEPPATPAAVGPTTMASGGGAPMADNNEGADGVGNASGNWHCDSTWLGDRVITTSTRTWALPTYNNHLYKQISSASTGASNDNHYFGYSTPWGYFDFNRFHCHFSPRDWQRLINNNWGFRPKRLNFKLFNIQVKEVTTNDGVTTIANNLTSTVQVFSDSEYQLPYVLGSAHQGCLPPFPADVFMIPQYGYLTLNNGSQAVGRSSFYCLEYFPSQMLRTGNNFTFSYTFEEAPFHSSYAHSQSLDRLMNPLIDQYLYYLNRTQNQSGSAQNKDLLFSRGSPAGMSVQPKNWLPGPCYRQQRVSKTKTDNNNSNFTWTGASKYNLNGRESIINPGTAMASHKDDEDKFFPMSGVMIFGKESAGASNTALDNVMITDEEEIKATNPVATERFGTVAVNFQSSSTDPATGDVHAMGALPGMVWQDRDVYLQGPIWAKIPHTDGHFHPSPLMGGFGLKNPPPQILIKNTPVPANPPAEFSATKFASFITQYSTGQVSVEIEWELQKENSKRWNPEVQYTSNYAKSANVDFTVDNNGLYTEPRPVGTRYLTRPL

SEQ ID NO: 746 - protein, 736 aa, synthetic construct
  source 1..736: note = Description of Artificial Sequence: Synthetic polypeptide
MAADGYLPDWLEDNLSEGIREWWDLKPGAPKPKANQQKQDDGRGLVLPGYKYLGPFNGLDKGEPVNAADAAALEHDKAYDQQLKAGDNPYLRYNHADAEFQERLQENTSFGGNLGRAVFQAKKRVLEPLGLVEEGAKTAPGKKRPVEQSPQEPDSSSGIGKTGQQPAKKRLNFGQTGDSESVPDPQPLGEPPATPAAVGPTTMASGGGAPMADNNEGADGVGNASGNWHCDSTWLGDRVITTSTRTWALPTYNNHLYKQISSASTGASNDNHYFGYSTPWGYFDFNRFHCHFPPRDWQRLINNNWGFRPKRLNFKLFNIQVKEVTSNDGVTTIANNLTSTVQVFSDSEYQLPYVLGSAHQGCLPPFPADVFMIPQYGYLTLNNGSQAVGRSSFYCLEYFPSQMLRTGNNFTFSYTFEEVPFHSSYAHSQSLDRLMNPLIDQYLYYLNRTQNQSGSAQNKDLLFSRGSPAGMSVQPKNWLPGPCYRQQRVSKTKTDNNNSNFTWTGASKYNLNGRESIINPGTAMASHKDDEDKFFPMSGVMIFGKESAGASNTALDNVMITDEEEIKATNPVATERFGTVAVNFQSSSTDPATGDVHAMGALPGMVWQDRDVYLQGPIWAKIPHTDGHFHPSPLMGGFGLKNPPPQILIKNTPVPANPPAEFSATKFASFITQYSTGQVSVEIEWELQKENSKRWNPEVQYTSNYAKSANVDFTVDNNGLYTEPRPIGTRYLTRPL

SEQ ID NO: 747 - protein, 736 aa, synthetic construct
  source 1..736: note = Description of Artificial Sequence: Synthetic polypeptide
MAADGYLPDWLEDNLSEGIREWWDLKPGAPKPKANQQKQDDGRGLVLPGYKYLGPFNGLDKGEPVNAADAAALEHDKAYDQQLKAGDNPYLRYNHADAEFQERLQEDTSFGGNLGRAVFQAKKRVLEPLGLVEEGAKTAPGKKRPVEQSPQEPDSSSGIGKTGQQPAKKRLNFGQTGDSESVPDPQPLGEPPATPAAVGPTTMASGGGAPMADNNEGADGVGNASGNWHCDSTWLGDRVITTSTRTWALPTYNNHLYKQISSASTGASNDNHYFGYSTPWGYFDFNRFHCHFSPRDWQRLINNNWGFRPKRLNFKLFNIQVKEVTTNDGVTTIANNLTSTVQVFSDSEYQLPYVLGSAHQGCLPPFPADVFMIPQYGYLTLNNGSQAVGRSSFYCLEYFPSQMLRTGNNFTFSYTFEEVPFHSSYAHSQSLDRLMNPLIDQYLYYLNRTQNQSGSAQNKDLLFSRGSPAGTSVQPKNWLPGPCYRQQRVSKTKTDNNNSNFTWTGASKYNLNGRESIINPGTAMASHKDDEDKFFPMSGVMIFGKESAGASNTALDNVMITDEEEIKATNPVATERFGTVAVNFQSSSTDPATGDVHAMGALPGMVWQDRDVYLQGPIWAKIPHTDGHFHPSPLMGGFGLKNPPPQILIKNTPVPANPPAEFSATKFASFITQYSTGQVSVEIEWELQKENSKRWNPEVQYTSNYAKSANVDFTVDNNGLYTGPRPIGTRYLTRPL

SEQ ID NO: 748 - protein, 736 aa, synthetic construct
  source 1..736: note = Description of Artificial Sequence: Synthetic polypeptide
MAADGYLPDWLEDNLSEGIREWWDLKPGAPKPKANQQKQDDGRGLVLPGYKYLGPFNGLDKGEPVNAADAAALEHDKAYDQQLKAGDNPYLRYNHADAEFQERLQEDTSFGGNLGRAVFQAKKRVLEPLGLVEEGAKTAPGKKRPVEQSPQEPDSSSGIGKTGQQPAKKRLNFGQTGDSESVPDPQPLGEPPATPAAVGPTTMASGGGAPMADNNEGADGVGNAPGNWHCDSTWLGDRVITTSTRTWALPTYNNHLYKQISSASTGASNDNHYFGYSTPWGYFDFNRFHCHFSPRDWQRLINNNWGFRPKRLNFKLFNIQVKEVTTNDGVTTIANNLTSTVQVFSDSEYQLPYVLGSAHQGCLPPFPADVFMIPQYGYLTLNNGSQAVGRSSFYCLEYFPSQMLRTGNNFTFSYTFEEVPFHSSYAHSQSLDRLMNPLIDQYLYYLNRTQNQSGSAQNKDLLFSRGSPAGMSVQPKNWLPGPCYRQQRVSKTKTDNNNSNFTWTGASKYNLNGRESIINPGTAMASHKDDEDKFFPMSGVMIFGKESAGASNTALDNVMITGEEEIKATNPVATERFGTVAVNFQSSSTDPATGDVHAMGALPGMVWQDRDVYLQGPIWAKIPHTDGHFHPSPLMGGFGLKNPPPQILIKNTPVPANPPAEFSATKFASFITQYSTGQVSVEIEWELQKENSKRWNPEVQYTSNYAKSANVDFTVDNNGLYTEPRPIGTRYLTRPL

SEQ ID NO: 749 - protein, 736 aa, synthetic construct
  source 1..736: note = Description of Artificial Sequence: Synthetic polypeptide
MAADGYLPDWLEDNLSEGIREWWDLKPGAPKPKANQQKQDDGRGLVLPGYKYLGPFNRLDKGEPVNAADAAALEHDKAYDQQLKAGDNPYLRYNHADAEFQERLQEDTSFGGNLGRAVFQAKKRVLEPLGLVEEGAKTAPGRKRPVEQSPQEPDSSSGIGKTGQQPAKKRLNFGQTGDSESVPDPQPLGEPPATPAAVGPTTMASGGGAPMADNNEGADGVGNASGNWHCDSTWLGDRVITTSTRTWALPTYNNHLYKQISSASTGASNDNHYFGYSTPWGYFDFNRFHCHFSPRDWQRLINNNWGFRPKRLNFKLFNIQVKEVTTNDGVTTIANNLTSTVQVFSDSEYQLPYVLGSAHQGCLPPFPADVFMIPQYGYLTLNNGGQAVGRSSFYCLEYFPSQMLRTGNNFTFSYTFEEVPFHSSYAHSQSLDRLMNPLIDQYLYYLNRTQNQSGSAQNKDLLFSRGSPAGMSVQPKNWLPGPCYRQQRVSKTKTDNNNSNFTWTGASKYSLNGRESIINPGTAMASHKDDEDKFFPMGGVMIFGKESAGASNTALDNAMITDEEEIKATNPVATERFGTVAVNFQSSSTDPATGDVHAMGALPGMVWQDRDVYLQGPIWAKIPHTDGHFHPSPLMGGFGLKNPPPQILIKNTPVPANPPAEFSATKFASFITQYSTGQVSVEIEWELQKENSKRWNPEVQYTSNYAKSANVDFTVDNNGLYTEPRPIGTRYLTRPL

SEQ ID NO: 750 - protein, 736 aa, synthetic construct
  source 1..736: note = Description of Artificial Sequence: Synthetic polypeptide
MAADGYLPDWLEDNLSEGIREWWDLKPGAPKPKANQQKQDDGRGLVLPGYKYLGPFNGLDKGEPVNAADAAALEHDKAYDQQLKAGDNPYLRYNHADAEFQERLQEDTSFGGNLGRAVFQAKKRVLEPLGLVEEGAKTAPGKKRPVEQSPQEPDSSSGIGKTGQQPAKKRLNFGQTGDSESVPDPQPLGEPPATPAAVGPTTMASGGGAPMADNNEGADGVGNASGNWHCDSTWLGGRVITTSTRTWALPTYNNHLYKQISSASTGASNDNHYFGYSTPWGYFDFNRFHCHFSPRDWQRLINNNWGFRPKRLNFKLFNIQVKEVTTNDGVTTIANNLTSTVQVFSDSEYQLPYVLGSAHQGCLPPFPADVFMIPQYGYLTLNNGSQAVGRSSFYCLEYFPSQMLRTGNNSTFSYTFEEVPFHSSYAHSQSLDRLMNPLIDQYLYYLNRTQNQSGSAQNKDLLFSRGSPAGMSVQPKNWLPGPCYRQQRVSKTKTDNNNSNFTWTGASKYNLNGRESIINPGTAMASHKDDEDKFFPMSGVMIFGKESAGASNTALDNVMITDEEEIKATNPVATERFGTVAVNFQSSSTDPATGDVHAMGTLPGMVWQDRDVYLQGPIWAKIPHTDGHFHPSPLMGGFGLKNPPPQILIKNTPVPANPPAEFSATKFASFITQYSTGQVSVEIEWELQKENSKRWNPEVQYTSNYAKSANVDFTVDNNGLYTEPRPIGTRYLTRPL

SEQ ID NO: 751 - protein, 736 aa, synthetic construct
  source 1..736: note = Description of Artificial Sequence: Synthetic polypeptide
MAADGYLPDWLEDNLSEGIREWWDLKPGAPKPKANQQKQDDGRGLVLPGYKYLGPFNGLDKGEPVSAADAAALEHDKAYDQQLKAGDNPYLRYNHADAEFQERLQEDTSFGGNLGRAVFQAKKRVLEPLGLVEEGAKTAPGKKRPVEQSPQEPDSSSGIGKTGQQPAKERLNFGQTGDSESVPDPQPLGEPPATPAAVGPTTMASGGGAPMADNNEGADGVGNASGNWHCDSTWLGDRVITTSTRTWALPTYNNHLYKQISSASTGASNDNHYFGYSTPWGYFDFNRFHCHFSPRDWQRLINNNWGFRPKRLNFKLFNIQVKEVTTNDGVTTIANNLTSTVQVFSDSEYQLPYVLGSAHQGCLPPFPADVFMIPQYGYLTLNNGSQAVGRSSFYCLEYFPSQMLRTGNNFTFSYTFEEVPFHSSYAHSQSLDRLMNPLIDQYLYYLNRTQNQSGSAQNKDLLFSRGSPAGMSVQPKNWLPGPCYRQQRVSKTKTDNNNSNFTWTGASKYNLNGRESIINPGTAMASHKDDEDKFFPMSGVMIFGKESAGASNTALDNVMITDEEEIKATNPVATERFGTVAVNFQSSSTDPATGDVHAMGALPGMVWQDRDVYLQGPIWAKIPHTDGHFHPSPLMGGFGLKNPPPQILIKNTPVPANPPAEFSATKFASFITQYSTGQVSVEIEWELQKENSKRWNPEVQYTSNYAKSANVDFTVDNNGLYTEPRPIGTRYLTRPL

SEQ ID NO: 752 - protein, 736 aa, synthetic construct
  source 1..736: note = Description of Artificial Sequence: Synthetic polypeptide
MAADGYLPDWLEDNLSEGIREWWDLKPGAPKPKANQQKQDDGRGLVLPGYKYLGPFNGLDKGEPVNAADAAALEHDKAYDQQLKAGDNPYLRYNHADAEFQERLQEDTSFGGNLGRAVFQAKKRVLEPLGLVEEGAKTAPGKKRPVEQSPQEPDSSSGIGKTGQQPAKKRLNFGQTGDSESVPDPQPLGEPPATPAAVGPTTMASGGGAPMADNNEGADGVGNASGNWHCDSTWLGDRVITTSTRTWALPTYNNHLYKQISSASTGASNDNHYFGYSTPWGYFDFNRFHCHFSPRDWQRLINNNWGFRPKRLNFKLFNIQVKEVTTNDGVTTIANNLTSTVQVFSDSEYQLPYVLGSAHQGCLPPFPADVFMIPQYGYLTLNNGSQAVGRSSFYCLEYFPSQMLRTGNNFTFSYTFEEVPFHSSYAHSQSLDRLMNPLIDQYLYYLNRTQNQSGSAQNKDLLFSRGSPAGMSVQPKNWLPGPCYRQQRVSKTKTDNNNSNFTWTGASKYNLNGRESIINPGTAMASHKDDEDKFFPMSGVMIFGKESAGASNTALDNVMITDEGEIKATNPVATERFGTVAVNFQSSSTDPATGDVHAMGALPGMVWQDRDVYLQGPIWAKIPHTDGHFHPSPLMGGFGLKNPPPQILIKNTPVPANPPAEFSATKFASFITQYSTGQVSVEIEWELQKENSKRWNPEVQYTSNYAKSANVDFTVDNNGLYTEPRPIGTRYLTRPL

SEQ ID NO: 753 - protein, 736 aa, synthetic construct
  source 1..736: note = Description of Artificial Sequence: Synthetic polypeptide
MAADGYLPDWLEDNLSEGIREWWDLKPGAPKPKANQQKQDDGRGLVLPGYKYLGPFNGLDKGEPVNAADAAALEHDKAYDQQLKAGDNPYLRYNHADAEFQERLQEDTSFGGNLGRAVFQAKKRVLEPFGLVEEGAKTAPGKKRPVEQSPQEPDSSSGIGKTGQQPAKKRLNFGQTGDSESVPDPQPLGEPPATPAAVGPTTMASGGGAPMADNNEGADGVGNASGNWHCDSTWLGDRVITTSTRTWALPTYNNHLYKQISSASTGASNDNHYFGYSTPWGYFDFNRFHCHFSPRDWQRLINNNWGFRPKRLNFKLFNIQVKEVTTNDGVTTIANNLTSTVQVFSDSEYQLPYVLGSAHQGCLPPFPADVFMIPQYGYLTLNNGSQAVGRSSFYCPEYFPSQMLRTGNNFTFSYTFEEVPFHSSYAHSQSLDRLMNPLIDQYLYYLNRTQNQSGSAQNKDLLFSRGSPAGMSVQPKNWLPGPCYRQQRVSKTKTDNNNSNFTWTGASKYNLNGRESIINPGTAMASHKDDKDKFFPMSGVMIFGKESAGASNTALDNVMITDEEEIKATNPVATERFGTVAVNFQSSNTDPATGDVHVMGALPGMVWQDRDVYLQGPIWAKIPHTDGHFHPSPLMGGFGLKHPPPQILIKNTPVPANPPAEFSATKFASFITQYSTGQVSVEIEWELQKENSKRWNPEVQYTSNYAKSANVDFTVDNNGLYTEPRPIGTRYLTRPL

SEQ ID NO: 754 - protein, 736 aa, synthetic construct
  source 1..736: note = Description of Artificial Sequence: Synthetic polypeptide
MAADGYLPDWLEDNLSEGIREWWDLKPGAPKPKANQQKQDDGRGLVLPGYKYLGPFNGLDKGEPVNAADAAALEHDKAYDQQLKAGDNPYLRYNHADAEFQERLQEDTSFGGNLGRAVFQAKKRVLEPFGLVEEGAKTAPGKKRPVEQSPQEPDSSSGIGKTGQQPAKKRLNFGQTGDSESVPDPQPLGEPPATPAAVGPTTMASGGGAPMADNNEGADGVGNASGNWHCDSTWLGDRVITTSTRTWALPTYNNHLYKQISSASTGASNDNHYFGYSTPWGYFDFNRFHCHFSPRDWQRLINNNWGFRPKRLNFKLFNIQVKEVTTNDGVTTIANNLTSTVQVFSDSEYQLPYVLGSAHQGCLPPFPADVFMIPQYGYLTLNNGSQAVGRSSFYCLEYFPSQMLRTGNNFTFSYTFEEVPFHSSYAHSQSLDRLMNPLIDQYLYYLNRTQNQSGSAQNKDLLFSRGSPAGMSVQPKNWLPGPCYRQQRVSKTKTDNNNSNFTWTGASKYNLNGRESIINPGTAMASHKDDKDKFFPMSGVMIFGKESAGASNTALDNVMITDEEEIKATNPVATERFGTVAVNFQSSDTDPATGDVHVMGALPGMVWQDRDVYLQGPIWAKIPHTDGHFHPSPLMGGFGLKHPPPQILIKNTPVPANPPAEFSATKFASFITQYSTGQVSVEIEWELQKENSKRWNPEVQYTSNYAKSANVDFTVDNNGLYTEPRPIGTRYLTRPL

SEQ ID NO: 755 - protein, 736 aa, synthetic construct
  source 1..736: note = Description of Artificial Sequence: Synthetic polypeptide
MAADGYLPDWLEDNLSEGIREWWDLKPGAPKPKANQQKQGDGRGLVLPGYKYLGPFNGLDKGEPVNAADAAALEHDKAYDQQLKAGDNPYLRYNHADAEFQERLQEDTSFGGNLGRAVFQAKKRVLEPFGLVEEGAKTAPGKKRPVEQSPQEPDSSSGIGKTGQQPAKKRLNFGQTGDSESVPDPQPLGEPPATPAAVGPTTMASGGGAPMADNNEGADGVGNASGNWHCDSTWLGDRVITTNTRTWALPTYNNHLYKQISSASTGASNDNHYFGYSTPWGYFDFNRFHCHFSPRDWQRLINNNWGFRPKRLNFKLFNIQVKEVTTNDGVTTIANNLTSTVQVFSDSEYQLPYVLGSAHQGCLPPFPADVFMIPQYGYLTLNNGSQAVGRSSFYCLEYFPSQMLRTGNNFTFSYTFEEVPFHSSYGHSQSLDRLMNLLIDQYLYYLNRTQNQSGSAQNKDLLFSRGSPAGMFVQPKNWLPGPCYRQQRVSKTKTDNNNSNFTWTGASKYNLNGRESIINPGTAMASHKDDEDKFFPMSGVMIFGKESAGASNTALDNVMITDEEEIKATNPVATERFGTVAVNFQSSSTDPATGDVHVMGALPGMVWQDRDVYLQGPIWAKIPHTDGHFHPSPLMGGFGLKHPPPQILIKNTPVPANPPAEFSATKFASFITQYSTGQVSVEIEWELQKENSKRWNPEVQYTSNYAKSANVDFTVDNNGLYTEPRPIGTRYLTRPL

SEQ ID NO: 756 - protein, 736 aa, synthetic construct
  source 1..736: note = Description of Artificial Sequence: Synthetic polypeptide
MAADGYLPDWLEDNLSEGIREWWDLKPGAPKPKANQQKQDDGRGLVLPGYKYLGPFNGLDKGEPVNAADAAALEHDKAYDQQLKAGDNPYLRYNHADAEFQERLQEDTSFGGNLGRAVFQAKKRVLEPFGLVEEGAKTAPGKKRPVEQSPQEPDSSSGIGKTGQQPAKKRLNFGQTGDSESVPDPQPLGEPPATPAAVGPTTMASGGGAPMADNNEGADGVGNASGNWHCDSTWLGDRVITTNTRTWALPTYNNHLYKQISSASTGASNDNHYFGYSTPWGYFDFNRFHCHFSPRDWQRLINNNWGFRPKRLNFKLFNIQVKEVTTNDGVTTIANNLTSTVQVFSDSEYQLPYVLGSAHQGCLPPFPADVFMIPQYGYLMLNNGSQAVGRSSFYCLEYFPSQMLRTGNNFTFSYTFEEVPFHSSYAHSQSLDRLMNPLIDQYLYYLNRTQNQSGSAQNKDLLFSRGSPAGMSVQPKNWLPGPCYRQQRVSKTKTDNNNSNFTWTGASKYNLNGRESIINPGTAMASHKDDEDKFFPMSGVMIFGKESAGASNTALDNVMITDEEEIKATNPAATERFGTVAVNFQSSSTDPATGDVHVMGALPGMVWQDRDVYLQGPIWAKIPHTDGHFHPSPLMGGFGLKHPPPQILIKNTPVPANPPAEFSATKFASFITQYSTGQVSVEIEWELQKENSKRWNPEVQYTSNYAKSANVDFTVDNNGLYTEPRPIGTRYLTRPL

SEQ ID NO: 757 - protein, 736 aa, synthetic construct
  source 1..736: note = Description of Artificial Sequence: Synthetic polypeptide
MAADGYLPDWLEDNLSEGIREWWDLKPGAPKPKANQQKQDDGRGLVLPGYKYLGPFNGLDKGEPVNAADAAALEHDKAYDQQLKAGDNPYLRYNHADAEFQERLQEDTSFGGNLGRAVFQAKKRVLEPFGLVEEGAKTAPGKKRPVEQSPQEPDSSSGIGKTGQQPAKKRLNFGQTGDSESVPDPQPLGEPPATPAAVGPTTMASGGGAPMADNNEGADGVGNASGNWHCDSTWLGDRVITTSTRTWALPTYNNHLYKQISSASTGASNDNHYFGYSTPWGYFDFNRFHCHFSPRDWQRLINNNWGFRPKRLNFKLFNIQVKEVTTNDGVTTIANNLTSTVQVFSDSEYQLPYVLGSAHQGCLPPFPADVFMIPQYGYLTLNNGSQAVGRSSFYCLEYFPSQMLRTGNNFTFSYTFEEVPFHSSYAHSQSLDRLMNPLIDQYLYYLNRTQNQSGSAQNKDLLFSRGSPAGMSVQPKNWLPGPCYRQQRVSKTKTDNNNSNFTWTGASKYNLNGRESIINPGTAMASHKDDEDKFFPMSGVMIFGKESAGASNTALDNVMITDEEEIKATNPVATERFGTVAVNFQSSSTDPATGDVHVMGALPGMVWQDRDVYLQGPIWAKIPHTDGHFHPSPLMGGFGLKHPPPQILIKNTPVPANPPAEFSATKFASFITQYSTGQVSVEIEWELQKENSKRWNPEVQYTSNYAKSANVDFTVDNNGLYTEPRPIGTRYLTRPL

SEQ ID NO: 758 - protein, 736 aa, synthetic construct
  source 1..736: note = Description of Artificial Sequence: Synthetic polypeptide
  VARIANT 102: note = MOD_RES - Xaa = any amino acid
MAADGYLPDWLEDNLSEGIREWWDLKPGAPKPKANQQKQDDGRGLVLPGYKYLGPFNGLDKGEPVNAADAAALEHDKAYDQQLKAGDNPYLRYNHADAEFQXRLQEDTSFGGNLGRAVFQAKKRVLEPFGLVEEGAKTAPGKKRPVEQSPQEPDSSSGIGKTGQQPAKKRLNFGQTGDSESVPDPQPLGEPPATPAAVGPTTMASGGGAPMADNNEGADGVGNASGNWHCDSTWLGGRVITTSTRTWALPTYNNHLYKQISSASTGASNDNHYFGHSTPWGYFDFNRFHCHFSPRDWQRLINNNWGFRPKRLNFKLFNIQVKEVTTNDGVTTIANNLTSTVQVFSDSEYQLPYVLGSAHQGCLPPSPADVFMIPQYGYLTLNNGSQAVGRSSFYCLEYFPSQMLRTGNNFTFSYTFEEVPFHSSYAHSQSLDRLMNPLIDQYLYYLNRTQNQSGSAQNKDLLFSRGSPAGMSVQPKNWLPGPCYRQQRVSKTKTDNNNSNFTWTGASKYNLNGRESIINPGTAMASHKDDKDKFFPMSGVMIFGKESAGASNTALDNVMITDEEEIKATNPVATERFGTVAVNFQSSNTDPATGDVHVMGALPGMVWQDRDVYLQGPIWAKIPHTDGHFHPSPLMGGFGLKHPPPQILIKNTPVPANPPAEFSATKFASFITQYSTGQVSVEIEWELQKENSKRWNPEVQYTSNYAKSANVDFTVDNNGLYTEPRPIGTRYLTRPL

SEQ ID NO: 759 - protein, 736 aa, synthetic construct
  source 1..736: note = Description of Artificial Sequence: Synthetic polypeptide
MAADGYFPDWLEDNLSEGIREWWDLKPGAPKPKANQQKQDDGRGLVLPGYKYLGPFNGLDKGEPVNAADAAALEHDKAYDQQLKAGDNPYLRYNHADAEFQERLQEDTSFGGNLGRAVFQAKKRVLEPFGLVEEGAKTAPGKKRPVEQSPQEPDSSSGIGRTGQQPAKKRLNFGQTGDSESVPDPQPLGEPPATPAAVGPTTMASGGGAPMADNNEGADGVGNASGNWHCDSTWLGDRVITTSTRTWALPTYNNHLYKQISSASTGASNDNHYFGYSTPWGYFDFNRFHCHFSPRDWQRLINNNWGFRPKRLNFKLFNIQVKEVTTNDGVTTIANNLTSTVQVFSDSEYQLPYVLGSAHQGCLPPFPADVFMIPQYGYLTLNNGSQAVGRSSFYCLEYFPSQMLRTGNNFTFSYTFEEVPFHSSYAHSQSLDRLMNPLIDQYLYYLNRTQNQSGSAQNKDLLFSRGSPAGMSVQPKNWLPGPCYRQQRVSKTKTDNNNSNFTWTGASKYNLNGRESIINPGTAMASHKDDEDKFFPMSGVMIFGKESAGASNTALDNVMITDEEEIKATNPVATERFGTVAVNFQSSSPDPATGDVHVMGALPGMVWQDRDVYLQGPIWAKIPHTDGHFHPSPLMGGFGLKHPPPQILIKNTPVPANPPAEFSATKFASFITQYSTGQVSVEIEWELQKENSKRWNPEVQYTSNYAKSANVDFTVDNNGLYSEPRPIGTRYLTRPL

SEQ ID NO: 760 - protein, 736 aa, synthetic construct
  source 1..736: note = Description of Artificial Sequence: Synthetic polypeptide
MAADGYLPDWLEDNLSEGIREWWDLKPGAPKPKANQQKQDDGRGLVLPGYKYLGPFNGLDKGEPVNAADAAALEHDKAYDQQLKAGDNPYLRYNHADAEFQERLQEDTSFGGNLGRAVFQAKKRVLEPFGLVEEGAKTAPGKKRPVEQSPQEPDSSSGIGKTGQQPAKKRLNFGQTGDSESVPDPQPLGEPPATPAAVGPTTMASGGGAPMADNNEGADGVGNASGNWHCDSTWLGDRVITTSTRTWALPTYNNHLYKQTSSASTGASNDNHYFGYSTPWGYFDFNRFHCHFSPRDWQRLINNNWGFRPKRLNFKLFNIQVKEVTTNDGVTTIANNLTSTVQVFSDSEYQLPYVLGSAHQGCLPPFPADVFMIPQYGYLTLNNGSQAVGRSSFYCLEYFPSQMLRTGNNFTFSYTFEEVPFHSSYAHSQSLDRLMNPLIDQYLYYLNRTQNQSGSAQNKDLLFSRGSPAGMSVQPKNWLPGPCYRQQRVSKTKTDYNNSNFTWTGASKYNLNGRESIINPGTAMASHKDDEDKFFPMSGVMIFGKESAGASNTALDNVMITDEEEIKATNPVATERFGTVAVNFQSSSTDPATGDVHVMGALPGMVWQDRDVYLQGPIWAKIPHTDGHFHPSPLMGGFGLKHPPPQILIKNTPVPANPPAEFSATKFASFITQYSTGQVSVEIEWELQKENSKRWNPEVQYTSNYAKSANVDFTVDNNGLYTEPRPIGTRYLTRPL

SEQ ID NO: 761 - protein, 736 aa, synthetic construct
  source 1..736: note = Description of Artificial Sequence: Synthetic polypeptide
MAADGYPPDWLEDNLSEGIREWWDLKPGVPKPKANQQKQDDGRGLVLPGYKYLGPFNGLDKGEPVNAADAAALEHDKAYDQQLKAGDNPYLRYNHADAEFQERLQEDTSFGGNLGRAVFQAKKRVLEPFGLVEEGAKTAPGKKRPVEQSPQEPDSSSGIGKTGQQPAKKRLNFGQTGDSESVPDPQPLGEPPATPAAVGPTTMASGGGAPMADNNEGADGVGNASGNWHCDSTWLGDRVITTSTRTWALPTYNNHLYKQISSASTGASNDNHYFGYSTPWGYFDFNRFHCHFSPRDWQRLINNNWGFRPKRLNFKLFNIQVKEVTTNDGVTTIANNLTSTVQVFSDSEYQLPYVLGSAHQGCLPPFPADVFMIPQYGYLTLNNGSQAVGRSSFYCLEYFPSQMLRTGNNFTFSYTFEEVPFHSSYAHSQSLDRLMNPLIDQYLYYLNRTQNQSGSAQNKDLLFSRGSPAGMSVQPKNWLPGPCYRQQRVSKTKTDNNNSNFTWTGASKYNLNGRESIINPGTAMASHKDDEDKFFPMSGVMIFGKESAGASNTALDNVMITDEEEIKATNPVATERFGTVAVNFQSSSTDPATGDVHVMGALPGMVWQDRDVYLQGPIWAKIPHTDGHFHPSPLMGGFGLKHPPPQILIKNTPVPANPPAEFSATKFASFITQYSTGQVSVEIEWELQKENSKRWNPEVQYTSNYAKSANVDFTVDNNGLYTEPRPIGTRYLTRPL

SEQ ID NO: 762 - protein, 732 aa, synthetic construct
  source 1..732: note = Description of Artificial Sequence: Synthetic polypeptide
MAADGYLPDWLEDNLSEGIREWWDLKPGAPKPKANQQKQDDGRGLVLPGYKYLGPFNGLDKGEPVNAADAAALEHDKAYDQQLKAGDNPYLRYNHADAEFQERLQEDTSFGGNLGRAVFQAKKRVLEPFGLVEEGAKTAPGKKRPVEQSPQEPDSSSGIGKTGQQPAKKRLNFGQTGDSESVPDPQPLGEPPATPAAVGPTTMASGGGAPMADNNEGADGVGNASGNWHCDSTWLGDRVITTSTRTWALPTYNNHLYKQISSASTGASNDNHYFGYSTPWGYFDFNRFHCHFSPRDWQRLINNNWGFRPKRLNFKLFNIQVKEVTTNDGVTTIANNLTSTVQAFSDSEYQLPYVLGSAHQGCLPPFPADVFMIPQYGYLTLNNGSQAVGRSSFYCLEYFPSQMLRTGNNFTFSYTFEEVPFHSSYAHSQSLDRLMNPLIDPYLYYLNRTQNQSGSAQNKDLLFSRGSPAGMSVQPKNWLPGPCYRQQRVSKTKTDNNNSNFTWTGASKYNLNGRESIINPGTAMASHKDDEDKFFPMSGVMIFGKESAGASNTALDNVMITDEEEIKATNPVATERFGTVAVNFQSSSTDPATGDVHVMGALPGMVWQDRDVYLQGPIWAKIPHTDGHFHPSPLMGGFGLKHPPPQILIKNTPVPANPPAEFSATKFASFITQYSTGQVSVEIEWELQKENSKRWNPEVQYTSNYAKSANVDFTVDNNGLYTEPRPIGTRYL

SEQ ID NO: 763 - protein, 736 aa, synthetic construct
  source 1..736: note = Description of Artificial Sequence: Synthetic polypeptide
MAADGYLPDWLEDNLSEGIREWWDLKPGAPKPKANQQKQDDGRGLVLPGYKYLGPFNGLDKGEPVNAADAAALEHDKAYDQQLKAGDNPYLRYNHADAEFQERLQEDTSFGGNLGRAVFQAKKRVLEPFGLVEEGAKTAPGKKRPVEQSPQEPDSSSGIGKTGQQPAKKRLNFGQTGDSESVPDPQPLGEPPATPAAVGPTTMASGGGAPMADNNEGADGVGNASGNWHCDSTWLGDRVITTSTRTWALPTYNNHLYKQISSASTGASNDNHYFGYSTPWGYFDFNRFHCHFSPRDWQRLINNNWGFRPKRLNFKLFNIQVKEVTTNDGVTTIANNLTSTVQVFSDSEYQLPYVLGSAHQGCLPPFPADVFMIPQYGYLTLNNGSQAVGRSSFYCLEYFPSQMLRTGNNFTFSYTFEEVPFHSSYAHSQSLDRLMNPLIDQYLYYLNRTQNQSGSAQNKDLLFSRGSPAGMSVQPKNWLPGPCYRQQRVSKTKTDNNNSNFTWTGASKYNLNGRESIINPGTAMASHKDDEDKFFPMSGVMIFGKESAGASNTALDNVMITDEEEIKATNPVATERFGTVAVNFQSSSTDPATGDVHVMGALPGMVWQDRDVYLQGPIWAKIPHTDGHSHPSPLMGGFGLKHPPPQILIKNTPVPANPPAEFSATKFASFITQYSTGQVSVEIEWELQKENSKRWNPEVQYTSNYAKSANVDFTVDNNGLYTEPRPIGTRYLTRPL

SEQ ID NO: 764 - protein, 736 aa, synthetic construct
  source 1..736: note = Description of Artificial Sequence: Synthetic polypeptide
MAADGYLPDWLEDNLSEGIREWWDLKPGAPKPKANQQKQDDGRGLVLPGYKYLGPFNGLDKGEPVNAADAAALEHDKAYDQQLKAGDNPYLRYNHADAEFQERLQEDTSFGGNLGRAVFQAKKRVLEPFGLVEEGAKTAPGKKRPVEQSPQEPDSSSGIGKTGQQPAKKRLNFGQTGDSESVPDPQPLGEPPATPAAVGPTTMASGGGAPMADNNEGADGVGNASGNWHCDSTWLGDRVITTSTRTWALPTYNNHLYKQISSASTGASNDNHYFGYSTPWGYFDFNRFHCHFSPRDWQRLINNNWGFRPKRLNFKLFNIQVKEVTTNDGVTTIANNLTSTVQVFSDSEYQLPYVLGSAHQGCLPPFPADVFMIPQYGYLTLNNGSQAVGRSSFYCLEYFPSQMLRTGNNFTFSYTFEEVPFHSSYAHSQSLDRLMNPLIDLYLYYLNRTQNQSGSAQNKDLLFSRGSPAGMSVQPKNWLPGPCYRQQRVSKTKTDNNNSNFTWTGASKYNLNGRESIINPGTAMASHKDDEDKFFPMSGVMIFGKESAGTSNTALDNVMITDEEEIKATNPVATERFGTVAVNFQSSSTDPATGDVHVMGALPGMVWQDRDVYLQGPIWAKIPHTDGHFHPSPLMGGFGLKHPPPQILIKNTPVPANPPAEFSATKFASFITQYSTGQVSVEIEWELQKENSKRWNPEVQYTSNYAKSANVDFTVDNNGLYTEPRPIGTRYLTRPL

SEQ ID NO: 765 - protein, 736 aa, synthetic construct
  source 1..736: note = Description of Artificial Sequence: Synthetic polypeptide
MAADGYLPDWLEDSLSEGIREWWDLKPGAPKPKANQQKQDDGRGLVLPGYKYLGPFNGLDKGEPVNAADAAALEHDKAYDQQLKAGDNPYLRYNHADAEFQERLQEDTSFGGNLGRAVFQAKKRVLEPFGLVEEGAKTAPGKKRPVEQSPQEPDSSSGIGKTGQQPAKKRLNFGQTGDSESVPDPQPLGEPPATPAAVGPTTMASGGGAPMADNNEGADGVGNASGNWHCDSTWLGDRVITTSTRTWALPTYNNHLYKQISSASTGASNDNHYFGYSTPWGYFDFNRFHCHFSPRDWQRLINNNWGFRPKRLNFKLFNIQVKEVTTNDGVTTIANNLTSTVQVFSDSEYQLPYVLGSAHQGCLPPFPADVFMIPQYGYLTPNNGSQAVGRSSFYCLEYFPSQMLRTGNNFTFSYTFEEVPFHSSYAHSQSLDRLMNPLIDQYQYYLNRTQNQSGSAQNKDLLFSRGSPAGMSVQPKNWLPGPCYRQQRVSKTKTDNNNSNFTWTGASKYNLNGRESIINPGTAMASHKDDEDKFFPMSGVMIFGKESAGASNTALDNVMITDEEEIKATNPVATERFGTVAVNFQSSSTDPATGDVHVMGALPGMVWQDRDVYLQGPIWAKIPHTDGHFHPSPLMGGFGLKHPPPQILIKNTPVPANPPAEFSATKFASFITQYSTGQVSVEIEWELQKENSKRWNPEVQYTSNYAKSANVDFTVDNNGLYTEPRPIGTRYLTRPL

SEQ ID NO: 766 - protein, 736 aa, synthetic construct; identical to SEQ ID NO: 757
  source 1..736: note = Description of Artificial Sequence: Synthetic polypeptide

SEQ ID NO: 767 - protein, 735 aa, synthetic construct
  source 1..735: note = Description of Artificial Sequence: Synthetic polypeptide
MAADGYLPDWLEDTLSEGIRQWWKLKPGPPPPKPAERHKDDSRGLVLPGYKYLGPFNGLDKGEPVNEADAAALEHDKAYDRQLDSGDNPYLKYNHADAEFQERLKEDTSFGGNLGRAVFQAKKRVLEPLGLVEEPVKTAPGKKRPVEHSPVEPDSSSGTGKAGQQPARKRLNFGQTGDADSVPDPQPLGQPPAAPSGLGTNTMATGSGAPMADNNEGADGVGNSSGNWHCDSTWMGDRVITTSTRTWALPTYNNHLYKQISSQSGASNDNHYFGYSTPWGYFDFNRFHCHFSPRDWQRLINNNWGFRPKRLNFKLFNIQVKEVTQNDGTTTIANNLTSTVQVFTDSEYQLPYVLGSAHQGCLPPFPADVFMVPQYGYLTLNNGSQAVGRSSFYCLEYFPSQMLRTGNNFTFSYTFEDVPFHSSYAHSQSLDRLMNPLIDQYLYYLSRTNTPSGTTTQSRLQFSRAGASDIRDQSRNWLPGPCYRQQRVSKTSADNNNSEYSWTGATKYHLNGRDSLVNPGPAMASHKDDEEKFFPQSGVLIFGKQGSEKTNVDIEKVMITDEEEIRTTNPVATEQYGSVSTNLQRGNRQAATADVNTQGVLPGMVWQDRDVYLQGPIWAKIPHTDGHFHPSPLMGGFGLKHPPPQILIKNTPVPANPSTTFSAAKFASFITQYSTGQVSVEIEWELQKENSKRWNPEIQYTSNYNKSVNVDFTVDTNGVYSEPRPIGTRYLTRNL

SEQ ID NO: 768 - DNA, 2211 bp, synthetic construct
  source 1..2211: mol_type = other DNA; note = Description of Artificial Sequence: Synthetic polynucleotide
atggctgctgacggttatcttccagattggctcgaggacaacctttctgaaggcattcgtgagtggtgggctctgaaacctggagtccctcaacccaaagcgaaccaacaacaccaggacaaccgtcggggtcttgtgcttccgggttacaaatacctcggacccggtaacggactcgacaaaggagagccggtcaacgaggcggacgcggcagccctcgaacacgacaaagcttacgaccagcagctcaaggccggtgacaacccgtacctcaagtacaaccacgccgacgccgagtttcaggagcgtcttcaagaagatacgtcttttgggggcaaccttggcagagcagtcttccaggccaaaaagaggatccttgagcctcttggtctggttgaggaagcagctaaaacggctcctggaaagaagaggcctgtagatcagtctcctcaggaaccggactcatcatctggtgttggcaaatcgggcaaacagcctgccagaaaaagactaaatttcggtcagactggcgactcagagtcagtcccagaccctcaacctctcggagaaccaccagcagcccccacaagtttgggatctaatacaatggcttcaggcggtggcgcaccaatggcagacaataacgagggtgccgatggagtgggtaattcctcaggaaattggcattgcgattcccaatggctgggcgacagagtcatcaccaccagcaccagaacctgggccctgcccacttacaacaaccatctctacaagcaaatctccagccaatcaggagcttcaaacgacaaccactactttggctacagcaccccttgggggtattttgactttaacagattccactgccacttctcaccacgtgactggcagcgactcattaacaacaactggggattccggcccaagaaactcagcttcaagctcttcaacatccaagttaaagaggtcacgcagaacgatggcacgacgactattgccaataaccttaccagcacggttcaagtgtttacggactcggagtatcagctcccgtacgtgctcgggtcggcgcaccaaggctgcctcccgccgtttccagcggacgtcttcatggtccctcagtatggatacctcaccctgaacaacggaagtcaagcggtgggacgctcatccttttactgcccggagtacttcccttcgcagatgctaaggactggaaataacttccaattcagctataccttcgaggatgtaccttttcacagcagctacgctcacagccagagtttggatcgcttgatgaatcctcttattgatcagtatctgtactacctgaacagaacgcaaggaacaacctctggaacaaccaaccaatcacggctgctttttagccaggctgggcctcagtctatgtctttgcaggccagaaattggctacctgggccctgctaccggcaacagagactttcaaagactgctaacgacaacaacaacagtaactttccttggacagcggccagcaaatatcatctcaatggccgcgactcgctggtgaatccaggaccagctatggccagtcacaaggacgatgaagaaaaatttttccctatgcacggcaatctaatatttggcaaagaagggacaacggcaagtaacgcagaattagataatgtaatgattacggatgaagaagagattcgtaccaccaatcctgtggcaacagagcagtatggaactgtggcaaataacttgcagagctcaaatacagctcccacgactagaactgtcaatgatcagggggccttacctggcatggtgtggcaagatcgtgacgtgtaccttcaaggacctatctgggcaaagattcctcacacggatggacactttcatccttctcctctgatgggaggctttggactgaaacatccgcctcctcaaatcatgatcaaaaatactccggtaccggcaaatcctccgacgactttcagcccggccaagtttgcttcatttatcactcagtactccactggacaggtcagcgtggaaattgagtgggagctacagaaagaaaacagcaaacgttggaatccagagattcagtacacttccaactacaacaagtctgttaatgtggactttactgtagacactaatggtgtttatagtgaacctcaccctattggaacccggtatctcacacgaaacttgtaa

SEQ ID NO: 769 - DNA, 2211 bp, synthetic construct
  source 1..2211: mol_type = other DNA; note = Description of Artificial Sequence: Synthetic polynucleotide
atggctgctgatggttatcttccagattggctcgaggacaacctttctgaaggcattcgtgagtggtgggctctgaaacctggagtccctcaacccaaagcgaaccaacaacaccaggacaaccgtcggggtcttgtgcttccgggttacaaatacctcggacccggtaacggactcgacaaaggagagccggtcaacgaggcggacgcggcagccctcgaacacgacaaagcttacgaccagcagctcaaggccggtgacaacccgtacctcaagtacaaccacgccgacgccgagtttcaggagcgtcttcaagaagatacgtcttttgggggcaaccttggcagagcagtcttccaggccaaaaagaggatccttgagcctcttggtctggttgaggaagcagctaaaacggctcctggaaagaagaggcctgtagatcagtctcctcaggaaccggactcatcatctggtgttggcaaatcgggcaaacagcctgccagaaaaagactaaatttcggtcagactggcgactcagagtcagtcccagaccctcaacctctcggagaaccaccagcagcccccacaagtttgggatctaatacaatggcttcaggcggtggcgcaccaatggcagacaataacgagggtgccgatggagtgggtaattcctcaggaaattggcattgcgattcccaatggctgggcgacagagtcatcaccaccagcaccagaacctgggccctgcccacttacaacaaccatctctacaagcaaatctccagccaatcaggagcttcaaacgacaaccactactttggctacagcaccccttgggggtattttgactttaacagattccactgccacttctcaccacgtgactggcagcgactcattaacaacaactggggattccggcccaagaaactcagcttcaagctcttcaacatccaagttaaagaggtcacgcagaacgatggcacgacgactgttgccaataaccttaccagcacggttcaagtgtttacggactcggagtatcaactcccgtacgtgctcgggtcggcgcaccaaggctgtctcccgccgtttccagcggacgtcttcatggtccctcagtatggatacctcaccctgaacaacggaagtcaagcggtgggacgctcatccttttactgcctggagtacttcccttcgcagatgctaaggactggaaataacttccaattcagctataccttcgaggatgtaccttttcacagcagctacgctcacagccagagtttggatcgcttgatgaatcctcttattgatcagtatctgtactacctgaacagaacgcaaggaacaacctctggaacaaccaaccaatcacggctgctttttagccaggctgggcctcagtctatgtctttgcaggccagaaattggctacctgggccctgctaccggcaacagagactttcaaagactgctaacgacaacaacaacagtaactttccttggacagcggccagcaaatatcatctcaatggccgcgactcgctggtgaatccaggaccagctatggccagtcacaaggacgatgaagaaaaatttttccctatgcacggcaatctaatatttggcaaagaagggacaacggcaagtaacgcagaattagataatgtaatgattacggatgaagaagagattcgtaccaccaatcctgtggcaacagagcagtatggaactgtggcaaataacttgcagagctcaaatacagctcccacgactagaactgtcaatgatcagggggccttacctggcatggtgtggcaagatcgtgacgtgtaccttcaaggacctatctgggcaaagattcctcacacggatggacactttcatccttctcctctgatgggaggctttggactgaaacatccgcctcctcaaatcatgatcaaaaatactccggtaccggcaaatcctccgacgactttcagcccggccaagtttgcttcatttatcactcagtactccactggacaggtcagcgtggaaattgagtgggagctacagaaagaaaacagcaaacgttggaatccagagattcagtacacttccaactacaacaagtctgttaatgtggactttactgtagacactaatggtgtttatagtgaacctcgccctattggaacccggtatctcacacgaaacttgtaa

SEQ ID NO: 770 - DNA, 2211 bp, synthetic construct
  source 1..2211: mol_type = other DNA; note = Description of Artificial Sequence: Synthetic polynucleotide
atggctgctgacggttatcttccagattggctcgaggacaacctttctgaaggcattcgtgagtggtgggctctgaaacctggagtccctcaacccaaagcgaaccaacaacaccaggacaaccgtcggggtcttgtgcttccgggttacaaatacctcggacccggtaacggactcgacaaaggagagccggtcaacgaggcggacgcggcagccctcgaacacgacaaagcttacgaccagcagctcaaggccggtgacaacccgtacctcaagtacaaccacgccgacgccgagtttcaggagcgtcttcaagaagatacgtcttttgggggcaaccttggcagagcagtcttccaggccaaaaagaggatccttgagcctcttggtctggttgaggaagcagctaaaacggctcctggaaagaagaggcctgtagatcagtctcctcaggaaccggactcatcatctggtgttggcaaatcgggcaaacagcctgccagaaaaagactaaatttcggtcagactggcgactcagagtcagtcccagaccctcaacctctcggagaaccaccagcagcccccacaagtttgggatctaatacaatggcttcaggcggtggcgcaccaatggcagacaataacgagggtgccgatggagtgggtaattcctcaggaaattggcattgcgattcccaatggctgggcgacagagtcatcaccaccagcaccagaacctgggccctgcccacttacaacaaccatctctacaagcaaatctccggccaatcaggagcttcaaacgacaaccactactttggctacagcaccccttgggggtattttgactttaacagattccactgccacttctcaccacgtgactggcagcgactcattaacaacaactggggattccggcccaagaaactcagcttcaagctcttcaacatccaagttaaagaggtcacgcagaacgatggcacgacgactattgccaataaccttaccagcacggttcaagtgtttacggactcggagtatcagctcccgtacgtgctcgggtcggcgcaccaaggctgtctcccgccgtttccagcggacgtcttcatggtccctcagtatggatacctcaccctgaacaacggaagtcaagcggtgggacgctcatccttttactgcctggagtacttcccttcgcagatgctaaggactggaaataacttccaattcagctataccttcgaggatgtaccttttcacagcagctacgctcacagccagagtttggatcgcttgatgaatcctcttattgatcagtatctgtactacctgaacagaacgcaaggaacaacctctggaacaaccaaccaatcacggctgctttttagccaggctgggcctcagtctatgtctttgcaggccagaaattggctacctgggccctgctaccggcaacagagactttcaaagactgctaacggcaacaacaacagtaactttccttggacagcggccagcaaatatcatctcaatggccgcgactcgctggtgaatccaggaccagctatggccagtcacaaggacgatgaagaaaaatttttccctatgcacggcaatctaatatttggcaaagaagggacaacggcaagtaacgcagaattagataatgtaatgattacggatgaagaagagattcgtaccaccaatcctgtggcaacagagcagtgtggaactgtggcaaataacttgcagagctcaaatacagctcccacgactagaactgtcaatgatcagggggccttacctggcatggtgtggcaagatcgtgacgtgtaccttcaaggacctatctgggcaaagattcctcacacggatggacactttcatccttctcctctgatgggaggctttggactgaaacatccgcctcctcaaatcatgatcaaaaatactccggtaccggcaaatcctccgacgactttcagcccggccaagtttgcttcatttatcactcagtactccactggacaggtcagcgtggaaattgagtgggagctacagaaagaaaacagcaaacgttggaatccagagattcagtacacttccaactacaacaagtctgttaatgtggactttactgtagacactaatggtgtttatagtgaacctcgccctattggaacccggtatctcacacgaaacttgtaa

SEQ ID NO: 771 - DNA, 2212 bp, synthetic construct
  source 1..2212: mol_type = other DNA; note = Description of Artificial Sequence: Synthetic polynucleotide
  misc_difference 1283: note = misc_feature - n is a, c, t, or g
atggctgctgacggttatcttccagattggctcgaggacaacctttctgaaggcattcgtgagtggtgggctctgaaacctggagtccctcaacccaaagcgaaccaacaacaccaggacaaccgtcggggtcttgtgcttccgggttacaaatacctcggaccgggtaacggactcgacaaaggagagccggtcaacgaggcggacgcggcagccctcgaacacgacaaagcttacgaccagcagctcaaggccggtgacaacccgtacctcaagtacaaccacgccgacgccgagtttcaggagcgtcttcaagaagatacgtcttttgggggcaaccttggcagagcagtcttccaggccaaaaagaggatccttgagcctcttggtctggttgagggagcagctaaaacggctcctggaaagaagaggcctgtagatcagtctcctcaggaaccggactcatcatctggtgttggcaaatcgggcaaacagcctgccagaaaaagactaaatttcggtcagactggcgactcagagtcagtcccagaccctcaacctctcggagaaccaccagcagcccccacaagtttgggatctaatacaatggcttcaggcggtggcgcaccaatggcagacaataacgagggtgccgatggagtgggtaattcctcaggaaattggcattgcgattcccaatggctgggcgacagagtcatcaccaccagcaccagaacctgggccctgcccacttacaacagccatctctacaagcaaatctccagccaatcaggagcttcaaacgacaaccactactttggctacagcaccccttgggggtattttgactttaacagattccactgccacttctcaccacgtgactggcagcgactcattaacaacaactggggattccggcccaagaaactcagcttcaagctcttcaacatccaagttaaagaggtcacgcagaacgatggcacgacgactattgccaataaccttaccagcacggtccaagtgtttacggactcggagtatcagctcccgtacgtgctcgggtcggcgcaccaaggctgtctcccgccgtttccagcggacgccttcatggtccctcagtatggatacctcaccctgaacaacggaagtcaagcggtgggacgctcatccttttactgcctggagtacttcccttcgcagatgctaaggactggaaataacttccaattcagctataccttcgaggatgtaccttttcacggcagctacgctcacagccngagtttggatcgcttgatgaatcctcttattgatcagtatctgtactacctgaacagaacgcaaggaacaacctctggaacaaccaaccaatcacggctgctttttagccaggctgggcctcagtctatgtctttgcaggccagaaattggctacctgggccctgctaccggcaacagagacttttcaaagactgctaacgacaacaacaacagtaactttccttggacagcggccagcaaatatcatctcaatggccgcgactcgctggtgaatccaggaccagctatggccagtcacaaggacgatgaagaaaaatttttccctatgcacggcaatctaatatttggcaaagaagggacaacggcaagtaacgcagaattagataatgtaatgattacggatgaagaagagattcgtaccaccaatcctgtggcaacagagcagtatggaactgtggcaaataacttgcagagctcaaatacagctcccacgactagaactgtcaatgatcagggggccttacctggcatggtgtggcaagatcgtgacgtgtaccttcaaggacctatctgggcaaagattcctcacacggatggacactttcatccttctcctctgatgggaggctttggactgaaacatccgcctcctcaaatcatgatcaaaaatactccggtaccggcaaatcctccgacgactttcagcccggccaagtttgcttcatttatcactcagtactccactggacaggtcagcgtggaaattgagtgggagctacagaaagaaaacagcaaacgttggaatccagagattcagtacacttccaactacaacaagtctgttaatgtggactttactgtagacactaatggtgtttatagtgaacctcgccctattggaacccggtatctcacacgaaactcgtaa

SEQ ID NO: 772 - DNA, 2212 bp, synthetic construct
  source 1..2212: mol_type = other DNA; note = Description of Artificial Sequence: Synthetic polynucleotide
atggctgctgacggttatcttccagattggctcgaggacaacctttctgaaggcattcgtgagtggtgggctctgaaacctggagtccctcaacccaaagcgaaccaacaacaccaggacaaccgtcggggtcttgtgcttccgggttacaaatacctcggacccggtaacggactcgacaaaggagagccggtcaacgaggcggacgcggcagccctcgaacacgacaaagcttacgaccagcagctcaaggccggtgacaacccgtacctcaagtacaaccacgccgacgccgagtttcaggagcgtcttcaagaagatacgtcttttgggggcaaccttggcagagcagtcttccaggccaaaaagaggatccttgagcctcttggtctggttgagggagcagctaaaacggctcctggaaagaagaggcctgtagatcagtctcctcaggaaccggactcatcatctggtgttggcaaatcgggcaaacagcttgccagaaaaagactaaatttcggtcagactggcgactcagagtcagtcccagaccctcaacctctcggagaaccaccagcagcccccacaagtttgggatctaatacaatggcttcaggcggtggcgcaccaatggcagacaataacgagggtgccgatggagtgggtaattcctcaggaaattggcattgcgattcccaatggctgggcgacagagtcatcaccaccagcaccagaacctgggccctgcccacttacaacagccatctctacaagcaaatctccggccaatcaggagcttcaaacgacaaccactactttggctacagcaccccctgggggtattttgactttaacagattccactgccacttctcaccacgtgactggcagcgactcattaacaacaactggggattccggcccaagaaactcagcttcaagctcttcaacatccaagttaaagaggtcacgcagaacgatggcacgacgactattgccaataaccttaccagcacggttcaagtgtttacggactcggagtatcagctcccgtacgtgctcgggtcggcgcaccaaggctgtctcccgccgtttccagcggacgtcttcatggtccctcagtatggatacctcaccctgaacaacggaagtcaagcggtgggacgctcatccttttactgcctggagtacttcccttcgcagatgctaaggactggaaataacttccaattcagctataccttcgaggatgtaccttttcacagcagctacgctcacagccagagtttggatcgcttgatgaatcctcttattgatcagtatctgtactacctgaacagaacgcaaggaacaacctctggaacaaccaaccaatcacggctgctttttagccaggctgggcctcagtctatgtctttgcaggccagaaattggctacctgggccctgctaccggcaacagagactttcaaagactgctaacgacaacaacaacagtaactttccttggacagcggccagcaaatatcatctcaatggccgcgactcgctggtgaatcccaggaccagctatggccagtcacaaggacgatgaagaaaaatttttccctatgcacggcaatctaatatttggcaaagaagggacaacggcaagtaacgcagaattagataatgtaatgattacggatgaagaagagattcgtaccaccaatcctgtggcaacagagcagtatggaactgtggcaaataacttgcagagctcaaatacagctcccacgactagaactgtcaatgatcagggggccttacctggcatggtgtggcaagatcgtgacgtgtaccttcaaggacctatctgggcaaagattcctcacacggatggacactttcatccttctcctctgatgggaggctttggactgaaacatccgcctcctcaaatcatgatcaaaaatactccggtaccggcaaatcctccgacgactttcagcccggccaagtttgcttcatttatcactcagtactccactggacaggtcagcgtggaaattgagtgggagctacagaaagaaaacagcaaacgttggaatccagagattcagtacacttccaactacaacaagtctgttaatgtggactttactgtagacactaatggtgtttatagtgaacctcgccctattggaacccggtatctcacacgaaacttgtaa

SEQ ID NO: 773 - DNA, 2212 bp, synthetic construct
  source 1..2212: mol_type = other DNA; note = Description of Artificial Sequence: Synthetic polynucleotide
atggctgctgacggttatcttccagattggctcgaggacaacctttctgaaggcattcgtgagtggtgggctctgaaacctggagtccctcaacccaaagcgaaccaacaacaccaggacgaccgtcggggtcttgtgcttccgggttacaaatacctcggacccggtaacggactcgacaaaggagagccggtcaacgaggcggacgcggcagccctcgaacacgacaaagcttacgaccagcagctcaaggccggtgacaacccgtgcctcaagtacaaccacgccgacgccgagtttcaggagcgtcttcaagaagatacgtcttttgggggcaaccttggcagagcagtcttccaggccaaaaagaggatccttgagcctcttggtctggttgaggaagcagctaaaacggctcctggaaagaagaggcctgtagatcagtctcctcaggaaccggactcatcatctggtgttggcaaatcgggcaaacagcctgccagaaaaagactaaatttcggtcagactggcgactcagagtcagtcccagaccctcaacctctcggagaaccaccagcagcccccacaagtttgggatctaatacaatggcttcaggcggtagcgcaccaatggcagacaataacgagggtgccgatggagtgggtaattcctcaggaaattggcattgcgattcccaatggctgggcgacagagtcatcaccaccagcaccagaacctgggccctgcccacttacaacaaccatctctacaagcaaatctccagccaatcaggagcttcaaacgacaaccactactttggctacagcaccccttgggggtattttgactttaacagattccactgccacttctcaccacgtgactggcagcgactcattaacaacaactggggattccggcccaagaaactcagcttcaagctcttcaacatccaagttaaagaggtcacgcagaacgatggcacgacgactattgccaataaccttaccagcacggttcaagtgtttacggactcggagtatcagctcccgtacgtgctcgggtcggcgcaccaaggctgtctcccgccgtttccagcggacgtcttcatggtccctcagtatggatacctcaccctgaacaacggaagtcaagcggtgggacgctcatccttttactgcctggagtacttcccttcgcagatgctaaggactggaaataacttccaattcagctataccttcgaggatgtaccttttcacagcagctacgctcacagccagagtttggatcgcttgatggatcctcttattgatcagtatctgtactacctgaacagaacgcaaggaacaacctctggaacaaccaaccaatcacggctgctttttagccaggctgggcctcagtctatgtctttgcaggccagaaattggctacctgggccctgctaccggcaacagagactttcaaagactgctaacgacaacaacaacagtaactttccttggacagcggccagcaaatatcatctcaatggccgcgactcgctggtgaatccaggaccagctatggccagtcacaaaggacgatgaagaaaaatttttccctatgcacggcaatctaatatttggcaaagaagggacaacggcaagtaacgcagaattagataatgtaatgattacggatgaagaagagattcgtaccaccaatcctgtggcaacagagcagtatggaactgtggcaaataacttgcagagctcaaatacagctcccacgactagaactgtcaatgatcagggggccttacctggcatggtgtggcaagatcgtgacgtgtaccttcaaggacctatctgggcaaagattcctcacacggatggacactttcatccttctcctctgatgggaggctttggactgaaacatccgcctcctcaaatcatgatcaaaaatactccggtaccggcaaatcctccgacgactttcagcccggccaagtttgcttcatttatcactcagtactccactggacaggtcagcgtggaaattgagtgggagctacagaaagaaaacagcaaacgttggaatccagagattcagtacacttccaactacaacaagtctgttaatgtggactttactgtagacactaatggtgtttatagtgaacctcgccctattggaacccggtatctcacacgaaacctgtaa

SEQ ID NO: 774 - DNA, 2211 bp, synthetic construct
  source 1..2211: mol_type = other DNA; note = Description of Artificial Sequence: Synthetic polynucleotide
atggctgctgacggttatcttccagattggctcgaggacaacctttctgaaggcattcgtgagtggtgggctctgaaacctggagtccctcaacccaaagcgaaccaacaacaccaggacgaccgtcggggtcttgtgcttccgggttacaaatacctcggacccggtaacggactcgacaaaggagagccggtcaacgaggcggacgcggcagccctcgaacacgacaaagcttacgaccagcagctcaaggccggtgacaacccgtacctcaagtacaaccacgccgacgccgagtttcaggagcgtcttcaagaagatacgtcttttgggggcaaccttggcagagcagtcttccaggccaaaaagaggatccttgagcctcttggtctggttgaggaagcagctaaaacggctcctggaaagaagaggcctgtagatcagtctcctcaggaaccggactcatcatctggtgttggcaaatcgggcaaacagcctgccagaaaaagactaaatttcggtcagactggcgactcagagtcagtcccagaccctcaacctctcggagaaccaccagcagcccccacaagtttgggatctaatacaatggcttcaggcggtggcgcaccaatggcagacaataacgagggtgccgatggagtgggtaattcctcaggaaattggcattgcgattcccaatggctgggcaacagagtcatcaccaccagcaccagaacctgggccctgcccacttacaacaaccatctctacaagcaaatctccagccaatcaggagcttcaaacgacaaccactactttggctacagcaccccttgggggtattttgactttaacagattccactgccacttctcaccacgtgactggcagcgactcattaacaacaactggggattccggcccaagaaactcagcttcaagctcttcaacatccaagttaaagaggtcacgcagaacgatggcacgacgactattgccaataaccttaccagcacggttcaagtgtttacggactcggagtatcagctcccgtacgtgctcgggtcggcgcaccaaggctgtctcccgccgtttccagcggacgtcttcatggtccctcagtatggatacctcaccctgaacaacggaagtcaagcggtgggacgctcatccttttactgcctggagtacttcccttcgcagatgctaaggactggaaataacttccaattcagctataccttcgaggatgtaccttttcacagcagctacgctcacagccagagtttggatcgcttgatgaatcctcttattgatcagtatctgtactacctgaacagaacgcaaggaacaacctctggaacaaccaaccaatcacggctgctttttagccaggctgggcctcagtctatgtctttgcaggccagaaattggctacctgggccctgctaccggcaacagagactttcaaagactgctaacgacaacaacaacagtaactttccttggacagcggccagcaaatatcatctcaatggccgcgactcgctggtgaatccaggaccagctatggccagtcacaaggacgatgaagaaaaatttttccctatgcacggcaatctaatatttggcaaagaagggacaacggcaagtaacgcagaattagataatgtaatgattacggatgaagaagagattcgtaccaccaatcctgtggcaacagagcagtatggaactgtggcaaataacttgcagagctcaaatacagctcccacgactagaactgtcaatgatcagggggccttacctggcatggtgtggcaagatcgtgacgtgtaccttcaaggacctatctgggcaaagattcctcacacggatggacactttcatccttctcctctgatgggaggctttggactgaaacatccgcctcctcaaatcatgatcaaaaatactccggtaccggcaaatcctccgacgactttcagcccggccaagtttgcttcatttatcactcagtactccactggacaggtcagcgtggaaattgagtgggagctacagaaagaaaacagcaaacgttggaatccagagattcagtacacttccaactacaacaagtctgttaatgtggactttactgtagacactaatggtgtttatagtgaacctcgccctattggaacccggtatctcacacgaaacttgtaa

SEQ ID NO: 775 - DNA, 2211 bp, synthetic construct
  source 1..2211: mol_type = other DNA; note = Description of Artificial Sequence: Synthetic polynucleotide
atggctgctgacggttatcttccagattggctcgaggacaacctttctgaaggcattcgtgagtggtgggctctgaaacctggagtccctcaacccaaagcgaaccaacaacaccaggacgaccgtcggggtcttgtgcttccgggttacaaatacctcggacccggtaacggactcgacaaaggagagccggtcaacgaggcggacgcggcagccctcgaacacgacaaagcttacgaccagcagctcaaggccggtgacaacccgtacctcaagtacaaccacgccgacgccgagtttcaggagcgtcttcaagaagatacgtcttttgggggcaaccttggcagagcagtcttccaggccaaaaagaggatccttgagcctcttggtctggttgaggaagcagctaaaacggctcctggaaagaagaggcctgtagatcagtctcctcaggaaccggactcatcatctggtgttggcaaatcgggcaaacagcctgccagaaaaagactaaatttcggtcagactggcgactcagagtcagtcccagaccctcaacctctcggagaaccaccagcagcccccacaagtttgggatctaatacaatggcttcaggcggtggcgcaccaatggcggacaataacgagggtgccgatggagtgggtaattcctcaggaaattggcattgcgattcccaatggctgggcgacagagtcatcaccaccagcaccagaacctgggccctgcccacttacaacaaccatctctacaagcaaatctccagccaatcaggagcttcaaacgacaaccactactttggctacagcaccccttgggggtattttgactttaacagattccactgccacttctcaccacgtgactggcagcgactcattaacaacaactggggattccggcccaagaaactcagcttcaagctcttcaacatccaagttaaagaggtcacgcagaacgatggcacgacgactattgccaataaccttaccagcacggttcaagtgtttacggactcggagtatcagctcccgtacgtgctcgggtcggcgcaccaaggctgtctcccgccgtttccagcggacgtcttcatggtccctcagtatggatacctcaccctgaacaacggaagtcaagcggtgggacgctcatccttttactgcctggagtacttcccttcgcagatgctaaggactggaaataacttccaattcagctataccttcgaggatgtaccttttcacagcagctacgctcacagccagagtttggatcgcttgatgaatcctcttattgatcagtatctgtactacctgaacagaacgcaaggaacaacctctggaacaaccaaccaatcacggctgctttttagccaggctgggcctcagtctatgtctttgcaggccagaaattggctacctgggccctgctaccggcaacagagactttcaaagactgctaacgacaacaacaacagtaactttccttggacagcggccagcaaatatcatctcaatggccgcgactcgctggtgaatccaggaccagctatggccagtcacaaggacgatgaagaaaaatttttccctatgcacggcaatctaatatttggcaaagaagggacaacggcaagtaacgcagaattagataatgtaatgattacggatgaagaagagattcgtaccaccaatcctgtggcaacagtgcagtatggaactgtggcaaataacttgcagagctcaaatacagctcccacgactagaactgtcaatgatcagggggccttacctggcatggtgtggcaagatcgtgacgtgtaccttcaaggacctatctgggcaaagattcctcacacggatggacactttcatccttctcctctgatgggaggctttggactgaaacatccgcctcctcaaatcatgatcaaaaatactccggtaccggcaaatcctccgacgactttcagcccggccaagtttgcttcatttatcactcagtactccactggacaggtcagcgtggaaattgagtgggagctacagaaagaaaacagcaaacgttggaatccagagattcagtacacttccaactacaacaagtctgttaatgtggactttactgtagacactaatggtgtttatagtgaacctcgccctattggaacccggtatctcacacgaaacttgtaa

SEQ ID NO: 776 - DNA, 2211 bp, synthetic construct
  source 1..2211: mol_type = other DNA; note = Description of Artificial Sequence: Synthetic polynucleotide
atggctgctgacggttatcttccagattggctcgaggacaacctttctgaaggcattcgtgagtggtgggctctgaaacctggagtccctcaacccaaagcgaaccaacaacaccaggacaaccgtcggggtcttgtgcttccgggttacaaatacctcggacccggtaacggactcgacaaaggagagccggtcaacgaggcggacgcggcagccctcgaacacgacaaagcttacgaccagcagctcaaggccggtgacaacccgtacctcaagtacaaccacgccgacgccgagtttcaggagcgtcttcaagaagatacgtcttttgggggcaaccttggcagagcagtcttccaggccaaaaaggggatccttgagcctcttggtctggttgaggaagcagctaaaacggctcctggaaagaagaggcctgtagatcagtctcctcaggaaccggactcatcatctggtgttggcaaatcgggcaaacagcctgccagaaaaagactaaatttcggtcagactggcgactcagagtcagtcccagaccctcaacctctcggagaaccaccagcagcccccacaagtttgggatctaatacaatggcttcaggcggtggcgcaccaatggcagacaataacgagggtgccgatggagtgggtaattcctcaggaaattggcattgcgattcccaatggctgggcgacagagtcatcaccaccagcaccagaacctgggccctgcccacttacaacaaccatctctacaagcaaatctccagccaatcaggagcttcaaacgacaaccactactttggctacagcaccccttgggggtattttgactttaacagattccactgccacttctcaccacgtgactggcagcgactcattaacaacaactggggattccggcccaagaaactcagcttcaagctcttcaacatccaagttaaagaggtcacgcagaacgatggcacgacgactattgccaataaccttaccagcacggttcaagtgtttacggactcggagtatcagctcccgtacgtgttcgggtcggcgcaccaaggctgtctcccgccgtttccagcggacgtcttcatggtccctcagtatggatacctcaccctgaacaacggaagtcaagcggtgggacgctcatccttttactgcctggagtacttcccttcgcagatgctaaggactggaaataacttccaattcagctataccttcgaggatgtaccttttcacagcagctacgctcacagccagagttcggatcgcttgatgaatcctcttattgatcagtatctgtactacctgaacagaacgcaaggaacaacctctggaacaaccaaccaatcacggctgctttttagccaggctgggcctcagtctatgtctttgcaggccagaaattggctacctgggccctgctaccggcaacagagactttcaaagactgctaacgacaacaacaacagtaactttccttgaacagcggccagcaaatatcatctcaatggccgcgactcgctggtgaatccaggaccagctatggccagtcacaaggacgatgaagaaaaatttttccctatgcacggcaatctaatatttggcaaagaagggacaacggcaagtaacgcagaattagataatgtaatgattacggatgaagaagagattcgtaccaccaatcctgtggcaacagagcagtatggaactgtggcaaataacttgcagagctcaaatacagctcccacgactagaactgtcaatgatcagggggccttacctggcatggtgtggcaagatcgtgacgtgtaccttcaaggacctatctgggcaaagattcctcacacggatggacactttcatccttctcctctgatgggaggctttggactgaaacatccgcctcctcaaatcatgatcaaaaatactccggtaccggcaaatcctccgacgactttcagcccggccaagtttgcttcatttatcactcagtactccactggacaggtcagcgtggaaattgagtgggagctacagaaagaaaacagcaaacgttggaatccagagattcagtacacttccaactacaacaagtctgttaatgtggactttactgtagacactaatggtgtttatagtgaacctcgccctattggaacccggtatctcacacgaaacttgtaa

SEQ ID NO: 777 - DNA, 2211 bp, synthetic construct
  source 1..2211: mol_type = other DNA; note = Description of Artificial Sequence: Synthetic polynucleotide
atggctgctgacggttatcttccagattggctcgaggacaacctttctgaaggcattcgtgagtggtgggctctgaaacctggagtccctcaacccaaagcgaaccaacaacaccaggacaaccgtcggggtcttgtgcttccgggttacaaatacctcggacccggtaacggactcgacgaaggagagccggtcaacgaggcggacgcggcagccctcgaacacgacaaagcttacgaccagcagctcaaggccggtgacaacccgtacctcaagtacaaccacgccgacgccgagtttcaggagcgtcttcaagaagatacgtcttttgggggcaaccttggcagagcagtcttccaggccaaaaagaggatccttgagcctcttggtctggttgagggagcagctaaaacggctcctggaaagaagaggcctgtagatcagtctcctcaggaaccggactcatcatctggtgttggcaaatcgggcaaacagcctgccagaaaaagactaaatttcggtcagactggcgactcagagtcagtcccagaccctcaacctctcggagaaccaccagcagcccccacaagtttgggatctaatacaatggcttcaggcggtggcgcaccaatggcagacaataacgagggtgccgatggagtgggtaattcctcaggaaattggcattgcgattcccaatggctgggcgacagagtcatcaccaccagcaccagaacctgggccctgcccacttacaacagccacctctacaagcaaatctccagccaatcaggagcttcaaacgacaaccactactttggctacagcaccccttgggggtattttgactttaacagattccactgccacttctcaccacgtgactggcagcgactcattaacaacaactggggattccggcccaagaaactcagcttcaagctcttcaacatccaagttaaagaggtcacgcagaacgatggcacgacgactattgccaataaccttaccagcacggttcaagtgtttacggactcggagtatcagctcccgtacgtgctcgggtcggcgcaccaaggctgtctcccgccgtttccagcggacgtcttcatggtccctcagtatggatacctcaccctgaacaacggaagtcaagcggtgggacgctcatccttttactgcctggagtacttcccttcgcagatgctaaggactggaaataacttccaattcagctataccttcgaggatgtaccttttcacagcagctacgctcacagccagagtttggatcgcttgatgaatcctcttattgatcagtatctgtactacctgaacagaacgcaaggaacaacctctggaacaaccaaccaatcacggctgctttttagccaggctgggcctcagtctatgtctttgcaggccagaaattggctacctgggccctgctaccggcaacagagactttcaaagactgctaacgacaacaacaacagtaactttccttggacagcggccagcaaatatcatctcaatggccgcgactcgctggtgaatccaggaccagctatggccagtcacaaggacgatgaagaaaaatttttccctatgcacggcaatctaatatttggcaaagaagggacaacggcaagtaacgcagaattagataatgtaatgattacggatgaagaagagattcgtaccaccaatcctgtggcaacagagcagtatggaactgtggcaaataacttgcagagctcaaatacagctcccacgactagaactgtcaatgatcagggggccttacctggcatggtgtggcaagatcgtgacgtgtaccttcaaggacctatctgggcaaagattcctcacacggatggacactttcatccttctcctctgatgggaggctttggactgaaacatccgcctcctcaaatcatgatcaaaaatactccggtaccggcaaatcctccgacgactttcagcccggccaagtttgcttcatttatcactcagtactccactggacaggtcagcgtggaaattgagtgggagctacagaaagaaaacagcaaacgttggaatccagagattcagtacacttccaactacaacaagtctgttaatgtggactttactgtagacactaatggtgtttatagtgaacctcgccctattggaacccggtatctcacacgaaacttgtaa

SEQ ID NO: 778 - DNA, 2211 bp, synthetic construct
  source 1..2211: mol_type = other DNA; note = Description of Artificial Sequence: Synthetic polynucleotide
atggctgctgacggttatcttccagattggctcgaggacaacctttctgaaggcattcgtgagtggtgggctctgaaacctggagtccctcaacccaaagcgaaccaacaacaccaggacaaccgtcggggtcttgtgcttccgggttacaaatacctcggacccggtaacggactcgacaaaggagagccggtcaacgaggcggacgcggcagccctcgaacacgacaaagcttacgaccagcagctcaaggccggtgacaacccgtacctcaagtacaaccacgccgacgccgagtttcaggagcgtcttcaagaagatacgtcttttgggggcaaccttggcagagcagtcttccaggccaaaaagaggatccttgagcctcttggtctggttgagggagcagctaaaacggctcctggaaagaagaggcctgtagatcagtctcctcaggaaccggactcatcatctggtgttggcaaatcgggcaaacagcctgccagaaaaagactaaatttcggtcagactggcgactcagagtcagtcccagaccctcaacctctcggagaaccaccagcagcccccacaagtttgggatctaatacaatggcttcaggcggtggcgcaccaatggcagacaataacgagggtgccgatggagtgggtaattcctcaggaaattggcattgcgattcccaatggctgggcgacagagtcatcaccaccagcaccagaacctgggccctgcccacttacaacagccatctctacaagcaaatctccagccaatcaggagcttcaaacgacaaccactactttggctacagcaccccttggggtattttgactttaacagattccactgccacttctcaccacgtgactggcagcgactcattaacaacaactggggattccggcccaagaaactcagcttcaagctcttcaacatccaagttaaagaggtcacgcagaacgatggcacgacgactattgccaataaccttaccagcacggttcaagtgtttacggactcggagtatcagctcccgtacgtgctcgggtcggcgcaccaaggctgtctcccgccgtttccagcggacgccttcatggtccctcagtatggatacctcaccctgaacaacggaagtcaagcggtgggacgctcatccttttactgcctggagtacttcccttcgcagatgctaaggactggaaataacttccaattcagctataccctcgaggatgtaccttttcacagcagctacgctcacagccagagtttggatcgcttgatgaatcctcttattgatcagtatctgtactacctgaacagaacgcaaggaacaacctctggaacaaccaaccaatcacggctgctttttagccaggctgggcctcagtctatgtctttgcaggccagaaattggctacctgggccctgctaccggcaacagagactttcaaagactgctaacgacaacaacaacagtaactttccttggacagcggccagcaaatatcatctcaatggccgcgactcgctggtgaatccaggaccagctatggccagtcacaaaggacgatgaagaaaaatttttccctatgcacggcaatctaatatttggcaaagaagggacaacggcaagtaacgcagaattagatagtgtaatgattacggatgaagaagagattcgtaccaccaatcctgtggcaacagagcagtatggaactgtggcaaataacttgcagagctcaaatacagctcccacgactagaactgtcaatgatcagggggccttacctggcatggtgtggcaagatcgtgacgtgtaccttcaaggacctatctgggcaaagattcctcacacggatggacactttcatccttctcctctgatgggaggctttggactgaaacatccgcctcctcaaatcatgatcaaaaatactccggtaccggcaaatcctccgacgactttcagcccggccaagtttgcttcatttatcactcagtactccactggacaggtcagcgtggaaattgagtgggagctacagaaagaaaacagcaaacgttggaatccagagattcagtacacttccaactacaacaagtctgttaatgtggactttactgtagacactaatggtgtttatagtgaacctcgccctattggaacccggtatctcacacgaaacttgtaa

SEQ ID NO: 779 - DNA, 2205 bp, synthetic construct
  source 1..2205: mol_type = other DNA; note = Description of Artificial Sequence: Synthetic polynucleotide
atgactgacggttaccttccagattggctagaggacaacctctctgagggcgttcgagagtggtgggcgctgcaacctggagcccctaaacccaaggcaaatcaacaacatcaggacaacgctcggggtcttgtgcttccgggttacaaatacctcggacccggcaacggactcgacaagggggaacccgtcaacgcagcggacgcggcagccctcgagcacgacaaggcctacgaccagcagctcaaggccggtgacaacccctacctcaagtacaaccacgccgacgcggagttccagcagcggcttcagggcgacacatcgtttgggggcaacctcggcagagcagtcttccaggccaaaaagagggttcttgaacctcttggtctggttgagcaagcgggtgagacggctcctggaaagaagagaccgttgattgaatccccccagcagcccgactcctccacgggtatcggcaaaaaaggcaagcagccggctaaaaagaagctcgttttcgaagacgaaactggagcaggcgacggaccccctgagggatcaacttccggagccatgtctgatgacagtgagatgcgtgcagcaactggcggagctgcagtcgagggcggacaaggtgccgatggagtgggtaatgcctcgggtgattggcattgcgattccacctggtctgagggccacgtcacgaccaccagcaccagaacctgggtcttgcccacctacaacaaccacctctacaagcgactcggagagagcctgcagtccaacacctacaacggattctccaccccctggggatactttgacttcaaccgcttccactgccacttctcaccacgtgactggcagcgactcatcaacaacaactggggcatgcgacccaaagccatgcgggtcaaaatcttcaacatccaggtcaaggaggtcacgacgtcgaacggcgagacaacggtggctaataaccttaccagcacggttcagatctttgcggactcgtcgtacgaactgccgtacgtgatggatgcgggtcaagagggcagcctgcctccttttcccaacgacgtctttatggtgccccagtacggctactgtggactggtgaccggcaacacttcgcagcaacagactgacagaaatgccttctactgcctggagtactttccttcgcagatgctgcggactggcaacaactttgaaattacgtacagttttgagaaggtgcctttccactcgatgtacgcgcacagccagagcctggaccggctgatgaaccctctcatcgaccagtacctgtggggactgcaatcgaccaccaccggaaccaccctgaatgccgggactgccaccaccaactttaccaagctgcggcctaccaacctttccaactttaaaaagaactggctgcccgggccttcaatcaagcagcagggcttctcaaagactgccaatcaaaactacaagatccctgccaccgggtcagacagtctcatcaaatacgagacgcacagcactctggacggaagatggagtgccctgacccccggacctccaatggccacggctggacctgcggacagcaagttcagcaacagccagctcatctttgcggggcctaaacagaacggcaacacggccaccgtacccgggactctgatcttcacctctgaggaggagctggcagccaccaacgctaccgatacggacatgtggggcaacctacctggcggtgaccagagcaacagcaacctgccgaccgtggacagactgacagccttgggagccgtgcctggaatggtctggcaaaacagagacatttactaccagggtcccatttgggccaagattcctcataccgatggacactttcacccctcaccgctgattggtgggtttgggctgaaacacccgcctcctcaaatttttatcaagaacaccccggtacctgcgaatcctgcgacgaccttcagctctactccggtaaactccttcattactcagtacagcactggccaggtgtcggtgcagattgactgggagatccagaaggagcggtccaaacgctggaaccccgaggtccagtttacctccaactacggacagcaaaactctctgttgtgggctcccgatgcggctgggaaatacactgagcctagggctatcggtacccgctacctcacccaccacctgtaa

SEQ ID NO: 780 - DNA, 2205 bp, synthetic construct
  source 1..2205: mol_type = other DNA; note = Description of Artificial Sequence: Synthetic polynucleotide
atgactgacggttaccttccagattggctagaggacaacctctctgaaggcgttcgagagtggtgggcgctgcaacctggagcccctaaacccaaggcaaatcaacaacatcaggacaacgctcggggtcttgtgcttccgggttacaaatacctcggacccggcaacggactcgacaagggggaacccgtcaacgcagcggacgcggcagccctcgagcacgacaaggcctacgaccagcagctcaaggccggtgacaacccctacctcaagtacaaccacgccgacgcggagttccagcagcggcttcagggcgacacatcgtttgggggcaacctcggcagagcagtcttccaggccaaaaagagggttcttgaacctcttggtctggttgagcaagcgggtgagacggctcctggaaagaagagaccgttgattgaatccccccagcagcccgactcctccacgggtatcggcaaaaaaggcaagcagccggctaaaaagaagctcgttttcgaagacgaaactggagcaggcgacggaccccctgagggatcaacttccggagccatgtctgatgacagtgagatgcgtgcagcagctggcggagctgcagtcgagggcggacaaggtgccgatggagtgggtaatgcctcgggtgattggcattgcgattccacctggtctgagggccacgtcacgaccaccagcaccagaacctgggtcttgcccacctacaacaaccacctctacaagcgactcggagagagcctgcagtccaacacctacaacggattctccaccccctggggatactttgacttcaaccgcttccactgccacttcttaccacgtgactggcagcgactcatcaacaacaactggggcgtgcgacccaaagccatgcgggtcaaaatcttcaacatccaggtcaaggaggtcacgacgtcgaacggcgagacaacggtggctaataaccttaccagcacggttcagatctttgcggactcgtcgtacgaactgccgtacgtgatggatgcgggtcaagagggcagcctgcctccttttcccaacgacgtctttatggtgccccagtacggctactgtggactggtgaccggcgacacttcgcagcaacagactgacagaaatgccttctactgcctggagtactttccttcgcagatgctgcggactggcaacaactttgaaattacgtacagttttgagaaggtgcctttccactcgatgtacgcgcacagccagagcctggaccggctgatgaaccctctcatcgaccagtacctgtggggactgcaatcgaccaccaccggaaccaccctgaatgccgggactgccaccaccaactttaccaagctgcggcctaccaacttttccaactttaaaaagaactggctgcccgggccttcaatcaagcagcagggcttctcaaagactgccaatcaaaactacaagatccctgccaccgggtcagacagtctcatcaaatacgagacgcacagcactctggacggaagatggagtgccctgacccccggacctccaatggccacggctggacctgcggacagcaagttcagcaacagccagctcatctttgcggggcctaaacagaacggcaacacggccaccgtacccgggactctgatcttcacctctgaggaggagctggcagccaccaacgccaccgatacggacatgtggggcaacctacctggcggtgaccagagcaacagcaacctgccgaccgtggacagactgacagccttgggagccgtgcctggaatggtctggcaaaacagagacatttactaccagggtcccatttgggccaagattcctcataccgatggacactttcacccctcaccgctgattggtgggtttgggctgaaacacccgcctcctcaaatttttatcaagaacaccccggtacctgcgaatcctgcgacgaccttcagctctactccggtaaactccttcattactcagtacagcactggccaggtgtcggtgcagattgactgggagatccagaaggagcggtccaaacgctggaaccccgaggtccagtttacctccaactacggacagcaaaactctctgttgtgggctcccgatgcggctgggaaatacactgagcctagggctatcggtacccgctacctcacccaccacctgtaa

SEQ ID NO: 781 - DNA, 2205 bp, synthetic construct
  source 1..2205: mol_type = other DNA; note = Description of Artificial Sequence: Synthetic polynucleotide
atgactgacggttaccttccagattggctagaggacaacctctctgaaggcgttcgagagtggtgggcgctgcaacctggagcccctaaacccaaggcaaatcaacaacatcaggacaacgctcggggtcttgtgcttccgggttacaaatacctcggacccggcaacggactcgacgagggggaacccgtcaacgcagcggacgcggcagccctcgagcacgacaaggcctacgaccagcagctcaaggccggtgacaacccctacctcaagtacaaccacgccgacgcggagttccagcagcggcttcagggcgacacatcgtttgggggcaacctcggcagagcagtcttccaggccaaaaagagggttcttgaacctcttggtctggttgagcaagcgggtgagacggctcctggaaagaagagaccgttgattgaatccccccagcagcccgactcctccacgggtatcggcaaaaaaggcaagcagccggctaaaaagaagctcgttttcgaagacgaaactggagcaggcgacggaccccctgagggatcaacttccggagccatgtctgatgacagtgagatgcgtgcagcagctggcggagctgcagtcgagggcggacaaggtgccgatggagtgggtaatgcctcgggtgattggcattgcgattccacctggtctgagggccacgtcacgaccaccagcaccagaacctgggtcttgcccacctacaacaaccacctctacaagcgactcggagagagcctgcagtccaacacctacaacggattctccaccccctggggatactttgacttcaaccgcttccactgccacttctcaccacgtgactggcagcgactcatcaacaacaactggggcatgcgacccaaagccatgcgggtcaaaatcttcaacatccaggtcaaggaggtcacgacgtcgaacggcgagacaacggtggctaataaccttaccagcacggttcagatctttgcggactcgtcgtacgaactgccgtacgtgatggatgcgggtcaagagggcagcctgcctccttttcccaacgacgtctttatggtgccccagtacggctactgtggactggtgaccggcaacacttcgcagcaacagactgacagaaatgccttctactgcctggagtactttccttcgcagatgctgcggactggcaacaactttgaaattacgtacagttttgagaaggtgcctttccactcgatgtacgcgcacagccagagcctggaccggctgatgaaccctctcatcgaccagtacctgtggggactgcaatcgaccaccaccggaaccaccctgaatgccgggactgccaccaccaactttaccaagctgcggcctaccaacttttccaactttaaaaagaactggctgcccgggccttcaatcaagcagcagggcttctcaaagactgccaatcaaaactacaagatccctgccaccgggtcagacagtctcatcaaatacgagacgcacagcactctggacggaagatggagtgccctgacccccggacctccaatggccacggctggacctgcggacagcaagttcagcaacagccagctcatctttgcggggcctaaacagaacggcaacacggccaccgtacccgggactctgatcttcacctctgaggaggagctggcagccaccaacgctaccgatacggacatgtggggcaacctacctggcggtgaccagagcaacagcaacctgccgaccgtggacagactgacagccttgggagccgtgcctggaatggtctggcaaaacagagacatttactaccagggtcccatttgggccaagattcctcataccgatggacactttcacccctcaccgctgattggtgggtttgggctgaaacacccgcctcctcaaatttttatcaagaacaccccggtacctgcgaatcctgcgacgaccttcagctctactccggtaaactccttcattactcagtacagcactggccaggtgtcggtgcagattgactgggagatccagaaggagcggtccaaacgctggaaccccgaggtccagtttacctccaactacggacagcaaaactctctgttgtgggctcccgatgcggctgggaaatacactgagcctagggctatcggtacccgctacctcacccaccacctgtaa

SEQ ID NO: 782 - DNA, 2205 bp, synthetic construct
  source 1..2205: mol_type = other DNA; note = Description of Artificial Sequence: Synthetic polynucleotide
atgactgacggttaccttccagattggctagaggacaacctctctgaaggcgttcgagagtggtgggcgctgcaacctggagcccctaaacccaaggcaaatcaacaacatcaggacaacgctcggggtcttgtgcttccgggttacaaatacctcggacccggcaacggactcgacaagggggaacccgtcaacgcagcggacgcggcagccctcgagcacgacaaggcctacgaccagcagctcaaggccggtgacaacccctacctcaagtacaaccacgccgacgcggagttccagcagcggcttcagggcgacacatcgtttgggggcaacctcggcagagcagtcttccaggccaaaaagagggttcttgaacctcttggtctggttgagcaagcgggtgagacggctcctggaaagaagagaccgttgattgaatccccccagcagcccgactcctccacgggtatcggcaaaaaaggcaagcagccggctaaaaagaagctcgttttcgaagacggaactggagcaggcgacggaccccctgagggatcaacttccggagccatgtctgatgacagtgagatgcgtgcagcagctggcggagctgcagtcgagggcggacaaggtgccgatggagtgggtaatgcctcgggtgattggcattgcgattccacctggtctgagggccacgtcacgaccaccagcaccagaacctgggtcttgcccacctacaacaaccacctctacaagcgactcggagagagcctgcagtccaacacctacaacggattccccaccccctggggatactttgacttcaaccgcttccactgccacttctcaccacgtgactggcagcgactcatcaacaacaactggggcatgcgacccaaagccatgcgggtcaaaatcttcaacatccaggtcaaggaggtcacgacgtcgaacggcgagacaacggcggctaataaccttaccagcacggttcagatctttgcggactcgtcgtacgaactgccgtacgtgatggatgcgggtcaagagggcagcctgcctccttttcccaacgacgtctttatggtgccccagtacggctactgtggactggtgaccggcaacacttcgcagcaacagactgacagaaatgccttctactgcctggagtactttccttcgcagatgctgcggactggcaacaactttgaaattacgtacagttttgagaaggtgcctttccactcgatgtacgcgcacagccagagcctggaccggctgatgaaccctctcatcgaccagtacctgtggggactgcaatcgaccaccaccggaaccaccctgaatgccgggactgccaccaccaactttaccaagctgcggcctaccaacttttccaactttaaaaagaactggctgcccgggccttcaatcaagcagcagggcttctcaaagactgccaatcaaaactacaagatccctgccaccgggtcagacagtctcatcaaatacgagacgcacagcactctggacggaagatggagtgccctgacccccggacctccaatggccacggctggacctgcggacagcaagttcagcaacagccagctcatctttgcggggcctaaacagaacggcaacacggccaccgtacccgggactctgatcttcacctctgaggaggagctggcagccaccaacgccaccgatacggacatgtggggcaacctacctggcggtgaccagagcaacagcaacctgccgaccgtggacagactgacagccttgggagccgtgcctggaatggtctggcaaaacagagacatttactaccagggtcccatttgggccaagattcctcataccgatggacactttcacccctcaccgctgattggtgggtttgggctgaaacacccgcctcctcaaatttttatcaagaacaccccggtacctgcgaatcctgcgacgaccttcagctctactccggtaaactccttcattactcagtacagcactggccaggtgtcggtgcagattgactgggagatccagaaggagcggtccaaacgctggaaccccgaggtccagtttacctccaactacggacagcaaaactctctgttgtgggctcccgatgcggctgggaaatacactgagcctagggctatcggtacccgctacctcacccaccacctgtaa

SEQ ID NO: 783 - DNA, 2205 bp, synthetic construct
  source 1..2205: mol_type = other DNA; note = Description of Artificial Sequence: Synthetic polynucleotide
atgactgacggttaccttccagattggctagaggacaacctctctgaaggcgttcgagagtggtgggcgctgcaacctggagcccctaaacccaaggcaaatcaacaacatcaggacaacgctcggggtcttgtgcttccgggttacaaatacctcggacccggcaacggactcgacaagggggaacccgtcaacgcagcggacgcggcagccctcgagcacgacaaggcctacgaccagcagctcaaggccggtgacaacccctacctcaagtacaaccacgccgacgcggagttccagcagcggcttcagggcgacacatcgtttgggggcaacctcggcagagcagtcttccaggccaaaaagagggttcttgaacctcttggtctggttgagcaagcgggtgagacggctcctggaaagaagagaccgttgattgaatccccccagcagcccgactcctccacgggtatcggcaaaaaaggcaagcagccggctaaaaagaagctcgttttcgaagacgaaactggagcaggcgacggaccccctgagggatcaacttccggagccatgtctgatgacagtgagatgcgtgcagcagctggcggagctgcagtcgagggcggacaaggtgccgatggagtgggtaatgcctcgggtgattggcattgcgattccacctggtctgagggccacgtcacgaccaccagcaccagaacctgggtcttgcccacctacaacaaccacctctacaagcgactcggagagagcctgcagtccaacacctacaacggattctccaccccctggggatactttgacttcaaccgcttccactgccacttctcaccacgtgactggcagcgactcatcaacaacaactggggcatgcgacccaaagccatgcgggtcaaaatcttcaacatccaggtcaaggaggtcacgacgtcgaacggcgagacaacggtggctaataaccttaccagcacggttcagatctttgcggactcgtcgtacgaactgccgtacgtgatggatgcgggtcaagagggcagcctgcctccttttcccaacgacgtctttatggtgccccagtacggctaccgtggactggtgaccggcaacacttcgcagcaacagactgacagaaatgccttctactgcctggagtactttccttcgcagatgctgcggactggcaacaactttgaaattacgtacagttttgagaaggtgcctttccactcgatgtacgcgcacagccagagcctggaccggctgatgaaccctctcatcgaccagtacctgtggggactgcaatcgaccaccaccggaaccaccctgaatgccgggactgccaccaccaactttaccaagctgcggcctaccaacttttccaactttaaaaagaactggctgcccgggccttcaatcaagcagcagggcttctcaaagactgccaatcaaaactacaagatccctgccaccgggtcagacagtctcatcaaatacgagacgcacagcactctggacggaagatggagtgccctgacccccggacctccaatggccacggctggacctgcggacagcaagttcagcaacagccagctcatctttgcggggcctaaacagaacggcaacacggccaccgtacccgggactctgatcttcacctctgaggaggagctggcagccaccaacgccaccgatacggacatgtggggcaacctacctggcggtgaccagagcaacagcaacctgccgaccgtggacagactgacagccttgggagccgtgcctggaatggtctggcaaaacagagacatttactaccagggtcccatttgggccaagattcctcataccgatggacactttcacccctcaccgctgattggtgggtttgggctgaaacacccgcctcctcaaatttttatcaagaacaccccggtacctgcgaatcctgcgacgaccttcagctctactccggtaaactccttcattactcagtacagcactggccaggtgtcggtgcagattgactgggagatccagaaggagcggtccaaacgctggaaccccgaggtccagtttacctccaactacggacagcaaaactctctgttgtgggctcccgatgcggctgggaaatacactgagcctagggctatcggtacccgctacctcacccaccacctgtaa

SEQ ID NO: 784 - DNA, 2205 bp, synthetic construct
  source 1..2205: mol_type = other DNA; note = Description of Artificial Sequence: Synthetic polynucleotide
atgactgacggttaccttccagattggctagaggacaacctctctgaaggcgttcgagagtggtgggcgctgcaacctggagcccctaaacccaaggcaaatcaacaacatcaggacaacgctcggggtcttgtgcttcagggttacaaatacctcggacccggcaacggactcgacaagggggaacccgtcaacgcagcggacgcggcagccctcgagcacgacaaggcctacgaccagcagctcaaggccggtgacaacccctacctcaagtacaaccacgccgacgcggagttccagcagcggcttcagggcgacacatcgtttgggggcaacctcggcagagcagtcttccaggccaaaaagagggttcttgaaccccttggtctggttgagcaagcgggtgagacggctcctggaaagaagagaccgttgattgaatccccccagcagcccgactcctccacgggtatcggcaaaaaaggcaagcagccggctaaaaagaagctcgttttcgaagacgaaactggagcaggcgacggaccccctgagggatcaacttccggagccatgtctgatgacagtgagatgcgtgcagcagctggcggagctgcagtcgagggcggacaaggtgccgatggagtgggtaatgcctcgggtgattggcattgcgattccacccggtctgagggccacgtcacgaccaccagcaccagaacctgggtcttgcccacctacaacaaccacctctacaagcgactcggagagagcctgcagtccaacacctacaacggattctccaccccctggggatactttgacttcaaccgcttccactgccacttctcaccacgtgactggcagcgactcatcaacaataactggggcatgcgacccaaagccatgcgggtcaaaatcttcaacatccaggtcaaggaggtcacgacgtcgaacggcgagacaacggtggctaataaccttaccagcacggttcagatctttgcggactcgtcgtacgaactgccgtacgtgatggatgcgggtcaagagggcagcctgcctccttttcccaacgacgtctttatggtgccccagtacggctactgtggactggtgaccggcaacacttcgcagcaacagactgacagaaatgccttctactgcctggagtactttccttcgcagatgctgcggactggcaacaactttgaaattacgtacagttttgagaaggtgcctttccactcgatgtacgcgcacagccagagcctggaccggctgatgaaccctctcatcgaccagtacctgtggggactgcaatcgaccaccaccggaaccaccctgaatgccgggactgccaccaccaactttaccaagctgcggcctaccaacttttccaactttaaaaagaactggctgcccgggccttcaatcaagcagcagggcttctcaaagactgccaatcaaaactacaagatccctgccaccgggtcagacagtctcatcaaatacgagacgcacagcactctggacggaagatggagtgcccggacccccggacctccaatggccacggctggacctgcggacagcaagttcagcaacagccagctcatctttgcggggcctaaacagaacggcaacacggccaccgtacccgggactctgatcttcacctctgaggaggagctggcagccaccaacgccaccgatacggacatgtggggcaacctacctggcggtgaccagagcaacagcaacctgccgaccgtggacagactgacagccttgggagccgtgcctggaatggtctggcaaaacagagacatttactaccagggtcccatttgggccaagattcctcataccgatggacactttcacccctcaccgctgattggtgggtttgggctgaaacacccgcctcctcaaatttttatcaagaacaccccggtacctgcgaatcctgcgacgaccttcagctctactccggtaaactccttcattactcagtacagcactggccaggtgtcggtgcagattgactgggagatccagaaggagcggtccaaacgctggaaccccgaggtccagtttacctccaactacggacagcaaaactctctgttgtgggctcccgatgcggctgggaaatacactgagcctagggctatcggtacccgctacctcacccaccacctgtaa

SEQ ID NO: 785 - DNA, 2175 bp, synthetic construct
  source 1..2175: mol_type = other DNA; note = Description of Artificial Sequence: Synthetic polynucleotide
atgtcttttgttgatcaccctccagattggttggaagaagttggtgaaggtcttcgcgagtttttgggccttgaagcgggcccaccgaaaccaaaacccaatcagcagcatcaagatcaagcccgtggtcttgtgctgcctggttataactatctcggacccggaaacggtctcgatcgaggagagcctgtcaacagggcagacgaggtcgcgcgagagcacgacatctcgtacaacgagcagcttgaggcgggagacaacccctacctcaagtacaaccacgcggacgccgagtttcaggagaggctcgccgacgacacatccttcgggggaaacctcggaaaggcagtctttcaggccaagaaaagggttctcgaaccttttggcctggttgaagagggtgctaagacggcccctaccggaaagcggatagacgaccactttccaaaaagaaagaaggcccggaccgaagaggactccaagccttccacctcgtcagacgccgaagctggacccagcggatcccagcagctgcaaatcccagcccaaccagcctcaagtttgggagctgatacaatgtctgcgggaggtggcggcccattgggcgacaataaccaaggtgccgatggagtgggcaatgcctcgggagattggcattgcgattccacgtggatgggggacagagtcgtcaccaagtccacccgaacctgggtgctgcccagctacaacaaccaccagtaccgagagatcaaaagcggctccgtcgacggaagcaacgccaacgcctactttggatacagcaccccctgggggtactttgactttaaccgcttccacagccactggagcccccgagactggcaaagactcatcaacaactactggggcttcagaccccggtccctcagagtcaaaatcttcaacattcaagtcaaagaggtcacggtgcaggactccaccaccaccatcgccaacaacctcacctccaccgtccaagtgtttacggacgacgactaccagctgccctacgtcgtcggcaacgggaccgagggatgcctgccggccttccctccgcaggtctttacgctgccgcagtacggttacgcgacgctgaaccgcgacaacacagaaaatcccaccgagaggagcagcttcttctgcctagagtactttcccagcaagatgctgagaacgggcaacaactttgagtttacctacaactttgaggaggtgcccttccactccagcttcgctcccagtcagaacctcttcaagctggccaacccgctggtggaccagtacttgtaccgcttcgtgagcacaaataacactggcggagtccagttcaacaagaacctggccgggagatacgccaacacctacaaaaactggttcccggggcccatgggccgaacccagggctggaacctgggctccggggtcaaccgcgccagtgtcagcgccttcgccacgaccaataggatggagctcgagggcgcgagttaccaggtgcccccgcagccgaacggcatgaccaacaacctccagggcagcaacacctatgccctggagaacactatgatcttcaacagccagccggcgaacccgggcaccaccgccacgtacctcgagggcaacatgctcatcaccagcgagagcgagacgcagccggtgaaccgcgtggcgtacaacgtcggcgggcagatggccaccaacaaccagagctccaccactgcccccgcgaccggcacgtacaacctccaggaaatcgtgcccggcagcgtgtggatggagagggacgtgtacctccaaggacccatctgggccaagatcccagagacggaggcgcactttcacccctctccggccatgggcggattcggactcaaacacccaccgcccatgatgctcatcaagaacacgcctgtgcccggaaatatcaccagcttctcggacgtgcccgtcagcagcttcatcacccagtacagcaccgggcaggtcaccgtggagatggagtgggagctcaagaaggaaaactccaagaggtggaacccagagatccagtacacaaacaactacaacgacccccagtttgtggactttgccccggacagcaccggggaatacagaaccaccagacctatcggaacccgataccttacccgacccctttaa

SEQ ID NO: 786 - DNA, 2175 bp, synthetic construct
  source 1..2175: mol_type = other DNA; note = Description of Artificial Sequence: Synthetic polynucleotide
atgtcttttgttgatcaccctccagattggttggaagaagttggtgaaggtcttcgcgagtttttgggccttgaagcgggcccaccgaaaccaaaacccaatcagcagcatcaagatcaagcccgtggtcttgtgctgcctggttataactatctcggacccggaaacggtctcgatcgaggagagcctgtcaacagggcagacgaggtcgcgcgagagcacgacatctcgtacaacgagcagcttgaggcgggagacaacccctacctcaagtacaaccacgcggacgccgagtttcaggagaagctcgccgacgacacatcctccgggggaaacctcggaaaggcagtctttcaggccaagaaaagggttctcgaaccttttggcctggttgaagagggtgctaagacggcccctaccggaaagcggatagacgaccactttccaaaaagaaagaaggcccggaccgaagaggactccaagccttccacctcgtcagacgccgaagctggacccagcggatcccagcagctgcaaatcccagcccaaccagcctcaagtttgggagctgatacaatgtctgcgggaggtggcggcccattgggcgacaataaccaaggtgccgatggagtgggcaatgcctcgggagattggcattgcgattccacgtggatgggggacagagtcgtcaccaagtccacccgaacctgggtgctgcccagctacaacaaccaccagtaccgagagatcaaaagcggctccgtcgacggaagcaacgccaacgcctactttggatacagcaccccctgggggtactttgactttaaccgcttccacagccactggagcccccgagactggcaaagactcatcaacaactactggggcttcagaccccggtccctcagagtcaaaatcttcaacattcaagtcaaagaggtcacggtgcaggactccaccaccaccatcgccaacaacctcacctccaccgtccaagtgtttacggacgacgactaccagctgccctacgtcgtcggcaacgggaccgagggatgcctgccggccttccctccgcaggtctttacgctgccgcagtacggttacgcgacgctgaaccgcgacaacacagaaaatcccaccgagaggagcagcttcttctgcctagagtactttcccagcaagatgctgagaacgggcaacaactttgagtttacctacaactttgaggaggtgcccttccactccagcttcgctcccagtcagaacctcttcaagctggccaacccgctagtggaccagtacttgtaccgcttcgtgagcacaaataacactggcggagtccagttcaacaagaacctggccgggagatacgccaacacctacaaaaactggttcccggggcccatgggccgaacccagggctggaacctgggctccggggtcaaccgcgccagtgtcagcgccttcgccacgaccaataggatggagctcgagggcgcgagttaccaggtgcccccgcagccgaacggcatgaccaacaacctccagggcagcaacacctatgccctggagaacactatgatcttcaacagccagccggcgaacccgggcaccaccgccacgtacctcgagggcaacatgctcatcaccagcgagagcgagacgcagccggtgaaccgcgtggcgtacaacgtcggcgggcagatggccaccaacaaccagagctccaccactgcccccgcgaccggcacgtacaacctccaggaaatcgtgcccggcagcgtgtggatggagagggacgtgtacctccaaggacccatctgggccaagatcccagagacgggggcgcactttcacccctctccggccatgggcggattcggactcaaacacccaccgcccatgatgctcatcaagaacacgcctgtgcccggaaatatcaccagcttctcggacgtgcccgtcagcagcttcatcacccagtacagcaccgggcaggtcaccgtggagatggagtgggagctcaagaaggaaaactccaagaggtggaacccagagatccagtacacaaacaactacaacgacccccagtttgtggactttgccccggacagcaccggggaatacagaaccaccagacctatcggaacccgataccttacccgacccctttaa

SEQ ID NO: 787 - DNA, 2175 bp, synthetic construct
  source 1..2175: mol_type = other DNA; note = Description of Artificial Sequence: Synthetic polynucleotide
atgtcttttgttgatcaccctccagattggttggaagaagttggtgaaggtcttcgcgagtttttgggccttgaagcgggcccaccgaaaccaaaacccaatcagcagcatcaagatcaagcccgtggtcttgtgctgcctggttataactatctcggacccggaaacggtctcgatcgaggagagcctgtcaacagggcagacgaggtcgcgcgagagcacgacatctcgtacaacgagcagcttgaggcgggagacaacccctacctcaagtacaaccacgcggacgccgagtttcaggagaagctcgccgacgacacatccttcgggggaaacctcggaaaggcagtctttcaggccaagaaaagggttctcgaaccttttggcctggttgaagagggtgctaagacggcccctaccggaaagcggatagacgaccactttccaaaaagaaagaaggcccggaccgaagaggactccaagccttccacctcgtcagacgccgaagctggacccagcggatcccagcagctgcaaatcccagcccaaccagcctcaagtttgggagctgatacaatgtctgcgggaggtggcggcccattgggcgacaataaccaaggtgccgatggagtgggcaatgcctcgggagattggcattgcgattccacgtggatgggggacagagtcgtcaccaagtccacccgaacctgggtgctgcccagctacaacaaccaccagtaccgagagatcaaaagcggctccgtcgacggaagcaacgccaacgcctactttggatacagcaccccctgggggtactttgactttaaccgcttccacagccactggagcccccgagactggcaaagactcatcaacaactactggggcttcagaccccggtccctcagagtcaaaatcttcaacattcaagtcaaagaggtcacggtgcaggactccaccaccaccatcgccaacaacctcacctccaccgtccaagtgtttacggacgacgactaccagctgccctacgtcgtcggcaacgggaccgagggatgcctgccggccttccctccgcaggtctttacgctgccgcagtacggttacgcgacactgaaccgcgacaacacagaaaatcccaccgagaggagcagcttcttctgcctagagtactttcccagcaagatgctgagaacgggcaacaactttgagtttacctacaactttgaggaggtgcccttccactccagcttcgctcccagtcagaacctcttcaagctggccaacccgctggtggaccagtacttgtaccgcttcgtgagcacaaataacactggcggagtccagttcaacaagaacctggccgggagatacgccaacacctacaaaaactggttcccggggcccatgggccgaacccagggctggaacctgggctccggggtcaaccgcgccagtgtcagcgccttcgccacgaccaataggatggagctcgagggcgcgagttaccaggtgcccccgcagccgaacggcatgaccaacaacctccagggcagcaacacctatgccctggagaacactatgatcttcaacagccagccggcgaacccgggcaccaccgccacgtacctcgagggcaacatgctcatcaccagcgagagcgagacgcagccggtgaaccgcgtggcgtacaacgtcggcgggcagatggccaccaacaaccagagctccaccactgcccccgcgaccggcacgtacaacctccaggaaatcgtgcccggcagcgtgtggatggagagggacgtgtacctccaaggacccatctgggccaagatcccagagacgggggcgcactttcacccctctccggccatgggcggattcggactcaaacacccaccgcccatgatgctcatcaagagcacgcctgtgcccggaaatatcaccagcttctcggacgtgcccgtcagcagcttcatcacccagtacagcaccgggcaggtcaccgtggagatggagtgggagctcaagaaggaaaactccaagaggtggaacccagagatccagtacacaaacaactacaacgacccccagtttgtggactttgccccggacagcaccggggaatacagaaccaccagacctatcggaacccgataccttacccgacccctttaa

SEQ ID NO: 788 - DNA, 2175 bp, synthetic construct
  source 1..2175: mol_type = other DNA; note = Description of Artificial Sequence: Synthetic polynucleotide
atgtcttttgttgatcaccctccagattggttggaagaagttggtgaaggtcttcgcgagtttttgggccctgaagcgggcccaccgaaaccaaaacccaatcagcagcatcaagatcaagcccgtggtcttgtgctgcctggttataactatctcggacccggaaacggtctcgatcgaggagagcctgtcaacagggcagacgaggtcgcgcgagagcacgacatctcgtacaacgagcagcttgaggcgggagacaacccctacctcaagtacaaccacgcggacgccgagtttcaggagaagctcgccgacgacacatccttcgggggaaacctcggaaaggcagtctttcaggccaagaaaagggttctcgaaccttttggcctggttgaagagggtgctaagacggcccctaccggaaagcggatagacgaccactttccaaaaagaaagaaggtccggaccgaagaggactccaagccttccacctcgtcagacgccgaagctggacccagcggatcccagcagctgcaaatcccagcccaaccagcctcaagtttgggagctgatacaatgtctgcgggaggtggcggcccattgggcgacaataaccaaggtgccgatggagtgggcaatgcctcgggagattggcattgcgattccacgtggatgggggacagagtcgtcaccaagtccacccgaacctgggtgccgcccagctacaacaaccaccagtaccgagagatcaaaagcggctccgtcgacggaagcaacgccaacgcctactttggatacagcaccccctgggggtactttgactttaaccgcttccacagccactggagcccccgagactggcaaagactcatcaacaactactggggcttcagaccccggtccctcagagtcaaaatcttcaacattcaagtcaaagaggtcacggtgcaggactccaccaccaccatcgccaacaacctcacctccaccgtccaagtgtttacggacgacgactaccagctgccctacgtcgtcggcaacgggaccgagggatgcctgccggccttccctccgcaggtctttacgctgccgcagtacggttacgcgacgctgaaccgcgacaacacagaaaatcccaccgagaggagcagcttcttctgcctagagtactttcccagcaagatgctgagaacgggcaacaactttgagtttacctacaactttgaggaggtgcccttccactccagcttcgctcccagtcagaacctcttcaagctggccaacccgctggtggaccagtacttgtaccgcttcgtgagcacaaataacactggcggagtccagttcaacaagaacctggccgggagatacgccaacacctacaaaaactggttcccggggcccatgggccgaacccagggctggaacctgggctccggggtcaaccgcgccagtgtcagcgccttcgccacgaccaataggatggagctcgagggcgcgagttaccaggtgcccccgcagccgaacggcatgaccaacaacctccagggcagcaacacctatgccctggagaacactatgatcttcaacagccagccggcgaacccgggcaccaccgccacgtacctcgagggcaacatgctcatcaccagcgagagcgagacgcagccggtgaaccgcgtggcgtgcaacgtcggcgggcagatggccaccaacaaccagagctccaccactgcccccgcgaccggcacgtacaacctccaggaaatcgtgcccggcagcgtgtggatggagagggacgtgtacctccaaggacccatctgggccaagatcccagagacgggggcgcactttcacccctctccggccatgggcggattcggactcaaacacccaccgcccatgatgctcatcaagaacacgcctgtgcccggaaatatcaccagcttctcggacgtgcccgtcagcagcttcatcacccagtacagcaccgggcaggtcaccgtggagatggagtgggagctcaagaaggaaaactccaagaggtggaacccagagatccagtacacaaacaactacaacgacccccagtttgtggactttgccccggacagcaccggggaatacagaaccaccagacctattggaacccgataccttacccgacccctttaa

SEQ ID NO: 789 - DNA, 2175 bp, synthetic construct
  source 1..2175: mol_type = other DNA; note = Description of Artificial Sequence: Synthetic polynucleotide
atgtcttttgttgatcaccctccagattggttggaagaagttggtgaaggtcttcgcgagtttttgggccttgaagcgggcccaccgaaaccaaaacccaatcagcagcatcaagatcaagcccgtggtcttgtgctgcctggttataactatctcggacccggaaacggtctcgatcgaggagagcctgtcaacagggcagacgaggtcgcgcgagagcacgacatctcgtacaacgagcagcttgaggcgggagacaacccctacctcaagtacaaccacgcggacgccgagtttcaggagaagctcgccgacgacacatccttcgggggaaacctcggaaaggcagtctttcaggccaagaaaagggttctcgaaccttttggcctggttgaagagggtgctaagacggcccctaccggaaagcggatagacgaccactttccaaaaagaaagaaggcccggaccgaagaggactccaagccttccacctcgtcagacgccgaagctggacccagcggatcccagcagctgcaaatcccagcccaaccagcctcaagtttgggagctgatacaatgtctgcgggaggtggcggcccattgggcgacaataaccaaggtgccgatggagtgggcaatgcctcgggagattggcattgcgattccacgtggatgggggacagagtcgtcaccaagtccacccgaacctgggtgctgcccagctacaacaaccaccagtaccgagagatcaaaagcggctccgtcgacggaagcaacgccaacgcctactttggatacagcaccccctgggggtactttgactttaaccgcttccacagccactggagcccccgagactggcaaagactcatcaacaactactggggcttcagaccccggtccctcagagtcaaaatcttcaacattcaagtcaaagaggtcacggtgcaggactccaccaccaccatcgccaacaacctcacctccaccgtccaagtgtttacggacgacgactaccagctgccctacgtcgtcggcaacgggaccgagggatgcctgccggccttccctccgcaggtctttacgctgccgcagtacggttacgcgacgctgaaccgcgacaacaccgaaaatcccaccgagaggagcagcttcttctgcctagagtactttcccagcaagatgctgagaacgggcaacaactttgagtttacctacaactttgaggaggtgcccttccactccagcttcgctcccagtcagaacctcttcaagctggccaacccgctggtggaccagtacttgtaccgcttcgtgagcacaaataacactggcggagtccagttcaacaagaacctggccgggagatacgccaacacctacaaaaactggttcccggggcccatgggccgaacccagggctggaacctgggctccggggtcaaccgcgccagtgtcagcgccttcgccacgaccaataggatggagctcgagggcgcgagttaccaggtgcccccgcagccgaacggcatgaccaacaacctccagggcagcaacacctatgccctggagaacactatgatcttcaacagccagccggcgaacccgggcaccaccgccacgtacctcgagggcaacatgctcatcaccagcgagagcgagacgcagccggtgaaccgcgtggcgtacaacgtcggcgggcagatggccaccaacaaccagagctccaccactgcccccgcgaccggcgcgtacaacctccaggaaatcgtgcccggcagcgtgtggatggagagggacgtgtacctccaaggacccatctgggccaagatcccagagacgggggcgcactttcacccctctccggccatgggcggattcggactcaaacacccaccgcccatgatgctcatcaagaacacgcctgtgcccggaaatatcaccagcttctcggacgtgcccgtcagcagcttcatcacccagtacagcaccgggcaggtcaccgtggagatggagtgggagctcaagaaggaaaactccaagaggtggaacccagagatccagtacacaaacaactacaacgacccccagtttgtggactttgccccggacagcaccggggaatacagaaccaccagacctatcggaacccgataccttacccgacccctttaa

SEQ ID NO: 790 - DNA, 2175 bp, synthetic construct
  source 1..2175: mol_type = other DNA; note = Description of Artificial Sequence: Synthetic polynucleotide
atgtcttttgttgatcaccctccagattggttggaagaagttggtgaaggtcttcgcgagtttttgggccttgaagcgggcccaccgaaaccaaaacccaatcagcagcatcaagatcaagcccgtggtcttgtgctgcctggttataactatctcggacccggaaacggtctcgatcgaggagagcctgtcaacagggcagacggggtcgcgcgagagcacgacatctcgtacaacgagcagcttgaggcgggagacaacccctacctcaagtacaaccacgcggacgccgagtttcaggagaagctcgccgacgacacatccttcgggggaaacctcggaaaggcagtctttcaggccaagaaaagggttctcgaaccttttggcctggttgaagagggtgctaagacggcccctaccggaaagcggatagacgaccactttccaaaaagaaagaaggcccggaccgaagaggactccaagccttccacctcgtcagacgccgaagctggacccagcggatcccagcagctgcaaatcccagcccaaccagcctcaagtttgggagctgatacaatgtctgcgggaggtggcggcccattgggcgacaataaccaaggtgccgatggagtgggcaatgcctcgggagattggcattgcgattccacgtggatgggggacagagtcgtcaccaagtccacccgaacctgggtgctgcccagctacaacaaccaccagtaccgagagatcaaaagcggctccgtcgacggaagcaacgccaacgcctactttggatacagcaccccctgggggtactttgactttaaccgcttccacagccactggagcccccgagactggcaaagactcatcaacaactactggggcttcagaccccggtccctcagagtcaaaatcttcaacattcaagtcaaagaggtcacggtgcaggactccaccaccaccatcgccaacaacctcacctccaccgtccaagcgtttacggacgacgactaccagctgccctacgtcgtcggcaacgggaccgagggatgcctgccggccttccctccgcaggtctttacgctgccgcagtacggttacgcgacgctgaaccgcgacaacacagaaaatcccaccgagaggagcagcttcttctgcctagagtactttcccagcaagatgctgagaacgggcaacaactttgagtttacctacaactttgaggaggtgcccttccactccagcttcgctcccagtcagaacctcttcaagctggccaacccgctggtggaccagtacttgtaccgcttcgtgagcacaaataacactggcggagtccagttcaacaagaacctggccgggagatacgccaacacctacaaaaactggttcccggggcccatgggccgaacccagggctggaacctgggctccggggtcaaccgcgccagtgtcagcgccttcgccacgaccaataggatggagctcgagggcgcgagttaccaggtgcccccgcagccgaacggcatgaccaacaacctccagggcagcaacacctatgccctggagaacactatgatcttcaacagccagccggcgaacccgggcaccaccgccacgtacctcgagggcaacatgctcatcaccagcgagagcgagacgcagccggtgaaccgcgtggcgtacaacgtcggcgggcagatggccaccaacaaccagagctccaccactgcccccgcgaccggcacgtacaacctccaggaaatcgtgcccggcagcgtgtggatggagagggacgtgtacctccaaggacccatctgggccaagatcccagagacgggggcgcactttcacccctctccggccatgggcggattcggactcaaacacccaccgcccatgatgctcatcaagaacacgcctgtgcccggaaatatcaccagcttctcggacgtgcccgtcagcagcttcatcacccagtacagcaccgggcaggtcaccgtggagatggagtgggagctcaagaaggaaaactccaagaggtggaacccagagatccagtacacaaacaactacaacgacccccagtttgtggactttgccccggacagcaccggggaatacagaaccaccagacctatcggaacccgataccttacccgacccctttaa

SEQ ID NO: 791 - DNA, 2175 bp, synthetic construct
  source 1..2175: mol_type = other DNA; note = Description of Artificial Sequence: Synthetic polynucleotide
atgtcttttgttgatcaccctccagattggttggaagaagttggtgaaggtcttcgcgagtttttgggccttgaagcgggcccaccgaaaccaaaacccaatcagcagcatcaagatcaagcccgtggtcttgtgctgcctggttataactatctcggacccggaaacggtctcgatcgaggagagcctgtcaacagggcagacgaggtcgcgcgagagcacgacatctcgtacaacgagcagcttgaggcgggagacaacccctacctcaagtacaaccacgcggacgccgagtttcaggagaagctcgccgacgacacatccttcgggggaaacctcggaaaggcagtctttcaggccaagaaaagggttctcgaaccttttggcctggttgaagagggtgctaagacggcccctaccggaaagcggatagacgaccactttccaaaaagaaagaaggcccggaccgaagaggactccaagccttccacctcgtcagacgccgaagctggacccagcggatcccagcagctgcaaatcccagcccaaccagcctcaagtttgggagctgatacaatgtctgcgggaggtggcggcccattgggcgacaataaccaaggtgccgatggagtgggcaatgcctcgggagattggcattgcgattccacgtggatgggggacagagtcgtcaccaagtccacccgaacctgggtgctgcccagctacaacaaccaccagtaccgagagatcaaaagcggctccgtcgacggaagcaacgccaacgcctactttggatacagcaccccctgggggtactttgactttaaccgcttccacagccactggagcccccgagactggcaaagactcatcaacaactactggggcttcagaccccggtccctcagagtcaaaatcttcaacattcaagtcaaagaggtcacggtgcaggactccaccaccaccatcgccaacaacctcacctccaccgtccaagtgtttacggacgacgactaccagctgccctacgtcgtcggcaacgggaccgagggatgcctgccggccttccctccgcaggtctttacgctgccgcagtacggttacgcgacgctgaaccgcgacaacacagaaaatcccaccgagaggagcagcttcttctgcctagagtactttcccagcaagatgctgagaacgggcaacaactttgagtttacctacaactttgaggaggtgcccttccactccagcttcgctcccagtcagaacctcttcaagctggccaacccgctggtggaccagtacttgtaccgcttcgtgagcacaaataacactggcggagtccagttcaacaagaacctggccgggagatacgccaacacctacaaaaactggttcccggggcccatgggccgaacccagggctggaacctgggctccggggtcaaccgcgccagtgtcagcgccttcgccacgaccaataggatggagctcgagggcgcgagttactaggtgcccccgcagccgaacggcatgaccaacaacctccagggcagcaacacctatgccctggagaacactatgatcttcaacagccagccggcgaacccgggcaccaccgccacgtacctcgagggcaacatgctcatcaccagcgagagcgagacgcagccggtgaaccgcgtggcgtacaacgtcggcgggcagatggccaccaacaaccagagctccaccactgcccccgcgaccggcacgtacaacctccaggaaatcgtgcccggcagcgtgtggatggagggggacgtgtacctccaaggacccatctgggccaagatcccagagacgggggcgcactttcacccctctccggccatgggcggattcggactcaagcacccaccgcccatgatgctcatcaagaacacgcctgtgcccggaaatatcaccagcttctcggacgtgcccgtcagcagcttcatcacccagtacagcaccgggcaggtcaccgtggagatggagtgggagctcaagaaggaaaactccaagaggtggaacccagagatccagtacacaaacaactacaacgacccccagtttgtggactttgccccggacagcaccggggaatacagaaccaccagacctatcggaacccgataccttacccgacccctttaa

SEQ ID NO: 792 - DNA, 2175 bp, synthetic construct
  source 1..2175: mol_type = other DNA; note = Description of Artificial Sequence: Synthetic polynucleotide
atgtcttttgttgatcaccctccagattggttggaagaagttggtgaaggtcttcgcgagtttttgggccttgaagcgggcccaccgaaaccaaaacccaatcagcagcatcaagatcaagcccgtggtcttgtgctgcctggttataactatctcggacccggaaacggtctcgatcgaggagagcctgtcaacagggcagacgaggtcgcgcgagagcacgacatctcgtacaacgagcagcttgaggcgggagacaacccctacctcaagtacaaccacgcggacgccgagtttcaggagaagctcgccgacgacacatccttcgggggaaacctcggaaaggcagtctttcaggccaagaaaagggttctcgaaccttttggcctggttgaagagggtgctaagacggcccctaccggaaagcggatagacgaccactttccaaaaagaaagaaggtccggaccgaagaggactccaagccttccacctcgtcagacgccgaagctggacccagcggatcccagcagctgcaaatcccagcccaaccagcctcaagtttgggagctgatacaatgtctgcgggaggtggcggcccattgggcgacaataaccaaggtgccgatggagtgggcaatgcctcgggagattggcattgcgattccacgtggatgggggacagagtcgtcaccaagtccacccgaacctgggtgctgcccagctacaacaaccaccagtaccgagagatcaaaagcggctccgtcgacggaagcaacgccaacgcctactttggatacagcaccccctgggggtactttgactttaaccgcttccacagccactggagcccccgagactggcaaagactcatcaacaactactggggcttcagaccccggtccctcagagtcaaaatcttcaacattcaagtcaaagaggtcacggtgcaggactccaccaccaccatcgccaacaacctcacctccaccgtccaagtgtttacggacgacgactaccagctgccctacgtcgtcggcaacgggaccgagggatgcctgccggccttccctccgcaggtctttacgctgccgcagtacggttacgcgacgctgaaccgcgacaacacagaaaatcccaccgagaggagcagcttcttctgcctagagtactttcccagcaagatgctgagaacgggcaacaactttgagtttacctacaactttgaggaggtgcccttccactccagcttcgctcccagtcagaacctcttcaagctggccaacccgctggtggaccagtacttgtaccgcttcgtgagcacaaataacactggcggagtccagttcaacaagaacctggccgggagatacgccaacacctacaaaaactggttcccggggcccatgggccgaacccagggctggaacctgggctccggggtcaaccgcgccagtgtcagcgccttcgccacgaccaataggatggagctcgagggcgcgagttaccaggtgcccccgcagccgaacggcatgaccaacaacctccagggcagcaacacctatgccctggagaacactatgatcttcaacagccagccggcgaacccgggcaccaccgccacgtacctcgagggcaacatgctcatcaccagcgagagcgagacgcagccggtgaaccgcgtggcgtacaacgtcggcgggcagatggccaccaacaaccagagctccaccactgcccccgcgaccggcacgtacaacctccaggaaatcgtgcccggcagcgtgtggatggagagggacgtgtacctccaaggacccatctgggccaagatcccagagacgggggcgcactttcacccctctccggccatgggcggattcggactcaaacacccaccgcccatgatgctcatcaagaacacgcctgtgcccggaaatatcaccagcttctcggacgtgcccgtcagcagcttcatcacccagtacagcaccgggcaggtcaccgtggagatggagtgggagctcaagaaggaaaactccgagaggtggaacccagagatccagtacacaaacaactacaacgacccccagtttgtggactttgccccggacagcaccggggaatacagaaccaccagacctattggaacccgataccttacccgacccctttaa

SEQ ID NO: 793 - DNA, 2175 bp, synthetic construct
  source 1..2175: mol_type = other DNA; note = Description of Artificial Sequence: Synthetic polynucleotide
atgtcttttgttgatcaccctccagattggttggaagaagttggtgaaggtcttcgcgagtttttgggccttgaagcgggcccaccgaaaccaaaacccaatcagcagcatcaagatcaagcccgtggtcttgtgctgcctggttataactatctcggacccggaaacggtctcgatcgaggagagcctgtcaacagggcagacgaggtcgcgcgagagcacgacatctcgtacagcgagcagcttgaggcgggagacaacccctacctcaagtacaaccacgcggacgccgagtttcaggagaagctcgccgacgacacatccttcgggggaaacctcggaaaggcagtctttcaggccaagaaaagggttctcgaaccttttggcctggttgaagagggtgctaagacggcccctaccggaaagcggatagacgaccactttccaaaaagaaagaaggcccggaccgaagaggactccaagccttccacctcgtcagacgccgaagctggacccagcggatcccagcagctgcaaatcccagcccaaccagcctcaagtttgggagctgatacaatgtctgcgggaggtggcggcccattgggcgacaataaccaaggtgccgatggagtgggcaatgcctcgggagattggcattgcgattccacgtggatgggggacagagtcgtcaccaagtccacccgaacctgggtgctgcccagctacaacaaccaccagtaccgagagatcaaaagcggctccgtcgacggaagcaacgccaacgcctactttggatacagcaccccctgggggtactttgactttaaccgcttccacagccactggagcccccgagactggcaaagactcatcaacaactactggggcttcagaccccggtccctcagagtcaaaatcttcaacattcaagtcaaagaggtcacggtgcaggactccaccaccaccatcgccaacaacctcacctccaccgtccaagtgtttacggacgacgactaccagctgccctacgtcgtcggcaacgggaccgagggatgcctgccggccttccctccgcaggtctttacgctgccgcagtacggttacgcgacgctgaaccgcgacaacacagaaaatcccaccgagaggagcagcttcttctgcctagagtactttcccagcaagatgctgagaacgggcaacaactttgagtttacctacaactttgaggaggtgcccttccactccagcttcgctcccagtcagaacctcttcaagctggccaacccgctggtggaccagtacttgtaccgcttcgtgagcacaaataacactggcggagtccagttcaacaagaacctggccgggagatacgccaacacctacaaaaactggttcccggggcccatgggccgaacccagggctggaacctgggctccggggtcaaccgcgccagtgtcagcgccttcgccacgaccaataggatggagctcgagggcgcgagttaccaggtgcccccgcagccgaacggcatgaccaacaacctccagggcagcaacacctatgccctggagaacactatgatcttcaacagccagccggcgaacccgggcaccaccgccacgtacctcgagggcaacatgctcatcaccagcgagagcgagacgcagccggtgaaccgcgtggcgtacaacgtcggcgggcagatggccaccaacaaccagagctccaccactgcccccgcgaccggcacgtacaacctccaggaaatcgtgcccggcagcgtgtggatggagagggacgtgtacctccaaggacccatctgggccaagatcccagagacgggggcgcactttcacccctctccggccatgggcggattcggactcaaacacccaccgcccatgatgctcatcaagaacacgcctgtgcccggaaatatcaccagcttctcggacgtgcccgtcagcagcttcatcacccagtacagcaccgggcaggtcaccgtggagatggagtgggagctcaagaaggaaaactccaagaggtggaacccagagatccagtacacaaacaactacaacgacccccagtttgtggactttgccccggacagcaccggggaatacagaaccgccagacctatcggaacccgataccttacccgacccctttaa

SEQ ID NO: 794 - DNA, 2175 bp, synthetic construct
  source 1..2175: mol_type = other DNA; note = Description of Artificial Sequence: Synthetic polynucleotide
atgtcttttgttgatcaccctccagattggttggaagaagttggtgaaggtcttcgcgagtttttgggccctgaagcgggcccaccgaaaccaaaacccaatcagcagcatcaagatcaagcccgtggtcttgtgctgcctggttataactatctcggacccggaaacggtctcgatcgaggagagcctgtcaacagggcagacgaggtcgcgcgagagcacgacatctcgtacaacgagcagcttgaggcgggagacaacccctacctcaagtacaaccacgcggacgccgagtttcaggagaagctcgccgacgacacatccttcgggggaaacctcggaaaggcagtctttcaggccaagaaaagggttctcgaaccttttggcctggttgaagagggtgctaagacggcccctaccggaaagcggatagacgaccactttccaaaaagaaagaaggcccggaccgaagaggactccaagccttccacctcgtcagacgccgaagctggacccagcggatcccagcagctgcaaatcccagcccaaccagcctcaagtttgggagctgatacaatgtctgcgggaggtggcggcccattgggcgacaataaccaaggtgccgatggagtgggcaatgcctcgggagattggcattgcgattccacgtggatgggggacagagtcgtcaccaagtccacccgaacctgggtgctgcccagctacaacaaccaccagtaccgagagatcaaaagcggctccgtcgacggaagcaacgccaacgcctactttggatacagcaccccctgggggtactttgactttaaccgcttccacagccactggagcccccgagactggcaaagactcatcaacaactactggggcttcagaccccggtccctcagagtcaaaatcttcaacattcaagtcaaagaggtcacggtgcaggactccaccaccaccatcgccaacaacctcacctccaccgtccaagtgtttacggacgacgactaccagctgccctacgtcgtcggcaacgggaccgagggatgcctgccggccttccctccgcaggtctttacgctgccgcagtacggttacgcgacgctgaaccgcgacaacacagaaaatcccaccgagaggagcagcttcttctgcctagagtactttcccagcaagatgctgagaacgggcaacaactttgagtttacctacaactttgaggaggtgcccttccactccagcttcgctcccagtcagaacctcttcaagctggccaacccgctggtggaccagtacttgtaccgcttcgtgagcacaaataacactggcggagtccagttcaacaagaacctggccgggagatacgccaacacctacaaaaactggttcccggggcccatgggccgaacccagggctggaacctgggctccggggtcaaccgcgccagtgtcagcgccttcgccacgaccaataggatggagctcgagggcgcgagttaccaggtgcccccgcagccgaacggcatgaccaacaacctccagggcagcaacacctatgccctggagaacactatgatcttcaacagccagccggcgaacccgggcaccaccgccacgtacctcgagggcaacatgctcatcaccagcgagagcgagacgcagccggtgaaccgcgtggcgtacaacgtcggcgggcagatgaccaccaacaaccagagctccaccactgcccccgcgaccggcacgtacaacctccaggaaatcgtgcccggcagcgtgtggatggagagggacgtgtacccccaaggacccatctgggccaagatcccagagacgggggcgcactttcacccctctccggccatgggcggattcggactcaaacacccaccgcccatgatgctcatcaagaacacgcctgtgcccggaaatatcaccagcttctcggacgtgcccgtcagcagcttcatcacccagtacagcaccgggcaggtcaccgtggagatggagtgggagctcaagaaggaaaactccaagaggtggaacccagagatccagtacacaaacaactacaacgacccccagtttgtggactttgccccggacagcaccggggaatacaggaccaccagacctatcggaacccgataccttacccgacccctttaa

SEQ ID NO: 795 - DNA, 2175 bp, synthetic construct
  source 1..2175: mol_type = other DNA; note = Description of Artificial Sequence: Synthetic polynucleotide
atgtcttttgttgatcaccctccagattggttggaagaagttggtgaaggtcttcgcgagtttttgggccttgaagcgggcccaccgaaaccaaaacccaatcagcagcatcaagatcaagcccgtggtcttgtgctgcctggttataactatctcggacccggaaacggtctcgatcgaggagagcctgtcaacagggcagacgaggtcgcgcgagagcacgacatctcgtacaacgagcagcttgaggcgggagacaacccctacctcaagtacaaccacgcggacgccgagtttcaggagaagctcgccgacgacacatccttcgggggaaacctcggaaaggcagtctttcaggccaagaaaagggttctcgaaccttttggcctggttgaagagggtgctaagacggcccctaccggaaagcggatagacgaccactttccaaaaagaaagaaggcccggaccgaagaggactccaagccttccacctcgtcagacgccgaagctggacccagcggatcccagcagctgcaaatcccagcccaaccagcctcaagtttgggagctgatacaatgtctgcgggaggtggcggcccattgggcgacaataaccaaggtgccgatggagtgggcaatgcctcgggagattggcattgcgattccacgtggatgggggacagagtcgtcaccaagtccacccgaacctgggtgctgcccagctacaacaaccaccagtaccgagagatcaaaagcggctccgtcgacggaagcaacgccaacgcctactttggatacagcaccccctgggggtactttgactttaaccgcttccacagccactggagcccccgagactggcaaagactcatcaacaactactggggcttcagaccccggtccctcagagtcaaaatcttcaacattcaagtcaaagaggtcacggtgcaggactccaccaccaccatcgccaacaacctcacctccaccgtccaagtgtttacggacgacgactaccagctgccctacgtcgtcggcaacgggaccgagggatgcctgccggccttccctccgcaggtctttacgctgccgcagtacggttacgcgacgctgaaccgcgacaacacagaaaatcccaccgagaggagcagcttcctctgcctagagtactttcccagcaagatgctgagaacgggcaacaactttgagtttacctacaactttgaggaggtgcccttccactccagcttcgctcccagtcagaacctcttcaagctggccaacccgctggtggaccagtacttgtaccgcttcgtgagcacaaataacactggcggagtccagttcaacaagaacctggccgggagatacgccaacacctacaaaaactggttcccggggcccatgggccgaacccagggctggaacctgggctccggggtcaaccgcgccagtgtcagcgccttcgccacgaccaataggatggagctcgagggcgcgagttaccaggtgcccccgcagccgaacggcatgaccaacaacctccagggcagcaacacctatgccctggagaacactatgatcttcaacagccagccggcgaacccgggcaccaccgccacgtacctcgagggcaacatgctcatcaccagcgagagcgagacgcagccggtgaaccgcgtggcgtacaacgtcggcgggcagatggccaccaacaaccagagctccaccactgcccccgcgaccggcacgtacaacctccaggaaatcgtgcccggcagcgtgtggatgaagagggacgtgtacctccaaggacccatctgggccaagatcccagagacgggggcgcactttcacccctctccggccatgggcggattcggactcaaacacccaccgcccatgatgctcatcaagaacacgcctgtgcccggaaatatcaccagcttctcggacgtgcccgtcagcagcttcatcacccagtacagcaccgggcaggtcaccgtggagatggagtgggagctcaagaaggaaaactccaagaggtggaacccagagatccagtacacaaacaactacaacgacccccagtttgtggactttgccccggacagcaccggggaatacagaaccaccagacctatcggaacccgataccttacccgacccctttaa

SEQ ID NO: 796 - DNA, 2175 bp, synthetic construct
  source 1..2175: mol_type = other DNA; note = Description of Artificial Sequence: Synthetic polynucleotide
atgtcttttgttgatcaccctccagattggttggaagaagttggtgaaggtcttcgcgagtttttgggccttgaggcgggcccaccgaaaccaaaacccaatcagcagcatcaagatcaagcccgtggtcttgtgctgcctggttataactatctcggacccggaaacggtctcgatcgaggagagcctgtcaacagggcagacgaggtcgcgcgagagcacgacatctcgtacaacgagcagcttgaggcgggagacaacccctacctcaagtacaaccacgcggacgccgagtttcaggagaagctcgccgacgacacatccttcgggggaaacctcggaaaggcagtctttcaggccaagaaaagggttctcgaaccttttggcctggttgaagagggtgctaagacggcccctaccggaaagcggatagacgaccactttccaaaaagaaagaaggcccggaccgaagaggactccaagccttccaccccgtcagacgccgaagctggacccagcggatcccagcagctgcaaatcccagcccaaccagcctcaagtttgggagctgatacaatgtctgcgggaggtggcggcccattgggcgacaataaccaaggtgccgatggagtgggcaatgcctcgggagattggcattgcgattccacgtggatgggggacagagtcgtcaccaagtccacccgaacctgggtgctgcccagctacaacaaccaccagtaccgagagatcaaaagcggctccgtcgacggaagcaacgccaacgcctactttggatacagcaccccctgggggtactttgactttaaccgcttccacagccactggagcccccgagactggcaaagactcatcaacaactactggggcttcagaccccggtccctcagagtcaaaatcttcaacattcaagtcaaagaggtcacggtgcaggactccaccaccaccatcgccaacaacctcacctccaccgtccaagtgtttacggacgacgactaccagctgccctacgtcgtcggcaacgggaccgagggatgcctgccggccttccctccgcaggtctttacgctgccgcagtacggttacgcgacgctgaaccgcgacaacacagaaaatcccaccgagaggagcagcttcttctgcctagagtactttcccagcaagatgctgagaacgggcaacaactttgagtttacctacaactttgaggaggtgcccttccactccagcttcgctcccagtcagaacctcttcaagctggccaacccgctggtggaccagtacttgtaccgcttcgtgagcacaaataacactggcggagtccagttcaacaagaacctggccgggagatacgccaacacctacaaaaactggttcccggggcccatgggccgaacccagggctggaacctgggctccggggtcaaccgcgccagtgtcagcgccttcgccacgaccaataggatggagctcgagggcgcgagttaccaggtgcccccgcagccgaacggcatgaccaacaacctccagggcagcaacacctatgccctggagaacactatgatcttcaacagccagccggcgaacccgggcaccaccgccacgtacctcgagggcaacatgctcatcaccagcgagagcgagacgcagccggtgaaccgcgtggcgtacaacgtcggcgggcagatggccaccaacaaccagagctccaccactgcccccgcgaccggcacgtacaacctccaggaaatcgtgcccggcagcgtgtggatggagagggacgtgtacctccaaggacccatctgggccaagatcccagagacgggggcgcactttcacccctctccggccatgggcggattcggactcaaacacccaccgcccatgatgctcatcaagaacacgcctgtgcccggaaatatcaccagcttctcggacgtgcccgtcagcagcttcatcacccagtacagcaccgggcaggtcaccgtggagatggagtgggagctcaagaaggaaaactccaagaggtggaacccagagatccagtacacaaacaactacaacgacccccagtttgtggactttgccccggacagcaccggggaatacagaaccaccagacctatcggaacccgataccttacccgacccctttaa

SEQ ID NO: 797 - DNA, 2175 bp, synthetic construct
  source 1..2175: mol_type = other DNA; note = Description of Artificial Sequence: Synthetic polynucleotide
atgtcttttgttgatcaccctccagattggttggaagaagttggtgaaggtcttcgcgagtttttgggccttgaagcgggcccaccgaaaccaaaacccaatcagcagcatcaagatcaagcccgtggtcttgtgctgcctggttataactatctcggacccggaaacggtctcgatcgaggagagcctgtcaacagggcagacgaggtcgcgcgagagcacgacatctcgtacaacgagcagcttgaggcgggagacaacccctacctcaagtacaaccacgcggacgccgagtttcaggagaagctcgccgacgacacatccttcgggggaaacctcggaaaggcagtctttcaggccaagaaaagggttctcgaaccttttggcctggttgaagagggtgctaagacggcccctaccggaaagcggatagacgaccactttccaaaaagaaagaaggcccggaccgaagaggactccaagccttccacctcgtcagacgccgaagctggacccagcggatcccagcagctgcaaatcccagcccaaccagcctcaagtttgggagctgatacaatgtctgcgggaggtggcggcccattgggcgacaataaccaaggtgccgatggagtgggcaatgcctcgggagattggcattgcgattccacgtggatgggggacagagtcgtcaccaagtccacccgaacctgggtgctgcccagctacaacaaccaccagtaccgagagatcaaaagcggctccgtcgacggaagcaacgccaacgcctactttggatacagcaccccctgggggtactttgactttaaccgcttccacagccactggagcccccgagactggcaaagactcatcaacaactactggggcttcagaccccggtccctcagagtcaaaatcttcaacattcaagtcaaagaggtcacggtgcaggactccaccaccaccatcgccaacaacctcacctccaccgtccaagtgtttacggacgacgactaccagctgccctacgtcgtcggcaacgggaccgagggatgcctgccggccttccctccgcaggtctttacgctgccgcagtacggttacgcgacgctgaaccgcgacaacacagaaaatcccaccgagaggagcagcttcttctgcctagagtactttcccagcaagatgctgagaacgggcaacaactttgagtttacctacaactttgaggaggtgcccttccactccagcttcgctcccagtcagaacctcttcaagctggccaacccgctggtggaccagtacttgtaccgcttcgtgagcacaaataacactggcggagtccagttcaacaagaacctggccgggagatacgccaacacccacaaaaactggttcccggggcccatgggccgaacccagggctggaacctgggctccggggtcaaccgcgccagtgtcagcgccttcgccacgaccaataggatggagctcgagggcgcgagttaccaggtgcccccgcagtcgaacggcatgaccaacaacctccggggcagcaacacctatgccctggagaacactatgatcttcaacagccagccggcgaacccgggcaccaccgccacgtacctcgagggcaacatgctcatcaccagcgagagcgagacgcagccggtgaaccgcgtggcgtacaacgtcggcgggcagatggccaccaacaaccagagctccaccactgcccccgcgaccggcacgtacaacctccaggaaatcgtgcccggcagcgtgtggatggagagggacgtgtacctccaaggacccatctgggccaagatcccagagacgggggcgcactttcacccctctccggccatgggcggattcggactcaaacacccaccgcccatgatgctcatcaagaacacgcctgtgcccggaaatatcaccagcttctcggacgtgcccgtcagcagcttcatcacccagtacagcaccgggcaggtcaccgtggagatggagtgggagctcaagaaggaaaactccaagaggtggaacccagagatccagtacacaaacaactacaacgacccccagtttgtggactttgccccggacagcaccggggaatacagaaccaccagacctatcggaacccgataccttacccgacccctttaa

SEQ ID NO: 798 - DNA, 2175 bp, synthetic construct
  source 1..2175: mol_type = other DNA; note = Description of Artificial Sequence: Synthetic polynucleotide
atgtcttttgttgatcaccctccagattggttggaagaagttggtgaaggtcttcgcgagtttttgggccttgaagcgggcccaccgaaaccaaaacccaatcagcagcatcaagatcaagcccgtggtcttgtgctgcctggttataactatctcggacccggaaacggtctcgatcgaggagagcctgtcaacagggcagacgaggtcgcgcgagagcacgacatctcgtacaacgagcagcttgaggcgggagacaacccctacctcaagtacaaccacgcggacgccgagtttcaggagaagctcgccgacgacacatccttcgggggaaacctcggaaaggcagtctttcaggccaagaaaagggttctcgaaccttttggcctggttgaagagggtgctaagacggcccctaccggaaagcggatagacgaccactttccaaaaagaaagaaggcccggaccgaagaggactccaagccttccacctcgtcagacgccgaagctggacccagcggatcccagcagctgcaaatcccagcccaaccagcctcaagtttgggagctgatacaatgtctgcgggaggtggcggcccattgggcgacaataaccaaggtgccgatggagtgggcaatgcctcgggagattggcattgcgattccacgtggatgggggacagagtcgtcaccaagtccacccgaacctgggtgctgcccagctacaacaaccaccagtaccgagagatcaaaagcggctccgtcgacggaagcaacgccaacgcctactttggatacagcaccccctgggggtactttgactttaaccgcttccacagccactggagcccccgagactggcaaagactcatcaacaactactggggcttcagaccccggtccctcagagtcaaaatcttcaacattcaagtcaaagaggtcacggtgcaggactccaccaccaccatcgccaacaacctcacctccaccgtccaagtgtttacggacgacgactaccagctgccctacgtcgtcggcaacgggaccgagggatgcctgccggccttccctccgcaggtctttacgctgccgcagtacggttacgcgacgctgaaccgcgacaacacagaaaatcccaccgagaggagcagcttcttctgcctagagtactttcccagcaagatgctgagaacgggcaacaactttgagtttacctacaactttgaggaggtgcccttccactccagcttcgctcccagtcagaacctcttcaagctggccaacccgctggtggaccagtacttgtaccgcttcgtgagcacaaataacactggcggagtccagttcaacaagaacctggccgggagatacgccaacacctacaaaaactggttcccggggcccatgggccgaacccagggctggaacctgggctccggggtcaaccgcgccagtgtcagcgccttcgccacgaccaataggatggagctcgagggcgcgagttaccaggtgcccccgcagccgaacggcatgaccaacaacctccagggcagcaacacctatgccctggagaacactatgatcttcaacagccagccggcgaacccgggcaccaccgccacgtacctcgagggcaacatgctcatcaccagcgagagcgagacgcagccggtgaaccgcgtggcgtacagcgtcggcgggcagatggccaccaacaaccagagctccaccactgcccccacgaccggcacgtacaacctccaggaaatcgtgcccggcagcgtgtggatggagagggacgtgtacctccaaggacccatctgggccaagatcccagagacgggggcgcactttcacccctctccggccatgggcggattcagactcaaacacccaccgcccatgatgctcatcaagaacacgcctgtgcccggaaatatcaccagcttctcggacgtgcccgtcagcagcttcatcacccagtacagcaccgggcaggtcaccgtggagatggagtgggagctcaagaaggaaaactccaagaggtggaacccagagatccagtacacaaacaactacaacgacccccagtttgtggactttgccccggacagcaccggggaatacagaaccaccagacctatcggaacccgataccttacccgacccctttaa

SEQ ID NO: 799 - DNA, 2175 bp, synthetic construct
  source 1..2175: mol_type = other DNA; note = Description of Artificial Sequence: Synthetic polynucleotide
atgtcttttgttgatcaccctccagattggttggaagaagttggtgaaggtcttcgcgagtttttgggccttgaagcgggcccaccgaaaccaaaacccaatcagcagcatcaagatcaagcccgtggtcttgtgctgcctggttataactatctcggacccggaaacggtctcgatcgaggagagcctgtcaacagggcagacgaggtcgcgcgagagcacgacatctcgtacaacgagcagcttgaggcgggagacaacccctacctcaagtacaaccacgcggacgccgagtttcaggagaagctcgccgacgacacatccttcgggggaaacctcggaaaggcagtctttcaggccaagaaaagggttctcgaaccttttggcctggttgaagagggtgctaagacggcccctaccggaaagcggatagacgaccactttccaaaaagaaagaaggcccggaccgaagaggactccaagccttccacctcgtcagacgccgaagctggacccagcggatcccagcagctgcaaatcccagcccaaccagcctcaagtttgggagctgatacaatgtctgcgggaggtggcggcccattgggcgacaataaccaaggtgccgatggagtgggcaatgcctcgggagattggcattgcgattccacgtggatgggggacagagtcgtcaccaagtccacccgaacctgggtgctgcccagctacaacaaccaccagtaccgagagatcaaaagcggctccgtcgacggaagcaacgccaacgcctactttggatacagcaccccctgggggtactttgactttaaccgcttccacagccactggagcccccgagactggcaaagactcatcaacaactactggggcttcagaccccggtccctcagagtcaaaatcttcaacattcaagtcaaagaggtcacggtgcaggactccaccaccaccatcgccaacaacctcacctccaccgtccaagtgtttacggacgacgactaccagctgccctacgtcgtcggcaacgggaccgagggatgcctgccggccttccctccgcaggtctttacgctgccgcagtacggttacgcgacgctgaaccgcgacaacacagaaaatcccaccgagaggagcagcttcttctgcctagagtactttcccagcaagatgctgagaacgggcaacaactttgagtttacctacaactttgaggaggtgcccttccactccagcttcgctcccagtcagaacctcttcaagctggccaacccgctggtggaccagtacttgtaccgcttcgtgagcacaaataacactggcggagtccagttcaacaagaacctggccgggagatacgccaacacctacaaaaactggttcccggggcccatgggccgaacccagggctggaacctgggctccggggtcaaccgcgccagtgtcagcgccttcgccgcgaccaataggatggagctcgagggcgcgagttaccaggtgcccccgcagccgaacggcatgaccaacaacctccagggcagcaacacctatgccctggagaacactatgatcttcaacagccagccggcgaacccgggcaccaccgccacgtacctcgagggcaacatgctcatcaccagcgagagcgagacgcagccggtgaaccgcgtggcgtacaacgtcggcgggcagatggccaccaacaaccagagctccaccactgcccccgcgaccggcacgtacaacctccaggaaatcgtgcccggcggcgtgtggatggagagggacgtgtacctccaaggacccatctgggccaagatcccagagacgggggcgcactttcacccctctccggccatgggcggattcggactcaaacacccaccgcccatgatgctcatcaagaacacgcctgtgcccggaaataccaccagcttctcggacgtgcccgtcagcagcttcatcacccagtacagcaccgggcaggtcaccgtggagatggagtgggagctcaagaaggaaaactccaagaggtggaacccagagatccagtacacaaacaactacaacgacccccagtttgtggactttgccccggacagcaccggggaatacagaaccaccagacctatcggaacccgataccttacccgacccctttaa

SEQ ID NO: 800 - DNA, 2175 bp, synthetic construct
  source 1..2175: mol_type = other DNA; note = Description of Artificial Sequence: Synthetic polynucleotide
atgtcttttgttgatcaccctccagattggttggaagaagttggtgaaggtcttcgcgagtttttgggccttgaagcgggcccaccgaaaccaaaacccaatcagcagcatcaagatcaagcccgtggtcttgtgctgcctggttataactatctcggacccggaaacggtctcgatcgaggagagcctgtcaacagggcagacgaggtcgcgcgagagcacgacatctcgtacaacgagcagcttgaggcgggagacaacccctacctcaagtacaaccacgcggacgccgagtttcaggagaagctcgccgacgacacatccttcgggggaaacctcggaaaggtagtctttcaggccaagaaaagggttctcgaaccttttggcctggttgaagagggtgctaagacggcccctaccggaaagcggatagacgaccactttccaaaaagaaagaaggcccggaccgaagaggactccaagccttccacctcgtcagacgccgaagctggacccagcggatcccagcagctgcaaatcccagcccaaccagcctcaagtttgggagctgatacaatgtctgcgggaggtggcggcccattgggcggcaataaccaaggtgccgatggagtgggcaatgcctcgggagattggcattgcgattccacgtggatgggggacagagtcgtcaccaagtccacccgaacctgggtgctgcccagctacaacaaccaccagtaccgagagatcaaaagcggctccgtcgacggaagcaacgccaacgcctactttggatacagcaccccctgggggtactttgactttaaccgcttccacagccactggggcccccgagactggcaaagactcatcaacaactactggggcttcagaccccggtccctcagagtcaaaatcttcaacattcaagtcaaagaggtcacggtgcaggactccaccaccaccatcgccaacaacctcacctccaccgtccaagtgtttacggacgacgactaccagctgccctacgtcgtcggcaacgggaccgagggatgcctgccggccttccctccgcaggtctttacgctgccgcagtacggttacgcgacgctgaaccgcgacaacacagaaaatcccaccgagaggagcagcttcttctgcctagagtactttcccagcaagatgctgagaacgggcaacaactttgagtttacctacaactttgaggaggtgcccttccactccagcttcgctcccagtcagaacctcttcaagctggccaacccgctggtggaccagtacttgtaccgcttcgtgagcacaaataacactggcggagtccagttcaacaagaacctggccgggagatacgccaacacctacaaaaactggttcccggggcccatgggccgaacccagggctggaacctgggctccggggtcaaccgcgccagtgtcagcgccctcgccacgaccaataggatggagctcgagggcgcgagttaccaggtgcccccgcagccgaacggcatgaccaacaacctccagggcagcaacacctatgccctggagaacactatgatcttcaacagccagccggcgaacccgggcaccaccgccacgtacctcgagggcaacatgctcatcaccagcgagagcgagacgcagccggtgaaccgcgtggcgtacaacgtcggcgggcagatggccaccaacaaccagagctccaccactgcccccgcgaccggcacgtacaacctccaggaaatcgtgcccggcagcgtgtggatggagagggacgtgtacctccaaggacccatctgggccaagatcccagagacgggggcgcactttcacccctctccggccatgggcggattcggactcaaacacccaccgcccatgatgctcatcaagaacacgcctgtgcccggaaatatcaccagcttctcggacgtgcccgtcagcagcttcatcacccagtacagcaccgggcaggtcaccgtggagatggagtgggagctcaagaaggaaaactccaagaggtggaacccagagatccagtacacaaacaactacaacgacccccagtttgtggactttgccccggacagcaccggggaatacagaaccaccagacctatcggaacccgataccttacccgacccctttaa

SEQ ID NO: 801 - DNA, 2175 bp, synthetic construct
  source 1..2175: mol_type = other DNA; note = Description of Artificial Sequence: Synthetic polynucleotide
atgtcttttgttgatcaccctccagattggttggaagaagttggtgaaggtcttcgcgagtttttgggccttgaagcgggcccaccgaaaccaaaacccaatcagcagcatcaagatcaagcccgtggtcttgtgctgcctggttataactatctcggacccggaaacggtctcgatcgaggagagcctgtcaacagggcagacgaggtcgcgcgagagcacgacatctcgtacaacgagcagcttgaggcgggagacaacccctacctcaagtacaaccacgcggacgccgagtttcaggagaagctcgccgacgacacatccttcgggggaaacctcggaaaggcagtctttcaggccaagaaaagggttctcgaaccttttggcctggttgaagagggtgctaagacggcccctaccggaaagcggatagacgaccactttccaaaaagaaagaaggcccggaccgaagaggactccaagccttccacctcgtcagacgccgaagctggacccagcggatcccagcagctgcaaatcccagcccaaccagcctcaagtttgggagctgatacaatgtctgcgggaggtggcggcccattgggcgacaataaccaaggtgccgatggagtgggcaatgcctcgggagattggcattgcgattccacgtggatgggggacagagtcgtcaccaagtccacccgaacctgggtgctgcccagctacaacaaccaccagtaccgagagatcaaaagcggctccgtcgacggaagcaacgccaacgcctactttggatacagcaccccctgggggtactttgactttaaccgcttccacagccactggagcccccgagactggcaaagactcatcaacaactactggggcttcagaccccggtccctcagagtcaaaatcttcaacattcaagtcaaagaggtcacggtgcaggactccaccaccaccatcgccaacaacctcacctccaccgtccaagtgtttacggacgacgactaccagctgccctacgtcgtcggcaacgggaccgagggatgcctgccggccttccctccgcaggtctttacgctgccgcagtacggttacgcgacgctgaaccgcgacaacacagaaaatcccaccgagaggagcagcttcttctgcctagagtactttcccagcaagatgctgagaacgggcaacaactttgagtttacctacaactttgaggaggtgcccttccactccagcttcgctcccagtcagaacctcttcaagctggccaacccgctggtggaccagtacttgtaccgcttcgtgagcacaaataacactggcggagtccagttcaacaagaacctggccgggagatacgccaacacctacaaaaactggttcccggggcccatgggccgaacccagggctggaacctgggctccggggtcaaccgcgccagtgtcagcgccttcgccacgaccaataggatggagctcgagggcgcgagttaccaggtgcccccgcagccgaacggcatgaccaacaacctccagggcagcaacacctatgccctggagaacactatgatcttcaacagccagccggcgaacccgggcaccaccgccacgtacctcgagggcaacatgctcatcaccagcgagagcgagacgcagccggtgaaccgcgtggcgtacaacgtcggcgggcagatggccaccaacaaccagagctccaccactgcccccgcgaccggcacgtacaacctccaggaaatcgtgcccggcagcgtgtggatggagagggacgtgtacctccaaggacccatctgagccaagatcccagagacgggggcgcactttcacccctctccggccatgggcggattcggactcaaacacccaccgcccatgatgctcatcaagaacacgcctgtgcccggaaatatcaccagcttctcggacgtgcccgtcagcagcttcatcacccagtacagcaccgggcaggtcaccgtggagatggagtgggagctcaagaaggaaaactccaagaggtggaacccagagatccagtacacaaacaactacaacgacccccagtttgtggactttgccccggacagcaccggggaatgcagaaccaccagacctatcggaacccgataccttacccgacccctttaa

SEQ ID NO: 802 - DNA, 2175 bp, synthetic construct
  source 1..2175: mol_type = other DNA; note = Description of Artificial Sequence: Synthetic polynucleotide
atgtcttttgttgatcaccctccagattggttggaagaagttggtgaaggtcttcgcgagtttttgggccttgaagcgggcccaccgaaaccaaaacccaatcagcagcatcaagatcaagcccgtggtcttgtgctgcctggttataactatctcggacccggaaacggtctcgatcgaggagagcctgtcaacagggcagacgaggtcgcgcgagagcacgacatctcgtacaacgagcagcttgaggcgggagacaacccctacctcaagtacaaccacgcggacgccgagtttcaggagaagctcgccgacgacacatccttcgggggaaacctcggaaaggcagtctttcaggccaagaaaagggttctcgaaccttttggcctggttgaagagggtgctaagacggcccctaccggaaagcggatagacgaccactttccaaaaagaaagaaggcccggaccgaagaggactccaagccttccacctcgtcagacgccgaagctggacccagcggatcccagcagctgcaaatcccagcccaaccagcctcaagtttgggagctgatacaatgtctgcgggaggtggcggcccattgggcgacaataaccaaggtgccgatggagtgggcaatgcctcgggagattggcattgcgattccacgtggatgggggacagagtcgtcaccaagtccacccgaacctgggtgctgcccagctacaacaaccaccagtaccgagagatcaaaagcggctccgtcgacggaagcaacgccaacgcctactttggatacagcaccccctgggggtactttgactttaaccgcttccacagccactggagcccccgagactggcaaagactcatcaacaactactggggcttcagaccccggtccctcagagtcaaaatcctcaacattcaagtcaaagaggtcacggtgcaggactccaccaccaccatcgccaacaacctcacctccaccgtccaagtgtttacggacgacgactaccagctgccctacgtcgtcggcaacgggaccgagggatgcctgccggccttccctccgcaggtctttacgctgccgcagtacggttacgcgacgctgaaccgcgacaacacagaaaatcccaccgagaggagcagcttcttctgcctagagtactttcccagcaagatgctgagaacgggcaacaactttgagtttacctacaactttgaggaggtgcccttccactccagcttcgctcccagtcagaacctcttcaagctggccaacccgctggtgggccagtacttgtaccgcttcgtgagcacaaataacactggcggagtccagttcaacgagaacctggccgggagatacgccaacacctacaaaaactggttcccggggcccatgggccgaacccagggctggaacctgggctccggggtcaaccgcgccagtgtcagcgccttcgccacgaccaataggatggagctcgagggcgcgagttaccaggtgcccccgcagccgaacggcatgaccaacaacctccagggcagcaacacctatgccctggagaacactatgatcttcaacagccagccggcgaacccgggcaccaccgccacgtacctcgagggcaacatgctcatcaccagcgagagcgagacgcagccggtgaaccgcgtggcgtacaacgtcggcgggcagatggccaccaacaaccagagctccaccactgcccccgcgaccggcacgtacaacctccaggaaatcgtgcccggcagcgtgtggatggagagggacgtgtacctccaaggacccatctgggccaagatcccagagacgggggcgcactttcacccctctccggccatgggcggattcggactcaaacacccaccgcccatgatgctcatcaagaacacgcctgtgcccggaaatatcaccagcttctcggacgtgcccgtcagcagcttcatcacccagtacagcaccgggcaggccaccgtggagatggagtgggagctcaagaaggaaaactccaagaggtggaacccagagatccagtacacaaacaactacaacgacccccagtttgtggactttgccccggacagcaccggggaatacagaaccaccagacctatcggaacccgataccttacccgacccctttaa

SEQ ID NO: 803 - DNA, 2175 bp, synthetic construct
  source 1..2175: mol_type = other DNA; note = Description of Artificial Sequence: Synthetic polynucleotide
atgtcttttgttgatcaccctccagattggttggaagaagttggtgaaggtcttcgcgagtttttgggccttgaagcgggcccaccgaaaccaaaacccaatcagcagcatcaagatcaagcccgtggtcttgtgctgcctggttataactatctcggacccggaaacggcctcgatcgaggagagcctgtcaacagggcagacgaggtcgcgcgagagcacgacatctcgtacaacgagcagcttgaggcgggagacaacccctacctcaagtacaaccacgcggacgccgagtttcaggagaagctcgccgacgacacatccttcgggggaaacctcggaaaggcagtctttcaggccaagaaaagggttctcgaaccttttggcctggttgaagagggtgctaagacggcccctaccggaaagcggatagacgaccactttccaaaaagaaagaaggcccggaccgaagaggactccaagccttccacctcgtcagacgccgaagctggacccagcggatcccagcagctgcaaatcccagcccaaccagcctcaagtttgggagctgatacaatgtctgcgggaggtggcggcccattgggcgacaataaccaaggtgccgatggagtgggcaatgcctcgggagattggcattgcgattccacgtggatgggggacagagtcgtcaccaagtccacccgaacctgggtgctgcccagctacaacaaccaccagtaccgagagatcaaaagcggctccgtcgacggaagcaacgccaacgcctactttggatacagcaccccctgggggtactttgactttaaccgcttccacagccactggagcccccgagactggcaaagactcatcaacaactactggggcttcagaccccggtccctcagagtcaaaatcttcaacattcaagtcaaagaggtcacggtgcaggactccaccaccatcatcgccaacaacctcacctccaccgtccaagtgtttacggacgacgactaccagctgccctacgtcgtcggcaacgggaccgagggatgcctgccggccttccctccgcaggtctttacgctgccgcagtacggttacgcgacgctgaaccgcgacaacacagaaaatcccaccgagaggagcagcttcttctgcctagagtactttcccagcaagatgctgagaacgggcaacaactttgagtttacctacaactttgaggaggtgcccttccactccagcttcgcccccagtcagaacctcttcaagctggccaacccgctggtggaccagtacttgtaccgcttcgtgagcacaaataacactggcggagtccagttcaacaagaacctggccgggagatacgccaacacctacaaaaactggttcccggggcccatgggccgaacccagggctggaacctgggctccggggtcaaccgcgccagtgtcagcgccttcgccacgaccaataggatggagctcgagggcgcgagttaccaggtgcccccgcagccgaacggcatgaccaacaacctccagggcagcaacacctatgccctggagaacactatgatcttcaacagccagccggcgaacccgggcaccaccgccacgtacctcgagggcaacatgctcatcaccagcgagagcgagacgcagccggtgaaccgcgtggcgtacaacgtcggcgggcagatggccaccaacaaccagagctccaccactgcccccgcgaccggcacgtacaacctccaggaaatcgtgcccggcagcgtgtggatggagagggacgtgtacctccaaggacccatctgggccaagatcccagagacgggggcgcactttcacccctctccggccatgggcggattcggactcaaacacccaccgcccatgatgctcatcaagaacacgcctgtgcccggaaatatcaccagcttctcggacgtgcccgtcagcagcttcatcacccagtacagcaccgggcaggtcaccgtggagatggagtgggagctcaagaaggaaaactccaagaggtggaacccagagatccagtacacaaacaactacaacgacccccagtttgtggactttgccccggacagcaccggggaatacagaaccaccagacctatcggaacccgataccttacccgacccctttaa

SEQ ID NO: 804 - DNA, 2175 bp, synthetic construct
  source 1..2175: mol_type = other DNA; note = Description of Artificial Sequence: Synthetic polynucleotide
atgtcttttgttgatcaccctccagattggttggaagaagttggtgaaggtcttcgcgagtttttgggccttgaagcgggcccaccgaaaccaaaacccaatcagcagcatcaagatcaagcccgtggtcttgtgctgcctggttataactatctcggacccggaaacggtctcgatcgaggagagcctgtcaacagggcagacgaggtcgcgcgagagcacgacatctcgtacaacgagcagcttgaggcgggagacaacccctacctcaagtacaaccacgcggacgccgagtttcaggagaagctcgccgacgacacatccttcgggggaaacctcggaaaggcagtctttcaggccaagaaaagggttctcgaaccttttggcctggttgaagagggtgctaagacggcccctaccggaaagcggatagacgaccactttccaaaaagaaagaaggcccggaccgaagaggactccaagccttccacctcgtcagacgccgaagctggacccagcggatcccagcagctgcaaatcccagcccaaccagcctcaagtttgggagctgatacaatgtctgcgggaggtggcggcccattgggcgacaataaccaaggtgccgatggagtgggcaatgcctcgggagattggcattgcgattccacgtggatgggggacagagtcgtcaccaagtccacccgaacctgggtgctgcccagctacaacaaccaccagtaccgagagatcaaaagcggctccgtcgacggaagcaacgccaacgcctactttggatacagcaccccctgggggtactttgactttaaccgcttccacagccactggagcccccgagactggcaaagactcatcaacaactactggggcttcagaccccggtccctcagagtcaaaatcttcaacattcaagtcaaagaggtcacggtgcaggactccaccaccaccatcgccaacaacctcacctccaccgtccaagtgtttacggacgacgactaccagctgccctacgtcgtcggcaacgggaccgagggatgcctgccggccttccctccgcaggtctttacgctgccgcagtacggttacgcgacgctgaaccgcgacaacacagaaaatcccaccgagaggagcagcttcttctgcctagagtactttcccagcaagatgctgagaacgggcaacaactttgagtttacctacaactttgaggaggtgcccttccactccagcttcgctcccagtcagaacctcttcaagctggccaacccgctggtggaccagtacttgtaccgcttcgtgagcacaaataacactggcggagtccagttcaacaagaacctggccgggagatacgccaacacctacaaaaactggttcccggggcccatgggccgaacccagggctggaacctgggctccggggtcaaccgcgccagtgtcagcgccttcgccacgaccaataggatggagctcgagggcgcgagttaccaggtgcccccgcagccgaacggcatgaccaacaacctccagggcagcaacacctatgccctggagaacactatgatcttcaacagccagccggcgaacccgggcaccaccgccacgtacctcgagggcaacatgctcatcaccagcgagagcgagacgcagccggtgaaccgcgtggcgtacaacgtcggcgggcagatggccaccaacaaccagagctccaccactgcccccgcgaccggcacgtacaacctccaggaaatcgtgcccggcagcgtgtggatggagagggacgtgtacctccaaggacccatctgggccaagatcccagagacgggggcgcactttcacccctctccggccatgggcggattcggactcaaacacccaccgcccatgatgctcatcaagaacacgcctgtgcccggaaatatcaccagcctctcggacgtgcccgtcagcagcttcatcacccagtacagcaccgggcaggtcaccgtggagatggagtgggagctcaagaaggaaaactccaagaggtggaacccagagatccagtacacaaacaactacaacgacccccagtttgtggactttgccccggacagcaccggggaatacagaaccaccagacctatcggaacccgataccttacccgacccctttaa

SEQ ID NO: 805 - DNA, 2175 bp, synthetic construct
  source 1..2175: mol_type = other DNA; note = Description of Artificial Sequence: Synthetic polynucleotide
atgtcttttgttgatcaccctccagattggttggaagaagttggtgaaggtcttcgcgagtttttgggccttgaagcgggcccaccgaaaccaaaacccaatcagcagcatcaagatcaagcccgtggtcttgtgctgcctggttataactatctcggacccggaaacggtctcgatcgaggagagcctgccaacagggcagacgaggtcgcgcgagagcacgacatctcgtacaacgagcagcttgaggcgggagacaacccctacctcaagtacaaccacgcgggcgccgagtttcaggagaagctcgccgacgacacatccttcgggggaaacctcggaaaggcagtctttcaggccaagaaaagggttctcgaaccttttggcctggttgaagagggtgctaagacggcccctaccggaaagcggatagacgaccactttccaaaaagaaagaaggcccggaccgaagaggactccaagccttccacctcgtcagacgccgaagctggacccagcggatcccagcagctgcaaatcccagcccaaccagcctcaagtttgggagctgatacaatgtctgcgggaggtggcggcccattgggcgacaataaccaaggtgccgatggagtgggcaatgcctcgggagattggcattgcgattccacgtggatgggggacagagtcgtcaccaagtccacccgaacctgggtgctgcccggctacaacaaccaccagtaccgagagatcaaaagcggctccgtcgacggaagcaacgccaacgcctactttggatacagcaccccctgggggtactttgactttaaccgcttccacagccactggagcccccgagactggcaaagactcatcaacaactactggggcttcagaccccggtccctcagagtcaaaatcttcaacattcaagtcaaagaggtcacggtgcaggactccaccaccaccatcgccaacaacctcacctccaccgtccaagtgtttacggacgacgactaccagctgccctacgtcgtcggcaacgggaccgagggatgcctgccggccttccctccgcaggtctttacgctgccgcagtacggttacgcgacgctgaaccgcgacaacacagaaaatcccaccgagaggagcagcttcttctgcctagagtactttcccagcaagatgctgagaacgggcaacaactttgagtttacctacaactttgaggaggtgcccttccactccagcttcgctcccagtcagaacctcttcaagctggccaacccgctggtggaccagtacttgtaccgcttcgtgagcacaaataatactggcggagtccagttcaacaagaacctggccgggagatacgccaacacctacaaaaactggttcccggggcccatgggccgaacccagggctggaacctgggctccggggtcaaccgcgccagtgtcagcgccttcgccacgaccaataggatggagctcgagggcgcgagttaccaggtgcccccgcagccgaacggcatgaccaacaacctccagggcagcaacacctatgccctggagaacactatgatcttcaacagccagccggcgaacccgggcaccaccgccacgtacctcgagggcaacatgctcatcaccagcgagagcgagacgcagccggtgaaccgcgtggcgtacaacgtcggcgggcagatggccaccaacaaccagagctccaccactgcccccgcgaccggcacgtacaacctccaggaaatcgtgcccggcagcgtgtggatggagagggacgtgtacctccaaggacccatctgggccaagatcccagagacgggggcgcactttcacccctctccggccatgggcggattcggactcaaacacccaccgcccatgatgctcatcaagaacacgcctgtgcccggaaatatcaccagcttctcggacgtgcccgtcagcagcttcatcacccagtacagcaccgggcaggtcaccgtggagatggagtgggagctcaagaaggaaaactccaagaggtggaacccagagatccagtacacaaacaactacaacgacccccagtttgtggactttgccccggacagcaccggggaatacagaaccaccagacctatcggaacccgataccttacccgacccctttaa

SEQ ID NO: 806 - DNA, 2175 bp, synthetic construct
  source 1..2175: mol_type = other DNA; note = Description of Artificial Sequence: Synthetic polynucleotide
atgtcttttgttgatcaccctccagattggttggaagaagttggtgaaggtcttcgcgagtttttgggccttgaagcgggcccaccgaaaccaaaacccaatcagcagcatcaagatcaagcccgtggtcttgtgctgcctggttataactatctcggacccggaaacggtctcgatcgaggagagcctgtcaacagggcagacgaggtcgcgcgagagcacgacatctcgtacaacgagcagcttgaggcgggagacaacccctacctcaagtacaaccacgcggacgccgagtttcaggagaagctcgccgacgacacatccttcgggggaaacctcggaaaggcagtctttcaggccaagaaaagggttctcgaaccttttggcctggttgaagagggtgctaagacggcccctaccggaaagcggatagacgaccactttccaaaaagaaagaaggcccggaccgaagaggactccaagcctcccacctcgtcagacgccgaagctggacccagcggatcccagcagctgcaaatcccagcccaaccagcctcaagtttgggagctgatacaatgtctgcgggaggtggcggcccattgggcgacaataaccaaggtgccgatggagtgggcaatgcctcgggagattggcattgcgattccacgtggatgggggacagagtcgtcaccaagtccacccgaacctgggtgctgcccagctacaacaaccaccagtaccgagagatcaaaagcggctccgtcgacggaagcaacgccaacgcctactttggatacagcaccccctgggggtactttgactttaaccgcttccacagccactggagcccccgagactggcaaagactcatcaacaactactggggcttcagaccccggtccctcagagtcaaaatcttcaacattcaagtcaaagaggtcacggtgcaggactccgccaccaccatcgccaacaacctcacctccaccgtccaagtgtttacggacgacgactaccagctgccctacgtcgtcggcaacgggaccgagggatgcctgccggccttccctccgcaggtctttacgctgccgcagtacggttacgcgacgctgaaccgcgacaacacagaaaatcccaccgagaggagcagcttcttctgcctagagtactttcccagcaagatgctgagaacgggcaacaactttgagtttacctacaactttgaggaggtgcccttccactccagcttcgctcccagtcagaacctcttcaagctggccaacccgctggtggaccagtacttgtaccgcttcgtgagcacaaataacactggcggagtccagttcaacaagaacctggccgggagatacgccaacacctacaaaaactggttcccggggcccatgggccgaacccagggctggaacctgggctccggggtcaaccgcgccagtgtcagcgccttcgccacgaccaataggatggagctcgagggcgcgagttaccaggtgcccccgcagccgaacggcatgaccaacaacctccagggcagcaacacctatgccctggagaacactatgatcttcaacagccagccggcgaacccgggcaccaccgccacgtacctcgagggcaacatgctcatcaccagcgagagcgagacgcagccggtgaaccgcgtggcgtacaacgtcggcgggcagatggccaccaacaaccagagctccaccactgcccccgcgaccggcacgtacaacctccaggaaatcgtgcccggcagcgtgtggatggagagggacgtgtacctccaaggacccatctgggccaagatcccagagacgggggcgcactttcacccctctccggccatgggcggattcggactcaaacacccaccgcccatgatgctcatcaagaacacgcctgtgcccggaaatatcaccagcttctcggacgtgcccgtcagcagcttcatcacccagtacagcaccgggcaggtcaccgtggagatggagtgggagctcaagaaggaaaactccaagaggtggaacccagagatccagtacacaaacaactacaacgacccccagtttgtggactttgccccggacagcaccggggaatacagaaccaccagacctatcggaacccgataccttacccgacccctttaa

SEQ ID NO: 807 - DNA, 2175 bp, synthetic construct
  source 1..2175: mol_type = other DNA; note = Description of Artificial Sequence: Synthetic polynucleotide
atgtcttttgttgatcaccctccagattggttggaagaagttggtgaaggtcttcgcgagtttttgggccttgaagcgggcccaccgaaaccaaaacccaatcagcagcatcaagatcaagcccgtggtcttgtgctgcctggttataactatctcggacccggaaacggtctcgatcgaggagagcctgtcaacagggcagacgaggtcgcgcgagagcacgacatctcgtacaacgagcagcttgaggcgggagacaacccctacctcaagtacaaccacgcggacgccgagtttcaggagaagctcgccgacgacacatccttcgggggaaacctcggaaaggcagtctttcaggccaagaaaagggttctcgaaccttttggcctggttgaagagggtgctaagacggcccctaccggaaagcggatagacgaccactttccaaaaagaaagaaggcccggaccgaagaggactccaagccttccacctcgtcagacgccgaagctggacccagcggatcccagcagccgcaaatcccagcccaaccagcctcaagtttgggagctgatacaatgtctgcgggaggtggcggcccattgggcgacaataaccaaggtgccgatggagtgggcaatgcctcgggagattggcattgcgattccacgtggatgggggacagagtcgtcaccaagtccacccgaacctgggtgctgcccagctacaacaaccaccagtaccgagagatcaaaagcggctccgtcgacggaagcaacgccaacgcctactttggatacagcaccccctgggggtactttgactttaaccgcttccacagccactggagcccccgagactggcaaagactcatcaacaactactggggcttcagaccccggtccctcagagtcaaaatcttcaacattcaagtcaaagaggtcacggtgcaggactccaccaccaccatcgccaacaacctcacctccaccgtccaagtgtttacggacgacgactaccagctgccctacgtcgtcggcaacgggaccgagggatgcctgccggccttccctccgcaggtctttacgctgccgcagtacggttacgcgacgctgaaccgcgacaacacagaaaatcccaccgagaggagcagcttcttctgcctagagtactttcccagcaagatgctgagaacgggcaacaactttgagtttacctacaactttgaggaggtgcccttccactccagcttcgctcccagtcagaacctcttcaagctggccaacccgctggtggaccagtacttgtaccgcttcgtgagcacaaataacactggcggagtccagttcaacaagaacctggccgggagatacgccaacacctacaaaaactggttcccggggcccatgggccgaacccagggctggaacctgggctccggggtcaaccgcgccagtgtcagcgccttcgccacgaccaataggatggagctcgagggcgcgagttaccaggtgcccccgcagccgaacggcatgaccaacaacctccagggcagcaacacctatgccctggagaacactatgatcttcaacagccagccggcgaacccgggcaccaccgccacgtacctcgagggcaacatgctcatcaccagcgagagcgagacgcagccggtgaaccgcgtggcgtacaacgtcggcgggcagatggccaccaacaaccagagctccaccactgcccccgcgaccggcacgtacaacctccaggaaatcgtgcccggcagcgtgtggatggagagggacgtgtacctccaaggacccatctgggccaagatcccagagacgggggcgcactttcacccctctccggccatgggcggattcggactcaaacacccaccgcccatgatgctcatcaagaacacgcctgcgcccggaaatatcaccagcttctcggacgtgcccgtcagcagcttcatcacccagtacagcaccgggcaggtcaccgtggagatggagtgggagctcaagaaggaaaactccaagaggtggaacccagagatccagtacacaaacaactacaacgacccccagtttgtggactttgccccggacagcaccggggaatacagaaccaccagacctatcggaacccgataccttacccgacccctttaa

SEQ ID NO: 808 - DNA, 2175 bp, synthetic construct
  source 1..2175: mol_type = other DNA; note = Description of Artificial Sequence: Synthetic polynucleotide
atgtcttttgttgatcaccctccagattggttggaagaagttggtgaaggtcttcgcgagtttttgggccttgaagcgggcccaccgaaaccaaaacccaatcagcagcatcaagatcaagcccgtggtcttgtgctgcctggttataactatctcggacccggaaacggtctcgatcgaggagagcctgtcaacagggcagacgaggtcgcgcgagagcacgacatctcgtacaacgagcagcttgaggcgggagacaacccctacctcaagtacaaccacgcggacgccgagtttcaggagaagctcgccgacgacacatccttcgggggaaacctcggaaaggcagtctttcaggccaagaaaagggttctcgaaccttttggcctggttgaagagggtgctaagacggcccctaccggaaagcggatagacgaccactttccaaaaagaaagaaggcccggaccgaagaggactccaagcctcccacctcgtcagacgccgaagctggacccagcggatcccagcagctgcaaatcccagcccaaccagcctcaagtttgggagctgatacaatgtctgcgggaggtggcggcccattgggcgacaataaccaaggtgccgatggagtgggcaatgcctcgggagattggcattgcgattccacgtggatgggggacagagtcgtcaccaagtccacccgaacctgggtgctgcccagctacaacaaccaccagtaccgagagatcaaaagcggctccgtcgacggaagcaacgccaacgcctactttggatacagcaccccctgggggtactttgactttaaccgcttccacagccactggagcccccgagactggcaaagactcatcaacaactactggggcttcagaccccggtccctcagagtcaaaatcttcaacattcaagtcaaagaggtcacggtgcaggactccaccaccaccatcgccaacaacctcacctccaccgtccaagtgtttacggacgacgactaccagctgccctacgtcgtcggcaacgggaccgagggatgcctgccggccttccctccgcaggtctttacgctgccgcagtacggttacgcgacgctgaaccgcgacaacacagaaaatcccaccgagaggagcagcttcttctgcctagagtactttcccagcaagatgctgagaacgggcaacaactttgagtttacctacaactttgaggaggtgcccttccactccagcttcgctcccagtcagaacctcttcaagctggccaacccgctggtggaccagtacttgtaccgcttcgtgagcacaaataacactggcggagtccagttcaacaagaacctggccgggagatacgccaacacctacaaaaactggttcccggggcccatgggccgaacccagggctggaacctgggctccggggtcaaccgcgccagtgtcagcgccttcgccacgaccaataggatggagctcgagggcgcgagttaccaggtgcccccgcagccgaacggcatgaccaacaacctccagggcagcaacacctatgccctggagaacactatgatcttcaacagccagccggcgaacccgggcaccaccgccacgtacctcgagggcaacatgctcatcaccagcgagagcgagacgcagccggtgaaccgcgtggcgtacaacgtcggcgggcagatggccaccaacaaccagagctccaccactgcccccgcgaccggcacgtacaacctccaggaaatcgtgcccggcagcgtgtggatggagagggacgtgtacctccaaggacccatctgggccaagatcccagagacgggggcgcactttcacccctctccggccatgggcggattcggactcaaacacccaccgcccatgatgctcatcaagaacacgcctgtgcccggaaatatcaccagcttctcggacgtgcccgtcagcagcttcatcacccagtacagcaccgggcaggtcaccgtggagatggagtgggagctcaagaaggaaaactccaagaggtggaacccagagatccagtacacaaacaactacaacgacccccagtttgtggactttgccccggacagcaccggggaatacagaaccaccagacctatcggaacccgataccttacccgacccctttaa

SEQ ID NO: 809 - DNA, 2175 bp, synthetic construct
  source 1..2175: mol_type = other DNA; note = Description of Artificial Sequence: Synthetic polynucleotide
atgtcttttgttgatcaccctccagattggttggaagaagttggtgaaggtcttcgcgagtttttgggccttgaagcgggcccaccgaaaccaaaacccaatcagcagcatcaagatcaagcccgtggtcttgtgctgcctggttataactatctcggacccggaaacggtctcgatcgaggagagcctgtcaacagggcagacgaggtcgcgcgagagcacgacatctcgtacaacgagcagcttgaggcgggagacaacccctacctcaagtacaaccacgcggacgccgagtttcaggagaagctcgccgacgacacatccttcgggggaaacctcggaaaggcagtctttcaggccaagaaaagggttctcgaaccttttggcctggttgaagagggtgctaagacggcccctaccggaaagcggatagacgaccactttccaaaaagaaagaaggcccggaccgaagaggactccaagcctcccacctcgtcagacgccgaagctggacccagcggatcccagcagctgcaaatcccagcccaaccagcctcaagtttgggagctgatacaatgtctgcgggaggtggcggcccattgggcgacaataaccaaggtgccgatggagtgggcaatgcctcgggagattggcattgcgattccacgtggatgggggacagagtcgtcaccaagtccacccgaacctgggtgccgcccagctacaacaaccaccagtaccgagagatcaaaagcggctccgtcgacggaagcaacgccaacgcctactttggatacagcaccccctgggggtactttgactttaaccgcttccacagccactggagcccccgagactggcaaagactcatcaacaactactggggcttcagaccccggtccctcagagtcaaaatcttcaacattcaagtcaaagaggtcacggtgcaggactccaccaccaccatcgccaacaacctcacctccaccgtccaagtgtttacggacgacgactaccagctgccctacgtcgtcggcaacgggaccgagggatgcctgccggccttccctccgcaggtctttacgctgccgcagtacggttacgcgacgctgaaccgcgacaacacagaaaatcccaccgagaggagcagcttcttctgcctagagtactttcccagcaagatgctgagaacgggcaacaactttgagtttacctacaactttgaggaggtgcccttccactccagcttcgctcccagtcagaacctcttcaagctggccaacccgctggtggaccagtacttgtaccgcttcgtgagcacaaataacactggcggagtccagttcaacaagaacctggccgggagatacgccaacacctacaaaaactggttcccggggcccatgggccgaacccagggctggaacctgggctccggggtcaaccgcgccagtgtcagcgccttcgccacgaccaataggatggagctcgagggcgcgagttaccaggtgcccccgcagccgaacggcatgaccaacaacctccagggcagcaacacctatgccctggagaacactatgatcttcaacagccagccggcgaacccgggcaccaccgccacgtacctcgagggcaacatgctcatcaccagcgagagcgagacgcagccggtgaaccgcgtggcgtacaacgtcggcgggcagatggccaccaacaaccagagctccaccactgcccccgcgaccggcacgtacaacctccaggaaatcgtgcccggcagcgtgtggatggagagggacgtgtacctccaaggacccatctgggccaagatcccagagacgggggcgcactttcacccctctccggccatgggcggattcggactcaaacacccaccgcccatgatgctcatcaagaacacgcctgtgcccggaaatatcaccagcttctcggacgtgcccgtcagcagcttcatcacccagtacagcaccgggcaggtcgccgtggagatggagtgggagctcaagaaggaaaactccaagaggtggaacccagagatccagtacacaaacaactacaacgacccccagtttgtggactttgccccggacagcaccggggaatacagaaccaccagacctatcggaacccgataccttacccgacccctttaa

SEQ ID NO: 810 - DNA, 2175 bp, synthetic construct
  source 1..2175: mol_type = other DNA; note = Description of Artificial Sequence: Synthetic polynucleotide
atgtcttttgttgatcaccctccagattggttggaagaagttggtgaaggtcttcgcgagtttttgggccttgaagcgggcccaccgaaaccaaaacccaatcagcagcatcaagatcaagcccgtggtcttgtgctgcctggttataactatctcggacccggaaacggtctcgatcgaggagagcctgtcaacagggcagacgaggtcgcgcgagagcacgacatctcgtacaacgagcagcttgaggcgggagacaacccctacctcaagtacaaccacgcggacgccgagtttcaggagaagctcgccgacgacacatccttcgggggaaacctcggaaaggcagtctttcaggccaagaaaagggttctcgaaccttttggcctggttgaagagggtgctaagacggcccctaccggaaagcggatagacgaccactttccaaaaagaaagaaggcccggaccgaagaggactccaagccttccacctcgtcagacgccgaagctggacccagcggatcccagcagctgcaaatcccagcccaaccagcctcaagtttgggagctgatacaatgtctgcgggaggtggcggcccattgggcgacaataaccaaggtgccgatggagtgggcaatgcctcgggagattggcattgcgattccacgtggatgggggacagagtcgtcaccaagtccacccgaacctgggtgctgcccagctacaacaaccaccagtaccgagagatcaaaagcggctccgtcgacggaagcaacgccaacgcctactttggatacagcaccccctgggggtactttgactttaaccgcttccacagccactggagcccccgagactggcaaagactcatcaacaactactggggcttcagaccccggtccctcagagtcaaaatcttcaacattcaagtcaaagaggtcacggtgcaggactccaccaccaccatcgccaacaacctcacctccaccgtccaagtgtttacggacgacgactaccagctgccctacgtcgtcggcaacgggaccgagggatgcctgccggccttccctccgcaggtctttacgctgccgcagtacggttacgcgacgctgaaccgcgacaacacagaaaatcccaccgagaggagcagcttcttctgcctagagtactttcccagcaagatgctgagaacgggcaacaactttgagtttacctacaactttgaggaggtgcccttccactccagcttcgctcccagtcagaacctcttcaagctggccaacccgctggtggaccagtacttgtaccgcttcgtgagcacaaataacactggcggagtccagttcaacaagaacctggccgggagatacgccaacacctacaaaaactggttcccggggcccatgggccgaacccagggctggaacctgggctccggggtcaaccgcgccagtgtcagcgccttcgccacgaccaataggatggagctcgagggcgcgagttaccaggtgcccccgcagccgaacggcatgaccaacaacctccagggcagcaacacctatgccctggagaacactatgatcttcaacagccagccggcgaacccgggcaccaccgccacgtacctcgagggcaacatgctcatcaccagcgagagcgagacgcagccggtgaaccgcgtggcgtacaacgtcggcgggcagatggccaccaacaaccagagctccaccactgcccccgcgaccggcacgtacaacctccaggaaatcgtgcccggcagcgtgtggatggagagggacgtgtacctccaaggacccatctgggccaagatcccagagacgggggcgcactttcacccctctccggccatgggcggattcggactcaaacacccaccgcccatgatgctcatcaagaacacgcctgcgcccggaaatatcaccagcttctcggacgtgcccgtcagcagcttcatcacccagtacagcaccgggcaggtcaccgtggagatggagtgggagctcaagaaggaaaactccaagaggtggaacccagagatccagtacacaaacaactacaacgacccccagtttgtggactttgccccggacagcaccggggaatacagaaccaccagacctatcggaacccgataccttacccgacccctttaa

SEQ ID NO: 811 - DNA, 2175 bp, synthetic construct
  source 1..2175: mol_type = other DNA; note = Description of Artificial Sequence: Synthetic polynucleotide
atgtcttttgttgatcaccctccagattggttggaagaagttggtgaaggtcttcgcgagtttttgggccttgaagcgggcccaccgaaaccaaaacccaatcagcagcatcaagatcaagcccgtggtcttgtgctgcctggttataactatctcggacccggaaacggtctcgatcgaggagagcctgtcaacagggcagacgaggtcgcgcgagagcacgacatctcgtacaacgagcagcttgaggcgggagacaacccctacctcaagtacaaccacgcggacgccgagtttcaggagaagctcgccgacgacacatccttcgggggaaacctcggaaaggcagtctttcaggccaagaaaagggttctcgaaccttttggcctggctgaagagggtgctaagacggcccctaccggaaagcggatagacgaccactttccaaaaagaaagaaggcccggaccgaagaggactccaagccttccacctcgtcagacgccgaagctggacccagcggatcccagcagctgcaaatcccagcccaaccagcctcaagtttgggagctgatacaatgtctgcgggaggtggcggcccattgggcgacaataaccaaggtgccgatggagtgggcaatgcctcgggagattggcattgcgattccacgtggatgggggacagagtcgtcaccaagtccacccgaacctgggtgctgcccagctacaacaaccaccagtaccgagagatcaaaagcggctccgtcgacggaagcaacgccaacgcctactttggatacagcaccccctgggggtactttgactttaaccgcttccacagccactggagcccccgagactggcaaagactcatcaacaactactggggcttcagaccccggtccctcagagccaaaatcttcaacattcaagtcaaagaggtcacggtgcaggactccaccaccaccatcgccaacaacctcacctccaccgtccaagtgtttacggacgacgactaccagctgccctacgtcgtcggcaacgggaccgagggatgcctgccggccttccctccgcaggtctttacgctgccgcagtacggttacgcgacgctgaaccgcgacaacacagaaaatcccaccgagaggagcagcttcttctgcctagagtactttcccagcaagatgctgagaacgggcaacaaccttgagtttacctacaactttgaggaggtgcccttccactccagcttcgctcccagtcagaacctcttcaagctggccaacccgctggtggaccagtacttgtaccgcttcgtgagcacaaataacactggcggagtccagttcaacaagaacctggccgggagatacgccaacacctacaaaaactggttcccggggcccatgggccgaacccagggctggaacctgggctccggggtcaaccgcgccagtgtcagcgccttcgccacgaccaataggatggagctcgagggcgcgagttaccaggtgcccccgcagccgaacggcatgaccaacaacctccagggcagcaacacctatgccctggagaacactatgatcttcaacagccagccggcgaacccgggcaccaccgccacgtacctcgagggcaacatgctcatcaccagcgagagcgagacgcagccggtgaaccgcgtggtgcacaacgtcggcgggcagatggccaccaacaaccagagctccaccactgcccccgcgaccggcacgtacaacctccaggaaatcgtgcccggcagcgtgtggatggagagggacgtgtacctccaaggacccatctgggccaagatcccagagacgggggcgcactttcacccctctccggccatgggcggattcggactcaaacacccaccgcccatgatgctcatcaagaacacgcctgtgcccggaaatatcaccagcttctcggacgtgcccgtcagcagcttcatcacccagtacagcaccgggcaggtcaccgtggagatggagtgggagctcaagaaggaaaactccaagaggtggaacccggagatccagtacacaaacaactacaacgacccccagtttgtggactttgccccggacagcaccggggaatacagaaccaccagacctatcggaacccgataccttacccgacccctttaa

SEQ ID NO: 812 - DNA, 2175 bp, synthetic construct
  source 1..2175: mol_type = other DNA; note = Description of Artificial Sequence: Synthetic polynucleotide
atgtcttttgttgatcaccctccagattggttggaagaagttggtgaaggtcttcgcgagtttttgggccttgaagcgggcccaccgaaaccaaaacccaatcagcagcatcaagatcaagcccgtggtcttgtgctgcctggttataactatctcggacccggaaacggtctcgatcgaggagagcctgtcaacagggcagacgaggtcgcgcgagagcacgacatctcgtacaacgagcagcttgaggcgggagacaacccctacctcaagtacaaccacgcggacgccgagtttcaggagaagctcgccgacgacacatccttcgggggaaacctcggaaaggcagtctttcaggccaagaaaagggttctcgaaccttttggcctggttgaagagggtgctaagacggcccctaccggaaagcggatagacgaccactttccaaaaagaaagaaggcccggaccgaagaggactccaagccttccacctcgtcagacgccgaagctggacccagcggatcccagcagctgcaaatcccagcccaaccagcctcaagtttgggagctgatacaatgtctgcgggaggtggcggcccattgggcgacaataaccaaggtgccgatggagtgggcaatgcctcgggagattggcattgcgattccacgtggatgggggacagagtcgtcaccaagtccacccgaacctgggtgctgcccagctacaacaaccaccagtaccgagagatcaaaagcggctccgtcgacggaggcaacgccaacgcctactttggatacagcaccccctgggggtactttgactttaaccgcttccacagccactggagcccccgggactggcaaagactcatcaacaactactggggcttcagaccccggtccctcagagtcaaaatcttcaacattcaagtcaaagaggtcacggtgcaggactccaccaccaccatcgccaacaacctcacctccaccgtccaagtgtttacggacgacgactaccagctgccctacgtcgtcggcaacgggaccgagggatgcctgccggccttccctccgcaggtctttacgctgccgcagtacggttacgcgacgctgaaccgcgacaacacagaaaatcccaccgagaggagcagcttcttctgcctagagtactttcccagcaagatgctgagaacgggcaacaactttgagtttacctacaactttgaggaggtgcccttccactccagcttcgctcccagtcagaacctcttcaagctggccaacccgctggtggaccagtacttgtaccgcttcgtgagcacaaataacactggcggagtccagttcaacaagaacctggccgggagatacgccaacacctacaaaaactggttcccggggcccatgggccgaacccagggctggaacctgggctccggggtcaaccgcgccagtgtcagcgccttcgccacgaccaataggatggagctcgagggcgcgagttaccaggtgcccccgcagccgaacggcatgaccaacaacctccagggcagcaacacctatgccctggagaacactatgatcttcaacagccagccggcgaacccgggcaccaccgccacgtacctcgagggcaacatgctcatcaccagcgagagcgagacgcagccggtgaaccgcgtggcgtacaacgtcggcgggcagatggccaccaacaaccagagctccaccactgcccccgcgaccggcacgtacaacctccaggaaatcgtgcccggcagcgtgtggatggagagggacgtgtacctccaaggacccatctgggccaagatcccagagacgggggcgcactttcacccctctccggccatgggcggattcggactcaaacacccaccgcccatgatgctcatcaagaacacgcctgcgcccggaaatatcaccagcttctcggacgtgcccgtcagcagcttcatcacccagtacagcaccgggcaggtcaccgtggagatggagtgggagctcaagaagggaaactccaagaggtggaacccagagatccagtacacaaacaactacaacgacccccagtttgtggactttgccccggacagcaccggggaatacagaaccaccagacctatcggaacccgataccttacccgacccctttaa

SEQ ID NO: 813 - DNA, 2175 bp, synthetic construct
  source 1..2175: mol_type = other DNA; note = Description of Artificial Sequence: Synthetic polynucleotide
atgtcttttgttgatcaccctccagattggttggaagaagttggtgaaggtcttcgcgagtttttgggccttgaagcgggcccaccgaaaccaaaacccaatcagcagcatcaagatcaagcccgtggtcttgtgctgcctggttataactatctcggacccggaaacggtctcgatcgaggagagcctgtcaacagggcagacgaggtcgcgcgagagcacgacatctcgtacaacgagcagcttgaggcgggagacaacccctacctcaagtacaaccacgcggacgccgagtttcaggagaagctcgccgacgacacgtccttcgggggaaacctcggaaaggcagtctttcaggccaagaaaagggttctcgaaccttttggcctggttgaagagggtgctaagacggcccctaccggaaagcggatagacgaccactttccaaaaagaaagaaggcccggaccgaagaggactccaagccttccacctcgtcagacgccgaagctggacccagcggatcccagcagctgcaaatcccagcccaaccagcctcaagtttgggagctgatacaatgtctgcgggaggtggcggcccattgggcgacaataaccaaggtgccgatggagtgggcaatgcctcgggagattggcattgcgattccacgtggatgggggacagagtcgtcaccaagtccacccgaacctgggtgctgcccagctacaacaaccaccagtaccgagagatcaaaagcggctccgtcgacggaagcaacgccaacgcctactttggatacagcaccccctgggggtactttgactttaaccgcttccacagccactggagcccccgagactggcaaagactcatcaacaactactggggcttcagaccccggtccctcagagtcaaaatcttcaacattcaagtcaaagaggtcacggtgcaggactccaccaccaccatcgccaacaacctcacctccaccgtccaagtgtttacggacgacgactaccagctgccctacgtcgtcggcaacgggaccgagggatgcctgccggccttccctccgcaggtctttacgctgccgcagtacggttacgcgacgctgaaccgcgacaacacagaaaatcccaccgagaggagcagcttcttctgcctagagtactttcccagcaagatgctgagaacgggcaacaactttgagtttacctacaactttgaggaggtgcccttccactccagcttcgctcccagtcagaacctcttcaagctggccaacccgctggtggaccagtacttgtaccgcttcgtgagcacaaataacactggcggagtccagttcaacaagaacctggccgggagatacgccaacacctacaaaaactggttcccggggcccatgggccgaacccagggctggaacctgggctccggggtcaaccgcgccagtgtcagcgccttcgccacgaccaataggatggagctcgagggcgcgagttaccaggtgcccccgcagccgaacggcatgaccaacaacctccagggcagcaacacctatgccctggagaacactatgatcttcaacagccagccggcgaacccgggcaccaccgccacgtacctcgagggcaacatgctcatcaccagcgagagcgagacgcagccggtgaaccgcgtggcgtacaacgtcggcgggcagatggccaccaacaaccagagctccaccactgcccccgcgaccggcacgtacaacctccaggaaatcgtgcccggcagcgtgtggatggagagggacgtgtacctccaaggacccatctgggccaagatcccagagacgggggtgcactttcacccctctccggccatgggcggattcggactcaaacacccaccgcccatgatgctcatcaagaacacgcctgtgcccggaaatatcaccagcttctcggacgtgcccgtcagcagcttcatcacccagtacagcaccgggcaggtcaccgtggagatggagtgggagctcaagaaggaaaactccaagaggtggaacccagagatccagtacacaaacaactacaacgacccccagtttgtggactttgccccggacagcaccggggaatacagaaccaccagacctatcggaacccgataccttacccgacccctttaa

SEQ ID NO: 814 - DNA, 2175 bp, synthetic construct
  source 1..2175: mol_type = other DNA; note = Description of Artificial Sequence: Synthetic polynucleotide
  misc_difference 1652: note = misc_feature - n is a, c, t, or g
atgtcttttgttgatcaccctccagattggttggaagaagttggtgaaggtcttcgcgagtttttgggccttgaagcgggcccaccgaaaccaaaacccaatcagcagcatcaagatcaagcccgtggtcttgtgctgcctggttataactatctcggacccggaaacggtctcgatcgaggagagcctgtcaacagggcagacgaggtcgcgcgagagcacgacatctcgtacaacgagcagcttgaggcgggagacaacccctacctcaagtacaaccacgcggacgccgagtttcaggagaagctcgccgacgacacatccttcgggggaaacctcggaaaggcagtctttcaggccaagaaaagggttctcgaaccttttggcctggttgaagagggtgctaagacggcccctaccggaaagcggatagacgaccactttccaaaaagaaagaaggcccggaccgaggaggactccaagccttccacctcgtcagacgccgaagctggacccagcggatcccagcagctgcaaatcccagcccaaccagcctcaagtttgggagctgatacaatgtctgcgggaggtggcggcccattgggcgacaataaccaaggtgccgatggagtgggcaatgcctcgggagattggcattgcgattccacgtggatgggggacagagtcgtcaccaagtccacccgaacctgggtgctgcccagctacaacaaccaccagtaccgagagatcaaaagcggctccgtcgacggaagcaacgccaacgcctactttggatacagcaccccctgggggtactttgactttaaccgcttccacagccactggagcccccgagactggcaaagactcatcaacaactactggggcttcagaccccggtccctcagagtcaaaatcttcaacattcaagtcaaagaggtcacggtgcaggactccaccaccaccatcgccaacaacctcacctccaccgtccaagtgtttacggacgacgactaccagctgccctacgtcgtcggcaacgggaccgagggatgcctgccggccttccctccgcaggtctttacgctgccgcagtacggttacgcgacgctgaaccgcgacaacacagaaaatcccaccgagaggagcagcttcttctgcctagagtactttcccagcaagatgctgagaacgggcaacaactttgagtttacctacaactttgaggaggtgcccttccactccagcttcgctcccagtcagaacctcttcaagctggccaacccgctggtggaccagtacttgtaccgcttcgtgagcacaaataacactggcggagtccagttcaacaagaacctggccgggagatacgccaacacctacaaaaactggttcccggggcccatgggccgaacccagggctggaacctgggctccggggtcaaccgcgccagtgtcagcgccttcgccacgaccaataggatggagctcgagggcgcgagttaccaggtgcccccgcagccgaacggcatgaccaacaacctccagggcagcaacacctatgccctggagaacactatgatcttcaacagccagccggcgaacccgggcaccaccgccacgtacctcgagggcagcatgctcatcaccancgagagcgagacgcagccggtgaaccgcgtggcgtacaacgtcggcgggcagatggccaccaacaaccagagctccaccactgcccccgcgaccggcacgtacaacctccaggaaatcgtgcccggcagcgtgtggatggagagggacgtgtacctccaaggacccatctgggccaagatcccagagacgggggcgcactttcacccctctccggccatgggcggattcggactcaaacacccaccgcccatgatgctcatcaagaacacgcctgtgcccggaaatatcaccagcttctcggacgtgcccgtcagcagcttcatcacccagtacagcaccgggcaggtcaccgtggagatggagtgggagctcaagaaggaaaactccaagaggtggaacccagagatccagtacacaaacaactacaacgacccccagtttgtggactttgccccggacagcaccggggaatacagaaccaccagacctatcggaacccgataccttacccgacccctttaa

SEQ ID NO: 815 - DNA, 2211 bp, synthetic construct
  source 1..2211: mol_type = other DNA; note = Description of Artificial Sequence: Synthetic polynucleotide
atggctgctgacggttatcttccagattggctcgaggacaacctttctgaaggcattcgtgagtggtgggctctgaaacctggagtccctcaacccaaagcgaaccaacaacaccaggacaaccgtcggggtcttgtgcttccgggttacaaatacctcggacccggtaacggactcgacaaaggagagccggtcaacgaggcggacgcggcagccctcgaacacgacaaagcttacgaccagcagctcaaggccggtgacaacccgtacctcaagtacaaccacgccgacgccgagtttcaggagcgtcttcaagaagatacgtcttttgggggcaaccttggcagagcagtcttccaggccaaaaagaggatccttgagcctcttggtctggttgaggaagcagctaaaacggctcctggaaagaagaggcctgtagatcagtctcctcaggaaccggactcatcatctggtgttggcaaatcgggcaaacagcctgccagaaaaagactaaatttcggtcagactggcgactcagagtcagtcccagaccctcaacctctcggagaaccaccagcagcccccacaagtttgggatctaatacaatggcttcaggcggtggcgcaccaatggcagacaataacgagggtgccgatggagtgggtaattcctcaggaaattggcattgcgattcccaatggctgggcgacagagtcatcaccaccagcaccagaacctgggccctgcccacttacaacaaccatctctacaagcaaatctccagccaatcaggagcttcaaacgacaaccactactttggctacagcaccccttgggggtattttgactttaacagattccactgccacttctcaccacgtgactggcagcgactcattaacaacaactggggattccggcccaagaaactcagcttcaagctcttcaacatccaagttaaagaggtcacgcagaacgatggcacgacgactattgccaataaccttaccagcacggttcaagtgtttacggactcggagtatcagctcccgtacgtgctcgggtcggcgcaccaaggctgtctcccgccgtttccagcggacgtcttcatggtccctcagtatggatacctcaccctgaacaacggaagtcaagcggtgggacgctcatccttttactgcctggagtacttcccttcgcagatgctaaggactggaaataacttccaattcagctataccttcgaggatgtaccttttcacagcagctacgctcacagccagagtttggatcgcttgatgaatcctcttattgatcagtatctgtactacctgaacagaacgcaaggaacaacctctggaacaaccaaccaatcacggctgctttttagccaggctgggcctcagtctatgtctttgcaggccagaaattggctacctgggccctgctaccggcaacagagactttcaaagactgctaacgacaacaacaacagtaactttccttggacagcggccagcaaatatcatctcaatggccgcgactcgctggtgaatccaggaccagctatggccagtcacaaggacgatgaagaaaaatttttccctatgcacggcaatctaatatttggcaaagaagggacaacggcaagtaacgcagaattagataatgtaatgattacggatgaagaagagattcgtaccaccaatcctgtggcaacagagcagtatggaactgtggcaaataacttgcagagctcaaatacagctcccacgactagaactgtcaatgatcagggggccttacctggcatggtgtggcaagatcgtgacgtgtaccttcaaggacctatctgggcaaagattcctcacacggatggacactttcatccttctcctctgatgggaggctttggactgaaacatccgcctcctcaaatcatgatcaaaaatactccggtaccggcaaatcctccgacgactttcagcccggccaagtttgcttcatttatcactcagtactccactggacaggtcagcgtggaaattgagtgggagctacagaaagaaaacagcaaacgttggaatccagagattcagtacacttccaactacaacaagtctgttaatgtggactttactgtagacactaatggtgtttatagtgaacctcgccctattggaacccggtatctcacacgaaacttgtaa

SEQ ID NO: 816 - DNA, 2205 bp, synthetic construct; identical to SEQ ID NO: 84
  source 1..2205: mol_type = other DNA; note = Description of Artificial Sequence: Synthetic polynucleotide

SEQ ID NO: 817 - DNA, 2234 bp, synthetic construct
  source 1..2234: mol_type = other DNA; note = Description of Artificial Sequence: Synthetic polynucleotide
atgtcttttgttgatcaccctccagattggttggaagaagttggtgaaggtcttcgcgagtttttgggccttgaagcgggcccaccgaaaccaaaacccaatcagcagcatcaagatcaagcccgtggtcttgtgctgcctggttataactatctcggacccggaaacggtctcgatcgaggagagcctgtcaacagggcagacgaggtcgcgcgagagcacgacatctcgtacaacgagcagcttgaggcgggagacaacccctacctcaagtacaaccacgcggacgccgagtttcaggagaagctcgccgacgacacatccttcgggggaaacctcggaaaggcagtctttcaggccaagaaaagggttctcgaaccttttggcctggttgaagagggtgctaagacggcccctaccggaaagcggatagacgaccactttccaaaaagaaagaaggctcggaccgaagaggactccaagccttccacctcgtcagacgccgaagctggacccagcggatcccagcagctgcaaatcccagcccaaccagcctcaagtttgggagctgatacaatgtctgcgggaggtggcggcccattgggcgacaataaccaaggtgccgatggagtgggcaatgcctcgggagattggcattgcgattccacgtggatgggggacagagtcgtcaccaagtccacccgaacctgggtgctgcccagctacaacaaccaccagtaccgagagatcaaaagcggctccgtcgacggaagcaacgccaacgcctactttggatacagcaccccctgggggtactttgactttaaccgcttccacagccactggagcccccgagactggcaaagactcatcaacaactactggggcttcagaccccggtccctcagagtcaaaatcttcaacattcaagtcaaagaggtcacggtgcaggactccaccaccaccatcgccaacaacctcacctccaccgtccaagtgtttacggacgacgactaccagctgccctacgtcgtcggcaacgggaccgagggatgcctgccggccttccctccgcaggtctttacgctgccgcagtacggttacgcgacgctgaaccgcgacaacacagaaaatcccaccgagaggagcagcttcttctgcctagagtactttcccagcaagatgctgagaacgggcaacaactttgagtttacctacaactttgaggaggtgcccttccactccagcttcgctcccagtcagaacctgttcaagctggccaacccgctggtggaccagtacttgtaccgcttcgtgagcacaaataacactggcggagtccagttcaacaagaacctggccgggagatacgccaacacctacaaaaactggttcccggggcccatgggccgaacccagggctggaacctgggctccggggtcaaccgcgccagtgtcagcgccttcgccacgaccaataggatggagctcgagggcgcgagttaccaggtgcccccgcagccgaacggcatgaccaacaacctccagggcagcaacacctatgccctggagaacactatgatcttcaacagccagccggcgaacccgggcaccaccgccacgtacctcgagggcaacatgctcatcaccagcgagagcgagacgcagccggtgaaccgcgtggcgtacaacgtcggcgggcagatggccaccaacaaccagagctccaccactgcccccgcgaccggcacgtacaacctccaggaaatcgtgcccggcagcgtgtggatggagagggacgtgtacctccaaggacccatctgggccaagatcccagagacgggggcgcactttcacccctctccggccatgggcggattcggactcaaacacccaccgcccatgatgctcatcaagaacacgcctgtgcccggaaatatcaccagcttctcggacgtgcccgtcagcagcttcatcacccagtacagcaccgggcaggtcaccgtggagatggagtgggagctcaagaaggaaaactccaagaggtggaacccagagatccagtacacaaacaactacaacgacccccagtttgtggactttgccccggacagcaccggggaatacagaaccaccagacctatcggaacccgataccttacccgacccctttaacccattcatgtcgcataccctcaataaaccgtgtattcgtgtcagtaaaatactgcctc

SEQ ID NO: 818 - protein, 736 aa, synthetic construct
  source 1..736: note = Description of Artificial Sequence: Synthetic polypeptide
MAADGYLPDWLEDNLSEGIREWWALKPGVPQPKANQQHQDNRRGLVLPGYKYLGPGNGLDKGEPVNEADAAALEHDKAYDQQLKAGDNPYLKYNHADAEFQERLQEDTSFGGNLGRAVFQAKKRILEPLGLVEEAAKTAPGKKRPVDQSPQEPDSSSGVGKSGKQPARKRLNFGQTGDSESVPDPQPLGEPPAAPTSLGSNTMASGGGAPMADNNEGADGVGNSSGNWHCDSQWLGDRVITTSTRTWALPTYNNHLYKQISSQSGASNDNHYFGYSTPWGYFDFNRFHCHFSPRDWQRLINNNWGFRPKKLSFKLFNIQVKEVTQNDGTTTIANNLTSTVQVFTDSEYQLPYVLGSAHQGCLPPFPADVFMVPQYGYLTLNNGSQAVGRSSFYCPEYFPSQMLRTGNNFQFSYTFEDVPFHSSYAHSQSLDRLMNPLIDQYLYYLNRTQGTTSGTTNQSRLLFSQAGPQSMSLQARNWLPGPCYRQQRLSKTANDNNNSNFPWTAASKYHLNGRDSLVNPGPAMASHKDDEEKFFPMHGNLIFGKEGTTASNAELDNVMITDEEEIRTTNPVATEQYGTVANNLQSSNTAPTTRTVNDQGALPGMVWQDRDVYLQGPIWAKIPHTDGHFHPSPLMGGFGLKHPPPQIMIKNTPVPANPPTTFSPAKFASFITQYSTGQVSVEIEWELQKENSKRWNPEIQYTSNYNKSVNVDFTVDTNGVYSEPHPIGTRYLTRNL

SEQ ID NO: 819 - protein, 736 aa, synthetic construct
  source 1..736: note = Description of Artificial Sequence: Synthetic polypeptide
MAADGYLPDWLEDNLSEGIREWWALKPGVPQPKANQQHQDNRRGLVLPGYKYLGPGNGLDKGEPVNEADAAALEHDKAYDQQLKAGDNPYLKYNHADAEFQERLQEDTSFGGNLGRAVFQAKKRILEPLGLVEEAAKTAPGKKRPVDQSPQEPDSSSGVGKSGKQPARKRLNFGQTGDSESVPDPQPLGEPPAAPTSLGSNTMASGGGAPMADNNEGADGVGNSSGNWHCDSQWLGDRVITTSTRTWALPTYNNHLYKQISSQSGASNDNHYFGYSTPWGYFDFNRFHCHFSPRDWQRLINNNWGFRPKKLSFKLFNIQVKEVTQNDGTTTVANNLTSTVQVFTDSEYQLPYVLGSAHQGCLPPFPADVFMVPQYGYLTLNNGSQAVGRSSFYCLEYFPSQMLRTGNNFQFSYTFEDVPFHSSYAHSQSLDRLMNPLIDQYLYYLNRTQGTTSGTTNQSRLLFSQAGPQSMSLQARNWLPGPCYRQQRLSKTANDNNNSNFPWTAASKYHLNGRDSLVNPGPAMASHKDDEEKFFPMHGNLIFGKEGTTASNAELDNVMITDEEEIRTTNPVATEQYGTVANNLQSSNTAPTTRTVNDQGALPGMVWQDRDVYLQGPIWAKIPHTDGHFHPSPLMGGFGLKHPPPQIMIKNTPVPANPPTTFSPAKFASFITQYSTGQVSVEIEWELQKENSKRWNPEIQYTSNYNKSVNVDFTVDTNGVYSEPRPIGTRYLTRNL

SEQ ID NO: 820 - protein, 736 aa, synthetic construct
  source 1..736: note = Description of Artificial Sequence: Synthetic polypeptide
MAADGYLPDWLEDNLSEGIREWWALKPGVPQPKANQQHQDNRRGLVLPGYKYLGPGNGLDKGEPVNEADAAALEHDKAYDQQLKAGDNPYLKYNHADAEFQERLQEDTSFGGNLGRAVFQAKKRILEPLGLVEEAAKTAPGKKRPVDQSPQEPDSSSGVGKSGKQPARKRLNFGQTGDSESVPDPQPLGEPPAAPTSLGSNTMASGGGAPMADNNEGADGVGNSSGNWHCDSQWLGDRVITTSTRTWALPTYNNHLYKQISGQSGASNDNHYFGYSTPWGYFDFNRFHCHFSPRDWQRLINNNWGFRPKKLSFKLFNIQVKEVTQNDGTTTIANNLTSTVQVFTDSEYQLPYVLGSAHQGCLPPFPADVFMVPQYGYLTLNNGSQAVGRSSFYCLEYFPSQMLRTGNNFQFSYTFEDVPFHSSYAHSQSLDRLMNPLIDQYLYYLNRTQGTTSGTTNQSRLLFSQAGPQSMSLQARNWLPGPCYRQQRLSKTANGNNNSNFPWTAASKYHLNGRDSLVNPGPAMASHKDDEEKFFPMHGNLIFGKEGTTASNAELDNVMITDEEEIRTTNPVATEQCGTVANNLQSSNTAPTTRTVNDQGALPGMVWQDRDVYLQGPIWAKIPHTDGHFHPSPLMGGFGLKHPPPQIMIKNTPVPANPPTTFSPAKFASFITQYSTGQVSVEIEWELQKENSKRWNPEIQYTSNYNKSVNVDFTVDTNGVYSEPRPIGTRYLTRNL

SEQ ID NO: 821 - protein, 736 aa, synthetic construct
  source 1..736: note = Description of Artificial Sequence: Synthetic polypeptide
MAADGYLPDWLEDNLSEGIREWWALKPGVPQPKANQQHQDNRRGLVLPGYKYLGPGNGLDKGEPVNEADAAALEHDKAYDQQLKAGDNPYLKYNHADAEFQERLQEDTSFGGNLGRAVFQAKKRILEPLGLVEGAAKTAPGKKRPVDQSPQEPDSSSGVGKSGKQPARKRLNFGQTGDSESVPDPQPLGEPPAAPTSLGSNTMASGGGAPMADNNEGADGVGNSSGNWHCDSQWLGDRVITTSTRTWALPTYNSHLYKQISSQSGASNDNHYFGYSTPWGYFDFNRFHCHFSPRDWQRLINNNWGFRPKKLSFKLFNIQVKEVTQNDGTTTIANNLTSTVQVFTDSEYQLPYVLGSAHQGCLPPFPADAFMVPQYGYLTLNNGSQAVGRSSFYCLEYFPSQMLRTGNNFQFSYTFEDVPFHGSYAHSQSLDRLMNPLIDQYLYYLNRTQGTTSGTTNQSRLLFSQAGPQSMSLQARNWLPGPCYRQQRLSKTANDNNNSNFPWTAASKYHLNGRDSLVNPGPAMASHKDDEEKFFPMHGNLIFGKEGTTASNAELDNVMITDEEEIRTTNPVATEQYGTVANNLQSSNTAPTTRTVNDQGALPGMVWQDRDVYLQGPIWAKIPHTDGHFHPSPLMGGFGLKHPPPQIMIKNTPVPANPPTTFSPAKFASFITQYSTGQVSVEIEWELQKENSKRWNPEIQYTSNYNKSVNVDFTVDTNGVYSEPRPIGTRYLTRNS

SEQ ID NO: 822 - protein, 736 aa, synthetic construct
  source 1..736: note = Description of Artificial Sequence: Synthetic polypeptide
MAADGYLPDWLEDNLSEGIREWWALKPGVPQPKANQQHQDNRRGLVLPGYKYLGPGNGLDKGEPVNEADAAALEHDKAYDQQLKAGDNPYLKYNHADAEFQERLQEDTSFGGNLGRAVFQAKKRILEPLGLVEGAAKTAPGKKRPVDQSPQEPDSSSGVGKSGKQLARKRLNFGQTGDSESVPDPQPLGEPPAAPTSLGSNTMASGGGAPMADNNEGADGVGNSSGNWHCDSQWLGDRVITTSTRTWALPTYNSHLYKQISGQSGASNDNHYFGYSTPWGYFDFNRFHCHFSPRDWQRLINNNWGFRPKKLSFKLFNIQVKEVTQNDGTTTIANNLTSTVQVFTDSEYQLPYVLGSAHQGCLPPFPADVFMVPQYGYLTLNNGSQAVGRSSFYCLEYFPSQMLRTGNNFQFSYTFEDVPFHSSYAHSQSLDRLMNPLIDQYLYYLNRTQGTTSGTTNQSRLLFSQAGPQSMSLQARNWLPGPCYRQQRLSKTANDNNNSNFPWTAASKYHLNGRDSLVNPGPAMASHKDDEEKFFPMHGNLIFGKEGTTASNAELDNVMITDEEEIRTTNPVATEQYGTVANNLQSSNTAPTTRTVNDQGALPGMVWQDRDVYLQGPIWAKIPHTDGHFHPSPLMGGFGLKHPPPQIMIKNTPVPANPPTTFSPAKFASFITQYSTGQVSVEIEWELQKENSKRWNPEIQYTSNYNKSVNVDFTVDTNGVYSEPRPIGTRYLTRNL

SEQ ID NO: 823 - protein, 736 aa, synthetic construct
  source 1..736: note = Description of Artificial Sequence: Synthetic polypeptide
MAADGYLPDWLEDNLSEGIREWWALKPGVPQPKANQQHQDDRRGLVLPGYKYLGPGNGLDKGEPVNEADAAALEHDKAYDQQLKAGDNPCLKYNHADAEFQERLQEDTSFGGNLGRAVFQAKKRILEPLGLVEEAAKTAPGKKRPVDQSPQEPDSSSGVGKSGKQPARKRLNFGQTGDSESVPDPQPLGEPPAAPTSLGSNTMASGGSAPMADNNEGADGVGNSSGNWHCDSQWLGDRVITTSTRTWALPTYNNHLYKQISSQSGASNDNHYFGYSTPWGYFDFNRFHCHFSPRDWQRLINNNWGFRPKKLSFKLFNIQVKEVTQNDGTTTIANNLTSTVQVFTDSEYQLPYVLGSAHQGCLPPFPADVFMVPQYGYLTLNNGSQAVGRSSFYCLEYFPSQMLRTGNNFQFSYTFEDVPFHSSYAHSQSLDRLMDPLIDQYLYYLNRTQGTTSGTTNQSRLLFSQAGPQSMSLQARNWLPGPCYRQQRLSKTANDNNNSNFPWTAASKYHLNGRDSLVNPGPAMASHKDDEEKFFPMHGNLIFGKEGTTASNAELDNVMITDEEEIRTTNPVATEQYGTVANNLQSSNTAPTTRTVNDQGALPGMVWQDRDVYLQGPIWAKIPHTDGHFHPSPLMGGFGLKHPPPQIMIKNTPVPANPPTTFSPAKFASFITQYSTGQVSVEIEWELQKENSKRWNPEIQYTSNYNKSVNVDFTVDTNGVYSEPRPIGTRYLTRNL

SEQ ID NO: 824 - protein, 736 aa, synthetic construct
  source 1..736: note = Description of Artificial Sequence: Synthetic polypeptide
MAADGYLPDWLEDNLSEGIREWWALKPGVPQPKANQQHQDDRRGLVLPGYKYLGPGNGLDKGEPVNEADAAALEHDKAYDQQLKAGDNPYLKYNHADAEFQERLQEDTSFGGNLGRAVFQAKKRILEPLGLVEEAAKTAPGKKRPVDQSPQEPDSSSGVGKSGKQPARKRLNFGQTGDSESVPDPQPLGEPPAAPTSLGSNTMASGGGAPMADNNEGADGVGNSSGNWHCDSQWLGNRVITTSTRTWALPTYNNHLYKQISSQSGASNDNHYFGYSTPWGYFDFNRFHCHFSPRDWQRLINNNWGFRPKKLSFKLFNIQVKEVTQNDGTTTIANNLTSTVQVFTDSEYQLPYVLGSAHQGCLPPFPADVFMVPQYGYLTLNNGSQAVGRSSFYCLEYFPSQMLRTGNNFQFSYTFEDVPFHSSYAHSQSLDRLMNPLIDQYLYYLNRTQGTTSGTTNQSRLLFSQAGPQSMSLQARNWLPGPCYRQQRLSKTANDNNNSNFPWTAASKYHLNGRDSLVNPGPAMASHKDDEEKFFPMHGNLIFGKEGTTASNAELDNVMITDEEEIRTTNPVATEQYGTVANNLQSSNTAPTTRTVNDQGALPGMVWQDRDVYLQGPIWAKIPHTDGHFHPSPLMGGFGLKHPPPQIMIKNTPVPANPPTTFSPAKFASFITQYSTGQVSVEIEWELQKENSKRWNPEIQYTSNYNKSVNVDFTVDTNGVYSEPRPIGTRYLTRNL

SEQ ID NO: 825 - protein, 736 aa, synthetic construct
  source 1..736: note = Description of Artificial Sequence: Synthetic polypeptide
MAADGYLPDWLEDNLSEGIREWWALKPGVPQPKANQQHQDDRRGLVLPGYKYLGPGNGLDKGEPVNEADAAALEHDKAYDQQLKAGDNPYLKYNHADAEFQERLQEDTSFGGNLGRAVFQAKKRILEPLGLVEEAAKTAPGKKRPVDQSPQEPDSSSGVGKSGKQPARKRLNFGQTGDSESVPDPQPLGEPPAAPTSLGSNTMASGGGAPMADNNEGADGVGNSSGNWHCDSQWLGDRVITTSTRTWALPTYNNHLYKQISSQSGASNDNHYFGYSTPWGYFDFNRFHCHFSPRDWQRLINNNWGFRPKKLSFKLFNIQVKEVTQNDGTTTIANNLTSTVQVFTDSEYQLPYVLGSAHQGCLPPFPADVFMVPQYGYLTLNNGSQAVGRSSFYCLEYFPSQMLRTGNNFQFSYTFEDVPFHSSYAHSQSLDRLMNPLIDQYLYYLNRTQGTTSGTTNQSRLLFSQAGPQSMSLQARNWLPGPCYRQQRLSKTANDNNNSNFPWTAASKYHLNGRDSLVNPGPAMASHKDDEEKFFPMHGNLIFGKEGTTASNAELDNVMITDEEEIRTTNPVATVQYGTVANNLQSSNTAPTTRTVNDQGALPGMVWQDRDVYLQGPIWAKIPHTDGHFHPSPLMGGFGLKHPPPQIMIKNTPVPANPPTTFSPAKFASFITQYSTGQVSVEIEWELQKENSKRWNPEIQYTSNYNKSVNVDFTVDTNGVYSEPRPIGTRYLTRNL

SEQ ID NO: 826 - protein, 735 aa, synthetic construct
  source 1..735: note = Description of Artificial Sequence: Synthetic polypeptide
MAADGYLPDWLEDNLSEGIREWWALKPGVPQPKANQQHQDNRRGLVLPGYKYLGPGNGLDKGEPVNEADAAALEHDKAYDQQLKAGDNPYLKYNHADAEFQERLQEDTSFGGNLGRAVFQAKKGILEPLGLVEEAAKTAPGKKRPVDQSPQEPDSSSGVGKSGKQPARKRLNFGQTGDSESVPDPQPLGEPPAAPTSLGSNTMASGGGAPMADNNEGADGVGNSSGNWHCDSQWLGDRVITTSTRTWALPTYNNHLYKQISSQSGASNDNHYFGYSTPWGYFDFNRFHCHFSPRDWQRLINNNWGFRPKKLSFKLFNIQVKEVTQNDGTTTIANNLTSTVQVFTDSEYQLPYVFGSAHQGCLPPFPADVFMVPQYGYLTLNNGSQAVGRSSFYCLEYFPSQMLRTGNNFQFSYTFEDVPFHSSYAHSQSSDRLMNPLIDQYLYYLNRTQGTTSGTTNQSRLLFSQAGPQSMSLQARNWLPGPCYRQQRLSKTANDNNNSNFPTAASKYHLNGRDSLVNPGPAMASHKDDEEKFFPMHGNLIFGKEGTTASNAELDNVMITDEEEIRTTNPVATEQYGTVANNLQSSNTAPTTRTVNDQGALPGMVWQDRDVYLQGPIWAKIPHTDGHFHPSPLMGGFGLKHPPPQIMIKNTPVPANPPTTFSPAKFASFITQYSTGQVSVEIEWELQKENSKRWNPEIQYTSNYNKSVNVDFTVDTNGVYSEPRPIGTRYLTRNL

SEQ ID NO: 827 - protein, 736 aa, synthetic construct
  source 1..736: note = Description of Artificial Sequence: Synthetic polypeptide
MAADGYLPDWLEDNLSEGIREWWALKPGVPQPKANQQHQDNRRGLVLPGYKYLGPGNGLDEGEPVNEADAAALEHDKAYDQQLKAGDNPYLKYNHADAEFQERLQEDTSFGGNLGRAVFQAKKRILEPLGLVEGAAKTAPGKKRPVDQSPQEPDSSSGVGKSGKQPARKRLNFGQTGDSESVPDPQPLGEPPAAPTSLGSNTMASGGGAPMADNNEGADGVGNSSGNWHCDSQWLGDRVITTSTRTWALPTYNSHLYKQISSQSGASNDNHYFGYSTPWGYFDFNRFHCHFSPRDWQRLINNNWGFRPKKLSFKLFNIQVKEVTQNDGTTTIANNLTSTVQVFTDSEYQLPYVLGSAHQGCLPPFPADVFMVPQYGYLTLNNGSQAVGRSSFYCLEYFPSQMLRTGNNFQFSYTFEDVPFHSSYAHSQSLDRLMNPLIDQYLYYLNRTQGTTSGTTNQSRLLFSQAGPQSMSLQARNWLPGPCYRQQRLSKTANDNNNSNFPWTAASKYHLNGRDSLVNPGPAMASHKDDEEKFFPMHGNLIFGKEGTTASNAELDNVMITDEEEIRTTNPVATEQYGTVANNLQSSNTAPTTRTVNDQGALPGMVWQDRDVYLQGPIWAKIPHTDGHFHPSPLMGGFGLKHPPPQIMIKNTPVPANPPTTFSPAKFASFITQYSTGQVSVEIEWELQKENSKRWNPEIQYTSNYNKSVNVDFTVDTNGVYSEPRPIGTRYLTRNL

SEQ ID NO: 828 - protein, 668 aa, synthetic construct
  source 1..668: note = Description of Artificial Sequence: Synthetic polypeptide
MAADGYLPDWLEDNLSEGIREWWALKPGVPQPKANQQHQDNRRGLVLPGYKYLGPGNGLDKGEPVNEADAAALEHDKAYDQQLKAGDNPYLKYNHADAEFQERLQEDTSFGGNLGRAVFQAKKRILEPLGLVEGAAKTAPGKKRPVDQSPQEPDSSSGVGKSGKQPARKRLNFGQTGDSESVPDPQPLGEPPAAPTSLGSNTMASGGGAPMADNNEGADGVGNSSGNWHCDSQWLGDRVITTSTRTWALPTYNSHLYKQISSQSGASNDNHYFGYSTPWGILTLTDSTATSHHVTGSDSLTTTGDSGPRNSASSSSTSKLKRSRRTMARRLLPITLPARFKCLRTRSISSRTCSGRRTKAVSRRFQRTPSWSLSMDTSPTTEVKRWDAHPFTAWSTSLRRCGLEITSNSAIPSRMYLFTAATLTARVWIAILLLISICTTTERKEQPLEQPTNHGCFLARLGLSLCLCRPEIGYLGPATGNRDFQRLLTTTTTVTFLGQRPANIISMAATRWIQDQLWPVTRTMKKNFSLCTAIRGPYLAWCGKIVTCTFKDLSGQRFLTRMDTFILLLWEALDNIRLLKSSKILRYRQILRRLSARPSLLHLSLSTPLDRSAWKLSGSYRKKTANVGIQRFSTLPTTTSLLMWTLLTLMVFIVNLALLEPGISHETC

SEQ ID NO: 829 - protein, 734 aa, synthetic construct
  source 1..734: note = Description of Artificial Sequence: Synthetic polypeptide
MTDGYLPDWLEDNLSEGVREWWALQPGAPKPKANQQHQDNARGLVLPGYKYLGPGNGLDKGEPVNAADAAALEHDKAYDQQLKAGDNPYLKYNHADAEFQQRLQGDTSFGGNLGRAVFQAKKRVLEPLGLVEQAGETAPGKKRPLIESPQQPDSSTGIGKKGKQPAKKKLVFEDETGAGDGPPEGSTSGAMSDDSEMRAATGGAAVEGGQGADGVGNASGDWHCDSTWSEGHVTTTSTRTWVLPTYNNHLYKRLGESLQSNTYNGFSTPWGYFDFNRFHCHFSPRDWQRLINNNWGMRPKAMRVKIFNIQVKEVTTSNGETTVANNLTSTVQIFADSSYELPYVMDAGQEGSLPPFPNDVFMVPQYGYCGLVTGNTSQQQTDRNAFYCLEYFPSQMLRTGNNFEITYSFEKVPFHSMYAHSQSLDRLMNPLIDQYLWGLQSTTTGTTLNAGTATTNFTKLRPTNLSNFKKNWLPGPSIKQQGFSKTANQNYKIPATGSDSLIKYETHSTLDGRWSALTPGPPMATAGPADSKFSNSQLIFAGPKQNGNTATVPGTLIFTSEEELAATNATDTDMWGNLPGGDQSNSNLPTVDRLTALGAVPGMVWQNRDIYYQGPIWAKIPHTDGHFHPSPLIGGFGLKHPPPQIFIKNTPVPANPATTFSSTPVNSFITQYSTGQVSVQIDWEIQKERSKRWNPEVQFTSNYGQQNSLLWAPDAAGKYTEPRAIGTRYLTHHL

SEQ ID NO: 830 - protein, 734 aa, synthetic construct
  source 1..734: note = Description of Artificial Sequence: Synthetic polypeptide
MTDGYLPDWLEDNLSEGVREWWALQPGAPKPKANQQHQDNARGLVLPGYKYLGPGNGLDKGEPVNAADAAALEHDKAYDQQLKAGDNPYLKYNHADAEFQQRLQGDTSFGGNLGRAVFQAKKRVLEPLGLVEQAGETAPGKKRPLIESPQQPDSSTGIGKKGKQPAKKKLVFEDETGAGDGPPEGSTSGAMSDDSEMRAAAGGAAVEGGQGADGVGNASGDWHCDSTWSEGHVTTTSTRTWVLPTYNNHLYKRLGESLQSNTYNGFSTPWGYFDFNRFHCHFLPRDWQRLINNNWGVRPKAMRVKIFNIQVKEVTTSNGETTVANNLTSTVQIFADSSYELPYVMDAGQEGSLPPFPNDVFMVPQYGYCGLVTGDTSQQQTDRNAFYCLEYFPSQMLRTGNNFEITYSFEKVPFHSMYAHSQSLDRLMNPLIDQYLWGLQSTTTGTTLNAGTATTNFTKLRPTNFSNFKKNWLPGPSIKQQGFSKTANQNYKIPATGSDSLIKYETHSTLDGRWSALTPGPPMATAGPADSKFSNSQLIFAGPKQNGNTATVPGTLIFTSEEELAATNATDTDMWGNLPGGDQSNSNLPTVDRLTALGAVPGMVWQNRDIYYQGPIWAKIPHTDGHFHPSPLIGGFGLKHPPPQIFIKNTPVPANPATTFSSTPVNSFITQYSTGQVSVQIDWEIQKERSKRWNPEVQFTSNYGQQNSLLWAPDAAGKYTEPRAIGTRYLTHHL

SEQ ID NO: 831 - protein, 734 aa, synthetic construct
  source 1..734: note = Description of Artificial Sequence: Synthetic polypeptide
MTDGYLPDWLEDNLSEGVREWWALQPGAPKPKANQQHQDNARGLVLPGYKYLGPGNGLDEGEPVNAADAAALEHDKAYDQQLKAGDNPYLKYNHADAEFQQRLQGDTSFGGNLGRAVFQAKKRVLEPLGLVEQAGETAPGKKRPLIESPQQPDSSTGIGKKGKQPAKKKLVFEDETGAGDGPPEGSTSGAMSDDSEMRAAAGGAAVEGGQGADGVGNASGDWHCDSTWSEGHVTTTSTRTWVLPTYNNHLYKRLGESLQSNTYNGFSTPWGYFDFNRFHCHFSPRDWQRLINNNWGMRPKAMRVKIFNIQVKEVTTSNGETTVANNLTSTVQIFADSSYELPYVMDAGQEGSLPPFPNDVFMVPQYGYCGLVTGNTSQQQTDRNAFYCLEYFPSQMLRTGNNFEITYSFEKVPFHSMYAHSQSLDRLMNPLIDQYLWGLQSTTTGTTLNAGTATTNFTKLRPTNFSNFKKNWLPGPSIKQQGFSKTANQNYKIPATGSDSLIKYETHSTLDGRWSALTPGPPMATAGPADSKFSNSQLIFAGPKQNGNTATVPGTLIFTSEEELAATNATDTDMWGNLPGGDQSNSNLPTVDRLTALGAVPGMVWQNRDIYYQGPIWAKIPHTDGHFHPSPLIGGFGLKHPPPQIFIKNTPVPANPATTFSSTPVNSFITQYSTGQVSVQIDWEIQKERSKRWNPEVQFTSNYGQQNSLLWAPDAAGKYTEPRAIGTRYLTHHL

SEQ ID NO: 832 - protein, 734 aa, synthetic construct
  source 1..734: note = Description of Artificial Sequence: Synthetic polypeptide
MTDGYLPDWLEDNLSEGVREWWALQPGAPKPKANQQHQDNARGLVLPGYKYLGPGNGLDKGEPVNAADAAALEHDKAYDQQLKAGDNPYLKYNHADAEFQQRLQGDTSFGGNLGRAVFQAKKRVLEPLGLVEQAGETAPGKKRPLIESPQQPDSSTGIGKKGKQPAKKKLVFEDGTGAGDGPPEGSTSGAMSDDSEMRAAAGGAAVEGGQGADGVGNASGDWHCDSTWSEGHVTTTSTRTWVLPTYNNHLYKRLGESLQSNTYNGFPTPWGYFDFNRFHCHFSPRDWQRLINNNWGMRPKAMRVKIFNIQVKEVTTSNGETTAANNLTSTVQIFADSSYELPYVMDAGQEGSLPPFPNDVFMVPQYGYCGLVTGNTSQQQTDRNAFYCLEYFPSQMLRTGNNFEITYSFEKVPFHSMYAHSQSLDRLMNPLIDQYLWGLQSTTTGTTLNAGTATTNFTKLRPTNFSNFKKNWLPGPSIKQQGFSKTANQNYKIPATGSDSLIKYETHSTLDGRWSALTPGPPMATAGPADSKFSNSQLIFAGPKQNGNTATVPGTLIFTSEEELAATNATDTDMWGNLPGGDQSNSNLPTVDRLTALGAVPGMVWQNRDIYYQGPIWAKIPHTDGHFHPSPLIGGFGLKHPPPQIFIKNTPVPANPATTFSSTPVNSFITQYSTGQVSVQIDWEIQKERSKRWNPEVQFTSNYGQQNSLLWAPDAAGKYTEPRAIGTRYLTHHL

SEQ ID NO: 833 - protein, 734 aa, synthetic construct
  source 1..734: note = Description of Artificial Sequence: Synthetic polypeptide
MTDGYLPDWLEDNLSEGVREWWALQPGAPKPKANQQHQDNARGLVLPGYKYLGPGNGLDKGEPVNAADAAALEHDKAYDQQLKAGDNPYLKYNHADAEFQQRLQGDTSFGGNLGRAVFQAKKRVLEPLGLVEQAGETAPGKKRPLIESPQQPDSSTGIGKKGKQPAKKKLVFEDETGAGDGPPEGSTSGAMSDDSEMRAAAGGAAVEGGQGADGVGNASGDWHCDSTWSEGHVTTTSTRTWVLPTYNNHLYKRLGESLQSNTYNGFSTPWGYFDFNRFHCHFSPRDWQRLINNNWGMRPKAMRVKIFNIQVKEVTTSNGETTVANNLTSTVQIFADSSYELPYVMDAGQEGSLPPFPNDVFMVPQYGYRGLVTGNTSQQQTDRNAFYCLEYFPSQMLRTGNNFEITYSFEKVPFHSMYAHSQSLDRLMNPLIDQYLWGLQSTTTGTTLNAGTATTNFTKLRPTNFSNFKKNWLPGPSIKQQGFSKTANQNYKIPATGSDSLIKYETHSTLDGRWSALTPGPPMATAGPADSKFSNSQLIFAGPKQNGNTATVPGTLIFTSEEELAATNATDTDMWGNLPGGDQSNSNLPTVDRLTALGAVPGMVWQNRDIYYQGPIWAKIPHTDGHFHPSPLIGGFGLKHPPPQIFIKNTPVPANPATTFSSTPVNSFITQYSTGQVSVQIDWEIQKERSKRWNPEVQFTSNYGQQNSLLWAPDAAGKYTEPRAIGTRYLTHHL

SEQ ID NO: 834 - protein, 734 aa, synthetic construct
  source 1..734: note = Description of Artificial Sequence: Synthetic polypeptide
MTDGYLPDWLEDNLSEGVREWWALQPGAPKPKANQQHQDNARGLVLQGYKYLGPGNGLDKGEPVNAADAAALEHDKAYDQQLKAGDNPYLKYNHADAEFQQRLQGDTSFGGNLGRAVFQAKKRVLEPLGLVEQAGETAPGKKRPLIESPQQPDSSTGIGKKGKQPAKKKLVFEDETGAGDGPPEGSTSGAMSDDSEMRAAAGGAAVEGGQGADGVGNASGDWHCDSTRSEGHVTTTSTRTWVLPTYNNHLYKRLGESLQSNTYNGFSTPWGYFDFNRFHCHFSPRDWQRLINNNWGMRPKAMRVKIFNIQVKEVTTSNGETTVANNLTSTVQIFADSSYELPYVMDAGQEGSLPPFPNDVFMVPQYGYCGLVTGNTSQQQTDRNAFYCLEYFPSQMLRTGNNFEITYSFEKVPFHSMYAHSQSLDRLMNPLIDQYLWGLQSTTTGTTLNAGTATTNFTKLRPTNFSNFKKNWLPGPSIKQQGFSKTANQNYKIPATGSDSLIKYETHSTLDGRWSARTPGPPMATAGPADSKFSNSQLIFAGPKQNGNTATVPGTLIFTSEEELAATNATDTDMWGNLPGGDQSNSNLPTVDRLTALGAVPGMVWQNRDIYYQGPIWAKIPHTDGHFHPSPLIGGFGLKHPPPQIFIKNTPVPANPATTFSSTPVNSFITQYSTGQVSVQIDWEIQKERSKRWNPEVQFTSNYGQQNSLLWAPDAAGKYTEPRAIGTRYLTHHL

SEQ ID NO: 835 - protein, 724 aa, synthetic construct
  source 1..724: note = Description of Artificial Sequence: Synthetic polypeptide
MSFVDHPPDWLEEVGEGLREFLGLEAGPPKPKPNQQHQDQARGLVLPGYNYLGPGNGLDRGEPVNRADEVAREHDISYNEQLEAGDNPYLKYNHADAEFQERLADDTSFGGNLGKAVFQAKKRVLEPFGLVEEGAKTAPTGKRIDDHFPKRKKARTEEDSKPSTSSDAEAGPSGSQQLQIPAQPASSLGADTMSAGGGGPLGDNNQGADGVGNASGDWHCDSTWMGDRVVTKSTRTWVLPSYNNHQYREIKSGSVDGSNANAYFGYSTPWGYFDFNRFHSHWSPRDWQRLINNYWGFRPRSLRVKIFNIQVKEVTVQDSTTTIANNLTSTVQVFTDDDYQLPYVVGNGTEGCLPAFPPQVFTLPQYGYATLNRDNTENPTERSSFFCLEYFPSKMLRTGNNFEFTYNFEEVPFHSSFAPSQNLFKLANPLVDQYLYRFVSTNNTGGVQFNKNLAGRYANTYKNWFPGPMGRTQGWNLGSGVNRASVSAFATTNRMELEGASYQVPPQPNGMTNNLQGSNTYALENTMIFNSQPANPGTTATYLEGNMLITSESETQPVNRVAYNVGGQMATNNQSSTTAPATGTYNLQEIVPGSVWMERDVYLQGPIWAKIPETEAHFHPSPAMGGFGLKHPPPMMLIKNTPVPGNITSFSDVPVSSFITQYSTGQVTVEMEWELKKENSKRWNPEIQYTNNYNDPQFVDFAPDSTGEYRTTRPIGTRYLTRPL

SEQ ID NO: 836 - protein, 724 aa, synthetic construct
  source 1..724: note = Description of Artificial Sequence: Synthetic polypeptide
MSFVDHPPDWLEEVGEGLREFLGLEAGPPKPKPNQQHQDQARGLVLPGYNYLGPGNGLDRGEPVNRADEVAREHDISYNEQLEAGDNPYLKYNHADAEFQEKLADDTSSGGNLGKAVFQAKKRVLEPFGLVEEGAKTAPTGKRIDDHFPKRKKARTEEDSKPSTSSDAEAGPSGSQQLQIPAQPASSLGADTMSAGGGGPLGDNNQGADGVGNASGDWHCDSTWMGDRVVTKSTRTWVLPSYNNHQYREIKSGSVDGSNANAYFGYSTPWGYFDFNRFHSHWSPRDWQRLINNYWGFRPRSLRVKIFNIQVKEVTVQDSTTTIANNLTSTVQVFTDDDYQLPYVVGNGTEGCLPAFPPQVFTLPQYGYATLNRDNTENPTERSSFFCLEYFPSKMLRTGNNFEFTYNFEEVPFHSSFAPSQNLFKLANPLVDQYLYRFVSTNNTGGVQFNKNLAGRYANTYKNWFPGPMGRTQGWNLGSGVNRASVSAFATTNRMELEGASYQVPPQPNGMTNNLQGSNTYALENTMIFNSQPANPGTTATYLEGNMLITSESETQPVNRVAYNVGGQMATNNQSSTTAPATGTYNLQEIVPGSVWMERDVYLQGPIWAKIPETGAHFHPSPAMGGFGLKHPPPMMLIKNTPVPGNITSFSDVPVSSFITQYSTGQVTVEMEWELKKENSKRWNPEIQYTNNYNDPQFVDFAPDSTGEYRTTRPIGTRYLTRPL

SEQ ID NO: 837 - protein, 724 aa, synthetic construct
  source 1..724: note = Description of Artificial Sequence: Synthetic polypeptide
MSFVDHPPDWLEEVGEGLREFLGLEAGPPKPKPNQQHQDQARGLVLPGYNYLGPGNGLDRGEPVNRADEVAREHDISYNEQLEAGDNPYLKYNHADAEFQEKLADDTSFGGNLGKAVFQAKKRVLEPFGLVEEGAKTAPTGKRIDDHFPKRKKARTEEDSKPSTSSDAEAGPSGSQQLQIPAQPASSLGADTMSAGGGGPLGDNNQGADGVGNASGDWHCDSTWMGDRVVTKSTRTWVLPSYNNHQYREIKSGSVDGSNANAYFGYSTPWGYFDFNRFHSHWSPRDWQRLINNYWGFRPRSLRVKIFNIQVKEVTVQDSTTTIANNLTSTVQVFTDDDYQLPYVVGNGTEGCLPAFPPQVFTLPQYGYATLNRDNTENPTERSSFFCLEYFPSKMLRTGNNFEFTYNFEEVPFHSSFAPSQNLFKLANPLVDQYLYRFVSTNNTGGVQFNKNLAGRYANTYKNWFPGPMGRTQGWNLGSGVNRASVSAFATTNRMELEGASYQVPPQPNGMTNNLQGSNTYALENTMIFNSQPANPGTTATYLEGNMLITSESETQPVNRVAYNVGGQMATNNQSSTTAPATGTYNLQEIVPGSVWMERDVYLQGPIWAKIPETGAHFHPSPAMGGFGLKHPPPMMLIKSTPVPGNITSFSDVPVSSFITQYSTGQVTVEMEWELKKENSKRWNPEIQYTNNYNDPQFVDFAPDSTGEYRTTRPIGTRYLTRPL

SEQ ID NO: 838 - protein, 724 aa, synthetic construct
  source 1..724: note = Description of Artificial Sequence: Synthetic polypeptide
MSFVDHPPDWLEEVGEGLREFLGPEAGPPKPKPNQQHQDQARGLVLPGYNYLGPGNGLDRGEPVNRADEVAREHDISYNEQLEAGDNPYLKYNHADAEFQEKLADDTSFGGNLGKAVFQAKKRVLEPFGLVEEGAKTAPTGKRIDDHFPKRKKVRTEEDSKPSTSSDAEAGPSGSQQLQIPAQPASSLGADTMSAGGGGPLGDNNQGADGVGNASGDWHCDSTWMGDRVVTKSTRTWVPPSYNNHQYREIKSGSVDGSNANAYFGYSTPWGYFDFNRFHSHWSPRDWQRLINNYWGFRPRSLRVKIFNIQVKEVTVQDSTTTIANNLTSTVQVFTDDDYQLPYVVGNGTEGCLPAFPPQVFTLPQYGYATLNRDNTENPTERSSFFCLEYFPSKMLRTGNNFEFTYNFEEVPFHSSFAPSQNLFKLANPLVDQYLYRFVSTNNTGGVQFNKNLAGRYANTYKNWFPGPMGRTQGWNLGSGVNRASVSAFATTNRMELEGASYQVPPQPNGMTNNLQGSNTYALENTMIFNSQPANPGTTATYLEGNMLITSESETQPVNRVACNVGGQMATNNQSSTTAPATGTYNLQEIVPGSVWMERDVYLQGPIWAKIPETGAHFHPSPAMGGFGLKHPPPMMLIKNTPVPGNITSFSDVPVSSFITQYSTGQVTVEMEWELKKENSKRWNPEIQYTNNYNDPQFVDFAPDSTGEYRTTRPIGTRYLTRPL

SEQ ID NO: 839 - protein, 724 aa, synthetic construct
  source 1..724: note = Description of Artificial Sequence: Synthetic polypeptide
MSFVDHPPDWLEEVGEGLREFLGLEAGPPKPKPNQQHQDQARGLVLPGYNYLGPGNGLDRGEPVNRADEVAREHDISYNEQLEAGDNPYLKYNHADAEFQEKLADDTSFGGNLGKAVFQAKKRVLEPFGLVEEGAKTAPTGKRIDDHFPKRKKARTEEDSKPSTSSDAEAGPSGSQQLQIPAQPASSLGADTMSAGGGGPLGDNNQGADGVGNASGDWHCDSTWMGDRVVTKSTRTWVLPSYNNHQYREIKSGSVDGSNANAYFGYSTPWGYFDFNRFHSHWSPRDWQRLINNYWGFRPRSLRVKIFNIQVKEVTVQDSTTTIANNLTSTVQVFTDDDYQLPYVVGNGTEGCLPAFPPQVFTLPQYGYATLNRDNTENPTERSSFFCLEYFPSKMLRTGNNFEFTYNFEEVPFHSSFAPSQNLFKLANPLVDQYLYRFVSTNNTGGVQFNKNLAGRYANTYKNWFPGPMGRTQGWNLGSGVNRASVSAFATTNRMELEGASYQVPPQPNGMTNNLQGSNTYALENTMIFNSQPANPGTTATYLEGNMLITSESETQPVNRVAYNVGGQMATNNQSSTTAPATGAYNLQEIVPGSVWMERDVYLQGPIWAKIPETGAHFHPSPAMGGFGLKHPPPMMLIKNTPVPGNITSFSDVPVSSFITQYSTGQVTVEMEWELKKENSKRWNPEIQYTNNYNDPQFVDFAPDSTGEYRTTRPIGTRYLTRPL

SEQ ID NO: 840 - protein, 724 aa, synthetic construct
  source 1..724: note = Description of Artificial Sequence: Synthetic polypeptide
MSFVDHPPDWLEEVGEGLREFLGLEAGPPKPKPNQQHQDQARGLVLPGYNYLGPGNGLDRGEPVNRADGVAREHDISYNEQLEAGDNPYLKYNHADAEFQEKLADDTSFGGNLGKAVFQAKKRVLEPFGLVEEGAKTAPTGKRIDDHFPKRKKARTEEDSKPSTSSDAEAGPSGSQQLQIPAQPASSLGADTMSAGGGGPLGDNNQGADGVGNASGDWHCDSTWMGDRVVTKSTRTWVLPSYNNHQYREIKSGSVDGSNANAYFGYSTPWGYFDFNRFHSHWSPRDWQRLINNYWGFRPRSLRVKIFNIQVKEVTVQDSTTTIANNLTSTVQAFTDDDYQLPYVVGNGTEGCLPAFPPQVFTLPQYGYATLNRDNTENPTERSSFFCLEYFPSKMLRTGNNFEFTYNFEEVPFHSSFAPSQNLFKLANPLVDQYLYRFVSTNNTGGVQFNKNLAGRYANTYKNWFPGPMGRTQGWNLGSGVNRASVSAFATTNRMELEGASYQVPPQPNGMTNNLQGSNTYALENTMIFNSQPANPGTTATYLEGNMLITSESETQPVNRVAYNVGGQMATNNQSSTTAPATGTYNLQEIVPGSVWMERDVYLQGPIWAKIPETGAHFHPSPAMGGFGLKHPPPMMLIKNTPVPGNITSFSDVPVSSFITQYSTGQVTVEMEWELKKENSKRWNPEIQYTNNYNDPQFVDFAPDSTGEYRTTRPIGTRYLTRPL

SEQ ID NO: 841 - protein, 723 aa, synthetic construct
  source 1..723: note = Description of Artificial Sequence: Synthetic polypeptide
MSFVDHPPDWLEEVGEGLREFLGLEAGPPKPKPNQQHQDQARGLVLPGYNYLGPGNGLDRGEPVNRADEVAREHDISYNEQLEAGDNPYLKYNHADAEFQEKLADDTSFGGNLGKAVFQAKKRVLEPFGLVEEGAKTAPTGKRIDDHFPKRKKARTEEDSKPSTSSDAEAGPSGSQQLQIPAQPASSLGADTMSAGGGGPLGDNNQGADGVGNASGDWHCDSTWMGDRVVTKSTRTWVLPSYNNHQYREIKSGSVDGSNANAYFGYSTPWGYFDFNRFHSHWSPRDWQRLINNYWGFRPRSLRVKIFNIQVKEVTVQDSTTTIANNLTSTVQVFTDDDYQLPYVVGNGTEGCLPAFPPQVFTLPQYGYATLNRDNTENPTERSSFFCLEYFPSKMLRTGNNFEFTYNFEEVPFHSSFAPSQNLFKLANPLVDQYLYRFVSTNNTGGVQFNKNLAGRYANTYKNWFPGPMGRTQGWNLGSGVNRASVSAFATTNRMELEGASYVPPQPNGMTNNLQGSNTYALENTMIFNSQPANPGTTATYLEGNMLITSESETQPVNRVAYNVGGQMATNNQSSTTAPATGTYNLQEIVPGSVWMEGDVYLQGPIWAKIPETGAHFHPSPAMGGFGLKHPPPMMLIKNTPVPGNITSFSDVPVSSFITQYSTGQVTVEMEWELKKENSKRWNPEIQYTNNYNDPQFVDFAPDSTGEYRTTRPIGTRYLTRPL

SEQ ID NO: 842 - protein, 724 aa, synthetic construct
  source 1..724: note = Description of Artificial Sequence: Synthetic polypeptide
MSFVDHPPDWLEEVGEGLREFLGLEAGPPKPKPNQQHQDQARGLVLPGYNYLGPGNGLDRGEPVNRADEVAREHDISYNEQLEAGDNPYLKYNHADAEFQEKLADDTSFGGNLGKAVFQAKKRVLEPFGLVEEGAKTAPTGKRIDDHFPKRKKVRTEEDSKPSTSSDAEAGPSGSQQLQIPAQPASSLGADTMSAGGGGPLGDNNQGADGVGNASGDWHCDSTWMGDRVVTKSTRTWVLPSYNNHQYREIKSGSVDGSNANAYFGYSTPWGYFDFNRFHSHWSPRDWQRLINNYWGFRPRSLRVKIFNIQVKEVTVQDSTTTIANNLTSTVQVFTDDDYQLPYVVGNGTEGCLPAFPPQVFTLPQYGYATLNRDNTENPTERSSFFCLEYFPSKMLRTGNNFEFTYNFEEVPFHSSFAPSQNLFKLANPLVDQYLYRFVSTNNTGGVQFNKNLAGRYANTYKNWFPGPMGRTQGWNLGSGVNRASVSAFATTNRMELEGASYQVPPQPNGMTNNLQGSNTYALENTMIFNSQPANPGTTATYLEGNMLITSESETQPVNRVAYNVGGQMATNNQSSTTAPATGTYNLQEIVPGSVWMERDVYLQGPIWAKIPETGAHFHPSPAMGGFGLKHPPPMMLIKNTPVPGNITSFSDVPVSSFITQYSTGQVTVEMEWELKKENSERWNPEIQYTNNYNDPQFVDFAPDSTGEYRTTRPIGTRYLTRPL

SEQ ID NO: 843 - protein, 724 aa, synthetic construct
  source 1..724: note = Description of Artificial Sequence: Synthetic polypeptide
MSFVDHPPDWLEEVGEGLREFLGLEAGPPKPKPNQQHQDQARGLVLPGYNYLGPGNGLDRGEPVNRADEVAREHDISYSEQLEAGDNPYLKYNHADAEFQEKLADDTSFGGNLGKAVFQAKKRVLEPFGLVEEGAKTAPTGKRIDDHFPKRKKARTEEDSKPSTSSDAEAGPSGSQQLQIPAQPASSLGADTMSAGGGGPLGDNNQGADGVGNASGDWHCDSTWMGDRVVTKSTRTWVLPSYNNHQYREIKSGSVDGSNANAYFGYSTPWGYFDFNRFHSHWSPRDWQRLINNYWGFRPRSLRVKIFNIQVKEVTVQDSTTTIANNLTSTVQVFTDDDYQLPYVVGNGTEGCLPAFPPQVFTLPQYGYATLNRDNTENPTERSSFFCLEYFPSKMLRTGNNFEFTYNFEEVPFHSSFAPSQNLFKLANPLVDQYLYRFVSTNNTGGVQFNKNLAGRYANTYKNWFPGPMGRTQGWNLGSGVNRASVSAFATTNRMELEGASYQVPPQPNGMTNNLQGSNTYALENTMIFNSQPANPGTTATYLEGNMLITSESETQPVNRVAYNVGGQMATNNQSSTTAPATGTYNLQEIVPGSVWMERDVYLQGPIWAKIPETGAHFHPSPAMGGFGLKHPPPMMLIKNTPVPGNITSFSDVPVSSFITQYSTGQVTVEMEWELKKENSKRWNPEIQYTNNYNDPQFVDFAPDSTGEYRTARPIGTRYLTRPL

SEQ ID NO: 844 - protein, 724 aa, synthetic construct
  source 1..724: note = Description of Artificial Sequence: Synthetic polypeptide
MSFVDHPPDWLEEVGEGLREFLGPEAGPPKPKPNQQHQDQARGLVLPGYNYLGPGNGLDRGEPVNRADEVAREHDISYNEQLEAGDNPYLKYNHADAEFQEKLADDTSFGGNLGKAVFQAKKRVLEPFGLVEEGAKTAPTGKRIDDHFPKRKKARTEEDSKPSTSSDAEAGPSGSQQLQIPAQPASSLGADTMSAGGGGPLGDNNQGADGVGNASGDWHCDSTWMGDRVVTKSTRTWVLPSYNNHQYREIKSGSVDGSNANAYFGYSTPWGYFDFNRFHSHWSPRDWQRLINNYWGFRPRSLRVKIFNIQVKEVTVQDSTTTIANNLTSTVQVFTDDDYQLPYVVGNGTEGCLPAFPPQVFTLPQYGYATLNRDNTENPTERSSFFCLEYFPSKMLRTGNNFEFTYNFEEVPFHSSFAPSQNLFKLANPLVDQYLYRFVSTNNTGGVQFNKNLAGRYANTYKNWFPGPMGRTQGWNLGSGVNRASVSAFATTNRMELEGASYQVPPQPNGMTNNLQGSNTYALENTMIFNSQPANPGTTATYLEGNMLITSESETQPVNRVAYNVGGQMTTNNQSSTTAPATGTYNLQEIVPGSVWMERDVYPQGPIWAKIPETGAHFHPSPAMGGFGLKHPPPMMLIKNTPVPGNITSFSDVPVSSFITQYSTGQVTVEMEWELKKENSKRWNPEIQYTNNYNDPQFVDFAPDSTGEYRTTRPIGTRYLTRPL

SEQ ID NO: 845 - protein, 724 aa, synthetic construct
  source 1..724: note = Description of Artificial Sequence: Synthetic polypeptide
MSFVDHPPDWLEEVGEGLREFLGLEAGPPKPKPNQQHQDQARGLVLPGYNYLGPGNGLDRGEPVNRADEVAREHDISYNEQLEAGDNPYLKYNHADAEFQEKLADDTSFGGNLGKAVFQAKKRVLEPFGLVEEGAKTAPTGKRIDDHFPKRKKARTEEDSKPSTSSDAEAGPSGSQQLQIPAQPASSLGADTMSAGGGGPLGDNNQGADGVGNASGDWHCDSTWMGDRVVTKSTRTWVLPSYNNHQYREIKSGSVDGSNANAYFGYSTPWGYFDFNRFHSHWSPRDWQRLINNYWGFRPRSLRVKIFNIQVKEVTVQDSTTTIANNLTSTVQVFTDDDYQLPYVVGNGTEGCLPAFPPQVFTLPQYGYATLNRDNTENPTERSSFLCLEYFPSKMLRTGNNFEFTYNFEEVPFHSSFAPSQNLFKLANPLVDQYLYRFVSTNNTGGVQFNKNLAGRYANTYKNWFPGPMGRTQGWNLGSGVNRASVSAFATTNRMELEGASYQVPPQPNGMTNNLQGSNTYALENTMIFNSQPANPGTTATYLEGNMLITSESETQPVNRVAYNVGGQMATNNQSSTTAPATGTYNLQEIVPGSVWMKRDVYLQGPIWAKIPETGAHFHPSPAMGGFGLKHPPPMMLIKNTPVPGNITSFSDVPVSSFITQYSTGQVTVEMEWELKKENSKRWNPEIQYTNNYNDPQFVDFAPDSTGEYRTTRPIGTRYLTRPL

SEQ ID NO: 846 - protein, 724 aa, synthetic construct
  source 1..724: note = Description of Artificial Sequence: Synthetic polypeptide
MSFVDHPPDWLEEVGEGLREFLGLEAGPPKPKPNQQHQDQARGLVLPGYNYLGPGNGLDRGEPVNRADEVAREHDISYNEQLEAGDNPYLKYNHADAEFQEKLADDTSFGGNLGKAVFQAKKRVLEPFGLVEEGAKTAPTGKRIDDHFPKRKKARTEEDSKPSTPSDAEAGPSGSQQLQIPAQPASSLGADTMSAGGGGPLGDNNQGADGVGNASGDWHCDSTWMGDRVVTKSTRTWVLPSYNNHQYREIKSGSVDGSNANAYFGYSTPWGYFDFNRFHSHWSPRDWQRLINNYWGFRPRSLRVKIFNIQVKEVTVQDSTTTIANNLTSTVQVFTDDDYQLPYVVGNGTEGCLPAFPPQVFTLPQYGYATLNRDNTENPTERSSFFCLEYFPSKMLRTGNNFEFTYNFEEVPFHSSFAPSQNLFKLANPLVDQYLYRFVSTNNTGGVQFNKNLAGRYANTYKNWFPGPMGRTQGWNLGSGVNRASVSAFATTNRMELEGASYQVPPQPNGMTNNLQGSNTYALENTMIFNSQPANPGTTATYLEGNMLITSESETQPVNRVAYNVGGQMATNNQSSTTAPATGTYNLQEIVPGSVWMERDVYLQGPIWAKIPETGAHFHPSPAMGGFGLKHPPPMMLIKNTPVPGNITSFSDVPVSSFITQYSTGQVTVEMEWELKKENSKRWNPEIQYTNNYNDPQFVDFAPDSTGEYRTTRPIGTRYLTRPL

SEQ ID NO: 847 - protein, 724 aa, synthetic construct
  source 1..724: note = Description of Artificial Sequence: Synthetic polypeptide
MSFVDHPPDWLEEVGEGLREFLGLEAGPPKPKPNQQHQDQARGLVLPGYNYLGPGNGLDRGEPVNRADEVAREHDISYNEQLEAGDNPYLKYNHADAEFQEKLADDTSFGGNLGKAVFQAKKRVLEPFGLVEEGAKTAPTGKRIDDHFPKRKKARTEEDSKPSTSSDAEAGPSGSQQLQIPAQPASSLGADTMSAGGGGPLGDNNQGADGVGNASGDWHCDSTWMGDRVVTKSTRTWVLPSYNNHQYREIKSGSVDGSNANAYFGYSTPWGYFDFNRFHSHWSPRDWQRLINNYWGFRPRSLRVKIFNIQVKEVTVQDSTTTIANNLTSTVQVFTDDDYQLPYVVGNGTEGCLPAFPPQVFTLPQYGYATLNRDNTENPTERSSFFCLEYFPSKMLRTGNNFEFTYNFEEVPFHSSFAPSQNLFKLANPLVDQYLYRFVSTNNTGGVQFNKNLAGRYANTHKNWFPGPMGRTQGWNLGSGVNRASVSAFATTNRMELEGASYQVPPQSNGMTNNLRGSNTYALENTMIFNSQPANPGTTATYLEGNMLITSESETQPVNRVAYNVGGQMATNNQSSTTAPATGTYNLQEIVPGSVWMERDVYLQGPIWAKIPETGAHFHPSPAMGGFGLKHPPPMMLIKNTPVPGNITSFSDVPVSSFITQYSTGQVTVEMEWELKKENSKRWNPEIQYTNNYNDPQFVDFAPDSTGEYRTTRPIGTRYLTRPL

SEQ ID NO: 848 - protein, 724 aa, synthetic construct
  source 1..724: note = Description of Artificial Sequence: Synthetic polypeptide
MSFVDHPPDWLEEVGEGLREFLGLEAGPPKPKPNQQHQDQARGLVLPGYNYLGPGNGLDRGEPVNRADEVAREHDISYNEQLEAGDNPYLKYNHADAEFQEKLADDTSFGGNLGKAVFQAKKRVLEPFGLVEEGAKTAPTGKRIDDHFPKRKKARTEEDSKPSTSSDAEAGPSGSQQLQIPAQPASSLGADTMSAGGGGPLGDNNQGADGVGNASGDWHCDSTWMGDRVVTKSTRTWVLPSYNNHQYREIKSGSVDGSNANAYFGYSTPWGYFDFNRFHSHWSPRDWQRLINNYWGFRPRSLRVKIFNIQVKEVTVQDSTTTIANNLTSTVQVFTDDDYQLPYVVGNGTEGCLPAFPPQVFTLPQYGYATLNRDNTENPTERSSFFCLEYFPSKMLRTGNNFEFTYNFEEVPFHSSFAPSQNLFKLANPLVDQYLYRFVSTNNTGGVQFNKNLAGRYANTYKNWFPGPMGRTQGWNLGSGVNRASVSAFATTNRMELEGASYQVPPQPNGMTNNLQGSNTYALENTMIFNSQPANPGTTATYLEGNMLITSESETQPVNRVAYSVGGQMATNNQSSTTAPTTGTYNLQEIVPGSVWMERDVYLQGPIWAKIPETGAHFHPSPAMGGFRLKHPPPMMLIKNTPVPGNITSFSDVPVSSFITQYSTGQVTVEMEWELKKENSKRWNPEIQYTNNYNDPQFVDFAPDSTGEYRTTRPIGTRYLTRPL

SEQ ID NO: 849 - protein, 724 aa, synthetic construct
  source 1..724: note = Description of Artificial Sequence: Synthetic polypeptide
MSFVDHPPDWLEEVGEGLREFLGLEAGPPKPKPNQQHQDQARGLVLPGYNYLGPGNGLDRGEPVNRADEVAREHDISYNEQLEAGDNPYLKYNHADAEFQEKLADDTSFGGNLGKAVFQAKKRVLEPFGLVEEGAKTAPTGKRIDDHFPKRKKARTEEDSKPSTSSDAEAGPSGSQQLQIPAQPASSLGADTMSAGGGGPLGDNNQGADGVGNASGDWHCDSTWMGDRVVTKSTRTWVLPSYNNHQYREIKSGSVDGSNANAYFGYSTPWGYFDFNRFHSHWSPRDWQRLINNYWGFRPRSLRVKIFNIQVKEVTVQDSTTTIANNLTSTVQVFTDDDYQLPYVVGNGTEGCLPAFPPQVFTLPQYGYATLNRDNTENPTERSSFFCLEYFPSKMLRTGNNFEFTYNFEEVPFHSSFAPSQNLFKLANPLVDQYLYRFVSTNNTGGVQFNKNLAGRYANTYKNWFPGPMGRTQGWNLGSGVNRASVSAFAATNRMELEGASYQVPPQPNGMTNNLQGSNTYALENTMIFNSQPANPGTTATYLEGNMLITSESETQPVNRVAYNVGGQMATNNQSSTTAPATGTYNLQEIVPGGVWMERDVYLQGPIWAKIPETGAHFHPSPAMGGFGLKHPPPMMLIKNTPVPGNTTSFSDVPVSSFITQYSTGQVTVEMEWELKKENSKRWNPEIQYTNNYNDPQFVDFAPDSTGEYRTTRPIGTRYLTRPL

SEQ ID NO: 850 - protein, 724 aa, synthetic construct
  source 1..724: note = Description of Artificial Sequence: Synthetic polypeptide
MSFVDHPPDWLEEVGEGLREFLGLEAGPPKPKPNQQHQDQARGLVLPGYNYLGPGNGLDRGEPVNRADEVAREHDISYNEQLEAGDNPYLKYNHADAEFQEKLADDTSFGGNLGKVVFQAKKRVLEPFGLVEEGAKTAPTGKRIDDHFPKRKKARTEEDSKPSTSSDAEAGPSGSQQLQIPAQPASSLGADTMSAGGGGPLGGNNQGADGVGNASGDWHCDSTWMGDRVVTKSTRTWVLPSYNNHQYREIKSGSVDGSNANAYFGYSTPWGYFDFNRFHSHWGPRDWQRLINNYWGFRPRSLRVKIFNIQVKEVTVQDSTTTIANNLTSTVQVFTDDDYQLPYVVGNGTEGCLPAFPPQVFTLPQYGYATLNRDNTENPTERSSFFCLEYFPSKMLRTGNNFEFTYNFEEVPFHSSFAPSQNLFKLANPLVDQYLYRFVSTNNTGGVQFNKNLAGRYANTYKNWFPGPMGRTQGWNLGSGVNRASVSALATTNRMELEGASYQVPPQPNGMTNNLQGSNTYALENTMIFNSQPANPGTTATYLEGNMLITSESETQPVNRVAYNVGGQMATNNQSSTTAPATGTYNLQEIVPGSVWMERDVYLQGPIWAKIPETGAHFHPSPAMGGFGLKHPPPMMLIKNTPVPGNITSFSDVPVSSFITQYSTGQVTVEMEWELKKENSKRWNPEIQYTNNYNDPQFVDFAPDSTGEYRTTRPIGTRYLTRPL

SEQ ID NO: 851 - protein, 723 aa, synthetic construct
  source 1..723: note = Description of Artificial Sequence: Synthetic polypeptide
MSFVDHPPDWLEEVGEGLREFLGLEAGPPKPKPNQQHQDQARGLVLPGYNYLGPGNGLDRGEPVNRADEVAREHDISYNEQLEAGDNPYLKYNHADAEFQEKLADDTSFGGNLGKAVFQAKKRVLEPFGLVEEGAKTAPTGKRIDDHFPKRKKARTEEDSKPSTSSDAEAGPSGSQQLQIPAQPASSLGADTMSAGGGGPLGDNNQGADGVGNASGDWHCDSTWMGDRVVTKSTRTWVLPSYNNHQYREIKSGSVDGSNANAYFGYSTPWGYFDFNRFHSHWSPRDWQRLINNYWGFRPRSLRVKIFNIQVKEVTVQDSTTTIANNLTSTVQVFTDDDYQLPYVVGNGTEGCLPAFPPQVFTLPQYGYATLNRDNTENPTERSSFFCLEYFPSKMLRTGNNFEFTYNFEEVPFHSSFAPSQNLFKLANPLVDQYLYRFVSTNNTGGVQFNKNLAGRYANTYKNWFPGPMGRTQGWNLGSGVNRASVSAFATTNRMELEGASYQVPPQPNGMTNNLQGSNTYALENTMIFNSQPANPGTTATYLEGNMLITSESETQPVNRVAYNVGGQMATNNQSSTTAPATGTYNLQEIVPGSVWMERDVYLQGPIAKIPETGAHFHPSPAMGGFGLKHPPPMMLIKNTPVPGNITSFSDVPVSSFITQYSTGQVTVEMEWELKKENSKRWNPEIQYTNNYNDPQFVDFAPDSTGECRTTRPIGTRYLTRPL

SEQ ID NO: 852 - protein, 724 aa, synthetic construct
  source 1..724: note = Description of Artificial Sequence: Synthetic polypeptide
MSFVDHPPDWLEEVGEGLREFLGLEAGPPKPKPNQQHQDQARGLVLPGYNYLGPGNGLDRGEPVNRADEVAREHDISYNEQLEAGDNPYLKYNHADAEFQEKLADDTSFGGNLGKAVFQAKKRVLEPFGLVEEGAKTAPTGKRIDDHFPKRKKARTEEDSKPSTSSDAEAGPSGSQQLQIPAQPASSLGADTMSAGGGGPLGDNNQGADGVGNASGDWHCDSTWMGDRVVTKSTRTWVLPSYNNHQYREIKSGSVDGSNANAYFGYSTPWGYFDFNRFHSHWSPRDWQRLINNYWGFRPRSLRVKILNIQVKEVTVQDSTTTIANNLTSTVQVFTDDDYQLPYVVGNGTEGCLPAFPPQVFTLPQYGYATLNRDNTENPTERSSFFCLEYFPSKMLRTGNNFEFTYNFEEVPFHSSFAPSQNLFKLANPLVGQYLYRFVSTNNTGGVQFNENLAGRYANTYKNWFPGPMGRTQGWNLGSGVNRASVSAFATTNRMELEGASYQVPPQPNGMTNNLQGSNTYALENTMIFNSQPANPGTTATYLEGNMLITSESETQPVNRVAYNVGGQMATNNQSSTTAPATGTYNLQEIVPGSVWMERDVYLQGPIWAKIPETGAHFHPSPAMGGFGLKHPPPMMLIKNTPVPGNITSFSDVPVSSFITQYSTGQATVEMEWELKKENSKRWNPEIQYTNNYNDPQFVDFAPDSTGEYRTTRPIGTRYLTRPL

SEQ ID NO: 853 - protein, 724 aa, synthetic construct
  source 1..724: note = Description of Artificial Sequence: Synthetic polypeptide
MSFVDHPPDWLEEVGEGLREFLGLEAGPPKPKPNQQHQDQARGLVLPGYNYLGPGNGLDRGEPVNRADEVAREHDISYNEQLEAGDNPYLKYNHADAEFQEKLADDTSFGGNLGKAVFQAKKRVLEPFGLVEEGAKTAPTGKRIDDHFPKRKKARTEEDSKPSTSSDAEAGPSGSQQLQIPAQPASSLGADTMSAGGGGPLGDNNQGADGVGNASGDWHCDSTWMGDRVVTKSTRTWVLPSYNNHQYREIKSGSVDGSNANAYFGYSTPWGYFDFNRFHSHWSPRDWQRLINNYWGFRPRSLRVKIFNIQVKEVTVQDSTTIIANNLTSTVQVFTDDDYQLPYVVGNGTEGCLPAFPPQVFTLPQYGYATLNRDNTENPTERSSFFCLEYFPSKMLRTGNNFEFTYNFEEVPFHSSFAPSQNLFKLANPLVDQYLYRFVSTNNTGGVQFNKNLAGRYANTYKNWFPGPMGRTQGWNLGSGVNRASVSAFATTNRMELEGASYQVPPQPNGMTNNLQGSNTYALENTMIFNSQPANPGTTATYLEGNMLITSESETQPVNRVAYNVGGQMATNNQSSTTAPATGTYNLQEIVPGSVWMERDVYLQGPIWAKIPETGAHFHPSPAMGGFGLKHPPPMMLIKNTPVPGNITSFSDVPVSSFITQYSTGQVTVEMEWELKKENSKRWNPEIQYTNNYNDPQFVDFAPDSTGEYRTTRPIGTRYLTRPL

SEQ ID NO: 854 - protein, 724 aa, synthetic construct
  source 1..724: note = Description of Artificial Sequence: Synthetic polypeptide
MSFVDHPPDWLEEVGEGLREFLGLEAGPPKPKPNQQHQDQARGLVLPGYNYLGPGNGLDRGEPVNRADEVAREHDISYNEQLEAGDNPYLKYNHADAEFQEKLADDTSFGGNLGKAVFQAKKRVLEPFGLVEEGAKTAPTGKRIDDHFPKRKKARTEEDSKPSTSSDAEAGPSGSQQLQIPAQPASSLGADTMSAGGGGPLGDNNQGADGVGNASGDWHCDSTWMGDRVVTKSTRTWVLPSYNNHQYREIKSGSVDGSNANAYFGYSTPWGYFDFNRFHSHWSPRDWQRLINNYWGFRPRSLRVKIFNIQVKEVTVQDSTTTIANNLTSTVQVFTDDDYQLPYVVGNGTEGCLPAFPPQVFTLPQYGYATLNRDNTENPTERSSFFCLEYFPSKMLRTGNNFEFTYNFEEVPFHSSFAPSQNLFKLANPLVDQYLYRFVSTNNTGGVQFNKNLAGRYANTYKNWFPGPMGRTQGWNLGSGVNRASVSAFATTNRMELEGASYQVPPQPNGMTNNLQGSNTYALENTMIFNSQPANPGTTATYLEGNMLITSESETQPVNRVAYNVGGQMATNNQSSTTAPATGTYNLQEIVPGSVWMERDVYLQGPIWAKIPETGAHFHPSPAMGGFGLKHPPPMMLIKNTPVPGNITSLSDVPVSSFITQYSTGQVTVEMEWELKKENSKRWNPEIQYTNNYNDPQFVDFAPDSTGEYRTTRPIGTRYLTRPL

SEQ ID NO: 855 - protein, 724 aa, synthetic construct
  source 1..724: note = Description of Artificial Sequence: Synthetic polypeptide
MSFVDHPPDWLEEVGEGLREFLGLEAGPPKPKPNQQHQDQARGLVLPGYNYLGPGNGLDRGEPANRADEVAREHDISYNEQLEAGDNPYLKYNHAGAEFQEKLADDTSFGGNLGKAVFQAKKRVLEPFGLVEEGAKTAPTGKRIDDHFPKRKKARTEEDSKPSTSSDAEAGPSGSQQLQIPAQPASSLGADTMSAGGGGPLGDNNQGADGVGNASGDWHCDSTWMGDRVVTKSTRTWVLPGYNNHQYREIKSGSVDGSNANAYFGYSTPWGYFDFNRFHSHWSPRDWQRLINNYWGFRPRSLRVKIFNIQVKEVTVQDSTTTIANNLTSTVQVFTDDDYQLPYVVGNGTEGCLPAFPPQVFTLPQYGYATLNRDNTENPTERSSFFCLEYFPSKMLRTGNNFEFTYNFEEVPFHSSFAPSQNLFKLANPLVDQYLYRFVSTNNTGGVQFNKNLAGRYANTYKNWFPGPMGRTQGWNLGSGVNRASVSAFATTNRMELEGASYQVPPQPNGMTNNLQGSNTYALENTMIFNSQPANPGTTATYLEGNMLITSESETQPVNRVAYNVGGQMATNNQSSTTAPATGTYNLQEIVPGSVWMERDVYLQGPIWAKIPETGAHFHPSPAMGGFGLKHPPPMMLIKNTPVPGNITSFSDVPVSSFITQYSTGQVTVEMEWELKKENSKRWNPEIQYTNNYNDPQFVDFAPDSTGEYRTTRPIGTRYLTRPL

SEQ ID NO: 856 - protein, 724 aa, synthetic construct
  source 1..724: note = Description of Artificial Sequence: Synthetic polypeptide
MSFVDHPPDWLEEVGEGLREFLGLEAGPPKPKPNQQHQDQARGLVLPGYNYLGPGNGLDRGEPVNRADEVAREHDISYNEQLEAGDNPYLKYNHADAEFQEKLADDTSFGGNLGKAVFQAKKRVLEPFGLVEEGAKTAPTGKRIDDHFPKRKKARTEEDSKPPTSSDAEAGPSGSQQLQIPAQPASSLGADTMSAGGGGPLGDNNQGADGVGNASGDWHCDSTWMGDRVVTKSTRTWVLPSYNNHQYREIKSGSVDGSNANAYFGYSTPWGYFDFNRFHSHWSPRDWQRLINNYWGFRPRSLRVKIFNIQVKEVTVQDSATTIANNLTSTVQVFTDDDYQLPYVVGNGTEGCLPAFPPQVFTLPQYGYATLNRDNTENPTERSSFFCLEYFPSKMLRTGNNFEFTYNFEEVPFHSSFAPSQNLFKLANPLVDQYLYRFVSTNNTGGVQFNKNLAGRYANTYKNWFPGPMGRTQGWNLGSGVNRASVSAFATTNRMELEGASYQVPPQPNGMTNNLQGSNTYALENTMIFNSQPANPGTTATYLEGNMLITSESETQPVNRVAYNVGGQMATNNQSSTTAPATGTYNLQEIVPGSVWMERDVYLQGPIWAKIPETGAHFHPSPAMGGFGLKHPPPMMLIKNTPVPGNITSFSDVPVSSFITQYSTGQVTVEMEWELKKENSKRWNPEIQYTNNYNDPQFVDFAPDSTGEYRTTRPIGTRYLTRPL

SEQ ID NO: 857 - protein, 724 aa, synthetic construct
  source 1..724: note = Description of Artificial Sequence: Synthetic polypeptide
MSFVDHPPDWLEEVGEGLREFLGLEAGPPKPKPNQQHQDQARGLVLPGYNYLGPGNGLDRGEPVNRADEVAREHDISYNEQLEAGDNPYLKYNHADAEFQEKLADDTSFGGNLGKAVFQAKKRVLEPFGLVEEGAKTAPTGKRIDDHFPKRKKARTEEDSKPSTSSDAEAGPSGSQQPQIPAQPASSLGADTMSAGGGGPLGDNNQGADGVGNASGDWHCDSTWMGDRVVTKSTRTWVLPSYNNHQYREIKSGSVDGSNANAYFGYSTPWGYFDFNRFHSHWSPRDWQRLINNYWGFRPRSLRVKIFNIQVKEVTVQDSTTTIANNLTSTVQVFTDDDYQLPYVVGNGTEGCLPAFPPQVFTLPQYGYATLNRDNTENPTERSSFFCLEYFPSKMLRTGNNFEFTYNFEEVPFHSSFAPSQNLFKLANPLVDQYLYRFVSTNNTGGVQFNKNLAGRYANTYKNWFPGPMGRTQGWNLGSGVNRASVSAFATTNRMELEGASYQVPPQPNGMTNNLQGSNTYALENTMIFNSQPANPGTTATYLEGNMLITSESETQPVNRVAYNVGGQMATNNQSSTTAPATGTYNLQEIVPGSVWMERDVYLQGPIWAKIPETGAHFHPSPAMGGFGLKHPPPMMLIKNTPAPGNITSFSDVPVSSFITQYSTGQVTVEMEWELKKENSKRWNPEIQYTNNYNDPQFVDFAPDSTGEYRTTRPIGTRYLTRPL

SEQ ID NO: 858 - protein, 724 aa, synthetic construct
  source 1..724: note = Description of Artificial Sequence: Synthetic polypeptide
MSFVDHPPDWLEEVGEGLREFLGLEAGPPKPKPNQQHQDQARGLVLPGYNYLGPGNGLDRGEPVNRADEVAREHDISYNEQLEAGDNPYLKYNHADAEFQEKLADDTSFGGNLGKAVFQAKKRVLEPFGLVEEGAKTAPTGKRIDDHFPKRKKARTEEDSKPPTSSDAEAGPSGSQQLQIPAQPASSLGADTMSAGGGGPLGDNNQGADGVGNASGDWHCDSTWMGDRVVTKSTRTWVLPSYNNHQYREIKSGSVDGSNANAYFGYSTPWGYFDFNRFHSHWSPRDWQRLINNYWGFRPRSLRVKIFNIQVKEVTVQDSTTTIANNLTSTVQVFTDDDYQLPYVVGNGTEGCLPAFPPQVFTLPQYGYATLNRDNTENPTERSSFFCLEYFPSKMLRTGNNFEFTYNFEEVPFHSSFAPSQNLFKLANPLVDQYLYRFVSTNNTGGVQFNKNLAGRYANTYKNWFPGPMGRTQGWNLGSGVNRASVSAFATTNRMELEGASYQVPPQPNGMTNNLQGSNTYALENTMIFNSQPANPGTTATYLEGNMLITSESETQPVNRVAYNVGGQMATNNQSSTTAPATGTYNLQEIVPGSVWMERDVYLQGPIWAKIPETGAHFHPSPAMGGFGLKHPPPMMLIKNTPVPGNITSFSDVPVSSFITQYSTGQVTVEMEWELKKENSKRWNPEIQYTNNYNDPQFVDFAPDSTGEYRTTRPIGTRYLTRPL

SEQ ID NO: 859 - protein, 724 aa, synthetic construct
  source 1..724: note = Description of Artificial Sequence: Synthetic polypeptide
MSFVDHPPDWLEEVGEGLREFLGLEAGPPKPKPNQQHQDQARGLVLPGYNYLGPGNGLDRGEPVNRADEVAREHDISYNEQLEAGDNPYLKYNHADAEFQEKLADDTSFGGNLGKAVFQAKKRVLEPFGLVEEGAKTAPTGKRIDDHFPKRKKARTEEDSKPPTSSDAEAGPSGSQQLQIPAQPASSLGADTMSAGGGGPLGDNNQGADGVGNASGDWHCDSTWMGDRVVTKSTRTWVPPSYNNHQYREIKSGSVDGSNANAYFGYSTPWGYFDFNRFHSHWSPRDWQRLINNYWGFRPRSLRVKIFNIQVKEVTVQDSTTTIANNLTSTVQVFTDDDYQLPYVVGNGTEGCLPAFPPQVFTLPQYGYATLNRDNTENPTERSSFFCLEYFPSKMLRTGNNFEFTYNFEEVPFHSSFAPSQNLFKLANPLVDQYLYRFVSTNNTGGVQFNKNLAGRYANTYKNWFPGPMGRTQGWNLGSGVNRASVSAFATTNRMELEGASYQVPPQPNGMTNNLQGSNTYALENTMIFNSQPANPGTTATYLEGNMLITSESETQPVNRVAYNVGGQMATNNQSSTTAPATGTYNLQEIVPGSVWMERDVYLQGPIWAKIPETGAHFHPSPAMGGFGLKHPPPMMLIKNTPVPGNITSFSDVPVSSFITQYSTGQVAVEMEWELKKENSKRWNPEIQYTNNYNDPQFVDFAPDSTGEYRTTRPIGTRYLTRPL

SEQ ID NO: 860 - protein, 724 aa, synthetic construct
  source 1..724: note = Description of Artificial Sequence: Synthetic polypeptide
MSFVDHPPDWLEEVGEGLREFLGLEAGPPKPKPNQQHQDQARGLVLPGYNYLGPGNGLDRGEPVNRADEVAREHDISYNEQLEAGDNPYLKYNHADAEFQEKLADDTSFGGNLGKAVFQAKKRVLEPFGLVEEGAKTAPTGKRIDDHFPKRKKARTEEDSKPSTSSDAEAGPSGSQQLQIPAQPASSLGADTMSAGGGGPLGDNNQGADGVGNASGDWHCDSTWMGDRVVTKSTRTWVLPSYNNHQYREIKSGSVDGSNANAYFGYSTPWGYFDFNRFHSHWSPRDWQRLINNYWGFRPRSLRVKIFNIQVKEVTVQDSTTTIANNLTSTVQVFTDDDYQLPYVVGNGTEGCLPAFPPQVFTLPQYGYATLNRDNTENPTERSSFFCLEYFPSKMLRTGNNFEFTYNFEEVPFHSSFAPSQNLFKLANPLVDQYLYRFVSTNNTGGVQFNKNLAGRYANTYKNWFPGPMGRTQGWNLGSGVNRASVSAFATTNRMELEGASYQVPPQPNGMTNNLQGSNTYALENTMIFNSQPANPGTTATYLEGNMLITSESETQPVNRVAYNVGGQMATNNQSSTTAPATGTYNLQEIVPGSVWMERDVYLQGPIWAKIPETGAHFHPSPAMGGFGLKHPPPMMLIKNTPAPGNITSFSDVPVSSFITQYSTGQVTVEMEWELKKENSKRWNPEIQYTNNYNDPQFVDFAPDSTGEYRTTRPIGTRYLTRPL

SEQ ID NO: 861 - protein, 724 aa, synthetic construct
  source 1..724: note = Description of Artificial Sequence: Synthetic polypeptide
MSFVDHPPDWLEEVGEGLREFLGLEAGPPKPKPNQQHQDQARGLVLPGYNYLGPGNGLDRGEPVNRADEVAREHDISYNEQLEAGDNPYLKYNHADAEFQEKLADDTSFGGNLGKAVFQAKKRVLEPFGLAEEGAKTAPTGKRIDDHFPKRKKARTEEDSKPSTSSDAEAGPSGSQQLQIPAQPASSLGADTMSAGGGGPLGDNNQGADGVGNASGDWHCDSTWMGDRVVTKSTRTWVLPSYNNHQYREIKSGSVDGSNANAYFGYSTPWGYFDFNRFHSHWSPRDWQRLINNYWGFRPRSLRAKIFNIQVKEVTVQDSTTTIANNLTSTVQVFTDDDYQLPYVVGNGTEGCLPAFPPQVFTLPQYGYATLNRDNTENPTERSSFFCLEYFPSKMLRTGNNLEFTYNFEEVPFHSSFAPSQNLFKLANPLVDQYLYRFVSTNNTGGVQFNKNLAGRYANTYKNWFPGPMGRTQGWNLGSGVNRASVSAFATTNRMELEGASYQVPPQPNGMTNNLQGSNTYALENTMIFNSQPANPGTTATYLEGNMLITSESETQPVNRVVHNVGGQMATNNQSSTTAPATGTYNLQEIVPGSVWMERDVYLQGPIWAKIPETGAHFHPSPAMGGFGLKHPPPMMLIKNTPVPGNITSFSDVPVSSFITQYSTGQVTVEMEWELKKENSKRWNPEIQYTNNYNDPQFVDFAPDSTGEYRTTRPIGTRYLTRPL

SEQ ID NO: 862 - protein, 724 aa, synthetic construct
  source 1..724: note = Description of Artificial Sequence: Synthetic polypeptide
MSFVDHPPDWLEEVGEGLREFLGLEAGPPKPKPNQQHQDQARGLVLPGYNYLGPGNGLDRGEPVNRADEVAREHDISYNEQLEAGDNPYLKYNHADAEFQEKLADDTSFGGNLGKAVFQAKKRVLEPFGLVEEGAKTAPTGKRIDDHFPKRKKARTEEDSKPSTSSDAEAGPSGSQQLQIPAQPASSLGADTMSAGGGGPLGDNNQGADGVGNASGDWHCDSTWMGDRVVTKSTRTWVLPSYNNHQYREIKSGSVDGGNANAYFGYSTPWGYFDFNRFHSHWSPRDWQRLINNYWGFRPRSLRVKIFNIQVKEVTVQDSTTTIANNLTSTVQVFTDDDYQLPYVVGNGTEGCLPAFPPQVFTLPQYGYATLNRDNTENPTERSSFFCLEYFPSKMLRTGNNFEFTYNFEEVPFHSSFAPSQNLFKLANPLVDQYLYRFVSTNNTGGVQFNKNLAGRYANTYKNWFPGPMGRTQGWNLGSGVNRASVSAFATTNRMELEGASYQVPPQPNGMTNNLQGSNTYALENTMIFNSQPANPGTTATYLEGNMLITSESETQPVNRVAYNVGGQMATNNQSSTTAPATGTYNLQEIVPGSVWMERDVYLQGPIWAKIPETGAHFHPSPAMGGFGLKHPPPMMLIKNTPAPGNITSFSDVPVSSFITQYSTGQVTVEMEWELKKGNSKRWNPEIQYTNNYNDPQFVDFAPDSTGEYRTTRPIGTRYLTRPL

SEQ ID NO: 863 - protein, 724 aa, synthetic construct
  source 1..724: note = Description of Artificial Sequence: Synthetic polypeptide
MSFVDHPPDWLEEVGEGLREFLGLEAGPPKPKPNQQHQDQARGLVLPGYNYLGPGNGLDRGEPVNRADEVAREHDISYNEQLEAGDNPYLKYNHADAEFQEKLADDTSFGGNLGKAVFQAKKRVLEPFGLVEEGAKTAPTGKRIDDHFPKRKKARTEEDSKPSTSSDAEAGPSGSQQLQIPAQPASSLGADTMSAGGGGPLGDNNQGADGVGNASGDWHCDSTWMGDRVVTKSTRTWVLPSYNNHQYREIKSGSVDGSNANAYFGYSTPWGYFDFNRFHSHWSPRDWQRLINNYWGFRPRSLRVKIFNIQVKEVTVQDSTTTIANNLTSTVQVFTDDDYQLPYVVGNGTEGCLPAFPPQVFTLPQYGYATLNRDNTENPTERSSFFCLEYFPSKMLRTGNNFEFTYNFEEVPFHSSFAPSQNLFKLANPLVDQYLYRFVSTNNTGGVQFNKNLAGRYANTYKNWFPGPMGRTQGWNLGSGVNRASVSAFATTNRMELEGASYQVPPQPNGMTNNLQGSNTYALENTMIFNSQPANPGTTATYLEGNMLITSESETQPVNRVAYNVGGQMATNNQSSTTAPATGTYNLQEIVPGSVWMERDVYLQGPIWAKIPETGVHFHPSPAMGGFGLKHPPPMMLIKNTPVPGNITSFSDVPVSSFITQYSTGQVTVEMEWELKKENSKRWNPEIQYTNNYNDPQFVDFAPDSTGEYRTTRPIGTRYLTRPL

SEQ ID NO: 864 - protein, 724 aa, synthetic construct
  source 1..724: note = Description of Artificial Sequence: Synthetic polypeptide
  VARIANT 551: note = MOD_RES - Xaa = any amino acid
MSFVDHPPDWLEEVGEGLREFLGLEAGPPKPKPNQQHQDQARGLVLPGYNYLGPGNGLDRGEPVNRADEVAREHDISYNEQLEAGDNPYLKYNHADAEFQEKLADDTSFGGNLGKAVFQAKKRVLEPFGLVEEGAKTAPTGKRIDDHFPKRKKARTEEDSKPSTSSDAEAGPSGSQQLQIPAQPASSLGADTMSAGGGGPLGDNNQGADGVGNASGDWHCDSTWMGDRVVTKSTRTWVLPSYNNHQYREIKSGSVDGSNANAYFGYSTPWGYFDFNRFHSHWSPRDWQRLINNYWGFRPRSLRVKIFNIQVKEVTVQDSTTTIANNLTSTVQVFTDDDYQLPYVVGNGTEGCLPAFPPQVFTLPQYGYATLNRDNTENPTERSSFFCLEYFPSKMLRTGNNFEFTYNFEEVPFHSSFAPSQNLFKLANPLVDQYLYRFVSTNNTGGVQFNKNLAGRYANTYKNWFPGPMGRTQGWNLGSGVNRASVSAFATTNRMELEGASYQVPPQPNGMTNNLQGSNTYALENTMIFNSQPANPGTTATYLEGSMLITXESETQPVNRVAYNVGGQMATNNQSSTTAPATGTYNLQEIVPGSVWMERDVYLQGPIWAKIPETGAHFHPSPAMGGFGLKHPPPMMLIKNTPVPGNITSFSDVPVSSFITQYSTGQVTVEMEWELKKENSKRWNPEIQYTNNYNDPQFVDFAPDSTGEYRTTRPIGTRYLTRPL

SEQ ID NO: 865 - protein, 736 aa, synthetic construct; identical to SEQ ID NO: 39
  source 1..736: note = Description of Artificial Sequence: Synthetic polypeptide

SEQ ID NO: 866 - protein, 734 aa, synthetic construct; identical to SEQ ID NO: 57
  source 1..734: note = Description of Artificial Sequence: Synthetic polypeptide

SEQ ID NO: 867 - protein, 723 aa, synthetic construct
  source 1..723: note = Description of Artificial Sequence: Synthetic polypeptide
MSFVDHPPDWLEEVGEGLREFLGLEAGPPKPKPNQQHQDQARGLVLPGYNYLGPGNGLDRGEPVNRADEVAREHDISYNEQLEAGDNPYLKYNHADAEFQEKLADDTSFGGNLGKAVFQAKKRVLEPFGLVEEGAKTAPTGKRIDDHFPKRKKARTEEDSKPSTSSDAEAGPSGSQQLQIPAQPASSLGADTMSAGGGPLGDNNQGADGVGNASGDWHCDSTWMGDRVVTKSTRTWVLPSYNNHQYREIKSGSVDGSNANAYFGYSTPWGYFDFNRFHSHWSPRDWQRLINNYWGFRPRSLRVKIFNIQVKEVTVQDSTTTIANNLTSTVQVFTDDDYQLPYVVGNGTEGCLPAFPPQVFTLPQYGYATLNRDNTENPTERSSFFCLEYFPSKMLRTGNNFEFTYNFEEVPFHSSFAPSQNLFKLANPLVDQYLYRFVSTNNTGGVQFNKNLAGRYANTYKNWFPGPMGRTQGWNLGSGVNRASVSAFATTNRMELEGASYQVPPQPNGMTNNLQGSNTYALENTMIFNSQPANPGTTATYLEGNMLITSESETQPVNRVAYNVGGQMATNNQSSTTAPATGTYNLQEIVPGSVWMERDVYLQGPIWAKIPETGAHFHPSPAMGGFGLKHPPPMMLIKNTPVPGNITSFSDVPVSSFITQYSTGQVTVEMEWELKKENSKRWNPEIQYTNNYNDPQFVDFAPDSTGEYRTTRPIGTRYLTRPL

SEQ ID NO: 868 - protein, 743 aa, synthetic construct
  source 1..743: note = Description of Artificial Sequence: Synthetic polypeptide
MAADGYLPDWLEDNLSEGIREWWALKPGAPQPKANQQHQDNARGLVLPGYKYLGPGNGLDKGEPVNAADAAALEHDKAYDQQLKAGDNPYLKYNHADAEFQERLKEDTSFGGNLGRAVFQAKKRLLEPLGLVEEAAKTAPGKKRPVEQSPQEPDSSAGIGKSGAQPAKKRLNFGQTGDTESVPDPQPIGEPPAAPSGVGSLTMASGGGAPVADNNEGADGVGSSSGNWHCDSQWLGDRVITTSTRTWALPTYNNHLYKQISNSTSGGSSNDNAYFGYSTPWGYFDFNRFHCHFSPRDWQRLINNNWGFRPKRLNFKLFNIQVKEVTDNNGVKTIANNLTSTVQVFTDSDYQLPYVLGSAHEGCLPPFPADVFMIPQYGYLTLNDGSQAVGRSSFYCLEYFPSQMLRTGNNFQFSYEFENVPFHSSYAHSQSLDRLMNPLIDQYLYYLSRTINGSGQNQQTLKFSVAGPSNMAVQGRNYIPGPSYRQQRVSTTVTQNNNSEFAWPGASSWALNGRNSLMNPGPAMASHKEGEDRFFPLSGSLIFGKQGTGRDNVDADKVMITNEEEIKTTNPVATESYGQVATNHQSAQTLAVPFKAQAQTGWVQNQGILPGMVWQDRDVYLQGPIWAKIPHTDGNFHPSPLMGGFGMKHPPPQILIKNTPVPADPPTAFNKDKLNSFITQYSTGQVSVEIEWELQKENSKRWNPEIQYTSNYYKSNNVEFAVNTEGVYSEPRPIGTRYLTRNL

SEQ ID NO: 869 - DNA, 2232 bp, synthetic construct
  source 1..2232: mol_type = other DNA; note = Description of Artificial Sequence: Synthetic polynucleotide
atggctgccgatggttatcttccagattggctcgaggacaaccttagtgaaggaattcgcgagtggtgggctttgaaacctggagcccctcaacccaaggcaaatcaacaacatcaagacaacgctcgaggtcttgtgcttccgggttacaaataccttggacccggcaacggactcgacaagggggagccggtcaacgcagcagacgcggcggccctcgagcacgacaaggcctacgaccagcagctcaaggccggagacaacccgtacctcaagtacaaccacgccgacgccgagttccaggagcggctcaaagaagatacgtcttttgggggcaacctcgggcgagcagtcttccaggccaaaaagaggcttcttgaacctcttggtctggttgaggaagcggctaagacggctcctggaaagaagaggcctgtagagcagtctcctcaggaaccggactcctccgcgggtattggcaaatcgggtgcacagcccgctaaaaagagactcaatttcggtcagactggcgacacagagtcagtcccagaccctcaaccaatcggagaacctcccgcagccccctcaggtgtgggatctcttacaatggcttcaggtggtggcgcaccagtggcagacaataacgaaggtgccgatggagtgggtagttcctcgggaaattggcattgcgattcccaatggctgggggacagagtcatcaccaccagcacccgaacctgggccctgcccacctacaacaatcacctctacaagcaaatctccaacagcacatctggaggatcttcaaatgacaacgcctacttcggctacagcaccccctgggggtattttgacttcaacagattccactgccacttctcaccacgtgactggcagcgactcatcaacaacaactggggattccggcctaagcgactcaacttcaagctcttcaacattcaggtcaaagaggttacggacaacaatggagtcaagaccatcgccaataaccttaccagcacggtccaggtcttcacggactcagactatcagctcccgtacgtgctcgggtcggctcacgagggctgcctcccgccgttcccagcggacgttttcatgattcctcagtacgggtatctgacgcttaatgatggaagccaggccgtgggtcgttcgtccttttactgcctggaatatttcccgtcgcaaatgctaagaacgggtaacaacttccagttcagctacgagtttgagaacgtacctttccatagcagctacgctcacagccaaagcctggaccgactaatgaatccactcatcgaccaatacttgtactatctctctagaactattaacggttctggacagaatcaacaaacgctaaaattcagtgtggccggacccagcaacatggctgtccagggaagaaactacatacctggacccagctaccgacaacaacgtgtctcaaccactgtgactcaaaacaacaacagcgaatttgcttggcctggagcttcttcttgggctctcaatggacgtaatagcttgatgaatcctggacctgctatggccagccacaaagaaggagaggaccgtttctttcctttgtctggatctttaatttttggcaaacaaggtaccggcagagacaacgtggatgcggacaaagtcatgataaccaacgaagaagaaattaaaactactaacccggtagcaacggagtcctatggacaagtggccacaaaccaccagagtgcccaaactttggcggtgccttttaaggcacaggcgcagaccggttgggttcaaaaccaaggaatacttccgggtatggtttggcaggacagagatgtgtacctgcaaggacccatttgggccaaaattcctcacacggacggcaactttcacccttctccgctgatgggagggtttggaatgaagcacccgcctcctcagatcctcatcaaaaacacacctgtacctgcggatcctccaacggccttcaacaaggacaagctgaactctttcatcacccagtattctactggccaagtcagcgtggagatcgagtgggagctgcagaaggaaaacagcaagcgctggaacccggagatccagtacacttccaactattacaagtctaataatgttgaatttgctgttaatactgaaggtgtatatagtgaaccccgccccattggcaccagatacctgactcgtaatctgtaa

SEQ ID NO: 870 - protein, 736 aa, synthetic construct
  source 1..736: note = Description of Artificial Sequence: Synthetic polypeptide
MAADGYLPDWLEDNLSEGIREWWALKPGAPQPKANQQHQDNARGLVLPGYKYLGPGNGLDKGEPVNAADAAALEHDKAYDQQLKAGDNPYLKYNHADAEFQERLKEDTSFGGNLGRAVFQAKKRLLEPLGLVEEAAKTAPGKKRPVEQSPQEPDSSAGIGKSGAQPAKKRLNFGQTGDTESVPDPQPIGEPPAAPSGVGSLTMASGGGAPVADNNEGADGVGSSSGNWHCDSQWLGDRVITTSTRTWALPTYNNHLYKQISNSTSGGSSNDNAYFGYSTPWGYFDFNRFHCHFSPRDWQRLINNNWGFRPKRLNFKLFNIQVKEVTDNNGVKTIANNLTSTVQVFTDSDYQLPYVLGSAHEGCLPPFPADVFMIPQYGYLTLNDGSQAVGRSSFYCLEYFPSQMLRTGNNFQFSYEFENVPFHSSYAHSQSLDRLMNPLIDQYLYYLSRTIQSSQTPRQTLKFSVAGPSNMAVQGRNYIPGPSYRQQRVSTTVTQNNNSEFAWPGASSWALNGRNSLMNPGPAMASHKEGEDRFFPLSGSLIFGKQGTGRDNVDADKVMITNEEEIKTTNPVATESYGQVATNHQSAQAQAQTGWVQNQGILPGMVWQDRDVYLQGPIWAKIPHTDGNFHPSPLMGGFGMKHPPPQILIKNTPVPADPPTAFNKDKLNSFITQYSTGQVSVEIEWELQKENSKRWNPEIQYTSNYYKSNNVEFAVNTEGVYSEPRPIGTRYLTRNL

SEQ ID NO: 871 - protein, 743 aa, synthetic construct
  source 1..743: note = Description of Artificial Sequence: Synthetic polypeptide
MAADGYLPDWLEDNLSEGIREWWALKPGAPQPKANQQHQDNARGLVLPGYKYLGPGNGLDKGEPVNAADAAALEHDKAYDQQLKAGDNPYLKYNHADAEFQERLKEDTSFGGNLGRAVFQAKKRLLEPLGLVEEAAKTAPGKKRPVEQSPQEPDSSAGIGKSGAQPAKKRLNFGQTGDTESVPDPQPIGEPPAAPSGVGSLTMASGGGAPVADNNEGADGVGSSSGNWHCDSQWLGDRVITTSTRTWALPTYNNHLYKQISNSTSGGSSNDNAYFGYSTPWGYFDFNRFHCHFSPRDWQRLINNNWGFRPKRLNFKLFNIQVKEVTDNNGVKTIANNLTSTVQVFTDSDYQLPYVLGSAHEGCLPPFPADVFMIPQYGYLTLNDGSQAVGRSSFYCLEYFPSQMLRTGNNFQFSYEFENVPFHSSYAHSQSLDRLMNPLIDQYLYYLSRTIILGTGTSQTLKFSVAGPSNMAVQGRNYIPGPSYRQQRVSTTVTQNNNSEFAWPGASSWALNGRNSLMNPGPAMASHKEGEDRFFPLSGSLIFGKQGTGRDNVDADKVMITNEEEIKTTNPVATESYGQVATNHQSAQTRTNPEAAQAQTGWVQNQGILPGMVWQDRDVYLQGPIWAKIPHTDGNFHPSPLMGGFGMKHPPPQILIKNTPVPADPPTAFNKDKLNSFITQYSTGQVSVEIEWELQKENSKRWNPEIQYTSNYYKSNNVEFAVNTEGVYSEPRPIGTRYLTRNL

SEQ ID NO: 872 - protein, 743 aa, synthetic construct
  source 1..743: note = Description of Artificial Sequence: Synthetic polypeptide
MAADGYLPDWLEDNLSEGIREWWALKPGAPQPKANQQHQDNARGLVLPGYKYLGPGNGLDKGEPVNAADAAALEHDKAYDQQLKAGDNPYLKYNHADAEFQERLKEDTSFGGNLGRAVFQAKKRLLEPLGLVEEAAKTAPGKKRPVEQSPQEPDSSAGIGKSGAQPAKKRLNFGQTGDTESVPDPQPIGEPPAAPSGVGSLTMASGGGAPVADNNEGADGVGSSSGNWHCDSQWLGDRVITTSTRTWALPTYNNHLYKQISNSTSGGSSNDNAYFGYSTPWGYFDFNRFHCHFSPRDWQRLINNNWGFRPKRLNFKLFNIQVKEVTDNNGVKTIANNLTSTVQVFTDSDYQLPYVLGSAHEGCLPPFPADVFMIPQYGYLTLNDGSQAVGRSSFYCLEYFPSQMLRTGNNFQFSYEFENVPFHSSYAHSQSLDRLMNPLIDQYLYYLSRTIILGTGTSQTLKFSVAGPSNMAVQGRNYIPGPSYRQQRVSTTVTQNNNSEFAWPGASSWALNGRNSLMNPGPAMASHKEGEDRFFPLSGSLIFGKQGTGRDNVDADKVMITNEEEIKTTNPVATESYGQVATNHQSAQNGGTSSSAQAQTGWVQNQGILPGMVWQDRDVYLQGPIWAKIPHTDGNFHPSPLMGGFGMKHPPPQILIKNTPVPADPPTAFNKDKLNSFITQYSTGQVSVEIEWELQKENSKRWNPEIQYTSNYYKSNNVEFAVNTEGVYSEPRPIGTRYLTRNL

SEQ ID NO: 873 - protein, 7 aa, synthetic construct
  source 1..7: note = Description of Artificial Sequence: Synthetic polypeptide
TLAVPFK

SEQ ID NO: 874 - protein, 7 aa, synthetic construct
  source 1..7: note = Description of Artificial Sequence: Synthetic polypeptide
KFPVALT

SEQ ID NO: 875 - protein, 6 aa, synthetic construct
  source 1..6: note = Description of Artificial Sequence: Synthetic polypeptide
LAVPFK

SEQ ID NO: 876 - protein, 5 aa, synthetic construct
  source 1..5: note = Description of Artificial Sequence: Synthetic polypeptide
AVPFK

SEQ ID NO: 877 - protein, 4 aa, synthetic construct
  source 1..4: note = Description of Artificial Sequence: Synthetic polypeptide
VPFK

SEQ ID NO: 878 - protein, 6 aa, synthetic construct
  source 1..6: note = Description of Artificial Sequence: Synthetic polypeptide
TLAVPF

SEQ ID NO: 879 - protein, 5 aa, synthetic construct
  source 1..5: note = Description of Artificial Sequence: Synthetic polypeptide
TLAVP

SEQ ID NO: 880 - protein, 4 aa, synthetic construct
  source 1..4: note = Description of Artificial Sequence: Synthetic polypeptide
TLAV

SEQ ID NO: 881 - protein, 7 aa, synthetic construct
  source 1..7: note = Description of Artificial Sequence: Synthetic polypeptide
SVSKPFL

SEQ ID NO: 882 - protein, 7 aa, synthetic construct
  source 1..7: note = Description of Artificial Sequence: Synthetic polypeptide
FTLTTPK

SEQ ID NO: 883 - protein, 7 aa, synthetic construct
  source 1..7: note = Description of Artificial Sequence: Synthetic polypeptide
MNATKNV

SEQ ID NO: 884 - protein, 7 aa, synthetic construct
  source 1..7: note = Description of Artificial Sequence: Synthetic polypeptide
QSSQTPR

SEQ ID NO: 885 - protein, 7 aa, synthetic construct
  source 1..7: note = Description of Artificial Sequence: Synthetic polypeptide
ILGTGTS

SEQ ID NO: 886 - protein, 7 aa, synthetic construct
  source 1..7: note = Description of Artificial Sequence: Synthetic polypeptide
TRTNPEA

SEQ ID NO: 887 - protein, 7 aa, synthetic construct
  source 1..7: note = Description of Artificial Sequence: Synthetic polypeptide
NGGTSSS

SEQ ID NO: 888 - protein, 7 aa, synthetic construct
  source 1..7: note = Description of Artificial Sequence: Synthetic polypeptide
YTLSQGW

SEQ ID NO: 889 - DNA, 21 bp, synthetic construct
  source 1..21: mol_type = other DNA; note = Description of Artificial Sequence: Synthetic polynucleotide
aagtttcctgtggcgttgact

SEQ ID NO: 890 - DNA, 21 bp, synthetic construct
  source 1..21: mol_type = other DNA; note = Description of Artificial Sequence: Synthetic polynucleotide
actttggcggtgccttttaag

SEQ ID NO: 891 - DNA, 21 bp, synthetic construct
  source 1..21: mol_type = other DNA; note = Description of Artificial Sequence: Synthetic polynucleotide
agtgtgagtaagccttttttg

SEQ ID NO: 892 - DNA, 21 bp, synthetic construct
  source 1..21: mol_type = other DNA; note = Description of Artificial Sequence: Synthetic polynucleotide
tttacgttgacgacgcctaag

SEQ ID NO: 893 - DNA, 21 bp, synthetic construct
  source 1..21: mol_type = other DNA; note = Description of Artificial Sequence: Synthetic polynucleotide
atgaatgctacgaagaatgtg

SEQ ID NO: 894 - DNA, 21 bp, synthetic construct
  source 1..21: mol_type = other DNA; note = Description of Artificial Sequence: Synthetic polynucleotide
cagtcgtcgcagacgcctagg

SEQ ID NO: 895 - DNA, 21 bp, synthetic construct
  source 1..21: mol_type = other DNA; note = Description of Artificial Sequence: Synthetic polynucleotide
attctggggactggtacttcg

SEQ ID NO: 896 - DNA, 21 bp, synthetic construct
  source 1..21: mol_type = other DNA; note = Description of Artificial Sequence: Synthetic polynucleotide
acgcggactaatcctgaggct

SEQ ID NO: 897 - DNA, 21 bp, synthetic construct
  source 1..21: mol_type = other DNA; note = Description of Artificial Sequence: Synthetic polynucleotide
aatggggggactagtagttct

SEQ ID NO: 898 - DNA, 21 bp, synthetic construct
  source 1..21: mol_type = other DNA; note = Description of Artificial Sequence: Synthetic polynucleotide
tatactttgtcgcagggttgg

SEQ ID NO: 899 - protein, 9 aa, synthetic construct
  source 1..9: note = Description of Artificial Sequence: Synthetic polypeptide
SADNNNSEY

SEQ ID NO: 900 - protein, 9 aa, synthetic construct
  source 1..9: note = Description of Artificial Sequence: Synthetic polypeptide
LIDQYLYYL

SEQ ID NO: 901 - protein, 9 aa, synthetic construct
  source 1..9: note = Description of Artificial Sequence: Synthetic polypeptide
VPQYGYLTL

SEQ ID NO: 902 - protein, 9 aa, synthetic construct
  source 1..9: note = Description of Artificial Sequence: Synthetic polypeptide
TTSTRTWAL

SEQ ID NO: 903 - protein, 9 aa, synthetic construct
  source 1..9: note = Description of Artificial Sequence: Synthetic polypeptide
YHLNGRDSL

SEQ ID NO: 904 - protein, 9 aa, synthetic construct
  source 1..9: note = Description of Artificial Sequence: Synthetic polypeptide
SQAVGRSSF

SEQ ID NO: 905 - protein, 9 aa, synthetic construct
  source 1..9: note = Description of Artificial Sequence: Synthetic polypeptide
VPANPSTTF

SEQ ID NO: 906 - protein, 9 aa, synthetic construct
  source 1..9: note = Description of Artificial Sequence: Synthetic polypeptide
FPQSGVLIF

SEQ ID NO: 907 - protein, 15 aa, synthetic construct
  source 1..15: note = Description of Artificial Sequence: Synthetic polypeptide
YFDFNRFHCHFSPRD

SEQ ID NO: 908 - protein, 15 aa, synthetic construct
  source 1..15: note = Description of Artificial Sequence: Synthetic polypeptide
VGNSSGNWHCDSTWM

SEQ ID NO: 909 - protein, 15 aa, synthetic construct
  source 1..15: note = Description of Artificial Sequence: Synthetic polypeptide
QFSQAGASDIRDQSR

SEQ ID NO: 910 - protein, 13 aa, synthetic construct
  source 1..13: note = Description of Artificial Sequence: Synthetic polypeptide
GASDIRQSRNWLP

SEQ ID NO: 911 - protein, 15 aa, synthetic construct
  source 1..15: note = Description of Artificial Sequence: Synthetic polypeptide
GNRQAATADVNTQGV

SEQ ID NO: 912 - protein, 9 aa, synthetic construct
  source 1..9: note = Description of Artificial Sequence: Synthetic polypeptide
LDRLMNPLI

SEQ ID NO: 913 - protein, 9 aa, synthetic construct
  source 1..9: note = Description of Artificial Sequence: Synthetic polypeptide
QPAKKRLNF

SEQ ID NO: 914 - RNA, 21 nt, synthetic construct
  source 1..21: mol_type = other RNA; note = Description of Artificial Sequence: Synthetic oligonucleotide
ttaacgtcagttcataaactt

SEQ ID NO: 915 - DNA, 21 bp, synthetic construct
  source 1..21: mol_type = other DNA; note = Description of Artificial Sequence: Synthetic oligonucleotide
  misc_feature 1..19: note = RNA
  misc_feature 20..21: note = DNA
ttaacgtcagttcataaactt

SEQ ID NO: 916 - RNA, 21 nt, synthetic construct
  source 1..21: mol_type = other RNA; note = Description of Artificial Sequence: Synthetic oligonucleotide
tgtcggtaccgtctaacactt

SEQ ID NO: 917 - DNA, 21 bp, synthetic construct
  source 1..21: mol_type = other DNA; note = Description of Artificial Sequence: Synthetic oligonucleotide
  misc_feature 1..19: note = RNA
  misc_feature 20..21: note = DNA
tgtcggtaccgtctaacactt

SEQ ID NO: 918 - RNA, 21 nt, synthetic construct
  source 1..21: mol_type = other RNA; note = Description of Artificial Sequence: Synthetic oligonucleotide
taagcatggagctagcaggtt

SEQ ID NO: 919 - DNA, 21 bp, synthetic construct
  source 1..21: mol_type = other DNA; note = Description of Artificial Sequence: Synthetic oligonucleotide
  misc_feature 1..19: note = RNA
  misc_feature 20..21: note = DNA
taagcatggagctagcaggtt

SEQ ID NO: 920 - RNA, 21 nt, synthetic construct
  source 1..21: mol_type = other RNA; note = Description of Artificial Sequence: Synthetic oligonucleotide
tacaacgagactgaattgctt

SEQ ID NO: 921 - DNA, 21 bp, synthetic construct
  source 1..21: mol_type = other DNA; note = Description of Artificial Sequence: Synthetic oligonucleotide
  misc_feature 1..19: note = RNA
  misc_feature 20..21: note = DNA
tacaacgagactgaattgctt

SEQ ID NO: 922 - RNA, 21 nt, synthetic construct
  source 1..21: mol_type = other RNA; note = Description of Artificial Sequence: Synthetic oligonucleotide
ttcagttcataaacctggatt

SEQ ID NO: 923 - DNA, 21 bp, synthetic construct
  source 1..21: mol_type = other DNA; note = Description of Artificial Sequence: Synthetic oligonucleotide
  misc_feature 1..19: note = RNA
  misc_feature 20..21: note = DNA
ttcagttcataaacctggatt

SEQ ID NO: 924 - RNA, 21 nt, synthetic construct
  source 1..21: mol_type = other RNA; note = Description of Artificial Sequence: Synthetic oligonucleotide
taacgtcagttcataaacctt

SEQ ID NO: 925 - DNA, 21 bp, synthetic construct
  source 1..21: mol_type = other DNA; note = Description of Artificial Sequence: Synthetic oligonucleotide
  misc_feature 1..19: note = RNA
  misc_feature 20..21: note = DNA
taacgtcagttcataaacctt

SEQ ID NO: 926 - RNA, 21 nt, synthetic construct
  source 1..21: mol_type = other RNA; note = Description of Artificial Sequence: Synthetic oligonucleotide
tccggtcacaacattgtggtt

SEQ ID NO: 927 - DNA, 21 bp, synthetic construct
  source 1..21: mol_type = other DNA; note = Description of Artificial Sequence: Synthetic oligonucleotide
  misc_feature 1..19: note = RNA
  misc_feature 20..21: note = DNA
tccggtcacaacattgtggtt

SEQ ID NO: 928 - RNA, 21 nt, synthetic construct
  source 1..21: mol_type = other RNA; note = Description of Artificial Sequence: Synthetic oligonucleotide
ttgcacggttctttgtgactt

SEQ ID NO: 929 - DNA, 21 bp, synthetic construct
  source 1..21: mol_type = other DNA; note = Description of Artificial Sequence: Synthetic oligonucleotide
  misc_difference 2: note = misc_feature - n is a, c, g, or t
  misc_feature 1..19: note = RNA
  misc_feature 20..21: note = DNA
ttgcacggttctttgtgactt

SEQ ID NO: 930 - RNA, 21 nt, synthetic construct
  source 1..21: mol_type = other RNA; note = Description of Artificial Sequence: Synthetic oligonucleotide
ttttataacaagaggttcatt

SEQ ID NO: 931 - DNA, 21 bp, synthetic construct
  source 1..21: mol_type = other DNA; note = Description of Artificial Sequence: Synthetic oligonucleotide
  misc_feature 1..19: note = RNA
  misc_feature 20..21: note = DNA
ttttataacaagaggttcatt

SEQ ID NO: 932 - RNA, 21 nt, synthetic construct
  source 1..21: mol_type = other RNA; note = Description of Artificial Sequence: Synthetic oligonucleotide
tccaaatactggttgtcggtt

SEQ ID NO: 933 - DNA, 21 bp, synthetic construct
  source 1..21: mol_type = other DNA; note = Description of Artificial Sequence: Synthetic oligonucleotide
  misc_feature 1..19: note = RNA
  misc_feature 20..21: note = DNA
tccaaatactggttgtcggtt

SEQ ID NO: 934 - RNA, 21 nt, synthetic construct
  source 1..21: mol_type = other RNA; note = Description of Artificial Sequence: Synthetic oligonucleotide
tattttaggaattccaatgtt

SEQ ID NO: 935 - DNA, 21 bp, synthetic construct
  source 1..21: mol_type = other DNA; note = Description of Artificial Sequence: Synthetic oligonucleotide
  misc_feature 1..19: note = RNA
  misc_feature 20..21: note = DNA
tattttaggaattccaatgtt

SEQ ID NO: 936 - RNA, 21 nt, synthetic construct
  source 1..21: mol_type = other RNA; note = Description of Artificial Sequence: Synthetic oligonucleotide
tttaggaattccaatgatctt

SEQ ID NO: 937 - DNA, 21 bp, synthetic construct
  source 1..21: mol_type = other DNA; note = Description of Artificial Sequence: Synthetic oligonucleotide
  misc_feature 1..19: note = RNA
  misc_feature 20..21: note = DNA
tttaggaattccaatgatctt

SEQ ID NO: 938 - DNA, 21 bp, synthetic construct
  source 1..21: mol_type = other DNA; note = Description of Artificial Sequence: Synthetic oligonucleotide
  misc_feature 1..19: note = RNA
  misc_feature 20..21: note = DNA
ttaatctctttactgatattt

SEQ ID NO: 939 - DNA, 21 bp, synthetic construct
  source 1..21: mol_type = other DNA; note = Description of Artificial Sequence: Synthetic oligonucleotide
  misc_feature 1..19: note = RNA
  misc_feature 20..21: note = DNA
gattttaggaattccaatgtt

SEQ ID NO: 940 - RNA, 22 nt, synthetic construct
  source 1..22: mol_type = other RNA; note = Description of Artificial Sequence: Synthetic oligonucleotide
taagcatggagctagcaggctt

SEQ ID NO: 941 - RNA, 21 nt, synthetic construct
  source 1..21: mol_type = other RNA; note = Description of Artificial Sequence: Synthetic oligonucleotide
taagcatggagctagcagggt

SEQ ID NO: 942 - RNA, 22 nt, synthetic construct
  source 1..22: mol_type = other RNA; note = Description of Artificial Sequence: Synthetic oligonucleotide
aaggacttgagggactcgaagt

SEQ ID NO: 943 - RNA, 21 nt, synthetic construct
  source 1..21: mol_type = other RNA; note = Description of Artificial Sequence: Synthetic oligonucleotide
aaggacttgagggactcgaag

SEQ ID NO: 944 - RNA, 19 nt, synthetic construct
  source 1..19: mol_type = other RNA; note = Description of Artificial Sequence: Synthetic oligonucleotide
aaggacttgagggactcga

SEQ ID NO: 945 - RNA, 21 nt, synthetic construct
  source 1..21: mol_type = other RNA; note = Description of Artificial Sequence: Synthetic oligonucleotide
aggacttgagggactcgaagt

SEQ ID NO: 946 - RNA, 22 nt, synthetic construct
  source 1..22: mol_type = other RNA; note = Description of Artificial Sequence: Synthetic oligonucleotide
gaggacttgagggactcgaagt

SEQ ID NO: 947 - RNA, 22 nt, synthetic construct
  source 1..22: mol_type = other RNA; note = Description of Artificial Sequence: Synthetic oligonucleotide
aaggacttgagggactcgaagt

SEQ ID NO: 948 - RNA, 23 nt, synthetic construct
  source 1..23: mol_type = other RNA; note = Description of Artificial Sequence: Synthetic oligonucleotide
aaggacttgagggactcgaagtt

SEQ ID NO: 949 - RNA, 21 nt, synthetic construct
  source 1..21: mol_type = other RNA; note = Description of Artificial Sequence: Synthetic oligonucleotide
aaggacttgagggactcgaag

SEQ ID NO: 950 - RNA, 19 nt, synthetic construct
  source 1..19: mol_type = other RNA; note = Description of Artificial Sequence: Synthetic oligonucleotide
aaggacttgagggactcga

SEQ ID NO: 951 - RNA, 22 nt, synthetic construct
  source 1..22: mol_type = other RNA; note = Description of Artificial Sequence: Synthetic oligonucleotide
aaggacttgagggactcgaagg

SEQ ID NO: 952 - RNA, 21 nt, synthetic construct
  source 1..21: mol_type = other RNA; note = Description of Artificial Sequence: Synthetic oligonucleotide
aaggacttgagggactcgaat

SEQ ID NO: 953 - RNA, 22 nt, synthetic construct
  source 1..22: mol_type = other RNA; note = Description of Artificial Sequence: Synthetic oligonucleotide
aaggacttgagggactcgaaga

SEQ ID NO: 954 - RNA, 22 nt, synthetic construct
  source 1..22: mol_type = other RNA; note = Description of Artificial Sequence: Synthetic oligonucleotide
aaggacttgagggactcgaagg

SEQ ID NO: 955 - RNA, 23 nt, synthetic construct
  source 1..23: mol_type = other RNA; note = Description of Artificial Sequence: Synthetic oligonucleotide
aaggacttgagggactcgaaggt

SEQ ID NO: 956 - RNA, 23 nt, synthetic construct
  source 1..23: mol_type = other RNA; note = Description of Artificial Sequence: Synthetic oligonucleotide
aaggacttgagggactcgaagga

SEQ ID NO: 957 - RNA, 21 nt, synthetic construct
  source 1..21: mol_type = other RNA; note = Description of Artificial Sequence: Synthetic oligonucleotide
aaggacttgagggactcgaag

SEQ ID NO: 958 - RNA, 22 nt, synthetic construct
  source 1..22: mol_type = other RNA; note = Description of Artificial Sequence: Synthetic oligonucleotide
aaggacttgagggactcgaagt

SEQ ID NO: 959 - RNA, 19 nt, synthetic construct
  source 1..19: mol_type = other RNA; note = Description of Artificial Sequence: Synthetic oligonucleotide
aaggacttgagggactcga

SEQ ID NO: 960 - RNA, 23 nt, synthetic construct
  source 1..23: mol_type = other RNA; note = Description of Artificial Sequence: Synthetic oligonucleotide
aaggacttgagggactcgaagga

SEQ ID NO: 961 - RNA, 22 nt, synthetic construct
  source 1..22: mol_type = other RNA; note = Description of Artificial Sequence: Synthetic oligonucleotide
aaggacttgagggactcgaagg

SEQ ID NO: 962 - RNA, 24 nt, synthetic construct
  source 1..24: mol_type = other RNA; note = Description of Artificial Sequence: Synthetic oligonucleotide
aaggacttgagggactcgaaggat

SEQ ID NO: 963 - RNA, 25 nt, synthetic construct
  source 1..25: mol_type = other RNA; note = Description of Artificial Sequence: Synthetic oligonucleotide
aaggacttgagggactcgaaggatt

SEQ ID NO: 964 - RNA, 21 nt, synthetic construct
  source 1..21: mol_type = other RNA; note = Description of Artificial Sequence: Synthetic oligonucleotide
aaggacttgagggactcgaag

SEQ ID NO: 965 - RNA, 24 nt, synthetic construct
  source 1..24: mol_type = other RNA; note = Description of Artificial Sequence: Synthetic oligonucleotide
aaggacttgagggactcgaaggaa

SEQ ID NO: 966 - RNA, 23 nt, synthetic construct
  source 1..23: mol_type = other RNA; note = Description of Artificial Sequence: Synthetic oligonucleotide
gatgaagtgcacacattggatga

SEQ ID NO: 967 - RNA, 22 nt, synthetic construct
  source 1..22: mol_type = other RNA; note = Description of Artificial Sequence: Synthetic oligonucleotide
gatgaactgcacacattggatg

SEQ ID NO: 968 - RNA, 23 nt, synthetic construct
  source 1..23: mol_type = other RNA; note = Description of Artificial Sequence: Synthetic oligonucleotide
gatgaattgcacacagtagatga

SEQ ID NO: 969 - RNA, 24 nt, synthetic construct
  source 1..24: mol_type = other RNA; note = Description of Artificial Sequence: Synthetic oligonucleotide
aaggacttgagggactcgaaggtt

SEQ ID NO: 970 - RNA, 25 nt, synthetic construct
  source 1..25: mol_type = other RNA; note = Description of Artificial Sequence: Synthetic oligonucleotide
aaggacttgagggactcgaaggttt

SEQ ID NO: 971 - RNA, 23 nt, synthetic construct
  source 1..23: mol_type = other RNA; note = Description of Artificial Sequence: Synthetic oligonucleotide
aaggacttgagggactcgaaggt

SEQ ID NO: 972 - RNA, 26 nt, synthetic construct
  source 1..26: mol_type = other RNA; note = Description of Artificial Sequence: Synthetic oligonucleotide
aaggacttgagggactcgaaggtttt

SEQ ID NO: 973 - RNA, 27 nt, synthetic construct
  source 1..27: mol_type = other RNA; note = Description of Artificial Sequence: Synthetic oligonucleotide
aaggacttgagggactcgaaggttttt

SEQ ID NO: 974 - RNA, 22 nt, synthetic construct
  source 1..22: mol_type = other RNA; note = Description of Artificial Sequence: Synthetic oligonucleotide
aaggacttgagggactcgaagg

SEQ ID NO: 975 - RNA, 22 nt, synthetic construct
  source 1..22: mol_type = other RNA; note = Description of Artificial Sequence: Synthetic oligonucleotide
taaggacttgagggactcgaag

SEQ ID NO: 976 - RNA, 21 nt, synthetic construct
  source 1..21: mol_type = other RNA; note = Description of Artificial Sequence: Synthetic oligonucleotide
aaggacttgagggactcgaag

SEQ ID NO: 977 - RNA, 22 nt, synthetic construct
  source 1..22: mol_type = other RNA; note = Description of Artificial Sequence: Synthetic oligonucleotide
aaggacttgagggactcgaagt

SEQ ID NO: 978 - RNA, 30 nt, synthetic construct
  source 1..30: mol_type = other RNA; note = Description of Artificial Sequence: Synthetic oligonucleotide
aaggacttgagggactcgaagacgagtccc

SEQ ID NO: 979 - RNA, 31 nt, synthetic construct
  source 1..31: mol_type = other RNA; note = Description of Artificial Sequence: Synthetic oligonucleotide
aaggacttgagggactcgaagacgagtccca

SEQ ID NO: 980 - RNA, 31 nt, synthetic construct
  source 1..31: mol_type = other RNA; note = Description of Artificial Sequence: Synthetic oligonucleotide
aaggacttgagggactcgaagacgagtccct

SEQ ID NO: 981 - RNA, 23 nt, synthetic construct
  source 1..23: mol_type = other RNA; note = Description of Artificial Sequence: Synthetic oligonucleotide
gatgaagtgcacacattggatac

SEQ ID NO: 982 - RNA, 24 nt, synthetic construct
  source 1..24: mol_type = other RNA; note = Description of Artificial Sequence: Synthetic oligonucleotide
gatgaagtgcacacattggataca

SEQ ID NO: 983 - RNA, 30 nt, synthetic construct
  source 1..30: mol_type = other RNA; note = Description of Artificial Sequence: Synthetic oligonucleotide
gatgaagtgcacacattggatacaatgtgt

SEQ ID NO: 984 - RNA, 21 nt, synthetic construct
  source 1..21: mol_type = other RNA; note = Description of Artificial Sequence: Synthetic oligonucleotide
gatgaagtgcacacattggat

SEQ ID NO: 985 - RNA, 22 nt, synthetic construct
  source 1..22: mol_type = other RNA; note = Description of Artificial Sequence: Synthetic oligonucleotide
gatgaagtgcacacattggata

SEQ ID NO: 986 - RNA, 23 nt, synthetic construct
  source 1..23: mol_type = other RNA; note = Description of Artificial Sequence: Synthetic oligonucleotide
gatgaattgcacacagtagatat

SEQ ID NO: 987 - RNA, 25 nt, synthetic construct
  source 1..25: mol_type = other RNA; note = Description of Artificial Sequence: Synthetic oligonucleotide
gatgaattgcacacagtagatatac

SEQ ID NO: 988 - RNA, 30 nt, synthetic construct
  source 1..30: mol_type = other RNA; note = Description of Artificial Sequence: Synthetic oligonucleotide
gatgaattgcacacagtagatatactgtgt

SEQ ID NO: 989 - RNA, 24 nt, synthetic construct
  source 1..24: mol_type = other RNA; note = Description of Artificial Sequence: Synthetic oligonucleotide
gatgaattgcacacagtagatata

SEQ ID NO: 990 - RNA, 24 nt, synthetic construct
  source 1..24: mol_type = other RNA; note = Description of Artificial Sequence: Synthetic oligonucleotide
atgaattgcacacagtagatatac

SEQ ID NO: 991 - RNA, 22 nt, synthetic construct
  source 1..22: mol_type = other RNA; note = Description of Artificial Sequence: Synthetic oligonucleotide
gatgaattgcacacagtagata

SEQ ID NO: 992 - RNA, 30 nt, synthetic construct; identical to SEQ ID NO: 988
  source 1..30: mol_type = other RNA; note = Description of Artificial Sequence: Synthetic oligonucleotide

SEQ ID NO: 993 - RNA, 20 nt, synthetic construct
  source 1..20: mol_type = other RNA; note = Description of Artificial Sequence: Synthetic oligonucleotide
tacaacgagactgaattgct

SEQ ID NO: 994 - RNA, 20 nt, synthetic construct
  source 1..20: mol_type = other RNA; note = Description of Artificial Sequence: Synthetic oligonucleotide
acaacgagactgaattgctt

SEQ ID NO: 995 - RNA, 22 nt, synthetic construct
  source 1..22: mol_type = other RNA; note = Description of Artificial Sequence: Synthetic oligonucleotide
tccggtcacaacattgtggttc

SEQ ID NO: 996 - RNA, 20 nt, synthetic construct
  source 1..20: mol_type = other RNA; note = Description of Artificial Sequence: Synthetic oligonucleotide
tccggtcacaacattgtggt

SEQ ID NO: 997 - RNA, 18 nt, synthetic construct
  source 1..18: mol_type = other RNA; note = Description of Artificial Sequence: Synthetic oligonucleotide
tccggtcacaacattgtg

SEQ ID NO: 998 - RNA, 20 nt, synthetic construct
  source 1..20: mol_type = other RNA; note = Description of Artificial Sequence: Synthetic oligonucleotide
ccggtcacaacattgtggtt

SEQ ID NO: 999 - RNA, 20 nt, synthetic construct
  source 1..20: mol_type = other RNA; note = Description of Artificial Sequence: Synthetic oligonucleotide
ttttataacaagaggttcat

SEQ ID NO: 1000 - RNA, 20 nt, synthetic construct
  source 1..20: mol_type = other RNA; note = Description of Artificial Sequence: Synthetic oligonucleotide
tttataacaagaggttcatt

SEQ ID NO: 1001 - RNA, 20 nt, synthetic construct
  source 1..20: mol_type = other RNA; note = Description of Artificial Sequence: Synthetic oligonucleotide
taagcatggagctagcaggt

SEQ ID NO: 1002 - RNA, 20 nt, synthetic construct
  source 1..20: mol_type = other RNA; note = Description of Artificial Sequence: Synthetic oligonucleotide
aagcatggagctagcaggtt

SEQ ID NO: 1003 - RNA, 20 nt, synthetic construct
  source 1..20: mol_type = other RNA; note = Description of Artificial Sequence: Synthetic oligonucleotide
ccaaatactggttgtcggtt

SEQ ID NO: 1004 - RNA, 22 nt, synthetic construct
  source 1..22: mol_type = other RNA; note = Description of Artificial Sequence: Synthetic oligonucleotide
tacaacgagactgaattgcttt

SEQ ID NO: 1005 - RNA, 22 nt, synthetic construct
  source 1..22: mol_type = other RNA; note = Description of Artificial Sequence: Synthetic oligonucleotide
taacgtcagttcataaaccttt

SEQ ID NO: 1006 - RNA, 22 nt, synthetic construct
  source 1..22: mol_type = other RNA; note = Description of Artificial Sequence: Synthetic oligonucleotide
gtccggtcacaacattgtggtt

SEQ ID NO: 1007 - RNA, 23 nt, synthetic construct
  source 1..23: mol_type = other RNA; note = Description of Artificial Sequence: Synthetic oligonucleotide
tccggtcacaacattgtggtttg

SEQ ID NO: 1008 - RNA, 22 nt, synthetic construct
  source 1..22: mol_type = other RNA; note = Description of Artificial Sequence: Synthetic oligonucleotide
tccggtcacaacattgtggttt

SEQ ID NO: 1009 - RNA, 19 nt, synthetic construct
  source 1..19: mol_type = other RNA; note = Description of Artificial Sequence: Synthetic oligonucleotide
tccggtcacaacattgtgg

SEQ ID NO: 1010 - RNA, 22 nt, synthetic construct
  source 1..22: mol_type = other RNA; note = Description of Artificial Sequence: Synthetic oligonucleotide
taagcatggagctagcaggttt

SEQ ID NO: 1011 - RNA, 21 nt, synthetic construct
  source 1..21: mol_type = other RNA; note = Description of Artificial Sequence: Synthetic oligonucleotide
aagcatggagctagcaggttt

SEQ ID NO: 1012 - RNA, 22 nt, synthetic construct
  source 1..22: mol_type = other RNA; note = Description of Artificial Sequence: Synthetic oligonucleotide
tccaaatactggttgtcggttt

SEQ ID NO: 1013 - RNA, 21 nt, synthetic construct
  source 1..21: mol_type = other RNA; note = Description of Artificial Sequence: Synthetic oligonucleotide
ccaaatactggttgtcggttt

SEQ ID NO: 1014 - RNA, 21 nt, synthetic construct
  source 1..21: mol_type = other RNA; note = Description of Artificial Sequence: Synthetic oligonucleotide
gtttatgaactgatcttaccc

SEQ ID NO: 1015 - RNA, 21 nt, synthetic construct
  source 1..21: mol_type = other RNA; note = Description of Artificial Sequence: Synthetic oligonucleotide
gtgttagacggtactgatccc

SEQ ID NO: 1016 - RNA, 21 nt, synthetic construct
  source 1..21: mol_type = other RNA; note = Description of Artificial Sequence: Synthetic oligonucleotide
cctgctagctccatgcttccc

SEQ ID NO: 1017 - RNA, 21 nt, synthetic construct
  source 1..21: mol_type = other RNA; note = Description of Artificial Sequence: Synthetic oligonucleotide
gtttatgaactgatcttagcc

SEQ ID NO: 1018 - RNA, 21 nt, synthetic construct
  source 1..21: mol_type = other RNA; note = Description of Artificial Sequence: Synthetic oligonucleotide
gtgttagacggtactgatgcc

SEQ ID NO: 1019 - RNA, 21 nt, synthetic construct
  source 1..21: mol_type = other RNA; note = Description of Artificial Sequence: Synthetic oligonucleotide
cctgctagctccatgcttgcc

SEQ ID NO: 1020 - RNA, 21 nt, synthetic construct
  source 1..21: mol_type = other RNA; note = Description of Artificial Sequence: Synthetic oligonucleotide
gtttatgaagtgatcttaacc

SEQ ID NO: 1021 - RNA, 21 nt, synthetic construct
  source 1..21: mol_type = other RNA; note = Description of Artificial Sequence: Synthetic oligonucleotide
gtgttagaccgtactgatacc

SEQ ID NO: 1022 - RNA, 21 nt, synthetic construct
  source 1..21: mol_type = other RNA; note = Description of Artificial Sequence: Synthetic oligonucleotide
cctgctagcaccatgcttacc

SEQ ID NO: 1023 - RNA, 21 nt, synthetic construct
  source 1..21: mol_type = other RNA; note = Description of Artificial Sequence: Synthetic oligonucleotide
gtttatgaactgatcttaacc

SEQ ID NO: 1024 - RNA, 21 nt, synthetic construct
  source 1..21: mol_type = other RNA; note = Description of Artificial Sequence: Synthetic oligonucleotide
gtgttagacggtactgatacc

SEQ ID NO: 1025 - RNA, 21 nt, synthetic construct
  source 1..21: mol_type = other RNA; note = Description of Artificial Sequence: Synthetic oligonucleotide
cctgctagctccatgcttacc

SEQ ID NO: 1026 - DNA, 21 bp, synthetic construct
  source 1..21: mol_type = other DNA; note = Description of Artificial Sequence: Synthetic oligonucleotide
  misc_feature 1..19: note = RNA
  misc_feature 20..21: note = DNA
cctgctagctccatgcttatt

SEQ ID NO: 1027 - RNA, 21 nt, synthetic construct
  source 1..21: mol_type = other RNA; note = Description of Artificial Sequence: Synthetic oligonucleotide
gtttatgaactgatcttgccc

SEQ ID NO: 1028 - RNA, 21 nt, synthetic construct
  source 1..21: mol_type = other RNA; note = Description of Artificial Sequence: Synthetic oligonucleotide
gtttatgaactgatcttggcc

SEQ ID NO: 1029 - RNA, 21 nt, synthetic construct
  source 1..21: mol_type = other RNA; note = Description of Artificial Sequence: Synthetic oligonucleotide
gtttatgaactgatcttgacc

SEQ ID NO: 1030 - RNA, 21 nt, synthetic construct
  source 1..21: mol_type = other RNA; note = Description of Artificial Sequence: Synthetic oligonucleotide
gcaattcagtctcgttgtccc

SEQ ID NO: 1031 - RNA, 21 nt, synthetic construct
  source 1..21: mol_type = other RNA; note = Description of Artificial Sequence: Synthetic oligonucleotide
tccaggtttatgaactgaccc

SEQ ID NO: 1032 - RNA, 21 nt, synthetic construct
  source 1..21: mol_type = other RNA; note = Description of Artificial Sequence: Synthetic oligonucleotide
ggtttatgaactgacgttccc

SEQ ID NO: 1033 - RNA, 21 nt, synthetic construct
  source 1..21: mol_type = other RNA; note = Description of Artificial Sequence: Synthetic oligonucleotide
ccacaatgttgtgactggccc

SEQ ID NO: 1034 - RNA, 21 nt, synthetic construct
  source 1..21: mol_type = other RNA; note = Description of Artificial Sequence: Synthetic oligonucleotide
gtcacaaagaaccgtgtaccc

SEQ ID NO: 1035 - RNA, 21 nt, synthetic construct
  source 1..21: mol_type = other RNA; note = Description of Artificial Sequence: Synthetic oligonucleotide
tgaacctcttgttataaaccc

SEQ ID NO: 1036 - RNA, 21 nt, synthetic construct
  source 1..21: mol_type = other RNA; note = Description of Artificial Sequence: Synthetic oligonucleotide
ccgacaaccagtatttggccc

SEQ ID NO: 1037 - RNA, 21 nt, synthetic construct
  source 1..21: mol_type = other RNA; note = Description of Artificial Sequence: Synthetic oligonucleotide
gcaattcagtctcgttgtgcc

SEQ ID NO: 1038 - RNA, 21 nt, synthetic construct
  source 1..21: mol_type = other RNA; note = Description of Artificial Sequence: Synthetic oligonucleotide
tccaggtttatgaactgagcc

SEQ ID NO: 1039 - RNA, 21 nt, synthetic construct
  source 1..21: mol_type = other RNA; note = Description of Artificial Sequence: Synthetic oligonucleotide
ggtttatgaactgacgttgcc

SEQ ID NO: 1040 - RNA, 21 nt, synthetic construct
  source 1..21: mol_type = other RNA; note = Description of Artificial Sequence: Synthetic oligonucleotide
ccacaatgttgtgactgggcc

SEQ ID NO: 1041 - RNA, 21 nt, synthetic construct
  source 1..21: mol_type = other RNA; note = Description of Artificial Sequence: Synthetic oligonucleotide
gtcacaaagaaccgtgtagcc

SEQ ID NO: 1042 - RNA, 21 nt, synthetic construct
  source 1..21: mol_type = other RNA; note = Description of Artificial Sequence: Synthetic oligonucleotide
tgaacctcttgttataaagcc

SEQ ID NO: 1043 - RNA, 21 nt, synthetic construct
  source 1..21: mol_type = other RNA; note = Description of Artificial Sequence: Synthetic oligonucleotide
ccgacaaccagtatttgggcc

SEQ ID NO: 1044 - RNA, 21 nt, synthetic construct
  source 1..21: mol_type = other RNA; note = Description of Artificial Sequence: Synthetic oligonucleotide
gcaattcagtctcgttgtacc

SEQ ID NO: 1045 - DNA, 21 bp, synthetic construct
  source 1..21: mol_type = other DNA; note = Description of Artificial Sequence: Synthetic oligonucleotide
  misc_feature 1..19: note = RNA
  misc_feature 20..21: note = DNA
gcaattcagtctcgttgtatt

SEQ ID NO: 1046 - RNA, 21 nt, synthetic construct
  source 1..21: mol_type = other RNA; note = Description of Artificial Sequence: Synthetic oligonucleotide
tccaggtttatgaactgaacc

SEQ ID NO: 1047 - DNA, 21 bp, synthetic construct
  source 1..21: mol_type = other DNA; note = Description of Artificial Sequence: Synthetic oligonucleotide
  misc_feature 1..19: note = RNA
  misc_feature 20..21: note = DNA
tccaggtttatgaactgaatt

SEQ ID NO: 1048 - RNA, 21 nt, synthetic construct
  source 1..21: mol_type = other RNA; note = Description of Artificial Sequence: Synthetic oligonucleotide
ggtttatgaactgacgttacc

SEQ ID NO: 1049 - RNA, 21 nt, synthetic construct
  source 1..21: mol_type = other RNA; note = Description of Artificial Sequence: Synthetic oligonucleotide
ccacaatgttgtgactggacc

SEQ ID NO: 1050 - RNA, 21 nt, synthetic construct
  source 1..21: mol_type = other RNA; note = Description of Artificial Sequence: Synthetic oligonucleotide
gtcacaaagaaccgtgtaacc

SEQ ID NO: 1051 - RNA, 21 nt, synthetic construct
  source 1..21: mol_type = other RNA; note = Description of Artificial Sequence: Synthetic oligonucleotide
tgaacctcttgttataaaacc

SEQ ID NO: 1052 - DNA, 21 bp, synthetic construct
  source 1..21: mol_type = other DNA; note = Description of Artificial Sequence: Synthetic oligonucleotide
  misc_feature 1..19: note = RNA
  misc_feature 20..21: note = DNA
tgaacctcttgttataaaatt

SEQ ID NO: 1053 - RNA, 21 nt, synthetic construct
  source 1..21: mol_type = other RNA; note = Description of Artificial Sequence: Synthetic oligonucleotide
ccgacaaccagtatttggacc

SEQ ID NO: 1054 - DNA, 21 bp, synthetic construct
  source 1..21: mol_type = other DNA; note = Description of Artificial Sequence: Synthetic oligonucleotide
  misc_feature 1..19: note = RNA
  misc_feature 20..21: note = DNA
ccgacaaccagtatttggatt

SEQ ID NO: 1055 - RNA, 21 nt, synthetic construct
  source 1..21: mol_type = other RNA; note = Description of Artificial Sequence: Synthetic oligonucleotide
gcaattcagactcgttgtacc

SEQ ID NO: 1056 - RNA, 21 nt, synthetic construct
  source 1..21: mol_type = other RNA; note = Description of Artificial Sequence: Synthetic oligonucleotide
tccaggtttttgaactgaacc

SEQ ID NO: 1057 - RNA, 21 nt, synthetic construct
  source 1..21: mol_type = other RNA; note = Description of Artificial Sequence: Synthetic oligonucleotide
ggtttatgatctgacgttacc

SEQ ID NO: 1058 - RNA, 21 nt, synthetic construct
  source 1..21: mol_type = other RNA; note = Description of Artificial Sequence: Synthetic oligonucleotide
ccacaatgtagtgactggacc

SEQ ID NO: 1059 - RNA, 21 nt, synthetic construct
  source 1..21: mol_type = other RNA; note = Description of Artificial Sequence: Synthetic oligonucleotide
gtcacaaagtaccgtgtaacc

SEQ ID NO: 1060 - RNA, 21 nt, synthetic construct
  source 1..21: mol_type = other RNA; note = Description of Artificial Sequence: Synthetic oligonucleotide
tgaacctctagttataaaacc

SEQ ID NO: 1061 - RNA, 21 nt, synthetic construct
  source 1..21: mol_type = other RNA; note = Description of Artificial Sequence: Synthetic oligonucleotide
ccgacaacctgtatttggacc

SEQ ID NO: 1062 - RNA, 21 nt, synthetic construct
  source 1..21: mol_type = other RNA; note = Description of Artificial Sequence: Synthetic oligonucleotide
cattggaattcctaaaattcc

SEQ ID NO: 1063 - RNA, 21 nt, synthetic construct
  source 1..21: mol_type = other RNA; note = Description of Artificial Sequence: Synthetic oligonucleotide
gatcattggaattcctaatcc

SEQ ID NO: 1064 - RNA, 21 nt, synthetic construct
  source 1..21: mol_type = other RNA; note = Description of Artificial Sequence: Synthetic oligonucleotide
cattggaattcctaaaatgcc

SEQ ID NO: 1065 - RNA, 21 nt, synthetic construct
  source 1..21: mol_type = other RNA; note = Description of Artificial Sequence: Synthetic oligonucleotide
gatcattggaattcctaagcc

SEQ ID NO: 1066 - RNA, 21 nt, synthetic construct
  source 1..21: mol_type = other RNA; note = Description of Artificial Sequence: Synthetic oligonucleotide
cattggaattcctaaaatacc

SEQ ID NO: 1067 - DNA, 21 bp, synthetic construct
  source 1..21: mol_type = other DNA; note = Description of Artificial Sequence: Synthetic oligonucleotide
  misc_feature 1..19: note = RNA
  misc_feature 20..21: note = DNA
cattggaattcctaaaatatt

SEQ ID NO: 1068 - RNA, 21 nt, synthetic construct
  source 1..21: mol_type = other RNA; note = Description of Artificial Sequence: Synthetic oligonucleotide
gatcattggaattcctaaacc

SEQ ID NO: 1069 - DNA, 21 bp, synthetic construct
  source 1..21: mol_type = other DNA; note = Description of Artificial Sequence: Synthetic oligonucleotide
  misc_feature 1..19: note = RNA
  misc_feature 20..21: note = DNA
gatcattggaattcctaaatt

SEQ ID NO: 1070 - RNA, 21 nt, synthetic construct
  source 1..21: mol_type = other RNA; note = Description of Artificial Sequence: Synthetic oligonucleotide
cattggaatacctaaaatacc

SEQ ID NO: 1071 - RNA, 21 nt, synthetic construct
  source 1..21: mol_type = other RNA; note = Description of Artificial Sequence: Synthetic oligonucleotide
gatcattggtattcctaaacc

SEQ ID NO: 1072 - DNA, 21 bp, synthetic construct
  source 1..21: mol_type = other DNA; note = Description of Artificial Sequence: Synthetic oligonucleotide
  misc_feature 1..19: note = RNA
  misc_feature 20..21: note = DNA
gtttatgaactgacgttaatt

SEQ ID NO: 1073 - DNA, 21 bp, synthetic construct
  source 1..21: mol_type = other DNA; note = Description of Artificial Sequence: Synthetic oligonucleotide
  misc_feature 1..19: note = RNA
  misc_feature 20..21: note = DNA
gtgttagacggtaccgacatt

SEQ ID NO: 1074 - DNA, 21 bp, synthetic construct
  source 1..21: mol_type = other DNA; note = Description of Artificial Sequence: Synthetic oligonucleotide
  misc_feature 1..19: note = RNA
  misc_feature 20..21: note = DNA
atatcagtaaagagattaatt

SEQ ID NO: 1075 - DNA, 21 bp, synthetic construct
  source 1..21: mol_type = other DNA; note = Description of Artificial Sequence: Synthetic oligonucleotide
  misc_feature 1..19: note = RNA
  misc_feature 20..21: note = DNA
ggtttatgaactgacgttatt

SEQ ID NO: 1076 - DNA, 21 bp, synthetic construct
  source 1..21: mol_type = other DNA; note = Description of Artificial Sequence: Synthetic oligonucleotide
  misc_feature 1..19: note = RNA
  misc_feature 20..21: note = DNA
ccacaatgttgtgaccggatt

SEQ ID NO: 1077 - DNA, 21 bp, synthetic construct
  source 1..21: mol_type = other DNA; note = Description of Artificial Sequence: Synthetic oligonucleotide
  misc_feature 1..19: note = RNA
  misc_feature 20..21: note = DNA
gtcacaaagaaccgtgcaatt

SEQ ID NO: 1078 - DNA, 21 bp, synthetic construct
  source 1..21: mol_type = other DNA; note = Description of Artificial Sequence: Synthetic oligonucleotide
  misc_feature 1..19: note = RNA
  misc_feature 20..21: note = DNA
cattggaattcctaaaatctt

SEQ ID NO: 1079 - RNA, 21 nt, synthetic construct
  source 1..21: mol_type = other RNA; note = Description of Artificial Sequence: Synthetic oligonucleotide
cctgctagctccatgcttgct

SEQ ID NO: 1080 - RNA, 21 nt, synthetic construct
  source 1..21: mol_type = other RNA; note = Description of Artificial Sequence: Synthetic oligonucleotide
cctgctagctccatgcttgat

SEQ ID NO: 1081 - RNA, 21 nt, synthetic construct
  source 1..21: mol_type = other RNA; note = Description of Artificial Sequence: Synthetic oligonucleotide
cctgctagctccatgcttatt

SEQ ID NO: 1082 - RNA, 21 nt, synthetic construct
  source 1..21: mol_type = other RNA; note = Description of Artificial Sequence: Synthetic oligonucleotide
cctgctagctccatgcttgtt

SEQ ID NO: 1083 - RNA, 20 nt, synthetic construct
  source 1..20: mol_type = other RNA; note = Description of Artificial Sequence: Synthetic oligonucleotide
ttcgagtccctcaagtagct

SEQ ID NO: 1084 - RNA, 22 nt, synthetic construct
  source 1..22: mol_type = other RNA; note = Description of Artificial Sequence: Synthetic oligonucleotide
ttcgagtccctcaagtagcttt

SEQ ID NO: 1085 - RNA, 22 nt, synthetic construct
  source 1..22: mol_type = other RNA; note = Description of Artificial Sequence: Synthetic oligonucleotide
tcgagtccctcaagtccattct

SEQ ID NO: 1086 - RNA, 21 nt, synthetic construct
  source 1..21: mol_type = other RNA; note = Description of Artificial Sequence: Synthetic oligonucleotide
ttccagtccatcaagtcaatt

SEQ ID NO: 1087 - RNA, 22 nt, synthetic construct
  source 1..22: mol_type = other RNA; note = Description of Artificial Sequence: Synthetic oligonucleotide
ttccgagtctaaaagtccttgg

SEQ ID NO: 1088 - RNA, 23 nt, synthetic construct
  source 1..23: mol_type = other RNA; note = Description of Artificial Sequence: Synthetic oligonucleotide
ttccgagtctaaaagtccttggc

SEQ ID NO: 1089 - RNA, 23 nt, synthetic construct
  source 1..23: mol_type = other RNA; note = Description of Artificial Sequence: Synthetic oligonucleotide
cttccgagtctaaaagtccttgg

SEQ ID NO: 1090 - RNA, 23 nt, synthetic construct
  source 1..23: mol_type = other RNA; note = Description of Artificial Sequence: Synthetic oligonucleotide
ttccgagtctaaaagtccttggt

SEQ ID NO: 1091 - RNA, 24 nt, synthetic construct
  source 1..24: mol_type = other RNA; note = Description of Artificial Sequence: Synthetic oligonucleotide
ttccgagtctaaaagtccttggct

SEQ ID NO: 1092 - RNA, 23 nt, synthetic construct
  source 1..23: mol_type = other RNA; note = Description of Artificial Sequence: Synthetic oligonucleotide
tccaatgtgaaacttcatcggct

SEQ ID NO: 1093 - RNA, 22 nt, synthetic construct
  source 1..22: mol_type = other RNA; note = Description of Artificial Sequence: Synthetic oligonucleotide
tccaatgtgaaacttcatcggc

SEQ ID NO: 1094 - RNA, 22 nt, synthetic construct
  source 1..22: mol_type = other RNA; note = Description of Artificial Sequence: Synthetic oligonucleotide
atccaatgtgaaacttcatcgt

SEQ ID NO: 1095 - RNA, 23 nt, synthetic construct
  source 1..23: mol_type = other RNA; note = Description of Artificial Sequence: Synthetic oligonucleotide
atccaatgtgaaacttcatcggt

SEQ ID NO: 1096 - RNA, 22 nt, synthetic construct
  source 1..22: mol_type = other RNA; note = Description of Artificial Sequence: Synthetic oligonucleotide
tccaatgtgaaacttcatcggt

SEQ ID NO: 1097 - RNA, 24 nt, synthetic construct
  source 1..24: mol_type = other RNA; note = Description of Artificial Sequence: Synthetic oligonucleotide
tccaatgtgaaacttcatcggctt

SEQ ID NO: 1098 - RNA, 22 nt, synthetic construct
  source 1..22: mol_type = other RNA; note = Description of Artificial Sequence: Synthetic oligonucleotide
atctactgtgaaaattcatcgg

SEQ ID NO: 1099 - RNA, 21 nt, synthetic construct
  source 1..21: mol_type = other RNA; note = Description of Artificial Sequence: Synthetic oligonucleotide
tctactgtgaaaattcatcgg

SEQ ID NO: 1100 - RNA, 22 nt, synthetic construct
  source 1..22: mol_type = other RNA; note = Description of Artificial Sequence: Synthetic oligonucleotide
tctactgtgaaaattcatcggc

SEQ ID NO: 1101 - RNA, 23 nt, synthetic construct
  source 1..23: mol_type = other RNA; note = Description of Artificial Sequence: Synthetic oligonucleotide
atctactgtgaaaattcatcggt

SEQ ID NO: 1102 - RNA, 22 nt, synthetic construct
  source 1..22: mol_type = other RNA; note = Description of Artificial Sequence: Synthetic oligonucleotide
tctactgtgaaaattcatcggt

SEQ ID NO: 1103 - RNA, 23 nt, synthetic construct
  source 1..23: mol_type = other RNA; note = Description of Artificial Sequence: Synthetic oligonucleotide
tctactgtgaaaattcatcggct

SEQ ID NO: 1104 - RNA, 22 nt, synthetic construct
  source 1..22: mol_type = other RNA; note = Description of Artificial Sequence: Synthetic oligonucleotide
ccttcggtcctcaagtccttca

SEQ ID NO: 1105 - RNA, 24 nt, synthetic construct
  source 1..24: mol_type = other RNA; note = Description of Artificial Sequence: Synthetic oligonucleotide
ttcgagtccatcaaatcctatagt

SEQ ID NO: 1106 - RNA, 21 nt, synthetic construct
  source 1..21: mol_type = other RNA; note = Description of Artificial Sequence: Synthetic oligonucleotide
tacaatgtgtgcacttcatat

SEQ ID NO: 1107 - RNA, 23 nt, synthetic construct
  source 1..23: mol_type = other RNA; note = Description of Artificial Sequence: Synthetic oligonucleotide
tatactgtgtgcaattcatttct

SEQ ID NO: 1108 - RNA, 20 nt, synthetic construct
  source 1..20: mol_type = other RNA; note = Description of Artificial Sequence: Synthetic oligonucleotide
gcaattcagtctcgttgtcc

SEQ ID NO: 1109 - RNA, 19 nt, synthetic construct
  source 1..19: mol_type = other RNA; note = Description of Artificial Sequence: Synthetic oligonucleotide
gcaattcagtctcgttgtc

SEQ ID NO: 1110 - RNA, 20 nt, synthetic construct
  source 1..20: mol_type = other RNA; note = Description of Artificial Sequence: Synthetic oligonucleotide
caattcagtctcgttgtccc

SEQ ID NO: 1111 - RNA, 19 nt, Homo sapiens
  source 1..19: mol_type = unassigned RNA
caattcagtctcgttgtcc

SEQ ID NO: 1112 - RNA, 20 nt, synthetic construct
  source 1..20: mol_type = other RNA; note = Description of Artificial Sequence: Synthetic oligonucleotide
gcaattcagtctcgttgtgc

SEQ ID NO: 1113 - RNA, 20 nt, synthetic construct
  source 1..20: mol_type = other RNA; note = Description of Artificial Sequence: Synthetic oligonucleotide
caattcagtctcgttgtgcc

SEQ ID NO: 1114 - RNA, 22 nt, synthetic construct
  source 1..22: mol_type = other RNA; note = Description of Artificial Sequence: Synthetic oligonucleotide
ccacaatgttgtgactgggcct

SEQ ID NO: 1115 - RNA, 20 nt, synthetic construct
  source 1..20: mol_type = other RNA; note = Description of Artificial Sequence: Synthetic oligonucleotide
ccacaatgttgtgactgggc

SEQ ID NO: 1116 - RNA, 20 nt, synthetic construct
  source 1..20: mol_type = other RNA; note = Description of Artificial Sequence: Synthetic oligonucleotide
cacaatgttgtgactgggcc

SEQ ID NO: 1117 - RNA, 22 nt, synthetic construct
  source 1..22: mol_type = other RNA; note = Description of Artificial Sequence: Synthetic oligonucleotide
tgaacctcttgttataaagcct

SEQ ID NO: 1118 - RNA, 20 nt, synthetic construct
  source 1..20: mol_type = other RNA; note = Description of Artificial Sequence: Synthetic oligonucleotide
tgaacctcttgttataaagc

SEQ ID NO: 1119 - RNA, 20 nt, synthetic construct
  source 1..20: mol_type = other RNA; note = Description of Artificial Sequence: Synthetic oligonucleotide
gaacctcttgttataaagcc

SEQ ID NO: 1120 - RNA, 22 nt, synthetic construct
  source 1..22: mol_type = other RNA; note = Description of Artificial Sequence: Synthetic oligonucleotide
cctgctagctccatgcttgcct

SEQ ID NO: 1121 - RNA, 20 nt, synthetic construct
  source 1..20: mol_type = other RNA; note = Description of Artificial Sequence: Synthetic oligonucleotide
cctgctagctccatgcttgc

SEQ ID NO: 1122 - RNA, 19 nt, synthetic construct
  source 1..19: mol_type = other RNA; note = Description of Artificial Sequence: Synthetic oligonucleotide
cctgctagctccatgcttg

SEQ ID NO: 1123 - RNA, 20 nt, synthetic construct
  source 1..20: mol_type = other RNA; note = Description of Artificial Sequence: Synthetic oligonucleotide
ctgctagctccatgcttgcc

SEQ ID NO: 1124 - RNA, 22 nt, synthetic construct
  source 1..22: mol_type = other RNA; note = Description of Artificial Sequence: Synthetic oligonucleotide
ccgacaaccagtatttgggcct

SEQ ID NO: 1125 - RNA, 20 nt, synthetic construct
  source 1..20: mol_type = other RNA; note = Description of Artificial Sequence: Synthetic oligonucleotide
ccgacaaccagtatttgggc

SEQ ID NO: 1126 - RNA, 19 nt, synthetic construct
  source 1..19: mol_type = other RNA; note = Description of Artificial Sequence: Synthetic oligonucleotide
ccgacaaccagtatttggg

SEQ ID NO: 1127 - RNA, 20 nt, synthetic construct
  source 1..20: mol_type = other RNA; note = Description of Artificial Sequence: Synthetic oligonucleotide
cgacaaccagtatttgggcc

SEQ ID NO: 1128 - RNA, 19 nt, synthetic construct
  source 1..19: mol_type = other RNA; note = Description of Artificial Sequence: Synthetic oligonucleotide
cgacaaccagtatttgggc

SEQ ID NO: 1129 - RNA, 22 nt, synthetic construct
  source 1..22: mol_type = other RNA; note = Description of Artificial Sequence: Synthetic oligonucleotide
gcaattcagtctcgttgtacct

SEQ ID NO: 1130 - RNA, 20 nt, synthetic construct
  source 1..20: mol_type = other RNA; note = Description of Artificial Sequence: Synthetic oligonucleotide
gcaattcagtctcgttgtac

SEQ ID NO: 1131 - RNA, 19 nt, synthetic construct
  source 1..19: mol_type = other RNA; note = Description of Artificial Sequence: Synthetic oligonucleotide
gcaattcagtctcgttgta

SEQ ID NO: 1132 - RNA, 20 nt, synthetic construct
  source 1..20: mol_type = other RNA; note = Description of Artificial Sequence: Synthetic oligonucleotide
caattcagtctcgttgtacc

SEQ ID NO: 1133 - RNA, 22 nt, synthetic construct
  source 1..22: mol_type = other RNA; note = Description of Artificial Sequence: Synthetic oligonucleotide
gcaattcagactcgttgtacct

SEQ ID NO: 1134 - RNA, 20 nt, synthetic construct
  source 1..20: mol_type = other RNA; note = Description of Artificial Sequence: Synthetic oligonucleotide
gcaattcagactcgttgtac

SEQ ID NO: 1135 - RNA, 19 nt, synthetic construct
  source 1..19: mol_type = other RNA; note = Description of Artificial Sequence: Synthetic oligonucleotide
gcaattcagactcgttgta

SEQ ID NO: 1136 - RNA, 20 nt, synthetic construct
  source 1..20: mol_type = other RNA; note = Description of Artificial Sequence: Synthetic oligonucleotide
caattcagactcgttgtacc

SEQ ID NO: 1137 - RNA, 22 nt, synthetic construct
  source 1..22: mol_type = other RNA; note = Description of Artificial Sequence: Synthetic oligonucleotide
agcaattcagtctcgttgtacc

SEQ ID NO: 1138 - RNA, 21 nt, synthetic construct
  source 1..21: mol_type = other RNA; note = Description of Artificial Sequence: Synthetic oligonucleotide
agcaattcagtctcgttgtac

SEQ ID NO: 1139 - RNA, 21 nt, synthetic construct
  source 1..21: mol_type = other RNA; note = Description of Artificial Sequence: Synthetic oligonucleotide
aggtttatgaactgacgttac

SEQ ID NO: 1140 - RNA, 22 nt, synthetic construct
  source 1..22: mol_type = other RNA; note = Description of Artificial Sequence: Synthetic oligonucleotide
aggtttatgaactgacgttacc

SEQ ID NO: 1141 - RNA, 21 nt, synthetic construct
  source 1..21: mol_type = other RNA; note = Description of Artificial Sequence: Synthetic oligonucleotide
accacaatgttgtgactggac

SEQ ID NO: 1142 - RNA, 22 nt, synthetic construct
  source 1..22: mol_type = other RNA; note = Description of Artificial Sequence: Synthetic oligonucleotide
accacaatgttgtgactggacc

SEQ ID NO: 1143 - RNA, 23 nt, synthetic construct
  source 1..23: mol_type = other RNA; note = Description of Artificial Sequence: Synthetic oligonucleotide
ccacaatgttgtgactggaccgt

SEQ ID NO: 1144 - RNA, 22 nt, synthetic construct
  source 1..22: mol_type = other RNA; note = Description of Artificial Sequence: Synthetic oligonucleotide
ccacaatgttgtgactggaccg

SEQ ID NO: 1145 - RNA, 20 nt, synthetic construct
  source 1..20: mol_type = other RNA; note = Description of Artificial Sequence: Synthetic oligonucleotide
ccacaatgttgtgactggac

SEQ ID NO: 1146 - RNA, 20 nt, synthetic construct
  source 1..20: mol_type = other RNA; note = Description of Artificial Sequence: Synthetic oligonucleotide
cacaatgttgtgactggacc

SEQ ID NO: 1147 - RNA, 22 nt, synthetic construct
  source 1..22: mol_type = other RNA; note = Description of Artificial Sequence: Synthetic oligonucleotide
acctgctagctccatgcttccc

SEQ ID NO: 1148 - RNA, 21 nt, synthetic construct
  source 1..21: mol_type = other RNA; note = Description of Artificial Sequence: Synthetic oligonucleotide
acctgctagctccatgcttcc

SEQ ID NO: 1149 - RNA, 20 nt, synthetic construct
  source 1..20: mol_type = other RNA; note = Description of Artificial Sequence: Synthetic oligonucleotide
acctgctagctccatgcttc

SEQ ID NO: 1150 - RNA, 20 nt, synthetic construct
  source 1..20: mol_type = other RNA; note = Description of Artificial Sequence: Synthetic oligonucleotide
cctgctagctccatgcttcc

SEQ ID NO: 1151 - RNA, 19 nt, synthetic construct
  source 1..19: mol_type = other RNA; note = Description of Artificial Sequence: Synthetic oligonucleotide
cctgctagctccatgcttc

SEQ ID NO: 1152 - RNA, 20 nt, synthetic construct
  source 1..20: mol_type = other RNA; note = Description of Artificial Sequence: Synthetic oligonucleotide
ctgctagctccatgcttccc

SEQ ID NO: 1153 - RNA, 19 nt, synthetic construct
  source 1..19: mol_type = other RNA; note = Description of Artificial Sequence: Synthetic oligonucleotide
ctgctagctccatgcttcc

SEQ ID NO: 1154 - RNA, 22 nt, synthetic construct
  source 1..22: mol_type = other RNA; note = Description of Artificial Sequence: Synthetic oligonucleotide
accgacaaccagtatttggacc

SEQ ID NO: 1155 - RNA, 21 nt, synthetic construct
  source 1..21: mol_type = other RNA; note = Description of Artificial Sequence: Synthetic oligonucleotide
accgacaaccagtatttggac

SEQ ID NO: 1156 - RNA, 23 nt, synthetic construct
  source 1..23: mol_type = other RNA; note = Description of Artificial Sequence: Synthetic oligonucleotide
ccgacaaccagtatttggaccgt

SEQ ID NO: 1157 - RNA, 23 nt, synthetic construct
  source 1..23: mol_type = other RNA; note = Description of Artificial Sequence: Synthetic oligonucleotide
ccgacaaccagtatttggaccgt

SEQ ID NO: 1158 - RNA, 20 nt, synthetic construct
  source 1..20: mol_type = other RNA; note = Description of Artificial Sequence: Synthetic oligonucleotide
ccgacaaccagtatttggac

SEQ ID NO: 1159 - RNA, 20 nt, synthetic construct
  source 1..20: mol_type = other RNA; note = Description of Artificial Sequence: Synthetic oligonucleotide
cgacaaccagtatttggacc

SEQ ID NO: 1160 - RNA, 21 nt, synthetic construct
  source 1..21: mol_type = other RNA; note = Description of Artificial Sequence: Synthetic oligonucleotide
cctgctagcaccgtgcttacc

SEQ ID NO: 1161 - DNA, 54 bp, synthetic construct
  source 1..54: mol_type = other DNA; note = Description of Artificial Sequence: Synthetic oligonucleotide
gtgctgggcggggggcggcgggccctcccgcagaacaccatgcgctcttcggaa

SEQ ID NO: 1162 - DNA, 100 bp, synthetic construct
  source 1..100: mol_type = other DNA; note = Description of Artificial Sequence: Synthetic oligonucleotide
gaagcaaagaaggggcagagggagcccgtgagctgagtgggccagggactgggagaaggagtgaggaggcagggccggcatgcctctgctgctggccaga

SEQ ID NO: 1163 - DNA, 54 bp, synthetic construct
  source 1..54: mol_type = other DNA; note = Description of Artificial Sequence: Synthetic oligonucleotide
gtgctgggcggggggcggcgggccctcccgcagaacaccatgcgctccacggaa

SEQ ID NO: 1164 - DNA, 35 bp, synthetic construct
  source 1..35: mol_type = other DNA; note = Description of Artificial Sequence: Synthetic oligonucleotide
gggccctcccgcagaacaccatgcgctccacggaa

SEQ ID NO: 1165 - DNA, 30 bp, synthetic construct
  source 1..30: mol_type = other DNA; note = Description of Artificial Sequence: Synthetic oligonucleotide
ctcccgcagaacaccatgcgctccacggaa

SEQ ID NO: 1166 - DNA, 55 bp, synthetic construct
  source 1..55: mol_type = other DNA; note = Description of Artificial Sequence: Synthetic oligonucleotide
gtgctgggcggggggcggcgggccctcccgcagaacaccatgcgctccacggaag

SEQ ID NO: 1167 - DNA, 54 bp, synthetic construct
  source 1..54: mol_type = other DNA; note = Description of Artificial Sequence: Synthetic oligonucleotide
gtgctgggcggggggcggcgggccctcccgcagaacaccatgcgctcctcggaa

SEQ ID NO: 1168 - DNA, 10 bp, synthetic construct
  source 1..10: mol_type = other DNA; note = Description of Artificial Sequence: Synthetic oligonucleotide
tgtgacctgg

SEQ ID NO: 1169 - DNA, 10 bp, synthetic construct
  source 1..10: mol_type = other DNA; note = Description of Artificial Sequence: Synthetic oligonucleotide
tgtgatttgg

SEQ ID NO: 1170 - DNA, 18 bp, synthetic construct
  source 1..18: mol_type = other DNA; note = Description of Artificial Sequence: Synthetic oligonucleotide
gtctgcacctgtcactag

SEQ ID NO: 1171 - DNA, 10 bp, synthetic construct
  source 1..10: mol_type = other DNA; note = Description of Artificial Sequence: Synthetic oligonucleotide
gtgacccaag

SEQ ID NO: 1172 - DNA, 15 bp, synthetic construct
  source 1..15: mol_type = other DNA; note = Description of Artificial Sequence: Synthetic oligonucleotide
gtggccactgagaag

SEQ ID NO: 1173 - DNA, 10 bp, synthetic construct
  source 1..10: mol_type = other DNA; note = Description of Artificial Sequence: Synthetic oligonucleotide
gtgacccaat

SEQ ID NO: 1174 - DNA, 10 bp, synthetic construct
  source 1..10: mol_type = other DNA; note = Description of Artificial Sequence: Synthetic oligonucleotide
gtgacccaac

SEQ ID NO: 1175 - DNA, 15 bp, synthetic construct
  source 1..15: mol_type = other DNA; note = Description of Artificial Sequence: Synthetic oligonucleotide
gtggccactgagaaa

SEQ ID NO: 1176 - protein, 7 aa, synthetic construct
  source 1..7: note = Description of Artificial Sequence: Synthetic polypeptide
QAVRTSL

SEQ ID NO: 1177 - protein, 7 aa, synthetic construct
  source 1..7: note = Description of Artificial Sequence: Synthetic polypeptide
LAKERLS

SEQ ID NO: 1178 - DNA, 52 bp, synthetic construct
  source 1..52: mol_type = other DNA; note = Description of Artificial Sequence: Synthetic oligonucleotide
ctgaggagcgccttgacagcagccatgggagggccgccccctacctcagtga

SEQ ID NO: 1179 - DNA, 52 bp, synthetic construct
  source 1..52: mol_type = other DNA; note = Description of Artificial Sequence: Synthetic oligonucleotide
ctgtggagcgccttgacagcagccatgggagggccgccccctacctcagtga

SEQ ID NO: 1180 - DNA, 100 bp, synthetic construct
  source 1..100: mol_type = other DNA; note = Description of Artificial Sequence: Synthetic oligonucleotide
tggccgtgtagtgctacccagcgctggctgcctcctcagcattgcaattcctctcccatctgggcaccagtcagctaccctggtgggaatctgggtagcc

SEQ ID NO: 1181 - DNA, 35 bp, synthetic construct
  source 1..35: mol_type = other DNA; note = Description of Artificial Sequence: Synthetic oligonucleotide
ctgaggagcgccttgacagcagccatgggagggcc

SEQ ID NO: 1182 - DNA, 52 bp, synthetic construct
  source 1..52: mol_type = other DNA; note = Description of Artificial Sequence: Synthetic oligonucleotide
ctgcggagcgccttgacagcagccatgggagggccgccccctacctcagtga

SEQ ID NO: 1183 - DNA, 158 bp, synthetic construct
  source 1..158: mol_type = other DNA; note = Description of Artificial Sequence: Synthetic oligonucleotide
gtgctgggcggggggcggcgggccctcccgcagaacaccatgcgctcttcggaatccaggtttatgaactgaccctgtgacctggttcagttcataaacctggattctgaggagcgccttgacagcagccatgggagggccgccccctacctcagtga

SEQ ID NO: 1184 - DNA, 158 bp, synthetic construct
  source 1..158: mol_type = other DNA; note = Description of Artificial Sequence: Synthetic oligonucleotide
gtgctgggcggggggcggcgggccctcccgcagaacaccatgcgctcttcggaatccaggtttatgaactgagcctgtgacctggttcagttcataaacctggattctgaggagcgccttgacagcagccatgggagggccgccccctacctcagtga

SEQ ID NO: 1185 - DNA, 158 bp, synthetic construct
  source 1..158: mol_type = other DNA; note = Description of Artificial Sequence: Synthetic oligonucleotide
gtgctgggcggggggcggcgggccctcccgcagaacaccatgcgctcttcggaatccaggtttatgaactgaacctgtgatttggttcagttcataaacctggattctgaggagcgccttgacagcagccatgggagggccgccccctacctcagtga

SEQ ID NO: 1186 - DNA, 158 bp, synthetic construct
  source 1..158: mol_type = other DNA; note = Description of Artificial Sequence: Synthetic oligonucleotide
gtgctgggcggggggcggcgggccctcccgcagaacaccatgcgctcttcggaatccaggtttttgaactgaacctgtgacctggttcagttcataaacctggattctgtggagcgccttgacagcagccatgggagggccgccccctacctcagtga

SEQ ID NO: 1187 - DNA, 158 bp, synthetic construct
  source 1..158: mol_type = other DNA; note = Description of Artificial Sequence: Synthetic oligonucleotide
gtgctgggcggggggcggcgggccctcccgcagaacaccatgcgctcttcggaatccaggtttatgaactgaacctgtgacctggttcagttcataaacctggattctgtggagcgccttgacagcagccatgggagggccgccccctacctcagtga

SEQ ID NO: 1188 - DNA, 260 bp, synthetic construct
  source 1..260: mol_type = other DNA; note = Description of Artificial Sequence: Synthetic oligonucleotide
gaagcaaagaaggggcagagggagcccgtgagctgagtgggccagggactgggagaaggagtgaggaggcagggccggcatgcctctgctgctggccagatccaggtttatgaactgaaccgtctgcacctgtcactagtgtcggtaccgtctaacactttggccgtgtagtgctacccagcgctggctgcctcctcagcattgcaattcctctcccatctgggcaccagtcagctaccctggtgggaatctgggtagcc

SEQ ID NO: 1189 - DNA, 158 bp, synthetic construct
  source 1..158: mol_type = other DNA; note = Description of Artificial Sequence: Synthetic oligonucleotide
gtgctgggcggggggcggcgggccctcccgcagaacaccatgcgctcttcggaaggtttatgaactgacgttccctgtgacctggtaacgtcagttcataaaccttctgaggagcgccttgacagcagccatgggagggccgccccctacctcagtga

SEQ ID NO: 1190 - DNA, 158 bp, synthetic construct
  source 1..158: mol_type = other DNA; note = Description of Artificial Sequence: Synthetic oligonucleotide
gtgctgggcggggggcggcgggccctcccgcagaacaccatgcgctcttcggaaggtttatgaactgacgttgcctgtgacctggtaacgtcagttcataaaccttctgaggagcgccttgacagcagccatgggagggccgccccctacctcagtga

SEQ ID NO: 1191 - DNA, 158 bp, synthetic construct
  source 1..158: mol_type = other DNA; note = Description of Artificial Sequence: Synthetic oligonucleotide
gtgctgggcggggggcggcgggccctcccgcagaacaccatgcgctcttcggaaggtttatgaactgacgttacctgtgatttggtaacgtcagttcataaaccttctgaggagcgccttgacagcagccatgggagggccgccccctacctcagtga

SEQ ID NO: 1192 - DNA, 158 bp, synthetic construct
  source 1..158: mol_type = other DNA; note = Description of Artificial Sequence: Synthetic oligonucleotide
gtgctgggcggggggcggcgggccctcccgcagaacaccatgcgctcttcggaaggtttatgatctgacgttacctgtgacctggtaacgtcagttcataaaccttctgtggagcgccttgacagcagccatgggagggccgccccctacctcagtga

SEQ ID NO: 1193 - DNA, 158 bp, synthetic construct
  source 1..158: mol_type = other DNA; note = Description of Artificial Sequence: Synthetic oligonucleotide
gtgctgggcggggggcggcgggccctcccgcagaacaccatgcgctcttcggaaggtttatgaactgacgttacctgtgacctggtaacgtcagttcataaaccttctgtggagcgccttgacagcagccatgggagggccgccccctacctcagtga

SEQ ID NO: 1194 - DNA, 260 bp, synthetic construct
  source 1..260: mol_type = other DNA; note = Description of Artificial Sequence: Synthetic oligonucleotide
gaagcaaagaaggggcagagggagcccgtgagctgagtgggccagggactgggagaaggagtgaggaggcagggccggcatgcctctgctgctggccagaggtttatgaactgacgttaccgtctgcacctgtcactagtaacgtcagttcataaacctttggccgtgtagtgctacccagcgctggctgcctcctcagcattgcaattcctctcccatctgggcaccagtcagctaccctggtgggaatctgggtagcc

SEQ ID NO: 1195 - DNA, 158 bp, synthetic construct
  source 1..158: mol_type = other DNA; note = Description of Artificial Sequence: Synthetic oligonucleotide
gtgctgggcggggggcggcgggccctcccgcagaacaccatgcgctcttcggaagtttatgaactgatcttaccctgtgacctggttaacgtcagttcataaacttctgaggagcgccttgacagcagccatgggagggccgccccctacctcagtga

SEQ ID NO: 1196 - DNA, 158 bp, synthetic construct
  source 1..158: mol_type = other DNA; note = Description of Artificial Sequence: Synthetic oligonucleotide
gtgctgggcggggggcggcgggccctcccgcagaacaccatgcgctcttcggaagtttatgaactgatcttagcctgtgacctggttaacgtcagttcataaacttctgaggagcgccttgacagcagccatgggagggccgccccctacctcagtga

SEQ ID NO: 1197 - DNA, 158 bp, synthetic construct
  source 1..158: mol_type = other DNA; note = Description of Artificial Sequence: Synthetic oligonucleotide
gtgctgggcggggggcggcgggccctcccgcagaacaccatgcgctcttcggaagtttatgaactgatcttaccctgtgatttggttaacgtcagttcataaacttctgaggagcgccttgacagcagccatgggagggccgccccctacctcagtga

SEQ ID NO: 1198 - DNA, 158 bp, synthetic construct
  source 1..158: mol_type = other DNA; note = Description of Artificial Sequence: Synthetic oligonucleotide
gtgctgggcggggggcggcgggccctcccgcagaacaccatgcgctcttcggaagtttatgaagtgatcttaacctgtgacctggttaacgtcagttcataaacttctgtggagcgccttgacagcagccatgggagggccgccccctacctcagtga

SEQ ID NO: 1199 - DNA, 158 bp, synthetic construct
  source 1..158: mol_type = other DNA; note = Description of Artificial Sequence: Synthetic oligonucleotide
gtgctgggcggggggcggcgggccctcccgcagaacaccatgcgctcttcggaagtttatgaactgatcttaacctgtgacctggttaacgtcagttcataaacttctgtggagcgccttgacagcagccatgggagggccgccccctacctcagtga

SEQ ID NO: 1200 - DNA, 260 bp, synthetic construct
  source 1..260: mol_type = other DNA; note = Description of Artificial Sequence: Synthetic oligonucleotide
gaagcaaagaaggggcagagggagcccgtgagctgagtgggccagggactgggagaaggagtgaggaggcagggccggcatgcctctgctgctggccagagtttatgaactgatcttacccgtctgcacctgtcactagttaacgtcagttcataaactttggccgtgtagtgctacccagcgctggctgcctcctcagcattgcaattcctctcccatctgggcaccagtcagctaccctggtgggaatctgggtagcc

SEQ ID NO: 1201 - DNA, 158 bp, synthetic construct
  source 1..158: mol_type = other DNA; note = Description of Artificial Sequence: Synthetic oligonucleotide
gtgctgggcggggggcggcgggccctcccgcagaacaccatgcgctcttcggaagtttatgaactgatcttgccctgtgacctggttaacgtcagttcataaacttctgaggagcgccttgacagcagccatgggagggccgccccctacctcagtga

SEQ ID NO: 1202 - DNA, 158 bp, synthetic construct
  source 1..158: mol_type = other DNA; note = Description of Artificial Sequence: Synthetic oligonucleotide
gtgctgggcggggggcggcgggccctcccgcagaacaccatgcgctcttcggaagtttatgaactgatcttggcctgtgacctggttaacgtcagttcataaacttctgaggagcgccttgacagcagccatgggagggccgccccctacctcagtga

SEQ ID NO: 1203 - DNA, 158 bp, synthetic construct
  source 1..158: mol_type = other DNA; note = Description of Artificial Sequence: Synthetic oligonucleotide
gtgctgggcggggggcggcgggccctcccgcagaacaccatgcgctcttcggaagtttatgaactgatcttgccctgtgatttggttaacgtcagttcataaacttctgaggagcgccttgacagcagccatgggagggccgccccctacctcagtga

SEQ ID NO: 1204 - DNA, 158 bp, synthetic construct
  source 1..158: mol_type = other DNA; note = Description of Artificial Sequence: Synthetic oligonucleotide
gtgctgggcggggggcggcgggccctcccgcagaacaccatgcgctcttcggaagtttatgaactgatcttgacctgtgacctggttaacgtcagttcataaacttctgtggagcgccttgacagcagccatgggagggccgccccctacctcagtga

SEQ ID NO: 1205 - DNA, 260 bp, synthetic construct
  source 1..260: mol_type = other DNA; note = Description of Artificial Sequence: Synthetic oligonucleotide
gaagcaaagaaggggcagagggagcccgtgagctgagtgggccagggactgggagaaggagtgaggaggcagggccggcatgcctctgctgctggccagagtttatgaactgatcttgcccgtctgcacctgtcactagttaacgtcagttcataaactttggccgtgtagtgctacccagcgctggctgcctcctcagcattgcaattcctctcccatctgggcaccagtcagctaccctggtgggaatctgggtagcc

SEQ ID NO: 1206 - DNA, 158 bp, synthetic construct
  source 1..158: mol_type = other DNA; note = Description of Artificial Sequence: Synthetic oligonucleotide
gtgctgggcggggggcggcgggccctcccgcagaacaccatgcgctcttcggaaccacaatgttgtgactggccctgtgacctggtccggtcacaacattgtggttctgaggagcgccttgacagcagccatgggagggccgccccctacctcagtga

SEQ ID NO: 1207 - DNA, 158 bp, synthetic construct
  source 1..158: mol_type = other DNA; note = Description of Artificial Sequence: Synthetic oligonucleotide
gtgctgggcggggggcggcgggccctcccgcagaacaccatgcgctcttcggaaccacaatgttgtgactgggcctgtgacctggtccggtcacaacattgtggttctgaggagcgccttgacagcagccatgggagggccgccccctacctcagtga

SEQ ID NO: 1208 - DNA, 158 bp, synthetic construct
  source 1..158: mol_type = other DNA; note = Description of Artificial Sequence: Synthetic oligonucleotide
gtgctgggcggggggcggcgggccctcccgcagaacaccatgcgctcttcggaaccacaatgttgtgactggacctgtgatttggtccggtcacaacattgtggttctgaggagcgccttgacagcagccatgggagggccgccccctacctcagtga

SEQ ID NO: 1209 - DNA, 158 bp, synthetic construct
  source 1..158: mol_type = other DNA; note = Description of Artificial Sequence: Synthetic oligonucleotide
gtgctgggcggggggcggcgggccctcccgcagaacaccatgcgctcttcggaaccacaatgtagtgactggacctgtgacctggtccggtcacaacattgtggttctgtggagcgccttgacagcagccatgggagggccgccccctacctcagtga

SEQ ID NO: 1210 - DNA, 158 bp, synthetic construct
  source 1..158: mol_type = other DNA; note = Description of Artificial Sequence: Synthetic oligonucleotide
gtgctgggcggggggcggcgggccctcccgcagaacaccatgcgctcttcggaaccacaatgttgtgactggacctgtgacctggtccggtcacaacattgtggttctgtggagcgccttgacagcagccatgggagggccgccccctacctcagtga

SEQ ID NO: 1211 - DNA, 260 bp, synthetic construct
  source 1..260: mol_type = other DNA; note = Description of Artificial Sequence: Synthetic oligonucleotide
gaagcaaagaaggggcagagggagcccgtgagctgagtgggccagggactgggagaaggagtgaggaggcagggccggcatgcctctgctgctggccagaccacaatgttgtgactggaccgtctgcacctgtcactagtccggtcacaacattgtggtttggccgtgtagtgctacccagcgctggctgcctcctcagcattgcaattcctctcccatctgggcaccagtcagctaccctggtgggaatctgggtagcc

SEQ ID NO: 1212 - DNA, 158 bp, synthetic construct
  source 1..158: mol_type = other DNA; note = Description of Artificial Sequence: Synthetic oligonucleotide
gtgctgggcggggggcggcgggccctcccgcagaacaccatgcgctcttcggaagtgttagacggtactgatccctgtgacctggtgtcggtaccgtctaacacttctgaggagcgccttgacagcagccatgggagggccgccccctacctcagtga

SEQ ID NO: 1213 - DNA, 158 bp, synthetic construct
  source 1..158: mol_type = other DNA; note = Description of Artificial Sequence: Synthetic oligonucleotide
gtgctgggcggggggcggcgggccctcccgcagaacaccatgcgctcttcggaagtgttagacggtactgatgcctgtgacctggtgtcggtaccgtctaacacttctgaggagcgccttgacagcagccatgggagggccgccccctacctcagtga

SEQ ID NO: 1214 - DNA, 158 bp, synthetic construct
  source 1..158: mol_type = other DNA; note = Description of Artificial Sequence: Synthetic oligonucleotide
gtgctgggcggggggcggcgggccctcccgcagaacaccatgcgctcttcggaagtgttagacggtactgatccctgtgatttggtgtcggtaccgtctaacacttctgaggagcgccttgacagcagccatgggagggccgccccctacctcagtga

SEQ ID NO: 1215 - DNA, 158 bp, synthetic construct
  source 1..158: mol_type = other DNA; note = Description of Artificial Sequence: Synthetic oligonucleotide
gtgctgggcggggggcggcgggccctcccgcagaacaccatgcgctcttcggaagtgttagaccgtactgatacctgtgacctggtgtcggtaccgtctaacacttctgtggagcgccttgacagcagccatgggagggccgccccctacctcagtga

SEQ ID NO: 1216 - DNA, 158 bp, synthetic construct
  source 1..158: mol_type = other DNA; note = Description of Artificial Sequence: Synthetic oligonucleotide
gtgctgggcggggggcggcgggccctcccgcagaacaccatgcgctcttcggaagtgttagacggtactgatacctgtgacctggtgtcggtaccgtctaacacttctgtggagcgccttgacagcagccatgggagggccgccccctacctcagtga

SEQ ID NO: 1217 - DNA, 260 bp, synthetic construct
  source 1..260: mol_type = other DNA; note = Description of Artificial Sequence: Synthetic oligonucleotide
gaagcaaagaaggggcagagggagcccgtgagctgagtgggccagggactgggagaaggagtgaggaggcagggccggcatgcctctgctgctggccagagtgttagacggtactgatcccgtctgcacctgtcactagtgtcggtaccgtctaacactttggccgtgtagtgctacccagcgctggctgcctcctcagcattgcaattcctctcccatctgggcaccagtcagctaccctggtgggaatctgggtagcc

SEQ ID NO: 1218 - DNA, 158 bp, synthetic construct
  source 1..158: mol_type = other DNA; note = Description of Artificial Sequence: Synthetic oligonucleotide
gtgctgggcggggggcggcgggccctcccgcagaacaccatgcgctcttcggaaccgacaaccagtatttggccctgtgacctggtccaaatactggttgtcggttctgaggagcgccttgacagcagccatgggagggccgccccctacctcagtga

SEQ ID NO: 1219 - DNA, 158 bp, synthetic construct
  source 1..158: mol_type = other DNA; note = Description of Artificial Sequence: Synthetic oligonucleotide
gtgctgggcggggggcggcgggccctcccgcagaacaccatgcgctcttcggaaccgacaaccagtatttgggcctgtgacctggtccaaatactggttgtcggttctgaggagcgccttgacagcagccatgggagggccgccccctacctcagtga

SEQ ID NO: 1220 - DNA, 158 bp, synthetic construct
  source 1..158: mol_type = other DNA; note = Description of Artificial Sequence: Synthetic oligonucleotide
gtgctgggcggggggcggcgggccctcccgcagaacaccatgcgctcttcggaaccgacaaccagtatttggacctgtgatttggtccaaatactggttgtcggttctgaggagcgccttgacagcagccatgggagggccgccccctacctcagtga

SEQ ID NO: 1221 - DNA, 158 bp, synthetic construct
  source 1..158: mol_type = other DNA; note = Description of Artificial Sequence: Synthetic oligonucleotide
gtgctgggcggggggcggcgggccctcccgcagaacaccatgcgctcttcggaaccgacaacctgtatttggacctgtgacctggtccaaatactggttgtcggttctgtggagcgccttgacagcagccatgggagggccgccccctacctcagtga

SEQ ID NO: 1222 - DNA, 158 bp, synthetic construct
  source 1..158: mol_type = other DNA; note = Description of Artificial Sequence: Synthetic oligonucleotide
gtgctgggcggggggcggcgggccctcccgcagaacaccatgcgctcttcggaaccgacaaccagtatttggacctgtgacctggtccaaatactggttgtcggttctgtggagcgccttgacagcagccatgggagggccgccccctacctcagtga

SEQ ID NO: 1223 - DNA, 260 bp, synthetic construct
  source 1..260: mol_type = other DNA; note = Description of Artificial Sequence: Synthetic oligonucleotide
gaagcaaagaaggggcagagggagcccgtgagctgagtgggccagggactgggagaaggagtgaggaggcagggccggcatgcctctgctgctggccagaccgacaaccagtatttggaccgtctgcacctgtcactagtccaaatactggttgtcggtttggccgtgtagtgctacccagcgctggctgcctcctcagcattgcaattcctctcccatctgggcaccagtcagctaccctggtgggaatctgggtagcc

SEQ ID NO: 1224 - DNA, 158 bp, synthetic construct
  source 1..158: mol_type = other DNA; note = Description of Artificial Sequence: Synthetic oligonucleotide
gtgctgggcggggggcggcgggccctcccgcagaacaccatgcgctcttcggaagtcacaaagaaccgtgtaccctgtgacctggttgcacggttctttgtgacttctgaggagcgccttgacagcagccatgggagggccgccccctacctcagtga

SEQ ID NO: 1225 - DNA, 158 bp, synthetic construct
  source 1..158: mol_type = other DNA; note = Description of Artificial Sequence: Synthetic oligonucleotide
gtgctgggcggggggcggcgggccctcccgcagaacaccatgcgctcttcggaagtcacaaagaaccgtgtagcctgtgacctggttgcacggttctttgtgacttctgaggagcgccttgacagcagccatgggagggccgccccctacctcagtga

SEQ ID NO: 1226 - DNA, 158 bp, synthetic construct
  source 1..158: mol_type = other DNA; note = Description of Artificial Sequence: Synthetic oligonucleotide
gtgctgggcggggggcggcgggccctcccgcagaacaccatgcgctcttcggaagtcacaaagaaccgtgtaacctgtgatttggttgcacggttctttgtgacttctgaggagcgccttgacagcagccatgggagggccgccccctacctcagtga

SEQ ID NO: 1227 - DNA, 158 bp, synthetic construct
  source 1..158: mol_type = other DNA; note = Description of Artificial Sequence: Synthetic oligonucleotide
gtgctgggcggggggcggcgggccctcccgcagaacaccatgcgctcttcggaagtcacaaagtaccgtgtaacctgtgacctggttgcacggttctttgtgacttctgtggagcgccttgacagcagccatgggagggccgccccctacctcagtga

SEQ ID NO: 1228 - DNA, 158 bp, synthetic construct
  source 1..158: mol_type = other DNA; note = Description of Artificial Sequence: Synthetic oligonucleotide
gtgctgggcggggggcggcgggccctcccgcagaacaccatgcgctcttcggaagtcacaaagaaccgtgtaacctgtgacctggttgcacggttctttgtgacttctgtggagcgccttgacagcagccatgggagggccgccccctacctcagtga

SEQ ID NO: 1229 - DNA, 260 bp, synthetic construct
  source 1..260: mol_type = other DNA; note = Description of Artificial Sequence: Synthetic oligonucleotide
gaagcaaagaaggggcagagggagcccgtgagctgagtgggccagggactgggagaaggagtgaggaggcagggccggcatgcctctgctgctggccagagtcacaaagaaccgtgtaaccgtctgcacctgtcactagttgcacggttctttgtgactttggccgtgtagtgctacccagcgctggctgcctcctcagcattgcaattcctctcccatctgggcaccagtcagctaccctggtgggaatctgggtagcc

SEQ ID NO: 1230 - DNA, 158 bp, synthetic construct
  source 1..158: mol_type = other DNA; note = Description of Artificial Sequence: Synthetic oligonucleotide
gtgctgggcggggggcggcgggccctcccgcagaacaccatgcgctcttcggaatgaacctcttgttataaaccctgtgacctggttttataacaagaggttcattctgaggagcgccttgacagcagccatgggagggccgccccctacctcagtga

SEQ ID NO: 1231 - DNA, 158 bp, synthetic construct
  source 1..158: mol_type = other DNA; note = Description of Artificial Sequence: Synthetic oligonucleotide
gtgctgggcggggggcggcgggccctcccgcagaacaccatgcgctcttcggaatgaacctcttgttataaagcctgtgacctggttttataacaagaggttcattctgaggagcgccttgacagcagccatgggagggccgccccctacctcagtga

SEQ ID NO: 1232 - DNA, 158 bp, synthetic construct
  source 1..158: mol_type = other DNA; note = Description of Artificial Sequence: Synthetic oligonucleotide
gtgctgggcggggggcggcgggccctcccgcagaacaccatgcgctcttcggaatgaacctcttgttataaaacctgtgatttggttttataacaagaggttcattctgaggagcgccttgacagcagccatgggagggccgccccctacctcagtga

SEQ ID NO: 1233 - DNA, 158 bp, synthetic construct
  source 1..158: mol_type = other DNA; note = Description of Artificial Sequence: Synthetic oligonucleotide
gtgctgggcggggggcggcgggccctcccgcagaacaccatgcgctcttcggaatgaacctctagttataaaacctgtgacctggttttataacaagaggttcattctgtggagcgccttgacagcagccatgggagggccgccccctacctcagtga

SEQ ID NO: 1234 - DNA, 158 bp, synthetic construct
  source 1..158: mol_type = other DNA; note = Description of Artificial Sequence: Synthetic oligonucleotide
gtgctgggcggggggcggcgggccctcccgcagaacaccatgcgctcttcggaatgaacctcttgttataaaacctgtgacctggttttataacaagaggttcattctgtggagcgccttgacagcagccatgggagggccgccccctacctcagtga

SEQ ID NO: 1235 - DNA, 260 bp, synthetic construct
  source 1..260: mol_type = other DNA; note = Description of Artificial Sequence: Synthetic oligonucleotide
gaagcaaagaaggggcagagggagcccgtgagctgagtgggccagggactgggagaaggagtgaggaggcagggccggcatgcctctgctgctggccagatgaacctcttgttataaaaccgtctgcacctgtcactagttttataacaagaggttcatttggccgtgtagtgctacccagcgctggctgcctcctcagcattgcaattcctctcccatctgggcaccagtcagctaccctggtgggaatctgggtagcc

SEQ ID NO: 1236 - DNA, 158 bp, synthetic construct
  source 1..158: mol_type = other DNA; note = Description of Artificial Sequence: Synthetic oligonucleotide
gtgctgggcggggggcggcgggccctcccgcagaacaccatgcgctcttcggaagatcattggaattcctaatcctgtgacctggtttaggaattccaatgatcttctgaggagcgccttgacagcagccatgggagggccgccccctacctcagtga

SEQ ID NO: 1237 - DNA, 158 bp, synthetic construct
  source 1..158: mol_type = other DNA; note = Description of Artificial Sequence: Synthetic oligonucleotide
gtgctgggcggggggcggcgggccctcccgcagaacaccatgcgctcttcggaagatcattggaattcctaagcctgtgacctggtttaggaattccaatgatcttctgaggagcgccttgacagcagccatgggagggccgccccctacctcagtga

SEQ ID NO: 1238 - DNA, 158 bp, synthetic construct
  source 1..158: mol_type = other DNA; note = Description of Artificial Sequence: Synthetic oligonucleotide
gtgctgggcggggggcggcgggccctcccgcagaacaccatgcgctcttcggaagatcattggaattcctaaacctgtgatttggtttaggaattccaatgatcttctgaggagcgccttgacagcagccatgggagggccgccccctacctcagtga

SEQ ID NO: 1239 - DNA, 158 bp, synthetic construct
  source 1..158: mol_type = other DNA; note = Description of Artificial Sequence: Synthetic oligonucleotide
gtgctgggcggggggcggcgggccctcccgcagaacaccatgcgctcttcggaagatcattggtattcctaaacctgtgacctggtttaggaattccaatgatcttctgtggagcgccttgacagcagccatgggagggccgccccctacctcagtga

SEQ ID NO: 1240 - DNA, 158 bp, synthetic construct
  source 1..158: mol_type = other DNA; note = Description of Artificial Sequence: Synthetic oligonucleotide
gtgctgggcggggggcggcgggccctcccgcagaacaccatgcgctcttcggaagatcattggaattcctaaacctgtgacctggtttaggaattccaatgatcttctgtggagcgccttgacagcagccatgggagggccgccccctacctcagtga

SEQ ID NO: 1241 - DNA, 260 bp, synthetic construct
  source 1..260: mol_type = other DNA; note = Description of Artificial Sequence: Synthetic oligonucleotide
gaagcaaagaaggggcagagggagcccgtgagctgagtgggccagggactgggagaaggagtgaggaggcagggccggcatgcctctgctgctggccagagatcattggaattcctaaaccgtctgcacctgtcactagtttaggaattccaatgatctttggccgtgtagtgctacccagcgctggctgcctcctcagcattgcaattcctctcccatctgggcaccagtcagctaccctggtgggaatctgggtagcc

SEQ ID NO: 1242 - DNA, 158 bp, synthetic construct
  source 1..158: mol_type = other DNA; note = Description of Artificial Sequence: Synthetic oligonucleotide
gtgctgggcggggggcggcgggccctcccgcagaacaccatgcgctcttcggaacattggaattcctaaaattcctgtgacctggtattttaggaattccaatgttctgaggagcgccttgacagcagccatgggagggccgccccctacctcagtga

SEQ ID NO: 1243 - DNA, 158 bp, synthetic construct
  source 1..158: mol_type = other DNA; note = Description of Artificial Sequence: Synthetic oligonucleotide
gtgctgggcggggggcggcgggccctcccgcagaacaccatgcgctcttcggaacattggaattcctaaaatgcctgtgacctggtattttaggaattccaatgttctgaggagcgccttgacagcagccatgggagggccgccccctacctcagtga

SEQ ID NO: 1244 - DNA, 158 bp, synthetic construct
  source 1..158: mol_type = other DNA; note = Description of Artificial Sequence: Synthetic oligonucleotide
gtgctgggcggggggcggcgggccctcccgcagaacaccatgcgctcttcggaacattggaattcctaaaatacctgtgatttggtattttaggaattccaatgttctgaggagcgccttgacagcagccatgggagggccgccccctacctcagtga

SEQ ID NO: 1245 - DNA, 158 bp, synthetic construct
  source 1..158: mol_type = other DNA; note = Description of Artificial Sequence: Synthetic oligonucleotide
gtgctgggcggggggcggcgggccctcccgcagaacaccatgcgctcttcggaacattggaatacctaaaatacctgtgacctggtattttaggaattccaatgttctgtggagcgccttgacagcagccatgggagggccgccccctacctcagtga

SEQ ID NO: 1246 - DNA, 158 bp, synthetic construct
  source 1..158: mol_type = other DNA; note = Description of Artificial Sequence: Synthetic oligonucleotide
gtgctgggcggggggcggcgggccctcccgcagaacaccatgcgctcttcggaacattggaattcctaaaatacctgtgacctggtattttaggaattccaatgttctgtggagcgccttgacagcagccatgggagggccgccccctacctcagtga

SEQ ID NO: 1247 - DNA, 260 bp, synthetic construct
  source 1..260: mol_type = other DNA; note = Description of Artificial Sequence: Synthetic oligonucleotide
gaagcaaagaaggggcagagggagcccgtgagctgagtgggccagggactgggagaaggagtgaggaggcagggccggcatgcctctgctgctggccagacattggaattcctaaaataccgtctgcacctgtcactagtattttaggaattccaatgtttggccgtgtagtgctacccagcgctggctgcctcctcagcattgcaattcctctcccatctgggcaccagtcagctaccctggtgggaatctgggtagcc

SEQ ID NO: 1248 - DNA, 158 bp, synthetic construct
  source 1..158: mol_type = other DNA; note = Description of Artificial Sequence: Synthetic oligonucleotide
gtgctgggcggggggcggcgggccctcccgcagaacaccatgcgctcttcggaagcaattcagtctcgttgtccctgtgacctggtacaacgagactgaattgcttctgaggagcgccttgacagcagccatgggagggccgccccctacctcagtga

SEQ ID NO: 1249 - DNA, 158 bp, synthetic construct
  source 1..158: mol_type = other DNA; note = Description of Artificial Sequence: Synthetic oligonucleotide
gtgctgggcggggggcggcgggccctcccgcagaacaccatgcgctcttcggaagcaattcagtctcgttgtgcctgtgacctggtacaacgagactgaattgcttctgaggagcgccttgacagcagccatgggagggccgccccctacctcagtga

SEQ ID NO: 1250 - DNA, 158 bp, synthetic construct
  source 1..158: mol_type = other DNA; note = Description of Artificial Sequence: Synthetic oligonucleotide
gtgctgggcggggggcggcgggccctcccgcagaacaccatgcgctcttcggaagcaattcagtctcgttgtacctgtgatttggtacaacgagactgaattgcttctgaggagcgccttgacagcagccatgggagggccgccccctacctcagtga

SEQ ID NO: 1251 - DNA, 158 bp, synthetic construct
  source 1..158: mol_type = other DNA; note = Description of Artificial Sequence: Synthetic oligonucleotide
gtgctgggcggggggcggcgggccctcccgcagaacaccatgcgctcttcggaagcaattcagactcgttgtacctgtgacctggtacaacgagactgaattgcttctgtggagcgccttgacagcagccatgggagggccgccccctacctcagtga

SEQ ID NO: 1252 - DNA, 158 bp, synthetic construct
  source 1..158: mol_type = other DNA; note = Description of Artificial Sequence: Synthetic oligonucleotide
gtgctgggcggggggcggcgggccctcccgcagaacaccatgcgctcttcggaagcaattcagtctcgttgtacctgtgacctggtacaacgagactgaattgcttctgtggagcgccttgacagcagccatgggagggccgccccctacctcagtga

SEQ ID NO: 1253 - DNA, 260 bp, synthetic construct
  source 1..260: mol_type = other DNA; note = Description of Artificial Sequence: Synthetic oligonucleotide
gaagcaaagaaggggcagagggagcccgtgagctgagtgggccagggactgggagaaggagtgaggaggcagggccggcatgcctctgctgctggccagagcaattcagtctcgttgtaccgtctgcacctgtcactagtacaacgagactgaattgctttggccgtgtagtgctacccagcgctggctgcctcctcagcattgcaattcctctcccatctgggcaccagtcagctaccctggtgggaatctgggtagcc

SEQ ID NO: 1254 - DNA, 158 bp, synthetic construct
  source 1..158: mol_type = other DNA; note = Description of Artificial Sequence: Synthetic oligonucleotide
gtgctgggcggggggcggcgggccctcccgcagaacaccatgcgctcttcggaacctgctagctccatgcttccctgtgacctggtaagcatggagctagcaggttctgaggagcgccttgacagcagccatgggagggccgccccctacctcagtga

SEQ ID NO: 1255 - DNA, 158 bp, synthetic construct
  source 1..158: mol_type = other DNA; note = Description of Artificial Sequence: Synthetic oligonucleotide
gtgctgggcggggggcggcgggccctcccgcagaacaccatgcgctcttcggaacctgctagctccatgcttgcctgtgacctggtaagcatggagctagcaggttctgaggagcgccttgacagcagccatgggagggccgccccctacctcagtga

SEQ ID NO: 1256 - DNA, 158 bp, synthetic construct
  source 1..158: mol_type = other DNA; note = Description of Artificial Sequence: Synthetic oligonucleotide
gtgctgggcggggggcggcgggccctcccgcagaacaccatgcgctcttcggaacctgctagctccatgcttccctgtgatttggtaagcatggagctagcaggttctgaggagcgccttgacagcagccatgggagggccgccccctacctcagtga

SEQ ID NO: 1257 - DNA, 158 bp, synthetic construct
  source 1..158: mol_type = other DNA; note = Description of Artificial Sequence: Synthetic oligonucleotide
gtgctgggcggggggcggcgggccctcccgcagaacaccatgcgctcttcggaacctgctagcaccatgcttacctgtgacctggtaagcatggagctagcaggttctgtggagcgccttgacagcagccatgggagggccgccccctacctcagtga

SEQ ID NO: 1258 - DNA, 158 bp, synthetic construct
  source 1..158: mol_type = other DNA; note = Description of Artificial Sequence: Synthetic oligonucleotide
gtgctgggcggggggcggcgggccctcccgcagaacaccatgcgctcttcggaacctgctagctccatgcttacctgtgacctggtaagcatggagctagcaggttctgtggagcgccttgacagcagccatgggagggccgccccctacctcagtga

SEQ ID NO: 1259 - DNA, 260 bp, synthetic construct
  source 1..260: mol_type = other DNA; note = Description of Artificial Sequence: Synthetic oligonucleotide
gaagcaaagaaggggcagagggagcccgtgagctgagtgggccagggactgggagaaggagtgaggaggcagggccggcatgcctctgctgctggccagacctgctagctccatgcttcccgtctgcacctgtcactagtaagcatggagctagcaggtttggccgtgtagtgctacccagcgctggctgcctcctcagcattgcaattcctctcccatctgggcaccagtcagctaccctggtgggaatctgggtagcc

SEQ ID NO: 1260 - DNA, 158 bp, synthetic construct
  source 1..158: mol_type = other DNA; note = Description of Artificial Sequence: Synthetic oligonucleotide
gtgctgggcggggggcggcgggccctcccgcagaacaccatgcgctcttcggaacctgctagctccatgcttgctgtgacccaagtaagcatggagctagcaggttctgaggagcgccttgacagcagccatgggagggccgccccctacctcagtga

SEQ ID NO: 1261 - DNA, 158 bp, synthetic construct
  source 1..158: mol_type = other DNA; note = Description of Artificial Sequence: Synthetic oligonucleotide
gtgctgggcggggggcggcgggccctcccgcagaacaccatgcgctccacggaacctgctagctccatgcttgctgtgacccaagtaagcatggagctagcaggttctgaggagcgccttgacagcagccatgggagggccgccccctacctcagtga

SEQ ID NO: 1262 - DNA, 163 bp, synthetic construct
  source 1..163: mol_type = other DNA; note = Description of Artificial Sequence: Synthetic oligonucleotide
gtgctgggcggggggcggcgggccctcccgcagaacaccatgcgctccacggaacctgctagctccatgcttgctgtggccactgagaagtaagcatggagctagcaggttctgaggagcgccttgacagcagccatgggagggccgccccctacctcagtga

SEQ ID NO: 1263 - DNA, 122 bp, synthetic construct
  source 1..122: mol_type = other DNA; note = Description of Artificial Sequence: Synthetic oligonucleotide
gggccctcccgcagaacaccatgcgctccacggaacctgctagctccatgcttgctgtgacccaagtaagcatggagctagcaggttctgaggagcgccttgacagcagccatgggagggcc

SEQ ID NO: 1264 - DNA, 117 bp, synthetic construct
  source 1..117: mol_type = other DNA; note = Description of Artificial Sequence: Synthetic oligonucleotide
ctcccgcagaacaccatgcgctccacggaacctgctagctccatgcttgctgtgacccaagtaagcatggagctagcaggttctgaggagcgccttgacagcagccatgggagggcc

SEQ ID NO: 1265 - DNA, 160 bp, synthetic construct
  source 1..160: mol_type = other DNA; note = Description of Artificial Sequence: Synthetic oligonucleotide
gtgctgggcggggggcggcgggccctcccgcagaacaccatgcgctccacggaagcctgctagctccatgcttgctgtgacccaagtaagcatggagctagcaggcttctgaggagcgccttgacagcagccatgggagggccgccccctacctcagtga

SEQ ID NO: 1266 - DNA, 158 bp, synthetic construct
  source 1..158: mol_type = other DNA; note = Description of Artificial Sequence: Synthetic oligonucleotide
gtgctgggcggggggcggcgggccctcccgcagaacaccatgcgctccacggaacctgctagctccatgcttgatgtgacccaattaagcatggagctagcaggttctgaggagcgccttgacagcagccatgggagggccgccccctacctcagtga

SEQ ID NO: 1267 - DNA, 158 bp, synthetic construct
  source 1..158: mol_type = other DNA; note = Description of Artificial Sequence: Synthetic oligonucleotide
gtgctgggcggggggcggcgggccctcccgcagaacaccatgcgctcctcggaacctgctagctccatgcttgctgtgacccaagtaagcatggagctagcaggttctgcggagcgccttgacagcagccatgggagggccgccccctacctcagtga

SEQ ID NO: 1268 - DNA, 158 bp, synthetic construct; identical to SEQ ID NO: 1242
  source 1..158: mol_type = other DNA; note = Description of Artificial Sequence: Synthetic oligonucleotide

SEQ ID NO: 1269 - DNA, 158 bp, synthetic construct; identical to SEQ ID NO: 1236
  source 1..158: mol_type = other DNA; note = Description of Artificial Sequence: Synthetic oligonucleotide

SEQ ID NO: 1270 - DNA, 158 bp, synthetic construct; identical to SEQ ID NO: 1243
  source 1..158: mol_type = other DNA; note = Description of Artificial Sequence: Synthetic oligonucleotide

SEQ ID NO: 1271 - DNA, 158 bp, synthetic construct; identical to SEQ ID NO: 1237
  source 1..158: mol_type = other DNA; note = Description of Artificial Sequence: Synthetic oligonucleotide

SEQ ID NO: 1272 - DNA, 158 bp, synthetic construct; identical to SEQ ID NO: 1244
  source 1..158: mol_type = other DNA; note = Description of Artificial Sequence: Synthetic oligonucleotide

SEQ ID NO: 1273 - DNA, 158 bp, synthetic construct; identical to SEQ ID NO: 1238
  source 1..158: mol_type = other DNA; note = Description of Artificial Sequence: Synthetic oligonucleotide

SEQ ID NO: 1274 - DNA, 158 bp, synthetic construct; identical to SEQ ID NO: 1245
  source 1..158: mol_type = other DNA; note = Description of Artificial Sequence: Synthetic oligonucleotide

SEQ ID NO: 1275 - DNA, 158 bp, synthetic construct; identical to SEQ ID NO: 1239
  source 1..158: mol_type = other DNA; note = Description of Artificial Sequence: Synthetic oligonucleotide

SEQ ID NO: 1276 - DNA, 158 bp, synthetic construct; identical to SEQ ID NO: 1246
  source 1..158: mol_type = other DNA; note = Description of Artificial Sequence: Synthetic oligonucleotide

SEQ ID NO: 1277 - DNA, 158 bp, synthetic construct; identical to SEQ ID NO: 1240
  source 1..158: mol_type = other DNA; note = Description of Artificial Sequence: Synthetic oligonucleotide

SEQ ID NO: 1278 - DNA, 260 bp, synthetic construct; identical to SEQ ID NO: 1247
  source 1..260: mol_type = other DNA; note = Description of Artificial Sequence: Synthetic oligonucleotide

SEQ ID NO: 1279 - DNA, 260 bp, synthetic construct; identical to SEQ ID NO: 1241
  source 1..260: mol_type = other DNA; note = Description of Artificial Sequence: Synthetic oligonucleotide

SEQ ID NO: 1280 - DNA, 21 bp, synthetic construct
  source 1..21: mol_type = other DNA; note = Description of Artificial Sequence: Synthetic oligonucleotide
gtttatgaactgatcttaccc

SEQ ID NO: 1281 - DNA, 21 bp, synthetic construct
  source 1..21: mol_type = other DNA; note = Description of Artificial Sequence: Synthetic oligonucleotide
gtgttagacggtactgatccc

SEQ ID NO: 1282 - DNA, 21 bp, synthetic construct
  source 1..21: mol_type = other DNA; note = Description of Artificial Sequence: Synthetic oligonucleotide
cctgctagctccatgcttccc

SEQ ID NO: 1283 - DNA, 21 bp, synthetic construct
  source 1..21: mol_type = other DNA; note = Description of Artificial Sequence: Synthetic oligonucleotide
gtttatgaactgatcttagcc

SEQ ID NO: 1284 - DNA, 21 bp, synthetic construct
  source 1..21: mol_type = other DNA; note = Description of Artificial Sequence: Synthetic oligonucleotide
gtgttagacggtactgatgcc

SEQ ID NO: 1285 - DNA, 21 bp, synthetic construct
  source 1..21: mol_type = other DNA; note = Description of Artificial Sequence: Synthetic oligonucleotide
cctgctagctccatgcttgcc

SEQ ID NO: 1286 - DNA, 21 bp, synthetic construct
  source 1..21: mol_type = other DNA; note = Description of Artificial Sequence: Synthetic oligonucleotide
gtttatgaagtgatcttaacc

SEQ ID NO: 1287 - DNA, 21 bp, synthetic construct
  source 1..21: mol_type = other DNA; note = Description of Artificial Sequence: Synthetic oligonucleotide
gtgttagaccgtactgatacc

SEQ ID NO: 1288 - DNA, 21 bp, synthetic construct
  source 1..21: mol_type = other DNA; note = Description of Artificial Sequence: Synthetic oligonucleotide
cctgctagcaccatgcttacc

SEQ ID NO: 1289 - DNA, 21 bp, synthetic construct
  source 1..21: mol_type = other DNA; note = Description of Artificial Sequence: Synthetic oligonucleotide
gtttatgaactgatcttaacc

SEQ ID NO: 1290 - DNA, 21 bp, synthetic construct
  source 1..21: mol_type = other DNA; note = Description of Artificial Sequence: Synthetic oligonucleotide
gtgttagacggtactgatacc

SEQ ID NO: 1291 - DNA, 21 bp, synthetic construct
  source 1..21: mol_type = other DNA; note = Description of Artificial Sequence: Synthetic oligonucleotide
cctgctagctccatgcttacc

SEQ ID NO: 1292 - DNA, 21 bp, synthetic construct
  source 1..21: mol_type = other DNA; note = Description of Artificial Sequence: Synthetic oligonucleotide
gtttatgaactgatcttgccc

SEQ ID NO: 1293 - DNA, 21 bp, synthetic construct
  source 1..21: mol_type = other DNA; note = Description of Artificial Sequence: Synthetic oligonucleotide
gtttatgaactgatcttggcc

SEQ ID NO: 1294 - DNA, 21 bp, synthetic construct
  source 1..21: mol_type = other DNA; note = Description of Artificial Sequence: Synthetic oligonucleotide
gtttatgaactgatcttgacc

SEQ ID NO: 1295 - DNA, 21 bp, synthetic construct
  source 1..21: mol_type = other DNA; note = Description of Artificial Sequence: Synthetic oligonucleotide
gcaattcagtctcgttgtccc

SEQ ID NO: 1296 - DNA, 21 bp, synthetic construct
  source 1..21: mol_type = other DNA; note = Description of Artificial Sequence: Synthetic oligonucleotide
tccaggtttatgaactgaccc

SEQ ID NO: 1297 - DNA, 21 bp, synthetic construct
  source 1..21: mol_type = other DNA; note = Description of Artificial Sequence: Synthetic oligonucleotide
ggtttatgaactgacgttccc

SEQ ID NO: 1298 - DNA, 21 bp, synthetic construct
  source 1..21: mol_type = other DNA; note = Description of Artificial Sequence: Synthetic oligonucleotide
ccacaatgttgtgactggccc

SEQ ID NO: 1299 - DNA, 21 bp, synthetic construct
  source 1..21: mol_type = other DNA; note = Description of Artificial Sequence: Synthetic oligonucleotide
gtcacaaagaaccgtgtaccc

SEQ ID NO: 1300 - DNA, 21 bp, synthetic construct
  source 1..21: mol_type = other DNA; note = Description of Artificial Sequence: Synthetic oligonucleotide
tgaacctcttgttataaaccc

SEQ ID NO: 1301 - DNA, 21 bp, synthetic construct
  source 1..21: mol_type = other DNA; note = Description of Artificial Sequence: Synthetic oligonucleotide
ccgacaaccagtatttggccc

SEQ ID NO: 1302 - DNA, 21 bp, synthetic construct
  source 1..21: mol_type = other DNA; note = Description of Artificial Sequence: Synthetic oligonucleotide
gcaattcagtctcgttgtgcc

SEQ ID NO: 1303 - DNA, 21 bp, synthetic construct
  source 1..21: mol_type = other DNA; note = Description of Artificial Sequence: Synthetic oligonucleotide
tccaggtttatgaactgagcc

SEQ ID NO: 1304 - DNA, 21 bp, synthetic construct
  source 1..21: mol_type = other DNA; note = Description of Artificial Sequence: Synthetic oligonucleotide
ggtttatgaactgacgttgcc

SEQ ID NO: 1305 - DNA, 21 bp, synthetic construct
  source 1..21: mol_type = other DNA; note = Description of Artificial Sequence: Synthetic oligonucleotide
ccacaatgttgtgactgggcc

SEQ ID NO: 1306 - DNA, 21 bp, synthetic construct
  source 1..21: mol_type = other DNA; note = Description of Artificial Sequence: Synthetic oligonucleotide
gtcacaaagaaccgtgtagcc

SEQ ID NO: 1307 - DNA, 21 bp, synthetic construct
  source 1..21: mol_type = other DNA; note = Description of Artificial Sequence: Synthetic oligonucleotide
tgaacctcttgttataaagcc

SEQ ID NO: 1308 - DNA, 21 bp, synthetic construct
  source 1..21: mol_type = other DNA; note = Description of Artificial Sequence: Synthetic oligonucleotide
ccgacaaccagtatttgggcc

SEQ ID NO: 1309 - DNA, 21 bp, synthetic construct
  source 1..21: mol_type = other DNA; note = Description of Artificial Sequence: Synthetic oligonucleotide
gcaattcagtctcgttgtacc

SEQ ID NO: 1310 - DNA, 21 bp, synthetic construct
  source 1..21: mol_type = other DNA; note = Description of Artificial Sequence: Synthetic oligonucleotide
tccaggtttatgaactgaacc

SEQ ID NO: 1311 - DNA, 21 bp, synthetic construct
  source 1..21: mol_type = other DNA; note = Description of Artificial Sequence: Synthetic oligonucleotide
ggtttatgaactgacgttacc

SEQ ID NO: 1312 - DNA, 21 bp, synthetic construct
  source 1..21: mol_type = other DNA; note = Description of Artificial Sequence: Synthetic oligonucleotide
ccacaatgttgtgactggacc

SEQ ID NO: 1313 - DNA, 21 bp, synthetic construct
  source 1..21: mol_type = other DNA; note = Description of Artificial Sequence: Synthetic oligonucleotide
gtcacaaagaaccgtgtaacc

SEQ ID NO: 1314 - DNA, 21 bp, synthetic construct
  source 1..21: mol_type = other DNA; note = Description of Artificial Sequence: Synthetic oligonucleotide
tgaacctcttgttataaaacc

SEQ ID NO: 1315 - DNA, 21 bp, synthetic construct
  source 1..21: mol_type = other DNA; note = Description of Artificial Sequence: Synthetic oligonucleotide
ccgacaaccagtatttggacc

SEQ ID NO: 1316 - DNA, 21 bp, synthetic construct
  source 1..21: mol_type = other DNA; note = Description of Artificial Sequence: Synthetic oligonucleotide
gcaattcagactcgttgtacc

SEQ ID NO: 1317 - DNA, 21 bp, synthetic construct
  source 1..21: mol_type = other DNA; note = Description of Artificial Sequence: Synthetic oligonucleotide
tccaggtttttgaactgaacc

SEQ ID NO: 1318 - DNA, 21 bp, synthetic construct
  source 1..21: mol_type = other DNA; note = Description of Artificial Sequence: Synthetic oligonucleotide
ggtttatgatctgacgttacc

SEQ ID NO: 1319 - DNA, 21 bp, synthetic construct
  source 1..21: mol_type = other DNA; note = Description of Artificial Sequence: Synthetic oligonucleotide
ccacaatgtagtgactggacc

SEQ ID NO: 1320 - DNA, 21 bp, synthetic construct
  source 1..21: mol_type = other DNA; note = Description of Artificial Sequence: Synthetic oligonucleotide
gtcacaaagtaccgtgtaacc

SEQ ID NO: 1321 - DNA, 21 bp, synthetic construct
  source 1..21: mol_type = other DNA; note = Description of Artificial Sequence: Synthetic oligonucleotide
tgaacctctagttataaaacc

SEQ ID NO: 1322 - DNA, 21 bp, synthetic construct
  source 1..21: mol_type = other DNA; note = Description of Artificial Sequence: Synthetic oligonucleotide
ccgacaacctgtatttggacc

SEQ ID NO: 1323 - DNA, 21 bp, synthetic construct
  source 1..21: mol_type = other DNA; note = Description of Artificial Sequence: Synthetic oligonucleotide
cattggaattcctaaaattcc

SEQ ID NO: 1324 - DNA, 21 bp, synthetic construct
  source 1..21: mol_type = other DNA; note = Description of Artificial Sequence: Synthetic oligonucleotide
gatcattggaattcctaatcc

SEQ ID NO: 1325 - DNA, 21 bp, synthetic construct
  source 1..21: mol_type = other DNA; note = Description of Artificial Sequence: Synthetic oligonucleotide
cattggaattcctaaaatgcc

SEQ ID NO: 1326 - DNA, 21 bp, synthetic construct
  source 1..21: mol_type = other DNA; note = Description of Artificial Sequence: Synthetic oligonucleotide
gatcattggaattcctaagcc

SEQ ID NO: 1327 - DNA, 21 bp, synthetic construct
  source 1..21: mol_type = other DNA; note = Description of Artificial Sequence: Synthetic oligonucleotide
cattggaattcctaaaatacc

SEQ ID NO: 1328 - DNA, 21 bp, synthetic construct
  source 1..21: mol_type = other DNA; note = Description of Artificial Sequence: Synthetic oligonucleotide
gatcattggaattcctaaacc

SEQ ID NO: 1329 - DNA, 21 bp, synthetic construct
  source 1..21: mol_type = other DNA; note = Description of Artificial Sequence: Synthetic oligonucleotide
cattggaatacctaaaatacc

SEQ ID NO: 1330 - DNA, 21 bp, synthetic construct
  source 1..21: mol_type = other DNA; note = Description of Artificial Sequence: Synthetic oligonucleotide
gatcattggtattcctaaacc

SEQ ID NO: 1331 - DNA, 21 bp, synthetic construct
  source 1..21: mol_type = other DNA; note = Description of Artificial Sequence: Synthetic oligonucleotide
cctgctagctccatgcttgct

SEQ ID NO: 1332 - DNA, 21 bp, synthetic construct
  source 1..21: mol_type = other DNA; note = Description of Artificial Sequence: Synthetic oligonucleotide
cctgctagctccatgcttgat

SEQ ID NO: 1333 - DNA, 21 bp, synthetic construct
  source 1..21: mol_type = other DNA; note = Description of Artificial Sequence: Synthetic oligonucleotide
ttaacgtcagttcataaactt

SEQ ID NO: 1334 - DNA, 21 bp, synthetic construct
  source 1..21: mol_type = other DNA; note = Description of Artificial Sequence: Synthetic oligonucleotide
tgtcggtaccgtctaacactt

SEQ ID NO: 1335 - DNA, 21 bp, synthetic construct
  source 1..21: mol_type = other DNA; note = Description of Artificial Sequence: Synthetic oligonucleotide
taagcatggagctagcaggtt

SEQ ID NO: 1336 - DNA, 21 bp, synthetic construct
  source 1..21: mol_type = other DNA; note = Description of Artificial Sequence: Synthetic oligonucleotide
tacaacgagactgaattgctt

SEQ ID NO: 1337 - DNA, 21 bp, synthetic construct
  source 1..21: mol_type = other DNA; note = Description of Artificial Sequence: Synthetic oligonucleotide
ttcagttcataaacctggatt

SEQ ID NO: 1338 - DNA, 21 bp, synthetic construct
  source 1..21: mol_type = other DNA; note = Description of Artificial Sequence: Synthetic oligonucleotide
taacgtcagttcataaacctt

SEQ ID NO: 1339 - DNA, 21 bp, synthetic construct
  source 1..21: mol_type = other DNA; note = Description of Artificial Sequence: Synthetic oligonucleotide
tccggtcacaacattgtggtt

SEQ ID NO: 1340 - DNA, 21 bp, synthetic construct
  source 1..21: mol_type = other DNA; note = Description of Artificial Sequence: Synthetic oligonucleotide
ttgcacggttctttgtgactt

SEQ ID NO: 1341 - DNA, 21 bp, synthetic construct
  source 1..21: mol_type = other DNA; note = Description of Artificial Sequence: Synthetic oligonucleotide
ttttataacaagaggttcatt

SEQ ID NO: 1342 - DNA, 21 bp, Homo sapiens
  source 1..21: mol_type = unassigned DNA
tccaaatactggttgtcggtt

SEQ ID NO: 1343 - DNA, 21 bp, synthetic construct
  source 1..21: mol_type = other DNA; note = Description of Artificial Sequence: Synthetic oligonucleotide
tattttaggaattccaatgtt

SEQ ID NO: 1344 - DNA, 21 bp, synthetic construct
  source 1..21: mol_type = other DNA; note = Description of Artificial Sequence: Synthetic oligonucleotide
tttaggaattccaatgatctt

SEQ ID NO: 1345 - DNA, 22 bp, synthetic construct
  source 1..22: mol_type = other DNA; note = Description of Artificial Sequence: Synthetic oligonucleotide
taagcatggagctagcaggctt

SEQ ID NO: 1346 - DNA, 158 bp, synthetic construct
  source 1..158: mol_type = other DNA; note = Description of Artificial Sequence: Synthetic oligonucleotide
gtgctgggcggggggcggcgggccctcccgcagaacaccatgcgctccacggaataagcatggagctagcagggtgtgacccaaccctgctagctccatgcttattctgaggagcgccttgacagcagccatgggagggccgccccctacctcagtga

SEQ ID NO: 1347 - DNA, 163 bp, synthetic construct
  source 1..163: mol_type = other DNA; note = Description of Artificial Sequence: Synthetic oligonucleotide
gtgctgggcggggggcggcgggccctcccgcagaacaccatgcgctcctcggaataagcatggagctagcaggttgtggccactgagaaacctgctagctccatgcttgttctgcggagcgccttgacagcagccatgggagggccgccccctacctcagtga

SEQ ID NO: 1348 - DNA, 21 bp, synthetic construct
  source 1..21: mol_type = other DNA; note = Description of Artificial Sequence: Synthetic oligonucleotide
cctgctagctccatgcttatt

SEQ ID NO: 1349 - DNA, 21 bp, synthetic construct
  source 1..21: mol_type = other DNA; note = Description of Artificial Sequence: Synthetic oligonucleotide
cctgctagctccatgcttgtt

SEQ ID NO: 1350 - DNA, 21 bp, synthetic construct
  source 1..21: mol_type = other DNA; note = Description of Artificial Sequence: Synthetic oligonucleotide
taagcatggagctagcagggt

SEQ ID NO: 1351 - DNA, 21 bp, synthetic construct
  source 1..21: mol_type = other DNA; note = Description of Artificial Sequence: Synthetic oligonucleotide
taagcatggagctagcaggtt

SEQ ID NO: 1352 - DNA, 2301 bp, synthetic construct
  source 1..2301: mol_type = other DNA; note = Description of Artificial Sequence: Synthetic polynucleotide
cctgcaggcagctgcgcgctcgctcgctcactgaggccgcccgggcaaagcccgggcgtcgggcgacctttggtcgcccggcctcagtgagcgagcgagcgcgcagagagggagtggccaactccatcactaggggttccttgtagttaatgattaacccgccatgctacttatctacgtagccatgcgtcgacataacgcgtcgacattgattattgactagttattaatagtaatcaattacggggtcattagttcatagcccatatatggagttccgcgttacataacttacggtaaatggcccgcctggctgaccgcccaacgacccccgcccattgacgtcaataatgacgtatgttcccatagtaacgccaatagggactttccattgacgtcaatgggtggagtatttacggtaaactgcccacttggcagtacatcaagtgtatcatatgccaagtacgccccctattgacgtcaatgacggtaaatggcccgcctggcattatgcccagtacatgaccttatgggactttcctacttggcagtacatctacgtattagtcatcgctattaccatgtcgaggccacgttctgcttcactctccccatctcccccccctccccacccccaattttgtatttatttattttttaattattttgtgcagcgatgggggcggggggggggggcgcgcgccaggcggggcggggcggggcgaggggcggggcggggcgaggcggagaggtgcggcggcagccaatcagagcggcgcgctccgaaagtttccttttatggcgaggcggcggcggcggcggccctataaaaagcgaagcgcgcggcgggcgggagcaagcttgaactgaaaaaccagaaagttaactggtaagtttagtctttttgtcttttatttcaggtcccggatccggtggtggtgcaaatcaaagaactgctcctcagtggatgttgcctttacttctaggcctgtacggaagtgttacttctgctctaaaagctgcggaattgtacccgcggccgatccaccggtgtgctgggcggggggcggcgggccctcccgcagaacaccatgcgctccacggaacctgctagctccatgcttgctgtggccactgagaagtaagcatggagctagcaggttctgaggagcgccttgacagcagccatgggagggccgccccctacctcagtgactcgaggacggggtgaactacgcctgaggatccgatctttttccctctgccaaaaattatggggacatcatgaagccccttgagcatctgacttctggctaataaaggaaatttattttcattgcaatagtgtgttggaattttttgtgtctctcactcgactagatttaaataattcgcccttgggcctaggcaattggatccgccggcagagaaaacatcccagggatttacagatcacatgcaggcagggaccagctcaacccttctttaatgtcatccagggagggggccagggatggaggggaggggttgaggagcgagaggcagttatttttgggtgggattcaccacttttcccatgaagaggggagacttggtattttgttcaatcattaagaagacaaagggtttgttgaacttgacctcgggggggatagacatgggtatggcctctaaaaacatggccccagcagcttcagtccctttctcgtcgatggtcagcacagccttatgcacggcctggaggggagagaagcagagacacgttgtaaggctgatcccaggcctcgagcaaggctcacgtggacacctcccaggaagcgctcactccccctggacggccctggccctgcacatcctctccctccctgtcacataggccttgctcctcctcaaggctttggctgatggggctggctcccctctgtccatcttcctgacaagcgcctctccccctgctcaggtgcacccacaactcagaacagggaagagcatcgtcactccacgtctgcctccagggctctctcctttctagtacacggcttgaagctccttgaggacacggaccctggcagtgaccttcacagtgcccagaccatttaaatatgtcgtgcatcgatgctacgtagataagtagcatggcgggttaatcattaactacagaggaacccctagtgatggagttggccactccctctctgcgcgctcgctcgctcactgaggccgggcgaccaaaggtcgcccgacgcccgggctttgcccgggcggcctcagtgagcgagcgagcgcgcagctgcctgcagg

SEQ ID NO: 1353 - DNA, 4608 bp, synthetic construct
  source 1..4608: mol_type = other DNA; note = Description of Artificial Sequence: Synthetic polynucleotide
cctgcaggcagctgcgcgctcgctcgctcactgaggccgcccgggcaaagcccgggcgtcgggcgacctttggtcgcccggcctcagtgagcgagcgagcgcgcagagagggagtggccaactccatcactaggggttccttgtagttaatgattaacccgccatgctacttatctacgtagccatgcgtcgacataacgcgtcgacattgattattgactagttattaatagtaatcaattacggggtcattagttcatagcccatatatggagttccgcgttacataacttacggtaaatggcccgcctggctgaccgcccaacgacccccgcccattgacgtcaataatgacgtatgttcccatagtaacgccaatagggactttccattgacgtcaatgggtggagtatttacggtaaactgcccacttggcagtacatcaagtgtatcatatgccaagtacgccccctattgacgtcaatgacggtaaatggcccgcctggcattatgcccagtacatgaccttatgggactttcctacttggcagtacatctacgtattagtcatcgctattaccatgtcgaggccacgttctgcttcactctccccatctcccccccctccccacccccaattttgtatttatttattttttaattattttgtgcagcgatgggggcggggggggggggcgcgcgccaggcggggcggggcggggcgaggggcggggcggggcgaggcggagaggtgcggcggcagccaatcagagcggcgcgctccgaaagtttccttttatggcgaggcggcggcggcggcggccctataaaaagcgaagcgcgcggcgggcgggagcaagcttgaactgaaaaaccagaaagttaactggtaagtttagtctttttgtcttttatttcaggtcccggatccggtggtggtgcaaatcaaagaactgctcctcagtggatgttgcctttacttctaggcctgtacggaagtgttacttctgctctaaaagctgcggaattgtacccgcggccgatccaccggtgtgctgggcggggggcggcgggccctcccgcagaacaccatgcgctccacggaacctgctagctccatgcttgctgtggccactgagaagtaagcatggagctagcaggttctgaggagcgccttgacagcagccatgggagggccgccccctacctcagtgactcgaggacggggtgaactacgcctgaggatccgatctttttccctctgccaaaaattatggggacatcatgaagccccttgagcatctgacttctggctaataaaggaaatttattttcattgcaatagtgtgttggaattttttgtgtctctcactcgactagatttaaataattcgcccttgggcctaggcaattggatccgccggcagagaaaacatcccagggatttacagatcacatgcaggcagggaccagctcaacccttctttaatgtcatccagggagggggccagggatggaggggaggggttgaggagcgagaggcagttatttttgggtgggattcaccacttttcccatgaagaggggagacttggtattttgttcaatcattaagaagacaaagggtttgttgaacttgacctcgggggggatagacatgggtatggcctctaaaaacatggccccagcagcttcagtccctttctcgtcgatggtcagcacagccttatgcacggcctggaggggagagaagcagagacacgttgtaaggctgatcccaggcctcgagcaaggctcacgtggacacctcccaggaagcgctcactccccctggacggccctggccctgcacatcctctccctccctgtcacataggccttgctcctcctcaaggctttggctgatggggctggctcccctctgtccatcttcctgacaagcgcctctccccctgctcaggtgcacccacaactcagaacagggaagagcatcgtcactccacgtctgcctccagggctctctcctttctagtacacggcttgaagctccttgaggacacggaccctggcagtgaccttcacagtgcccagaccccaagataatgcagccattcatggaactgcaggttgttcattggtcgcctttagttttccaaaataagtgtcactttagctgaaatcattcattaattcagacaccaaatctcacagatcgaaggagtcagaaattcctttgaaacaacttagcccaaacctttctgtgtcagtatggataaatcaaggcccaatgtctagaaggtcttgggcaaagttgaaattcagggtcagtgacacaacctcaagggaggccccgaaagtgccagctgcacagcagcccctgcctggctttgctgtttgcccaccgtcccgtgtcagtgaatcacgggcatcttcaggagctcagcctgggtcttcatttgtttccctcggccccttcctcagcctcaggacagtgctgcagcccccacacattcttccctacagataccatggtgcaacaaggtcgtcagggtgatctcaccttggagagcttcaggggtgcctcctctgtgaccccggagaggtcagccccattgctgaagaccttagtgatgcccagttgacccaggacgctcttcagatcataggttccagtaatggacagtttgggtaaatgtaagctggcagacctgtcgtgcagaaaagaaattcaaggcatggcacagcattcctcttgttcttctgggacccaccacagtgcaagtgttttcttttctgattatttctgccacttactcctgtgtcctccacccacactaagatgggaactcggctttggtttgttctacttttagctcttctacattgagtcaaagaatgttaacatcgaatgaatcacaaaagcttgaaatgccacctcctctgatattctaggtgtcctggaagcctgtctcatcttgccctgtagtgttgggtcacctggcccccagcctgtaacatccccagggccctacacccagagaaacacggggctggtggcagtgcccagtgacaaccgtttagtggataagagaagagtgaccacaccaggctgagtgctcctctctggttttccatggggagacaatgccaccctgagcagggtctggtgtgagcggcagctggctctgggctctctgatccgttaccctctcagcctctttgttctttctcaacccctggagcagagacctcaggaggtgctggcatggaacagagaaattccagcctcgattcctattatgaacccgacaccttttgtattttcatcttggttttacagtgtacaaaacgaactagatcagcagggcatgggcataatcacgaatgcacacacatacactaatgtgtggctcatgtttaagtatcacttactacaggacacccaatctaacagcaccgataaagtgacagagaaacgcaagccttctgcgaacatggcctggctgttccaattccgaaccttgcttttctgggccttgccacacaggctcttcccccgtccccccagggacattctacccttgaactccacactccactgctgcctttgccaggaagcccatctgttcctttttggttctgccagaacgtgtggtggtgctgctgtccctgccttgggcactggatattgggaagggacagtgtccacactggagtgggaagttcccagggacgagacctttacctcctcaccctgggtactgttctcctcatggagcatggacggcgctgcctgaactcagtggtggcctcattctggaagccaagtttatacagagtagcagtgacccagggatgtggggttcaccctcctcagccctctggccagtcctgatgggcctcagtcccaacatggctaagaggtgtgggcagcttcttggtcaccctcaggttggggaatcaccttctgtcttcattttccaggaacttggtgatgatatcgtgggtgagttcatttaccaggtgctgtagtttcccctcatcaggcaggaagaagatggcggtggcattgcccaggtatttcatcagcagcacccagctggacagcttcttacagtgctggatgttaaacatgcctaaacgcttcatcataggcaccttcacggtggtcacctggtccacgtggaagtcctcttcctcggtgtccttgacttcaaagggtctctcccatttgcctggagagaggggaaggtgggcatcaccaggggtgagtgaaggtttggaagagtgtagcagaataagaaaccatgagtcccctccctgagaagccctgagcccccttgacgacacacatccctcgaggctcagcttcatcatctgtaaaaggtgctgaaactgaccatttaaatatgtcgtgcatcgatgctacgtagataagtagcatggcgggttaatcattaactacagaggaacccctagtgatggagttggccactccctctctgcgcgctcgctcgctcactgaggccgggcgaccaaaggtcgcccgacgcccgggctttgcccgggcggcctcagtgagcgagcgagcgcgcagctgcctgcagg

SEQ ID NO: 1354 - DNA, 2296 bp, synthetic construct
  source 1..2296: mol_type = other DNA; note = Description of Artificial Sequence: Synthetic polynucleotide
cctgcaggcagctgcgcgctcgctcgctcactgaggccgcccgggcaaagcccgggcgtcgggcgacctttggtcgcccggcctcagtgagcgagcgagcgcgcagagagggagtggccaactccatcactaggggttccttgtagttaatgattaacccgccatgctacttatctacgtagccatgcgtcgacataacgcgtcgacattgattattgactagttattaatagtaatcaattacggggtcattagttcatagcccatatatggagttccgcgttacataacttacggtaaatggcccgcctggctgaccgcccaacgacccccgcccattgacgtcaataatgacgtatgttcccatagtaacgccaatagggactttccattgacgtcaatgggtggagtatttacggtaaactgcccacttggcagtacatcaagtgtatcatatgccaagtacgccccctattgacgtcaatgacggtaaatggcccgcctggcattatgcccagtacatgaccttatgggactttcctacttggcagtacatctacgtattagtcatcgctattaccatgtcgaggccacgttctgcttcactctccccatctcccccccctccccacccccaattttgtatttatttattttttaattattttgtgcagcgatgggggcggggggggggggcgcgcgccaggcggggcggggcggggcgaggggcggggcggggcgaggcggagaggtgcggcggcagccaatcagagcggcgcgctccgaaagtttccttttatggcgaggcggcggcggcggcggccctataaaaagcgaagcgcgcggcgggcgggagcaagcttgaactgaaaaaccagaaagttaactggtaagtttagtctttttgtcttttatttcaggtcccggatccggtggtggtgcaaatcaaagaactgctcctcagtggatgttgcctttacttctaggcctgtacggaagtgttacttctgctctaaaagctgcggaattgtacccgcggccgatccaccggtgtgctgggcggggggcggcgggccctcccgcagaacaccatgcgctcttcggaagcaattcagtctcgttgtacctgtgatttggtacaacgagactgaattgcttctgaggagcgccttgacagcagccatgggagggccgccccctacctcagtgactcgaggacggggtgaactacgcctgaggatccgatctttttccctctgccaaaaattatggggacatcatgaagccccttgagcatctgacttctggctaataaaggaaatttattttcattgcaatagtgtgttggaattttttgtgtctctcactcgactagatttaaataattcgcccttgggcctaggcaattggatccgccggcagagaaaacatcccagggatttacagatcacatgcaggcagggaccagctcaacccttctttaatgtcatccagggagggggccagggatggaggggaggggttgaggagcgagaggcagttatttttgggtgggattcaccacttttcccatgaagaggggagacttggtattttgttcaatcattaagaagacaaagggtttgttgaacttgacctcgggggggatagacatgggtatggcctctaaaaacatggccccagcagcttcagtccctttctcgtcgatggtcagcacagccttatgcacggcctggaggggagagaagcagagacacgttgtaaggctgatcccaggcctcgagcaaggctcacgtggacacctcccaggaagcgctcactccccctggacggccctggccctgcacatcctctccctccctgtcacataggccttgctcctcctcaaggctttggctgatggggctggctcccctctgtccatcttcctgacaagcgcctctccccctgctcaggtgcacccacaactcagaacagggaagagcatcgtcactccacgtctgcctccagggctctctcctttctagtacacggcttgaagctccttgaggacacggaccctggcagtgaccttcacagtgcccagaccatttaaatatgtcgtgcatcgatgctacgtagataagtagcatggcgggttaatcattaactacagaggaacccctagtgatggagttggccactccctctctgcgcgctcgctcgctcactgaggccgggcgaccaaaggtcgcccgacgcccgggctttgcccgggcggcctcagtgagcgagcgagcgcgcagctgcctgcagg

SEQ ID NO: 1355 - DNA, 2301 bp, synthetic construct
  source 1..2301: mol_type = other DNA; note = Description of Artificial Sequence: Synthetic polynucleotide
cctgcaggcagctgcgcgctcgctcgctcactgaggccgcccgggcaaagcccgggcgtcgggcgacctttggtcgcccggcctcagtgagcgagcgagcgcgcagagagggagtggccaactccatcactaggggttccttgtagttaatgattaacccgccatgctacttatctacgtagccatgcgtcgacataacgcgtcgacattgattattgactagttattaatagtaatcaattacggggtcattagttcatagcccatatatggagttccgcgttacataacttacggtaaatggcccgcctggctgaccgcccaacgacccccgcccattgacgtcaataatgacgtatgttcccatagtaacgccaatagggactttccattgacgtcaatgggtggagtatttacggtaaactgcccacttggcagtacatcaagtgtatcatatgccaagtacgccccctattgacgtcaatgacggtaaatggcccgcctggcattatgcccagtacatgaccttatgggactttcctacttggcagtacatctacgtattagtcatcgctattaccatgtcgaggccacgttctgcttcactctccccatctcccccccctccccacccccaattttgtatttatttattttttaattattttgtgcagcgatgggggcggggggggggggcgcgcgccaggcggggcggggcggggcgaggggcggggcggggcgaggcggagaggtgcggcggcagccaatcagagcggcgcgctccgaaagtttccttttatggcgaggcggcggcggcggcggccctataaaaagcgaagcgcgcggcgggcgggagcaagcttgaactgaaaaaccagaaagttaactggtaagtttagtctttttgtcttttatttcaggtcccggatccggtggtggtgcaaatcaaagaactgctcctcagtggatgttgcctttacttctaggcctgtacggaagtgttacttctgctctaaaagctgcggaattgtacccgcggccgatccaccggtgtgctgggcggggggcggcgggccctcccgcagaacaccatgcgctcctcggaataagcatggagctagcaggttgtggccactgagaaacctgctagctccatgcttgttctgcggagcgccttgacagcagccatgggagggccgccccctacctcagtgactcgaggacggggtgaactacgcctgaggatccgatctttttccctctgccaaaaattatggggacatcatgaagccccttgagcatctgacttctggctaataaaggaaatttattttcattgcaatagtgtgttggaattttttgtgtctctcactcgactagatttaaataattcgcccttgggcctaggcaattggatccgccggcagagaaaacatcccagggatttacagatcacatgcaggcagggaccagctcaacccttctttaatgtcatccagggagggggccagggatggaggggaggggttgaggagcgagaggcagttatttttgggtgggattcaccacttttcccatgaagaggggagacttggtattttgttcaatcattaagaagacaaagggtttgttgaacttgacctcgggggggatagacatgggtatggcctctaaaaacatggccccagcagcttcagtccctttctcgtcgatggtcagcacagccttatgcacggcctggaggggagagaagcagagacacgttgtaaggctgatcccaggcctcgagcaaggctcacgtggacacctcccaggaagcgctcactccccctggacggccctggccctgcacatcctctccctccctgtcacataggccttgctcctcctcaaggctttggctgatggggctggctcccctctgtccatcttcctgacaagcgcctctccccctgctcaggtgcacccacaactcagaacagggaagagcatcgtcactccacgtctgcctccagggctctctcctttctagtacacggcttgaagctccttgaggacacggaccctggcagtgaccttcacagtgcccagaccatttaaatatgtcgtgcatcgatgctacgtagataagtagcatggcgggttaatcattaactacagaggaacccctagtgatggagttggccactccctctctgcgcgctcgctcgctcactgaggccgggcgaccaaaggtcgcccgacgcccgggctttgcccgggcggcctcagtgagcgagcgagcgcgcagctgcctgcagg

SEQ ID NO: 1356 - DNA, 4606 bp, synthetic construct
  source 1..4606: mol_type = other DNA; note = Description of Artificial Sequence: Synthetic polynucleotide
cctgcaggcagctgcgcgctcgctcgctcactgaggccgcccgggcaaagcccgggcgtcgggcgacctttggtcgcccggcctcagtgagcgagcgagcgcgcagagagggagtggccaactccatcactaggggttccttgtagttaatgattaacccgccatgctacttatctacgtagccatgcgtcgacataacgcgtaattcgcccttgggcctaggcaattggatccgccggcagagaaaacatcccagggatttacagatcacatgcaggcagggaccagctcaacccttctttaatgtcatccagggagggggccagggatggaggggaggggttgaggagcgagaggcagttatttttgggtgggattcaccacttttcccatgaagaggggagacttggtattttgttcaatcattaagaagacaaagggtttgttgaacttgacctcgggggggatagacatgggtatggcctctaaaaacatggccccagcagcttcagtccctttctcgtcgatggtcagcacagccttatgcacggcctggaggggagagaagcagagacacgttgtaaggctgatcccaggcctcgagcaaggctcacgtggacacctcccaggaagcgctcactccccctggacggccctggccctgcacatcctctccctccctgtcacataggccttgctcctcctcaaggctttggctgatggggctggctcccctctgtccatcttcctgacaagcgcctctccccctgctcaggtgcacccacaactcagaacagggaagagcatcgtcactccacgtctgcctccagggctctctcctttctagtacacggcttgaagctccttgaggacacggaccctggcagtgaccttcacagtgcccagaccccaagataatgcagccattcatggaactgcaggttgttcattggtcgcctttagttttccaaaataagtgtcactttagctgaaatcattcattaattcagacaccaaatctcacagatcgaaggagtcagaaattcctttgaaacaacttagcccaaacctttctgtgtcagtatggataaatcaaggcccaatgtctagaaggtcttgggcaaagttgaaattcagggtcagtgacacaacctcaagggaggccccgaaagtgccagctgcacagcagcccctgcctggctttgctgtttgcccaccgtcccgtgtcagtgaatcacgggcatcttcaggagctcagcctgggtcttcatttgtttccctcggccccttcctcagcctcaggacagtgctgcagcccccacacattcttccctacagataccatggtgcaacaaggtcgtcagggtgatctcaccttggagagcttcaggggtgcctcctctgtgaccccggagaggtcagccccattgctgaagaccttagtgatgcccagttgacccaggacgctcttcagatcataggttccagtaatggacagtttgggtaaatgtaagctggcagacctgtcgtgcagaaaagaaattcaaggcatggcacagcattcctcttgttcttctgggacccaccacagtgcaagtgttttcttttctgattatttctgccacttactcctgtgtcctccacccacactaagatgggaactcggctttggtttgttctacttttagctcttctacattgagtcaaagaatgttaacatcgaatgaatcacaaaagcttgaaatgccacctcctctgatattctaggtgtcctggaagcctgtctcatcttgccctgtagtgttgggtcacctggcccccagcctgtaacatccccagggccctacacccagagaaacacggggctggtggcagtgcccagtgacaaccgtttagtggataagagaagagtgaccacaccaggctgagtgctcctctctggttttccatggggagacaatgccaccctgagcagggtctggtgtgagcggcagctggctctgggctctctgatccgttaccctctcagcctctttgttctttctcaacccctggagcagagacctcaggaggtgctggcatggaacagagaaattccagcctcgattcctattatgaacccgacaccttttgtattttcatcttggttttacagtgtacaaaacgaactagatcagcagggcatgggcataatcacgaatgcacacacatacactaatgtgtggctcatgtttaagtatcacttactacaggacacccaatctaacagcaccgataaagtgacagagaaacgcaagccttctgcgaacatggcctggctgttccaattccgaaccttgcttttctgggccttgccacacaggctcttcccccgtccccccagggacattctacccttgaactccacactccactgctgcctttgccaggaagcccatctgttcctttttggttctgccagaacgtgtggtggtgctgctgtccctgccttgggcactggatattgggaagggacagtgtccacactggagtgggaagttcccagggacgagacctttacctcctcaccctgggtactgttctcctcatggagcatggacggcgctgcctgaactcagtggtggcctcattctggaagccaagtttatacagagtagcagtgacccagggatgtggggttcaccctcctcagccctctggccagtcctgatgggcctcagtcccaacatggctaagaggtgtgggcagcttcttggtcaccctcaggttggggaatcaccttctgtcttcattttccaggaacttggtgatgatatcgtgggtgagttcatttaccaggtgctgtagtttcccctcatcaggcaggaagaagatggcggtggcattgcccaggtatttcatcagcagcacccagctggacagcttcttacagtgctggatgttaaacatgcctaaacgcttcatcataggcaccttcacggtggtcacctggtccacgtggaagtcctcttcctcggtgtccttgacttcaaagggtctctcccatttgcctggagagaggggaaggtgggcatcaccaggggtgagtgaaggtttggaagagtgtagcagaataagaaaccatgagtcccctccctgagaagccctgagcccccttgacgacacacatccctcgaggctcagcttcatcatctgtaaaaggtgctgaaactgaccacgcgtcgacattgattattgactagttattaatagtaatcaattacggggtcattagttcatagcccatatatggagttccgcgttacataacttacggtaaatggcccgcctggctgaccgcccaacgacccccgcccattgacgtcaataatgacgtatgttcccatagtaacgccaatagggactttccattgacgtcaatgggtggagtatttacggtaaactgcccacttggcagtacatcaagtgtatcatatgccaagtacgccccctattgacgtcaatgacggtaaatggcccgcctggcattatgcccagtacatgaccttatgggactttcctacttggcagtacatctacgtattagtcatcgctattaccatgtcgaggccacgttctgcttcactctccccatctcccccccctccccacccccaattttgtatttatttattttttaattattttgtgcagcgatgggggcggggggggggggcgcgcgccaggcggggcggggcggggcgaggggcggggcggggcgaggcggagaggtgcggcggcagccaatcagagcggcgcgctccgaaagtttccttttatggcgaggcggcggcggcggcggccctataaaaagcgaagcgcgcggcgggcgggagcaagcttgaactgaaaaaccagaaagttaactggtaagtttagtctttttgtcttttatttcaggtcccggatccggtggtggtgcaaatcaaagaactgctcctcagtggatgttgcctttacttctaggcctgtacggaagtgttacttctgctctaaaagctgcggaattgtacccgcggccgatccaccggtgtgctgggcggggggcggcgggccctcccgcagaacaccatgcgctccacggaacctgctagctccatgcttgctgtggccactgagaagtaagcatggagctagcaggttctgaggagcgccttgacagcagccatgggagggccgccccctacctcagtgactcgaggacggggtgaactacgcctgaggatccgatctttttccctctgccaaaaattatggggacatcatgaagccccttgagcatctgacttctggctaataaaggaaatttattttcattgcaatagtgtgttggaattttttgtgtctctcactcgactagatttaaatatgtcgtgcatcgatgctacgtagataagtagcatggcgggttaatcattaactacagaggaacccctagtgatggagttggccactccctctctgcgcgctcgctcgctcactgaggccgggcgaccaaaggtcgcccgacgcccgggctttgcccgggcggcctcagtgagcgagcgagcgcgcagctgcctgcagg

SEQ ID NO: 1357 - DNA, 2299 bp, synthetic construct
  source 1..2299: mol_type = other DNA; note = Description of Artificial Sequence: Synthetic polynucleotide
cctgcaggcagctgcgcgctcgctcgctcactgaggccgcccgggcaaagcccgggcgtcgggcgacctttggtcgcccggcctcagtgagcgagcgagcgcgcagagagggagtggccaactccatcactaggggttccttgtagttaatgattaacccgccatgctacttatctacgtagccatgcgtcgacataacgcgtaattcgcccttgggcctaggcaattggatccgccggcagagaaaacatcccagggatttacagatcacatgcaggcagggaccagctcaacccttctttaatgtcatccagggagggggccagggatggaggggaggggttgaggagcgagaggcagttatttttgggtgggattcaccacttttcccatgaagaggggagacttggtattttgttcaatcattaagaagacaaagggtttgttgaacttgacctcgggggggatagacatgggtatggcctctaaaaacatggccccagcagcttcagtccctttctcgtcgatggtcagcacagccttatgcacggcctggaggggagagaagcagagacacgttgtaaggctgatcccaggcctcgagcaaggctcacgtggacacctcccaggaagcgctcactccccctggacggccctggccctgcacatcctctccctccctgtcacataggccttgctcctcctcaaggctttggctgatggggctggctcccctctgtccatcttcctgacaagcgcctctccccctgctcaggtgcacccacaactcagaacagggaagagcatcgtcactccacgtctgcctccagggctctctcctttctagtacacggcttgaagctccttgaggacacggaccctggcagtgaccttcacagtgcccagaccacgcgtcgacattgattattgactagttattaatagtaatcaattacggggtcattagttcatagcccatatatggagttccgcgttacataacttacggtaaatggcccgcctggctgaccgcccaacgacccccgcccattgacgtcaataatgacgtatgttcccatagtaacgccaatagggactttccattgacgtcaatgggtggagtatttacggtaaactgcccacttggcagtacatcaagtgtatcatatgccaagtacgccccctattgacgtcaatgacggtaaatggcccgcctggcattatgcccagtacatgaccttatgggactttcctacttggcagtacatctacgtattagtcatcgctattaccatgtcgaggccacgttctgcttcactctccccatctcccccccctccccacccccaattttgtatttatttattttttaattattttgtgcagcgatgggggcggggggggggggcgcgcgccaggcggggcggggcggggcgaggggcggggcggggcgaggcggagaggtgcggcggcagccaatcagagcggcgcgctccgaaagtttccttttatggcgaggcggcggcggcggcggccctataaaaagcgaagcgcgcggcgggcgggagcaagcttgaactgaaaaaccagaaagttaactggtaagtttagtctttttgtcttttatttcaggtcccggatccggtggtggtgcaaatcaaagaactgctcctcagtggatgttgcctttacttctaggcctgtacggaagtgttacttctgctctaaaagctgcggaattgtacccgcggccgatccaccggtgtgctgggcggggggcggcgggccctcccgcagaacaccatgcgctccacggaacctgctagctccatgcttgctgtggccactgagaagtaagcatggagctagcaggttctgaggagcgccttgacagcagccatgggagggccgccccctacctcagtgactcgaggacggggtgaactacgcctgaggatccgatctttttccctctgccaaaaattatggggacatcatgaagccccttgagcatctgacttctggctaataaaggaaatttattttcattgcaatagtgtgttggaattttttgtgtctctcactcgactagatttaaatatgtcgtgcatcgatgctacgtagataagtagcatggcgggttaatcattaactacagaggaacccctagtgatggagttggccactccctctctgcgcgctcgctcgctcactgaggccgggcgaccaaaggtcgcccgacgcccgggctttgcccgggcggcctcagtgagcgagcgagcgcgcagctgcctgcagg

SEQ ID NO: 1358 - DNA, 2294 bp, synthetic construct
  source 1..2294: mol_type = other DNA; note = Description of Artificial Sequence: Synthetic polynucleotide
cctgcaggcagctgcgcgctcgctcgctcactgaggccgcccgggcaaagcccgggcgtcgggcgacctttggtcgcccggcctcagtgagcgagcgagcgcgcagagagggagtggccaactccatcactaggggttccttgtagttaatgattaacccgccatgctacttatctacgtagccatgcgtcgacataacgcgtaattcgcccttgggcctaggcaattggatccgccggcagagaaaacatcccagggatttacagatcacatgcaggcagggaccagctcaacccttctttaatgtcatccagggagggggccagggatggaggggaggggttgaggagcgagaggcagttatttttgggtgggattcaccacttttcccatgaagaggggagacttggtattttgttcaatcattaagaagacaaagggtttgttgaacttgacctcgggggggatagacatgggtatggcctctaaaaacatggccccagcagcttcagtccctttctcgtcgatggtcagcacagccttatgcacggcctggaggggagagaagcagagacacgttgtaaggctgatcccaggcctcgagcaaggctcacgtggacacctcccaggaagcgctcactccccctggacggccctggccctgcacatcctctccctccctgtcacataggccttgctcctcctcaaggctttggctgatggggctggctcccctctgtccatcttcctgacaagcgcctctccccctgctcaggtgcacccacaactcagaacagggaagagcatcgtcactccacgtctgcctccagggctctctcctttctagtacacggcttgaagctccttgaggacacggaccctggcagtgaccttcacagtgcccagaccacgcgtcgacattgattattgactagttattaatagtaatcaattacggggtcattagttcatagcccatatatggagttccgcgttacataacttacggtaaatggcccgcctggctgaccgcccaacgacccccgcccattgacgtcaataatgacgtatgttcccatagtaacgccaatagggactttccattgacgtcaatgggtggagtatttacggtaaactgcccacttggcagtacatcaagtgtatcatatgccaagtacgccccctattgacgtcaatgacggtaaatggcccgcctggcattatgcccagtacatgaccttatgggactttcctacttggcagtacatctacgtattagtcatcgctattaccatgtcgaggccacgttctgcttcactctccccatctcccccccctccccacccccaattttgtatttatttattttttaattattttgtgcagcgatgggggcggggggggggggcgcgcgccaggcggggcggggcggggcgaggggcggggcggggcgaggcggagaggtgcggcggcagccaatcagagcggcgcgctccgaaagtttccttttatggcgaggcggcggcggcggcggccctataaaaagcgaagcgcgcggcgggcgggagcaagcttgaactgaaaaaccagaaagttaactggtaagtttagtctttttgtcttttatttcaggtcccggatccggtggtggtgcaaatcaaagaactgctcctcagtggatgttgcctttacttctaggcctgtacggaagtgttacttctgctctaaaagctgcggaattgtacccgcggccgatccaccggtgtgctgggcggggggcggcgggccctcccgcagaacaccatgcgctcttcggaagcaattcagtctcgttgtacctgtgatttggtacaacgagactgaattgcttctgaggagcgccttgacagcagccatgggagggccgccccctacctcagtgactcgaggacggggtgaactacgcctgaggatccgatctttttccctctgccaaaaattatggggacatcatgaagccccttgagcatctgacttctggctaataaaggaaatttattttcattgcaatagtgtgttggaattttttgtgtctctcactcgactagatttaaatatgtcgtgcatcgatgctacgtagataagtagcatggcgggttaatcattaactacagaggaacccctagtgatggagttggccactccctctctgcgcgctcgctcgctcactgaggccgggcgaccaaaggtcgcccgacgcccgggctttgcccgggcggcctcagtgagcgagcgagcgcgcagctgcctgcagg

SEQ ID NO: 1359 - DNA, 2299 bp, synthetic construct
  source 1..2299: mol_type = other DNA; note = Description of Artificial Sequence: Synthetic polynucleotide
cctgcaggcagctgcgcgctcgctcgctcactgaggccgcccgggcaaagcccgggcgtcgggcgacctttggtcgcccggcctcagtgagcgagcgagcgcgcagagagggagtggccaactccatcactaggggttccttgtagttaatgattaacccgccatgctacttatctacgtagccatgcgtcgacataacgcgtaattcgcccttgggcctaggcaattggatccgccggcagagaaaacatcccagggatttacagatcacatgcaggcagggaccagctcaacccttctttaatgtcatccagggagggggccagggatggaggggaggggttgaggagcgagaggcagttatttttgggtgggattcaccacttttcccatgaagaggggagacttggtattttgttcaatcattaagaagacaaagggtttgttgaacttgacctcgggggggatagacatgggtatggcctctaaaaacatggccccagcagcttcagtccctttctcgtcgatggtcagcacagccttatgcacggcctggaggggagagaagcagagacacgttgtaaggctgatcccaggcctcgagcaaggctcacgtggacacctcccaggaagcgctcactccccctggacggccctggccctgcacatcctctccctccctgtcacataggccttgctcctcctcaaggctttggctgatggggctggctcccctctgtccatcttcctgacaagcgcctctccccctgctcaggtgcacccacaactcagaacagggaagagcatcgtcactccacgtctgcctccagggctctctcctttctagtacacggcttgaagctccttgaggacacggaccctggcagtgaccttcacagtgcccagaccacgcgtcgacattgattattgactagttattaatagtaatcaattacggggtcattagttcatagcccatatatggagttccgcgttacataacttacggtaaatggcccgcctggctgaccgcccaacgacccccgcccattgacgtcaataatgacgtatgttcccatagtaacgccaatagggactttccattgacgtcaatgggtggagtatttacggtaaactgcccacttggcagtacatcaagtgtatcatatgccaagtacgccccctattgacgtcaatgacggtaaatggcccgcctggcattatgcccagtacatgaccttatgggactttcctacttggcagtacatctacgtattagtcatcgctattaccatgtcgaggccacgttctgcttcactctccccatctcccccccctccccacccccaattttgtatttatttattttttaattattttgtgcagcgatgggggcggggggggggggcgcgcgccaggcggggcggggcggggcgaggggcggggcggggcgaggcggagaggtgcggcggcagccaatcagagcggcgcgctccgaaagtttccttttatggcgaggcggcggcggcggcggccctataaaaagcgaagcgcgcggcgggcgggagcaagcttgaactgaaaaaccagaaagttaactggtaagtttagtctttttgtcttttatttcaggtcccggatccggtggtggtgcaaatcaaagaactgctcctcagtggatgttgcctttacttctaggcctgtacggaagtgttacttctgctctaaaagctgcggaattgtacccgcggccgatccaccggtgtgctgggcggggggcggcgggccctcccgcagaacaccatgcgctcctcggaataagcatggagctagcaggttgtggccactgagaaacctgctagctccatgcttgttctgcggagcgccttgacagcagccatgggagggccgccccctacctcagtgactcgaggacggggtgaactacgcctgaggatccgatctttttccctctgccaaaaattatggggacatcatgaagccccttgagcatctgacttctggctaataaaggaaatttattttcattgcaatagtgtgttggaattttttgtgtctctcactcgactagatttaaatatgtcgtgcatcgatgctacgtagataagtagcatggcgggttaatcattaactacagaggaacccctagtgatggagttggccactccctctctgcgcgctcgctcgctcactgaggccgggcgaccaaaggtcgcccgacgcccgggctttgcccgggcggcctcagtgagcgagcgagcgcgcagctgcctgcagg

SEQ ID NO: 1360 - DNA, 4618 bp, synthetic construct
  source 1..4618: mol_type = other DNA; note = Description of Artificial Sequence: Synthetic polynucleotide
cctgcaggcagctgcgcgctcgctcgctcactgaggccgcccgggcaaagcccgggcgtcgggcgacctttggtcgcccggcctcagtgagcgagcgagcgcgcagagagggagtggccaactccatcactaggggttccttgtagttaatgattaacccgccatgctacttatctacgtagccatgcgtcgacataacgcgtaattcgcccttgggcctaggcaattggatccgccggcagagaaaacatcccagggatttacagatcacatgcaggcagggaccagctcaacccttctttaatgtcatccagggagggggccagggatggaggggaggggttgaggagcgagaggcagttatttttgggtgggattcaccacttttcccatgaagaggggagacttggtattttgttcaatcattaagaagacaaagggtttgttgaacttgacctcgggggggatagacatgggtatggcctctaaaaacatggccccagcagcttcagtccctttctcgtcgatggtcagcacagccttatgcacggcctggaggggagagaagcagagacacgttgtaaggctgatcccaggcctcgagcaaggctcacgtggacacctcccaggaagcgctcactccccctggacggccctggccctgcacatcctctccctccctgtcacataggccttgctcctcctcaaggctttggctgatggggctggctcccctctgtccatcttcctgacaagcgcctctccccctgctcaggtgcacccacaactcagaacagggaagagcatcgtcactccacgtctgcctccagggctctctcctttctagtacacggcttgaagctccttgaggacacggaccctggcagtgaccttcacagtgcccagaccccaagataatgcagccattcatggaactgcagttgttcattggtcgcctttagttttccaaaataagtgtcatctttagctgaaatcattcattaattcagacaccaaatctcacagatcgaaggagtcagaaattcctttgaaacaacttagcccaaacctttctgtgtcagtatggataaatcaaggcccaatgtctagaaggtcttgggcaaagttgaaattcagggtcagtgacacaacctcaagggaggccccgaaagtgccagctgcacagcagtcccctgcctggctttgctgtttgaccacgtcccgtgtcagtgaatcacgggcatcttcaggagctcagcctgggtcttcatttgtttccctcggccccttcctcagcctcaggacagagctgcagcccccacacattcttccctacagataccatggtgcaacaaggtcgtcagggtgatctcaccttggagagcttcaggggtgcctcctctgtgaccccggagaggtcagccccattgctgaagaccttagtgatgcccagttgacccaggacgctcttcagatcataggttccagtaatggacagtttgggtaaatgtaagctggcagacctgtcgtgcagaaaagaaattcaaggcatggcacagcattcctcttgttcttctgggacccaccacagtgcaagtgttttcttttctgattatttctgccacttactcctgtgtcctccacccacactaagatgggaactcggctttggtttgttctacttttagctcttctacattgagtcaaagacgcgtcgacattgattattgactagttattaatagtaatcaattacggggtcattagttcatagcccatatatggagttccgcgttacataacttacggtaaatggcccgcctggctgaccgcccaacgacccccgcccattgacgtcaataatgacgtatgttcccatagtaacgccaatagggactttccattgacgtcaatgggtggagtatttacggtaaactgcccacttggcagtacatcaagtgtatcatatgccaagtacgccccctattgacgtcaatgacggtaaatggcccgcctggcattatgcccagtacatgaccttatgggactttcctacttggcagtacatctacgtattagtcatcgctattaccatgtcgaggccacgttctgcttcactctccccatctcccccccctccccacccccaattttgtatttatttattttttaattattttgtgcagcgatgggggcggggggggggggcgcgcgccaggcggggcggggcggggcgaggggcggggcggggcgaggcggagaggtgcggcggcagccaatcagagcggcgcgctccgaaagtttccttttatggcgaggcggcggcggcggcggccctataaaaagcgaagcgcgcggcgggcgggagcaagcttgaactgaaaaaccagaaagttaactggtaagtttagtctttttgtcttttatttcaggtcccggatccggtggtggtgcaaatcaaagaactgctcctcagtggatgttgcctttacttctaggcctgtacggaagtgttacttctgctctaaaagctgcggaattgtacccgcggccgatccaccggtgtgctgggcggggggcggcgggccctcccgcagaacaccatgcgctccacggaacctgctagctccatgcttgctgtggccactgagaagtaagcatggagctagcaggttctgaggagcgccttgacagcagccatgggagggccgccccctacctcagtgactcgaggacggggtgaactacgcctgaggatccgatctttttccctctgccaaaaattatggggacatcatgaagccccttgagcatctgacttctggctaataaaggaaatttattttcattgcaatagtgtgttggaattttttgtgtctctcactcgactagatttaaataatgttaacatcgaatgaatcacaaaagcttgaaatgccacctcctctgatattctaggtgtcctggaagcctgtctcatcttgccctgtagtgttgggtcacctggcccccagcctgtaacatccccagggccctacacccagagaaacacggggctggtggcagtgcccagtgacaaccgtttagtggataagagaagagtgaccacaccaggctgagtgctcctctctggttttccatggggagacaatgccaccctgagcagggtctggtgtgagcgggcagcttggctctgggctctctgatccgttaccctctcagcctctttgttctttctcaacccctggagcagagacctcaggaggtgctggcatggaacagagaaattccagcctcgattcctattatgaacccgacaccttttgtattttcatcttggttttacagtgtacaaaacgaactagatcagcagggcatgggcataatcacgaatgcacacacatacactaatgtgtggctcatgtttaagtatcacttactacaggacacccaatctaacagcaccgataaagtgacagagaaacgcaagccttctgcgaacatggcctggctgttccaattccgaaccttgcttttctgggccttgccacacaggctcttcccccgtccccccagggacattctacccttgaactccacactccactgctgcctttgccaggaagcccatctgttcctttttggttctgccagaacgtgtggtggtgctgctgtccctgccctgggcactggatattgggaagggacagtgtccacactggagtgggaagtccccagggacgagacctttacctcctcacccctgggtactgtcctcctcatggagcatggatggcgctgcctgaactcagtggtggcctcattctggaagccaagtttatacagagtagcagtgacccagggatgtggggttcaccctcctcagccctctggccagtcctgatgggcctcagtcccaacatggctaagaggtgtgggcagcttcttggtcaccctcaggttggggaatcaccttctgtcttcattttccaggaacttggtgatgatatcgtgggtgagttcattttccaggtgctgtagtttcccctcatcaggcaggaagaagatggcggtggcattgcccaggtatttcatcagcagcacccagctggacagcttcttacagtgctggatgttaaacatgcctaaacgcttcatcataggcaccttcacggtggtcacctggtccacgtggaagtcctcttcctcggtgtccttgacttcaaagggtctctcccatttgcctggagagaggggaaggtgggcatcaccaggggtgagtgaaggtttggaagagtgtagcagaataaagaaaccatgagtcccctccctgagaagccctgagcccccttgacgacacacatccctcgaggctcagcttcatcatctgtaaaaggtgctgaaactgaccatttaaatatgtcgtgcatcgatgctacgtagataagtagcatggcgggttaatcattaactacagaggaacccctagtgatggagttggccactccctctctgcgcgctcgctcgctcactgaggccgggcgaccaaaggtcgcccgacgcccgggctttgcccgggcggcctcagtgagcgagcgagcgcgcagctgcctgcagg

SEQ ID NO: 1361 - DNA, 2307 bp, synthetic construct
  source 1..2307: mol_type = other DNA; note = Description of Artificial Sequence: Synthetic polynucleotide
cctgcaggcagctgcgcgctcgctcgctcactgaggccgcccgggcaaagcccgggcgtcgggcgacctttggtcgcccggcctcagtgagcgagcgagcgcgcagagagggagtggccaactccatcactaggggttccttgtagttaatgattaacccgccatgctacttatctacgtagccatgcgtcgacataacgcgtaattcgcccttgggcctaggcaattggatccgccggcagagaaaacatcccagggatttacagatcacatgcaggcagggaccagctcaacccttctttaatgtcatccagggagggggccagggatggaggggaggggttgaggagcgagaggcagttatttttgggtgggattcaccacttttcccatgaagaggggagacttggtattttgttcaatcattaagaagacaaagggtttgttgaacttgacctcgggggggatagacatgggtatggcctctaaaaacatggccccagcagcttcagtccctttctcgtcgatggtcagcacagccttatgcacggcctggagggacgcgtcgacattgattattgactagttattaatagtaatcaattacggggtcattagttcatagcccatatatggagttccgcgttacataacttacggtaaatggcccgcctggctgaccgcccaacgacccccgcccattgacgtcaataatgacgtatgttcccatagtaacgccaatagggactttccattgacgtcaatgggtggagtatttacggtaaactgcccacttggcagtacatcaagtgtatcatatgccaagtacgccccctattgacgtcaatgacggtaaatggcccgcctggcattatgcccagtacatgaccttatgggactttcctacttggcagtacatctacgtattagtcatcgctattaccatgtcgaggccacgttctgcttcactctccccatctcccccccctccccacccccaattttgtatttatttattttttaattattttgtgcagcgatgggggcggggggggggggcgcgcgccaggcggggcggggcggggcgaggggcggggcggggcgaggcggagaggtgcggcggcagccaatcagagcggcgcgctccgaaagtttccttttatggcgaggcggcggcggcggcggccctataaaaagcgaagcgcgcggcgggcgggagcaagcttgaactgaaaaaccagaaagttaactggtaagtttagtctttttgtcttttatttcaggtcccggatccggtggtggtgcaaatcaaagaactgctcctcagtggatgttgcctttacttctaggcctgtacggaagtgttacttctgctctaaaagctgcggaattgtacccgcggccgatccaccggtgtgctgggcggggggcggcgggccctcccgcagaacaccatgcgctccacggaacctgctagctccatgcttgctgtggccactgagaagtaagcatggagctagcaggttctgaggagcgccttgacagcagccatgggagggccgccccctacctcagtgactcgaggacggggtgaactacgcctgaggatccgatctttttccctctgccaaaaattatggggacatcatgaagccccttgagcatctgacttctggctaataaaggaaatttattttcattgcaatagtgtgttggaattttttgtgtctctcactcgactagatttaaatgagagaagcagagacacgttgtaaggctgatcccaggcctcgagcaaggctcacgtggacacctcccaggaagcgctcactccccctggacggccctggccctgcacatcctctccctccctgtcacataggccttgctcctcctcaaggctttggctgatggggctggctcccctctgtccatcttcctgacaagcgcctctccccctgctcaggtgcacccacaactcagaacagggaagagcatcgtcactccacgtctgcctccagggctctctcctttctagtacacggcttgaagctccttgaggacacggaccctggcagtgaccttcacagtgcccagaccatttaaatatgtcgtgcatcgatgctacgtagataagtagcatggcgggttaatcattaactacagaggaacccctagtgatggagttggccactccctctctgcgcgctcgctcgctcactgaggccgggcgaccaaaggtcgcccgacgcccgggctttgcccgggcggcctcagtgagcgagcgagcgcgcagctgcctgcagg

SEQ ID NO: 1362 - DNA, 2302 bp, synthetic construct
  source 1..2302: mol_type = other DNA; note = Description of Artificial Sequence: Synthetic polynucleotide
cctgcaggcagctgcgcgctcgctcgctcactgaggccgcccgggcaaagcccgggcgtcgggcgacctttggtcgcccggcctcagtgagcgagcgagcgcgcagagagggagtggccaactccatcactaggggttccttgtagttaatgattaacccgccatgctacttatctacgtagccatgcgtcgacataacgcgtaattcgcccttgggcctaggcaattggatccgccggcagagaaaacatcccagggatttacagatcacatgcaggcagggaccagctcaacccttctttaatgtcatccagggagggggccagggatggaggggaggggttgaggagcgagaggcagttatttttgggtgggattcaccacttttcccatgaagaggggagacttggtattttgttcaatcattaagaagacaaagggtttgttgaacttgacctcgggggggatagacatgggtatggcctctaaaaacatggccccagcagcttcagtccctttctcgtcgatggtcagcacagccttatgcacggcctggagggacgcgtcgacattgattattgactagttattaatagtaatcaattacggggtcattagttcatagcccatatatggagttccgcgttacataacttacggtaaatggcccgcctggctgaccgcccaacgacccccgcccattgacgtcaataatgacgtatgttcccatagtaacgccaatagggactttccattgacgtcaatgggtggagtatttacggtaaactgcccacttggcagtacatcaagtgtatcatatgccaagtacgccccctattgacgtcaatgacggtaaatggcccgcctggcattatgcccagtacatgaccttatgggactttcctacttggcagtacatctacgtattagtcatcgctattaccatgtcgaggccacgttctgcttcactctccccatctcccccccctccccacccccaattttgtatttatttattttttaattattttgtgcagcgatgggggcggggggggggggcgcgcgccaggcggggcggggcggggcgaggggcggggcggggcgaggcggagaggtgcggcggcagccaatcagagcggcgcgctccgaaagtttccttttatggcgaggcggcggcggcggcggccctataaaaagcgaagcgcgcggcgggcgggagcaagcttgaactgaaaaaccagaaagttaactggtaagtttagtctttttgtcttttatttcaggtcccggatccggtggtggtgcaaatcaaagaactgctcctcagtggatgttgcctttacttctaggcctgtacggaagtgttacttctgctctaaaagctgcggaattgtacccgcggccgatccaccggtgtgctgggcggggggcggcgggccctcccgcagaacaccatgcgctcttcggaagcaattcagtctcgttgtacctgtgatttggtacaacgagactgaattgcttctgaggagcgccttgacagcagccatgggagggccgccccctacctcagtgactcgaggacggggtgaactacgcctgaggatccgatctttttccctctgccaaaaattatggggacatcatgaagccccttgagcatctgacttctggctaataaaggaaatttattttcattgcaatagtgtgttggaattttttgtgtctctcactcgactagatttaaatgagagaagcagagacacgttgtaaggctgatcccaggcctcgagcaaggctcacgtggacacctcccaggaagcgctcactccccctggacggccctggccctgcacatcctctccctccctgtcacataggccttgctcctcctcaaggctttggctgatggggctggctcccctctgtccatcttcctgacaagcgcctctccccctgctcaggtgcacccacaactcagaacagggaagagcatcgtcactccacgtctgcctccagggctctctcctttctagtacacggcttgaagctccttgaggacacggaccctggcagtgaccttcacagtgcccagaccatttaaatatgtcgtgcatcgatgctacgtagataagtagcatggcgggttaatcattaactacagaggaacccctagtgatggagttggccactccctctctgcgcgctcgctcgctcactgaggccgggcgaccaaaggtcgcccgacgcccgggctttgcccgggcggcctcagtgagcgagcgagcgcgcagctgcctgcagg

SEQ ID NO: 1363 - DNA, 2307 bp, synthetic construct
  source 1..2307: mol_type = other DNA; note = Description of Artificial Sequence: Synthetic polynucleotide
cctgcaggcagctgcgcgctcgctcgctcactgaggccgcccgggcaaagcccgggcgtcgggcgacctttggtcgcccggcctcagtgagcgagcgagcgcgcagagagggagtggccaactccatcactaggggttccttgtagttaatgattaacccgccatgctacttatctacgtagccatgcgtcgacataacgcgtaattcgcccttgggcctaggcaattggatccgccggcagagaaaacatcccagggatttacagatcacatgcaggcagggaccagctcaacccttctttaatgtcatccagggagggggccagggatggaggggaggggttgaggagcgagaggcagttatttttgggtgggattcaccacttttcccatgaagaggggagacttggtattttgttcaatcattaagaagacaaagggtttgttgaacttgacctcgggggggatagacatgggtatggcctctaaaaacatggccccagcagcttcagtccctttctcgtcgatggtcagcacagccttatgcacggcctggagggacgcgtcgacattgattattgactagttattaatagtaatcaattacggggtcattagttcatagcccatatatggagttccgcgttacataacttacggtaaatggcccgcctggctgaccgcccaacgacccccgcccattgacgtcaataatgacgtatgttcccatagtaacgccaatagggactttccattgacgtcaatgggtggagtatttacggtaaactgcccacttggcagtacatcaagtgtatcatatgccaagtacgccccctattgacgtcaatgacggtaaatggcccgcctggcattatgcccagtacatgaccttatgggactttcctacttggcagtacatctacgtattagtcatcgctattaccatgtcgaggccacgttctgcttcactctccccatctcccccccctccccacccccaattttgtatttatttattttttaattattttgtgcagcgatgggggcggggggggggggcgcgcgccaggcggggcggggcggggcgaggggcggggcggggcgaggcggagaggtgcggcggcagccaatcagagcggcgcgctccgaaagtttccttttatggcgaggcggcggcggcggcggccctataaaaagcgaagcgcgcggcgggcgggagcaagcttgaactgaaaaaccagaaagttaactggtaagtttagtctttttgtcttttatttcaggtcccggatccggtggtggtgcaaatcaaagaactgctcctcagtggatgttgcctttacttctaggcctgtacggaagtgttacttctgctctaaaagctgcggaattgtacccgcggccgatccaccggtgtgctgggcggggggcggcgggccctcccgcagaacaccatgcgctcctcggaataagcatggagctagcaggttgtggccactgagaaacctgctagctccatgcttgttctgcggagcgccttgacagcagccatgggagggccgccccctacctcagtgactcgaggacggggtgaactacgcctgaggatccgatctttttccctctgccaaaaattatggggacatcatgaagccccttgagcatctgacttctggctaataaaggaaatttattttcattgcaatagtgtgttggaattttttgtgtctctcactcgactagatttaaatgagagaagcagagacacgttgtaaggctgatcccaggcctcgagcaaggctcacgtggacacctcccaggaagcgctcactccccctggacggccctggccctgcacatcctctccctccctgtcacataggccttgctcctcctcaaggctttggctgatggggctggctcccctctgtccatcttcctgacaagcgcctctccccctgctcaggtgcacccacaactcagaacagggaagagcatcgtcactccacgtctgcctccagggctctctcctttctagtacacggcttgaagctccttgaggacacggaccctggcagtgaccttcacagtgcccagaccatttaaatatgtcgtgcatcgatgctacgtagataagtagcatggcgggttaatcattaactacagaggaacccctagtgatggagttggccactccctctctgcgcgctcgctcgctcactgaggccgggcgaccaaaggtcgcccgacgcccgggctttgcccgggcggcctcagtgagcgagcgagcgcgcagctgcctgcagg

SEQ ID NO: 1364 - DNA, 1587 bp, synthetic construct
  source 1..1587: mol_type = other DNA; note = Description of Artificial Sequence: Synthetic polynucleotide
cctgcaggcagctgcgcgctcgctcgctcactgaggccgcccgggcaaagcccgggcgtcgggcgacctttggtcgcccggcctcagtgagcgagcgagcgcgcagagagggagtggccaactccatcactaggggttccttgtagttaatgattaacccgccatgctacttatctacgtagccatgcgtcgacataacgcgtcgacattgattattgactagttattaatagtaatcaattacggggtcattagttcatagcccatatatggagttccgcgttacataacttacggtaaatggcccgcctggctgaccgcccaacgacccccgcccattgacgtcaataatgacgtatgttcccatagtaacgccaatagggactttccattgacgtcaatgggtggagtatttacggtaaactgcccacttggcagtacatcaagtgtatcatatgccaagtacgccccctattgacgtcaatgacggtaaatggcccgcctggcattatgcccagtacatgaccttatgggactttcctacttggcagtacatctacgtattagtcatcgctattaccatgtcgaggccacgttctgcttcactctccccatctcccccccctccccacccccaattttgtatttatttattttttaattattttgtgcagcgatgggggcggggggggggggcgcgcgccaggcggggcggggcggggcgaggggcggggcggggcgaggcggagaggtgcggcggcagccaatcagagcggcgcgctccgaaagtttccttttatggcgaggcggcggcggcggcggccctataaaaagcgaagcgcgcggcgggcgggagcaagcttgaactgaaaaaccagaaagttaactggtaagtttagtctttttgtcttttatttcaggtcccggatccggtggtggtgcaaatcaaagaactgctcctcagtggatgttgcctttacttctaggcctgtacggaagtgttacttctgctctaaaagctgcggaattgtacccgcggccgatccaccggtgtgctgggcggggggcggcgggccctcccgcagaacaccatgcgctccacggaacctgctagctccatgcttgctgtggccactgagaagtaagcatggagctagcaggttctgaggagcgccttgacagcagccatgggagggccgccccctacctcagtgactcgaggacggggtgaactacgcctgaggatccgatctttttccctctgccaaaaattatggggacatcatgaagccccttgagcatctgacttctggctaataaaggaaatttattttcattgcaatagtgtgttggaattttttgtgtctctcactcgactagatttaaatatgtcgtgcatcgatgctacgtagataagtagcatggcgggttaatcattaactacagaggaacccctagtgatggagttggccactccctctctgcgcgctcgctcgctcactgaggccgggcgaccaaaggtcgcccgacgcccgggctttgcccgggcggcctcagtgagcgagcgagcgcgcagctgcctgcagg

SEQ ID NO: 1365 - DNA, 1582 bp, synthetic construct
  source 1..1582: mol_type = other DNA; note = Description of Artificial Sequence: Synthetic polynucleotide
cctgcaggcagctgcgcgctcgctcgctcactgaggccgcccgggcaaagcccgggcgtcgggcgacctttggtcgcccggcctcagtgagcgagcgagcgcgcagagagggagtggccaactccatcactaggggttccttgtagttaatgattaacccgccatgctacttatctacgtagccatgcgtcgacataacgcgtcgacattgattattgactagttattaatagtaatcaattacggggtcattagttcatagcccatatatggagttccgcgttacataacttacggtaaatggcccgcctggctgaccgcccaacgacccccgcccattgacgtcaataatgacgtatgttcccatagtaacgccaatagggactttccattgacgtcaatgggtggagtatttacggtaaactgcccacttggcagtacatcaagtgtatcatatgccaagtacgccccctattgacgtcaatgacggtaaatggcccgcctggcattatgcccagtacatgaccttatgggactttcctacttggcagtacatctacgtattagtcatcgctattaccatgtcgaggccacgttctgcttcactctccccatctcccccccctccccacccccaattttgtatttatttattttttaattattttgtgcagcgatgggggcggggggggggggcgcgcgccaggcggggcggggcggggcgaggggcggggcggggcgaggcggagaggtgcggcggcagccaatcagagcggcgcgctccgaaagtttccttttatggcgaggcggcggcggcggcggccctataaaaagcgaagcgcgcggcgggcgggagcaagcttgaactgaaaaaccagaaagttaactggtaagtttagtctttttgtcttttatttcaggtcccggatccggtggtggtgcaaatcaaagaactgctcctcagtggatgttgcctttacttctaggcctgtacggaagtgttacttctgctctaaaagctgcggaattgtacccgcggccgatccaccggtgtgctgggcggggggcggcgggccctcccgcagaacaccatgcgctcttcggaagcaattcagtctcgttgtgcctgtgacctggtacaacgagactgaattgcttctgaggagcgccttgacagcagccatgggagggccgccccctacctcagtgactcgaggacggggtgaactacgcctgaggatccgatctttttccctctgccaaaaattatggggacatcatgaagccccttgagcatctgacttctggctaataaaggaaatttattttcattgcaatagtgtgttggaattttttgtgtctctcactcgactagatttaaatatgtcgtgcatcgatgctacgtagataagtagcatggcgggttaatcattaactacagaggaacccctagtgatggagttggccactccctctctgcgcgctcgctcgctcactgaggccgggcgaccaaaggtcgcccgacgcccgggctttgcccgggcggcctcagtgagcgagcgagcgcgcagctgcctgcagg

SEQ ID NO: 1366 - DNA, 1584 bp, synthetic construct
  source 1..1584: mol_type = other DNA; note = Description of Artificial Sequence: Synthetic polynucleotide
ctgcgcgctcgctcgctcactgaggccgcccgggcaaagcccgggcgtcgggcgacctttggtcgcccggcctcagtgagcgagcgagcgcgcagagagggagtgtagccatgctctaggaagatcaattcaattcacgcgtcgacattgattattgactagttattaatagtaatcaattacggggtcattagttcatagcccatatatggagttccgcgttacataacttacggtaaatggcccgcctggctgaccgcccaacgacccccgcccattgacgtcaataatgacgtatgttcccatagtaacgccaatagggactttccattgacgtcaatgggtggagtatttacggtaaactgcccacttggcagtacatcaagtgtatcatatgccaagtacgccccctattgacgtcaatgacggtaaatggcccgcctggcattatgcccagtacatgaccttatgggactttcctacttggcagtacatctacgtattagtcatcgctattaccatgtcgaggccacgttctgcttcactctccccatctcccccccctccccacccccaattttgtatttatttattttttaattattttgtgcagcgatgggggcggggggggggggcgcgcgccaggcggggcggggcggggcgaggggcggggcggggcgaggcggagaggtgcggcggcagccaatcagagcggcgcgctccgaaagtttccttttatggcgaggcggcggcggcggcggccctataaaaagcgaagcgcgcggcgggcgggagcaagcttgaactgaaaaaccagaaagttaactggtaagtttagtctttttgtcttttatttcaggtcccggatccggtggtggtgcaaatcaaagaactgctcctcagtggatgttgcctttacttctaggcctgtacggaagtgttacttctgctctaaaagctgcggaattgtacccgcggccgatccaccggtgaagcaaagaaggggcagagggagcccgtgagctgagtgggccagggactgggagaaggagtgaggaggcagggccggcatgcctctgctgctggccagacctgctagctccatgcttcccgtctgcacctgtcactagtaagcatggagctagcaggtttggccgtgtagtgctacccagcgctggctgcctcctcagcattgcaattcctctcccatctgggcaccagtcagctaccctggtgggaatctgggtagccctcgaggacggggtgaactacgcctgaggatccgatctttttccctctgccaaaaattatggggacatcatgaagccccttgagcatctgacttctggctaataaaggaaatttattttcattgcaatagtgtgttggaattttttgtgtctctcactcggcctaggtagataagtagcatggcgggttaatcattaactacaaggaacccctagtgatggagttggccactccctctctgcgcgctcgctcgctcactgaggccgggcgaccaaaggtcgcccgacgcccgggctttgcccgggcggcctcagtgagcgagcgagcgcgcag

SEQ ID NO: 1367 - DNA, 1482 bp, synthetic construct
  source 1..1482: mol_type = other DNA; note = Description of Artificial Sequence: Synthetic polynucleotide
ctgcgcgctcgctcgctcactgaggccgcccgggcaaagcccgggcgtcgggcgacctttggtcgcccggcctcagtgagcgagcgagcgcgcagagagggagtgtagccatgctctaggaagatcaattcaattcacgcgtcgacattgattattgactagttattaatagtaatcaattacggggtcattagttcatagcccatatatggagttccgcgttacataacttacggtaaatggcccgcctggctgaccgcccaacgacccccgcccattgacgtcaataatgacgtatgttcccatagtaacgccaatagggactttccattgacgtcaatgggtggagtatttacggtaaactgcccacttggcagtacatcaagtgtatcatatgccaagtacgccccctattgacgtcaatgacggtaaatggcccgcctggcattatgcccagtacatgaccttatgggactttcctacttggcagtacatctacgtattagtcatcgctattaccatgtcgaggccacgttctgcttcactctccccatctcccccccctccccacccccaattttgtatttatttattttttaattattttgtgcagcgatgggggcggggggggggggcgcgcgccaggcggggcggggcggggcgaggggcggggcggggcgaggcggagaggtgcggcggcagccaatcagagcggcgcgctccgaaagtttccttttatggcgaggcggcggcggcggcggccctataaaaagcgaagcgcgcggcgggcgggagcaagcttgaactgaaaaaccagaaagttaactggtaagtttagtctttttgtcttttatttcaggtcccggatccggtggtggtgcaaatcaaagaactgctcctcagtggatgttgcctttacttctaggcctgtacggaagtgttacttctgctctaaaagctgcggaattgtacccgcggccgatccaccggtgtgctgggcggggggcggcgggccctcccgcagaacaccatgcgctcttcggaagcaattcagtctcgttgtgcctgtgacctggtacaacgagactgaattgcttctgaggagcgccttgacagcagccatgggagggccgccccctacctcagtgactcgaggacggggtgaactacgcctgaggatccgatctttttccctctgccaaaaattatggggacatcatgaagccccttgagcatctgacttctggctaataaaggaaatttattttcattgcaatagtgtgttggaattttttgtgtctctcactcggcctaggtagataagtagcatggcgggttaatcattaactacaaggaacccctagtgatggagttggccactccctctctgcgcgctcgctcgctcactgaggccgggcgaccaaaggtcgcccgacgcccgggctttgcccgggcggcctcagtgagcgagcgagcgcgcag

SEQ ID NO: 1368 - DNA, 4606 bp, synthetic construct
  source 1..4606: mol_type = other DNA; note = Description of Artificial Sequence: Synthetic polynucleotide
cctgcaggcagctgcgcgctcgctcgctcactgaggccgcccgggcaaagcccgggcgtcgggcgacctttggtcgcccggcctcagtgagcgagcgagcgcgcagagagggagtggccaactccatcactaggggttccttgtagttaatgattaacccgccatgctacttatctacgtagccatgcgtcgacataacgcgtatatctagacgttacataacttacggtaaatggcccgcctggctgaccgcccaacgacccccgcccattgacgtcaataatgacgtatgttcccatagtaacgccaatagggactttccattgacgtcaatgggtggagtatttacggtaaactgcccacttggcagtacatcaagtgtatcatatgccaagtacgccccctattgacgtcaatgacggtaaatggcccgcctggcattatgcccagtacatgaccttatgggactttcctacttggcagtacatctagtattagtcatcgctattaccatggtgatgcggttttggcagtacatcaatgggcgtggatagcggtttgactcacggggatttccaagtctccaccccattgacgtcaatgggagtttgttttggcaccaaaatcaacgggactttccaaaatgtcgtaacaactccgccccattgacgcaaatgggcggtaggcgtgtacggtgggaggtctatataagcagagctcgtttagtgaaccgtcagatcgcctggagacgccatccacgctgttttgacctccatagaagacaccgggaccgatccagcctccgcggattcgaatcccggccgggaacggtgcattggaacgcggattccccgtgccaagagtgacgtaagtaccgcctatagagtctataggcccacaaaaaatgctttcttcttttaatatacttttttgtttatcttatttctaatactttccctaatctctttctttcagggcaataatgatacaatgtatcatgcctctttgcaccattctaaagaataacagtgataatttctgggttaaggcaatagcaatatttctgcatataaatatttctgcatataaattgtaactgatgtaagaggtttcatattgctaatagcagctacaatccagctaccattctgcttttattttatggttgggataaggctggattattctgagtccaagctaggcccttttgctaatcatgttcatacctcttatcttcctcccacagctcctgggcaacgtgctggtctgtgtgctggcccatcactttggcaaagaattgggattcgaacatcgattgaattccccggggatccaccgtgctgggcggggggcggcgggccctcccgcagaacaccatgcgctccacggaacctgctagctccatgcttgctgtggccactgagaagtaagcatggagctagcaggttctgaggagcgccttgacagcagccatgggagggccgccccctacctcagtgactcgagagatctacgggtggcatccctgtgacccctccccagtgcctctcctggccctggaagttgccactccagtgcccaccagccttgtcctaataaaattaagttgcatcattttgtctgactaggtgtccttctataatattatggggtggaggggggtggtatggagcaaggggcaagttgggaagacaacctgtagggcctgcggggtctattgggaaccaagctggagtgcagtggcacaatcttggctcactgcaatctccgcctcctgggttcaagcgattctcctgcctcagcctcccgagttgttgggattccaggcatgcatgaccaggctcagctaatttttgtttttttggtagagacggggtttcaccatattggccaggctggtctccaactcctaatctcaggtgatctacccaccttggcctcccaaattgctgggattacaggcgtgaaccactgctcccttccctgtccttactagatttaaataattcgcccttgggcctaggcaattggatccgccggcagagaaaacatcccagggatttacagatcacatgcaggcagggaccagctcaacccttctttaatgtcatccagggagggggccagggatggaggggaggggttgaggagcgagaggcagttatttttgggtgggattcaccacttttcccatgaagaggggagacttggtattttgttcaatcattaagaagacaaagggtttgttgaacttgacctcgggggggatagacatgggtatggcctctaaaaacatggccccagcagcttcagtccctttctcgtcgatggtcagcacagccttatgcacggcctggaggggagagaagcagagacacgttgtaaggctgatcccaggcctcgagcaaggctcacgtggacacctcccaggaagcgctcactccccctggacggccctggccctgcacatcctctccctccctgtcacataggccttgctcctcctcaaggctttggctgatggggctggctcccctctgtccatcttcctgacaagcgcctctccccctgctcaggtgcacccacaactcagaacagggaagagcatcgtcactccacgtctgcctccagggctctctcctttctagtacacggcttgaagctccttgaggacacggaccctggcagtgaccttcacagtgcccagaccccaagataatgcagccattcatggaactgcaggttgttcattggtcgcctttagttttccaaaataagtgtcactttagctgaaatcattcattaattcagacaccaaatctcacagatcgaaggagtcagaaattcctttgaaacaacttagcccaaacctttctgtgtcagtatggataaatcaaggcccaatgtctagaaggtcttgggcaaagttgaaattcagggtcagtgacacaacctcaagggaggccccgaaagtgccagctgcacagcagcccctgcctggctttgctgtttgcccaccgtcccgtgtcagtgaatcacgggcatcttcaggagctcagcctgggtcttcatttgtttccctcggccccttcctcagcctcaggacagtgctgcagcccccacacattcttccctacagataccatggtgcaacaaggtcgtcagggtgatctcaccttggagagcttcaggggtgcctcctctgtgaccccggagaggtcagccccattgctgaagaccttagtgatgcccagttgacccaggacgctcttcagatcataggttccagtaatggacagtttgggtaaatgtaagctggcagacctgtcgtgcagaaaagaaattcaaggcatggcacagcattcctcttgttcttctgggacccaccacagtgcaagtgttttcttttctgattatttctgccacttactcctgtgtcctccacccacactaagatgggaactcggctttggtttgttctacttttagctcttctacattgagtcaaagaatgttaacatcgaatgaatcacaaaagcttgaaatgccacctcctctgatattctaggtgtcctggaagcctgtctcatcttgccctgtagtgttgggtcacctggcccccagcctgtaacatccccagggccctacacccagagaaacacggggctggtggcagtgcccagtgacaaccgtttagtggataagagaagagtgaccacaccaggctgagtgctcctctctggttttccatggggagacaatgccaccctgagcagggtctggtgtgagcggcagctggctctgggctctctgatccgttaccctctcagcctctttgttctttctcaacccctggagcagagacctcaggaggtgctggcatggaacagagaaattccagcctcgattcctattatgaacccgacaccttttgtattttcatcttggttttacagtgtacaaaacgaactagatcagcagggcatgggcataatcacgaatgcacacacatacactaatgtgtggctcatgtttaagtatcacttactacaggacacccaatctaacagcaccgataaagtgacagagaaacgcaagccttctgcgaacatggcctggctgttccaattccgaaccttgcttttctgggccttgccacacaggctcttcccccgtccccccagggacattctacccttgaactccacactccactgctgcctttgccaggaagcccatctgttcctttttggttctgccagaacgtgtggtggtgctgctgtccctgccttgggcactggatattgggaagggacagtgtccacactggagtgggaagttcccagggacgagacctttacctcctcaccctgggtactgttctcctcatggagcatggatttaaatatgtcgtgcatcgatgctacgtagataagtagcatggcgggttaatcattaactacagaggaacccctagtgatggagttggccactccctctctgcgcgctcgctcgctcactgaggccgggcgaccaaaggtcgcccgacgcccgggctttgcccgggcggcctcagtgagcgagcgagcgcgcagctgcctgcagg

SEQ ID NO: 1369 - DNA, 2308 bp, synthetic construct
  source 1..2308: mol_type = other DNA; note = Description of Artificial Sequence: Synthetic polynucleotide
cctgcaggcagctgcgcgctcgctcgctcactgaggccgcccgggcaaagcccgggcgtcgggcgacctttggtcgcccggcctcagtgagcgagcgagcgcgcagagagggagtggccaactccatcactaggggttccttgtagttaatgattaacccgccatgctacttatctacgtagccatgcgtcgacataacgcgtatatctagacgttacataacttacggtaaatggcccgcctggctgaccgcccaacgacccccgcccattgacgtcaataatgacgtatgttcccatagtaacgccaatagggactttccattgacgtcaatgggtggagtatttacggtaaactgcccacttggcagtacatcaagtgtatcatatgccaagtacgccccctattgacgtcaatgacggtaaatggcccgcctggcattatgcccagtacatgaccttatgggactttcctacttggcagtacatctagtattagtcatcgctattaccatggtgatgcggttttggcagtacatcaatgggcgtggatagcggtttgactcacggggatttccaagtctccaccccattgacgtcaatgggagtttgttttggcaccaaaatcaacgggactttccaaaatgtcgtaacaactccgccccattgacgcaaatgggcggtaggcgtgtacggtgggaggtctatataagcagagctcgtttagtgaaccgtcagatcgcctggagacgccatccacgctgttttgacctccatagaagacaccgggaccgatccagcctccgcggattcgaatcccggccgggaacggtgcattggaacgcggattccccgtgccaagagtgacgtaagtaccgcctatagagtctataggcccacaaaaaatgctttcttcttttaatatacttttttgtttatcttatttctaatactttccctaatctctttctttcagggcaataatgatacaatgtatcatgcctctttgcaccattctaaagaataacagtgataatttctgggttaaggcaatagcaatatttctgcatataaatatttctgcatataaattgtaactgatgtaagaggtttcatattgctaatagcagctacaatccagctaccattctgcttttattttatggttgggataaggctggattattctgagtccaagctaggcccttttgctaatcatgttcatacctcttatcttcctcccacagctcctgggcaacgtgctggtctgtgtgctggcccatcactttggcaaagaattgggattcgaacatcgattgaattccccggggatccaccgtgctgggcggggggcggcgggccctcccgcagaacaccatgcgctccacggaacctgctagctccatgcttgctgtggccactgagaagtaagcatggagctagcaggttctgaggagcgccttgacagcagccatgggagggccgccccctacctcagtgactcgagagatctacgggtggcatccctgtgacccctccccagtgcctctcctggccctggaagttgccactccagtgcccaccagccttgtcctaataaaattaagttgcatcattttgtctgactaggtgtccttctataatattatggggtggaggggggtggtatggagcaaggggcaagttgggaagacaacctgtagggcctgcggggtctattgggaaccaagctggagtgcagtggcacaatcttggctcactgcaatctccgcctcctgggttcaagcgattctcctgcctcagcctcccgagttgttgggattccaggcatgcatgaccaggctcagctaatttttgtttttttggtagagacggggtttcaccatattggccaggctggtctccaactcctaatctcaggtgatctacccaccttggcctcccaaattgctgggattacaggcgtgaaccactgctcccttccctgtccttactagatttaaataattcgcccttgggcctaggcaattggatccgccggcagagaaaacatcccagggatttacagatcacatgcaggcagggaccagctcaacccttctatttaaatatgtcgtgcatcgatgctacgtagataagtagcatggcgggttaatcattaactacagaggaacccctagtgatggagttggccactccctctctgcgcgctcgctcgctcactgaggccgggcgaccaaaggtcgcccgacgcccgggctttgcccgggcggcctcagtgagcgagcgagcgcgcagctgcctgcagg

SEQ ID NO: 1370 - DNA, 4608 bp, synthetic construct
  source 1..4608: mol_type = other DNA; note = Description of Artificial Sequence: Synthetic polynucleotide
cctgcaggcagctgcgcgctcgctcgctcactgaggccgcccgggcaaagcccgggcgtcgggcgacctttggtcgcccggcctcagtgagcgagcgagcgcgcagagagggagtggccaactccatcactaggggttccttgtagttaatgattaacccgccatgctacttatctacgtagccatgcgtcgacataacgcgtaattcgcccttgggcctaggcaattggatccgccggcagagaaaacatcccagggatttacagatcacatgcaggcagggaccagctcaacccttctttaatgtcatccagggagggggccagggatggaggggaggggttgaggagcgagaggcagttatttttgggtgggattcaccacttttcccatgaagaggggagacttggtattttgttcaatcattaagaagacaaagggtttgttgaacttgacctcgggggggatagacatgggtatggcctctaaaaacatggccccagcagcttcagtccctttctcgtcgatggtcagcacagccttatgcacggcctggaggggagagaagcagagacacgttgtaaggctgatcccaggcctcgagcaaggctcacgtggacacctcccaggaagcgctcactccccctggacggccctggccctgcacatcctctccctccctgtcacataggccttgctcctcctcaaggctttggctgatggggctggctcccctctgtccatcttcctgacaagcgcctctccccctgctcaggtgcacccacaactcagaacagggaagagcatcgtcactccacgtctgcctccagggctctctcctttctagtacacggcttgaagctccttgaggacacggaccctggcagtgaccttcacagtgcccagaccccaagataatgcagccattcatggaactgcagttgttcattggtcgcctttagttttccaaaataagtgtcatctttagctgaaatcattcattaattcagacaccaaatctcacagatcgaaggagtcagaaattcctttgaaacaacttagcccaaacctttctgtgtcagtatggataaatcaaggcccaatgtctagaaggtcttgggcaaagttgaaattcagggtcagtgacacaacctcaagggaggccccgaaagtgccagctgcacagcagtcccctgcctggctttgctgtttgaccacgtcccgtgtcagtgaatcacgggcatcttcaggagctcagcctgggtcttcatttgtttccctcggccccttcctcagcctcaggacagagctgcagcccccacacattcttccctacagataccagggtgcaacaaggtcgtcagggtgatctcaccttggagagcttcaggggtgcctcctctgtgaccccggagaggtcagccccattgctgaagaccttagtgatgcccagttgacccaggacgctcttcagatcataggttccagtaatggacagtttgggtaaatgtaagctggcagacctgtcgtgcagaaaagaaattcaaggcatggcacagcattcctcttgttcttctgggacccaccacagtgcaagtgttttcttttctgattatttctgccacttactcctgtgtcctccacccacactaagatgggaactcggctttggtttgttctacttttagctcttctacattgagtcaaagaatgttaacatcgaatgaatcacaaaagcttgaaatgccacctcctctgatattctaggtgtcctggaagcctgtctcatcttgccctgtagtgttgggtcacctggcccccagcctgtaacatccccagggccctacacccagagaaacacggggctggtggcagtgcccagtgacaaccgtttagtggataagagaagagtgaccacaccaggctgagtgctcctctctggttttccatgggggagacaatgccaccctgagcagggtctggtgtgagcgggcagcttggctctgggctctctgatccgttaccctctcagcctctttgttctttctcaacccctggagcagagacctcaggaggtgctggcatggaacagagaaattccagcctcgattcctattatgaacccgacaccttttgtattttcatcttggttttacagtgtacaaaacgaactagatcagcagggcatgggcataatcacgaatgcacacacatacactaatgtgtggctcatgtttaagtatcacttactacaggacacccaatctaacagcaccgataaagtgacagagaaacgcaagccttctgcgaacatggcctggctgttccaattccgaaccttgcttttctgggccttgccacacaggctcttcccccgtccccccagggacattctacccttgaactccacactccactgctgcctttgccaggaagcccatctgttcctttttggttctgccagaacgtgtggtggtgctgctgtccctgccctgggcactggatattgggaagggacagtgtccacactggagtgggaagtccccagggacgagacctttacctcctcacccctgggtactgttctcctcatggagcatggacgcgtatatctagacgttacataacttacggtaaatggcccgcctggctgaccgcccaacgacccccgcccattgacgtcaataatgacgtatgttcccatagtaacgccaatagggactttccattgacgtcaatgggtggagtatttacggtaaactgcccacttggcagtacatcaagtgtatcatatgccaagtacgccccctattgacgtcaatgacggtaaatggcccgcctggcattatgcccagtacatgaccttatgggactttcctacttggcagtacatctagtattagtcatcgctattaccatggtgatgcggttttggcagtacatcaatgggcgtggatagcggtttgactcacggggatttccaagtctccaccccattgacgtcaatgggagtttgttttggcaccaaaatcaacgggactttccaaaatgtcgtaacaactccgccccattgacgcaaatgggcggtaggcgtgtacggtgggaggtctatataagcagagctcgtttagtgaaccgtcagatcgcctggagacgccatccacgctgttttgacctccatagaagacaccgggaccgatccagcctccgcggattcgaatcccggccgggaacggtgcattggaacgcggattccccgtgccaagagtgacgtaagtaccgcctatagagtctataggcccacaaaaaatgctttcttcttttaatatacttttttgtttatcttatttctaatactttccctaatctctttctttcagggcaataatgatacaatgtatcatgcctctttgcaccattctaaagaataacagtgataatttctgggttaaggcaatagcaatatttctgcatataaatatttctgcatataaattgtaactgatgtaagaggtttcatattgctaatagcagctacaatccagctaccattctgcttttattttatggttgggataaggctggattattctgagtccaagctaggcccttttgctaatcatgttcatacctcttatcttcctcccacagctcctgggcaacgtgctggtctgtgtgctggcccatcactttggcaaagaattgggattcgaacatcgattgaattccccggggatccaccgtgctgggcggggggcggcgggccctcccgcagaacaccatgcgctccacggaacctgctagctccatgcttgctgtggccactgagaagtaagcatggagctagcaggttctgaggagcgccttgacagcagccatgggagggccgccccctacctcagtgactcgagagatctacgggtggcatccctgtgacccctccccagtgcctctcctggccctggaagttgccactccagtgcccaccagccttgtcctaataaaattaagttgcatcattttgtctgactaggtgtccttctataatattatggggtggaggggggtggtatggagcaaggggcaagttgggaagacaacctgtagggcctgcggggtctattgggaaccaagctggagtgcagtggcacaatcttggctcactgcaatctccgcctcctgggttcaagcgattctcctgcctcagcctcccgagttgttgggattccaggcatgcatgaccaggctcagctaatttttgtttttttggtagagacggggtttcaccatattggccaggctggtctccaactcctaatctcaggtgatctacccaccttggcctcccaaattgctgggattacaggcgtgaaccactgctcccttccctgtccttactagatttaaatatgtcgtgcatcgatgctacgtagataagtagcatggcgggttaatcattaactacagaggaacccctagtgatggagttggccactccctctctgcgcgctcgctcgctcactgaggccgggcgaccaaaggtcgcccgacgcccgggctttgcccgggcggcctcagtgagcgagcgagcgcgcagctgcctgcagg

SEQ ID NO: 1371 - DNA, 2306 bp, synthetic construct
  source 1..2306: mol_type = other DNA; note = Description of Artificial Sequence: Synthetic polynucleotide
cctgcaggcagctgcgcgctcgctcgctcactgaggccgcccgggcaaagcccgggcgtcgggcgacctttggtcgcccggcctcagtgagcgagcgagcgcgcagagagggagtggccaactccatcactaggggttccttgtagttaatgattaacccgccatgctacttatctacgtagccatgcgtcgacataacgcgtaattcgcccttgggcctaggcaattggatccgccggcagagaaaacatcccagggatttacagatcacatgcaggcagggaccagctcaacccttctacgcgtatatctagacgttacataacttacggtaaatggcccgcctggctgaccgcccaacgacccccgcccattgacgtcaataatgacgtatgttcccatagtaacgccaatagggactttccattgacgtcaatgggtggagtatttacggtaaactgcccacttggcagtacatcaagtgtatcatatgccaagtacgccccctattgacgtcaatgacggtaaatggcccgcctggcattatgcccagtacatgaccttatgggactttcctacttggcagtacatctagtattagtcatcgctattaccatggtgatgcggttttggcagtacatcaatgggcgtggatagcggtttgactcacggggatttccaagtctccaccccattgacgtcaatgggagtttgttttggcaccaaaatcaacgggactttccaaaatgtcgtaacaactccgccccattgacgcaaatgggcggtaggcgtgtacggtgggaggtctatataagcagagctcgtttagtgaaccgtcagatcgcctggagacgccatccacgctgttttgacctccatagaagacaccgggaccgatccagcctccgcggattcgaatcccggccgggaacggtgcattggaacgcggattccccgtgccaagagtgacgtaagtaccgcctatagagtctataggcccacaaaaaatgctttcttcttttaatatacttttttgtttatcttatttctaatactttccctaatctctttctttcagggcaataatgatacaatgtatcatgcctctttgcaccattctaaagaataacagtgataatttctgggttaaggcaatagcaatatttctgcatataaatatttctgcatataaattgtaactgatgtaagaggtttcatattgctaatagcagctacaatccagctaccattctgcttttattttatggttgggataaggctggattattctgagtccaagctaggcccttttgctaatcatgttcatacctcttatcttcctcccacagctcctgggcaacgtgctggtctgtgtgctggcccatcactttggcaaagaattgggattcgaacatcgattgaattccccggggatccaccgtgctgggcggggggcggcgggccctcccgcagaacaccatgcgctccacggaacctgctagctccatgcttgctgtggccactgagaagtaagcatggagctagcaggttctgaggagcgccttgacagcagccatgggagggccgccccctacctcagtgactcgagagatctacgggtggcatccctgtgacccctccccagtgcctctcctggccctggaagttgccactccagtgcccaccagccttgtcctaataaaattaagttgcatcattttgtctgactaggtgtccttctataatattatggggtggaggggggtggtatggagcaaggggcaagttgggaagacaacctgtagggcctgcggggtctattgggaaccaagctggagtgcagtggcacaatcttggctcactgcaatctccgcctcctgggttcaagcgattctcctgcctcagcctcccgagttgttgggattccaggcatgcatgaccaggctcagctaatttttgtttttttggtagagacggggtttcaccatattggccaggctggtctccaactcctaatctcaggtgatctacccaccttggcctcccaaattgctgggattacaggcgtgaaccactgctcccttccctgtccttactagatttaaatatgtcgtgcatcgatgctacgtagataagtagcatggcgggttaatcattaactacagaggaacccctagtgatggagttggccactccctctctgcgcgctcgctcgctcactgaggccgggcgaccaaaggtcgcccgacgcccgggctttgcccgggcggcctcagtgagcgagcgagcgcgcagctgcctgcagg

SEQ ID NO: 1372 - DNA, 4598 bp, synthetic construct
  source 1..4598: mol_type = other DNA; note = Description of Artificial Sequence: Synthetic polynucleotide
cctgcaggcagctgcgcgctcgctcgctcactgaggccgcccgggcaaagcccgggcgtcgggcgacctttggtcgcccggcctcagtgagcgagcgagcgcgcagagagggagtggccaactccatcactaggggttccttgtagttaatgattaacccgccatgctacttatctacgtagccatgcgtcgacataacgcgtatatctagacgttacataacttacggtaaatggcccgcctggctgaccgcccaacgacccccgcccattgacgtcaataatgacgtatgttcccatagtaacgccaatagggactttccattgacgtcaatgggtggagtatttacggtaaactgcccacttggcagtacatcaagtgtatcatatgccaagtacgccccctattgacgtcaatgacggtaaatggcccgcctggcattatgcccagtacatgaccttatgggactttcctacttggcagtacatctagtattagtcatcgctattaccatggtgatgcggttttggcagtacatcaatgggcgtggatagcggtttgactcacggggatttccaagtctccaccccattgacgtcaatgggagtttgttttggcaccaaaatcaacgggactttccaaaatgtcgtaacaactccgccccattgacgcaaatgggcggtaggcgtgtacggtgggaggtctatataagcagagctcgtttagtgaaccgtcagatcgcctggagacgccatccacgctgttttgacctccatagaagacaccgggaccgatccagcctccgcggattcgaatcccggccgggaacggtgcattggaacgcggattccccgtgccaagagtgacgtaagtaccgcctatagagtctataggcccacaattcgcccttgggcctaggcaattggatccgccggcagagaaaacatcccagggatttacagatcacatgcaggcagggaccagctcaacccttctttaatgtcatccagggagggggccagggatggaggggaggggttgaggagcgagaggcagttatttttgggtgggattcaccacttttcccatgaagaggggagacttggtattttgttcaatcattaagaagacaaagggtttgttgaacttgacctcgggggggatagacatgggtatggcctctaaaaacatggccccagcagcttcagtccctttctcgtcgatggtcagcacagccttatgcacggcctggaggggagagaagcagagacacgttgtaaggctgatcccaggcctcgagcaaggctcacgtggacacctcccaggaagcgctcactccccctggacggccctggccctgcacatcctctccctccctgtcacataggccttgctcctcctcaaggctttggctgatggggctggctcccctctgtccatcttcctgacaagcgcctctccccctgctcaggtgcacccacaactcagaacagggaagagcatcgtcactccacgtctgcctccagggctctctcctttctagtacacggcttgaagctccttgaggacacggaccctggcagtgaccttcacagtgcccagaccccaagataatgcagccattcatggaactgcaggttgttcattggtcgcctttagttttccaaaataagtgtcactttagctgaaatcattcattaattcagacaccaaatctcacagatcgaaggagtcagaaattcctttgaaacaacttagcccaaacctttctgtgtcagtatggataaatcaaggcccaatgtctagaaggtcttgggcaaagttgaaattcagggtcagtgacacaacctcaagggaggccccgaaagtgccagctgcacagcagcccctgcctggctttgctgtttgcccaccgtcccgtgtcagtgaatcacgggcatcttcaggagctcagcctgggtcttcatttgtttccctcggccccttcctcagcctcaggacagtgctgcagcccccacacattcttccctacagataccatggtgcaacaaggtcgtcagggtgatctcaccttggagagcttcaggggtgcctcctctgtgaccccggagaggtcagccccattgctgaagaccttagtgatgcccagttgacccaggacgctcttcagatcataggttccagtaatggacagtttgggtaaatgtaagctggcagacctgtcgtgcagaaaagaaattcaaggcatggcacagcattcctcttgttcttctgggacccaccacagtgcaagtgttttcttttctgattatttctgccacttactcctgtgtcctccacccacactaagatgggaactcggctttggtttgttctacttttagctcttctacattgagtcaaagaatgttaacatcgaatgaatcacaaaagcttgaaatgccacctcctctgatattctaggtgtcctggaagcctgtctcatcttgccctgtagtgttgggtcacctggcccccagcctgtaacatccccagggccctacacccagagaaacacggggctggtggcagtgcccagtgacaaccgtttagtggataagagaagagtgaccacaccaggctgagtgctcctctctggttttccatggggagacaatgccaccctgagcagggtctggtgtgagcggcagctggctctgggctctctgatccgttaccctctcagcctctttgttctttctcaacccctggagcagagacctcaggaggtgctggcatggaacagagaaattccagcctcgattcctattatgaacccgacaccttttgtattttcatcttggttttacagtgtacaaaacgaactagatcagcagggcatgggcataatcacgaatgcacacacatacactaatgtgtggctcatgtttaagtatcacttactacaggacacccaatctaacagcaccgataaagtgacagagaaacgcaagccttctgcgaacatggcctggctgttccaattccgaaccttgcttttctgggccttgccacacaggctcttcccccgtccccccagggacattctacccttgaactccacactccactgctgcctttgccaggaagcccatctgttcctttttggttctgccagaacgtgtggtggtgctgctgtccctgccttgggcactggatattgggaagggacagtgtccacactggagtgggaagttcccagggacgagacctttacctcctcaccctgggtactgttctcctcatggagcatggaaaaaatgctttcttcttttaatatacttttttgtttatcttatttctaatactttccctaatctctttctttcagggcaataatgatacaatgtatcatgcctctttgcaccattctaaagaataacagtgataatttctgggttaaggcaatagcaatatttctgcatataaatatttctgcatataaattgtaactgatgtaagaggtttcatattgctaatagcagctacaatccagctaccattctgcttttattttatggttgggataaggctggattattctgagtccaagctaggcccttttgctaatcatgttcatacctcttatcttcctcccacagctcctgggcaacgtgctggtctgtgtgctggcccatcactttggcaaagaattgggattcgaacatcgattgaattccccggggatccaccgtgctgggcggggggcggcgggccctcccgcagaacaccatgcgctccacggaacctgctagctccatgcttgctgtggccactgagaagtaagcatggagctagcaggttctgaggagcgccttgacagcagccatgggagggccgccccctacctcagtgactcgagagatctacgggtggcatccctgtgacccctccccagtgcctctcctggccctggaagttgccactccagtgcccaccagccttgtcctaataaaattaagttgcatcattttgtctgactaggtgtccttctataatattatggggtggaggggggtggtatggagcaaggggcaagttgggaagacaacctgtagggcctgcggggtctattgggaaccaagctggagtgcagtggcacaatcttggctcactgcaatctccgcctcctgggttcaagcgattctcctgcctcagcctcccgagttgttgggattccaggcatgcatgaccaggctcagctaatttttgtttttttggtagagacggggtttcaccatattggccaggctggtctccaactcctaatctcaggtgatctacccaccttggcctcccaaattgctgggattacaggcgtgaaccactgctcccttccctgtccttactagatttaaatatgtcgtgcatcgatgctacgtagataagtagcatggcgggttaatcattaactacagaggaacccctagtgatggagttggccactccctctctgcgcgctcgctcgctcactgaggccgggcgaccaaaggtcgcccgacgcccgggctttgcccgggcggcctcagtgagcgagcgagcgcgcagctgcctgcagg

SEQ ID NO: 1373 - DNA, 2300 bp, synthetic construct
  source 1..2300: mol_type = other DNA; note = Description of Artificial Sequence: Synthetic polynucleotide
cctgcaggcagctgcgcgctcgctcgctcactgaggccgcccgggcaaagcccgggcgtcgggcgacctttggtcgcccggcctcagtgagcgagcgagcgcgcagagagggagtggccaactccatcactaggggttccttgtagttaatgattaacccgccatgctacttatctacgtagccatgcgtcgacataacgcgtatatctagacgttacataacttacggtaaatggcccgcctggctgaccgcccaacgacccccgcccattgacgtcaataatgacgtatgttcccatagtaacgccaatagggactttccattgacgtcaatgggtggagtatttacggtaaactgcccacttggcagtacatcaagtgtatcatatgccaagtacgccccctattgacgtcaatgacggtaaatggcccgcctggcattatgcccagtacatgaccttatgggactttcctacttggcagtacatctagtattagtcatcgctattaccatggtgatgcggttttggcagtacatcaatgggcgtggatagcggtttgactcacggggatttccaagtctccaccccattgacgtcaatgggagtttgttttggcaccaaaatcaacgggactttccaaaatgtcgtaacaactccgccccattgacgcaaatgggcggtaggcgtgtacggtgggaggtctatataagcagagctcgtttagtgaaccgtcagatcgcctggagacgccatccacgctgttttgacctccatagaagacaccgggaccgatccagcctccgcggattcgaatcccggccgggaacggtgcattggaacgcggattccccgtgccaagagtgacgtaagtaccgcctatagagtctataggcccacaattcgcccttgggcctaggcaattggatccgccggcagagaaaacatcccagggatttacagatcacatgcaggcagggaccagctcaacccttctaaaaaatgctttcttcttttaatatacttttttgtttatcttatttctaatactttccctaatctctttctttcagggcaataatgatacaatgtatcatgcctctttgcaccattctaaagaataacagtgataatttctgggttaaggcaatagcaatatttctgcatataaatatttctgcatataaattgtaactgatgtaagaggtttcatattgctaatagcagctacaatccagctaccattctgcttttattttatggttgggataaggctggattattctgagtccaagctaggcccttttgctaatcatgttcatacctcttatcttcctcccacagctcctgggcaacgtgctggtctgtgtgctggcccatcactttggcaaagaattgggattcgaacatcgattgaattccccggggatccaccgtgctgggcggggggcggcgggccctcccgcagaacaccatgcgctccacggaacctgctagctccatgcttgctgtggccactgagaagtaagcatggagctagcaggttctgaggagcgccttgacagcagccatgggagggccgccccctacctcagtgactcgagagatctacgggtggcatccctgtgacccctccccagtgcctctcctggccctggaagttgccactccagtgcccaccagccttgtcctaataaaattaagttgcatcattttgtctgactaggtgtccttctataatattatggggtggaggggggtggtatggagcaaggggcaagttgggaagacaacctgtagggcctgcggggtctattgggaaccaagctggagtgcagtggcacaatcttggctcactgcaatctccgcctcctgggttcaagcgattctcctgcctcagcctcccgagttgttgggattccaggcatgcatgaccaggctcagctaatttttgtttttttggtagagacggggtttcaccatattggccaggctggtctccaactcctaatctcaggtgatctacccaccttggcctcccaaattgctgggattacaggcgtgaaccactgctcccttccctgtccttactagatttaaatatgtcgtgcatcgatgctacgtagataagtagcatggcgggttaatcattaactacagaggaacccctagtgatggagttggccactccctctctgcgcgctcgctcgctcactgaggccgggcgaccaaaggtcgcccgacgcccgggctttgcccgggcggcctcagtgagcgagcgagcgcgcagctgcctgcagg

SEQ ID NO: 1374 - DNA, 4615 bp, synthetic construct
  source 1..4615: mol_type = other DNA; note = Description of Artificial Sequence: Synthetic polynucleotide
cctgcaggcagctgcgcgctcgctcgctcactgaggccgcccgggcaaagcccgggcgtcgggcgacctttggtcgcccggcctcagtgagcgagcgagcgcgcagagagggagtggccaactccatcactaggggttccttgtagttaatgattaacccgccatgctacttatctacgtagccatgcgtcgacataacgcgtaattcgcccttgggcctaggcaattggatccgccggcagagaaaacatcccagggatttacagatcacatgcaggcagggaccagctcaacccttctttaatgtcatccagggagggggccagggatggaggggaggggttgaggagcgagaggcagttatttttgggtgggattcaccacttttcccatgaagaggggagacttggtattttgttcaatcattaagaagacaaagggtttgttgaacttgacctcgggggggatagacatgggtatggcctctaaaaacatggccccagcagcttcagtccctttctcgtcgatggtcagcacagccttatgcacggcctggaggggagagaagcagagacacgttgtaaggctgatcccaggcctcgagcaaggctcacgtggacacctcccaggaagcgctcactccccctggacggccctggccctgcacatcctctccctccctgtcacataggccttgctcctcctcaaggctttggctgatggggctggctcccctctgtccatcttcctgacaagcgcctctccccctgctcaggtgcacccacaactcagaacagggaagagcatcgtcactccacgtctgcctccagggctctctcctttctagtacacggcttgaagctccttgaggacacggaccctggcagtgaccttcacagtgcccagaccccaagataatgcagccattcatggaactgcagttgttcattggtcgcctttagttttccaaaataagtgtcatctttagctgaaatcattcattaattcagacaccaaatctcacagatcgaaggagtcagaaattcctttgaaacaacttagcccaaacctttctgtgtcagtatggataaatcaaggcccaatgtctagaaggtcttgggcaaagttgaaattcagggtcagtgacacaacctcaagggaggccccgaaagtgccagctgcacagcagtcccctgcctggctttgctgtttgaccacgtcccgtgtcagtgaatcacgggcatcttcaggagctcagcctgggtcttcatttgtttccctcggccccttcctcagcctcaggacagagctgcagcccccacacattcttccctacagataccagggtgcaacaaggtcgtcagggtgatctcaccttggagagcttcaggggtgcctccacgcgtatatctagacgttacataacttacggtaaatggcccgcctggctgaccgcccaacgacccccgcccattgacgtcaataatgacgtatgttcccatagtaacgccaatagggactttccattgacgtcaatgggtggagtatttacggtaaactgcccacttggcagtacatcaagtgtatcatatgccaagtacgccccctattgacgtcaatgacggtaaatggcccgcctggcattatgcccagtacatgaccttatgggactttcctacttggcagtacatctagtattagtcatcgctattaccatggtgatgcggttttggcagtacatcaatgggcgtggatagcggtttgactcacggggatttccaagtctccaccccattgacgtcaatgggagtttgttttggcaccaaaatcaacgggactttccaaaatgtcgtaacaactccgccccattgacgcaaatgggcggtaggcgtgtacggtgggaggtctatataagcagagctcgtttagtgaaccgtcagatcgcctggagacgccatccacgctgttttgacctccatagaagacaccgggaccgatccagcctccgcggattcgaatcccggccgggaacggtgcattggaacgcggattccccgtgccaagagtgacgtaagtaccgcctatagagtctataggcccacaaaaaatgctttcttcttttaatatacttttttgtttatcttatttctaatactttccctaatctctttctttcagggcaataatgatacaatgtatcatgcctctttgcaccattctaaagaataacagtgataatttctgggttaaggcaatagcaatatttctgcatataaatatttctgcatataaattgtaactgatgtaagaggtttcatattgctaatagcagctacaatccagctaccattctgcttttattttatggttgggataaggctggattattctgagtccaagctaggcccttttgctaatcatgttcatacctcttatcttcctcccacagctcctgggcaacgtgctggtctgtgtgctggcccatcactttggcaaagaattgggattcgaacatcgattgaattccccggggatccaccgtgctgggcggggggcggcgggccctcccgcagaacaccatgcgctccacggaacctgctagctccatgcttgctgtggccactgagaagtaagcatggagctagcaggttctgaggagcgccttgacagcagccatgggagggccgccccctacctcagtgactcgagagatctacgggtggcatccctgtgacccctccccagtgcctctcctggccctggaagttgccactccagtgcccaccagccttgtcctaataaaattaagttgcatcattttgtctgactaggtgtccttctataatattatggggtggaggggggtggtatggagcaaggggcaagttgggaagacaacctgtagggcctgcggggtctattgggaaccaagctggagtgcagtggcacaatcttggctcactgcaatctccgcctcctgggttcaagcgattctcctgcctcagcctcccgagttgttgggattccaggcatgcatgaccaggctcagctaatttttgtttttttggtagagacggggtttcaccatattggccaggctggtctccaactcctaatctcaggtgatctacccaccttggcctcccaaattgctgggattacaggcgtgaaccactgctcccttccctgtccttactagatttaaattctgtgaccccggagaggtcagccccattgctgaagaccttagtgatgcccagttgacccaggacgctcttcagatcataggttccagtaatggacagtttgggtaaatgtaagctggcagacctgtcgtgcagaaaagaaattcaaggcatggcacagcattcctcttgttcttctgggacccaccacagtgcaagtgttttcttttctgattatttctgccacttactcctgtgtcctccacccacactaagatgggaactcggctttggtttgttctacttttagctcttctacattgagtcaaagaatgttaacatcgaatgaatcacaaaagcttgaaatgccacctcctctgatattctaggtgtcctggaagcctgtctcatcttgccctgtagtgttgggtcacctggcccccagcctgtaacatccccagggccctacacccagagaaacacggggctggtggcagtgcccagtgacaaccgtttagtggataagagaagagtgaccacaccaggctgagtgctcctctctggttttccatggggagacaatgccaccctgagcagggtctggtgtgagcgggcagcttggctctgggctctctgatccgttaccctctcagcctctttgttctttctcaacccctggagcagagacctcaggaggtgctggcatggaacagagaaattccagcctcgattcctattatgaacccgacaccttttgtattttcatcttggttttacagtgtacaaaacgaactagatcagcagggcatgggcataatcacgaatgcacacacatacactaatgtgtggctcatgtttaagtatcacttactacaggacacccaatctaacagcaccgataaagtgacagagaaacgcaagccttctgcgaacatggcctggctgttccaattccgaaccttgcttttctgggccttgccacacaggctcttcccccgtccccccagggacattctacccttgaactccacactccactgctgcctttgccaggaagcccatctgttcctttttggttctgccagaacgtgtggtggtgctgctgtccctgccctgggcactggatattgggaagggacagtgtccacactggagtgggaagtccccagggacgagacctttacctcctcacccctgggtactgttctcctcatggagcatggatttaaatatgtcgtgcatcgatgctacgtagataagtagcatggcgggttaatcattaactacagaggaacccctagtgatggagttggccactccctctctgcgcgctcgctcgctcactgaggccgggcgaccaaaggtcgcccgacgcccgggctttgcccgggcggcctcagtgagcgagcgagcgcgcagctgcctgcagg

SEQ ID NO: 1375 - DNA, 2314 bp, synthetic construct
  source 1..2314: mol_type = other DNA; note = Description of Artificial Sequence: Synthetic polynucleotide
cctgcaggcagctgcgcgctcgctcgctcactgaggccgcccgggcaaagcccgggcgtcgggcgacctttggtcgcccggcctcagtgagcgagcgagcgcgcagagagggagtggccaactccatcactaggggttccttgtagttaatgattaacccgccatgctacttatctacgtagccatgcgtcgacataacgcgtaattcgcccttgggcctaggcaattggatccgccggcagagaaaacatcacgcgtatatctagacgttacataacttacggtaaatggcccgcctggctgaccgcccaacgacccccgcccattgacgtcaataatgacgtatgttcccatagtaacgccaatagggactttccattgacgtcaatgggtggagtatttacggtaaactgcccacttggcagtacatcaagtgtatcatatgccaagtacgccccctattgacgtcaatgacggtaaatggcccgcctggcattatgcccagtacatgaccttatgggactttcctacttggcagtacatctagtattagtcatcgctattaccatggtgatgcggttttggcagtacatcaatgggcgtggatagcggtttgactcacggggatttccaagtctccaccccattgacgtcaatgggagtttgttttggcaccaaaatcaacgggactttccaaaatgtcgtaacaactccgccccattgacgcaaatgggcggtaggcgtgtacggtgggaggtctatataagcagagctcgtttagtgaaccgtcagatcgcctggagacgccatccacgctgttttgacctccatagaagacaccgggaccgatccagcctccgcggattcgaatcccggccgggaacggtgcattggaacgcggattccccgtgccaagagtgacgtaagtaccgcctatagagtctataggcccacaaaaaatgctttcttcttttaatatacttttttgtttatcttatttctaatactttccctaatctctttctttcagggcaataatgatacaatgtatcatgcctctttgcaccattctaaagaataacagtgataatttctgggttaaggcaatagcaatatttctgcatataaatatttctgcatataaattgtaactgatgtaagaggtttcatattgctaatagcagctacaatccagctaccattctgcttttattttatggttgggataaggctggattattctgagtccaagctaggcccttttgctaatcatgttcatacctcttatcttcctcccacagctcctgggcaacgtgctggtctgtgtgctggcccatcactttggcaaagaattgggattcgaacatcgattgaattccccggggatccaccgtgctgggcggggggcggcgggccctcccgcagaacaccatgcgctccacggaacctgctagctccatgcttgctgtggccactgagaagtaagcatggagctagcaggttctgaggagcgccttgacagcagccatgggagggccgccccctacctcagtgactcgagagatctacgggtggcatccctgtgacccctccccagtgcctctcctggccctggaagttgccactccagtgcccaccagccttgtcctaataaaattaagttgcatcattttgtctgactaggtgtccttctataatattatggggtggaggggggtggtatggagcaaggggcaagttgggaagacaacctgtagggcctgcggggtctattgggaaccaagctggagtgcagtggcacaatcttggctcactgcaatctccgcctcctgggttcaagcgattctcctgcctcagcctcccgagttgttgggattccaggcatgcatgaccaggctcagctaatttttgtttttttggtagagacggggtttcaccatattggccaggctggtctccaactcctaatctcaggtgatctacccaccttggcctcccaaattgctgggattacaggcgtgaaccactgctcccttccctgtcctgactagatttaaatccagggatttacagatcacatgcaggcagggaccagctcaactcttctatttaaatatgtcgtgcatcgatgctacgtagataagtagcatggcgggttaatcattaactacagaggaacccctagtgatggagttggccactccctctctgcgcgctcgctcgctcactgaggccgggcgaccaaaggtcgcccgacgcccgggctttgcccgggcggcctcagtgagcgagcgagcgcgcagctgcctgcagg

SEQ ID NO: 1376 - DNA, 2198 bp, synthetic construct
  source 1..2198: mol_type = other DNA; note = Description of Artificial Sequence: Synthetic polynucleotide
cctgcaggcagctgcgcgctcgctcgctcactgaggccgcccgggcaaagcccgggcgtcgggcgacctttggtcgcccggcctcagtgagcgagcgagcgcgcagagagggagtggccaactccatcactaggggttccttgtagttaatgattaacccgccatgctacttatctacgtatacatgcgtcgacataacgcgtatatctagacgttacataacttacggtaaatggcccgcctggctgaccgcccaacgacccccgcccattgacgtcaataatgacgtatgttcccatagtaacgccaatagggactttccattgacgtcaatgggtggagtatttacggtaaactgcccacttggcagtacatcaagtgtatcatatgccaagtacgccccctattgacgtcaatgacggtaaatggcccgcctggcattatgcccagtacatgaccttatgggactttcctacttggcagtacatctagtattagtcatcgctattaccatggtgatgcggttttggcagtacatcaatgggcgtggatagcggtttgactcacggggatttccaagtctccaccccattgacgtcaatgggagtttgttttggcaccaaaatcaacgggactttccaaaatgtcgtaacaactccgccccattgacgcaaatgggcggtaggcgtgtacggtgggaggtctatataagcagagctcgtttagtgaaccgtcagatcgcctggagacgccatccacgctgttttgacctccatagaagacaccgggaccgatccagcctccgcggattcgaatcccggccgggaacggtgcattggaacgcggattccccgtgccaagagtgacgtaagtaccgcctatagagtctataggcccacaaaaaatgctttcttcttttaatatacttttttgtttatcttatttctaatactttccctaatctctttctttcagggcaataatgatacaatgtatcatgcctctttgcaccattctaaagaataacagtgataatttctgggttaaggcaatagcaatatttctgcatataaatatttctgcatataaattgtaactgatgtaagaggtttcatattgctaatagcagctacaatccagctaccattctgcttttattttatggttgggataaggctggattattctgagtccaagctaggcccttttgctaatcatgttcatacctcttatcttcctcccacagctcctgggcaacgtgctggtctgtgtgctggcccatcactttggcaaagaattgggattcgaacatcgattgaattccccggggatccaccgtgctgggcggggggcggcgggccctcccgcagaacaccatgcgctcttcggaagcaattcagtctcgttgtgcctgtgacctggtacaacgagactgaattgcttctgaggagcgccttgacagcagccatgggagggccgccccctacctcagtgactcgagagatctacgggtggcatccctgtgacccctccccagtgcctctcctggccctggaagttgccactccagtgcccaccagccttgtcctaataaaattaagttgcatcattttgtctgactaggtgtccttctataatattatggggtggaggggggtggtatggagcaaggggcaagttgggaagacaacctgtagggcctgcggggtctattgggaaccaagctggagtgcagtggcacaatcttggctcactgcaatctccgcctcctgggttcaagcgattctcctgcctcagcctcccgagttgttgggattccaggcatgcatgaccaggctcagctaatttttgtttttttggtagagacggggtttcaccatattggccaggctggtctccaactcctaatctcaggtgatctacccaccttggcctcccaaattgctgggattacaggcgtgaaccactgctcccttccctgtccttactagatttaaatatgtcgtgcatcgatgctacgtagataagtagcatggcgggttaatcattaactacagaggaacccctagtgatggagttggccactccctctctgcgcgctcgctcgctcactgaggccgggcgaccaaaggtcgcccgacgcccgggctttgcccgggcggcctcagtgagcgagcgagcgcgcagctgcctgcagg

SEQ ID NO: 1377 - DNA, 2203 bp, synthetic construct
  source 1..2203: mol_type = other DNA; note = Description of Artificial Sequence: Synthetic polynucleotide
cctgcaggcagctgcgcgctcgctcgctcactgaggccgcccgggcaaagcccgggcgtcgggcgacctttggtcgcccggcctcagtgagcgagcgagcgcgcagagagggagtggccaactccatcactaggggttccttgtagttaatgattaacccgccatgctacttatctacgtatacatgcgtcgacataacgcgtatatctagacgttacataacttacggtaaatggcccgcctggctgaccgcccaacgacccccgcccattgacgtcaataatgacgtatgttcccatagtaacgccaatagggactttccattgacgtcaatgggtggagtatttacggtaaactgcccacttggcagtacatcaagtgtatcatatgccaagtacgccccctattgacgtcaatgacggtaaatggcccgcctggcattatgcccagtacatgaccttatgggactttcctacttggcagtacatctagtattagtcatcgctattaccatggtgatgcggttttggcagtacatcaatgggcgtggatagcggtttgactcacggggatttccaagtctccaccccattgacgtcaatgggagtttgttttggcaccaaaatcaacgggactttccaaaatgtcgtaacaactccgccccattgacgcaaatgggcggtaggcgtgtacggtgggaggtctatataagcagagctcgtttagtgaaccgtcagatcgcctggagacgccatccacgctgttttgacctccatagaagacaccgggaccgatccagcctccgcggattcgaatcccggccgggaacggtgcattggaacgcggattccccgtgccaagagtgacgtaagtaccgcctatagagtctataggcccacaaaaaatgctttcttcttttaatatacttttttgtttatcttatttctaatactttccctaatctctttctttcagggcaataatgatacaatgtatcatgcctctttgcaccattctaaagaataacagtgataatttctgggttaaggcaatagcaatatttctgcatataaatatttctgcatataaattgtaactgatgtaagaggtttcatattgctaatagcagctacaatccagctaccattctgcttttattttatggttgggataaggctggattattctgagtccaagctaggcccttttgctaatcatgttcatacctcttatcttcctcccacagctcctgggcaacgtgctggtctgtgtgctggcccatcactttggcaaagaattgggattcgaacatcgattgaattccccggggatccaccgtgctgggcggggggcggcgggccctcccgcagaacaccatgcgctccacggaacctgctagctccatgcttgctgtggccactgagaagtaagcatggagctagcaggttctgaggagcgccttgacagcagccatgggagggccgccccctacctcagtgactcgagagatctacgggtggcatccctgtgacccctccccagtgcctctcctggccctggaagttgccactccagtgcccaccagccttgtcctaataaaattaagttgcatcattttgtctgactaggtgtccttctataatattatggggtggaggggggtggtatggagcaaggggcaagttgggaagacaacctgtagggcctgcggggtctattgggaaccaagctggagtgcagtggcacaatcttggctcactgcaatctccgcctcctgggttcaagcgattctcctgcctcagcctcccgagttgttgggattccaggcatgcatgaccaggctcagctaatttttgtttttttggtagagacggggtttcaccatattggccaggctggtctccaactcctaatctcaggtgatctacccaccttggcctcccaaattgctgggattacaggcgtgaaccactgctcccttccctgtccttactagatttaaatatgtcgtgcatcgatgctacgtagataagtagcatggcgggttaatcattaactacagaggaacccctagtgatggagttggccactccctctctgcgcgctcgctcgctcactgaggccgggcgaccaaaggtcgcccgacgcccgggctttgcccgggcggcctcagtgagcgagcgagcgcgcagctgcctgcagg

SEQ ID NO: 1378 - DNA, 844 bp, synthetic construct
  source 1..844: mol_type = other DNA; note = Description of Artificial Sequence: Synthetic polynucleotide
ctgcgcgctcgctcgctcactgaggccgcccgggcaaagcccgggcgtcgggcgacctttggtcgcccggcctcagtgagcgagcgagcgcgcagagagggagtgtagccatgctctaggaagatcaattcaattcacgcgttgacgtacgaaattcgaacgctgacgtcatcaacccgctccaaggaatcgcgggcccagtgtcactaggcgggaacacccagcgcgcgtgcgccctggcaggaagatggctgtgagggacagggagtggcgccctgcaatatttgcatgtcgctatgtgttctgggaaatcaccataaacgtgaaatgtctttggatttgggaatcttataagttctgtatgagaccacaccggtgaagcaaagaaggggcagagggagcccgtgagctgagtgggccagggactgggagaaggagtgaggaggcagggccggcatgcctctgctgctggccagacctgctagctccatgcttcccgtctgcacctgtcactagtaagcatggagctagcaggtttggccgtgtagtgctacccagcgctggctgcctcctcagcattgcaattcctctcccatctgggcaccagtcagctaccctggtgggaatctgggtagccctcgagatagcggccgcccccgagatctttttatgtacatctagataagtagcatggcgggttaatcattaactacaaggaacccctagtgatggagttggccactccctctctgcgcgctcgctcgctcactgaggccgggcgaccaaaggtcgcccgacgcccgggctttgcccgggcggcctcagtgagcgagcgagcgcgcag

SEQ ID NO: 1379 - DNA, 742 bp, synthetic construct
  source 1..742: mol_type = other DNA; note = Description of Artificial Sequence: Synthetic polynucleotide
ctgcgcgctcgctcgctcactgaggccgcccgggcaaagcccgggcgtcgggcgacctttggtcgcccggcctcagtgagcgagcgagcgcgcagagagggagtgtagccatgctctaggaagatcaattcaattcacgcgttgacgtacgaaattcgaacgctgacgtcatcaacccgctccaaggaatcgcgggcccagtgtcactaggcgggaacacccagcgcgcgtgcgccctggcaggaagatggctgtgagggacagggagtggcgccctgcaatatttgcatgtcgctatgtgttctgggaaatcaccataaacgtgaaatgtctttggatttgggaatcttataagttctgtatgagaccacaccggtgtgctgggcggggggcggcgggccctcccgcagaacaccatgcgctcttcggaagcaattcagtctcgttgtgcctgtgacctggtacaacgagactgaattgcttctgaggagcgccttgacagcagccatgggagggccgccccctacctcagtgactcgagatagcggccgcccccgagatctttttatgtacatctagataagtagcatggcgggttaatcattaactacaaggaacccctagtgatggagttggccactccctctctgcgcgctcgctcgctcactgaggccgggcgaccaaaggtcgcccgacgcccgggctttgcccgggcggcctcagtgagcgagcgagcgcgcag

SEQ ID NO: 1380 - DNA, 141 bp, synthetic construct
  source 1..141: mol_type = other DNA; note = Description of Artificial Sequence: Synthetic oligonucleotide
cctgcaggcagctgcgcgctcgctcgctcactgaggccgcccgggcaaagcccgggcgtcgggcgacctttggtcgcccggcctcagtgagcgagcgagcgcgcagagagggagtggccaactccatcactaggggttcct

SEQ ID NO: 1381 - DNA, 105 bp, synthetic construct
  source 1..105: mol_type = other DNA; note = Description of Artificial Sequence: Synthetic oligonucleotide
ctgcgcgctcgctcgctcactgaggccgcccgggcaaagcccgggcgtcgggcgacctttggtcgcccggcctcagtgagcgagcgagcgcgcagagagggagtg

SEQ ID NO: 1382 - DNA, 141 bp, synthetic construct
  source 1..141: mol_type = other DNA; note = Description of Artificial Sequence: Synthetic oligonucleotide
aggaacccctagtgatggagttggccactccctctctgcgcgctcgctcgctcactgaggccgggcgaccaaaggtcgcccgacgcccgggctttgcccgggcggcctcagtgagcgagcgagcgcgcagctgcctgcagg

SEQ ID NO: 1383 - DNA, 130 bp, synthetic construct
  source 1..130: mol_type = other DNA; note = Description of Artificial Sequence: Synthetic oligonucleotide
aggaacccctagtgatggagttggccactccctctctgcgcgctcgctcgctcactgaggccgggcgaccaaaggtcgcccgacgcccgggctttgcccgggcggcctcagtgagcgagcgagcgcgcag

SEQ ID NO: 1384 - DNA, 10 bp, synthetic construct
  source 1..10: mol_type = other DNA; note = Description of Artificial Sequence: Synthetic oligonucleotide
gtcgacataa

SEQ ID NO: 1385 - DNA, 121 bp, synthetic construct
  source 1..121: mol_type = other DNA; note = Description of Artificial Sequence: Synthetic oligonucleotide
gtcgacataacgcgtaattcgcccttgggcctaggcaattggatccgccggcagagaaaacatcccagggatttacagatcacatgcaggcagggaccagctcaacccttctacgcgtata

SEQ ID NO: 1386 - DNA, 73 bp, synthetic construct
  source 1..73: mol_type = other DNA; note = Description of Artificial Sequence: Synthetic oligonucleotide
gtcgacataacgcgtaattcgcccttgggcctaggcaattggatccgccggcagagaaaacatcacgcgtata

SEQ ID NO: 1387 - DNA, 18 bp, synthetic construct
  source 1..18: mol_type = other DNA; note = Description of Artificial Sequence: Synthetic oligonucleotide
gtcgacataacgcgtata

SEQ ID NO: 1388 - DNA, 1482 bp, synthetic construct
  source 1..1482: mol_type = other DNA; note = Description of Artificial Sequence: Synthetic polynucleotide
ctgcgcgctcgctcgctcactgaggccgcccgggcaaagcccgggcgtcgggcgacctttggtcgcccggcctcagtgagcgagcgagcgcgcagagagggagtgtagccatgctctaggaagatcaattcaattcacgcgtcgacattgattattgactagttattaatagtaatcaattacggggtcattagttcatagcccatatatggagttccgcgttacataacttacggtaaatggcccgcctggctgaccgcccaacgacccccgcccattgacgtcaataatgacgtatgttcccatagtaacgccaatagggactttccattgacgtcaatgggtggagtatttacggtaaactgcccacttggcagtacatcaagtgtatcatatgccaagtacgccccctattgacgtcaatgacggtaaatggcccgcctggcattatgcccagtacatgaccttatgggactttcctacttggcagtacatctacgtattagtcatcgctattaccatgtcgaggccacgttctgcttcactctccccatctcccccccctccccacccccaattttgtatttatttattttttaattattttgtgcagcgatgggggcggggggggggggcgcgcgccaggcggggcggggcggggcgaggggcggggcggggcgaggcggagaggtgcggcggcagccaatcagagcggcgcgctccgaaagtttccttttatggcgaggcggcggcggcggcggccctataaaaagcgaagcgcgcggcgggcgggagcaagcttgaactgaaaaaccagaaagttaactggtaagtttagtctttttgtcttttatttcaggtcccggatccggtggtggtgcaaatcaaagaactgctcctcagtggatgttgcctttacttctaggcctgtacggaagtgttacttctgctctaaaagctgcggaattgtacccgcggccgatccaccggtgtgctgggcggggggcggcgggccctcccgcagaacaccatgcgctcttcggaacctgctagctccatgcttgcctgtgacctggtaagcatggagctagcaggttctgaggagcgccttgacagcagccatgggagggccgccccctacctcagtgactcgaggacggggtgaactacgcctgaggatccgatctttttccctctgccaaaaattatggggacatcatgaagccccttgagcatctgacttctggctaataaaggaaatttattttcattgcaatagtgtgttggaattttttgtgtctctcactcggcctaggtagataagtagcatggcgggttaatcattaactacaaggaacccctagtgatggagttggccactccctctctgcgcgctcgctcgctcactgaggccgggcgaccaaaggtcgcccgacgcccgggctttgcccgggcggcctcagtgagcgagcgagcgcgcag

SEQ ID NO: 1389 - DNA, 14 bp, synthetic construct
  source 1..14: mol_type = other DNA; note = Description of Artificial Sequence: Synthetic oligonucleotide
ctcgagagatctac

SEQ ID NO: 1390 - DNA, 3013 bp, synthetic construct
  source 1..3013: mol_type = other DNA; note = Description of Artificial Sequence: Synthetic oligonucleotide
aattcgcccttgggcctaggcaattggatccgccggcagagaaaacatcccagggatttacagatcacatgcaggcagggaccagctcaacccttctttaatgtcatccagggagggggccagggatggaggggaggggttgaggagcgagaggcagttatttttgggtgggattcaccacttttcccatgaagaggggagacttggtattttgttcaatcattaagaagacaaagggtttgttgaacttgacctcgggggggatagacatgggtatggcctctaaaaacatggccccagcagcttcagtccctttctcgtcgatggtcagcacagccttatgcacggcctggaggggagagaagcagagacacgttgtaaggctgatcccaggcctcgagcaaggctcacgtggacacctcccaggaagcgctcactccccctggacggccctggccctgcacatcctctccctccctgtcacataggccttgctcctcctcaaggctttggctgatggggctggctcccctctgtccatcttcctgacaagcgcctctccccctgctcaggtgcacccacaactcagaacagggaagagcatcgtcactccacgtctgcctccagggctctctcctttctagtacacggcttgaagctccttgaggacacggaccctggcagtgaccttcacagtgcccagaccccaagataatgcagccattcatggaactgcaggttgttcattggtcgcctttagttttccaaaataagtgtcactttagctgaaatcattcattaattcagacaccaaatctcacagatcgaaggagtcagaaattcctttgaaacaacttagcccaaacctttctgtgtcagtatggataaatcaaggcccaatgtctagaaggtcttgggcaaagttgaaattcagggtcagtgacacaacctcaagggaggccccgaaagtgccagctgcacagcagcccctgcctggctttgctgtttgcccaccgtcccgtgtcagtgaatcacgggcatcttcaggagctcagcctgggtcttcatttgtttccctcggccccttcctcagcctcaggacagtgctgcagcccccacacattcttccctacagataccatggtgcaacaaggtcgtcagggtgatctcaccttggagagcttcaggggtgcctcctctgtgaccccggagaggtcagccccattgctgaagaccttagtgatgcccagttgacccaggacgctcttcagatcataggttccagtaatggacagtttgggtaaatgtaagctggcagacctgtcgtgcagaaaagaaattcaaggcatggcacagcattcctcttgttcttctgggacccaccacagtgcaagtgttttcttttctgattatttctgccacttactcctgtgtcctccacccacactaagatgggaactcggctttggtttgttctacttttagctcttctacattgagtcaaagaatgttaacatcgaatgaatcacaaaagcttgaaatgccacctcctctgatattctaggtgtcctggaagcctgtctcatcttgccctgtagtgttgggtcacctggcccccagcctgtaacatccccagggccctacacccagagaaacacggggctggtggcagtgcccagtgacaaccgtttagtggataagagaagagtgaccacaccaggctgagtgctcctctctggttttccatggggagacaatgccaccctgagcagggtctggtgtgagcggcagctggctctgggctctctgatccgttaccctctcagcctctttgttctttctcaacccctggagcagagacctcaggaggtgctggcatggaacagagaaattccagcctcgattcctattatgaacccgacaccttttgtattttcatcttggttttacagtgtacaaaacgaactagatcagcagggcatgggcataatcacgaatgcacacacatacactaatgtgtggctcatgtttaagtatcacttactacaggacacccaatctaacagcaccgataaagtgacagagaaacgcaagccttctgcgaacatggcctggctgttccaattccgaaccttgcttttctgggccttgccacacaggctcttcccccgtccccccagggacattctacccttgaactccacactccactgctgcctttgccaggaagcccatctgttcctttttggttctgccagaacgtgtggtggtgctgctgtccctgccttgggcactggatattgggaagggacagtgtccacactggagtgggaagttcccagggacgagacctttacctcctcaccctgggtactgttctcctcatggagcatggacggcgctgcctgaactcagtggtggcctcattctggaagccaagtttatacagagtagcagtgacccagggatgtggggttcaccctcctcagccctctggccagtcctgatgggcctcagtcccaacatggctaagaggtgtgggcagcttcttggtcaccctcaggttggggaatcaccttctgtcttcattttccaggaacttggtgatgatatcgtgggtgagttcatttaccaggtgctgtagtttcccctcatcaggcaggaagaagatggcggtggcattgcccaggtatttcatcagcagcacccagctggacagcttcttacagtgctggatgttaaacatgcctaaacgcttcatcataggcaccttcacggtggtcacctggtccacgtggaagtcctcttcctcggtgtccttgacttcaaagggtctctcccatttgcctggagagaggggaaggtgggcatcaccaggggtgagtgaaggtttggaagagtgtagcagaataagaaaccatgagtcccctccctgagaagccctgagcccccttgacgacacacatccctcgaggctcagcttcatcatctgtaaaaggtgctgaaactgacc

SEQ ID NO: 1391 - DNA, 712 bp, synthetic construct
  source 1..712: mol_type = other DNA; note = Description of Artificial Sequence: Synthetic oligonucleotide
aattcgcccttgggcctaggcaattggatccgccggcagagaaaacatcccagggatttacagatcacatgcaggcagggaccagctcaacccttctttaatgtcatccagggagggggccagggatggaggggaggggttgaggagcgagaggcagttatttttgggtgggattcaccacttttcccatgaagaggggagacttggtattttgttcaatcattaagaagacaaagggtttgttgaacttgacctcgggggggatagacatgggtatggcctctaaaaacatggccccagcagcttcagtccctttctcgtcgatggtcagcacagccttatgcacggcctggaggggagagaagcagagacacgttgtaaggctgatcccaggcctcgagcaaggctcacgtggacacctcccaggaagcgctcactccccctggacggccctggccctgcacatcctctccctccctgtcacataggccttgctcctcctcaaggctttggctgatggggctggctcccctctgtccatcttcctgacaagcgcctctccccctgctcaggtgcacccacaactcagaacagggaagagcatcgtcactccacgtctgcctccagggctctctcctttctagtacacggcttgaagctccttgaggacacggaccctggcagtgaccttcacagtgcccagaccacgcgt

SEQ ID NO: 1392 - DNA, 2405 bp, synthetic construct
  source 1..2405: mol_type = other DNA; note = Description of Artificial Sequence: Synthetic oligonucleotide
aattcgcccttgggcctaggcaattggatccgccggcagagaaaacatcccagggatttacagatcacatgcaggcagggaccagctcaacccttctttaatgtcatccagggagggggccagggatggaggggaggggttgaggagcgagaggcagttatttttgggtgggattcaccacttttcccatgaagaggggagacttggtattttgttcaatcattaagaagacaaagggtttgttgaacttgacctcgggggggatagacatgggtatggcctctaaaaacatggccccagcagcttcagtccctttctcgtcgatggtcagcacagccttatgcacggcctggaggggagagaagcagagacacgttgtaaggctgatcccaggcctcgagcaaggctcacgtggacacctcccaggaagcgctcactccccctggacggccctggccctgcacatcctctccctccctgtcacataggccttgctcctcctcaaggctttggctgatggggctggctcccctctgtccatcttcctgacaagcgcctctccccctgctcaggtgcacccacaactcagaacagggaagagcatcgtcactccacgtctgcctccagggctctctcctttctagtacacggcttgaagctccttgaggacacggaccctggcagtgaccttcacagtgcccagaccccaagataatgcagccattcatggaactgcagttgttcattggtcgcctttagttttccaaaataagtgtcatctttagctgaaatcattcattaattcagacaccaaatctcacagatcgaaggagtcagaaattcctttgaaacaacttagcccaaacctttctgtgtcagtatggataaatcaaggcccaatgtctagaaggtcttgggcaaagttgaaattcagggtcagtgacacaacctcaagggaggccccgaaagtgccagctgcacagcagtcccctgcctggctttgctgtttgaccacgtcccgtgtcagtgaatcacgggcatcttcaggagctcagcctgggtcttcatttgtttccctcggccccttcctcagcctcaggacagagctgcagcccccacacattcttccctacagataccagggtgcaacaaggtcgtcagggtgatctcaccttggagagcttcaggggtgcctcctctgtgaccccggagaggtcagccccattgctgaagaccttagtgatgcccagttgacccaggacgctcttcagatcataggttccagtaatggacagtttgggtaaatgtaagctggcagacctgtcgtgcagaaaagaaattcaaggcatggcacagcattcctcttgttcttctgggacccaccacagtgcaagtgttttcttttctgattatttctgccacttactcctgtgtcctccacccacactaagatgggaactcggctttggtttgttctacttttagctcttctacattgagtcaaagaatgttaacatcgaatgaatcacaaaagcttgaaatgccacctcctctgatattctaggtgtcctggaagcctgtctcatcttgccctgtagtgttgggtcacctggcccccagcctgtaacatccccagggccctacacccagagaaacacggggctggtggcagtgcccagtgacaaccgtttagtggataagagaagagtgaccacaccaggctgagtgctcctctctggttttccatgggggagacaatgccaccctgagcagggtctggtgtgagcgggcagcttggctctgggctctctgatccgttaccctctcagcctctttgttctttctcaacccctggagcagagacctcaggaggtgctggcatggaacagagaaattccagcctcgattcctattatgaacccgacaccttttgtattttcatcttggttttacagtgtacaaaacgaactagatcagcagggcatgggcataatcacgaatgcacacacatacactaatgtgtggctcatgtttaagtatcacttactacaggacacccaatctaacagcaccgataaagtgacagagaaacgcaagccttctgcgaacatggcctggctgttccaattccgaaccttgcttttctgggccttgccacacaggctcttcccccgtccccccagggacattctacccttgaactccacactccactgctgcctttgccaggaagcccatctgttcctttttggttctgccagaacgtgtggtggtgctgctgtccctgccctgggcactggatattgggaagggacagtgtccacactggagtgggaagtccccagggacgagacctttacctcctcacccctgggtactgttctcctcatggagcatggacgcgt

SEQ ID NO: 1393 - DNA, 1203 bp, synthetic construct
  source 1..1203: mol_type = other DNA; note = Description of Artificial Sequence: Synthetic oligonucleotide
aattcgcccttgggcctaggcaattggatccgccggcagagaaaacatcccagggatttacagatcacatgcaggcagggaccagctcaacccttctttaatgtcatccagggagggggccagggatggaggggaggggttgaggagcgagaggcagttatttttgggtgggattcaccacttttcccatgaagaggggagacttggtattttgttcaatcattaagaagacaaagggtttgttgaacttgacctcgggggggatagacatgggtatggcctctaaaaacatggccccagcagcttcagtccctttctcgtcgatggtcagcacagccttatgcacggcctggaggggagagaagcagagacacgttgtaaggctgatcccaggcctcgagcaaggctcacgtggacacctcccaggaagcgctcactccccctggacggccctggccctgcacatcctctccctccctgtcacataggccttgctcctcctcaaggctttggctgatggggctggctcccctctgtccatcttcctgacaagcgcctctccccctgctcaggtgcacccacaactcagaacagggaagagcatcgtcactccacgtctgcctccagggctctctcctttctagtacacggcttgaagctccttgaggacacggaccctggcagtgaccttcacagtgcccagaccccaagataatgcagccattcatggaactgcagttgttcattggtcgcctttagttttccaaaataagtgtcatctttagctgaaatcattcattaattcagacaccaaatctcacagatcgaaggagtcagaaattcctttgaaacaacttagcccaaacctttctgtgtcagtatggataaatcaaggcccaatgtctagaaggtcttgggcaaagttgaaattcagggtcagtgacacaacctcaagggaggccccgaaagtgccagctgcacagcagtcccctgcctggctttgctgtttgaccacgtcccgtgtcagtgaatcacgggcatcttcaggagctcagcctgggtcttcatttgtttccctcggccccttcctcagcctcaggacagagctgcagcccccacacattcttccctacagataccagggtgcaacaaggtcgtcagggtgatctcaccttggagagcttcaggggtgcctccacgcgt

SEQ ID NO: 1394 - DNA, 103 bp, synthetic construct
  source 1..103: mol_type = other DNA; note = Description of Artificial Sequence: Synthetic oligonucleotide
aattcgcccttgggcctaggcaattggatccgccggcagagaaaacatcccagggatttacagatcacatgcaggcagggaccagctcaacccttctacgcgt

SEQ ID NO: 1395 - DNA, 55 bp, synthetic construct
  source 1..55: mol_type = other DNA; note = Description of Artificial Sequence: Synthetic oligonucleotide
aattcgcccttgggcctaggcaattggatccgccggcagagaaaacatcacgcgt

SEQ ID NO: 1396 - DNA, 1512 bp, synthetic construct
  source 1..1512: mol_type = other DNA; note = Description of Artificial Sequence: Synthetic oligonucleotide
cgcgtaattcgcccttgggcctaggcaattggatccgccggcagagaaaacatcccagggatttacagatcacatgcaggcagggaccagctcaacccttctttaatgtcatccagggagggggccagggatggaggggaggggttgaggagcgagaggcagttatttttgggtgggattcaccacttttcccatgaagaggggagacttggtattttgttcaatcattaagaagacaaagggtttgttgaacttgacctcgggggggatagacatgggtatggcctctaaaaacatggccccagcagcttcagtccctttctcgtcgatggtcagcacagccttatgcacggcctggaggggagagaagcagagacacgttgtaaggctgatcccaggcctcgagcaaggctcacgtggacacctcccaggaagcgctcactccccctggacggccctggccctgcacatcctctccctccctgtcacataggccttgctcctcctcaaggctttggctgatggggctggctcccctctgtccatcttcctgacaagcgcctctccccctgctcaggtgcacccacaactcagaacagggaagagcatcgtcactccacgtctgcctccagggctctctcctttctagtacacggcttgaagctccttgaggacacggaccctggcagtgaccttcacagtgcccagaccccaagataatgcagccattcatggaactgcagttgttcattggtcgcctttagttttccaaaataagtgtcatctttagctgaaatcattcattaattcagacaccaaatctcacagatcgaaggagtcagaaattcctttgaaacaacttagcccaaacctttctgtgtcagtatggataaatcaaggcccaatgtctagaaggtcttgggcaaagttgaaattcagggtcagtgacacaacctcaagggaggccccgaaagtgccagctgcacagcagtcccctgcctggctttgctgtttgaccacgtcccgtgtcagtgaatcacgggcatcttcaggagctcagcctgggtcttcatttgtttccctcggccccttcctcagcctcaggacagagctgcagcccccacacattcttccctacagataccatggtgcaacaaggtcgtcagggtgatctcaccttggagagcttcaggggtgcctcctctgtgaccccggagaggtcagccccattgctgaagaccttagtgatgcccagttgacccaggacgctcttcagatcataggttccagtaatggacagtttgggtaaatgtaagctggcagacctgtcgtgcagaaaagaaattcaaggcatggcacagcattcctcttgttcttctgggacccaccacagtgcaagtgttttcttttctgattatttctgccacttactcctgtgtcctccacccacactaagatgggaactcggctttggtttgttctacttttagctcttctacattgagtcaaaga

SEQ ID NO: 1397 - DNA, 363 bp, synthetic construct
  source 1..363: mol_type = other DNA; note = Description of Artificial Sequence: Synthetic oligonucleotide
aattcgcccttgggcctaggcaattggatccgccggcagagaaaacatcccagggatttacagatcacatgcaggcagggaccagctcaacccttctttaatgtcatccagggagggggccagggatggaggggaggggttgaggagcgagaggcagttatttttgggtgggattcaccacttttcccatgaagaggggagacttggtattttgttcaatcattaagaagacaaagggtttgttgaacttgacctcgggggggatagacatgggtatggcctctaaaaacatggccccagcagcttcagtccctttctcgtcgatggtcagcacagccttatgcacggcctggagggacgcgt

SEQ ID NO: 1398 - DNA, 2395 bp, synthetic construct
  source 1..2395: mol_type = other DNA; note = Description of Artificial Sequence: Synthetic oligonucleotide
aattcgcccttgggcctaggcaattggatccgccggcagagaaaacatcccagggatttacagatcacatgcaggcagggaccagctcaacccttctttaatgtcatccagggagggggccagggatggaggggaggggttgaggagcgagaggcagttatttttgggtgggattcaccacttttcccatgaagaggggagacttggtattttgttcaatcattaagaagacaaagggtttgttgaacttgacctcgggggggatagacatgggtatggcctctaaaaacatggccccagcagcttcagtccctttctcgtcgatggtcagcacagccttatgcacggcctggaggggagagaagcagagacacgttgtaaggctgatcccaggcctcgagcaaggctcacgtggacacctcccaggaagcgctcactccccctggacggccctggccctgcacatcctctccctccctgtcacataggccttgctcctcctcaaggctttggctgatggggctggctcccctctgtccatcttcctgacaagcgcctctccccctgctcaggtgcacccacaactcagaacagggaagagcatcgtcactccacgtctgcctccagggctctctcctttctagtacacggcttgaagctccttgaggacacggaccctggcagtgaccttcacagtgcccagaccccaagataatgcagccattcatggaactgcaggttgttcattggtcgcctttagttttccaaaataagtgtcactttagctgaaatcattcattaattcagacaccaaatctcacagatcgaaggagtcagaaattcctttgaaacaacttagcccaaacctttctgtgtcagtatggataaatcaaggcccaatgtctagaaggtcttgggcaaagttgaaattcagggtcagtgacacaacctcaagggaggccccgaaagtgccagctgcacagcagcccctgcctggctttgctgtttgcccaccgtcccgtgtcagtgaatcacgggcatcttcaggagctcagcctgggtcttcatttgtttccctcggccccttcctcagcctcaggacagtgctgcagcccccacacattcttccctacagataccatggtgcaacaaggtcgtcagggtgatctcaccttggagagcttcaggggtgcctcctctgtgaccccggagaggtcagccccattgctgaagaccttagtgatgcccagttgacccaggacgctcttcagatcataggttccagtaatggacagtttgggtaaatgtaagctggcagacctgtcgtgcagaaaagaaattcaaggcatggcacagcattcctcttgttcttctgggacccaccacagtgcaagtgttttcttttctgattatttctgccacttactcctgtgtcctccacccacactaagatgggaactcggctttggtttgttctacttttagctcttctacattgagtcaaagaatgttaacatcgaatgaatcacaaaagcttgaaatgccacctcctctgatattctaggtgtcctggaagcctgtctcatcttgccctgtagtgttgggtcacctggcccccagcctgtaacatccccagggccctacacccagagaaacacggggctggtggcagtgcccagtgacaaccgtttagtggataagagaagagtgaccacaccaggctgagtgctcctctctggttttccatggggagacaatgccaccctgagcagggtctggtgtgagcggcagctggctctgggctctctgatccgttaccctctcagcctctttgttctttctcaacccctggagcagagacctcaggaggtgctggcatggaacagagaaattccagcctcgattcctattatgaacccgacaccttttgtattttcatcttggttttacagtgtacaaaacgaactagatcagcagggcatgggcataatcacgaatgcacacacatacactaatgtgtggctcatgtttaagtatcacttactacaggacacccaatctaacagcaccgataaagtgacagagaaacgcaagccttctgcgaacatggcctggctgttccaattccgaaccttgcttttctgggccttgccacacaggctcttcccccgtccccccagggacattctacccttgaactccacactccactgctgcctttgccaggaagcccatctgttcctttttggttctgccagaacgtgtggtggtgctgctgtccctgccttgggcactggatattgggaagggacagtgtccacactggagtgggaagttcccagggacgagacctttacctcctcaccctgggtactgttctcctcatggagcatgg

SEQ ID NO: 1399 - DNA, 97 bp, synthetic construct
  source 1..97: mol_type = other DNA; note = Description of Artificial Sequence: Synthetic oligonucleotide
aattcgcccttgggcctaggcaattggatccgccggcagagaaaacatcccagggatttacagatcacatgcaggcagggaccagctcaacccttct

SEQ ID NO: 1400 - DNA, 714 bp, synthetic construct
  source 1..714: mol_type = other DNA; note = Description of Artificial Sequence: Synthetic oligonucleotide
aattcgcccttgggcctaggcaattggatccgccggcagagaaaacatcccagggatttacagatcacatgcaggcagggaccagctcaacccttctttaatgtcatccagggagggggccagggatggaggggaggggttgaggagcgagaggcagttatttttgggtgggattcaccacttttcccatgaagaggggagacttggtattttgttcaatcattaagaagacaaagggtttgttgaacttgacctcgggggggatagacatgggtatggcctctaaaaacatggccccagcagcttcagtccctttctcgtcgatggtcagcacagccttatgcacggcctggaggggagagaagcagagacacgttgtaaggctgatcccaggcctcgagcaaggctcacgtggacacctcccaggaagcgctcactccccctggacggccctggccctgcacatcctctccctccctgtcacataggccttgctcctcctcaaggctttggctgatggggctggctcccctctgtccatcttcctgacaagcgcctctccccctgctcaggtgcacccacaactcagaacagggaagagcatcgtcactccacgtctgcctccagggctctctcctttctagtacacggcttgaagctccttgaggacacggaccctggcagtgaccttcacagtgcccagaccatttaaat

SEQ ID NO: 1401 - DNA, 3021 bp, synthetic construct
  source 1..3021: mol_type = other DNA; note = Description of Artificial Sequence: Synthetic oligonucleotide
aattcgcccttgggcctaggcaattggatccgccggcagagaaaacatcccagggatttacagatcacatgcaggcagggaccagctcaacccttctttaatgtcatccagggagggggccagggatggaggggaggggttgaggagcgagaggcagttatttttgggtgggattcaccacttttcccatgaagaggggagacttggtattttgttcaatcattaagaagacaaagggtttgttgaacttgacctcgggggggatagacatgggtatggcctctaaaaacatggccccagcagcttcagtccctttctcgtcgatggtcagcacagccttatgcacggcctggaggggagagaagcagagacacgttgtaaggctgatcccaggcctcgagcaaggctcacgtggacacctcccaggaagcgctcactccccctggacggccctggccctgcacatcctctccctccctgtcacataggccttgctcctcctcaaggctttggctgatggggctggctcccctctgtccatcttcctgacaagcgcctctccccctgctcaggtgcacccacaactcagaacagggaagagcatcgtcactccacgtctgcctccagggctctctcctttctagtacacggcttgaagctccttgaggacacggaccctggcagtgaccttcacagtgcccagaccccaagataatgcagccattcatggaactgcaggttgttcattggtcgcctttagttttccaaaataagtgtcactttagctgaaatcattcattaattcagacaccaaatctcacagatcgaaggagtcagaaattcctttgaaacaacttagcccaaacctttctgtgtcagtatggataaatcaaggcccaatgtctagaaggtcttgggcaaagttgaaattcagggtcagtgacacaacctcaagggaggccccgaaagtgccagctgcacagcagcccctgcctggctttgctgtttgcccaccgtcccgtgtcagtgaatcacgggcatcttcaggagctcagcctgggtcttcatttgtttccctcggccccttcctcagcctcaggacagtgctgcagcccccacacattcttccctacagataccatggtgcaacaaggtcgtcagggtgatctcaccttggagagcttcaggggtgcctcctctgtgaccccggagaggtcagccccattgctgaagaccttagtgatgcccagttgacccaggacgctcttcagatcataggttccagtaatggacagtttgggtaaatgtaagctggcagacctgtcgtgcagaaaagaaattcaaggcatggcacagcattcctcttgttcttctgggacccaccacagtgcaagtgttttcttttctgattatttctgccacttactcctgtgtcctccacccacactaagatgggaactcggctttggtttgttctacttttagctcttctacattgagtcaaagaatgttaacatcgaatgaatcacaaaagcttgaaatgccacctcctctgatattctaggtgtcctggaagcctgtctcatcttgccctgtagtgttgggtcacctggcccccagcctgtaacatccccagggccctacacccagagaaacacggggctggtggcagtgcccagtgacaaccgtttagtggataagagaagagtgaccacaccaggctgagtgctcctctctggttttccatggggagacaatgccaccctgagcagggtctggtgtgagcggcagctggctctgggctctctgatccgttaccctctcagcctctttgttctttctcaacccctggagcagagacctcaggaggtgctggcatggaacagagaaattccagcctcgattcctattatgaacccgacaccttttgtattttcatcttggttttacagtgtacaaaacgaactagatcagcagggcatgggcataatcacgaatgcacacacatacactaatgtgtggctcatgtttaagtatcacttactacaggacacccaatctaacagcaccgataaagtgacagagaaacgcaagccttctgcgaacatggcctggctgttccaattccgaaccttgcttttctgggccttgccacacaggctcttcccccgtccccccagggacattctacccttgaactccacactccactgctgcctttgccaggaagcccatctgttcctttttggttctgccagaacgtgtggtggtgctgctgtccctgccttgggcactggatattgggaagggacagtgtccacactggagtgggaagttcccagggacgagacctttacctcctcaccctgggtactgttctcctcatggagcatggacggcgctgcctgaactcagtggtggcctcattctggaagccaagtttatacagagtagcagtgacccagggatgtggggttcaccctcctcagccctctggccagtcctgatgggcctcagtcccaacatggctaagaggtgtgggcagcttcttggtcaccctcaggttggggaatcaccttctgtcttcattttccaggaacttggtgatgatatcgtgggtgagttcatttaccaggtgctgtagtttcccctcatcaggcaggaagaagatggcggtggcattgcccaggtatttcatcagcagcacccagctggacagcttcttacagtgctggatgttaaacatgcctaaacgcttcatcataggcaccttcacggtggtcacctggtccacgtggaagtcctcttcctcggtgtccttgacttcaaagggtctctcccatttgcctggagagaggggaaggtgggcatcaccaggggtgagtgaaggtttggaagagtgtagcagaataagaaaccatgagtcccctccctgagaagccctgagcccccttgacgacacacatccctcgaggctcagcttcatcatctgtaaaaggtgctgaaactgaccatttaaat

SEQ ID NO: 1402 - DNA, 1209 bp, synthetic construct
  source 1..1209: mol_type = other DNA; note = Description of Artificial Sequence: Synthetic oligonucleotide
tctgtgaccccggagaggtcagccccattgctgaagaccttagtgatgcccagttgacccaggacgctcttcagatcataggttccagtaatggacagtttgggtaaatgtaagctggcagacctgtcgtgcagaaaagaaattcaaggcatggcacagcattcctcttgttcttctgggacccaccacagtgcaagtgttttcttttctgattatttctgccacttactcctgtgtcctccacccacactaagatgggaactcggctttggtttgttctacttttagctcttctacattgagtcaaagaatgttaacatcgaatgaatcacaaaagcttgaaatgccacctcctctgatattctaggtgtcctggaagcctgtctcatcttgccctgtagtgttgggtcacctggcccccagcctgtaacatccccagggccctacacccagagaaacacggggctggtggcagtgcccagtgacaaccgtttagtggataagagaagagtgaccacaccaggctgagtgctcctctctggttttccatggggagacaatgccaccctgagcagggtctggtgtgagcgggcagcttggctctgggctctctgatccgttaccctctcagcctctttgttctttctcaacccctggagcagagacctcaggaggtgctggcatggaacagagaaattccagcctcgattcctattatgaacccgacaccttttgtattttcatcttggttttacagtgtacaaaacgaactagatcagcagggcatgggcataatcacgaatgcacacacatacactaatgtgtggctcatgtttaagtatcacttactacaggacacccaatctaacagcaccgataaagtgacagagaaacgcaagccttctgcgaacatggcctggctgttccaattccgaaccttgcttttctgggccttgccacacaggctcttcccccgtccccccagggacattctacccttgaactccacactccactgctgcctttgccaggaagcccatctgttcctttttggttctgccagaacgtgtggtggtgctgctgtccctgccctgggcactggatattgggaagggacagtgtccacactggagtgggaagtccccagggacgagacctttacctcctcacccctgggtactgttctcctcatggagcatggatttaaat

SEQ ID NO: 1403 - DNA, 56 bp, synthetic construct
  source 1..56: mol_type = other DNA; note = Description of Artificial Sequence: Synthetic oligonucleotide
ccagggatttacagatcacatgcaggcagggaccagctcaactcttctatttaaat

SEQ ID NO: 1404 - DNA, 1519 bp, synthetic construct
  source 1..1519: mol_type = other DNA; note = Description of Artificial Sequence: Synthetic oligonucleotide
aatgttaacatcgaatgaatcacaaaagcttgaaatgccacctcctctgatattctaggtgtcctggaagcctgtctcatcttgccctgtagtgttgggtcacctggcccccagcctgtaacatccccagggccctacacccagagaaacacggggctggtggcagtgcccagtgacaaccgtttagtggataagagaagagtgaccacaccaggctgagtgctcctctctggttttccatggggagacaatgccaccctgagcagggtctggtgtgagcgggcagcttggctctgggctctctgatccgttaccctctcagcctctttgttctttctcaacccctggagcagagacctcaggaggtgctggcatggaacagagaaattccagcctcgattcctattatgaacccgacaccttttgtattttcatcttggttttacagtgtacaaaacgaactagatcagcagggcatgggcataatcacgaatgcacacacatacactaatgtgtggctcatgtttaagtatcacttactacaggacacccaatctaacagcaccgataaagtgacagagaaacgcaagccttctgcgaacatggcctggctgttccaattccgaaccttgcttttctgggccttgccacacaggctcttcccccgtccccccagggacattctacccttgaactccacactccactgctgcctttgccaggaagcccatctgttcctttttggttctgccagaacgtgtggtggtgctgctgtccctgccctgggcactggatattgggaagggacagtgtccacactggagtgggaagtccccagggacgagacctttacctcctcacccctgggtactgtcctcctcatggagcatggatggcgctgcctgaactcagtggtggcctcattctggaagccaagtttatacagagtagcagtgacccagggatgtggggttcaccctcctcagccctctggccagtcctgatgggcctcagtcccaacatggctaagaggtgtgggcagcttcttggtcaccctcaggttggggaatcaccttctgtcttcattttccaggaacttggtgatgatatcgtgggtgagttcattttccaggtgctgtagtttcccctcatcaggcaggaagaagatggcggtggcattgcccaggtatttcatcagcagcacccagctggacagcttcttacagtgctggatgttaaacatgcctaaacgcttcatcataggcaccttcacggtggtcacctggtccacgtggaagtcctcttcctcggtgtccttgacttcaaagggtctctcccatttgcctggagagaggggaaggtgggcatcaccaggggtgagtgaaggtttggaagagtgtagcagaataaagaaaccatgagtcccctccctgagaagccctgagcccccttgacgacacacatccctcgaggctcagcttcatcatctgtaaaaggtgctgaaactgaccatttaaat

SEQ ID NO: 1405 - DNA, 357 bp, synthetic construct
  source 1..357: mol_type = other DNA; note = Description of Artificial Sequence: Synthetic oligonucleotide
gagagaagcagagacacgttgtaaggctgatcccaggcctcgagcaaggctcacgtggacacctcccaggaagcgctcactccccctggacggccctggccctgcacatcctctccctccctgtcacataggccttgctcctcctcaaggctttggctgatggggctggctcccctctgtccatcttcctgacaagcgcctctccccctgctcaggtgcacccacaactcagaacagggaagagcatcgtcactccacgtctgcctccagggctctctcctttctagtacacggcttgaagctccttgaggacacggaccctggcagtgaccttcacagtgcccagaccatttaaat

SEQ ID NO: 1406 - DNA, 2403 bp, synthetic construct
  source 1..2403: mol_type = other DNA; note = Description of Artificial Sequence: Synthetic oligonucleotide
aattcgcccttgggcctaggcaattggatccgccggcagagaaaacatcccagggatttacagatcacatgcaggcagggaccagctcaacccttctttaatgtcatccagggagggggccagggatggaggggaggggttgaggagcgagaggcagttatttttgggtgggattcaccacttttcccatgaagaggggagacttggtattttgttcaatcattaagaagacaaagggtttgttgaacttgacctcgggggggatagacatgggtatggcctctaaaaacatggccccagcagcttcagtccctttctcgtcgatggtcagcacagccttatgcacggcctggaggggagagaagcagagacacgttgtaaggctgatcccaggcctcgagcaaggctcacgtggacacctcccaggaagcgctcactccccctggacggccctggccctgcacatcctctccctccctgtcacataggccttgctcctcctcaaggctttggctgatggggctggctcccctctgtccatcttcctgacaagcgcctctccccctgctcaggtgcacccacaactcagaacagggaagagcatcgtcactccacgtctgcctccagggctctctcctttctagtacacggcttgaagctccttgaggacacggaccctggcagtgaccttcacagtgcccagaccccaagataatgcagccattcatggaactgcaggttgttcattggtcgcctttagttttccaaaataagtgtcactttagctgaaatcattcattaattcagacaccaaatctcacagatcgaaggagtcagaaattcctttgaaacaacttagcccaaacctttctgtgtcagtatggataaatcaaggcccaatgtctagaaggtcttgggcaaagttgaaattcagggtcagtgacacaacctcaagggaggccccgaaagtgccagctgcacagcagcccctgcctggctttgctgtttgcccaccgtcccgtgtcagtgaatcacgggcatcttcaggagctcagcctgggtcttcatttgtttccctcggccccttcctcagcctcaggacagtgctgcagcccccacacattcttccctacagataccatggtgcaacaaggtcgtcagggtgatctcaccttggagagcttcaggggtgcctcctctgtgaccccggagaggtcagccccattgctgaagaccttagtgatgcccagttgacccaggacgctcttcagatcataggttccagtaatggacagtttgggtaaatgtaagctggcagacctgtcgtgcagaaaagaaattcaaggcatggcacagcattcctcttgttcttctgggacccaccacagtgcaagtgttttcttttctgattatttctgccacttactcctgtgtcctccacccacactaagatgggaactcggctttggtttgttctacttttagctcttctacattgagtcaaagaatgttaacatcgaatgaatcacaaaagcttgaaatgccacctcctctgatattctaggtgtcctggaagcctgtctcatcttgccctgtagtgttgggtcacctggcccccagcctgtaacatccccagggccctacacccagagaaacacggggctggtggcagtgcccagtgacaaccgtttagtggataagagaagagtgaccacaccaggctgagtgctcctctctggttttccatggggagacaatgccaccctgagcagggtctggtgtgagcggcagctggctctgggctctctgatccgttaccctctcagcctctttgttctttctcaacccctggagcagagacctcaggaggtgctggcatggaacagagaaattccagcctcgattcctattatgaacccgacaccttttgtattttcatcttggttttacagtgtacaaaacgaactagatcagcagggcatgggcataatcacgaatgcacacacatacactaatgtgtggctcatgtttaagtatcacttactacaggacacccaatctaacagcaccgataaagtgacagagaaacgcaagccttctgcgaacatggcctggctgttccaattccgaaccttgcttttctgggccttgccacacaggctcttcccccgtccccccagggacattctacccttgaactccacactccactgctgcctttgccaggaagcccatctgttcctttttggttctgccagaacgtgtggtggtgctgctgtccctgccttgggcactggatattgggaagggacagtgtccacactggagtgggaagttcccagggacgagacctttacctcctcaccctgggtactgttctcctcatggagcatggatttaaat

SEQ ID NO: 1407 - DNA, 105 bp, synthetic construct
  source 1..105: mol_type = other DNA; note = Description of Artificial Sequence: Synthetic oligonucleotide
aattcgcccttgggcctaggcaattggatccgccggcagagaaaacatcccagggatttacagatcacatgcaggcagggaccagctcaacccttctatttaaat

SEQ ID NO: 1408 - DNA, 382 bp, synthetic construct
  source 1..382: mol_type = other DNA; note = Description of Artificial Sequence: Synthetic oligonucleotide
cgcgtcgacattgattattgactagttattaatagtaatcaattacggggtcattagttcatagcccatatatggagttccgcgttacataacttacggtaaatggcccgcctggctgaccgcccaacgacccccgcccattgacgtcaataatgacgtatgttcccatagtaacgccaatagggactttccattgacgtcaatgggtggagtatttacggtaaactgcccacttggcagtacatcaagtgtatcatatgccaagtacgccccctattgacgtcaatgacggtaaatggcccgcctggcattatgcccagtacatgaccttatgggactttcctacttggcagtacatctacgtattagtcatcgctattac

SEQ ID NO: 1409 - DNA, 303 bp, synthetic construct
  source 1..303: mol_type = other DNA; note = Description of Artificial Sequence: Synthetic oligonucleotide
cgttacataacttacggtaaatggcccgcctggctgaccgcccaacgacccccgcccattgacgtcaataatgacgtatgttcccatagtaacgccaatagggactttccattgacgtcaatgggtggagtatttacggtaaactgcccacttggcagtacatcaagtgtatcatatgccaagtacgccccctattgacgtcaatgacggtaaatggcccgcctggcattatgcccagtacatgaccttatgggactttcctacttggcagtacatctagtattagtcatcgctattaccatg

SEQ ID NO: 1410 - DNA, 260 bp, synthetic construct
  source 1..260: mol_type = other DNA; note = Description of Artificial Sequence: Synthetic oligonucleotide
ccacgttctgcttcactctccccatctcccccccctccccacccccaattttgtatttatttattttttaattattttgtgcagcgatgggggcggggggggggggcgcgcgccaggcggggcggggcggggcgaggggcggggcggggcgaggcggagaggtgcggcggcagccaatcagagcggcgcgctccgaaagtttccttttatggcgaggcggcggcggcggcggccctataaaaagcgaagcgcgcggcggg

SEQ ID NO: 1411 - DNA, 588 bp, synthetic construct
  source 1..588: mol_type = other DNA; note = Description of Artificial Sequence: Synthetic oligonucleotide
gttgacattgattattgactagttattaatagtaatcaattacggggtcattagttcatagcccatatatggagttccgcgttacataacttacggtaaatggcccgcctggctgaccgcccaacgacccccgcccattgacgtcaataatgacgtatgttcccatagtaacgccaatagggactttccattgacgtcaatgggtggagtatttacggtaaactgcccacttggcagtacatcaagtgtatcatatgccaagtacgccccctattgacgtcaatgacggtaaatggcccgcctggcattatgcccagtacatgaccttatgggactttcctacttggcagtacatctacgtattagtcatcgctattaccatggtgatgcggttttggcagtacatcaatgggcgtggatagcggtttgactcacggggatttccaagtctccaccccattgacgtcaatgggagtttgttttggcaccaaaatcaacgggactttccaaaatgtcgtaacaactccgccccattgacgcaaatgggcggtaggcgtgtacggtgggaggtctatataagcagagctc

SEQ ID NO: 1412 - DNA, 204 bp, synthetic construct
  source 1..204: mol_type = other DNA; note = Description of Artificial Sequence: Synthetic oligonucleotide
gtgatgcggttttggcagtacatcaatgggcgtggatagcggtttgactcacggggatttccaagtctccaccccattgacgtcaatgggagtttgttttggcaccaaaatcaacgggactttccaaaatgtcgtaacaactccgccccattgacgcaaatgggcggtaggcgtgtacggtgggaggtctatataagcagagct

SEQ ID NO: 1413 - DNA, 219 bp, synthetic construct
  source 1..219: mol_type = other DNA; note = Description of Artificial Sequence: Synthetic oligonucleotide
aattcgaacgctgacgtcatcaacccgctccaaggaatcgcgggcccagtgtcactaggcgggaacacccagcgcgcgtgcgccctggcaggaagatggctgtgagggacagggagtggcgccctgcaatatttgcatgtcgctatgtgttctgggaaatcaccataaacgtgaaatgtctttggatttgggaatcttataagttctgtatgagaccac

SEQ ID NO: 1414 - DNA, 17 bp, synthetic construct
  source 1..17: mol_type = other DNA; note = Description of Artificial Sequence: Synthetic oligonucleotide
taatacgactcactata

SEQ ID NO: 1415 - DNA, 134 bp, synthetic construct
  source 1..134: mol_type = other DNA; note = Description of Artificial Sequence: Synthetic oligonucleotide
tcagatcgcctggagacgccatccacgctgttttgacctccatagaagacaccgggaccgatccagcctccgcggattcgaatcccggccgggaacggtgcattggaacgcggattccccgtgccaagagtgac

SEQ ID NO: 1416 - DNA, 53 bp, synthetic construct
  source 1..53: mol_type = other DNA; note = Description of Artificial Sequence: Synthetic oligonucleotide
ctcctgggcaacgtgctggtctgtgtgctggcccatcactttggcaaagaatt

SEQ ID NO: 1417 - DNA, 172 bp, synthetic construct
  source 1..172: mol_type = other DNA; note = Description of Artificial Sequence: Synthetic oligonucleotide
gaactgaaaaaccagaaagttaactggtaagtttagtctttttgtcttttatttcaggtcccggatccggtggtggtgcaaatcaaagaactgctcctcagtggatgttgcctttacttctaggcctgtacggaagtgttacttctgctctaaaagctgcggaattgtaccc

SEQ ID NO: 1418 - DNA, 32 bp, synthetic construct
  source 1..32: mol_type = other DNA; note = Description of Artificial Sequence: Synthetic oligonucleotide
gtaagtaccgcctatagagtctataggcccac

SEQ ID NO: 1419 - DNA, 347 bp, synthetic construct
  source 1..347: mol_type = other DNA; note = Description of Artificial Sequence: Synthetic oligonucleotide
aaaaaatgctttcttcttttaatatacttttttgtttatcttatttctaatactttccctaatctctttctttcagggcaataatgatacaatgtatcatgcctctttgcaccattctaaagaataacagtgataatttctgggttaaggcaatagcaatatttctgcatataaatatttctgcatataaattgtaactgatgtaagaggtttcatattgctaatagcagctacaatccagctaccattctgcttttattttatggttgggataaggctggattattctgagtccaagctaggcccttttgctaatcatgttcatacctcttatcttcctcccacag

SEQ ID NO: 1420 - DNA, 127 bp, synthetic construct
  source 1..127: mol_type = other DNA; note = Description of Artificial Sequence: Synthetic oligonucleotide
gatctttttccctctgccaaaaattatggggacatcatgaagccccttgagcatctgacttctggctaataaaggaaatttattttcattgcaatagtgtgttggaattttttgtgtctctcactcg

SEQ ID NO: 1421 - DNA, 225 bp, synthetic construct
  source 1..225: mol_type = other DNA; note = Description of Artificial Sequence: Synthetic oligonucleotide
ctgtgccttctagttgccagccatctgttgtttgcccctcccccgtgccttccttgaccctggaaggtgccactcccactgtcctttcctaataaaatgaggaaattgcatcgcattgtctgagtaggtgtcattctattctggggggtggggtggggcaggacagcaagggggaggattgggaagacaatagcaggcatgctggggatgcggtgggctctatgg

SEQ ID NO: 1422 - DNA, 477 bp, synthetic construct
  source 1..477: mol_type = other DNA; note = Description of Artificial Sequence: Synthetic oligonucleotide
gggtggcatccctgtgacccctccccagtgcctctcctggccctggaagttgccactccagtgcccaccagccttgtcctaataaaattaagttgcatcattttgtctgactaggtgtccttctataatattatggggtggaggggggtggtatggagcaaggggcaagttgggaagacaacctgtagggcctgcggggtctattgggaaccaagctggagtgcagtggcacaatcttggctcactgcaatctccgcctcctgggttcaagcgattctcctgcctcagcctcccgagttgttgggattccaggcatgcatgaccaggctcagctaatttttgtttttttggtagagacggggtttcaccatattggccaggctggtctccaactcctaatctcaggtgatctacccaccttggcctcccaaattgctgggattacaggcgtgaaccactgctcccttccctgtcctt

SEQ ID NO: 1423 - DNA, 476 bp, synthetic construct
  source 1..476: mol_type = other DNA; note = Description of Artificial Sequence: Synthetic oligonucleotide
gggtggcatccctgtgacccctccccagtgcctctcctggccctggaagttgccactccagtgcccaccagccttgtcctaataaaattaagttgcatcattttgtctgactaggtgtccttctataatattatggggtggaggggggtggtatggagcaaggggcaagttgggaagacaacctgtagggcctgcggggtctattgggaaccaagctggagtgcagtggcacaatcttggctcactgcaatctccgcctcctgggttcaagcgattctcctgcctcagcctcccgagttgttgggattccaggcatgcatgaccaggctcagctaatttttgtttttttggtagagacggggtttcaccatattggccaggctggtctccaactcctaatctcaggtgatctacccaccttggcctcccaaattgctgggattacaggcgtgaaccactgctcccttccctgtcct

SEQ ID NO: 1424 - protein, 3144 aa, Homo sapiens
MATLEKLMKAFESLKSFQQQQQQQQQQQQQQQQQQQQQQQPPPPPPPPPPPQLPQPPPQAQPLLPQPQPPPPPPPPPPGPAVAEEPLHRPKKELSATKKDRVNHCLTICENIVAQSVRNSPEFQKLLGIAMELFLLCSDDAESDVRMVADECLNKVIKALMDSNLPRLQLELYKEIKKNGAPRSLRAALWRFAELAHLVRPQKCRPYLVNLLPCLTRTSKRPEESVQETLAAAVPKIMASFGNFANDNEIKVLLKAFIANLKSSSPTIRRTAAGSAVSICQHSRRTQYFYSWLLNVLLGLLVPVEDEHSTLLILGVLLTLRYLVPLLQQQVKDTSLKGSFGVTRKEMEVSPSAEQLVQVYELTLHHTQHQDHNVVTGALELLQQLFRTPPPELLQTLTAVGGIGQLTAAKEESGGRSRSGSIVELIAGGGSSCSPVLSRKQKGKVLLGEEEALEDDSESRSDVSSSALTASVKDEISGELAASSGVSTPGSAGHDIITEQPRSQHTLQADSVDLASCDLTSSATDGDEEDILSHSSSQVSAVPSDPAMDLNDGTQASSPISDSSQTTTEGPDSAVTPSDSSEIVLDGTDNQYLGLQIGQPQDEDEEATGILPDEASEAFRNSSMALQQAHLLKNMSHCRQPSDSSVDKFVLRDEATEPGDQENKPCRIKGDIGQSTDDDSAPLVHCVRLLSASFLLTGGKNVLVPDRDVRVSVKALALSCVGAAVALHPESFFSKLYKVPLDTTEYPEEQYVSDILNYIDHGDPQVRGATAILCGTLICSILSRSRFHVGDWMGTIRTLTGNTFSLADCIPLLRKTLKDESSVTCKLACTAVRNCVMSLCSSSYSELGLQLIIDVLTLRNSSYWLVRTELLETLAEIDFRLVSFLEAKAENLHRGAHHYTGLLKLQERVLNNVVIHLLGDEDPRVRHVAAASLIRLVPKLFYKCDQGQADPVVAVARDQSSVYLKLLMHETQPPSHFSVSTITRIYRGYNLLPSITDVTMENNLSRVIAAVSHELITSTTRALTFGCCEALCLLSTAFPVCIWSLGWHCGVPPLSASDESRKSCTVGMATMILTLLSSAWFPLDLSAHQDALILAGNLLAASAPKSLRSSWASEEEANPAATKQEEVWPALGDRALVPMVEQLFSHLLKVINICAHVLDDVAPGPAIKAALPSLTNPPSLSPIRRKGKEKEPGEQASVPLSPKKGSEASAASRQSDTSGPVTTSKSSSLGSFYHLPSYLKLHDVLKATHANYKVTLDLQNSTEKFGGFLRSALDVLSQILELATLQDIGKCVEEILGYLKSCFSREPMMATVCVQQLLKTLFGTNLASQFDGLSSNPSKSQGRAQRLGSSSVRPGLYHYCFMAPYTHFTQALADASLRNMVQAEQENDTSGWFDVLQKVSTQLKTNLTSVTKNRADKNAIHNHIRLFEPLVIKALKQYTTTTCVQLQKQVLDLLAQLVQLRVNYCLLDSDQVFIGFVLKQFEYIEVGQFRESEAIIPNIFFFLVLLSYERYHSKQIIGIPKIIQLCDGIMASGRKAVTHAIPALQPIVHDLFVLRGTNKADAGKELETQKEVVVSMLLRLIQYHQVLEMFILVLQQCHKENEDKWKRLSRQIADIILPMLAKQQMHIDSHEALGVLNTLFEILAPSSLRPVDMLLRSMFVTPNTMASVSTVQLWISGILAILRVLISQSTEDIVLSRIQELSFSPYLISCTVINRLRDGDSTSTLEEHSEGKQIKNLPEETFSRFLLQLVGILLEDIVTKQLKVEMSEQQHTFYCQELGTLLMCLIHIFKSGMFRRITAAATRLFRSDGCGGSFYTLDSLNLRARSMITTHPALVLLWCQILLLVNHTDYRWWAEVQQTPKRHSLSSTKLLSPQMSGEEEDSDLAAKLGMCNREIVRRGALILFCDYVCQNLHDSEHLTWLIVNHIQDLISLSHEPPVQDFISAVHRNSAASGLFIQAIQSRCENLSTPTMLKKTLQCLEGIHLSQSGAVLTLYVDRLLCTPFRVLARMVDILACRRVEMLLAANLQSSMAQLPMEELNRIQEYLQSSGLAQRHQRLYSLLDRFRLSTMQDSLSPSPPVSSHPLDGDGHVSLETVSPDKDWYVHLVKSQCWTRSDSALLEGAELVNRIPAEDMNAFMMNSEFNLSLLAPCLSLGMSEISGGQKSALFEAAREVTLARVSGTVQQLPAVHHVFQPELPAEPAAYWSKLNDLFGDAALYQSLPTLARALAQYLVVVSKLPSHLHLPPEKEKDIVKFVVATLEALSWHLIHEQIPLSLDLQAGLDCCCLALQLPGLWSVVSSTEFVTHACSLIYCVHFILEAVAVQPGEQLLSPERRTNTPKAISEEEEEVDPNTQNPKYITAACEMVAEMVESLQSVLALGHKRNSGVPAFLTPLLRNIIISLARLPLVNSYTRVPPLVWKLGWSPKPGGDFGTAFPEIPVEFLQEKEVFKEFIYRINTLGWTSRTQFEETWATLLGVLVTQPLVMEQEESPPEEDTERTQINVLAVQAITSLVLSAMTVPVAGNPAVSCLEQQPRNKPLKALDTRFGRKLSIIRGIVEQEIQAMVSKRENIATHHLYQAWDPVPSLSPATTGALISHEKLLLQINPERELGSMSYKLGQVSIHSVWLGNSITPLREEEWDEEEEEEADAPAPSSPPTSPVNSRKHRAGVDIHSCSQFLLELYSRWILPSSSARRTPAILISEVVRSLLVVSDLFTERNQFELMYVTLTELRRVHPSEDEILAQYLVPATCKAAAVLGMDKAVAEPVSRLLESTLRSSHLPSRVGALHGVLYVLECDLLDDTAKQLIPVISDYLLSNLKGIAHCVNIHSQQHVLVMCATAFYLIENYPLDVGPEFSASIIQMCGVMLSGSEESTPSIIYHCALRGLERLLLSEQLSRLDAESLVKLSVDRVNVHSPHRAMAALGLMLTCMYTGKEKVSPGRTSDPNPAAPDSESVIVAMERVSVLFDRIRKGFPCEARVVARILPQFLDDFFPPQDIMNKVIGEFLSNQQPYPQFMATVVYKVFQTLHSTGQSSMVRDWVMLSLSNFTQRAPVAMATWSLSCFFVSASTSPWVAAILPHVISRMGKLEQVDVNLFCLVATDFYRHQIEEELDRRAFQSVLEVVAAPGSPYHRLLTCLRNVHKVTTC

SEQ ID NO: 1425 - DNA, 13669 bp, Homo sapiens
  source 1..13669: mol_type = unassigned DNA
ttgctgtgtgaggcagaacctgcgggggcaggggcgggctggttccctggccagccattggcagagtccgcaggctagggctgtcaatcatgctggccggcgtggccccgcctccgccggcgcggccccgcctccgccggcgcagcgtctgggacgcaaggcgccgtgggggctgccgggacgggtccaagatggacggccgctcaggttctgcttttacctgcggcccagagccccattcattgccccggtgctgagcggcgccgcgagtcggcccgaggcctccggggactgccgtgccgggcgggagaccgccatggcgaccctggaaaagctgatgaaggccttcgagtccctcaagtccttccagcagcagcagcagcagcagcagcagcagcagcagcagcagcagcagcagcagcagcagcagcaacagccgccaccgccgccgccgccgccgccgcctcctcagcttcctcagccgccgccgcaggcacagccgctgctgcctcagccgcagccgcccccgccgccgcccccgccgccacccggcccggctgtggctgaggagccgctgcaccgaccaaagaaagaactttcagctaccaagaaagaccgtgtgaatcattgtctgacaatatgtgaaaacatagtggcacagtctgtcagaaattctccagaatttcagaaacttctgggcatcgctatggaactttttctgctgtgcagtgatgacgcagagtcagatgtcaggatggtggctgacgaatgcctcaacaaagttatcaaagctttgatggattctaatcttccaaggttacagctcgagctctataaggaaattaaaaagaatggtgcccctcggagtttgcgtgctgccctgtggaggtttgctgagctggctcacctggttcggcctcagaaatgcaggccttacctggtgaaccttctgccgtgcctgactcgaacaagcaagagacccgaagaatcagtccaggagaccttggctgcagctgttcccaaaattatggcttcttttggcaattttgcaaatgacaatgaaattaaggttttgttaaaggccttcatagcgaacctgaagtcaagctcccccaccattcggcggacagcggctggatcagcagtgagcatctgccagcactcaagaaggacacaatatttctatagttggctactaaatgtgctcttaggcttactcgttcctgtcgaggatgaacactccactctgctgattcttggcgtgctgctcaccctgaggtatttggtgcccttgctgcagcagcaggtcaaggacacaagcctgaaaggcagcttcggagtgacaaggaaagaaatggaagtctctccttctgcagagcagcttgtccaggtttatgaactgacgttacatcatacacagcaccaagaccacaatgttgtgaccggagccctggagctgttgcagcagctcttcagaacgcctccacccgagcttctgcaaaccctgaccgcagtcgggggcattgggcagctcaccgctgctaaggaggagtctggtggccgaagccgtagtgggagtattgtggaacttatagctggagggggttcctcatgcagccctgtcctttcaagaaaacaaaaaggcaaagtgctcttaggagaagaagaagccttggaggatgactctgaatcgagatcggatgtcagcagctctgccttaacagcctcagtgaaggatgagatcagtggagagctggctgcttcttcaggggtttccactccagggtcagcaggtcatgacatcatcacagaacagccacggtcacagcacacactgcaggcggactcagtggatctggccagctgtgacttgacaagctctgccactgatggggatgaggaggatatcttgagccacagctccagccaggtcagcgccgtcccatctgaccctgccatggacctgaatgatgggacccaggcctcgtcgcccatcagcgacagctcccagaccaccaccgaagggcctgattcagctgttaccccttcagacagttctgaaattgtgttagacggtaccgacaaccagtatttgggcctgcagattggacagccccaggatgaagatgaggaagccacaggtattcttcctgatgaagcctcggaggccttcaggaactcttccatggcccttcaacaggcacatttattgaaaaacatgagtcactgcaggcagccttctgacagcagtgttgataaatttgtgttgagagatgaagctactgaaccgggtgatcaagaaaacaagccttgccgcatcaaaggtgacattggacagtccactgatgatgactctgcacctcttgtccattgtgtccgccttttatctgcttcgtttttgctaacagggggaaaaaatgtgctggttccggacagggatgtgagggtcagcgtgaaggccctggccctcagctgtgtgggagcagctgtggccctccacccggaatctttcttcagcaaactctataaagttcctcttgacaccacggaataccctgaggaacagtatgtctcagacatcttgaactacatcgatcatggagacccacaggttcgaggagccactgccattctctgtgggaccctcatctgctccatcctcagcaggtcccgcttccacgtgggagattggatgggcaccattagaaccctcacaggaaatacattttctttggcggattgcattcctttgctgcggaaaacactgaaggatgagtcttctgttacttgcaagttagcttgtacagctgtgaggaactgtgtcatgagtctctgcagcagcagctacagtgagttaggactgcagctgatcatcgatgtgctgactctgaggaacagttcctattggctggtgaggacagagcttctggaaacccttgcagagattgacttcaggctggtgagctttttggaggcaaaagcagaaaacttacacagaggggctcatcattatacagggcttttaaaactgcaagaacgagtgctcaataatgttgtcatccatttgcttggagatgaagaccccagggtgcgacatgttgccgcagcatcactaattaggcttgtcccaaagctgttttataaatgtgaccaaggacaagctgatccagtagtggccgtggcaagagatcaaagcagtgtttacctgaaacttctcatgcatgagacgcagcctccatctcatttctccgtcagcacaataaccagaatatatagaggctataacctactaccaagcataacagacgtcactatggaaaataacctttcaagagttattgcagcagtttctcatgaactaatcacatcaaccaccagagcactcacatttggatgctgtgaagctttgtgtcttctttccactgccttcccagtttgcatttggagtttaggttggcactgtggagtgcctccactgagtgcctcagatgagtctaggaagagctgtaccgttgggatggccacaatgattctgaccctgctctcgtcagcttggttcccattggatctctcagcccatcaagatgctttgattttggccggaaacttgcttgcagccagtgctcccaaatctctgagaagttcatgggcctctgaagaagaagccaacccagcagccaccaagcaagaggaggtctggccagccctgggggaccgggccctggtgcccatggtggagcagctcttctctcacctgctgaaggtgattaacatttgtgcccacgtcctggatgacgtggctcctggacccgcaataaaggcagccttgccttctctaacaaaccccccttctctaagtcccatccgacgaaaggggaaggagaaagaaccaggagaacaagcatctgtaccgttgagtcccaagaaaggcagtgaggccagtgcagcttctagacaatctgatacctcaggtcctgttacaacaagtaaatcctcatcactggggagtttctatcatcttccttcatacctcaaactgcatgatgtcctgaaagctacacacgctaactacaaggtcacgctggatcttcagaacagcacggaaaagtttggagggtttctccgctcagccttggatgttctttctcagatactagagctggccacactgcaggacattgggaagtgtgttgaagagatcctaggatacctgaaatcctgctttagtcgagaaccaatgatggcaactgtttgtgttcaacaattgttgaagactctctttggcacaaacttggcctcccagtttgatggcttatcttccaaccccagcaagtcacaaggccgagcacagcgccttggctcctccagtgtgaggccaggcttgtaccactactgcttcatggccccgtacacccacttcacccaggccctcgctgacgccagcctgaggaacatggtgcaggcggagcaggagaacgacacctcgggatggtttgatgtcctccagaaagtgtctacccagttgaagacaaacctcacgagtgtcacaaagaaccgtgcagataagaatgctattcataatcacattcgtttgtttgaacctcttgttataaaagctttaaaacagtacacgactacaacatgtgtgcagttacagaagcaggttttagatttgctggcgcagctggttcagttacgggttaattactgtcttctggattcagatcaggtgtttattggctttgtattgaaacagtttgaatacattgaagtgggccagttcagggaatcagaggcaatcattccaaacatctttttcttcttggtattactatcttatgaacgctatcattcaaaacagatcattggaattcctaaaatcattcagctctgtgatggcatcatggccagtggaaggaaggctgtgacacatgccataccggctctgcagcccatagtccacgacctctttgtattaagaggaacaaataaagctgatgcaggaaaagagcttgaaacccaaaaagaggtggtggtgtcaatgttactgagactcatccagtaccatcaggtgttggagatgttcattcttgtcctgcagcagtgccacaaggagaatgaagacaagtggaagcgactgtctcgacagatagctgacatcatcctcccaatgttagccaaacagcagatgcacattgactctcatgaagcccttggagtgttaaatacattatttgagattttggccccttcctccctccgtccggtagacatgcttttacggagtatgttcgtcactccaaacacaatggcgtccgtgagcactgttcaactgtggatatcgggaattctggccattttgagggttctgatttcccagtcaactgaagatattgttctttctcgtattcaggagctctccttctctccgtatttaatctcctgtacagtaattaataggttaagagatggggacagtacttcaacgctagaagaacacagtgaagggaaacaaataaagaatttgccagaagaaacattttcaaggtttctattacaactggttggtattcttttagaagacattgttacaaaacagctgaaggtggaaatgagtgagcagcaacatactttctattgccaggaactaggcacactgctaatgtgtctgatccacatcttcaagtctggaatgttccggagaatcacagcagctgccactaggctgttccgcagtgatggctgtggcggcagtttctacaccctggacagcttgaacttgcgggctcgttccatgatcaccacccacccggccctggtgctgctctggtgtcagatactgctgcttgtcaaccacaccgactaccgctggtgggcagaagtgcagcagaccccgaaaagacacagtctgtccagcacaaagttacttagtccccagatgtctggagaagaggaggattctgacttggcagccaaacttggaatgtgcaatagagaaatagtacgaagaggggctctcattctcttctgtgattatgtctgtcagaacctccatgactccgagcacttaacgtggctcattgtaaatcacattcaagatctgatcagcctttcccacgagcctccagtacaggacttcatcagtgccgttcatcggaactctgctgccagcggcctgttcatccaggcaattcagtctcgttgtgaaaacctttcaactccaaccatgctgaagaaaactcttcagtgcttggaggggatccatctcagccagtcgggagctgtgctcacgctgtatgtggacaggcttctgtgcacccctttccgtgtgctggctcgcatggtcgacatccttgcttgtcgccgggtagaaatgcttctggctgcaaatttacagagcagcatggcccagttgccaatggaagaactcaacagaatccaggaataccttcagagcagcgggctcgctcagagacaccaaaggctctattccctgctggacaggtttcgtctctccaccatgcaagactcacttagtccctctcctccagtctcttcccacccgctggacggggatgggcacgtgtcactggaaacagtgagtccggacaaagactggtacgttcatcttgtcaaatcccagtgttggaccaggtcagattctgcactgctggaaggtgcagagctggtgaatcggattcctgctgaagatatgaatgccttcatgatgaactcggagttcaacctaagcctgctagctccatgcttaagcctagggatgagtgaaatttctggtggccagaagagtgccctttttgaagcagcccgtgaggtgactctggcccgtgtgagcggcaccgtgcagcagctccctgctgtccatcatgtcttccagcccgagctgcctgcagagccggcggcctactggagcaagttgaatgatctgtttggggatgctgcactgtatcagtccctgcccactctggcccgggccctggcacagtacctggtggtggtctccaaactgcccagtcatttgcaccttcctcctgagaaagagaaggacattgtgaaattcgtggtggcaacccttgaggccctgtcctggcatttgatccatgagcagatcccgctgagtctggatctccaggcagggctggactgctgctgcctggccctgcagctgcctggcctctggagcgtggtctcctccacagagtttgtgacccacgcctgctccctcatctactgtgtgcacttcatcctggaggccgttgcagtgcagcctggagagcagcttcttagtccagaaagaaggacaaataccccaaaagccatcagcgaggaggaggaggaagtagatccaaacacacagaatcctaagtatatcactgcagcctgtgagatggtggcagaaatggtggagtctctgcagtcggtgttggccttgggtcataaaaggaatagcggcgtgccggcgtttctcacgccattgctaaggaacatcatcatcagcctggcccgcctgccccttgtcaacagctacacacgtgtgcccccactggtgtggaagcttggatggtcacccaaaccgggaggggattttggcacagcattccctgagatccccgtggagttcctccaggaaaaggaagtctttaaggagttcatctaccgcatcaacacactaggctggaccagtcgtactcagtttgaagaaacttgggccaccctccttggtgtcctggtgacgcagcccctcgtgatggagcaggaggagagcccaccagaagaagacacagagaggacccagatcaacgtcctggccgtgcaggccatcacctcactggtgctcagtgcaatgactgtgcctgtggccggcaacccagctgtaagctgcttggagcagcagccccggaacaagcctctgaaagctctcgacaccaggtttgggaggaagctgagcattatcagagggattgtggagcaagagattcaagcaatggtttcaaagagagagaatattgccacccatcatttatatcaggcatgggatcctgtcccttctctgtctccggctactacaggtgccctcatcagccacgagaagctgctgctacagatcaaccccgagcgggagctggggagcatgagctacaaactcggccaggtgtccatacactccgtgtggctggggaacagcatcacacccctgagggaggaggaatgggacgaggaagaggaggaggaggccgacgcccctgcaccttcgtcaccacccacgtctccagtcaactccaggaaacaccgggctggagttgacatccactcctgttcgcagtttttgcttgagttgtacagccgctggatcctgccgtccagctcagccaggaggaccccggccatcctgatcagtgaggtggtcagatcccttctagtggtctcagacttgttcaccgagcgcaaccagtttgagctgatgtatgtgacgctgacagaactgcgaagggtgcacccttcagaagacgagatcctcgctcagtacctggtgcctgccacctgcaaggcagctgccgtccttgggatggacaaggccgtggcggagcctgtcagccgcctgctggagagcacgctcaggagcagccacctgcccagcagggttggagccctgcacggcgtcctctatgtgctggagtgcgacctgctggacgacactgccaagcagctcatcccggtcatcagcgactatctcctctccaacctgaaagggatcgcccactgcgtgaacattcacagccagcagcacgtactggtcatgtgtgccactgcgttttacctcattgagaactatcctctggacgtagggccggaattttcagcatcaataatacagatgtgtggggtgatgctgtctggaagtgaggagtccaccccctccatcatttaccactgtgccctcagaggcctggagcgcctcctgctctctgagcagctctcccgcctggatgcagaatcgctggtcaagctgagtgtggacagagtgaacgtgcacagcccgcaccgggccatggcggctctgggcctgatgctcacctgcatgtacacaggaaaggagaaagtcagtccgggtagaacttcagaccctaatcctgcagcccccgacagcgagtcagtgattgttgctatggagcgggtatctgttctttttgataggatcaggaaaggctttccttgtgaagccagagtggtggccaggatcctgccccagtttctagacgacttcttcccaccccaggacatcatgaacaaagtcatcggagagtttctgtccaaccagcagccatacccccagttcatggccaccgtggtgtataaggtgtttcagactctgcacagcaccgggcagtcgtccatggtccgggactgggtcatgctgtccctctccaacttcacgcagagggccccggtcgccatggccacgtggagcctctcctgcttctttgtcagcgcgtccaccagcccgtgggtcgcggcgatcctcccacatgtcatcagcaggatgggcaagctggagcaggtggacgtgaaccttttctgcctggtcgccacagacttctacagacaccagatagaggaggagctcgaccgcagggccttccagtctgtgcttgaggtggttgcagccccaggaagcccatatcaccggctgctgacttgtttacgaaatgtccacaaggtcaccacctgctgagcgccatggtgggagagactgtgaggcggcagctggggccggagcctttggaagtctgcgcccttgtgccctgcctccaccgagccagcttggtccctatgggcttccgcacatgccgcgggcggccaggcaacgtgcgtgtctctgccatgtggcagaagtgctctttgtggcagtggccaggcagggagtgtctgcagtcctggtggggctgagcctgaggccttccagaaagcaggagcagctgtgctgcaccccatgtgggtgaccaggtcctttctcctgatagtcacctgctggttgttgccaggttgcagctgctcttgcatctgggccagaagtcctccctcctgcaggctggctgttggcccctctgctgtcctgcagtagaaggtgccgtgagcaggctttgggaacactggcctgggtctccctggtggggtgtgcatgccacgccccgtgtctggatgcacagatgccatggcctgtgctgggccagtggctgggggtgctagacacccggcaccattctcccttctctcttttcttctcaggatttaaaatttaattatatcagtaaagagattaattttaacgtaactctttctatgcccgtgtaaagtatgtgaatcgcaaggcctgtgctgcatgcgacagcgtccggggtggtggacagggcccccggccacgctccctctcctgtagccactggcatagccctcctgagcacccgctgacatttccgttgtacatgttcctgtttatgcattcacaaggtgactgggatgtagagaggcgttagtgggcaggtggccacagcaggactgaggacaggcccccattatcctaggggtgcgctcacctgcagcccctcctcctcgggcacagacgactgtcgttctccacccaccagtcagggacagcagcctccctgtcactcagctgagaaggccagccctccctggctgtgagcagcctccactgtgtccagagacatgggcctcccactcctgttccttgctagccctggggtggcgtctgcctaggagctggctggcaggtgttgggacctgctgctccatggatgcatgccctaagagtgtcactgagctgtgttttgtctgagcctctctcggtcaacagcaaagcttggtgtcttggcactgttagtgacagagcccagcatcccttctgcccccgttccagctgacatcttgcacggtgaccccttttagtcaggagagtgcagatctgtgctcatcggagactgccccacggccctgtcagagccgccactcctatccccaggccaggtccctggaccagcctcctgtttgcaggcccagaggagccaagtcattaaaatggaagtggattctggatggccgggctgctgctgatgtaggagctggatttgggagctctgcttgccgactggctgtgagacgaggcaggggctctgcttcctcagccctagaggcgagccaggcaaggttggcgactgtcatgtggcttggtttggtcatgcccgtcgatgttttgggtattgaatgtggtaagtggaggaaatgttggaactctgtgcaggtgctgccttgagacccccaagcttccacctgtccctctcctatgtggcagctggggagcagctgagatgtggacttgtatgctgcccacatacgtgagggggagctgaaagggagcccctcctctgagcagcctctgccaggcctgtatgaggcttttcccaccagctcccaacagaggcctcccccagccaggaccacctcgtcctcgtggcggggcagcaggagcggtagaaaggggtccgatgtttgaggaggcccttaagggaagctactgaattataacacgtaagaaaatcaccattccgtattggttgggggctcctgtttctcatcctagctttttcctggaaagcccgctagaaggtttgggaacgaggggaaagttctcagaactgttggctgctccccacccgcctcccgcctcccccgcaggttatgtcagcagctctgagacagcagtatcacaggccagatgttgttcctggctagatgtttacatttgtaagaaataacactgtgaatgtaaaacagagccattcccttggaatgcatatcgctgggctcaacatagagtttgtcttcctcttgtttacgacgtgatctaaaccagtccttagcaaggggctcagaacaccccgctctggcagtaggtgtcccccacccccaaagacctgcctgtgtgctccggagatgaatatgagctcattagtaaaaatgacttcacccacgcatatacataaagtatccatgcatgtgcatatagacacatctataattttacacacacacctctcaagacggagatgcatggcctctaagagtgcccgtgtcggttcttcctggaagttgactttccttagacccgccaggtcaagttagccgcgtgacggacatccaggcgtgggacgtggtcagggcagggctcattcattgcccactaggatcccactggcgaagatggtctccatatcagctctctgcagaagggaggaagactttatcatgttcctaaaaatctgtggcaagcacccatcgtattatccaaattttgttgcaaatgtgattaatttggttgtcaagttttgggggtgggctgtggggagattgcttttgttttcctgctggtaatatcgggaaagattttaatgaaaccagggtagaattgtttggcaatgcactgaagcgtgtttctttcccaaaatgtgcctcccttccgctgcgggcccagctgagtctatgtaggtgatgtttccagctgccaagtgctctttgttactgtccaccctcatttctgccagcgcatgtgtcctttcaaggggaaaatgtgaagctgaaccccctccagacacccagaatgtagcatctgagaaggccctgtgccctaaaggacacccctcgcccccatcttcatggagggggtcatttcagagccctcggagccaatgaacagctcctcctcttggagctgagatgagccccacgtggagctcgggacggatagtagacagcaataactcggtgtgtggccgcctggcaggtggaacttcctcccgttgcggggtggagtgaggttagttctgtgtgtctggtgggtggagtcaggcttctcttgctacctgtgagcatccttcccagcagacatcctcatcgggctttgtccctcccccgcttcctccctctgcggggaggacccgggaccacagctgctggccagggtagacttggagctgtcctccagaggggtcacgtgtaggagtgagaagaaggaagatcttgagagctgctgagggaccttggagagctcaggatggctcagacgaggacactcgcttgccgggcctgggcctcctgggaaggagggagctgctcagaatgccgcatgacaactgaaggcaacctggaaggttcaggggccgctcttcccccatgtgcctgtcacgctctggtgcagtcaaaggaacgccttcccctcagttgtttctaagagcagagtctcccgctgcaatctgggtggtaactgccagccttggaggatcgtggccaacgtggacctgcctacggagggtgggctctgacccaagtggggcctccttgtccaggtctcactgctttgcaccgtggtcagagggactgtcagctgagcttgagctcccctggagccagcagggctgtgatgggcgagtcccggagccccacccagacctgaatgcttctgagagcaaagggaaggactgacgagagatgtatatttaattttttaactgctgcaaacattgtacatccaaattaaaggaaaaaaatggaaaccatcaaaaaaaaaaaaaaaaaa

SEQ ID NO: 1426 - DNA, 1482 bp, synthetic construct
  source 1..1482: mol_type = other DNA; note = Description of Artificial Sequence: Synthetic polynucleotide
ctgcgcgctcgctcgctcactgaggccgcccgggcaaagcccgggcgtcgggcgacctttggtcgcccggcctcagtgagcgagcgagcgcgcagagagggagtgtagccatgctctaggaagatcaattcaattcacgcgtcgacattgattattgactagttattaatagtaatcaattacggggtcattagttcatagcccatatatggagttccgcgttacataacttacggtaaatggcccgcctggctgaccgcccaacgacccccgcccattgacgtcaataatgacgtatgttcccatagtaacgccaatagggactttccattgacgtcaatgggtggagtatttacggtaaactgcccacttggcagtacatcaagtgtatcatatgccaagtacgccccctattgacgtcaatgacggtaaatggcccgcctggcattatgcccagtacatgaccttatgggactttcctacttggcagtacatctacgtattagtcatcgctattaccatgtcgaggccacgttctgcttcactctccccatctcccccccctccccacccccaattttgtatttatttattttttaattattttgtgcagcgatgggggcggggggggggggcgcgcgccaggcggggcggggcggggcgaggggcggggcggggcgaggcggagaggtgcggcggcagccaatcagagcggcgcgctccgaaagtttccttttatggcgaggcggcggcggcggcggccctataaaaagcgaagcgcgcggcgggcgggagcaagcttgaactgaaaaaccagaaagttaactggtaagtttagtctttttgtcttttatttcaggtcccggatccggtggtggtgcaaatcaaagaactgctcctcagtggatgttgcctttacttctaggcctgtacggaagtgttacttctgctctaaaagctgcggaattgtacccgcggccgatccaccggtgtgctgggcggggggcggcgggccctcccgcagaacaccatgcgctcttcggaagcaattcagtctcgttgtccctgtgacctggtacaacgagactgaattgcttctgaggagcgccttgacagcagccatgggagggccgccccctacctcagtgactcgaggacggggtgaactacgcctgaggatccgatctttttccctctgccaaaaattatggggacatcatgaagccccttgagcatctgacttctggctaataaaggaaatttattttcattgcaatagtgtgttggaattttttgtgtctctcactcggcctaggtagataagtagcatggcgggttaatcattaactacaaggaacccctagtgatggagttggccactccctctctgcgcgctcgctcgctcactgaggccgggcgaccaaaggtcgcccgacgcccgggctttgcccgggcggcctcagtgagcgagcgagcgcgcag

SEQ ID NO: 1427 - DNA, 1482 bp, synthetic construct
  source 1..1482: mol_type = other DNA; note = Description of Artificial Sequence: Synthetic polynucleotide
ctgcgcgctcgctcgctcactgaggccgcccgggcaaagcccgggcgtcgggcgacctttggtcgcccggcctcagtgagcgagcgagcgcgcagagagggagtgtagccatgctctaggaagatcaattcaattcacgcgtcgacattgattattgactagttattaatagtaatcaattacggggtcattagttcatagcccatatatggagttccgcgttacataacttacggtaaatggcccgcctggctgaccgcccaacgacccccgcccattgacgtcaataatgacgtatgttcccatagtaacgccaatagggactttccattgacgtcaatgggtggagtatttacggtaaactgcccacttggcagtacatcaagtgtatcatatgccaagtacgccccctattgacgtcaatgacggtaaatggcccgcctggcattatgcccagtacatgaccttatgggactttcctacttggcagtacatctacgtattagtcatcgctattaccatgtcgaggccacgttctgcttcactctccccatctcccccccctccccacccccaattttgtatttatttattttttaattattttgtgcagcgatgggggcggggggggggggcgcgcgccaggcggggcggggcggggcgaggggcggggcggggcgaggcggagaggtgcggcggcagccaatcagagcggcgcgctccgaaagtttccttttatggcgaggcggcggcggcggcggccctataaaaagcgaagcgcgcggcgggcgggagcaagcttgaactgaaaaaccagaaagttaactggtaagtttagtctttttgtcttttatttcaggtcccggatccggtggtggtgcaaatcaaagaactgctcctcagtggatgttgcctttacttctaggcctgtacggaagtgttacttctgctctaaaagctgcggaattgtacccgcggccgatccaccggtgtgctgggcggggggcggcgggccctcccgcagaacaccatgcgctcttcggaatgaacctcttgttataaagcctgtgacctggttttataacaagaggttcattctgaggagcgccttgacagcagccatgggagggccgccccctacctcagtgactcgaggacggggtgaactacgcctgaggatccgatctttttccctctgccaaaaattatggggacatcatgaagccccttgagcatctgacttctggctaataaaggaaatttattttcattgcaatagtgtgttggaattttttgtgtctctcactcggcctaggtagataagtagcatggcgggttaatcattaactacaaggaacccctagtgatggagttggccactccctctctgcgcgctcgctcgctcactgaggccgggcgaccaaaggtcgcccgacgcccgggctttgcccgggcggcctcagtgagcgagcgagcgcgcag

SEQ ID NO: 1428 - DNA, 1482 bp, synthetic construct
  source 1..1482: mol_type = other DNA; note = Description of Artificial Sequence: Synthetic polynucleotide
ctgcgcgctcgctcgctcactgaggccgcccgggcaaagcccgggcgtcgggcgacctttggtcgcccggcctcagtgagcgagcgagcgcgcagagagggagtgtagccatgctctaggaagatcaattcaattcacgcgtcgacattgattattgactagttattaatagtaatcaattacggggtcattagttcatagcccatatatggagttccgcgttacataacttacggtaaatggcccgcctggctgaccgcccaacgacccccgcccattgacgtcaataatgacgtatgttcccatagtaacgccaatagggactttccattgacgtcaatgggtggagtatttacggtaaactgcccacttggcagtacatcaagtgtatcatatgccaagtacgccccctattgacgtcaatgacggtaaatggcccgcctggcattatgcccagtacatgaccttatgggactttcctacttggcagtacatctacgtattagtcatcgctattaccatgtcgaggccacgttctgcttcactctccccatctcccccccctccccacccccaattttgtatttatttattttttaattattttgtgcagcgatgggggcggggggggggggcgcgcgccaggcggggcggggcggggcgaggggcggggcggggcgaggcggagaggtgcggcggcagccaatcagagcggcgcgctccgaaagtttccttttatggcgaggcggcggcggcggcggccctataaaaagcgaagcgcgcggcgggcgggagcaagcttgaactgaaaaaccagaaagttaactggtaagtttagtctttttgtcttttatttcaggtcccggatccggtggtggtgcaaatcaaagaactgctcctcagtggatgttgcctttacttctaggcctgtacggaagtgttacttctgctctaaaagctgcggaattgtacccgcggccgatccaccggtgtgctgggcggggggcggcgggccctcccgcagaacaccatgcgctcttcggaaccgacaaccagtatttgggcctgtgacctggtccaaatactggttgtcggttctgaggagcgccttgacagcagccatgggagggccgccccctacctcagtgactcgaggacggggtgaactacgcctgaggatccgatctttttccctctgccaaaaattatggggacatcatgaagccccttgagcatctgacttctggctaataaaggaaatttattttcattgcaatagtgtgttggaattttttgtgtctctcactcggcctaggtagataagtagcatggcgggttaatcattaactacaaggaacccctagtgatggagttggccactccctctctgcgcgctcgctcgctcactgaggccgggcgaccaaaggtcgcccgacgcccgggctttgcccgggcggcctcagtgagcgagcgagcgcgcag

SEQ ID NO: 1429 - DNA, 1482 bp, synthetic construct
  source 1..1482: mol_type = other DNA; note = Description of Artificial Sequence: Synthetic polynucleotide
ctgcgcgctcgctcgctcactgaggccgcccgggcaaagcccgggcgtcgggcgacctttggtcgcccggcctcagtgagcgagcgagcgcgcagagagggagtgtagccatgctctaggaagatcaattcaattcacgcgtcgacattgattattgactagttattaatagtaatcaattacggggtcattagttcatagcccatatatggagttccgcgttacataacttacggtaaatggcccgcctggctgaccgcccaacgacccccgcccattgacgtcaataatgacgtatgttcccatagtaacgccaatagggactttccattgacgtcaatgggtggagtatttacggtaaactgcccacttggcagtacatcaagtgtatcatatgccaagtacgccccctattgacgtcaatgacggtaaatggcccgcctggcattatgcccagtacatgaccttatgggactttcctacttggcagtacatctacgtattagtcatcgctattaccatgtcgaggccacgttctgcttcactctccccatctcccccccctccccacccccaattttgtatttatttattttttaattattttgtgcagcgatgggggcggggggggggggcgcgcgccaggcggggcggggcggggcgaggggcggggcggggcgaggcggagaggtgcggcggcagccaatcagagcggcgcgctccgaaagtttccttttatggcgaggcggcggcggcggcggccctataaaaagcgaagcgcgcggcgggcgggagcaagcttgaactgaaaaaccagaaagttaactggtaagtttagtctttttgtcttttatttcaggtcccggatccggtggtggtgcaaatcaaagaactgctcctcagtggatgttgcctttacttctaggcctgtacggaagtgttacttctgctctaaaagctgcggaattgtacccgcggccgatccaccggtgtgctgggcggggggcggcgggccctcccgcagaacaccatgcgctcttcggaaccacaatgttgtgactgggcctgtgacctggtccggtcacaacattgtggttctgaggagcgccttgacagcagccatgggagggccgccccctacctcagtgactcgaggacggggtgaactacgcctgaggatccgatctttttccctctgccaaaaattatggggacatcatgaagccccttgagcatctgacttctggctaataaaggaaatttattttcattgcaatagtgtgttggaattttttgtgtctctcactcggcctaggtagataagtagcatggcgggttaatcattaactacaaggaacccctagtgatggagttggccactccctctctgcgcgctcgctcgctcactgaggccgggcgaccaaaggtcgcccgacgcccgggctttgcccgggcggcctcagtgagcgagcgagcgcgcag

SEQ ID NO: 1430 - DNA, 1482 bp, synthetic construct
  source 1..1482: mol_type = other DNA; note = Description of Artificial Sequence: Synthetic polynucleotide
ctgcgcgctcgctcgctcactgaggccgcccgggcaaagcccgggcgtcgggcgacctttggtcgcccggcctcagtgagcgagcgagcgcgcagagagggagtgtagccatgctctaggaagatcaattcaattcacgcgtcgacattgattattgactagttattaatagtaatcaattacggggtcattagttcatagcccatatatggagttccgcgttacataacttacggtaaatggcccgcctggctgaccgcccaacgacccccgcccattgacgtcaataatgacgtatgttcccatagtaacgccaatagggactttccattgacgtcaatgggtggagtatttacggtaaactgcccacttggcagtacatcaagtgtatcatatgccaagtacgccccctattgacgtcaatgacggtaaatggcccgcctggcattatgcccagtacatgaccttatgggactttcctacttggcagtacatctacgtattagtcatcgctattaccatgtcgaggccacgttctgcttcactctccccatctcccccccctccccacccccaattttgtatttatttattttttaattattttgtgcagcgatgggggcggggggggggggcgcgcgccaggcggggcggggcggggcgaggggcggggcggggcgaggcggagaggtgcggcggcagccaatcagagcggcgcgctccgaaagtttccttttatggcgaggcggcggcggcggcggccctataaaaagcgaagcgcgcggcgggcgggagcaagcttgaactgaaaaaccagaaagttaactggtaagtttagtctttttgtcttttatttcaggtcccggatccggtggtggtgcaaatcaaagaactgctcctcagtggatgttgcctttacttctaggcctgtacggaagtgttacttctgctctaaaagctgcggaattgtacccgcggccgatccaccggtgtgctgggcggggggcggcgggccctcccgcagaacaccatgcgctcttcggaagcaattcagtctcgttgtacctgtgatttggtacaacgagactgaattgcttctgaggagcgccttgacagcagccatgggagggccgccccctacctcagtgactcgaggacggggtgaactacgcctgaggatccgatctttttccctctgccaaaaattatggggacatcatgaagccccttgagcatctgacttctggctaataaaggaaatttattttcattgcaatagtgtgttggaattttttgtgtctctcactcggcctaggtagataagtagcatggcgggttaatcattaactacaaggaacccctagtgatggagttggccactccctctctgcgcgctcgctcgctcactgaggccgggcgaccaaaggtcgcccgacgcccgggctttgcccgggcggcctcagtgagcgagcgagcgcgcag

SEQ ID NO: 1431 - DNA, 1482 bp, synthetic construct
  source 1..1482: mol_type = other DNA; note = Description of Artificial Sequence: Synthetic polynucleotide
ctgcgcgctcgctcgctcactgaggccgcccgggcaaagcccgggcgtcgggcgacctttggtcgcccggcctcagtgagcgagcgagcgcgcagagagggagtgtagccatgctctaggaagatcaattcaattcacgcgtcgacattgattattgactagttattaatagtaatcaattacggggtcattagttcatagcccatatatggagttccgcgttacataacttacggtaaatggcccgcctggctgaccgcccaacgacccccgcccattgacgtcaataatgacgtatgttcccatagtaacgccaatagggactttccattgacgtcaatgggtggagtatttacggtaaactgcccacttggcagtacatcaagtgtatcatatgccaagtacgccccctattgacgtcaatgacggtaaatggcccgcctggcattatgcccagtacatgaccttatgggactttcctacttggcagtacatctacgtattagtcatcgctattaccatgtcgaggccacgttctgcttcactctccccatctcccccccctccccacccccaattttgtatttatttattttttaattattttgtgcagcgatgggggcggggggggggggcgcgcgccaggcggggcggggcggggcgaggggcggggcggggcgaggcggagaggtgcggcggcagccaatcagagcggcgcgctccgaaagtttccttttatggcgaggcggcggcggcggcggccctataaaaagcgaagcgcgcggcgggcgggagcaagcttgaactgaaaaaccagaaagttaactggtaagtttagtctttttgtcttttatttcaggtcccggatccggtggtggtgcaaatcaaagaactgctcctcagtggatgttgcctttacttctaggcctgtacggaagtgttacttctgctctaaaagctgcggaattgtacccgcggccgatccaccggtgtgctgggcggggggcggcgggccctcccgcagaacaccatgcgctcttcggaagcaattcagactcgttgtacctgtgacctggtacaacgagactgaattgcttctgtggagcgccttgacagcagccatgggagggccgccccctacctcagtgactcgaggacggggtgaactacgcctgaggatccgatctttttccctctgccaaaaattatggggacatcatgaagccccttgagcatctgacttctggctaataaaggaaatttattttcattgcaatagtgtgttggaattttttgtgtctctcactcggcctaggtagataagtagcatggcgggttaatcattaactacaaggaacccctagtgatggagttggccactccctctctgcgcgctcgctcgctcactgaggccgggcgaccaaaggtcgcccgacgcccgggctttgcccgggcggcctcagtgagcgagcgagcgcgcag

SEQ ID NO: 1432 - DNA, 1482 bp, synthetic construct
  source 1..1482: mol_type = other DNA; note = Description of Artificial Sequence: Synthetic polynucleotide
ctgcgcgctcgctcgctcactgaggccgcccgggcaaagcccgggcgtcgggcgacctttggtcgcccggcctcagtgagcgagcgagcgcgcagagagggagtgtagccatgctctaggaagatcaattcaattcacgcgtcgacattgattattgactagttattaatagtaatcaattacggggtcattagttcatagcccatatatggagttccgcgttacataacttacggtaaatggcccgcctggctgaccgcccaacgacccccgcccattgacgtcaataatgacgtatgttcccatagtaacgccaatagggactttccattgacgtcaatgggtggagtatttacggtaaactgcccacttggcagtacatcaagtgtatcatatgccaagtacgccccctattgacgtcaatgacggtaaatggcccgcctggcattatgcccagtacatgaccttatgggactttcctacttggcagtacatctacgtattagtcatcgctattaccatgtcgaggccacgttctgcttcactctccccatctcccccccctccccacccccaattttgtatttatttattttttaattattttgtgcagcgatgggggcggggggggggggcgcgcgccaggcggggcggggcggggcgaggggcggggcggggcgaggcggagaggtgcggcggcagccaatcagagcggcgcgctccgaaagtttccttttatggcgaggcggcggcggcggcggccctataaaaagcgaagcgcgcggcgggcgggagcaagcttgaactgaaaaaccagaaagttaactggtaagtttagtctttttgtcttttatttcaggtcccggatccggtggtggtgcaaatcaaagaactgctcctcagtggatgttgcctttacttctaggcctgtacggaagtgttacttctgctctaaaagctgcggaattgtacccgcggccgatccaccggtgtgctgggcggggggcggcgggccctcccgcagaacaccatgcgctcttcggaagcaattcagtctcgttgtacctgtgacctggtacaacgagactgaattgcttctgtggagcgccttgacagcagccatgggagggccgccccctacctcagtgactcgaggacggggtgaactacgcctgaggatccgatctttttccctctgccaaaaattatggggacatcatgaagccccttgagcatctgacttctggctaataaaggaaatttattttcattgcaatagtgtgttggaattttttgtgtctctcactcggcctaggtagataagtagcatggcgggttaatcattaactacaaggaacccctagtgatggagttggccactccctctctgcgcgctcgctcgctcactgaggccgggcgaccaaaggtcgcccgacgcccgggctttgcccgggcggcctcagtgagcgagcgagcgcgcag

SEQ ID NO: 1433 - DNA, 1584 bp, synthetic construct
  source 1..1584: mol_type = other DNA; note = Description of Artificial Sequence: Synthetic polynucleotide
ctgcgcgctcgctcgctcactgaggccgcccgggcaaagcccgggcgtcgggcgacctttggtcgcccggcctcagtgagcgagcgagcgcgcagagagggagtgtagccatgctctaggaagatcaattcaattcacgcgtcgacattgattattgactagttattaatagtaatcaattacggggtcattagttcatagcccatatatggagttccgcgttacataacttacggtaaatggcccgcctggctgaccgcccaacgacccccgcccattgacgtcaataatgacgtatgttcccatagtaacgccaatagggactttccattgacgtcaatgggtggagtatttacggtaaactgcccacttggcagtacatcaagtgtatcatatgccaagtacgccccctattgacgtcaatgacggtaaatggcccgcctggcattatgcccagtacatgaccttatgggactttcctacttggcagtacatctacgtattagtcatcgctattaccatgtcgaggccacgttctgcttcactctccccatctcccccccctccccacccccaattttgtatttatttattttttaattattttgtgcagcgatgggggcggggggggggggcgcgcgccaggcggggcggggcggggcgaggggcggggcggggcgaggcggagaggtgcggcggcagccaatcagagcggcgcgctccgaaagtttccttttatggcgaggcggcggcggcggcggccctataaaaagcgaagcgcgcggcgggcgggagcaagcttgaactgaaaaaccagaaagttaactggtaagtttagtctttttgtcttttatttcaggtcccggatccggtggtggtgcaaatcaaagaactgctcctcagtggatgttgcctttacttctaggcctgtacggaagtgttacttctgctctaaaagctgcggaattgtacccgcggccgatccaccggtgaagcaaagaaggggcagagggagcccgtgagctgagtgggccagggactgggagaaggagtgaggaggcagggccggcatgcctctgctgctggccagagcaattcagtctcgttgtaccgtctgcacctgtcactagtacaacgagactgaattgctttggccgtgtagtgctacccagcgctggctgcctcctcagcattgcaattcctctcccatctgggcaccagtcagctaccctggtgggaatctgggtagccctcgaggacggggtgaactacgcctgaggatccgatctttttccctctgccaaaaattatggggacatcatgaagccccttgagcatctgacttctggctaataaaggaaatttattttcattgcaatagtgtgttggaattttttgtgtctctcactcggcctaggtagataagtagcatggcgggttaatcattaactacaaggaacccctagtgatggagttggccactccctctctgcgcgctcgctcgctcactgaggccgggcgaccaaaggtcgcccgacgcccgggctttgcccgggcggcctcagtgagcgagcgagcgcgcag

SEQ ID NO: 1434 - DNA, 1584 bp, synthetic construct
  source 1..1584: mol_type = other DNA; note = Description of Artificial Sequence: Synthetic polynucleotide
ctgcgcgctcgctcgctcactgaggccgcccgggcaaagcccgggcgtcgggcgacctttggtcgcccggcctcagtgagcgagcgagcgcgcagagagggagtgtagccatgctctaggaagatcaattcaattcacgcgtcgacattgattattgactagttattaatagtaatcaattacggggtcattagttcatagcccatatatggagttccgcgttacataacttacggtaaatggcccgcctggctgaccgcccaacgacccccgcccattgacgtcaataatgacgtatgttcccatagtaacgccaatagggactttccattgacgtcaatgggtggagtatttacggtaaactgcccacttggcagtacatcaagtgtatcatatgccaagtacgccccctattgacgtcaatgacggtaaatggcccgcctggcattatgcccagtacatgaccttatgggactttcctacttggcagtacatctacgtattagtcatcgctattaccatgtcgaggccacgttctgcttcactctccccatctcccccccctccccacccccaattttgtatttatttattttttaattattttgtgcagcgatgggggcggggggggggggcgcgcgccaggcggggcggggcggggcgaggggcggggcggggcgaggcggagaggtgcggcggcagccaatcagagcggcgcgctccgaaagtttccttttatggcgaggcggcggcggcggcggccctataaaaagcgaagcgcgcggcgggcgggagcaagcttgaactgaaaaaccagaaagttaactggtaagtttagtctttttgtcttttatttcaggtcccggatccggtggtggtgcaaatcaaagaactgctcctcagtggatgttgcctttacttctaggcctgtacggaagtgttacttctgctctaaaagctgcggaattgtacccgcggccgatccaccggtgaagcaaagaaggggcagagggagcccgtgagctgagtgggccagggactgggagaaggagtgaggaggcagggccggcatgcctctgctgctggccagaggtttatgaactgacgttaccgtctgcacctgtcactagtaacgtcagttcataaacctttggccgtgtagtgctacccagcgctggctgcctcctcagcattgcaattcctctcccatctgggcaccagtcagctaccctggtgggaatctgggtagccctcgaggacggggtgaactacgcctgaggatccgatctttttccctctgccaaaaattatggggacatcatgaagccccttgagcatctgacttctggctaataaaggaaatttattttcattgcaatagtgtgttggaattttttgtgtctctcactcggcctaggtagataagtagcatggcgggttaatcattaactacaaggaacccctagtgatggagttggccactccctctctgcgcgctcgctcgctcactgaggccgggcgaccaaaggtcgcccgacgcccgggctttgcccgggcggcctcagtgagcgagcgagcgcgcag

SEQ ID NO: 1435 - DNA, 1584 bp, synthetic construct
  source 1..1584: mol_type = other DNA; note = Description of Artificial Sequence: Synthetic polynucleotide
ctgcgcgctcgctcgctcactgaggccgcccgggcaaagcccgggcgtcgggcgacctttggtcgcccggcctcagtgagcgagcgagcgcgcagagagggagtgtagccatgctctaggaagatcaattcaattcacgcgtcgacattgattattgactagttattaatagtaatcaattacggggtcattagttcatagcccatatatggagttccgcgttacataacttacggtaaatggcccgcctggctgaccgcccaacgacccccgcccattgacgtcaataatgacgtatgttcccatagtaacgccaatagggactttccattgacgtcaatgggtggagtatttacggtaaactgcccacttggcagtacatcaagtgtatcatatgccaagtacgccccctattgacgtcaatgacggtaaatggcccgcctggcattatgcccagtacatgaccttatgggactttcctacttggcagtacatctacgtattagtcatcgctattaccatgtcgaggccacgttctgcttcactctccccatctcccccccctccccacccccaattttgtatttatttattttttaattattttgtgcagcgatgggggcggggggggggggcgcgcgccaggcggggcggggcggggcgaggggcggggcggggcgaggcggagaggtgcggcggcagccaatcagagcggcgcgctccgaaagtttccttttatggcgaggcggcggcggcggcggccctataaaaagcgaagcgcgcggcgggcgggagcaagcttgaactgaaaaaccagaaagttaactggtaagtttagtctttttgtcttttatttcaggtcccggatccggtggtggtgcaaatcaaagaactgctcctcagtggatgttgcctttacttctaggcctgtacggaagtgttacttctgctctaaaagctgcggaattgtacccgcggccgatccaccggtgaagcaaagaaggggcagagggagcccgtgagctgagtgggccagggactgggagaaggagtgaggaggcagggccggcatgcctctgctgctggccagaccgacaaccagtatttggaccgtctgcacctgtcactagtccaaatactggttgtcggtttggccgtgtagtgctacccagcgctggctgcctcctcagcattgcaattcctctcccatctgggcaccagtcagctaccctggtgggaatctgggtagccctcgaggacggggtgaactacgcctgaggatccgatctttttccctctgccaaaaattatggggacatcatgaagccccttgagcatctgacttctggctaataaaggaaatttattttcattgcaatagtgtgttggaattttttgtgtctctcactcggcctaggtagataagtagcatggcgggttaatcattaactacaaggaacccctagtgatggagttggccactccctctctgcgcgctcgctcgctcactgaggccgggcgaccaaaggtcgcccgacgcccgggctttgcccgggcggcctcagtgagcgagcgagcgcgcag

SEQ ID NO: 1436 - DNA, 1584 bp, synthetic construct
  source 1..1584: mol_type = other DNA; note = Description of Artificial Sequence: Synthetic polynucleotide
ctgcgcgctcgctcgctcactgaggccgcccgggcaaagcccgggcgtcgggcgacctttggtcgcccggcctcagtgagcgagcgagcgcgcagagagggagtgtagccatgctctaggaagatcaattcaattcacgcgtcgacattgattattgactagttattaatagtaatcaattacggggtcattagttcatagcccatatatggagttccgcgttacataacttacggtaaatggcccgcctggctgaccgcccaacgacccccgcccattgacgtcaataatgacgtatgttcccatagtaacgccaatagggactttccattgacgtcaatgggtggagtatttacggtaaactgcccacttggcagtacatcaagtgtatcatatgccaagtacgccccctattgacgtcaatgacggtaaatggcccgcctggcattatgcccagtacatgaccttatgggactttcctacttggcagtacatctacgtattagtcatcgctattaccatgtcgaggccacgttctgcttcactctccccatctcccccccctccccacccccaattttgtatttatttattttttaattattttgtgcagcgatgggggcggggggggggggcgcgcgccaggcggggcggggcggggcgaggggcggggcggggcgaggcggagaggtgcggcggcagccaatcagagcggcgcgctccgaaagtttccttttatggcgaggcggcggcggcggcggccctataaaaagcgaagcgcgcggcgggcgggagcaagcttgaactgaaaaaccagaaagttaactggtaagtttagtctttttgtcttttatttcaggtcccggatccggtggtggtgcaaatcaaagaactgctcctcagtggatgttgcctttacttctaggcctgtacggaagtgttacttctgctctaaaagctgcggaattgtacccgcggccgatccaccggtgaagcaaagaaggggcagagggagcccgtgagctgagtgggccagggactgggagaaggagtgaggaggcagggccggcatgcctctgctgctggccagaccacaatgttgtgactggaccgtctgcacctgtcactagtccggtcacaacattgtggtttggccgtgtagtgctacccagcgctggctgcctcctcagcattgcaattcctctcccatctgggcaccagtcagctaccctggtgggaatctgggtagccctcgaggacggggtgaactacgcctgaggatccgatctttttccctctgccaaaaattatggggacatcatgaagccccttgagcatctgacttctggctaataaaggaaatttattttcattgcaatagtgtgttggaattttttgtgtctctcactcggcctaggtagataagtagcatggcgggttaatcattaactacaaggaacccctagtgatggagttggccactccctctctgcgcgctcgctcgctcactgaggccgggcgaccaaaggtcgcccgacgcccgggctttgcccgggcggcctcagtgagcgagcgagcgcgcag

SEQ ID NO: 1437 - DNA, 1487 bp, synthetic construct
  source 1..1487: mol_type = other DNA; note = Description of Artificial Sequence: Synthetic polynucleotide
ctgcgcgctcgctcgctcactgaggccgcccgggcaaagcccgggcgtcgggcgacctttggtcgcccggcctcagtgagcgagcgagcgcgcagagagggagtgtagccatgctctaggaagatcaattcaattcacgcgtcgacattgattattgactagttattaatagtaatcaattacggggtcattagttcatagcccatatatggagttccgcgttacataacttacggtaaatggcccgcctggctgaccgcccaacgacccccgcccattgacgtcaataatgacgtatgttcccatagtaacgccaatagggactttccattgacgtcaatgggtggagtatttacggtaaactgcccacttggcagtacatcaagtgtatcatatgccaagtacgccccctattgacgtcaatgacggtaaatggcccgcctggcattatgcccagtacatgaccttatgggactttcctacttggcagtacatctacgtattagtcatcgctattaccatgtcgaggccacgttctgcttcactctccccatctcccccccctccccacccccaattttgtatttatttattttttaattattttgtgcagcgatgggggcggggggggggggcgcgcgccaggcggggcggggcggggcgaggggcggggcggggcgaggcggagaggtgcggcggcagccaatcagagcggcgcgctccgaaagtttccttttatggcgaggcggcggcggcggcggccctataaaaagcgaagcgcgcggcgggcgggagcaagcttgaactgaaaaaccagaaagttaactggtaagtttagtctttttgtcttttatttcaggtcccggatccggtggtggtgcaaatcaaagaactgctcctcagtggatgttgcctttacttctaggcctgtacggaagtgttacttctgctctaaaagctgcggaattgtacccgcggccgatccaccggtgtgctgggcggggggcggcgggccctcccgcagaacaccatgcgctccacggaacctgctagctccatgcttgctgtggccactgagaagtaagcatggagctagcaggttctgaggagcgccttgacagcagccatgggagggccgccccctacctcagtgactcgaggacggggtgaactacgcctgaggatccgatctttttccctctgccaaaaattatggggacatcatgaagccccttgagcatctgacttctggctaataaaggaaatttattttcattgcaatagtgtgttggaattttttgtgtctctcactcggcctaggtagataagtagcatggcgggttaatcattaactacaaggaacccctagtgatggagttggccactccctctctgcgcgctcgctcgctcactgaggccgggcgaccaaaggtcgcccgacgcccgggctttgcccgggcggcctcagtgagcgagcgagcgcgcag

SEQ ID NO: 1438 - DNA, 1487 bp, synthetic construct
  source 1..1487: mol_type = other DNA; note = Description of Artificial Sequence: Synthetic polynucleotide
ctgcgcgctcgctcgctcactgaggccgcccgggcaaagcccgggcgtcgggcgacctttggtcgcccggcctcagtgagcgagcgagcgcgcagagagggagtgtagccatgctctaggaagatcaattcaattcacgcgtcgacattgattattgactagttattaatagtaatcaattacggggtcattagttcatagcccatatatggagttccgcgttacataacttacggtaaatggcccgcctggctgaccgcccaacgacccccgcccattgacgtcaataatgacgtatgttcccatagtaacgccaatagggactttccattgacgtcaatgggtggagtatttacggtaaactgcccacttggcagtacatcaagtgtatcatatgccaagtacgccccctattgacgtcaatgacggtaaatggcccgcctggcattatgcccagtacatgaccttatgggactttcctacttggcagtacatctacgtattagtcatcgctattaccatgtcgaggccacgttctgcttcactctccccatctcccccccctccccacccccaattttgtatttatttattttttaattattttgtgcagcgatgggggcggggggggggggcgcgcgccaggcggggcggggcggggcgaggggcggggcggggcgaggcggagaggtgcggcggcagccaatcagagcggcgcgctccgaaagtttccttttatggcgaggcggcggcggcggcggccctataaaaagcgaagcgcgcggcgggcgggagcaagcttgaactgaaaaaccagaaagttaactggtaagtttagtctttttgtcttttatttcaggtcccggatccggtggtggtgcaaatcaaagaactgctcctcagtggatgttgcctttacttctaggcctgtacggaagtgttacttctgctctaaaagctgcggaattgtacccgcggccgatccaccggtgtgctgggcggggggcggcgggccctcccgcagaacaccatgcgctcctcggaataagcatggagctagcaggttgtggccactgagaaacctgctagctccatgcttgttctgcggagcgccttgacagcagccatgggagggccgccccctacctcagtgactcgaggacggggtgaactacgcctgaggatccgatctttttccctctgccaaaaattatggggacatcatgaagccccttgagcatctgacttctggctaataaaggaaatttattttcattgcaatagtgtgttggaattttttgtgtctctcactcggcctaggtagataagtagcatggcgggttaatcattaactacaaggaacccctagtgatggagttggccactccctctctgcgcgctcgctcgctcactgaggccgggcgaccaaaggtcgcccgacgcccgggctttgcccgggcggcctcagtgagcgagcgagcgcgcag

SEQ ID NO: 1439 - protein, 743 aa, synthetic construct
  source 1..743: note = Description of Artificial Sequence: Synthetic polypeptide
MAADGYLPDWLEDNLSEGIREWWALKPGAPQPKANQQHQDNARGLVLPGYKYLGPGNGLDKGEPVNAADAAALEHDKAYDQQLKAGDNPYLKYNHADAEFQERLKEDTSFGGNLGRAVFQAKKRLLEPLGLVEEAAKTAPGKKRPVEQSPQEPDSSAGIGKSGAQPAKKRLNFGQTGDTESVPDPQPIGEPPAAPSGVGSLTMASGGGAPVADNNEGADGVGSSSGNWHCDSQWLGDRVITTSTRTWALPTYNNHLYKQISNSTSGGSSNDNAYFGYSTPWGYFDFNRFHCHFSPRDWQRLINNNWGFRPKRLNFKLFNIQVKEVTDNNGVKTIANNLTSTVQVFTDSDYQLPYVLGSAHEGCLPPFPADVFMIPQYGYLTLNDGSQAVGRSSFYCLEYFPSQMLRTGNNFQFSYEFENVPFHSSYAHSQSLDRLMNPLIDQYLYYLSRTINGSGQNQQTLKFSVAGPSNMAVQGRNYIPGPSYRQQRVSTTVTQNNNSEFAWPGASSWALNGRNSLMNPGPAMASHKEGEDRFFPLSGSLIFGKQGTGRDNVDADKVMITNEEEIKTTNPVATESYGQVATNHQSDGTLAVPFKAQAQTGWVQNQGILPGMVWQDRDVYLQGPIWAKIPHTDGNFHPSPLMGGFGMKHPPPQILIKNTPVPADPPTAFNKDKLNSFITQYSTGQVSVEIEWELQKENSKRWNPEIQYTSNYYKSNNVEFAVNTEGVYSEPRPIGTRYLTRNL

SEQ ID NO: 1440 - protein, 743 aa, synthetic construct
  source 1..743: note = Description of Artificial Sequence: Synthetic polypeptide
MAADGYLPDWLEDNLSEGIREWWALKPGAPQPKANQQHQDNARGLVLPGYKYLGPGNGLDKGEPVNAADAAALEHDKAYDQQLKAGDNPYLKYNHADAEFQERLKEDTSFGGNLGRAVFQAKKRLLEPLGLVEEAAKTAPGKKRPVEQSPQEPDSSAGIGKSGAQPAKKRLNFGQTGDTESVPDPQPIGEPPAAPSGVGSLTMASGGGAPVADNNEGADGVGSSSGNWHCDSQWLGDRVITTSTRTWALPTYNNHLYKQISNSTSGGSSNDNAYFGYSTPWGYFDFNRFHCHFSPRDWQRLINNNWGFRPKRLNFKLFNIQVKEVTDNNGVKTIANNLTSTVQVFTDSDYQLPYVLGSAHEGCLPPFPADVFMIPQYGYLTLNDGSQAVGRSSFYCLEYFPSQMLRTGNNFQFSYEFENVPFHSSYAHSQSLDRLMNPLIDQYLYYLSRTINGSGQNQQTLKFSVAGPSNMAVQGRNYIPGPSYRQQRVSTTVTQNNNSEFAWPGASSWALNGRNSLMNPGPAMASHKEGEDRFFPLSGSLIFGKQGTGRDNVDADKVMITNEEEIKTTNPVATESYGQVATNHQSAQQAVRTSLAQAQTGWVQNQGILPGMVWQDRDVYLQGPIWAKIPHTDGNFHPSPLMGGFGMKHPPPQILIKNTPVPADPPTAFNKDKLNSFITQYSTGQVSVEIEWELQKENSKRWNPEIQYTSNYYKSNNVEFAVNTEGVYSEPRPIGTRYLTRNL

SEQ ID NO: 1441 - protein, 736 aa, synthetic construct
  source 1..736: note = Description of Artificial Sequence: Synthetic polypeptide
MAADGYLPDWLEDNLSEGIREWWALKPGAPQPKANQQHQDNARGLVLPGYKYLGPGNGLDKGEPVNAADAAALEHDKAYDQQLKAGDNPYLKYNHADAEFQERLKEDTSFGGNLGRAVFQAKKRLLEPLGLVEEAAKTAPGKKRPVEQSPQEPDSSAGIGKSGAQPAKKRLNFGQTGDTESVPDPQPIGEPPAAPSGVGSLTMASGGGAPVADNNEGADGVGSSSGNWHCDSQWLGDRVITTSTRTWALPTYNNHLYKQISNSTSGGSSNDNAYFGYSTPWGYFDFNRFHCHFSPRDWQRLINNNWGFRPKRLNFKLFNIQVKEVTDNNGVKTIANNLTSTVQVFTDSDYQLPYVLGSAHEGCLPPFPADVFMIPQYGYLTLNDGSQAVGRSSFYCLEYFPSQMLRTGNNFQFSYEFENVPFHSSYAHSQSLDRLMNPLIDQYLYYLSRTINGSGQNQQTLKFSVAGPSNMAVQGRNYIPGPSYRQQRVSTTVTQNNNSEFAWPGASSWALNGRNSLMNPGPAMASHKEGEDRFFPLSGSLIFGKQGTGRDNVDADKVMITNEEEIKTTNPVATESYGQVATNHQSAQAQAQTGWVQNQGILPGMVWQDRDVYLQGPIWAKIPHTDGNFHPSPLMGGFGMKHPPPQILIKNTPVPADPPTAFNKDKLNSFITQYSTGQVSVEIEWELQKENSKRWNPEIQYTSNYYKSNNVEFAVNTEGVYSEPRPIGTRYLTRNL

SEQ ID NO: 1442 - protein, 11 aa, synthetic construct
  source 1..11: note = Description of Artificial Sequence: Synthetic polypeptide
AQTLAVPFKAQ

SEQ ID NO: 1443 - protein, 11 aa, synthetic construct
  source 1..11: note = Description of Artificial Sequence: Synthetic polypeptide
AQSVSKPFLAQ

SEQ ID NO: 1444 - protein, 11 aa, synthetic construct
  source 1..11: note = Description of Artificial Sequence: Synthetic polypeptide
AQFTLTTPKAQ

SEQ ID NO: 1445 - protein, 11 aa, synthetic construct
  source 1..11: note = Description of Artificial Sequence: Synthetic polypeptide
DGTLAVPFKAQ

SEQ ID NO: 1446 - protein, 11 aa, synthetic construct
  source 1..11: note = Description of Artificial Sequence: Synthetic polypeptide
ESTLAVPFKAQ

SEQ ID NO: 1447 - protein, 11 aa, synthetic construct
  source 1..11: note = Description of Artificial Sequence: Synthetic polypeptide
GGTLAVPFKAQ

SEQ ID NO: 1448 - protein, 11 aa, synthetic construct
  source 1..11: note = Description of Artificial Sequence: Synthetic polypeptide
AQTLATPFKAQ

SEQ ID NO: 1449 - protein, 11 aa, synthetic construct
  source 1..11: note = Description of Artificial Sequence: Synthetic polypeptide
ATTLATPFKAQ

SEQ ID NO: 1450 - protein, 11 aa, synthetic construct
  source 1..11: note = Description of Artificial Sequence: Synthetic polypeptide
DGTLATPFKAQ

SEQ ID NO: 1451 - protein, 11 aa, synthetic construct
  source 1..11: note = Description of Artificial Sequence: Synthetic polypeptide
GGTLATPFKAQ

SEQ ID NO: 1452 - protein, 11 aa, synthetic construct
  source 1..11: note = Description of Artificial Sequence: Synthetic polypeptide
SGSLAVPFKAQ

SEQ ID NO: 1453 - protein, 11 aa, synthetic construct
  source 1..11: note = Description of Artificial Sequence: Synthetic polypeptide
AQTLAQPFKAQ

SEQ ID NO: 1454 - protein, 11 aa, synthetic construct
  source 1..11: note = Description of Artificial Sequence: Synthetic polypeptide
AQTLQQPFKAQ

SEQ ID NO: 1455 - protein, 11 aa, synthetic construct
  source 1..11: note = Description of Artificial Sequence: Synthetic polypeptide
AQTLSNPFKAQ

SEQ ID NO: 1456 - protein, 11 aa, synthetic construct
  source 1..11: note = Description of Artificial Sequence: Synthetic polypeptide
AQTLAVPFSNP

SEQ ID NO: 1457 - protein, 11 aa, synthetic construct
  source 1..11: note = Description of Artificial Sequence: Synthetic polypeptide
QGTLAVPFKAQ

SEQ ID NO: 1458 - protein, 11 aa, synthetic construct
  source 1..11: note = Description of Artificial Sequence: Synthetic polypeptide
NQTLAVPFKAQ

SEQ ID NO: 1459 - protein, 11 aa, synthetic construct
  source 1..11: note = Description of Artificial Sequence: Synthetic polypeptide
EGSLAVPFKAQ

SEQ ID NO: 1460 - protein, 11 aa, synthetic construct
  source 1..11: note = Description of Artificial Sequence: Synthetic polypeptide
SGNLAVPFKAQ

SEQ ID NO: 1461 - protein, 11 aa, synthetic construct
  source 1..11: note = Description of Artificial Sequence: Synthetic polypeptide
EGTLAVPFKAQ

SEQ ID NO: 1462 - protein, 11 aa, synthetic construct
  source 1..11: note = Description of Artificial Sequence: Synthetic polypeptide
DSTLAVPFKAQ

SEQ ID NO: 1463 - protein, 11 aa, synthetic construct
  source 1..11: note = Description of Artificial Sequence: Synthetic polypeptide
AVTLAVPFKAQ

SEQ ID NO: 1464 - protein, 11 aa, synthetic construct
  source 1..11: note = Description of Artificial Sequence: Synthetic polypeptide
AQTLSTPFKAQ

SEQ ID NO: 1465 - protein, 11 aa, synthetic construct
  source 1..11: note = Description of Artificial Sequence: Synthetic polypeptide
AQTLPQPFKAQ

SEQ ID NO: 1466 - protein, 11 aa, synthetic construct
  source 1..11: note = Description of Artificial Sequence: Synthetic polypeptide
AQTLSQPFKAQ

SEQ ID NO: 1467 - protein, 11 aa, synthetic construct
  source 1..11: note = Description of Artificial Sequence: Synthetic polypeptide
AQTLQLPFKAQ

SEQ ID NO: 1468 - protein, 11 aa, synthetic construct
  source 1..11: note = Description of Artificial Sequence: Synthetic polypeptide
AQTLTMPFKAQ

SEQ ID NO: 1469 - protein, 11 aa, synthetic construct
  source 1..11: note = Description of Artificial Sequence: Synthetic polypeptide
AQTLTTPFKAQ

SEQ ID NO: 1470 - protein, 11 aa, synthetic construct
  source 1..11: note = Description of Artificial Sequence: Synthetic polypeptide
AQYTLSQGWAQ

SEQ ID NO: 1471 - protein, 11 aa, synthetic construct
  source 1..11: note = Description of Artificial Sequence: Synthetic polypeptide
AQMNATKNVAQ

SEQ ID NO: 1472 - protein, 11 aa, synthetic construct
  source 1..11: note = Description of Artificial Sequence: Synthetic polypeptide
AQVSGGHHSAQ

SEQ ID NO: 1473 - protein, 11 aa, synthetic construct
  source 1..11: note = Description of Artificial Sequence: Synthetic polypeptide
AQTLTAPFKAQ

SEQ ID NO: 1474 - protein, 11 aa, synthetic construct
  source 1..11: note = Description of Artificial Sequence: Synthetic polypeptide
AQTLSKPFKAQ

SEQ ID NO: 1475 - protein, 7 aa, synthetic construct
  source 1..7: note = Description of Artificial Sequence: Synthetic polypeptide
QAVRTSL

SEQ ID NO: 1476 - protein, 7 aa, synthetic construct
  source 1..7: note = Description of Artificial Sequence: Synthetic polypeptide
LAKERLS

SEQ ID NO: 1477 - protein, 7 aa, synthetic construct
  source 1..7: note = Description of Artificial Sequence: Synthetic polypeptide
MNSTKNV

SEQ ID NO: 1478 - protein, 7 aa, synthetic construct
  source 1..7: note = Description of Artificial Sequence: Synthetic polypeptide
VSGGHHS

SEQ ID NO: 1479 - protein, 14 aa, synthetic construct
  source 1..14: note = Description of Artificial Sequence: Synthetic polypeptide
SAQTLAVPFKAQAQ

SEQ ID NO: 1480 - protein, 14 aa, synthetic construct
  source 1..14: note = Description of Artificial Sequence: Synthetic polypeptide
  VARIANT 2..4: note = Xaa = any amino acid
SXXXLAVPFKAQAQ

SEQ ID NO: 1481 - protein, 14 aa, synthetic construct
  source 1..14: note = Description of Artificial Sequence: Synthetic polypeptide
  VARIANT 4..6: note = Xaa = any amino acid
SAQXXXVPFKAQAQ

SEQ ID NO: 1482 - protein, 14 aa, synthetic construct
  source 1..14: note = Description of Artificial Sequence: Synthetic polypeptide
  VARIANT 6..8: note = Xaa = any amino acid
SAQTLXXXFKAQAQ

SEQ ID NO: 1483 - protein, 14 aa, synthetic construct
  source 1..14: note = Description of Artificial Sequence: Synthetic polypeptide
  VARIANT 8..10: note = Xaa = any amino acid
SAQTLAVXXXAQAQ

SEQ ID NO: 1484 - protein, 14 aa, synthetic construct
  source 1..14: note = Description of Artificial Sequence: Synthetic polypeptide
  VARIANT 10..12: note = Xaa = any amino acid
SAQTLAVPFXXXAQ

SEQ ID NO: 1485 - protein, 7 aa, synthetic construct
  source 1..7: note = Description of Artificial Sequence: Synthetic polypeptide
TNHQSAQ

SEQ ID NO: 1486 - protein, 7 aa, synthetic construct
  source 1..7: note = Description of Artificial Sequence: Synthetic polypeptide
AQAQTGW

SEQ ID NO: 1487 - protein, 9 aa, synthetic construct
  source 1..9: note = Description of Artificial Sequence: Synthetic polypeptide
DGTLATPFK

SEQ ID NO: 1488 - protein, 11 aa, synthetic construct
  source 1..11: note = Description of Artificial Sequence: Synthetic polypeptide
  VARIANT 10..11: note = Xaa = any amino acid
DGTLATPFKXX

SEQ ID NO: 1489 - protein, 8 aa, synthetic construct
  source 1..8: note = Description of Artificial Sequence: Synthetic polypeptide
LAVPFKAQ

SEQ ID NO: 1490 - protein, 6 aa, synthetic construct
  source 1..6: note = Description of Artificial Sequence: Synthetic polypeptide
VPFKAQ

SEQ ID NO: 1491 - protein, 4 aa, synthetic construct
  source 1..4: note = Description of Artificial Sequence: Synthetic polypeptide
FKAQ

SEQ ID NO: 1492 - protein, 6 aa, synthetic construct
  source 1..6: note = Description of Artificial Sequence: Synthetic polypeptide
AQTLAV

SEQ ID NO: 1493 - protein, 8 aa, synthetic construct
  source 1..8: note = Description of Artificial Sequence: Synthetic polypeptide
AQTLAVPF

SEQ ID NO: 1494 - protein, 4 aa, synthetic construct
  source 1..4: note = Description of Artificial Sequence: Synthetic polypeptide
QAVR

SEQ ID NO: 1495 - protein, 4 aa, synthetic construct
  source 1..4: note = Description of Artificial Sequence: Synthetic polypeptide
AVRT

SEQ ID NO: 1496 - protein, 4 aa, synthetic construct
  source 1..4: note = Description of Artificial Sequence: Synthetic polypeptide
VRTS

SEQ ID NO: 1497 - protein, 4 aa, synthetic construct
  source 1..4: note = Description of Artificial Sequence: Synthetic polypeptide
RTSL

SEQ ID NO: 1498 - protein, 5 aa, synthetic construct
  source 1..5: note = Description of Artificial Sequence: Synthetic polypeptide
QAVRT

SEQ ID NO: 1499 - protein, 5 aa, synthetic construct
  source 1..5: note = Description of Artificial Sequence: Synthetic polypeptide
AVRTS

SEQ ID NO: 1500 - protein, 5 aa, synthetic construct
  source 1..5: note = Description of Artificial Sequence: Synthetic polypeptide
VRTSL

SEQ ID NO: 1501 - protein, 6 aa, synthetic construct
  source 1..6: note = Description of Artificial Sequence: Synthetic polypeptide
QAVRTS

SEQ ID NO: 1502 - protein, 6 aa, synthetic construct
  source 1..6: note = Description of Artificial Sequence: Synthetic polypeptide
AVRTSL

SEQ ID NO: 1503 - DNA, 33 bp, synthetic construct
  source 1..33: mol_type = other DNA; note = Description of Artificial Sequence: Synthetic polynucleotide
gatgggactttggcggtgccttttaaggcacag

SEQ ID NO: 1504 - DNA, 33 bp, synthetic construct
  source 1..33: mol_type = other DNA; note = Description of Artificial Sequence: Synthetic polynucleotide
gatgggacgttggcggtgccttttaaggcacag

SEQ ID NO: 1505 - DNA, 21 bp, synthetic construct
  source 1..21: mol_type = other DNA; note = Description of Artificial Sequence: Synthetic polynucleotide
caggcggttaggacgtctttg

SEQ ID NO: 1506 - DNA, 27 bp, synthetic construct
  source 1..27: mol_type = other DNA; note = Description of Artificial Sequence: Synthetic polynucleotide
caggtcttcacggactcagactatcag

SEQ ID NO: 1507 - DNA, 32 bp, synthetic construct
  source 1..32: mol_type = other DNA; note = Description of Artificial Sequence: Synthetic polynucleotide
caagtaaaacctctacaaatgtggtaaaatcg

SEQ ID NO: 1508 - DNA, 36 bp, synthetic construct
  source 1..36: mol_type = other DNA; note = Description of Artificial Sequence: Synthetic polynucleotide
actcatcgaccaatacttgtactatctctctagaac

SEQ ID NO: 1509 - DNA, 26 bp, synthetic construct
  source 1..26: mol_type = other DNA; note = Description of Artificial Sequence: Synthetic polynucleotide
ggaagtattccttggttttgaaccca

SEQ ID NO: 1510 - DNA, 23 bp, synthetic construct
  source 1..23: mol_type = other DNA; note = Description of Artificial Sequence: Synthetic polynucleotide
ggtcgcggttcttgtttgtggat

SEQ ID NO: 1511 - DNA, 24 bp, synthetic construct
  source 1..24: mol_type = other DNA; note = Description of Artificial Sequence: Synthetic polynucleotide
cgaccttgaagcgcatgaactcct

SEQ ID NO: 1512 - DNA, 83 bp, synthetic construct
  source 1..83: mol_type = other DNA; note = Description of Artificial Sequence: Synthetic polynucleotide
  misc_difference 42..43: note = misc_feature - n = a, c, t or g
  misc_difference 45..46: note = misc_feature - n = a, c, t or g
  misc_difference 48..49: note = misc_feature - n = a, c, t or g
  misc_difference 51..52: note = misc_feature - n = a, c, t or g
  misc_difference 54..55: note = misc_feature - n = a, c, t or g
  misc_difference 57..58: note = misc_feature - n = a, c, t or g
  misc_difference 60..61: note = misc_feature - n = a, c, t or g
gtattccttggttttgaacccaaccggtctgcgcctgtgcmnnmnnmnnmnnmnnmnnmnnttgggcactctggtggtttgtc

SEQ ID NO: 1513 - DNA, 64 bp, synthetic construct
  source 1..64: mol_type = other DNA; note = Description of Artificial Sequence: Synthetic polynucleotide
  misc_difference 36..37: note = misc_feature - n = a, c, t or g
  misc_difference 39..40: note = misc_feature - n = a, c, t or g
  misc_difference 42..43: note = misc_feature - n = a, c, t or g
gtattccttggttttgaacccaaccggtctgcgcmnnmnnmnnaaaaggcaccgccaaagtttg

SEQ ID NO: 1514 - DNA, 70 bp, synthetic construct
  source 1..70: mol_type = other DNA; note = Description of Artificial Sequence: Synthetic polynucleotide
  misc_difference 42..43: note = misc_feature - n = a, c, t or g
  misc_difference 45..46: note = misc_feature - n = a, c, t or g
  misc_difference 48..49: note = misc_feature - n = a, c, t or g
gtattccttggttttgaacccaaccggtctgcgcctgtgcmnnmnnmnncaccgccaaagtttgggcact

SEQ ID NO: 1515 - DNA, 77 bp, synthetic construct
  source 1..77: mol_type = other DNA; note = Description of Artificial Sequence: Synthetic polynucleotide
  misc_difference 48..49: note = misc_feature - n = a, c, t or g
  misc_difference 51..52: note = misc_feature - n = a, c, t or g
  misc_difference 54..55: note = misc_feature - n is a, c, g, or t
  misc_difference 60..61: note = misc_feature - n = a, c, t or g
gtattccttggttttgaacccaaccggtctgcgcctgtgccttaaamnnmnnmnncaaagtttgggcactctggtgg

SEQ ID NO: 1516 - DNA, 83 bp, synthetic construct
  source 1..83: mol_type = other DNA; note = Description of Artificial Sequence: Synthetic polynucleotide
  misc_difference 54..55: note = misc_feature - n = a, c, t or g
  misc_difference 57..58: note = misc_feature - n = a, c, t or g
  misc_difference 60..61: note = misc_feature - n = a, c, t or g
gtattccttggttttgaacccaaccggtctgcgcctgtgccttaaaaggcacmnnmnnmnnttgggcactctggtggtttgtg

SEQ ID NO: 1517 - DNA, 21 bp, synthetic construct
  source 1..21: mol_type = other DNA; note = Description of Artificial Sequence: Synthetic polynucleotide
cttgcgaaggagcggctttcg

SEQ ID NO: 1518 - protein, 534 aa, synthetic construct
  source 1..534: note = Description of Artificial Sequence: Synthetic polypeptide
MAEGGGGAMGDSSGGADGVGNASGNWHCDSQWMGNTVITKTTRTWVLPSYNNHIYKAITSGTSQDANVQYAGYSTPWGYFDFNRFHCHFSPRDWQRLINNHWGIRPKSLKFKIFNVQVKEVTTQDQTKTIANNLTSTIQVFTDDEHQLPYVLGSATEGTMPPFPSDVYALPQYGYCTMHTNQNGARFNDRSAFYCLEYFPSQMLRTGNNFEFTFDFEEVPFHSMFAHSQDLDRLMNPLVDQYLWNFNEVDSSRNAQFKKAVKGAYGTMGRNWLPGPKFLDQRVRAYTGGTDNYANWNIWSNGNKVNLKDRQYLLQPGPVSATYTEGEASSLPAQNILGIAKDPYRSGSTTAGISDIMVTEEQEVAPTNGVGWKPYGRTVTNEQNTTTAPTSSDLDVLGALPGMVWQNRDIYLQGPIGAKIPKTDGKFHPSPNLGGFGLHNPPPQVFIKNTPVPADPPVEYVHQKWNSYITQYSTGQCTVEMVWELRKENSKRWNPEIQFTSNFSNRTSIMFAPNETGGYVEDRLIGTRYLTQNL

SEQ ID NO: 1519 - protein, 554 aa, synthetic construct
  source 1..554: note = Description of Artificial Sequence: Synthetic polypeptide
MTSVNSAEASTGAGGGGSNPVKSMWSEGATFSANSVTCTFSRQFLIPYDPEHHYKVFSPAASSCHNASGKEAKVCTISPIMGYSTPWRYLDFNALNLFFSPLEFQHLIENYGSIAPDALTVTISEIAVKDVTDKTGGGVQVTDSTTGRLCMLVDHEYKYPYVLGQGQDTLAPELPIWVYFPPQYAYLTVGDVNTQGISGDSKKLASEESAFYVLEHSSFQLLGTGGTATMSYKFPPVPPENLEGCSQHFYEMYNPLYGSRLGVPDTLGGDPKFRSLTHEDHAIQPQNFMPGPLVNSVSTKEGDSFNTGAGKALTGLSTGTSQNTRISLRPGPVSQPYHHWDTDKYVTGINAISHGQTTYGNAEDKEYQQGVGRFPNEKEQLKQLQGLNMHTYFPNKGTQQYTDQIERPLMVGSVWNRRALHYESQLWSKIPNLDDSFKTQFAALGGWGLHQPPPQIFLKILPQSGPIGGIKSMGITTLVQYAVGIMTVTMTFKLGPRKATGRWNPQPGVYPPHAAGHLPYVLYDPTATDAKQHHRHGYEKPEELWTAKSRVHPL

SEQ ID NO: 1520 - protein, 587 aa, synthetic construct
  source 1..587: note = Description of Artificial Sequence: Synthetic polypeptide
MSDGTSQPDGGNAVHSAARVERAADGPGGSGGGGSGGGGVGVSTGSYDNQTHYRFLGDGWVEITALATRLVHLNMPKSENYCRIRVHNTTDTSVKGNMAKDDAHEQIWTPWSLVDANAWGVWLQPSDWQYICNTMSQLNLVSLDQEIFNVVLKTVTEQDSGGQAIKIYNNDLTACMMVAVDSNNILPYTPAANSMETLGFYPWKPTIASPYRYYFCVDRDLSVTYENQEGTIEHNVMGTPKGMNSQFFTIENTQQITLLRTGDEFATGTYYFDTNPVKLTHTWQTNRQLGQPPLLSTFPEADTDAGTLTAQGSRHGATQMEVNWVSEAIRTRPAQVGFCQPHNDFEASRAGPFAAPKVPADVTQGMDREANGSVRYSYGKQHGENWAAHGPAPERYTWDETNFGSGRDTRDGFIQSAPLVVPPPLNGILTNANPIGTKNDIHFSNVFNSYGPLTTFSHPSPVYPQGQIWDKELDLEHKPRLHITAPFVCKNNAPGQMLVRLGPNLTDQYDPNGATLSRIVTYGTFFWKGKLTMRAKLRANTTWNPVYQVSVEDNGNSYMSVTKWLPTATGNMQSVPLITRPVARNTY

SEQ ID NO: 1521 - protein, 584 aa, synthetic construct
  source 1..584: note = Description of Artificial Sequence: Synthetic polypeptide
MSDGAVQPDGGQPAVRNERATGSGNGSGGGGGGGSGGVGISTGTFNNQTEFKFLENGWVEITANSSRLVHLNMPESENYKRVVVNNMDKTAVKGNMALDDIHVEIVTPWSLVDANAWGVWFNPGDWQLIVNTMSELHLVSFEQEIFNVVLKTVSESATQPPTKVYNNDLTASLMVALDSNNTMPFTPAAMRSETLGFYPWKPTIPTPWRYYFQWDRTLIPSHTGTSGTPTNVYHGTDPDDVQFYTIENSVPVHLLRTGDEFATGTFFFDCKPCRLTHTWQTNRALGLPPFLNSLPQSEGATNFGDIGVQQDKRRGVTQMGNTDYITEATIMRPAEVGYSAPYYSFEASTQGPFKTPIAAGRGGAQTDENQAADGDPRYAFGRQHGQKTTTTGETPERFTYIAHQDTGRYPEGDWIQNINFNLPVTNDNVLLPTDPIGGKTGINYTNIFNTYGPLTALNNVPPVYPNGQIWDKEFDTDLKPRLHINAPFVCQNNCPGQLFVKVAPNLTNQYDPDASANMSRIVTYSDFWWKGKLVFKAKLRASHTWNPIQQMSINVDNQFNYVPNNIGAMKIVYEKSQLAPRKLY

SEQ ID NO: 1522 - protein, 548 aa, synthetic construct
  source 1..548: note = Description of Artificial Sequence: Synthetic polypeptide
GVGISTGTFNNQTEFKFLENGWVEITANSSRLVHLNMPESENYRRVVVNNMDKTAVNGNMALDDIHAQIVTPWSLVDANAWGVWFNPGDWQLIVNTMSELHLVSFEQEIFNVVLKTVSESATQPPTKVYNNDLTASLMVALDSNNTMPFTPAAMRSETLGFYPWKPTIPTPWRYYFQWDRTLIPSHTGTSGTPTNIYHGTDPDDVQFYTIENSVPVHLLRTGDEFATGTFFFDCKPCRLTHTWQTNRALGLPPFLNSLPQSEGATNFGDIGVQQDKRRGVTQMGNTNYITEATIMRPAEVGYSAPYYSFEASTQGPFKTPIAAGRGGAQTDENQAADGNPRYAFGRQHGQKTTTTGETPERFTYIAHQDTGRYPEGDWIQNINFNLPVTNDNVLLPTDPIGGKTGINYTNIFNTYGPLTALNNVPPVYPNGQIWDKEFDTDLKPRLHVNAPFVCQNNCPGQLFVKVAPNLTNEYDPDASANMSRIVTYSDFWWKGKLVFKAKLRASHTWNPIQQMSINVDNQFNYVPSNIGGMKIVYEKSQLAPRKLY

SEQ ID NO: 1523 - protein, 736 aa, synthetic construct; identical to SEQ ID NO: 101
  source 1..736: note = Description of Artificial Sequence: Synthetic polypeptide

SEQ ID NO: 1524 - protein, 736 aa, synthetic construct; identical to SEQ ID NO: 96
  source 1..736: note = Description of Artificial Sequence: Synthetic polypeptide

SEQ ID NO: 1525 - protein, 736 aa, synthetic construct
  source 1..736: note = Description of Artificial Sequence: Synthetic polypeptide
MAADGYLPDWLEDTLSEGIRQWWKLKPGPPPPKPAERHKDDSRGLVLPGYKYLGPFNGLDKGEPVNEADAAALEHDKAYDRQLDSGDNPYLKYNHADAEFQERLKEDTSFGGNLGRAVFQAKKRVLEPLGLVEEPVKTAPGKKRPVEHSPVEEPDSSSGTGKAGQQPARKRLNFGQTGDADSVPDPQPLGQPPAAPSGLGTNTMATGSGAPMADNNEGADGVGNSSGNWHCDSTWMGDRVITTSTRTWALPTYNNHLYKQISSQSGASNDNHYFGYSTPWGYFDFNRFHCHFSPRDWQRLINNNWGFRPKRLNFKLFNIQVKEVTQNDGTTTIANNLTSTVQVFTDSEYQLPYVLGSAHQGCLPPFPADVFMVPQYGYLTLNNGSQAVGRSSFYCLEYFPSQMLRTGNNFTFSYTFEDVPFHSSYAHSQSLDRLMNPLIDQYLYYLSRTNTPSGTTTQSRLQFSQAGASDIRDQSRNWLPGPCYRQQRVSKTSADNNNSEYSWTGATKYHLNGRDSLVNPGPAMASHKDDEEKFFPQSGVLIFGKQGSEKTNVDIEKVMITDEEEIRTTNPVATEQYGSVSTNLQRGNRQAATADVNTQGVLPGMVWQDRDVYLQGPIWAKIPHTDGHFHPSPLMGGFGLKHPPPQILIKNTPVPANPSTTFSAAKFASFITQYSTGQVSVEIEWELQKENSKRWNPEIQYTSNYNKSVNVDFTVDTNGVYSEPRPIGTRYLTRNL

SEQ ID NO: 1526 - protein, 736 aa, synthetic construct
  source 1..736: note = Description of Artificial Sequence: Synthetic polypeptide
MAADGYLPDWLEDNLSEGIREWWDLKPGAPKPKANQQKQDDGRGLVLPGYKYLGPFNGLDKGEPVNAADAAALEHDKAYDQQLKAGDNPYLRYNHADAEFQERLQEDTSFGGNLGRAVFQAKKRVLEPFGLVEEGAKTAPGKKRPVEQSPQEPDSSSGIGKTGQQPAKKRLNFGQTGDSESVPDPQPLGEPPATPAAVGPTTMASGGGAPMADNNEGADGVGNASGNWHCDSTWLGDRVITTSTRTWALPTYNNHLYKQISSASTGASNDNHYFGYSTPWGYFDFNRFHCHFSPRDWQRLINNNWGFRPKRLNFKLFNVQVKEVTTNDGVTTIANNLTSTVQVFSDSEYQLPYVLGSAHQGCLPPFPADVFMIPQYGYLTLNNGSQAVGRSSFYCLEYFPSQMLRTGNNFTFSYTFEDVPFHSSYAHSQSLDRLMNPLIDQYLYYLNRTQDQSGSAQNKDLLFSRGSPAGMSVQPKNWLPGPCYRQQRVSKTKTDNNNSNFTWTGASKYNLNGRESIINPGTAMASHKDDKNKFFPMSGVMIFGKESAGASNTALDNVMITDEEEIKATNPVATERFGTVAVNLQSSSTDPATGDVHVMGALPGMVWQDRDVYLQGPIWAKIPHTDGHFHPSPLMGGFGLKNPPPQILIKNTPVPANPPAEFSATKFASFITQYSTGQVSVEIEWELQKENSKRWNPEVQYTSNYAKSANVDFTVDNNGLYTEPRPIGTRYLTRPL

SEQ ID NO: 1527 - protein, 737 aa, synthetic construct
  source 1..737: note = Description of Artificial Sequence: Synthetic polypeptide
MAADGYLPDWLEDTLSEGIRQWWKLKPGPPPPKPAERHKDDSRGLVLPGYKYLGPGNGLDKGEPVNAADAAALEHDKAYDQQLKAGDNPYLKYNHADAEFQERLKEDTSFGGNLGRAVFQAKKRVLEPLGLVEEGAKTAPGKKRPVEPSPQRSPDSSTGIGKKGQQPARKRLNFGQTGDSESVPDPQPLGEPPATPAAVGPTTMASGGGAPMADNNEGADGVGNASGNWHCDSTWLGDRVITTSTRTWALPTYNNHLYKQISSASTGASNDNHYFGYSTPWGYFDFNRFHCHFSPRDWQRLINNNWGFRPKRLNFKLFNIQVKEVTTNDGVTTIANNLTSTVQVFSDSEYQLPYVLGSAHQGCLPPFPADVFMIPQYGYLTLNNGSQAVGRSSFYCLEYFPSQMLRTGNNFTFSYTFEDVPFHSSYAHSQSLDRLMNPLIDQYLYYLNRTQNQSGSAQNKDLLFSRGSPAGMSVQPKNWLPGPCYRQQRVSKTKTDNNNSNFTWTGASKYNLNGRESIINPGTAMASHKDDKDKFFPMSGVMIFGKESAGASNTALDNVMITDEEEIKATNPVATERFGTVAVNLQSSSTDPATEDVHVMGALPGMVWQDRDVYLQGPIWAKIPHTDGHFHPSPLMGGFGLKNPPPQILIKNTPVPANPPAEFSATKFASFITQYSTGQVSVEIEWELQKENSKRWNPEVQYTSNYAKSANVDFTVDNNGLYTEPRPIGTRYLTRNL

SEQ ID NO: 1528 - protein, 736 aa, synthetic construct
  source 1..736: note = Description of Artificial Sequence: Synthetic polypeptide
MAADGYLPDWLEDNLSEGIREWWDLKPGAPKPKANQQKQDDGRGLVLPGYKYLGPFNGLDKGEPVNAADAAALEHDKAYDQQLKAGDNPYLRYNHADAEFQERLQEDTSFGGNLGRAVFQAKKRVLEPFGLVEEGAKTAPGKKRPVEQSPQEPDSSSGIGKTGQQPAKKRLNFGQTGDSESVPDPQPLGEPPATPAAVGPTTMASGGGAPMADNNEGADGVGNASGNWHCDSTWLGDRVITTSTRTWALPTYNNHLYKQISSASTGASNDNHYFGYSTPWGYFDFNRFHCHFSPRDWQRLINNNWGFRPKRLNFKLFNVQVKEVTTNDGVTTIANNLTSTVQVFSDSEYQLPYVLGSAHQGCLPPFPADVFMIPQYGYLTLNNGSQAVGRSSFYCLEYFPSQMLRTGNNFTFSYTFEDVPFHSSYAHSQSLDRLMNPLIDQYLYYLNRTQDQSGSAQNKDLLFSRGSPAGMSVQPKNWLPGPCYRQQRVSKTKTDNNNSNFTWTGASKYNLNGRESIINPGTAMASHKDDKNKFFPMSGVMIFGKESAGASNTALDNVMITDEEEIKATNPVATERFGTVAVNLQSSSTDPATGDVHVMGALPGMVWQDRDVYLQGPIWAKIPHTDGHFHPSPLMGGFGLKHPPPQILIKNTPVPANPPAEFSATKFASFITQYSTGQVSVEIEWELQKENSKRWNPEVQYTSNYAKSANVDFTVDNNGLYTEPRPIGTRYLTRPL

SEQ ID NO: 1529 - protein, 736 aa, synthetic construct
  source 1..736: note = Description of Artificial Sequence: Synthetic polypeptide
MAADGYLPDWLEDNLSEGIREWWDLKPGAPKPKANQQKQDDGRGLVLPGYKYLGPFNGLDKGEPVNAADAAALEHDKAYDQQLKAGDNPYLRYNHADAEFQERLQEDTSFGGNLGRAVFQAKKRVLEPFGLVEEGAKTAPGKKRPVEQSPQEPDSSSGIGKTGQQPAKKRLNFGQTGDSESVPDPQPLGEPPATPAAVGPTTMASGGGAPMADNNEGADGVGNASGNWHCDSTWLGDRVITTSTRTWALPTYNNHLYKQISSASTGASNDNHYFGYSTPWGYFDFNRFHCHFSPRDWQRLINNNWGFRPKRLNFKLFNVQVKEVTTNDGVTTIANNLTSTVQVFSDSEYQLPYVLGSAHQGCLPPFPADVFMIPQYGYLTLNNGSQAVGRSSFYCLEYFPSQMLRTGNNFTFSYTFEDVPFHSSYAHSQSLDRLMNPLIDQYLYYLNRTQDQSGSAQNKDLLFSRGSPAGMSVQPKNWLPGPCYRQQRVSKTKTDNNNSNFTWTGASKYNLNGRESIINPGTAMASHKDDKDKFFPMSGVMIFGKESAGASNTALDNVMITDEEEIKATNPVATERFGTVAVNLQSSSTDPATGDVHVMGALPGMVWQDRDVYLQGPIWAKIPHTDGHFHPSPLMGGFGLKHPPPQILIKNTPVPANPPAEFSATKFASFITQYSTGQVSVEIEWELQKENSKRWNPEVQYTSNYAKSANVDFTVDNNGLYTEPRPIGTRYLTRPL

SEQ ID NO: 1530 - protein, 736 aa, synthetic construct
  source 1..736: note = Description of Artificial Sequence: Synthetic polypeptide
MAADGYLPDWLEDNLSEGIREWWDLKPGAPKPKANQQKQDDGRGLVLPGYKYLGPFNGLDKGEPVNAADAAALEHDKAYDQQLKAGDNPYLRYNHADAEFQERLQEDTSFGGNLGRAVFQAKKRVLEPFGLVEEGAKTAPGKKRPVEQSPQEPDSSSGIGKTGQQPAKKRLNFGQTGDSESVPDPQPLGEPPATPAAVGPTTMASGGGAPMADNNEGADGVGNASGNWHCDSTWLGDRVITTSTRTWALPTYNNHLYKQISSASTGASNDNHYFGYSTPWGYFDFNRFHCHFSPRDWQRLINNNWGFRPKRLNFKLFNIQVKEVTTNDGVTTIANNLTSTVQVFSDSEYQLPYVLGSAHQGCLPPFPADVFMIPQYGYLTLNNGSQAVGRSSFYCLEYFPSQMLRTGNNFTFSYTFEDVPFHSSYAHSQSLDRLMNPLIDQYLYYLNRTQDQSGSAQNKDLLFSRGSPAGMSVQPKNWLPGPCYRQQRVSKTKTDNNNSNFTWTGASKYNLNGRESIINPGTAMASHKDDKNKFFPMSGVMIFGKESAGASNTALDNVMITDEEEIKATNPVATERFGTVAVNLQSSSTDPATGDVHVMGALPGMVWQDRDVYLQGPIWAKIPHTDGHFHPSPLMGGFGLKHPPPQILIKNTPVPANPPAEFSATKFASFITQYSTGQVSVEIEWELQKENSKRWNPEVQYTSNYAKSANVDFTVDNNGLYTEPRPIGTRYLTRPL

SEQ ID NO: 1531 - protein, 736 aa, synthetic construct
  source 1..736: note = Description of Artificial Sequence: Synthetic polypeptide
MAADGYLPDWLEDNLSEGIREWWDLKPGAPKPKANQQKQDDGRGLVLPGYKYLGPFNGLDKGEPVNAADAAALEHDKAYDQQLKAGDNPYLRYNHADAEFQERLQEDTSFGGNLGRAVFQAKKRVLEPFGLVEEGAKTAPGKKRPVEQSPQEPDSSSGIGKTGQQPAKKRLNFGQTGDSESVPDPQPLGEPPATPAAVGPTTMASGGGAPMADNNEGADGVGNASGNWHCDSTWLGDRVITTSTRTWALPTYNNHLYKQISSASTGASNDNHYFGYSTPWGYFDFNRFHCHFSPRDWQRLINNNWGFRPKRLNFKLFNVQVKEVTTNDGVTTIANNLTSTVQVFSDSEYQLPYVLGSAHQGCLPPFPADVFMIPQYGYLTLNNGSQAVGRSSFYCLEYFPSQMLRTGNNFTFSYTFEDVPFHSSYAHSQSLDRLMNPLIDQYLYYLNRTQNQSGSAQNKDLLFSRGSPAGMSVQPKNWLPGPCYRQQRVSKTKTDNNNSNFTWTGASKYNLNGRESIINPGTAMASHKDDKDKFFPMSGVMIFGKESAGASNTALDNVMITDEEEIKATNPVATERFGTVAVNLQSSSTDPATGDVHVMGALPGMVWQDRDVYLQGPIWAKIPHTDGHFHPSPLMGGFGLKHPPPQILIKNTPVPANPPAEFSATKFASFITQYSTGQVSVEIEWELQKENSKRWNPEVQYTSNYAKSANVDFTVDNNGLYTEPRPIGTRYLTRPL

SEQ ID NO: 1532 - protein, 736 aa, synthetic construct
  source 1..736: note = Description of Artificial Sequence: Synthetic polypeptide
MAADGYLPDWLEDNLSEGIREWWDLKPGAPKPKANQQKQDDGRGLVLPGYKYLGPFNGLDKGEPVNAADAAALEHDKAYDQQLKAGDNPYLRYNHADAEFQERLQEDTSFGGNLGRAVFQAKKRVLEPFGLVEEGAKTAPGKKRPVEQSPQEPDSSSGIGKTGQQPAKKRLNFGQTGDSESVPDPQPLGEPPATPAAVGPTTMASGGGAPMADNNEGADGVGNASGNWHCDSTWLGDRVITTSTRTWALPTYNNHLYKQISSASTGASNDNHYFGYSTPWGYFDFNRFHCHFSPRDWQRLINNNWGFRPKRLNFKLFNVQVKEVTTNDGVTTIANNLTSTVQVFSDSEYQLPYVLGSAHQGCLPPFPADVFMIPQYGYLTLNNGSQAVGRSSFYCLEYFPSQMLRTGNNFTFSYTFEDVPFHSSYAHSQSLDRLMNPLIDQYLYYLNRTQNQSGSAQNKDLLFSRGSPAGMSVQPKNWLPGPCYRQQRVSKTKTDNNNSNFTWTGASKYNLNGRESIINPGTAMASHKDDKNKFFPMSGVMIFGKESAGASNTALDNVMITDEEEIKATNPVATERFGTVAVNLQSSSTDPATGDVHVMGALPGMVWQDRDVYLQGPIWAKIPHTDGHFHPSPLMGGFGLKHPPPQILIKNTPVPANPPAEFSATKFASFITQYSTGQVSVEIEWELQKENSKRWNPEVQYTSNYAKSANVDFTVDNNGLYTEPRPIGTRYLTRPL

SEQ ID NO: 1533 - DNA, 2217 bp, synthetic construct
  source 1..2217: mol_type = other DNA; note = Description of Artificial Sequence: Synthetic polynucleotide
atggctgccgatggttatcttccagattggctcgaggacaacctctctgagggcattcgcgagtggtgggacctgaaacctggagccccgaaacccaaagccaaccagcaaaagcaggacaacggccggggtctggtgcttcctggctacaagtacctcggacccttcaacggactcgacaagggggagcccgtcaacgcggcggacgcagcggccctcgagcacgacaaggcctacgaccagcagctccaagcgggtgacaatccgtacctgcggtataatcacgccgacgccgagtttcaggagcgtctgcaagaagatacgtcttttgggggcaacctcgggcgcgcagtcttccaggccaaaaagcgggttctcgaacctctgggcctggttgaatcgccggttaagacggctcctggaaagaagagaccggtagagccatcaccccagcgctctccagactcctctacgggcatcggcaagaaaggccagcagcccgcaaaaaagagactcaattttgggcagactggcgactcagagtcagtccccgaccctcaaccaatcggagaaccaccagcaggcccctctggtctgggatctggtacaatggctgcaggcggtggcgctccaatggcagacaataacgaaggcgccgacggagtgggtagttcctcaggaaattggcattgcgattccacatggctgggcgacagagtcatcaccaccagcacccgcacctgggccctgcccacctacaacaaccacctctacaagcaaatctccaacgggacctcgggaggaagcaccaacgacaacacctacttcggctacagcaccccctgggggtattttgacttcaacagattccactgccacttttcaccacgtgactggcagcgactcatcaacaacaactggggattccggcccaagaggctcaacttcaagctcttcaacatccaagtcaaggaggtcacgcagaatgaaggcaccaagaccatcgccaataaccttaccagcacgattcaggtctttacggactcggaataccagctcccgtacgtgctcggctcggcgcaccagggctgcctgcctccgttcccggcggacgtcttcatgattcctcagtacgggtacctgactctgaacaatggcagtcaggctgtgggccggtcgtccttctactgcctggagtactttccttctcaaatgctgagaacgggcaacaactttgaattcagctacaacttcgaggacgtgcccttccacagcagctacgcgcacagccagagcctggaccggctgatgaaccctctcatcgaccagtacttgtactacctgtcccggactcaaagcacgggcggtactgcaggaactcagcagttgctattttctcaggccgggcctaacaacatgtcggctcaggccaagaactggctacccggtccctgctaccggcagcaacgcgtctccacgacactgtcgcagaacaacaacagcaactttgcctggacgggtgccaccaagtatcatctgaatggcagagactctctggtgaatcctggcgttgccatggctacccacaaggacgacgaagagcgattttttccatccagcggagtcttaatgtttgggaaacagggagctggaaaagacaacgtggactatagcagcgtgatgctaaccagcgaggaagaaataaagaccaccaacccagtggccacagaacagtacggcgtggtggccgataacctgcaacagcaaaacgccgctcctattgtaggggccgtcaatagtcaaggagccttacctggcatggtgtggcagaaccgggacgtgtacctgcagggtcccatctgggccaagattcctcatacggacggcaactttcatccctcgccgctgatgggaggctttggactgaagcatccgcctcctcagatcctgattaaaaacacacctgttcccgcggatcctccgaccaccttcaatcaggccaagctggcttctttcatcacgcagtacagtaccggccaggtcagcgtggagatcgagtgggagctgcagaaggagaacagcaaacgctggaacccagagattcagtacacttccaactactacaaatctacaaatgtggactttgctgtcaatactgagggtacttattccgagcctcgccccattggcacccgttacctcacccgtaatctgtaa

SEQ ID NO: 1534 - protein, 738 aa, synthetic construct
  source 1..738: note = Description of Artificial Sequence: Synthetic polypeptide
MAADGYLPDWLEDNLSEGIREWWDLKPGAPKPKANQQKQDNGRGLVLPGYKYLGPFNGLDKGEPVNAADAAALEHDKAYDQQLQAGDNPYLRYNHADAEFQERLQEDTSFGGNLGRAVFQAKKRVLEPLGLVESPVKTAPGKKRPVEPSPQRSPDSSTGIGKKGQQPAKKRLNFGQTGDSESVPDPQPIGEPPAGPSGLGSGTMAAGGGAPMADNNEGADGVGSSSGNWHCDSTWLGDRVITTSTRTWALPTYNNHLYKQISNGTSGGSTNDNTYFGYSTPWGYFDFNRFHCHFSPRDWQRLINNNWGFRPKRLNFKLFNIQVKEVTQNEGTKTIANNLTSTIQVFTDSEYQLPYVLGSAHQGCLPPFPADVFMIPQYGYLTLNNGSQAVGRSSFYCLEYFPSQMLRTGNNFEFSYNFEDVPFHSSYAHSQSLDRLMNPLIDQYLYYLSRTQSTGGTAGTQQLLFSQAGPNNMSAQAKNWLPGPCYRQQRVSTTLSQNNNSNFAWTGATKYHLNGRDSLVNPGVAMATHKDDEERFFPSSGVLMFGKQGAGKDNVDYSSVMLTSEEEIKTTNPVATEQYGVVADNLQQQNAAPIVGAVNSQGALPGMVWQNRDVYLQGPIWAKIPHTDGNFHPSPLMGGFGLKHPPPQILIKNTPVPADPPTTFNQAKLASFITQYSTGQVSVEIEWELQKENSKRWNPEIQYTSNYYKSTNVDFAVNTEGTYSEPRPIGTRYLTRNL

SEQ ID NO: 1535 - protein, 738 aa, synthetic construct; identical to SEQ ID NO: 1534
  source 1..738: note = Description of Artificial Sequence: Synthetic polypeptide

SEQ ID NO: 1536 - DNA, 4472 bp, synthetic construct
  source 1..4472: mol_type = other DNA; note = Description of Artificial Sequence: Synthetic polynucleotide
ctccatcactaggggtaaccgcgaagcgcctcccacgctgccgcgtcagcgctgacgtaaattacgtcataggggagtggtcctgtattagctgtcacgtgagtgcttttgcgacattttgcgacaccacgtggccattcatggtatatatggccgagtgagcgagcaggatctccattttgaccgcgaaatttgaacgagcagcagccatgccgggcttctacgagatcgtgcttaaggtgccgagcgacctggacgagcacctgccgggcatttctgactcgtttgtgaactgggtggcagagaaggaatgggagctgcccccggattctgacatggatcggaatctgattgagcaggcacccctgaccgtggccgagaagctacagcgcgacttcctggtccaatggcgccgcgtgagtaaggccccggaggccctcttctttgttcagttcgagaagggcgagtcctacttccacctccatattctggtagagaccacgggggtcaaatccatggtgctgggccgcttcctgagtcagattcgggacaagctggtgcagaccatctaccgcgggatcgagccgaccctgcccaactggttcgcggtgacaaagacgcgtaatggcgccggaggggggaacaaggtggtggacgagtgctacatccccaactacctgctgcccaagactcagcccgagctgcagtgggcgtggactaacatggaggagtatataagcgcgtgcttgaacctggccgagcgcaaacggctcgtggcgcagcacctgacccacgtcagccagacccaggagcagaacaaggagaatctgaacccgaattctgacgcgcctgtcatccggtcaaaaacctccgcgcgctacatggagctggtcgggtggctggtggaccggggcatcacctccgagaagcagtggatccaggaggaccaggcctcgtacatctccttcaacgccgcctccaactcgcggtctcagatcaaggccgcgctggacaatgccggcaagatcatggcgctgaccaaatccgcgcccgactacctggtaggccccgctctgcccgcggacattaaatccaaccgcatctaccgcatcctggagctgaatggctacgaccctgcctacgccggttccgtctttctcggctgggcccagaaaaagtttggcaaaaggaacaccatctggctgtttgggccggccaccacgggcaagaccaacatcgcggaagccatcgcccacgccgtgcccttctacggctgcgtcaactggaccaatgagaactttcccttcaacgattgcgtcgacaagatggtgatctggtgggaggagggcaagatgacggccaaggtcgtggagtccgccaaggccattctcggcggcagcaaggtgcgcgtggaccaaaagtgcaagtcgtccgcccagatcgatcccacccccgtgatcgtcacctccaacaccaacatgtgcgccgtgattgacgggaacagcaccaccttcgagcaccagcagccgttgcaggaccggatgttcaaatttgaacttacccgccgtctggagcacgactttggcaaggtgacaaagcaggaagtcaaagagttcttccgctgggcgcaggatcacgtgaccgaggtggcgcatgagttctacgtcagaaagggtggagctaacaaaagacccgcccccgatgacgcggatataagcgagcccaagcgggcctgcccctcagtcgcggatccatcgacgtcagacgcggaaggagctccggtggactttgccgacaggtaccaaaacaaatgttctcgtcacgcgggcatgcttcagatgctgtttccctgcaaaacatgcgagagaatgaatcagaatttcaacatttgcttcacgcacgggaccagagactgttcagaatgtttccctggcgtgtcagaatctcaaccggtcgtcagaaaaaagacgtatcggaaactctgtgcgattcatcatctgctggggcgggcacccgagattgcttgctcggcctgcgacctggtcaacgtggacctggatgactgtgtttctgagcaataaatgacttaaaccaggtatggctgccgatggttatcttccagattggctcgaggacaacctctctgagggcattcgcgagtggtgggacctgaaacctggagccccgaaacccaaagccaaccagcaaaagcaggacaacggccggggtctggtgcttcctggctacaagtacctcggacccttcaacggactcgacaagggggagcccgtcaacgcggcggacgcagcggccctcgagcacgacaaggcctacgaccagcagctccaagcgggtgacaatccgtacctgcggtataatcacgccgacgccgagtttcaggagcgtctgcaagaagatacgtcttttgggggcaacctcgggcgcgcagtcttccaggccaaaaagcgggttctcgaacctctgggcctggttgaatcgccggttaagacggctcctggaaagaagagaccggtagagccatcaccccagcgctctccagactcctctacgggcatcggcaagaaaggccagcagcccgcaaaaaagagactcaattttgggcagactggcgactcagagtcagtccccgaccctcaaccaatcggagaaccaccagcaggcccctctggtctgggatctggtacaatggctgcaggcggtggcgctccaatggcagacaataacgaaggcgccgacggagtgggtagttcctcaggaaattggcattgcgattccacatggctgggcgacagagtcatcaccaccagcacccgcacctgggccctgcccacctacaacaaccacctctacaagcaaatctccaacgggacctcgggaggaagcaccaacgacaacacctacttcggctacagcaccccctgggggtattttgacttcaacagattccactgccacttttcaccacgtgactggcagcgactcatcaacaacaactggggattccggcccaagaggctcaacttcaagctcttcaacatccaagtcaaggaggtcacgcagaatgaaggcaccaagaccatcgccaataaccttaccagcacgattcaggtctttacggactcggaataccagctcccgtacgtgctcggctcggcgcaccagggctgcctgcctccgttcccggcggacgtcttcatgattcctcagtacgggtacctgactctgaacaatggcagtcaggctgtgggccggtcgtccttctactgcctggagtactttccttctcaaatgctgagaacgggcaacaactttgaattcagctacaacttcgaggacgtgcccttccacagcagctacgcgcacagccagagcctggaccggctgatgaaccctctcatcgaccagtacttgtactacctgtcccggactcaaagcacgggcggtactgcaggaactcagcagttgctattttctcaggccgggcctaacaacatgtcggctcaggccaagaactggctacccggtccctgctaccggcagcaacgcgtctccacgacactgtcgcagaacaacaacagcaactttgcctggacgggtgccaccaagtatcatctgaatggcagagactctctggtgaatcctggcgttgccatggctacccacaaggacgacgaagagcgattttttccatccagcggagtcttaatgtttgggaaacagggagctggaaaagacaacgtggactatagcagcgtgatgctaaccagcgaggaagaaataaagaccaccaacccagtggccacagaacagtacggcgtggtggccgataacctgcaacagcaaaacgccgctcctattgtaggggccgtcaatagtcaaggagccttacctggcatggtgtggcagaaccgggacgtgtacctgcagggtcccatctgggccaagattcctcatacggacggcaactttcatccctcgccgctgatgggaggctttggactgaagcatccgcctcctcagatcctgattaaaaacacacctgttcccgcggatcctccgaccaccttcaatcaggccaagctggcttctttcatcacgcagtacagtaccggccaggtcagcgtggagatcgagtgggagctgcagaaggagaacagcaaacgctggaacccagagattcagtacacttccaactactacaaatctacaaatgtggactttgctgtcaatactgagggtacttattccgagcctcgccccattggcacccgttacctcacccgtaatctgtaattacatgttaatcaataaaccggttaattcgtttcagttgaactttggtctcctgtccttcttatcttatcggttaccatagaaactggttacttattaactgcttggtgcgcttcgcgataaaagacttacgtcatcgggttacccctagtgatgga

SEQ ID NO: 1537 - protein, 738 aa, synthetic construct
  source 1..738: note = Description of Artificial Sequence: Synthetic polypeptide
MAADGYLPDWLEDNLSEGIREWWDLKPGAPKPKANQQKQDNGRGLVLPGYKYLGPFNGLDKGEPVNAADAAALEHDKAYDQQLQAGDNPYLRYNHADAEFQERLQEDTSFGGNLGRAVFQAKKRVLEPLGLVESPVKTAPGKKRPVEPSPQRSPDSSTGIGKKGQQPAKKRLNFGQTGDSESVPDPQPIGEPPAAPSGVGPNTMAAGGGAPMADNNEGADGVGSSSGNWHCDSTWLGDRVITTSTRTWALPTYNNHLYKQISNGTSGGSTNDNTYFGYSTPWGYFDFNRFHCHFSPRDWQRLINNNWGFRPKRLNFKLFNIQVKEVTQNEGTKTIANNLTSTIQVFTDSEYQLPYVLGSAHQGCLPPFPADVFMIPQYGYLTLNNGSQAVGRSSFYCLEYFPSQMLRTGNNFEFSYNFEDVPFHSSYAHSQSLDRLMNPLIDQYLYYLSRTQSTGGTAGTQQLLFSQAGPNNMSAQAKNWLPGPCYRQQRVSTTLSQNNNSNFAWTGATKYHLNGRDSLVNPGVAMATHKDDEERFFPSSGVLMFGKQGAGKDNVDYSSVMLTSEEEIKTTNPVATEQYGVVADNLQQQNAAPIVGAVNSQGALPGMVWQNRDVYLQGPIWAKIPHTDGNFHPSPLMGGFGLKHPPPQILIKNTPVPADPPTTFNQAKLASFITQYSTGQVSVEIEWELQKENSKRWNPEIQYTSNYYKSTNVDFAVNTEGTYSEPRPIGTRYLTRNL

SEQ ID NO: 1538 - protein, 738 aa, synthetic construct
  source 1..738: note = Description of Artificial Sequence: Synthetic polypeptide
MAADGYLPDWLEDNLSEGIREWWDLKPGAPKPKANQQRQDNGRGLVLPGYRYLGPFNGLDKGEPVNAADAAALEHDRAYDQQLQAGDNPYLRYNHADAEFQERLQEDTSFGGNLGRAVFQAKKRVLEPLGLVESPVRTAPGKKRPVEPSPQRSPDSSTGIGKKGQQPARKRLNFGQTGDSESVPDPQPIGEPPAAPSGVGPNTMAAGGGAPMADNNEGADGVGSSSGNWHCDSTWLGDRVITTSTRTWALPTYNNHLYRQISNGTSGGSTNDNTYFGYSTPWGYFDFNRFHCHFSPRDWQRLINNNWGFRPKRLNFKLFNIQVKEVTQNEGTRTIANNLTSTIQVFTDSEYQLPYVLGSAHQGCLPPFPADVFMIPQYGYLTLNNGSQAVGRSSFYCLEYFPSQMLRTGNNFEFSYNFEDVPFHSSYAHSQSLDRLMNPLIDQYLYYLSRTQSTGGTAGTQQLLFSQAGPNNMSAQAKNWLPGPCYRQQRVSTTLSQNNNSNFAWTGATKYHLNGRDSLVNPGVAMATHRDDEERFFPSSGVLMFGRQGAGRDNVDYSSVMLTSEEEIRTTNPVATEQYGVVADNLQQQNAAPIVGAVNSQGALPGMVWQNRDVYLQGPIWAKIPHTDGNFHPSPLMGGFGLKHPPPQILIKNTPVPADPPTTFNQAKLASFITQYSTGQVSVEIEWELQKENSKRWNPEIQYTSNYYKSTNVDFAVNTEGTYSEPRPIGTRYLTRNL

SEQ ID NO: 1539 - protein, 738 aa, synthetic construct
  source 1..738: note = Description of Artificial Sequence: Synthetic polypeptide
MAADGYLPDWLEDNLSEGIREWWDLKPGAPKPKANQQRQDNGRGLVLPGYRYLGPFNGLDKGEPVNAADAAALEHDRAYDQQLQAGDNPYLRYNHADAEFQERLQEDTSFGGNLGRAVFQAKKRVLEPLGLVESPVRTAPGKKRPVEPSPQRSPDSSTGIGKRGQQPARKRLNFGQTGDSESVPDPQPIGEPPAAPSGVGPNTMAAGGGAPMADNNEGADGVGSSSGNWHCDSTWLGDRVITTSTRTWALPTYNNHLYRQISNGTSGGSTNDNTYFGYSTPWGYFDFNRFHCHFSPRDWQRLINNNWGFRPKRLNFKLFNIQVKEVTQNEGTRTIANNLTSTIQVFTDSEYQLPYVLGSAHQGCLPPFPADVFMIPQYGYLTLNNGSQAVGRSSFYCLEYFPSQMLRTGNNFEFSYNFEDVPFHSSYAHSQSLDRLMNPLIDQYLYYLSRTQSTGGTAGTQQLLFSQAGPNNMSAQAKNWLPGPCYRQQRVSTTLSQNNNSNFAWTGATKYHLNGRDSLVNPGVAMATHRDDEERFFPSSGVLMFGKQGAGRDNVDYSSVMLTSEEEIRTTNPVATEQYGVVADNLQQQNAAPIVGAVNSQGALPGMVWQNRDVYLQGPIWAKIPHTDGNFHPSPLMGGFGLKHPPPQILIKNTPVPADPPTTFNQAKLASFITQYSTGQVSVEIEWELQKENSKRWNPEIQYTSNYYKSTNVDFAVNTEGTYSEPRPIGTRYLTRNL

SEQ ID NO: 1540 - protein, 738 aa, synthetic construct
  source 1..738: note = Description of Artificial Sequence: Synthetic polypeptide
MAADGYLPDWLEDNLSEGIREWWDLKPGAPKPKANQQRQDNGRGLVLPGYRYLGPFNGLDKGEPVNAADAAALEHDRAYDQQLQAGDNPYLRYNHADAEFQERLQEDTSFGGNLGRAVFQAKKRVLEPLGLVESPVRTAPGKKRPVEPSPQRSPDSSTGIGKRGQQPAKKRLNFGQTGDSESVPDPQPIGEPPAAPSGVGPNTMAAGGGAPMADNNEGADGVGSSSGNWHCDSTWLGDRVITTSTRTWALPTYNNHLYRQISNGTSGGSTNDNTYFGYSTPWGYFDFNRFHCHFSPRDWQRLINNNWGFRPKRLNFKLFNIQVKEVTQNEGTRTIANNLTSTIQVFTDSEYQLPYVLGSAHQGCLPPFPADVFMIPQYGYLTLNNGSQAVGRSSFYCLEYFPSQMLRTGNNFEFSYNFEDVPFHSSYAHSQSLDRLMNPLIDQYLYYLSRTQSTGGTAGTQQLLFSQAGPNNMSAQAKNWLPGPCYRQQRVSTTLSQNNNSNFAWTGATKYHLNGRDSLVNPGVAMATHRDDEERFFPSSGVLMFGRQGAGRDNVDYSSVMLTSEEEIRTTNPVATEQYGVVADNLQQQNAAPIVGAVNSQGALPGMVWQNRDVYLQGPIWAKIPHTDGNFHPSPLMGGFGLKHPPPQILIKNTPVPADPPTTFNQAKLASFITQYSTGQVSVEIEWELQKENSKRWNPEIQYTSNYYKSTNVDFAVNTEGTYSEPRPIGTRYLTRNL

SEQ ID NO: 1541 - protein, 738 aa, synthetic construct
  source 1..738: note = Description of Artificial Sequence: Synthetic polypeptide
MAADGYLPDWLEDNLSEGIREWWDLKPGAPKPKANQQRQDNGRGLVLPGYRYLGPFNGLDKGEPVNAADAAALEHDRAYDQQLQAGDNPYLRYNHADAEFQERLQEDTSFGGNLGRAVFQAKKRVLEPLGLVESPVRTAPGKKRPVEPSPQRSPDSSTGIGKRGQQPAKKRLNFGQTGDSESVPDPQPIGEPPAAPSGVGPNTMAAGGGAPMADNNEGADGVGSSSGNWHCDSTWLGDRVITTSTRTWALPTYNNHLYRQISNGTSGGSTNDNTYFGYSTPWGYFDFNRFHCHFSPRDWQRLINNNWGFRPKRLNFKLFNIQVKEVTQNEGTRTIANNLTSTIQVFTDSEYQLPYVLGSAHQGCLPPFPADVFMIPQYGYLTLNNGSQAVGRSSFYCLEYFPSQMLRTGNNFEFSYNFEDVPFHSSYAHSQSLDRLMNPLIDQYLYYLSRTQSTGGTAGTQQLLFSQAGPNNMSAQAKNWLPGPCYRQQRVSTTLSQNNNSNFAWTGATKYHLNGRDSLVNPGVAMATHRDDEERFFPSSGVLMFGKQGAGRDNVDYSSVMLTSEEEIRTTNPVATEQYGVVADNLQQQNAAPIVGAVNSQGALPGMVWQNRDVYLQGPIWAKIPHTDGNFHPSPLMGGFGLKHPPPQILIKNTPVPADPPTTFNQARLASFITQYSTGQVSVEIEWELQKENSKRWNPEIQYTSNYYKSTNVDFAVNTEGTYSEPRPIGTRYLTRNL

SEQ ID NO: 1542 - protein, 738 aa, synthetic construct
  source 1..738: note = Description of Artificial Sequence: Synthetic polypeptide
MAADGYLPDWLEDNLSEGIREWWDLKPGAPKPKANQQRQDNGRGLVLPGYRYLGPFNGLDKGEPVNAADAAALEHDRAYDQQLQAGDNPYLRYNHADAEFQERLQEDTSFGGNLGRAVFQAKKRVLEPLGLVESPVRTAPGKKRPVEPSPQRSPDSSTGIGKKGQQPAKKRLNFGQTGDSESVPDPQPIGEPPAAPSGVGPNTMAAGGGAPMADNNEGADGVGSSSGNWHCDSTWLGDRVITTSTRTWALPTYNNHLYRQISNGTSGGSTNDNTYFGYSTPWGYFDFNRFHCHFSPRDWQRLINNNWGFRPKRLNFKLFNIQVKEVTQNEGTRTIANNLTSTIQVFTDSEYQLPYVLGSAHQGCLPPFPADVFMIPQYGYLTLNNGSQAVGRSSFYCLEYFPSQMLRTGNNFEFSYNFEDVPFHSSYAHSQSLDRLMNPLIDQYLYYLSRTQSTGGTAGTQQLLFSQAGPNNMSAQAKNWLPGPCYRQQRVSTTLSQNNNSNFAWTGATKYHLNGRDSLVNPGVAMATHRDDEERFFPSSGVLMFGRQGAGRDNVDYSSVMLTSEEEIRTTNPVATEQYGVVADNLQQQNAAPIVGAVNSQGALPGMVWQNRDVYLQGPIWAKIPHTDGNFHPSPLMGGFGLKHPPPQILIKNTPVPADPPTTFNQARLASFITQYSTGQVSVEIEWELQKENSKRWNPEIQYTSNYYKSTNVDFAVNTEGTYSEPRPIGTRYLTRNL

SEQ ID NO: 1543 - DNA, 2214 bp, synthetic construct
  source 1..2214: mol_type = other DNA; note = Description of Artificial Sequence: Synthetic polynucleotide
atggctgccgatggttatcttccagattggctcgaggacaacctctctgagggcattcgcgagtggtgggacctgaaacctggagccccgaaacccaaagccaaccagcaaaagcaggacaacggccggggtctggtgcttcctggctacaagtacctcggacccttcaacggactcgacaagggggagcccgtcaacgcggcggacgcagcggccctcgagcacgacaaggcctacgaccagcagctccaagcgggtgacaatccgtacctgcggtataatcacgccgacgccgagtttcaggagcgtctgcaagaagatacgtcttttgggggcaacctcgggcgcgcagtcttccaggccaaaaagcgggttctcgaacctctgggcctggttgaatcgccggttaagacggctcctggaaagaagagaccggtagagccatcaccccagcgctctccagactcctctacgggcatcggcaagaaaggccagcagcccgcaaaaaagagactcaattttgggcagactggcgactcagagtcagtccccgaccctcaaccaatcggagaaccaccagcagccccctctggtgtgggacctaatacaatggctgcaggcggtggcgctccaatggcagacaataacgaaggcgccgacggagtgggtagttcctcaggaaattggcattgcgattccacatggctgggcgacagagtcatcaccaccagcacccgcacctgggccctgcccacctacaacaaccacctctacaagcaaatctccaacgggacctcgggaggaagcaccaacgacaacacctacttcggctacagcaccccctgggggtattttgacttcaacagattccactgccacttttcaccacgtgactggcagcgactcatcaacaacaactggggattccggcccaagaggctcaacttcaagctcttcaacatccaagtcaaggaggtcacgcagaatgaaggcaccaagaccatcgccaataaccttaccagcacgattcaggtctttacggactcggaataccagctcccgtacgtgctcggctcggcgcaccagggctgcctgcctccgttcccggcggacgtcttcatgattcctcagtacgggtacctgactctgaacaatggcagtcaggctgtgggccggtcgtccttctactgcctggagtactttccttctcaaatgctgagaacgggcaacaactttgaattcagctacaacttcgaggacgtgcccttccacagcagctacgcgcacagccagagcctggaccggctgatgaaccctctcatcgaccagtacttgtactacctgtcccggactcaaagcacgggcggtactgcaggaactcagcagttgctattttctcaggccgggcctaacaacatgtcggctcaggccaagaactggctacccggtccctgctaccggcagcaacgcgtctccacgacactgtcgcagaacaacaacagcaactttgcctggacgggtgccaccaagtatcatctgaatggcagagactctctggtgaatcctggcgttgccatggctacccacaaggacgacgaagagcgattttttccatccagcggagtcttaatgtttgggaaacagggagctggaaaagacaacgtggactatagcagcgtgatgctaaccagcgaggaagaaataaagaccaccaacccagtggccacagaacagtacggcgtggtggccgataacctgcaacagcaaaacgccgctcctattgtaggggccgtcaatagtcaaggagccttacctggcatggtgtggcagaaccgggacgtgtacctgcagggtcccatctgggccaagattcctcatacggacggcaactttcatccctcgccgctgatgggaggctttggactgaagcatccgcctcctcagatcctgattaaaaacacacctgttcccgcggatcctccgaccaccttcaatcaggccaagctggcttctttcatcacgcagtacagtaccggccaggtcagcgtggagatcgagtgggagctgcagaaggagaacagcaaacgctggaacccagagattcagtacacttccaactactacaaatctacaaatgtggactttgctgtcaatactgagggtacttattccgagcctcgccccattggcacccgttacctcacccgtaatctg

SEQ ID NO: 1544 - DNA, 2217 bp, synthetic construct
  source 1..2217: mol_type = other DNA; note = Description of Artificial Sequence: Synthetic polynucleotide
atggctgccgatggttatcttccagattggctcgaggacaacctctctgagggcattcgcgagtggtgggacctgaaacctggagccccgaaacccaaagccaaccagcaaaggcaggacaacggccggggtctggtgcttcctggctacaggtacctcggacccttcaacggactcgacaagggggagcccgtcaacgcggcggacgcagcggccctcgagcacgacagggcctacgaccagcagctccaagcgggtgacaatccgtacctgcggtataatcacgccgacgccgagtttcaggagcgtctgcaagaagatacgtcttttgggggcaacctcgggcgcgcagtcttccaggccaaaaagcgggttctcgaacctctgggcctggttgaatcgccggttaggacggctcctggaaagaagagaccggtagagccatcaccccagcgctctccagactcctctacgggcatcggcaagaaaggccagcagcccgcaagaaagagactcaattttgggcagactggcgactcagagtcagtccccgaccctcaaccaatcggagaaccaccagcagccccctctggtgtgggacctaatacaatggctgcaggcggtggcgctccaatggcagacaataacgaaggcgccgacggagtgggtagttcctcaggaaattggcattgcgattccacatggctgggcgacagagtcatcaccaccagcacccgcacctgggccctgcccacctacaacaaccacctctacaggcaaatctccaacgggacctcgggaggaagcaccaacgacaacacctacttcggctacagcaccccctgggggtattttgacttcaacagattccactgccacttttcaccacgtgactggcagcgactcatcaacaacaactggggattccggcccaagaggctcaacttcaagctcttcaacatccaagtcaaggaggtcacgcagaatgaaggcaccaggaccatcgccaataaccttaccagcacgattcaggtctttacggactcggaataccagctcccgtacgtgctcggctcggcgcaccagggctgcctgcctccgttcccggcggacgtcttcatgattcctcagtacgggtacctgactctgaacaatggcagtcaggctgtgggccggtcgtccttctactgcctggagtactttccttctcaaatgctgagaacgggcaacaactttgaattcagctacaacttcgaggacgtgcccttccacagcagctacgcgcacagccagagcctggaccggctgatgaaccctctcatcgaccagtacttgtactacctgtcccggactcaaagcacgggcggtactgcaggaactcagcagttgctattttctcaggccgggcctaacaacatgtcggctcaggccaagaactggctacccggtccctgctaccggcagcaacgcgtctccacgacactgtcgcagaacaacaacagcaactttgcctggacgggtgccaccaagtatcatctgaatggcagagactctctggtgaatcctggcgttgccatggctacccacagggacgacgaagagcgattttttccatccagcggagtcttaatgtttgggagacagggagctggaagagacaacgtggactatagcagcgtgatgctaaccagcgaggaagaaataaggaccaccaacccagtggccacagaacagtacggcgtggtggccgataacctgcaacagcaaaacgccgctcctattgtaggggccgtcaatagtcaaggagccttacctggcatggtgtggcagaaccgggacgtgtacctgcagggtcccatctgggccaagattcctcatacggacggcaactttcatccctcgccgctgatgggaggctttggactgaagcatccgcctcctcagatcctgattaaaaacacacctgttcccgcggatcctccgaccaccttcaatcaggccaagctggcttctttcatcacgcagtacagtaccggccaggtcagcgtggagatcgagtgggagctgcagaaggagaacagcaaacgctggaacccagagattcagtacacttccaactactacaaatctacaaatgtggactttgctgtcaatactgagggtacttattccgagcctcgccccattggcacccgttacctcacccgtaatctgtaa

SEQ ID NO: 1545 - DNA, 2217 bp, synthetic construct
  source 1..2217: mol_type = other DNA; note = Description of Artificial Sequence: Synthetic polynucleotide
atggctgccgatggttatcttccagattggctcgaggacaacctctctgagggcattcgcgagtggtgggacctgaaacctggagccccgaaacccaaagccaaccagcaaaggcaggacaacggccggggtctggtgcttcctggctacaggtacctcggacccttcaacggactcgacaagggggagcccgtcaacgcggcggacgcagcggccctcgagcacgacagggcctacgaccagcagctccaagcgggtgacaatccgtacctgcggtataatcacgccgacgccgagtttcaggagcgtctgcaagaagatacgtcttttgggggcaacctcgggcgcgcagtcttccaggccaaaaagcgggttctcgaacctctgggcctggttgaatcgccggttaggacggctcctggaaagaagagaccggtagagccatcaccccagcgctctccagactcctctacgggcatcggcaagagaggccagcagcccgcaagaaagagactcaattttgggcagactggcgactcagagtcagtccccgaccctcaaccaatcggagaaccaccagcagccccctctggtgtgggacctaatacaatggctgcaggcggtggcgctccaatggcagacaataacgaaggcgccgacggagtgggtagttcctcaggaaattggcattgcgattccacatggctgggcgacagagtcatcaccaccagcacccgcacctgggccctgcccacctacaacaaccacctctacaggcaaatctccaacgggacctcgggaggaagcaccaacgacaacacctacttcggctacagcaccccctgggggtattttgacttcaacagattccactgccacttttcaccacgtgactggcagcgactcatcaacaacaactggggattccggcccaagaggctcaacttcaagctcttcaacatccaagtcaaggaggtcacgcagaatgaaggcaccaggaccatcgccaataaccttaccagcacgattcaggtctttacggactcggaataccagctcccgtacgtgctcggctcggcgcaccagggctgcctgcctccgttcccggcggacgtcttcatgattcctcagtacgggtacctgactctgaacaatggcagtcaggctgtgggccggtcgtccttctactgcctggagtactttccttctcaaatgctgagaacgggcaacaactttgaattcagctacaacttcgaggacgtgcccttccacagcagctacgcgcacagccagagcctggaccggctgatgaaccctctcatcgaccagtacttgtactacctgtcccggactcaaagcacgggcggtactgcaggaactcagcagttgctattttctcaggccgggcctaacaacatgtcggctcaggccaagaactggctacccggtccctgctaccggcagcaacgcgtctccacgacactgtcgcagaacaacaacagcaactttgcctggacgggtgccaccaagtatcatctgaatggcagagactctctggtgaatcctggcgttgccatggctacccacagggacgacgaagagcgattttttccatccagcggagtcttaatgtttgggaaacagggagctggaagagacaacgtggactatagcagcgtgatgctaaccagcgaggaagaaataaggaccaccaacccagtggccacagaacagtacggcgtggtggccgataacctgcaacagcaaaacgccgctcctattgtaggggccgtcaatagtcaaggagccttacctggcatggtgtggcagaaccgggacgtgtacctgcagggtcccatctgggccaagattcctcatacggacggcaactttcatccctcgccgctgatgggaggctttggactgaagcatccgcctcctcagatcctgattaaaaacacacctgttcccgcggatcctccgaccaccttcaatcaggccaagctggcttctttcatcacgcagtacagtaccggccaggtcagcgtggagatcgagtgggagctgcagaaggagaacagcaaacgctggaacccagagattcagtacacttccaactactacaaatctacaaatgtggactttgctgtcaatactgagggtacttattccgagcctcgccccattggcacccgttacctcacccgtaatctgtaa

SEQ ID NO: 1546 - DNA, 2217 bp, synthetic construct
  source 1..2217: mol_type = other DNA; note = Description of Artificial Sequence: Synthetic polynucleotide
atggctgccgatggttatcttccagattggctcgaggacaacctctctgagggcattcgcgagtggtgggacctgaaacctggagccccgaaacccaaagccaaccagcaaaggcaggacaacggccggggtctggtgcttcctggctacaggtacctcggacccttcaacggactcgacaagggggagcccgtcaacgcggcggacgcagcggccctcgagcacgacagggcctacgaccagcagctccaagcgggtgacaatccgtacctgcggtataatcacgccgacgccgagtttcaggagcgtctgcaagaagatacgtcttttgggggcaacctcgggcgcgcagtcttccaggccaaaaagcgggttctcgaacctctgggcctggttgaatcgccggttaggacggctcctggaaagaagagaccggtagagccatcaccccagcgctctccagactcctctacgggcatcggcaagagaggccagcagcccgcaaaaaagagactcaattttgggcagactggcgactcagagtcagtccccgaccctcaaccaatcggagaaccaccagcagccccctctggtgtgggacctaatacaatggctgcaggcggtggcgctccaatggcagacaataacgaaggcgccgacggagtgggtagttcctcaggaaattggcattgcgattccacatggctgggcgacagagtcatcaccaccagcacccgcacctgggccctgcccacctacaacaaccacctctacaggcaaatctccaacgggacctcgggaggaagcaccaacgacaacacctacttcggctacagcaccccctgggggtattttgacttcaacagattccactgccacttttcaccacgtgactggcagcgactcatcaacaacaactggggattccggcccaagaggctcaacttcaagctcttcaacatccaagtcaaggaggtcacgcagaatgaaggcaccaggaccatcgccaataaccttaccagcacgattcaggtctttacggactcggaataccagctcccgtacgtgctcggctcggcgcaccagggctgcctgcctccgttcccggcggacgtcttcatgattcctcagtacgggtacctgactctgaacaatggcagtcaggctgtgggccggtcgtccttctactgcctggagtactttccttctcaaatgctgagaacgggcaacaactttgaattcagctacaacttcgaggacgtgcccttccacagcagctacgcgcacagccagagcctggaccggctgatgaaccctctcatcgaccagtacttgtactacctgtcccggactcaaagcacgggcggtactgcaggaactcagcagttgctattttctcaggccgggcctaacaacatgtcggctcaggccaagaactggctacccggtccctgctaccggcagcaacgcgtctccacgacactgtcgcagaacaacaacagcaactttgcctggacgggtgccaccaagtatcatctgaatggcagagactctctggtgaatcctggcgttgccatggctacccacagggacgacgaagagcgattttttccatccagcggagtcttaatgtttgggagacagggagctggaagagacaacgtggactatagcagcgtgatgctaaccagcgaggaagaaataaggaccaccaacccagtggccacagaacagtacggcgtggtggccgataacctgcaacagcaaaacgccgctcctattgtaggggccgtcaatagtcaaggagccttacctggcatggtgtggcagaaccgggacgtgtacctgcagggtcccatctgggccaagattcctcatacggacggcaactttcatccctcgccgctgatgggaggctttggactgaagcatccgcctcctcagatcctgattaaaaacacacctgttcccgcggatcctccgaccaccttcaatcaggccaagctggcttctttcatcacgcagtacagtaccggccaggtcagcgtggagatcgagtgggagctgcagaaggagaacagcaaacgctggaacccagagattcagtacacttccaactactacaaatctacaaatgtggactttgctgtcaatactgagggtacttattccgagcctcgccccattggcacccgttacctcacccgtaatctgtaa

SEQ ID NO: 1547 - DNA, 2217 bp, synthetic construct
  source 1..2217: mol_type = other DNA; note = Description of Artificial Sequence: Synthetic polynucleotide
atggctgccgatggttatcttccagattggctcgaggacaacctctctgagggcattcgcgagtggtgggacctgaaacctggagccccgaaacccaaagccaaccagcaaaggcaggacaacggccggggtctggtgcttcctggctacaggtacctcggacccttcaacggactcgacaagggggagcccgtcaacgcggcggacgcagcggccctcgagcacgacagggcctacgaccagcagctccaagcgggtgacaatccgtacctgcggtataatcacgccgacgccgagtttcaggagcgtctgcaagaagatacgtcttttgggggcaacctcgggcgcgcagtcttccaggccaaaaagcgggttctcgaacctctgggcctggttgaatcgccggttaggacggctcctggaaagaagagaccggtagagccatcaccccagcgctctccagactcctctacgggcatcggcaagagaggccagcagcccgcaaaaaagagactcaattttgggcagactggcgactcagagtcagtccccgaccctcaaccaatcggagaaccaccagcagccccctctggtgtgggacctaatacaatggctgcaggcggtggcgctccaatggcagacaataacgaaggcgccgacggagtgggtagttcctcaggaaattggcattgcgattccacatggctgggcgacagagtcatcaccaccagcacccgcacctgggccctgcccacctacaacaaccacctctacaggcaaatctccaacgggacctcgggaggaagcaccaacgacaacacctacttcggctacagcaccccctgggggtattttgacttcaacagattccactgccacttttcaccacgtgactggcagcgactcatcaacaacaactggggattccggcccaagaggctcaacttcaagctcttcaacatccaagtcaaggaggtcacgcagaatgaaggcaccaggaccatcgccaataaccttaccagcacgattcaggtctttacggactcggaataccagctcccgtacgtgctcggctcggcgcaccagggctgcctgcctccgttcccggcggacgtcttcatgattcctcagtacgggtacctgactctgaacaatggcagtcaggctgtgggccggtcgtccttctactgcctggagtactttccttctcaaatgctgagaacgggcaacaactttgaattcagctacaacttcgaggacgtgcccttccacagcagctacgcgcacagccagagcctggaccggctgatgaaccctctcatcgaccagtacttgtactacctgtcccggactcaaagcacgggcggtactgcaggaactcagcagttgctattttctcaggccgggcctaacaacatgtcggctcaggccaagaactggctacccggtccctgctaccggcagcaacgcgtctccacgacactgtcgcagaacaacaacagcaactttgcctggacgggtgccaccaagtatcatctgaatggcagagactctctggtgaatcctggcgttgccatggctacccacagggacgacgaagagcgattttttccatccagcggagtcttaatgtttgggaaacagggagctggaagagacaacgtggactatagcagcgtgatgctaaccagcgaggaagaaataaggaccaccaacccagtggccacagaacagtacggcgtggtggccgataacctgcaacagcaaaacgccgctcctattgtaggggccgtcaatagtcaaggagccttacctggcatggtgtggcagaaccgggacgtgtacctgcagggtcccatctgggccaagattcctcatacggacggcaactttcatccctcgccgctgatgggaggctttggactgaagcatccgcctcctcagatcctgattaaaaacacacctgttcccgcggatcctccgaccaccttcaatcaggccaggctggcttctttcatcacgcagtacagtaccggccaggtcagcgtggagatcgagtgggagctgcagaaggagaacagcaaacgctggaacccagagattcagtacacttccaactactacaaatctacaaatgtggactttgctgtcaatactgagggtacttattccgagcctcgccccattggcacccgttacctcacccgtaatctgtaa

SEQ ID NO: 1548 - DNA, 2217 bp, synthetic construct
  source 1..2217: mol_type = other DNA; note = Description of Artificial Sequence: Synthetic polynucleotide
atggctgccgatggttatcttccagattggctcgaggacaacctctctgagggcattcgcgagtggtgggacctgaaacctggagccccgaaacccaaagccaaccagcaaaggcaggacaacggccggggtctggtgcttcctggctacaggtacctcggacccttcaacggactcgacaagggggagcccgtcaacgcggcggacgcagcggccctcgagcacgacagggcctacgaccagcagctccaagcgggtgacaatccgtacctgcggtataatcacgccgacgccgagtttcaggagcgtctgcaagaagatacgtcttttgggggcaacctcgggcgcgcagtcttccaggccaaaaagcgggttctcgaacctctgggcctggttgaatcgccggttaggacggctcctggaaagaagagaccggtagagccatcaccccagcgctctccagactcctctacgggcatcggcaagaaaggccagcagcccgcaaaaaagagactcaattttgggcagactggcgactcagagtcagtccccgaccctcaaccaatcggagaaccaccagcagccccctctggtgtgggacctaatacaatggctgcaggcggtggcgctccaatggcagacaataacgaaggcgccgacggagtgggtagttcctcaggaaattggcattgcgattccacatggctgggcgacagagtcatcaccaccagcacccgcacctgggccctgcccacctacaacaaccacctctacaggcaaatctccaacgggacctcgggaggaagcaccaacgacaacacctacttcggctacagcaccccctgggggtattttgacttcaacagattccactgccacttttcaccacgtgactggcagcgactcatcaacaacaactggggattccggcccaagaggctcaacttcaagctcttcaacatccaagtcaaggaggtcacgcagaatgaaggcaccaggaccatcgccaataaccttaccagcacgattcaggtctttacggactcggaataccagctcccgtacgtgctcggctcggcgcaccagggctgcctgcctccgttcccggcggacgtcttcatgattcctcagtacgggtacctgactctgaacaatggcagtcaggctgtgggccggtcgtccttctactgcctggagtactttccttctcaaatgctgagaacgggcaacaactttgaattcagctacaacttcgaggacgtgcccttccacagcagctacgcgcacagccagagcctggaccggctgatgaaccctctcatcgaccagtacttgtactacctgtcccggactcaaagcacgggcggtactgcaggaactcagcagttgctattttctcaggccgggcctaacaacatgtcggctcaggccaagaactggctacccggtccctgctaccggcagcaacgcgtctccacgacactgtcgcagaacaacaacagcaactttgcctggacgggtgccaccaagtatcatctgaatggcagagactctctggtgaatcctggcgttgccatggctacccacagggacgacgaagagcgattttttccatccagcggagtcttaatgtttgggagacagggagctggaagagacaacgtggactatagcagcgtgatgctaaccagcgaggaagaaataaggaccaccaacccagtggccacagaacagtacggcgtggtggccgataacctgcaacagcaaaacgccgctcctattgtaggggccgtcaatagtcaaggagccttacctggcatggtgtggcagaaccgggacgtgtacctgcagggtcccatctgggccaagattcctcatacggacggcaactttcatccctcgccgctgatgggaggctttggactgaagcatccgcctcctcagatcctgattaaaaacacacctgttcccgcggatcctccgaccaccttcaatcaggccaggctggcttctttcatcacgcagtacagtaccggccaggtcagcgtggagatcgagtgggagctgcagaaggagaacagcaaacgctggaacccagagattcagtacacttccaactactacaaatctacaaatgtggactttgctgtcaatactgagggtacttattccgagcctcgccccattggcacccgttacctcacccgtaatctgtaa

SEQ ID NO: 1549 - protein, 744 aa, synthetic construct
  source 1..744: note = Description of Artificial Sequence: Synthetic polypeptide
MAADGYLPDWLEDTLSEGIRQWWKLKPGPPPPKPAERHKDDSRGLVLPGYKYLGPFNGLDKGEPVNEADAAALEHDKAYDRQLDSGDNPYLKYNHADAEFQERLKEDTSFGGNLGRAVFQAKKRVLEPLGLVEEPVKTAPGKKRPVEHSPVEPDSSSGTGKAGQQPARKRLNFGQTGDADSVPDPQPLGQPPAAPSGLGTNTMATGSGAPMADNNEGADGVGNSSGNWHCDSTWMGDRVITTSTRTWALPTYNNHLYKQISSQSGASNDNHYFGYSTPWGYFDFNRFHCHFSPRDWQRLINNNWGFRPKRLNFKLFNIQVKEVTQNDGTTTIANNLTSTVQVFTDSEYQLPYVLGSAHQGCLPPFPADVFMVPQYGYLTLNNGSQAVGRSSFYCLEYFPSQMLRTGNNFTFSYTFEDVPFHSSYAHSQSLDRLMNPLIDQYLYYLSRTNTPSGTTTQSRLQFSQAGASDIRDQSRNWLPGPCYRQQRVSKTSADNNNSEYSWTGATKYHLNGRDSLVNPGPAMASHKDDEEKFFPQSGVLIFGKQGSEKTNVDIEKVMITDEEEIRTTNPVATEQYGSVSTNLQRGQRGESGHGYFAQAATADVNTQGVLPGMVWQDRDVYLQGPIWAKIPHTDGHFHPSPLMGGFGLKHPPPQILIKNTPVPANPSTTFSAAKFASFITQYSTGQVSVEIEWELQKENSKRWNPEIQYTSNYNKSVNVDFTVDTNGVYSEPRPIGTRYLTRNL

SEQ ID NO: 1550 - DNA, 8359 bp, synthetic construct
  source 1..8359: mol_type = other DNA; note = Description of Artificial Sequence: Synthetic polynucleotide
catcatcaataatataccttattttggattgaagccaatatgataatgagggggtggagtttgtgacgtggcgcggggcgtgggaacggggcgggtgacgtagtagctctagaggtcctgtattagaggtcacgtgagtgttttgcgacattttgcgacaccatgtggtcacgctgggtatttaagcccgagtgagcacgcagggtctccattttgaagcgggaggtttgaacgcgcagccgccatgccggggttttacgagattgtgattaaggtccccagcgaccttgacgagcatctgcccggcatttctgacagctttgtgaactgggtggccgagaaggaatgggagttgccgccagattctgacatggatctgaatctgattgagcaggcacccctgaccgtggccgagaagctgcagcgcgactttctgacggaatggcgccgtgtgagtaaggcaccggaggcccttttctttgtgcaatttgagaagggagagagctacttccacatgcacgtgctcgtggaaaccaccggggtgaaatccatggttttgggacgtttcctgagtcagattcgcgaaaaactgattcagagaatttaccgcgggatcgagccgactttgccaaactggttcgcggtcacaaagaccagaaatggcgccggaggcgggaacaaggtggtggatgagtgctacatccccaattacttgctccccaaaacccagcctgagctccagtgggcgtggactaatatggaacagtatttaagcgcctgtttgaatctcacggagcgtaaacggttggtggcgcagcatctgacgcacgtgtcgcagacgcaggagcagaacaaagagaatcagaatcccaattctgatgcgccggtgatcagatcaaaaacttcagccaggtacatggagctggtcgggtggctcgtggacaaggggattacctcggagaagcagtggatccaggaggaccaggcctcatacatctccttcaatgcggcctccaactcgcggtcccaaatcaaggctgccttggacaatgcgggaaagattatgagcctgactaaaaccgcccccgactacctggtgggccagcagcccgtggaggacatttccagcaatcggatttataaaattttggaactaaacgggtacgatccccaatatgcggcttccgtctttctgggatgggccacgaaaaagttcggcaagaggaacaccatctggctgtttgggcctgcaactaccgggaagaccaacatcgcggaggccatagcccacactgtgcccttctacgggtgcgtaaactggaccaatgagaactttcccttcaacgactgtgtcgacaagatggtgatctggtgggaggaggggaagatgaccgccaaggtcgtggagtcggccaaagccattctcggaggaagcaaggtgcgcgtggaccagaaatgcaagtcctcggcccagatagacccgactcccgtgatcgtcacctccaacaccaacatgtgcgccgtgattgacgggaactcaacgaccttcgaacaccagcagccgttgcaagaccggatgttcaaatttgaactcacccgccgtctggatcatgactttgggaaggtcaccaagcaggaagtcaaagactttttccggtgggcaaaggatcacgtggttgaggtggagcatgaattctacgtcaaaaagggtggagccaagaaaagacccgcccccagtgacgcagatataagtgagcccaaacgggtgcgcgagtcagttgcgcagccatcgacgtcagacgcggaagcttcgatcaactacgcagacaggtaccaaaacaaatgttctcgtcacgtgggcatgaatctgatgctgtttccctgcagacaatgcgagagaatgaatcagaattcaaatatctgcttcactcacggacagaaagactgtttagagtgctttcccgtgtcagaatctcaacccgtttctgtcgtcaaaaaggcgtatcagaaactgtgctacattcatcatatcatgggaaaggtgccagacgcttgcactgcctgcgatctggtcaatgtggatttggatgactgcatctttgaacaataaatgatttaaatcaggtatggctgccgatggttatcttccagattggctcgaggacactctctctgaaggaataagacagtggtggaagctcaaacctggcccaccaccaccaaagcccgcagagcggcataaggacgacagcaggggtcttgtgcttcctgggtacaagtacctcggacccttcaacggactcgacaagggagagccggtcaacgaggcagacgccgcggccctcgagcacgacaaagcctacgaccggcagctcgacagcggagacaacccgtacctcaagtacaaccacgccgacgcggagtttcaggagcgccttaaagaagatacgtcttttgggggcaacctcggacgagcagtcttccaggcgaaaaagagggttcttgaacctctgggcctggttgaggaacctgttaagacggctccgggaaaaaagaggccggtagagcactctcctgtggagccagactcctcctcgggaaccggaaaggcgggccagcagcctgcaagaaaaagattgaattttggtcagactggagacgcagactcagtacctgacccccagcctctcggacagccaccagcagccccctctggtctgggaactaatacgatggctacaggcagtggcgcaccaatggcagacaataacgagggcgccgacggagtgggtaattcctcgggaaattggcattgcgattccacatggatgggcgacagagtcatcaccaccagcacccgaacctgggccctgcccacctacaacaaccacctctacaaacaaatttccagccaatcaggagcctcgaacgacaatcactactttggctacagcaccccttgggggtattttgacttcaacagattccactgccacttttcaccacgtgactggcaaagactcatcaacaacaactggggattccgacccaagagactcaacttcaagctctttaacattcaagtcaaagaggtcacgcagaatgacggtacgacgacgattgccaataaccttaccagcacggttcaggtgtttactgactcggagtaccagctcccgtacgtcctcggctcggcgcatcaaggatgcctcccgccgttcccagcagacgtcttcatggtgccacagtatggatacctcaccctgaacaacgggagtcaggcagtaggacgctcttcattttactgcctggagtactttccttctcagatgctgcgtaccggaaacaactttaccttcagctacacttttgaggacgttcctttccacagcagctacgctcacagccagagtctggaccgtctcatgaatcctctcatcgaccagtacctgtattacttgagcagaacaaacactccaagtggaaccaccacgcagtcaaggcttcagttttctcaggccggagcgagtgacattcgggaccagtctaggaactggcttcctggaccctgttaccgccagcagcgagtatcaaagacatctgcggataacaacaacagtgaatactcgtggactggagctaccaagtaccacctcaatggcagagactctctggtgaatccgggcccggccatggcaagccacaaggacgatgaagaaaagttttttcctcagagcggggttctcatctttgggaagcaaggctcagagaaaacaaatgtggacattgaaaaggtcatgattacagacgaagaggaaatcaggacaaccaatcccgtggctacggagcagtatggttctgtatctaccaacctccagagaggccagagaggcgagtctggtcatggttattttgcccaggcggccaccgcagatgtcaacacacaaggcgttcttccaggcatggtctggcaggacagagatgtgtaccttcaggggcccatctgggcaaagattccacacacggacggacattttcacccctctcccctcatgggtggattcggacttaaacaccctcctccacagattctcatcaagaacaccccggtacctgcgaatccttcgaccaccttcagtgcggcaaagtttgcttccttcatcacacagtactccacgggacaggtcagcgtggagatcgagtgggagctgcagaaggaaaacagcaaacgctggaatcccgaaattcagtacacttccaactacaacaagtctgttaatgtggactttactgtggacactaatggcgtgtattcagagcctcgccccattggcaccagatacctgactcgtaatctgtaattgcttgttaatcaataaaccgtttaattcgtttcagttgaactttggtctctgcgtatttctttcttatctagtttccatgctctagaggtcctgtattagaggtcacgtgagtgttttgcgacattttgcgacaccatgtggtcacgctgggtatttaagcccgagtgagcacgcagggtctccattttgaagcgggaggtttgaacgcgcagccaccacggcggggttttacgagattgtgattaaggtccccagcgaccttgacgagcatctgcccggcatttctgacagctttgtgaactgggtggccgagaaggaatgggagttgccgccagattctgacatggatctgaatctgattgagcaggcacccctgaccgtggccgagaagctgcatcgctggcgtaatagcgaagaggcccgcaccgatcgcccttcccaacagttgcgcagcctgaatggcgaatggcgattccgttgcaatggctggcggtaatattgttctggatattaccagcaaggccgatagtttgagttcttctactcaggcaagtgatgttattactaatcaaagaagtattgcgacaacggttaatttgcgtgatggacagactcttttactcggtggcctcactgattataaaaacacttctcaggattctggcgtaccgttcctgtctaaaatccctttaatcggcctcctgtttagctcccgctctgattctaacgaggaaagcacgttatacgtgctcgtcaaagcaaccatagtacgcgccctgtagcggcgcattaagcgcggcgggtgtggtggttacgcgcagcgtgaccgctacacttgccagcgccctagcgcccgctcctttcgctttcttcccttcctttctcgccacgttcgccggctttccccgtcaagctctaaatcgggggctccctttagggttccgatttagtgctttacggcacctcgaccccaaaaaacttgattagggtgatggttcacgtagtgggccatcgccctgatagacggtttttcgccctttgacgttggagtccacgttctttaatagtggactcttgttccaaactggaacaacactcaaccctatctcggtctattcttttgatttataagggattttgccgatttcggcctattggttaaaaaatgagctgatttaacaaaaatttaacgcgaattttaacaaaatattaacgtttacaatttaaatatttgcttatacaatcttcctgtttttggggcttttctgattatcaaccggggtacatatgattgacatgctagttttacgattaccgttcatcgattctcttgtttgctccagactctcaggcaatgacctgatagcctttgtagagacctctcaaaaatagctaccctctccggcatgaatttatcagctagaacggttgaatatcatattgatggtgatttgactgtctccggcctttctcacccgtttgaatctttacctacacattactcaggcattgcatttaaaatatatgagggttctaaaaatttttatccttgcgttgaaataaaggcttctcccgcaaaagtattacagggtcataatgtttttggtacaaccgatttagctttatgctctgaggctttattgcttaattttgctaattctttgccttgcctgtatgatttattggatgttggaattcctgatgcggtattttctccttacgcatctgtgcggtatttcacaccgcatatggtgcactctcagtacaatctgctctgatgccgcatagttaagccagccccgacacccgccaacacccgctgacgcgccctgacgggcttgtctgctcccggcatccgcttacagacaagctgtgaccgtctccgggagctgcatgtgtcagaggttttcaccgtcatcaccgaaacgcgcgagacgaaagggcctcgtgatacgcctatttttataggttaatgtcatgataataatggtttcttagacgtcaggtggcacttttcggggaaatgtgcgcggaacccctatttgtttatttttctaaatacattcaaatatgtatccgctcatgagacaataaccctgataaatgcttcaataatattgaaaaaggaagagtatgagtattcaacatttccgtgtcgcccttattcccttttttgcggcattttgccttcctgtttttgctcacccagaaacgctggtgaaagtaaaagatgctgaagatcagttgggtgcacgagtgggttacatcgaactggatctcaacagcggtaagatccttgagagttttcgccccgaagaacgttttccaatgatgagcacttttaaagttctgctatgtggcgcggtattatcccgtattgacgccgggcaagagcaactcggtcgccgcatacactattctcagaatgacttggttgagtactcaccagtcacagaaaagcatcttacggatggcatgacagtaagagaattatgcagtgctgccataaccatgagtgataacactgcggccaacttacttctgacaacgatcggaggaccgaaggagctaaccgcttttttgcacaacatgggggatcatgtaactcgccttgatcgttgggaaccggagctgaatgaagccataccaaacgacgagcgtgacaccacgatgcctgtagcaatggcaacaacgttgcgcaaactattaactggcgaactacttactctagcttcccggcaacaattaatagactggatggaggcggataaagttgcaggaccacttctgcgctcggcccttccggctggctggtttattgctgataaatctggagccggtgagcgtgggtctcgcggtatcattgcagcactggggccagatggtaagccctcccgtatcgtagttatctacacgacggggagtcaggcaactatggatgaacgaaatagacagatcgctgagataggtgcctcactgattaagcattggtaactgtcagaccaagtttactcatatatactttagattgatttaaaacttcatttttaatttaaaaggatctaggtgaagatcctttttgataatctcatgaccaaaatcccttaacgtgagttttcgttccactgagcgtcagaccccgtagaaaagatcaaaggatcttcttgagatcctttttttctgcgcgtaatctgctgcttgcaaacaaaaaaaccaccgctaccagcggtggtttgtttgccggatcaagagctaccaactctttttccgaaggtaactggcttcagcagagcgcagataccaaatactgtccttctagtgtagccgtagttaggccaccacttcaagaactctgtagcaccgcctacatacctcgctctgctaatcctgttaccagtggctgctgccagtggcgataagtcgtgtcttaccgggttggactcaagacgatagttaccggataaggcgcagcggtcgggctgaacggggggttcgtgcacacagcccagcttggagcgaacgacctacaccgaactgagatacctacagcgtgagctatgagaaagcgccacgcttcccgaagggagaaaggcggacaggtatccggtaagcggcagggtcggaacaggagagcgcacgagggagcttccagggggaaacgcctggtatctttatagtcctgtcgggtttcgccacctctgacttgagcgtcgatttttgtgatgctcgtcaggggggcggagcctatggaaaaacgccagcaacgcggcctttttacggttcctggccttttgctggccttttgctcacatgttctttcctgcgttatcccctgattctgtggataaccgtattaccgcctttgagtgagctgataccgctcgccgcagccgaacgaccgagcgcagcgagtcagtgagcgaggaagcggaagagcgcccaatacgcaaaccgcctctccccgcgcgttggccgattcattaatgcagaattcc

SEQ ID NO: 1551 - protein, 736 aa, synthetic construct
  source 1..736: note = Description of Artificial Sequence: Synthetic polypeptide
MAADGYLPDWLEDNLSEGIREWWDLKPGAPKPKANQQKQDDGRGLVLPGYKYLGPFNGLDKGEPVNAADAAALEHDKAYDQQLKAGDNPYLRYNHADAEFQERLQEDTSFGGNLGRAVFQAKKRVLEPLGLVEEGAKTAPGKKRPVEQSPQEPDSSSGIGKKGQQPAKKRLNFGQTGDSESVPDPQPLGEPPAAPSGVGSNTMAAGGGAPMADNNEGADGVGNASGNWHCDSTWLGDRVITTSTRTWALPTYNNHLYKQISSQSGASTNDNTYFGYSTPWGYFDFNRFHCHFSPRDWQRLINNNWGFRPKRLNFKLFNIQVKEVTTNDGTTTIANNLTSTVQVFTDSEYQLPYVLGSAHQGCLPPFPADVFMIPQYGYLTLNNGSQAVGRSSFYCLEYFPSQMLRTGNNFEFSYTFEDVPFHSSYAHSQSLDRLMNPLIDQYLYYLSRTQTTSGTAGNRTLQFSQAGPSSMANQAKNWLPGPCYRQQRVSKTANQNNNSNFAWTGATKYHLNGRDSLVNPGPAMATHKDDEDKFFPMSGVLIFGKQGAGNSNVDLDNVMITSEEEIKTTNPVATEQYGTVATNLQSSNTAPATGTVNSQGALPGMVWQNRDVYLQGPIWAKIPHTDGHFHPSPLMGGFGLKHPPPQILIKNTPVPANPPTTFSPAKFASFITQYSTGQVSVEIEWELQKENSKRWNPEIQYTSNYNKSTNVDFAVDTNGVYSEPRPIGTRYLTRNL

SEQ ID NO: 1552 - DNA, 2208 bp, synthetic construct
  source 1..2208: mol_type = other DNA; note = Description of Artificial Sequence: Synthetic polynucleotide
atggctgccgatggttatcttccagattggctcgaggacaacctctctgagggcattcgcgagtggtgggacttgaaacctggagccccgaaacccaaagccaaccagcaaaagcaggacgacggccggggtctggtgcttcctggctacaagtacctcggacccttcaacggactcgacaagggggagcccgtcaacgcggcggacgcagcggccctcgagcacgacaaggcctacgaccagcagctcaaagcgggtgacaatccgtacctgcggtataaccacgccgacgccgagtttcaggagcgtctgcaagaagatacgtcttttgggggcaacctcgggcgagcagtcttccaggccaagaagcgggttctcgaacctctcggtctggttgaggaaggcgctaagacggctcctggaaagaagagaccggtagagcaatcaccccaggaaccagactcctcttcgggcatcggcaagaaaggccagcagcccgcgaagaagagactcaactttgggcagacaggcgactcagagtcagtgcccgaccctcaaccactcggagaaccccccgcagccccctctggtgtgggatctaatacaatggcagcaggcggtggcgctccaatggcagacaataacgaaggcgccgacggagtgggtaacgcctcaggaaattggcattgcgattccacatggctgggcgacagagtcatcaccaccagcacccgaacctgggccctccccacctacaacaaccacctctacaagcaaatctccagccaatcgggagcaagcaccaacgacaacacctacttcggctacagcaccccctgggggtattttgactttaacagattccactgccacttctcaccacgtgactggcagcgactcatcaacaacaactggggattccggcccaagagactcaacttcaagctcttcaacatccaggtcaaggaggtcacgacgaatgatggcaccacgaccatcgccaataaccttaccagcacggttcaggtctttacggactcggaataccagctcccgtacgtcctcggctctgcgcaccagggctgcctgcctccgttcccggcggacgtcttcatgattcctcagtacgggtacctgactctgaacaatggcagtcaggccgtgggccgttcctccttctactgcctggagtactttccttctcaaatgctgagaacgggcaacaactttgagttcagctacacgtttgaggacgtgccttttcacagcagctacgcgcacagccaaagcctggaccggctgatgaaccccctcatcgaccagtacctgtactacctgtctcggactcagaccacgagtggtaccgcaggaaatcggacgttgcaattttctcaggccgggcctagtagcatggcgaatcaggccaaaaactggctacccgggccctgctaccggcagcaacgcgtctccaagacagcgaatcaaaataacaacagcaactttgcctggaccggtgccaccaagtatcatctgaatggcagagactctctggtaaatcccggtcccgctatggcaacccacaaggacgacgaagacaaattttttccgatgagcggagtcttaatatttgggaaacagggagctggaaatagcaacgtggaccttgacaacgttatgataaccagtgaggaagaaattaaaaccaccaacccagtggccacagaacagtacggcacggtggccactaacctgcaatcgtcaaacaccgctcctgctacagggaccgtcaacagtcaaggagccttacctggcatggtctggcagaaccgggacgtgtacctgcagggtcctatctgggccaagattcctcacacggacggacactttcatccctcgccgctgatgggaggctttggactgaaacacccgcctcctcagatcctgattaagaatacacctgttcccgcgaatcctccaactaccttcagtccagctaagtttgcgtcgttcatcacgcagtacagcaccggacaggtcagcgtggaaattgaatgggagctgcagaaagaaaacagcaaacgctggaacccagagattcaatacacttccaactacaacaaatctacaaatgtggactttgctgttgacacaaatggcgtttattctgagcctcgccccatcggcacccgttacctcacccgtaatctg

SEQ ID NO: 1553 - protein, 737 aa, synthetic construct
  source 1..737: note = Description of Artificial Sequence: Synthetic polypeptide
MAADGYLPDWLEDNLSEGIREWWDLKPGAPKPKANQQKQDDGRGLVLPGYKYLGPFNGLDKGEPVNAADAAALEHDKAYDQQLKAGDNPYLRYNHADAEFQERLQEDTSFGGNLGRAVFQAKKRVLEPLGLVEEGAKTAPGKKRPVEQSPQEPDSSTGIGKKGQQPAKKRLNFGQTGDSESVPDPQPLGEPPAAPSGVGSNTMAAGGGAPMADNNEGADGVGNASGNWHCDSTWLGDRVITTSTRTWALPTYNNHLYKQISNSQSGGSTNDNTYFGYSTPWGYFDFNRFHCHFSPRDWQRLINNNWGFRPKRLNFKLFNIQVKEVTTNDGTTTIANNLTSTVQVFTDSEYQLPYVLGSAHQGCLPPFPADVFMIPQYGYLTLNNGSQAVGRSSFYCLEYFPSQMLRTGNNFEFSYTFEDVPFHSSYAHSQSLDRLMNPLIDQYLYYLSRTQTTGGTAGNRTLQFSQAGPSSMANQAKNWLPGPCYRQQRVSKTTNQNNNSNFAWTGATKYHLNGRDSLVNPGVAMATHKDDEDRFFPSSGVLIFGKQGAGNDNVDLDNVMITSEEEIKTTNPVATEEYGVVATNLQSANTAPQTGTVNSQGALPGMVWQNRDVYLQGPIWAKIPHTDGNFHPSPLMGGFGLKHPPPQILIKNTPVPANPPTTFSPAKFASFITQYSTGQVSVEIEWELQKENSKRWNPEIQYTSNYNKSTNVDFAVDTEGVYSEPRPIGTRYLTRNL

SEQ ID NO: 1554 - DNA, 2211 bp, synthetic construct
  source 1..2211: mol_type = other DNA; note = Description of Artificial Sequence: Synthetic polynucleotide
atggctgccgatggttatcttccagattggctcgaggacaacctctctgagggcattcgcgagtggtgggacttgaaacctggagccccgaaacccaaagccaaccagcaaaagcaggacgacggccggggtctggtgcttcctggctacaagtacctcggacccttcaacggactcgacaagggggagcccgtcaacgcggcggacgcagcggccctcgagcacgacaaggcctacgaccagcagctcaaagcgggtgacaatccgtacctgcggtataaccacgccgacgccgagtttcaggagcgtctgcaagaagatacgtcttttgggggcaacctcgggcgagcagtcttccaggccaagaagcgggttctcgaacctctcggtctggttgaggaaggcgctaagacggctcctggaaagaagagaccggtagagcaatcaccccaggaaccagactcctctacgggcatcggcaagaaaggccagcagcccgcgaaaaagagactcaactttgggcagactggcgactcagagtcagtgcccgaccctcaaccactcggagaaccccccgcagccccctctggtgtgggatctaatacaatggctgcaggcggtggcgctccaatggcagacaataacgaaggcgccgacggagtgggtaatgcctcaggaaattggcattgcgattccacatggctgggcgacagagtcatcaccaccagcacccgaacctgggccctccccacctacaacaaccacctctacaagcaaatctccaacagccaatcgggaggaagcaccaacgacaacacctacttcggctacagcaccccctgggggtattttgactttaacagattccactgccacttctcaccacgtgactggcagcgactcatcaacaacaactggggattccggcccaagagactcaacttcaagctcttcaacatccaggtcaaggaggtcacgacgaatgatggcaccacgaccatcgccaataaccttaccagcacggttcaggtctttacggactcggaataccagctcccgtacgtcctcggctctgcgcaccagggctgcctgcctccgttcccggcggacgtcttcatgattcctcagtacgggtacctgactctgaacaatggcagtcaggccgtgggccgttcctccttctactgcctggagtactttccttctcaaatgctgagaacgggcaacaactttgagttcagctacacgtttgaggacgtgccttttcacagcagctacgcgcacagccaaagcctggaccggctgatgaaccccctcatcgaccagtacctgtactacctgtctcggactcagaccacgggaggtaccgcaggaaatcggacgttgcaattttctcaggccgggcctagtagcatggcgaatcaggccaaaaactggctacccgggccctgctaccggcagcaacgcgtctccaagacaacgaatcaaaataacaacagcaactttgcctggaccggtgccaccaagtatcatctgaatggcagagactctctggtaaatcccggtgtcgctatggcaacccacaaggacgacgaagaccgattttttccgtccagcggagtcttaatatttgggaaacagggagctggaaatgacaacgtggaccttgacaacgttatgataaccagtgaggaagaaattaaaaccaccaacccagtggccacagaagagtacggcgtggtggccactaacctgcaatcggcaaacaccgctcctcaaacagggaccgtcaacagtcaaggagccttacctggcatggtctggcagaaccgggacgtgtacctgcagggtcctatctgggccaagattcctcacacggacggaaactttcatccctcgccgctgatgggaggctttggactgaaacacccgcctcctcagatcctgattaagaatacacctgttcccgcgaatcctccaactaccttcagtccagctaagtttgcgtcgttcatcacgcagtacagcaccggacaggtcagcgtggaaattgaatgggagctgcagaaagaaaacagcaaacgctggaacccagagattcaatacacttccaactacaacaaatctacaaatgtggactttgctgttgacacagaaggcgtttattctgagcctcgccccatcggcacccgttacctcacccgtaatctg

SEQ ID NO: 1555 - protein, 738 aa, synthetic construct
  source 1..738: note = Description of Artificial Sequence: Synthetic polypeptide
MAADGYLPDWLEDNLSEGIREWWDLKPGAPKPKANQQKQDDGRGLVLPGYKYLGPFNGLDKGEPVNAADAAALEHDKAYDQQLKAGDNPYLRYNHADAEFQERLQEDTSFGGNLGRAVFQAKKRVLEPLGLVEEGAKTAPGKKRPVEQSPQREPDSSTGIGKKGQQPAKKRLNFGQTGDSESVPDPQPLGEPPAAPSGVGSNTMAAGGGAPMADNNEGADGVGNSSGNWHCDSTWLGDRVITTSTRTWALPTYNNHLYKQISNGTSGGSTNDNTYFGYSTPWGYFDFNRFHCHFSPRDWQRLINNNWGFRPKRLNFKLFNIQVKEVTTNEGTKTIANNLTSTVQVFTDSEYQLPYVLGSAHQGCLPPFPADVFMIPQYGYLTLNNGSQAVGRSSFYCLEYFPSQMLRTGNNFQFSYTFEDVPFHSSYAHSQSLDRLMNPLIDQYLYYLSRTQTTGGTAGTQTLQFSQAGPSSMANQAKNWLPGPCYRQQRVSTTTNQNNNSNFAWTGATKYHLNGRDSLVNPGVAMATHKDDEDRFFPSSGVLIFGKQGAGNDNVDYSNVMITSEEEIKTTNPVATEEYGVVATNLQSANTAPQTGTVNSQGALPGMVWQNRDVYLQGPIWAKIPHTDGNFHPSPLMGGFGLKHPPPQILIKNTPVPADPPTTFNQAKLNSFITQYSTGQVSVEIEWELQKENSKRWNPEIQYTSNYYKSTNVDFAVNTEGVYSEPRPIGTRYLTRNL

SEQ ID NO: 1556 - DNA, 2214 bp, synthetic construct
  source 1..2214: mol_type = other DNA; note = Description of Artificial Sequence: Synthetic polynucleotide
atggctgccgatggttatcttccagattggctcgaggacaacctctctgagggcattcgcgagtggtgggacctgaaacctggagccccgaaacccaaagccaaccagcaaaagcaggacgacggccggggtctggtgcttcctggctacaagtacctcggacccttcaacggactcgacaagggggagcccgtcaacgcggcggacgcagcggccctcgagcacgacaaggcctacgaccagcagctcaaagcgggtgacaatccgtacctgcggtataatcacgccgacgccgagtttcaggagcgtctgcaagaagatacgtcttttgggggcaacctcgggcgagcagtcttccaggccaagaagcgggttctcgaacctctcggtctggttgaggaaggcgctaagacggctcctggaaagaagagaccggtagagcagtcaccacagcgtgagcccgactcctccacgggcatcggcaagaaaggccagcagcccgccaaaaagagactcaatttcggtcagactggcgactcagagtcagtccccgaccctcaacctctcggagaacctccagcagcgccctctggtgtgggatctaatacaatggctgcaggcggtggcgcaccaatggcagacaataacgaaggtgccgacggagtgggtaattcctcgggaaattggcattgcgattccacatggctgggcgacagagtcatcaccaccagcacccgaacctgggccctgcccacctacaacaaccacctctacaagcaaatctccaacgggacctcgggaggcagcaccaacgacaacacctactttggctacagcaccccctgggggtattttgactttaacagattccactgccacttctcaccacgtgactggcagcgactcatcaacaacaactggggattccggcccaagagactcaacttcaagctcttcaacatccaggtcaaagaggtcacgacgaatgaaggcaccaagaccatcgccaataacctcaccagcaccgtccaggtgtttacggactcggaataccagctgccgtacgtcctcggctctgcccaccagggctgcctgcctccgttcccggcggacgtcttcatgattcctcagtacggctacctgactctcaacaacggtagtcaggccgtgggacgttcctccttctactgcctggagtacttcccctctcagatgctgagaacgggcaacaactttcaattcagctacactttcgaggacgtgcctttccacagcagctacgcgcacagccagagtttggacaggctgatgaatcctctcatcgaccagtacctgtactacctgtcaagaacccagactacgggaggcacagcgggaacccagacgttgcagttttctcaggccgggcctagcagcatggcgaatcaggccaaaaactggctgcctggaccctgctacagacagcagcgcgtctccacgacaacgaatcaaaacaacaacagcaactttgcctggactggtgccaccaagtatcatctgaacggcagagactctctggtgaatccgggcgtcgccatggcaacccacaaggacgacgaggaccgcttcttcccatccagcggcgtcctcatatttggcaagcagggagctggaaatgacaacgtggactatagcaacgtgatgataaccagcgaggaagaaatcaagaccaccaaccccgtggccacagaagagtatggcgtggtggctactaacctacagtcggcaaacaccgctcctcaaacggggaccgtcaacagccagggagccttacctggcatggtctggcagaaccgggacgtgtacctgcagggtcctatttgggccaagattcctcacacagatggcaactttcacccgtctcctttaatgggcggctttggacttaaacatccgcctcctcagatcctcatcaaaaacactcctgttcctgcggatcctccaacaacgttcaaccaggccaagctgaattctttcatcacgcagtacagcaccggacaagtcagcgtggagatcgagtgggagctgcagaaggagaacagcaagcgctggaacccagagattcagtatacttccaactactacaaatctacaaatgtggactttgctgttaatactgagggtgtttactctgagcctcgccccattggcactcgttacctcacccgtaatctg

SEQ ID NO: 1557 - protein, 738 aa, synthetic construct
  source 1..738: note = Description of Artificial Sequence: Synthetic polypeptide
MAADGYLPDWLEDNLSEGIREWWDLKPGAPKPKANQQKQDDGRGLVLPGYKYLGPFNGLDKGEPVNAADAAALEHDKAYDQQLKAGDNPYLRYNHADAEFQERLQEDTSFGGNLGRAVFQAKKRVLEPLGLVEEGAKTAPGKKRPVEQSPQREPDSSTGIGKKGQQPARKRLNFGQTGDSESVPDPQPLGEPPAAPSGVGSNTMAAGGGAPMADNNEGADGVGSSSGNWHCDSTWLGDRVITTSTRTWALPTYNNHLYKQISNGTSGGSTNDNTYFGYSTPWGYFDFNRFHCHFSPRDWQRLINNNWGFRPKRLNFKLFNIQVKEVTQNEGTKTIANNLTSTIQVFTDSEYQLPYVLGSAHQGCLPPFPADVFMIPQYGYLTLNNGSQAVGRSSFYCLEYFPSQMLRTGNNFQFSYTFEDVPFHSSYAHSQSLDRLMNPLIDQYLYYLSRTQTTGGTAGTQTLQFSQAGPSNMANQAKNWLPGPCYRQQRVSTTTSQNNNSNFAWTGATKYHLNGRDSLVNPGVAMATHKDDEDRFFPSSGILIFGKQGAGKDNVDYSNVMLTSEEEIKTTNPVATEEYGVVADNLQQQNTAPQIGTVNSQGALPGMVWQNRDVYLQGPIWAKIPHTDGNFHPSPLMGGFGLKHPPPQILIKNTPVPADPPTTFNQAKLNSFITQYSTGQVSVEIEWELQKENSKRWNPEIQYTSNYYKSTNVDFAVNTEGVYSEPRPIGTRYLTRNL

SEQ ID NO: 1558 - DNA, 2214 bp, synthetic construct
  source 1..2214: mol_type = other DNA; note = Description of Artificial Sequence: Synthetic polynucleotide
atggctgccgatggttatcttccagattggctcgaggacaacctctctgagggcattcgcgagtggtgggacctgaaacctggagccccgaaacccaaagccaaccagcaaaagcaggacgacggccggggtctggtgcttcctggctacaagtacctcggacccttcaacggactcgacaagggggagcccgtcaacgcggcggacgcagcggccctcgagcacgacaaggcctacgaccagcagctcaaagcgggtgacaatccgtacctgcggtataatcacgccgacgccgagtttcaggagcgtctgcaagaagatacgtcttttgggggcaacctcgggcgagcagtcttccaggccaagaagcgggttctcgaacctctcggtctggttgaggaaggcgctaagacggctcctggaaagaagagaccggtagagcagtcaccacagcgtgagcccgactcctccacgggcatcggcaagaaaggccagcagcccgccagaaagagactcaatttcggtcagactggcgactcagagtcagtccccgaccctcaacctctcggagaacctccagcagcgccctctggtgtgggatctaatacaatggctgcaggcggtggcgcaccaatggcagacaataacgaaggtgccgacggagtgggtagttcctcgggaaattggcattgcgattccacatggctgggcgacagagtcatcaccaccagcacccgaacctgggccctgcccacctacaacaaccacctctacaagcaaatctccaacgggacctcgggaggcagcaccaacgacaacacctactttggctacagcaccccctgggggtattttgactttaacagattccactgccacttctcaccacgtgactggcagcgactcatcaacaacaactggggattccggcccaagagactcaacttcaagctcttcaacatccaggtcaaagaggtcacgcagaatgaaggcaccaagaccatcgccaataacctcaccagcaccatccaggtgtttacggactcggaataccagctgccgtacgtcctcggctctgcccaccagggctgcctgcctccgttcccggcggacgtcttcatgattcctcagtacggctacctgactctcaacaacggtagtcaggccgtgggacgttcctccttctactgcctggagtacttcccctctcagatgctgagaacgggcaacaactttcaattcagctacactttcgaggacgtgcctttccacagcagctacgcgcacagccagagtttggacaggctgatgaatcctctcatcgaccagtacctgtactacctgtcaagaacccagactacgggaggcacagcgggaacccagacgttgcagttttctcaggccgggcctagcaacatggcgaatcaggccaaaaactggctgcctggaccctgctacagacagcagcgcgtctccacgacaacgtcgcaaaacaacaacagcaactttgcctggactggtgccaccaagtatcatctgaacggcagagactctctggtgaatccgggcgtcgccatggcaacccacaaggacgacgaggaccgcttcttcccatccagcggcatcctcatatttggcaagcagggagctggaaaagacaacgtggactatagcaacgtgatgctaaccagcgaggaagaaatcaagaccaccaaccccgtggccacagaagagtatggcgtggtggctgataacctacagcagcaaaacaccgctcctcaaatagggaccgtcaacagccagggagccttacctggcatggtctggcagaaccgggacgtgtacctgcagggtcctatttgggccaagattcctcacacagatggcaactttcacccgtctcctttaatgggcggctttggacttaaacatccgcctcctcagatcctcatcaaaaacactcctgttcctgcggatcctccaacaacgttcaaccaggccaagctgaattctttcatcacgcagtacagcaccggacaagtcagcgtggagatcgagtgggagctgcagaaggagaacagcaagcgctggaacccagagattcagtatacttccaactactacaaatctacaaatgtggactttgctgttaatactgagggtgtttactctgagcctcgccccattggcactcgttacctcacccgtaatctg

SEQ ID NO: 1559 - protein, 738 aa, synthetic construct
  source 1..738: note = Description of Artificial Sequence: Synthetic polypeptide
MAADGYLPDWLEDNLSEGIREWWDLKPGAPKPKANQQKQDDGRGLVLPGYKYLGPFNGLDKGEPVNAADAAALEHDKAYDQQLKAGDNPYLRYNHADAEFQERLQEDTSFGGNLGRAVFQAKKRVLEPLGLVEEGAKTAPGKKRPVEPSPQRSPDSSTGIGKKGQQPARKRLNFGQTGDSESVPDPQPIGEPPAAPSGVGSGTMAAGGGAPMADNNEGADGVGSSSGNWHCDSTWLGDRVITTSTRTWALPTYNNHLYKQISNGTSGGSTNDNTYFGYSTPWGYFDFNRFHCHFSPRDWQRLINNNWGFRPKRLNFKLFNIQVKEVTQNEGTKTIANNLTSTIQVFTDSEYQLPYVLGSAHQGCLPPFPADVFMIPQYGYLTLNNGSQAVGRSSFYCLEYFPSQMLRTGNNFEFSYTFEDVPFHSSYAHSQSLDRLMNPLIDQYLYYLSRTQSTGGTAGTQQLLFSQAGPSNMSAQAKNWLPGPCYRQQRVSTTLSQNNNSNFAWTGATKYHLNGRDSLVNPGVAMATHKDDEDRFFPSSGILMFGKQGAGKDNVDYSNVMLTSEEEIKTTNPVATEQYGVVADNLQQQNTAPIVGAVNSQGALPGMVWQNRDVYLQGPIWAKIPHTDGNFHPSPLMGGFGLKHPPPQILIKNTPVPADPPTTFNQAKLNSFITQYSTGQVSVEIEWELQKENSKRWNPEIQYTSNYYKSTNVDFAVNTEGVYSEPRPIGTRYLTRNL

SEQ ID NO: 1560 - DNA, 2214 bp, synthetic construct
  source 1..2214: mol_type = other DNA; note = Description of Artificial Sequence: Synthetic polynucleotide
atggctgccgatggttatcttccagattggctcgaggacaacctctctgagggcattcgcgagtggtgggacctgaaacctggagccccgaaacccaaagccaaccagcaaaagcaggacgacggccggggtctggtgcttcctggctacaagtacctcggacccttcaacggactcgacaagggggagcccgtcaacgcggcggacgcagcggccctcgagcacgacaaggcctacgaccagcagctcaaagcgggtgacaatccgtacctgcggtataatcacgccgacgccgagtttcaggagcgtctgcaagaagatacgtcttttgggggcaacctcgggcgagcagtcttccaggccaagaagcgggttctcgaacctctcggtctggttgaggaaggcgctaagacggctcctggaaagaagagaccggtagagccgtcaccacagcgttcccccgactcctccacgggcatcggcaagaaaggccagcagcccgccagaaagagactcaatttcggtcagactggcgactcagagtcagtccccgaccctcaacctatcggagaacctccagcagcgccctctggtgtgggatctggtacaatggctgcaggcggtggcgcaccaatggcagacaataacgaaggtgccgacggagtgggtagttcctcgggaaattggcattgcgattccacatggctgggcgacagagtcatcaccaccagcacccgaacctgggccctgcccacctacaacaaccacctctacaagcaaatctccaacgggacctcgggaggcagcaccaacgacaacacctactttggctacagcaccccctgggggtattttgactttaacagattccactgccacttctcaccacgtgactggcagcgactcatcaacaacaactggggattccggcccaagagactcaacttcaagctcttcaacatccaggtcaaagaggtcacgcagaatgaaggcaccaagaccatcgccaataacctcaccagcaccatccaggtgtttacggactcggaataccagctgccgtacgtcctcggctctgcccaccagggctgcctgcctccgttcccggcggacgtcttcatgattcctcagtacggctacctgactctcaacaacggtagtcaggccgtgggacgttcctccttctactgcctggagtacttcccctctcagatgctgagaacgggcaacaactttgagttcagctacactttcgaggacgtgcctttccacagcagctacgcgcacagccagagtttggacaggctgatgaatcctctcatcgaccagtacctgtactacctgtcaagaacccagtctacgggaggcacagcgggaacccagcagttgctgttttctcaggccgggcctagcaacatgtcggctcaggccaaaaactggctgcctggaccctgctacagacagcagcgcgtctccacgacactgtcgcaaaacaacaacagcaactttgcctggactggtgccaccaagtatcatctgaacggcagagactctctggtgaatccgggcgtcgccatggcaacccacaaggacgacgaggaccgcttcttcccatccagcggcatcctcatgtttggcaagcagggagctggaaaagacaacgtggactatagcaacgtgatgctaaccagcgaggaagaaatcaagaccaccaaccccgtggccacagaacagtatggcgtggtggctgataacctacagcagcaaaacaccgctcctattgtgggggccgtcaacagccagggagccttacctggcatggtctggcagaaccgggacgtgtacctgcagggtcctatttgggccaagattcctcacacagatggcaactttcacccgtctcctttaatgggcggctttggacttaaacatccgcctcctcagatcctcatcaaaaacactcctgttcctgcggatcctccaacaacgttcaaccaggccaagctgaattctttcatcacgcagtacagcaccggacaagtcagcgtggagatcgagtgggagctgcagaaggagaacagcaagcgctggaacccagagattcagtatacttccaactactacaaatctacaaatgtggactttgctgttaatactgagggtgtttactctgagcctcgccccattggcactcgttacctcacccgtaatctg

SEQ ID NO: 1561 - protein, 738 aa, synthetic construct
  source 1..738: note = Description of Artificial Sequence: Synthetic polypeptide
MAADGYLPDWLEDNLSEGIREWWDLKPGAPKPKANQQKQDDGRGLVLPGYKYLGPFNGLDKGEPVNAADAAALEHDKAYDQQLKAGDNPYLRYNHADAEFQERLQEDTSFGGNLGRAVFQAKKRVLEPLGLVEEGAKTAPGKKRPVEPSPQRSPDSSTGIGKKGQQPAKKRLNFGQTGDSESVPDPQPIGEPPAGPSGLGSGTMAAGGGAPMADNNEGADGVGSSSGNWHCDSTWLGDRVITTSTRTWALPTYNNHLYKQISNGTSGGSTNDNTYFGYSTPWGYFDFNRFHCHFSPRDWQRLINNNWGFRPKRLNFKLFNIQVKEVTQNEGTKTIANNLTSTIQVFTDSEYQLPYVLGSAHQGCLPPFPADVFMIPQYGYLTLNNGSQAVGRSSFYCLEYFPSQMLRTGNNFEFSYTFEDVPFHSSYAHSQSLDRLMNPLIDQYLYYLSRTQSTGGTAGTQQLLFSQAGPSNMSAQAKNWLPGPCYRQQRVSTTLSQNNNSNFAWTGATKYHLNGRDSLVNPGVAMATHKDDEERFFPSSGVLMFGKQGAGKDNVDYSSVMLTSEEEIKTTNPVATEQYGVVADNLQQQNTAPIVGAVNSQGALPGMVWQNRDVYLQGPIWAKIPHTDGNFHPSPLMGGFGLKHPPPQILIKNTPVPADPPTTFSQAKLASFITQYSTGQVSVEIEWELQKENSKRWNPEIQYTSNYYKSTNVDFAVNTEGTYSEPRPIGTRYLTRNL

SEQ ID NO: 1562 - DNA, 2214 bp, synthetic construct
  source 1..2214: mol_type = other DNA; note = Description of Artificial Sequence: Synthetic polynucleotide
atggctgccgatggttatcttccagattggctcgaggacaacctctctgagggcattcgcgagtggtgggacttgaaacctggagccccgaaacccaaagccaaccagcaaaagcaggacgacggccggggtctggtgcttcctggctacaagtacctcggacccttcaacggactcgacaagggggagcccgtcaacgcggcggacgcagcggccctcgagcacgacaaggcctacgaccagcagctcaaagcgggtgacaatccgtacctgcggtataaccacgccgacgccgagtttcaggagcgtctgcaagaagatacgtcttttgggggcaacctcgggcgagcagtcttccaggccaagaagcgggttctcgaacctctcggtctggttgaggaaggcgctaagacggctcctggaaagaagagaccggtagagccatcaccccagcgttctccagactcctctacgggcatcggcaagaaaggccagcagcccgcgaaaaagagactcaactttgggcagactggcgactcagagtcagtgcccgaccctcaaccaatcggagaaccccccgcaggcccctctggtctgggatctggtacaatggctgcaggcggtggcgctccaatggcagacaataacgaaggcgccgacggagtgggtagttcctcaggaaattggcattgcgattccacatggctgggcgacagagtcatcaccaccagcacccgaacctgggccctccccacctacaacaaccacctctacaagcaaatctccaacgggacttcgggaggaagcaccaacgacaacacctacttcggctacagcaccccctgggggtattttgactttaacagattccactgccacttctcaccacgtgactggcagcgactcatcaacaacaactggggattccggcccaagagactcaacttcaagctcttcaacatccaggtcaaggaggtcacgcagaatgaaggcaccaagaccatcgccaataaccttaccagcacgattcaggtctttacggactcggaataccagctcccgtacgtcctcggctctgcgcaccagggctgcctgcctccgttcccggcggacgtcttcatgattcctcagtacgggtacctgactctgaacaatggcagtcaggccgtgggccgttcctccttctactgcctggagtactttccttctcaaatgctgagaacgggcaacaactttgagttcagctacacgtttgaggacgtgccttttcacagcagctacgcgcacagccaaagcctggaccggctgatgaaccccctcatcgaccagtacctgtactacctgtctcggactcagtccacgggaggtaccgcaggaactcagcagttgctattttctcaggccgggcctagtaacatgtcggctcaggccaaaaactggctacccgggccctgctaccggcagcaacgcgtctccacgacactgtcgcaaaataacaacagcaactttgcctggaccggtgccaccaagtatcatctgaatggcagagactctctggtaaatcccggtgtcgctatggcaacccacaaggacgacgaagagcgattttttccgtccagcggagtcttaatgtttgggaaacagggagctggaaaagacaacgtggactatagcagcgttatgctaaccagtgaggaagaaattaaaaccaccaacccagtggccacagaacagtacggcgtggtggccgataacctgcaacagcaaaacaccgctcctattgtaggggccgtcaacagtcaaggagccttacctggcatggtctggcagaaccgggacgtgtacctgcagggtcctatctgggccaagattcctcacacggacggaaactttcatccctcgccgctgatgggaggctttggactgaaacacccgcctcctcagatcctgattaagaatacacctgttcccgcggatcctccaactaccttcagtcaagctaagctggcgtcgttcatcacgcagtacagcaccggacaggtcagcgtggaaattgaatgggagctgcagaaagaaaacagcaaacgctggaacccagagattcaatacacttccaactactacaaatctacaaatgtggactttgctgttaacacagaaggcacttattctgagcctcgccccatcggcacccgttacctcacccgtaatctg

SEQ ID NO: 1563 - protein, 737 aa, synthetic construct
  source 1..737: note = Description of Artificial Sequence: Synthetic polypeptide
MAADGYLPDWLEDNLSEGIREWWDLKPGAPKPKANQQKQDDGRGLVLPGYKYLGPFNGLDKGEPVNAADAAALEHDKAYDQQLKAGDNPYLRYNHADAEFQERLQEDTSFGGNLGRAVFQAKKRVLEPLGLVEEGAKTAPGKKRPVEPSPQRSPDSSTGIGKKGQQPAKKRLNFGQTGDSESVPDPQPLGEPPAAPSGVGSGTMAAGGGAPMADNNEGADGVGNASGNWHCDSTWLGDRVITTSTRTWALPTYNNHLYKQISSQSAGSTNDNTYFGYSTPWGYFDFNRFHCHFSPRDWQRLINNNWGFRPKKLRFKLFNIQVKEVTTNDGVTTIANNLTSTVQVFSDSEYQLPYVLGSAHQGCLPPFPADVFMIPQYGYLTLNNGSQSVGRSSFYCLEYFPSQMLRTGNNFEFSYTFEDVPFHSSYAHSQSLDRLMNPLIDQYLYYLARTQSTTGGTAGNRELQFYQAGPSTMAEQAKNWLPGPCYRQQRVSKTLDQNNNSNFAWTGATKYHLNGRNSLVNPGVAMATHKDDEDRFFPSSGVLIFGKTGAANKTTLENVLMTNEEEIKTTNPVATEEYGVVSSNLQSANTAPQTQTVNSQGALPGMVWQNRDVYLQGPIWAKIPHTDGNFHPSPLMGGFGLKHPPPQILIKNTPVPANPPEVFTPAKFASFITQYSTGQVSVEIEWELQKENSKRWNPEIQYTSNYDKSTNVDFAVDSEGVYSEPRPIGTRYLTRNL

SEQ ID NO: 1564 - DNA, 2211 bp, synthetic construct
  source 1..2211: mol_type = other DNA; note = Description of Artificial Sequence: Synthetic polynucleotide
atggctgccgatggttatcttccagattggctcgaggacaacctctctgagggcattcgcgagtggtgggacctgaaacctggagccccgaaacccaaagccaaccagcaaaagcaggacgacggccggggtctggtgcttcctggctacaagtacctcggacccttcaacggactcgacaagggggagcccgtcaacgcggcggacgcagcggccctcgagcacgacaaggcctacgaccagcagctcaaagcgggtgacaatccgtacctgcggtataaccacgccgacgccgagtttcaggagcgtctgcaagaagatacgtcatttgggggcaacctcgggcgagcagtcttccaggccaagaagcgggttctcgaacctctcggtctggttgaggaaggcgctaagacggctcctggaaagaagagaccggtagagccgtcacctcagcgttcccccgactcctccacgggcatcggcaagaaaggccagcagcccgccaaaaagagactcaatttcggtcagactggcgactcagagtcagtccccgaccctcaacctctcggagaacctccagcagcgccctctggtgtgggatctggtacaatggctgcaggcggtggcgcaccaatggcagacaataacgaaggtgccgacggagtgggtaatgcctcaggaaattggcattgcgattccacatggctgggcgacagagtcattaccaccagcacccgaacctgggccctgcccacctacaacaaccacctctacaagcaaatctccagtcaaagtgcaggtagtaccaacgacaacacctacttcggctacagcaccccctgggggtattttgactttaacagattccactgccacttctcaccacgtgactggcagcgactcatcaacaacaactggggattccggcccaagaagctgcggttcaagctcttcaacatccaggtcaaggaggtcacgacgaatgacggcgttacgaccatcgctaataaccttaccagcacggttcaggtattctcggactcggaataccagctgccgtacgtcctcggctctgcgcaccagggctgcctgcctccgttcccggcggacgtcttcatgattcctcagtacggctacctgactctcaacaatggcagtcagtctgtgggacgttcctccttctactgcctggagtacttcccctctcagatgctgagaacgggcaacaactttgagttcagctacaccttcgaggacgtgcctttccacagcagctacgcacacagccagagcctggaccggctgatgaatcccctcatcgaccagtacttgtactacctggccagaacacagagtaccacaggaggcacagctggcaatcgggaactgcagttttaccaggccgggccttcaactatggccgaacaagccaagaattggttacctggaccttgctaccggcaacaaagagtctccaaaacgctggatcaaaacaacaacagcaactttgcttggactggtgccaccaaatatcacctgaacggcagaaactcgttggttaatcccggcgtcgccatggcaactcacaaggacgacgaggaccgctttttcccatccagcggagtcctgatttttggaaaaactggagcagctaacaaaactacattggaaaatgtgttaatgacaaatgaagaagaaattaaaactactaatcctgtagccacggaagaatacggggtagtcagcagcaacttacaatcggctaatactgcaccccagacacaaactgtcaacagccagggagccttacctggcatggtctggcagaaccgggacgtgtacctgcagggtcccatctgggccaagattcctcacacggatggcaactttcacccgtctcctttgatgggcggctttggacttaaacatccgcctcctcagatcctgatcaagaacactcccgttcccgctaatcctccggaggtgtttactcctgccaagtttgcttcgttcatcacacagtacagcaccggacaagtcagcgtggaaatcgagtgggagctgcagaaggaaaacagcaagcgctggaacccggagattcagtacacctccaactatgataagtcgactaatgtggactttgccgttgacagcgagggtgtttactctgagcctcgccctattggcactcgttacctcacccgtaatctg

SEQ ID NO: 1565 - protein, 735 aa, synthetic construct
  source 1..735: note = Description of Artificial Sequence: Synthetic polypeptide
MAADGYLPDWLEDNLSEGIREWWDLKPGAPKPKANQQKQDDGRGLVLPGYKYLGPFNGLDKGEPVNAADAAALEHDKAYDQQLKAGDNPYLRYNHADAEFQERLQEDTSFGGNLGRAVFQAKKRVLEPLGLVEEGAKTAPGKKRPVEQSPQEPDSSSGIGKSGQQPAKKRLNFGQTGDSESVPDPQPLGEPPAAPSGVGSNTMASGGGAPMADNNEGADGVGNASGNWHCDSTWLGDRVITTSTRTWALPTYNNHLYKQISSQSGASNDNHYFGYSTPWGYFDFNRFHCHFSPRDWQRLINNNWGFRPKRLNFKLFNIQVKEVTTNDGTTTIANNLTSTVQVFTDSEYQLPYVLGSAHQGCLPPFPADVFMIPQYGYLTLNNGSQAVGRSSFYCLEYFPSQMLRTGNNFTFSYTFEDVPFHSSYAHSQSLDRLMNPLIDQYLYYLSRTQTTSGTAQNRELQFSQAGPSSMANQAKNWLPGPCYRQQRVSKTANDNNNSNFAWTGATKYHLNGRDSLVNPGPAMASHKDDEDKFFPMSGVLIFGKQGAGASNVDLDNVMITDEEEIKTTNPVATEQYGTVATNLQSSNTAPATGTVNSQGALPGMVWQDRDVYLQGPIWAKIPHTDGHFHPSPLMGGFGLKHPPPQILIKNTPVPANPPTTFSPAKFASFITQYSTGQVSVEIEWELQKENSKRWNPEIQYTSNYNKSANVDFTVDTNGVYSEPRPIGTRYLTRNL

SEQ ID NO: 1566 - DNA, 2205 bp, synthetic construct
  source 1..2205: mol_type = other DNA; note = Description of Artificial Sequence: Synthetic polynucleotide
atggctgccgatggttatcttccagattggctcgaggacaacctctctgagggcattcgcgagtggtgggacttgaaacctggagccccgaaacccaaagccaaccagcaaaagcaggacgacggccggggtctggtgcttcctggctacaagtacctcggacccttcaacggactcgacaagggggagcccgtcaacgcggcggatgcagcggccctcgagcacgacaaggcctacgaccagcagctcaaagcgggtgacaatccgtacctgcggtataaccacgccgacgccgagtttcaggagcgtctgcaagaagatacgtcttttgggggcaacctcgggcgagcagtcttccaggccaagaagagggttctcgaacctcttggtctggttgaggaaggtgctaagacggctcctggaaagaaacgtccggtagagcagtcgccacaagagccagactcctcctcgggcattggcaagtcaggccagcagcccgctaaaaagagactcaattttggtcagactggcgactcagagtcagtccccgacccacaacctctcggagaacctccagcagccccctctggtgtgggatctaatacaatggcttcaggcggtggcgcaccaatggcagacaataacgaaggcgccgacggagtgggtaatgcctcaggaaattggcattgcgattccacatggctgggcgacagagtcatcaccaccagcacccgaacatgggccttgcccacctataacaaccacctctacaagcaaatctccagtcaatcaggggccagcaacgacaaccactacttcggctacagcaccccctgggggtattttgatttcaacagattccactgccatttctcaccacgtgactggcagcgactcatcaacaacaattggggattccggcccaagagactcaacttcaagctcttcaacatccaagtcaaggaggtcacgacgaatgatggcaccacgaccatcgctaataaccttaccagcacggttcaagtcttcacggactcggagtaccagttgccgtacgtcctcggctctgcgcaccagggctgcctccctccgttcccggcggacgtgttcatgattccgcagtacggctacctaacgctcaacaatggcagccaggcagtgggacggtcatccttttactgcctggaatatttcccatcgcagatgctgagaacgggcaataactttaccttcagctacaccttcgaggacgtgcctttccacagcagctacgcgcacagccagagcctggaccggctgatgaatcctctcatcgaccagtacctgtattacctgagcagaactcagactacgtccggaactgcccaaaacagggagttgcagtttagccaggcgggtccatctagcatggctaatcaggccaaaaactggctacctggaccctgttaccggcagcagcgcgtttctaaaacagcaaatgacaacaacaacagcaactttgcctggactggtgctacaaaatatcaccttaatgggcgtgattctttagtcaaccctggccctgctatggcctcacacaaagacgacgaagacaagttctttcccatgagcggtgtcttgatttttggaaagcagggcgccggagcttcaaacgttgatttggacaatgtcatgatcacagacgaagaggaaatcaaaaccactaaccccgtggccaccgaacaatatgggactgtggcaaccaatctccagagcagcaacacagcccctgcgaccggaactgtgaattctcagggagccttacctggaatggtgtggcaagacagagacgtatacctgcagggtcctatttgggccaaaattcctcacacggatggacactttcacccgtctcctctcatgggcggctttggacttaagcacccgcctcctcagatcctcatcaaaaacacgcctgttcctgcgaatcctccgacaacgttttcgcctgcaaagtttgcttcattcatcacccagtattccacaggacaagtgagcgtggagattgaatgggagctgcagaaagaaaacagcaaacgctggaatcccgaaatacagtatacatctaactataataaatctgccaacgttgatttcactgtggacaccaatggagtttatagtgagcctcgccccattggcacccgttacctcacccgtaacctg

SEQ ID NO: 1567 - protein, 735 aa, synthetic construct
  source 1..735: note = Description of Artificial Sequence: Synthetic polypeptide
MAADGYLPDWLEDNLSEGIREWWDLKPGAPQPKANQQHQDDGRGLVLPGYKYLGPFNGLDKGEPVNEADAAALEHDKAYDQQLKAGDNPYLKYNHADAEFQERLQEDTSFGGNLGRAVFQAKKRVLEPLGLVEEAAKTAPGKKRPVEQSPQEPDSSSGIGKSGQQPARKRLNFGQTGDSESVPDPQPLGEPPAAPSGVGSNTMASGGGAPMADNNEGADGVGNSSGNWHCDSTWLGDRVITTSTRTWALPTYNNHLYKQISSQSGASNDNHYFGYSTPWGYFDFNRFHCHFSPRDWQRLINNNWGFRPKKLNFKLFNIQVKEVTQNDGTTTIANNLTSTVQVFTDSEYQLPYVLGSAHQGCLPPFPADVFMIPQYGYLTLNNGSQAVGRSSFYCLEYFPSQMLRTGNNFTFSYTFEDVPFHSSYAHSQSLDRLMNPLIDQYLYYLSRTQTTSGTTQQSRLQFSQAGPSSMAQQAKNWLPGPCYRQQRVSKTANDNNNSNFAWTGATKYHLNGRDSLVNPGPAMASHKDDEEKFFPMHGVLIFGKQGTGASNVDLDNVMITDEEEIRTTNPVATEQYGTVATNLQSSNTAPATGTVNSQGALPGMVWQDRDVYLQGPIWAKIPHTDGHFHPSPLMGGFGLKHPPPQILIKNTPVPANPPTTFSPAKFASFITQYSTGQVSVEIEWELQKENSKRWNPEIQYTSNYNKSVNVDFTVDTNGVYSEPRPIGTRYLTRNL

SEQ ID NO: 1568 - DNA, 2205 bp, synthetic construct
  source 1..2205: mol_type = other DNA; note = Description of Artificial Sequence: Synthetic polynucleotide
atggctgctgacggttatcttccagattggctcgaggacaacctttctgaaggcattcgtgagtggtgggatctgaaacctggagcccctcaacccaaagcgaaccaacaacaccaggacgacggtcggggtcttgtgcttccgggttacaaatacctcggaccctttaacggactcgacaaaggagagccggtcaacgaggcggacgcggcagccctcgaacacgacaaagcttacgaccagcagctcaaggccggtgacaacccgtacctcaagtacaaccacgccgacgccgagtttcaggagcgtcttcaagaagatacgtcttttgggggcaaccttggcagagcagtcttccaggccaaaaagagggtccttgagcctcttggtctggttgaggaagcagctaaaacggctcctggaaagaagaggcctgtagaacagtctcctcaggaaccggactcatcatctggtattggcaaatcgggccaacagcctgccagaaaaagactaaatttcggtcagactggagactcagagtcagtcccagaccctcaacctctcggagaaccaccagcagccccctcaggtgtgggatctaatacaatggcttcaggcggtggcgcaccaatggcagacaataacgagggtgccgatggagtgggtaattcctcaggaaattggcattgcgattccacatggctgggcgacagagtcatcaccaccagcaccagaacctgggccctgcccacttacaacaaccatctctacaagcaaatctccagccaatcaggagcttcaaacgacaaccactactttggctacagcaccccttgggggtattttgactttaacagattccactgccacttctcaccacgtgactggcagcgactcattaacaacaactggggattccggcccaagaaactcaacttcaagctcttcaacatccaagttaaagaggtcacgcagaacgatggcacgacgactattgccaataaccttaccagcacggttcaagtgtttacggactcggagtatcagctcccgtacgtgctcgggtcggcgcaccaaggctgtctcccgccgtttccagcggacgtcttcatgatccctcagtatggatacctcaccctgaacaacggaagtcaagcggtgggacgctcatccttttactgcctggagtacttcccttcgcagatgctaaggactggaaataacttcacattcagctataccttcgaggatgtaccttttcacagcagctacgctcacagccagagtttggatcgcttgatgaatcctcttattgatcagtatctgtactacctgagcagaacgcaaacaacctctggaacaacccaacaatcacggctgcaatttagccaggctgggccttcgtctatggctcagcaggccaaaaattggctacctgggccctgctaccggcaacagagagtttcaaagactgctaacgacaacaacaacagtaactttgcttggacaggggccaccaaatatcatctcaatggccgcgactcgctggtgaatccaggaccagctatggccagtcacaaggacgatgaagaaaaatttttccctatgcacggcgttctaatatttggcaaacaagggacaggggcaagtaacgtagatttagataatgtaatgattacggatgaagaagagattcgtaccaccaatcctgtggcaacagagcagtatggaactgtggcaactaacttgcagagctcaaatacagctcccgcgactggaactgtcaatagtcagggggccttacctggcatggtgtggcaagatcgtgacgtgtaccttcaaggacctatctgggcaaagattcctcacacggatggacactttcatccttctcctctgatgggaggctttggactgaaacatccgcctcctcaaatcttgatcaaaaatactccggtaccggcaaatcctccgacgactttcagcccggccaagtttgcttcatttatcactcagtactccactggacaggtcagcgtggaaattgagtgggagctacagaaagaaaacagcaaacgttggaatccagagattcagtacacttccaactacaacaagtctgttaatgtggactttactgtagacactaatggtgtttatagtgaacctcgccctattggaacccggtatctcacacgaaacttg

SEQ ID NO: 1569 - protein, 736 aa, synthetic construct
  source 1..736: note = Description of Artificial Sequence: Synthetic polypeptide
MAADGYLPDWLEDNLSEGIREWWDLKPGAPKPKANQQKQDDGRGLVLPGYKYLGPFNGLDKGEPVNAADAAALEHDKAYDQQLKAGDNPYLRYNHADAEFQERLQEDTSFGGNLGRAVFQAKKRVLEPLGLVEEGAKTAPGKKRPVEQSPQEPDSSSGIGKKGQQPARKRLNFGQTGDSESVPDPQPLGEPPAAPSGVGSNTMAAGGGAPMADNNEGADGVGNASGNWHCDSTWLGDRVITTSTRTWALPTYNNHLYKQISSQSGGSTNDNTYFGYSTPWGYFDFNRFHCHFSPRDWQRLINNNWGFRPKRLNFKLFNIQVKEVTTNDGTTTIANNLTSTVQVFTDSEYQLPYVLGSAHQGCLPPFPADVFMIPQYGYLTLNNGSQAVGRSSFYCLEYFPSQMLRTGNNFEFSYTFEDVPFHSSYAHSQSLDRLMNPLIDQYLYYLSRTQTTSGTAGNRTLQFSQAGPSSMANQAKNWLPGPCYRQQRVSKTANQNNNSNFAWTGATKYHLNGRDSLVNPGPAMATHKDDEDKFFPMSGVLIFGKQGAGNSNVDLDNVMITNEEEIKTTNPVATEQYGTVATNLQSANTAPATGTVNSQGALPGMVWQDRDVYLQGPIWAKIPHTDGHFHPSPLMGGFGLKHPPPQILIKNTPVPANPPTTFSPAKFASFITQYSTGQVSVEIEWELQKENSKRWNPEIQYTSNYNKSTNVDFAVDTNGVYSEPRPIGTRYLTRNL

SEQ ID NO: 1570 - protein, 736 aa, synthetic construct
  source 1..736: note = Description of Artificial Sequence: Synthetic polypeptide
MAADGYLPDWLEDNLSEGIREWWDLKPGAPKPKANQQKQDDGRGLVLPGYKYLGPFNGLDKGEPVNAADAAALEHDKAYDQQLKAGDNPYLRYNHADAEFQERLQEDTSFGGNLGRAVFQAKKRVLEPLGLVEEGAKTAPGKKRPVEQSPQEPDSSSGIGKKGQQPAKKRLNFGQTGDSESVPDPQPLGEPPAAPSGVGSNTMASGGGAPMADNNEGADGVGNASGNWHCDSTWLGDRVITTSTRTWALPTYNNHLYKQISSQSGASTNDNTYFGYSTPWGYFDFNRFHCHFSPRDWQRLINNNWGFRPKRLNFKLFNIQVKEVTTNDGTTTIANNLTSTVQVFTDSEYQLPYVLGSAHQGCLPPFPADVFMIPQYGYLTLNNGSQAVGRSSFYCLEYFPSQMLRTGNNFQFSYTFEDVPFHSSYAHSQSLDRLMNPLIDQYLYYLSRTQTTSGTAGNRELQFSQAGPSSMANQAKNWLPGPCYRQQRVSKTTNQNNNSNFAWTGATKYHLNGRDSLVNPGPAMATHKDDEDKFFPMSGVLIFGKQGAGNSNVDLDNVMITNEEEIKTTNPVATEEYGTVATNLQSANTAPATGTVNSQGALPGMVWQNRDVYLQGPIWAKIPHTDGHFHPSPLMGGFGLKHPPPQILIKNTPVPANPPTTFSPAKFASFITQYSTGQVSVEIEWELQKENSKRWNPEIQYTSNYNKSTNVDFAVDTNGVYSEPRPIGTRYLTRNL

SEQ ID NO: 1571 - protein, 736 aa, synthetic construct
  source 1..736: note = Description of Artificial Sequence: Synthetic polypeptide
MAADGYLPDWLEDNLSEGIREWWDLKPGAPKPKANQQKQDDGRGLVLPGYKYLGPFNGLDKGEPVNAADAAALEHDKAYDQQLKAGDNPYLRYNHADAEFQERLQEDTSFGGNLGRAVFQAKKRVLEPLGLVEEGAKTAPGKKRPVEQSPQEPDSSSGIGKKGQQPARKRLNFGQTGDSESVPDPQPLGEPPAAPSGVGSNTMAAGGGAPMADNNEGADGVGNASGNWHCDSTWLGDRVITTSTRTWALPTYNNHLYKQISSQSGGSTNDNTYFGYSTPWGYFDFNRFHCHFSPRDWQRLINNNWGFRPKRLNFKLFNIQVKEVTTNDGTTTIANNLTSTVQVFTDSEYQLPYVLGSAHQGCLPPFPADVFMIPQYGYLTLNNGSQAVGRSSFYCLEYFPSQMLRTGNNFEFSYTFEDVPFHSSYAHSQSLDRLMNPLIDQYLYYLSRTQTTSGTAGNRELQFSQAGPSSMANQAKNWLPGPCYRQQRVSKTTNQNNNSNFAWTGATKYHLNGRDSLVNPGPAMATHKDDEDKFFPMSGVLIFGKQGAGNSNVDLDNVMITSEEEIKTTNPVATEEYGTVATNLQSSNTAPATGTVNSQGALPGMVWQERDVYLQGPIWAKIPHTDGHFHPSPLMGGFGLKHPPPQILIKNTPVPANPPTTFSPAKFASFITQYSTGQVSVEIEWELQKENSKRWNPEIQYTSNYNKSTNVDFAVDTNGVYSEPRPIGTRYLTRNL

SEQ ID NO: 1572 - protein, 736 aa, synthetic construct
  source 1..736: note = Description of Artificial Sequence: Synthetic polypeptide
MAADGYLPDWLEDNLSEGIREWWDLKPGAPKPKANQQKQDDGRGLVLPGYKYLGPFNGLDKGEPVNAADAAALEHDKAYDQQLKAGDNPYLRYNHADAEFQERLQEDTSFGGNLGRAVFQAKKRVLEPLGLVEEGAKTAPGKKRPVEQSPQEPDSSSGIGKKGQQPARKRLNFGQTGDSESVPDPQPLGEPPAAPSGVGSNTMASGGGAPMADNNEGADGVGNASGNWHCDSTWLGDRVITTSTRTWALPTYNNHLYKQISSQSGGSTNDNTYFGYSTPWGYFDFNRFHCHFSPRDWQRLINNNWGFRPKKLNFKLFNIQVKEVTTNDGTTTIANNLTSTVQVFTDSEYQLPYVLGSAHQGCLPPFPADVFMIPQYGYLTLNNGSQAVGRSSFYCLEYFPSQMLRTGNNFEFSYTFEDVPFHSSYAHSQSLDRLMNPLIDQYLYYLSRTQTTSGTAGNRELQFSQAGPSSMANQAKNWLPGPCYRQQRVSKTTNQNNNSNFAWTGATKYHLNGRDSLVNPGPAMATHKDDEDKFFPMSGVLIFGKQGAGNSNVDLDNVMITSEEEIKTTNPVATEEYGTVATNLQSANTAPATGTVNSQGALPGMVWQDRDVYLQGPIWAKIPHTDGHFHPSPLMGGFGLKHPPPQILIKNTPVPANPPTTFSPAKFASFITQYSTGQVSVEIEWELQKENSKRWNPEIQYTSNYNKSTNVDFAVDTNGVYSEPRPIGTRYLTRNL

SEQ ID NO: 1573 - protein, 736 aa, synthetic construct
  source 1..736: note = Description of Artificial Sequence: Synthetic polypeptide
MAADGYLPDWLEDNLSEGIREWWDLKPGAPKPKANQQKQDDGRGLVLPGYKYLGPFNGLDKGEPVNAADAAALEHDKAYDQQLKAGDNPYLRYNHADAEFQERLQEDTSFGGNLGRAVFQAKKRVLEPLGLVEEGAKTAPGKKRPVEQSPQEPDSSSGIGKKGQQPARKRLNFGQTGDSESVPDPQPLGEPPAAPSGVGSNTMAAGGGAPMADNNEGADGVGNASGNWHCDSTWLGDRVITTSTRTWALPTYNNHLYKQISSQSGGSTNDNTYFGYSTPWGYFDFNRFHCHFSPRDWQRLINNNWGFRPKKLNFKLFNIQVKEVTTNDGTTTIANNLTSTVQVFTDSEYQLPYVLGSAHQGCLPPFPADVFMIPQYGYLTLNNGSQAVGRSSFYCLEYFPSQMLRTGNNFQFSYTFEDVPFHSSYAHSQSLDRLMNPLIDQYLYYLSRTQTTSGTAGNRTLQFSQAGPSSMANQAKNWLPGPCYRQQRVSKTTNQNNNSNFAWTGATKYHLNGRDSLVNPGPAMATHKDDEDKFFPMSGVLIFGKQGAGNSNVDLDNVMITNEEEIKTTNPVATEEYGTVATNLQSANTAPATGTVNSQGALPGMVWQDRDVYLQGPIWAKIPHTDGHFHPSPLMGGFGLKHPPPQILIKNTPVPANPPTTFSPAKFASFITQYSTGQVSVEIEWELQKENSKRWNPEIQYTSNYNKSTNVDFAVDTNGVYSEPRPIGTRYLTRNL

SEQ ID NO: 1574 - protein, 736 aa, synthetic construct
  source 1..736: note = Description of Artificial Sequence: Synthetic polypeptide
MAADGYLPDWLEDNLSEGIREWWDLKPGAPKPKANQQKQDDGRGLVLPGYKYLGPFNGLDKGEPVNAADAAALEHDKAYDQQLKAGDNPYLRYNHADAEFQERLQEDTSFGGNLGRAVFQAKKRVLEPLGLVEEGAKTAPGKKRPVEQSPQEPDSSSGIGKKGQQPAKKRLNFGQTGDSESVPDPQPLGEPPAAPSGVGSNTMAAGGGAPMADNNEGADGVGNASGNWHCDSTWLGDRVITTSTRTWALPTYNNHLYKQISSQSGGSTNDNTYFGYSTPWGYFDFNRFHCHFSPRDWQRLINNNWGFRPKKLNFKLFNIQVKEVTTNDGTTTIANNLTSTVQVFTDSEYQLPYVLGSAHQGCLPPFPADVFMIPQYGYLTLNNGSQAVGRSSFYCLEYFPSQMLRTGNNFEFSYTFEDVPFHSSYAHSQSLDRLMNPLIDQYLYYLSRTQTTSGTAGNRTLQFSQAGPSSMANQAKNWLPGPCYRQQRVSKTANQNNNSNFAWTGATKYHLNGRDSLVNPGPAMATHKDDEDKFFPMSGVLIFGKQGAGNSNVDLDNVMITSEEEIKTTNPVATEQYGTVATNLQSSNTAPATGTVNSQGALPGMVWQNRDVYLQGPIWAKIPHTDGHFHPSPLMGGFGLKHPPPQILIKNTPVPANPPTTFSPAKFASFITQYSTGQVSVEIEWELQKENSKRWNPEIQYTSNYNKSTNVDFAVDTNGVYSEPRPIGTRYLTRNL

SEQ ID NO: 1575 - protein, 736 aa, synthetic construct
  source 1..736: note = Description of Artificial Sequence: Synthetic polypeptide
MAADGYLPDWLEDNLSEGIREWWDLKPGAPKPKANQQKQDDGRGLVLPGYKYLGPFNGLDKGEPVNAADAAALEHDKAYDQQLKAGDNPYLRYNHADAEFQERLQEDTSFGGNLGRAVFQAKKRVLEPLGLVEEGAKTAPGKKRPVEQSPQEPDSSSGIGKKGQQPAKKRLNFGQTGDSESVPDPQPLGEPPAAPSGVGSNTMASGGGAPMADNNEGADGVGNASGNWHCDSTWLGDRVITTSTRTWALPTYNNHLYKQISSQSGGSTNDNTYFGYSTPWGYFDFNRFHCHFSPRDWQRLINNNWGFRPKKLNFKLFNIQVKEVTTNDGTTTIANNLTSTVQVFTDSEYQLPYVLGSAHQGCLPPFPADVFMIPQYGYLTLNNGSQAVGRSSFYCLEYFPSQMLRTGNNFEFSYTFEDVPFHSSYAHSQSLDRLMNPLIDQYLYYLSRTQTTSGTAGNRTLQFSQAGPSSMANQAKNWLPGPCYRQQRVSKTANQNNNSNFAWTGATKYHLNGRDSLVNPGPAMATHKDDEDKFFPMSGVLIFGKQGAGNSNVDLDNVMITSEEEIKTTNPVATEEYGTVATNLQSSNTAPATGTVNSQGALPGMVWQNRDVYLQGPIWAKIPHTDGHFHPSPLMGGFGLKHPPPQILIKNTPVPANPPTTFSPAKFASFITQYSTGQVSVEIEWELQKENSKRWNPEIQYTSNYNKSTNVDFAVDTNGVYSEPRPIGTRYLTRNL

SEQ ID NO: 1576 - protein, 736 aa, synthetic construct
  source 1..736: note = Description of Artificial Sequence: Synthetic polypeptide
MAADGYLPDWLEDNLSEGIREWWDLKPGAPKPKANQQKQDDGRGLVLPGYKYLGPFNGLDKGEPVNAADAAALEHDKAYDQQLKAGDNPYLRYNHADAEFQERLQEDTSFGGNLGRAVFQAKKRVLEPLGLVEEGAKTAPGKKRPVEQSPQEPDSSSGIGKKGQQPAKKRLNFGQTGDSESVPDPQPLGEPPAAPSGVGSNTMASGGGAPMADNNEGADGVGNASGNWHCDSTWLGDRVITTSTRTWALPTYNNHLYKQISSQSGGSTNDNTYFGYSTPWGYFDFNRFHCHFSPRDWQRLINNNWGFRPKKLNFKLFNIQVKEVTTNDGTTTIANNLTSTVQVFTDSEYQLPYVLGSAHQGCLPPFPADVFMIPQYGYLTLNNGSQAVGRSSFYCLEYFPSQMLRTGNNFQFSYTFEDVPFHSSYAHSQSLDRLMNPLIDQYLYYLSRTQTTSGTAGNRELQFSQAGPSSMANQAKNWLPGPCYRQQRVSKTTNQNNNSNFAWTGATKYHLNGRDSLVNPGPAMATHKDDEDKFFPMSGVLIFGKQGAGNSNVDLDNVMITNEEEIKTTNPVATEQYGTVATNLQSANTAPATGTVNSQGALPGMVWQDRDVYLQGPIWAKIPHTDGHFHPSPLMGGFGLKHPPPQILIKNTPVPANPPTTFSPAKFASFITQYSTGQVSVEIEWELQKENSKRWNPEIQYTSNYNKSTNVDFAVDTNGVYSEPRPIGTRYLTRNL

SEQ ID NO: 1577 - DNA, 2211 bp, synthetic construct
  source 1..2211: mol_type = other DNA; note = Description of Artificial Sequence: Synthetic polynucleotide
atggctgccgatggttatcttccagattggctcgaggacaacctctctgagggcattcgcgagtggtgggacttgaaacctggagccccgaaacccaaagccaaccagcaaaagcaggacgacggccggggtctggtgcttcctggctacaagtacctcggacccttcaacggactcgacaagggggagcccgtcaacgcggcggacgcagcggccctcgagcacgacaaggcctacgaccagcagctcaaagcgggtgacaatccgtacctgcggtataaccacgccgacgccgagtttcaggagcgtctgcaagaagatacgtcttttgggggcaacctcgggcgagcagtcttccaggccaagaagcgggttctcgaacctctcggtctggttgaggaaggcgctaagacggctcctggaaagaagagaccggtagagcaatcaccccaggaaccagactcctcttcgggcatcggcaagaaaggccagcagcccgcgaaaaagagactcaactttgggcagacaggcgactcagagtcagtgcccgaccctcaaccactcggagaaccccccgcagccccctctggtgtgggatctaatacaatggctgcaggcggtggcgctccaatggcagacaataacgaaggcgccgacggagtgggtaacgcctcaggaaattggcattgcgattccacatggctgggcgacagagtcatcaccaccagcacccgaacctgggccctccccacctacaacaaccacctctacaagcaaatctccagccaatcgggagcaagcaccaacgacaacacctacttcggctacagcaccccctgggggtattttgactttaacagattccactgccacttctcaccacgtgactggcagcgactcatcaacaacaactggggattccggcccaagagactcaacttcaagctcttcaacatccaggtcaaggaggtcacgacgaatgatggcaccacgaccatcgccaataaccttaccagcacggttcaggtctttacggactcggaataccagctcccgtacgtcctcggctctgcgcaccagggctgcctgcctccgttcccggcggacgtcttcatgattcctcagtacgggtacctgactctgaacaatggcagtcaggccgtgggccgttcctccttctactgcctggagtactttccttctcaaatgctgagaacgggcaacaactttgagttcagctacacgtttgaggacgtgccttttcacagcagctacgcgcacagccaaagcctggaccggctgatgaaccccctcatcgaccagtacctgtactacctgtctcggactcagaccacgagtggtaccgcaggaaatcggacgttgcaattttctcaggccgggcctagtagcatggcgaatcaggccaaaaactggctacccgggccctgctaccggcagcaacgcgtctccaagacagcgaatcaaaataacaacagcaactttgcctggaccggtgccaccaagtatcatctgaatggcagagactctctggtaaatcccggtcccgctatggcaacccacaaggacgacgaagacaaattttttccgatgagcggagtcttaatatttgggaaacagggagctggaaatagcaacgtggaccttgacaacgttatgataaccagtgaggaagaaattaaaaccaccaacccagtggccacagaacagtacggcacggtggccactaacctgcaatcgtcaaacaccgctcctgctacagggaccgtcaacagtcaaggagccttacctggcatggtctggcagaaccgggacgtgtacctgcagggtcctatctgggccaagattcctcacacggacggacactttcatccctcgccgctgatgggaggctttggactgaaacacccgcctcctcagatcctgattaagaatacacctgttcccgcgaatcctccaactaccttcagtccagctaagtttgcgtcgttcatcacgcagtacagcaccggacaggtcagcgtggaaattgaatgggagctgcagaaagaaaacagcaaacgctggaacccagagattcaatacacttccaactacaacaaatctacaaatgtggactttgctgttgacacaaatggcgtttattctgagcctcgccccatcggcacccgttacctcacccgtaatctgtaa

SEQ ID NO: 1578 - protein, 738 aa, synthetic construct; identical to SEQ ID NO: 7
  source 1..738: note = Description of Artificial Sequence: Synthetic polypeptide

SEQ ID NO: 1579 - DNA, 2211 bp, synthetic construct
  source 1..2211: mol_type = other DNA; note = Description of Artificial Sequence: Synthetic polynucleotide
atggctgccgatggttatcttccagattggctcgaggacaacctctctgagggcattcgcgagtggtgggacttgaaacctggagccccgaaacccaaagccaaccagcaaaagcaggacgacggccggggtctggtgcttcctggctacaagtacctcggacccttcaacggactcgacaagggggagcccgtcaacgcggcggacgcagcggccctcgagcacgacaaggcctacgaccagcagctcaaagcgggtgacaatccgtacctgcggtataaccacgccgacgccgagtttcaggagcgtctgcaagaagatacgtcttttgggggcaacctcgggcgagcagtcttccaggccaagaagcgggttctcgaaccttttggtctggttgaggaaggcgctaagacggctcctggaaagaaacgtccggtagagcagtcgccacaagagccagactcctcctcgggcatcggcaagacaggccagcagcccgctaaaaagagactcaattttggtcagactggcgactcagagtcagtccccgacccacaacctctcggagaacctccagcaacccccgctgctgtgggacctactacaatggcttcaggcggtggcgcaccaatggcagacaataacgaaggcgccgacggagtgggtaatgcctcaggaaattggcattgcgattccacatggctgggcgacagagtcatcaccaccagcacccgcacctgggccttgcccacctacaataaccacctctacaagcaaatctccagtgcttcaacgggggccagcaacgacaaccactacttcggctacagcaccccctgggggtattttgatttcaacagattccactgccacttttcaccgcgtgactggcagcgactcatcaacaacaattggggattccggcccaagagactcaacttcaagctcttcaacatccaagtcaaggaggtcacgacgagtgatggcgtcacaaccatcgctaataaccttaccagcacggttcaagtcttctcggactcggagtaccagcttccgtacgtcctcggctctgcgcaccagggctgcctccctccgttcccggcggacgtgttcatgattccgcaatacggctacctgacgctcaacaatggcagccaagccgtgggacgttcatccttttactgcctggaatatttcccttctcagatgctgagaacgggcaacaactttaccttcagctacacctttgaggaagtgcctttccacagcagctacgcgcacagccagagcctggaccggctgatgaatcctctcatcgaccaatacctgtattacctgaacagaactcaaaatcagtccggaagtgcccaaaacaaggacttgctgtttagccgtgggtctccagctggcatgtctgttcagcccaaaaactggctacctggaccctgttatcggcagcagcgcgtttctaaaacaaaaacaggcaacaacaacagcaattttacctggactggtgcttcaaaatataacctcaatgggcatgaatccatcatcaaccctggcactgctatggcctcacacaaagacgacgaagacaagttctttcccatgagcggtgtcatgatttttggaaaagagagcgccggagcttcaaacactgcattggacaatgtcatgattacagacgaagaggaaattaaagccactaaccctgtggccaccgaaagatttgggaccgtggcagtcaatttccagagcagcagcacacaccctgcgaccggagatgtgcatgttatgggagcattacctggcatggtgtggcaagatagagacgtgtacctgcagggtcccatctgggccaaaattcctcacacagatggacactttcacccgtctcctcttatgggcggctttggactcaagcacccgcctcctcagatcctcatcaaaaacacgcctgttcctgcgaatcctccggcggagttttcagctacaaagtttgcttcattcatcacccaatactccacaggacaagtgagtgtggaaattgaatgggagctgcagaaagaaaacagcaagcgctggaatcccgaagtgcagtacacatccaattatgcaaaatctgccaacgttgattttaccgtggacaacaatggactttatactgagcctcgccccattggcacccgttaccttacccgtcccctgtaa

SEQ ID NO: 1580 - DNA, 2211 bp, synthetic construct; identical to SEQ ID NO: 1579
  source 1..2211: mol_type = other DNA; note = Description of Artificial Sequence: Synthetic polynucleotide

SEQ ID NO: 1581 - DNA, 2202 bp, synthetic construct
  source 1..2202: mol_type = other DNA; note = Description of Artificial Sequence: Synthetic polynucleotide
atgactgacggttaccttccagattggctagaggacaacctctctgaaggcgttcgagagtggtgggcgctgcaacctggagcccctaaacccaaggcaaatcaacaacatcaggacaacgctcggggtcttgtgcttccgggttacaaatacctcggacccggcaacggacttgacaagggggaacccgtcaacgcagcggacgcggcagccctcgaacacgacaaggcctacgaccagcagctcaaggccggtgacaacccctacctcaagtacaaccacgccgacgccgagtttcaggagcgtcttcaagaagatacgtcttttgggggcaacctcggacgagcagtcttccaggccaaaaagaggatccttgagcctctgggtctggttgaggaagcggctaagacggctcctggaaaaaagagacctgtagagcaatctccagcagaaccggactcctcttcgggcatcggcaaatcaggccagcagcccgctagaaaaagactgaattttggtcagactggcgacacagagtcagtcccagaccctcaaccactcggacaacctcccgcagccccctctggtgtgggatctactacaatggcttcaggcggtggcgcaccaatggcagacaataacgagggtgccgatggagtgggtaattcctcaggaaattggcattgcgattcccaatggctgggcgacagagtcatcaccaccagcacccgcacctgggccctgcccacctacaacaatcacctctacaagcaaatctccagccaatcaggagccaccaacgacaaccactactttggctacagcaccccctgggggtattttgacttcaacagattccactgccacttttcaccacgtgactggcaaagactcatcaacaacaactggggattccgacccaagagactcaacttcaagctctttaacattcaagtcaaagaggtcacgcagaatgacggtacgacgacgattgccaataaccttaccagcacggttcaggtgtttactgactccgagtaccagctcccgtacgtcctcggctcggcgcatcagggatgcctcccgccgttcccagcagacgtcttcatggtcccacagtatggatacctcaccctgaacaacgggagtcaggcggtaggacgctcttccttttactgcctggagtactttccttctcagatgctgcgtactggaaacaactttcagtttagctacacttttgaagacgtgcctttccacagcagctacgctcacagccaaagtctggaccgtctcatgaatcctctgatcgaccagtacctgtactatctgaacaggacacaaacagccagtggaactcagcagtctcggctactgtttagccaagctggacccaccagtatgtctcttcaagctaaaaactggctgcctggaccttgctacagacagcagcgtctgtcaaagcaggcaaacgacaacaacaacagcaactttccctggactggtgccaccaaatatcatctgaatggccgggactcattggtgaacccgggccctgctatggccagtcacaaggatgacaaagaaaagtttttccccatgcatggaaccctgatatttggtaaagaaggaacaaatgccaacaacgcggatttggaaaatgtcatgattacagatgaagaagaaatccgcaccaccaatcccgtggctacggagcagtacgggactgtgtcaaataatttgcaaaactcaaacgctggtccaactactggaactgtcaatcaccaaggagcgttacctggtatggtgtggcaggatcgagacgtgtacctgcagggacccatttgggccaagattcctcacaccgatggacactttcatccttctccactgatgggaggttttgggctcaaacacccgcctcctcagatcatgatcaaaaacactcccgttccagccaatcctcccacaaactttagtgcggcaaagtttgcttccttcatcacacagtactccacggggcaggtcagcgtggagatcgagtgggagctgcagaaggagaacagcaaacgctggaatcccgaaattcagtacacttccaactacaacaaatctgttaatgtggactttactgtggacactaatggtgtgtattcagagcctcgccccattggcaccagatacctgactcgtaatctgtaa

SEQ ID NO: 1582 - DNA, 2211 bp, synthetic construct
  source 1..2211: mol_type = other DNA; note = Description of Artificial Sequence: Synthetic polynucleotide
atggctgccgatggttatcttccagattggctcgaggacaacctctctgagggcattcgcgagtggtgggacttgaaacctggagccccgaaacccaaagccaaccagcaaaagcaggacgacggccggggtctggtgcttcctggctacaagtacctcggacccttcaacggactcgacaagggggagcccgtcaacgcggcggacgcagcggccctcgagcacgacaaggcctacgaccagcagctcaaagcgggtgacaatccgtacctgcggtataaccacgccgacgccgagtttcaggagcgtctgcaagaagatacgtcttttgggggcaacctcgggcgagcagtcttccaggccaagaagcgggttctcgaaccttttggtctggttgaggaaggcgctaagacggctcctggaaagaaacgtccggtagagcagtcgccacaagagccagactcctcctcgggcatcggcaagacaggccagcagcccgctaaaaagagactcaattttggtcagactggcgactcagagtcagtccccgacccacaacctctcggagaacctccagcaacccccgctgctgtgggacctactacaatggcttcaggcggtggcgcaccaatggcagacaataacgaaggcgccgacggagtgggtaatgcctcaggaaattggcattgcgattccacatggctgggcgacagagtcatcaccaccagcacccgcacctgggccttgcccacctacaataaccacctctacaagcaaatctccagtgcttcaacgggggccagcaacgacaaccactacttcggctacagcaccccctgggggtattttgatttcaacagattccactgccacttttcaccacgtgactggcagcgactcatcaacaacaattggggattccggcccaagagactcaacttcaagctcttcaacatccaagtcaaggaggtcacgacgaatgatggcgtcacaaccatcgctaataaccttaccagcacggttcaagtcttctcggactcggagtaccagcttccgtacgtcctcggctctgcgcaccagggctgcctccctccgttcccggcggacgtgttcatgattccgcaatacggctacctgacgctcaacaatggcagccaagccgtgggacgttcatccttttactgcctggaatatttcccttctcagatgctgagaacgggcaacaactttaccttcagctacacctttgaggaagtgcctttccacagcagctacgcgcacagccagagcctggaccggctgatgaatcctctcatcgaccaatacctgtattacctgaacagaactcaaaatcagtccggaagtgcccaaaacaaggacttgctgtttagccgtgggtctccagctggcatgtctgttcagcccaaaaactggctacctggaccctgttatcggcagcagcgcgtttctaaaacaaaaacagacaacaacaacagcaattttacctggactggtgcttcaaaatataacctcaatgggcgtgaatccatcatcaaccctggcactgctatggcctcacacaaagacgacgaagacaagttctttcccatgagcggtgtcatgatttttggaaaagagagcgccggagcttcaaacactgcattggacaatgtcatgattacagacgaagaggaaattaaagccactaaccctgtggccaccgaaagatttgggaccgtggcagtcaatttccagagcagcagcacagaccctgcgaccggagatgtgcatgttatgggagcattacctggcatggtgtggcaagatagagacgtgtacctgcagggtcccatctgggccaaaattcctcacacagatggacactttcacccgtctcctcttatgggcggctttggactcaagcacccgcctcctcagatcctcatcaaaaacacgcctgttcctgcgaatcctccggcggagttttcagctacaaagtttgcttcattcatcacccaatactccacaggacaagtgagtgtggaaattgaatgggagctgcagaaagaaaacagcaagcgctggaatcccgaagtgcagtacacatccaattatgcaaaatctgccaacgttgattttaccgtggacaacaatggactttatactgagcctcgccccattggcacccgttaccttacccgtcccctgtaa

SEQ ID NO: 1583 - DNA, 2211 bp, synthetic construct
  source 1..2211: mol_type = other DNA; note = Description of Artificial Sequence: Synthetic polynucleotide
atggctgccgatggttatcttccagattggctcgaggacaacctctctgagggcattcgcaagtggtgggacttgaaacctggagccccgaaacccaaagccaaccagcaaaagcaggacgacggccggggtctggtgcttcctggctacaagtacctcggacccttcaacggactcgacaagggggagcccgtcaacgcggcggacgcagcggccctcgagcacgacaaggcctacgaccagcagctcaaagcgggtgacaatccgtacctgcggtataaccacgccgacgccgagtttcaggagcgtctgcaagaagatacgtcttttgggggcaacctcgggagagcagtcttccaggccaagaagcgggttctcgaaccttttggtctggttgaggaaggcgctaagacggctcctggaaagaaacgtccggtagagcagtcgccacaagagccagactcctcctcgggcatcggcaagacaggccagcagcccgctaaaaagagactcaattttggtcagactggcgactcagagtcagtccccgacccacaacctctcggagaacctccagcaacccccgctgctgtgggacctactacaatggcttcaggcggtggcgcaccaatggcagacaataacgaaggcgccgacggagtgggtaatgcctcaggaaattggcattgcgattccacatggctgggcgacagagtcatcaccaccagcacccgcacctgggccttgcccacctacaataaccacctctacaagcaaatctccagtgcttcaacgggggccagcaacgacaaccactacttcggctacagcaccccctgggggtattttgatttcaacagattccactgccacttttcaccacgtgactggcagcgactcatcaacaacaattggggattccggcccaagagactcaacttcaagctcttcaacatccaagtcaaggaggtcacgacgaatgatggcgtcacaaccatcgctaataaccttaccagcacggttcaagtcttctcggactcggagtaccagcttccgtacgtcctcggctctgcgcaccagggctgcctccctccgttcccggcggacgtgttcatgattccgcaatacggctacctgacgctcaacaatggcagccaagccgtgggacgttcatccttttactgcctggaatatttcccttctcagatgctgagaacgggcaacaactttaccttcagctacacctttgaggaagtgcctttccacagcagctacgcgcacagccagagcctggaccggctgatgaatcctctcatcgaccaatacctgtattacctgaacagaactcaaaatcagtccggaagtgcccaaaacaaggacttgctgtttagccgtgggtctccagctggcatgtctgttcagcccaaaaactggctacctggaccctgttatcggcagcagcgcgtttctaaaacaaaaacagacaacaacaacagcaattttacctggactggtgcttcaaaatataacctcaatgggcgtgaatccatcatcaaccctggcactgctatggcctcacacaaagacgacaaagacaagttctttcccatgagcggtgtcatgatttttggaaaagagagcgccggagcttcaaacactgcattggacaatgtcatgattacagacgaagaggaaattaaagccactaaccctgtggccaccgaaagatttgggaccgtggcagtcaatttccagagcagcagcacagaccctgcgaccggagatgtgcatgttatgggagcattacctggcatggtgtggcaagatagagacgtgtacctgcagggtcccatttgggccaaaattcctcacacagatggacactttcacccgtctcctcttatgggcggctttggactcaagcacccgcctcctcagatcctcatcaaaaacacacctgttcctgcgaatcctccggcggagttttcagctacaaagtttgcttcattcatcacccaatactccacaggacaagtgagtgtggaaattgaatgggagctgcagaaagaaaacagcaagcgctggaatcccgaagtgcagtacacatccaattatgcaaaatctgccaacgttgattttaccgtggacaacaatggactttatactgagcctcgccccattggcacccgttaccttacccgtcccctgtaa

SEQ ID NO: 1584 - DNA, 2211 bp, synthetic construct
  source 1..2211: mol_type = other DNA; note = Description of Artificial Sequence: Synthetic polynucleotide
atggctgccgatggttatcttccagattggctcgaggacaacctctctgagggcattcgcgagtggtgggacttgaaacctggagccccgaaacccaaagccaaccagcaaaagcaggacaacggccggggtctggtgcttcctggctacaagtacctcggacccttcaacggactcgacaagggggagcccgtcaacgcggcggacgcagcggccctcgagcacgacaaggcctacgaccagcagctcaaagcgggtgacaatccgtacctgcggtataaccacgccgacgccgagtttcaggagcgtctgcaagaagatacgtcttttgggggcaacctcgggcgagcagtcttccaggccaagaagcgggttctcgaaccttttggtctggttgaggaaggcgctaagacggctcctggaaagaaacgtccggtagagcagtcgccacaagagccagactcctcctcgggcatcggcaagacaggccagcagcccgctaaaaagagactcaattttggtcagactggcgactcagagtcagtccccgacccacaacctctcggagaacctccagcaacccccgctgctgtgggacctactacaatggcttcaggcggtggcgcaccaatggcagacaataacgaaggcgccgacggagtgggtaatgcctcaggaaattggcattgcgattccacatggctgggcgacagagtcatcaccaccagcacccgcacctgggccttgcccacctacaataaccacctctacaagcaaatctccagtgcttcaacgggggccagcaacgacaaccactacttcggctacagcaccccctgggggtattttgatttcaacagattccactgccacttttcaccacgtgactggcagcgactcatcaacaacaattggggattccggcccaagagactcaacttcaagctcttcaacatccaagtcaaggaggtcacgacgaatgatggcgtcacaaccatcgctaataaccttaccagcacggttcaagtcttctcggactcggagtaccagcttccgtacgtcctcggctctgcgcaccagggctgcctccctccgttcccggcggacgtgttcatgattccgcaatacggctacctgacgctcaacaatggcagccaagccgtgggacgttcatccttttactgcctggaatatttcccttctcagatgctgagaacgggcaacaactttaccttcagctacacctttgaggaagtgcctttccacagcagctacgcgcacagccagagcctggaccggctgatgaatcctctcatcgaccaatacctgtattacctgaacagaactcaaaatcagtccggaagtgcccaaaacaaggacttgctgtttagccgtgggtctccagctggcatgtctgttcagcccaaaaactggctacctggaccctgttatcggcagcagcgcgtttctaaaacaaaaacagacaacaacaacagcaattttacctggactggtgcttcaaaatataacctcaatgggcgtgaatccatcatcaaccctggcactgctatggcctcacacaaagacgacgaagacaagttctttcccatgagcggtgtcatgatttttggaaaagagagcgccggagcttcaaacactgcattggacaatgtcatgattacagacgaagaggaaattaaagccactaaccctgtggccaccgaaagatttgggaccgtggcagtcaatttccagagcagcagcacacaccctgcgaccggagatgtgcatgttatgggagcattacctggcatggtgtggcaagatagagacgtgtacctgcagggtcccatctgggccaaaattcctcacacagatggacactttcacccgtctcctcttatgggcggctttggactcaagcacccgcctcctcagatcctcatcaaaaacacgcctgttcctgcgaatcctccggcggagttttcagctacaaagtttgcttcattcatcacccaatactccacaggacaagtgagtgtggaaattgaatgggagctgcagaaagaaaacagcaagcgctggaatcccgaagtgcagtacacatccaattatgcaaaatctgccaacgttgattttaccgtggacaacaatggactttatactgagcctcgccccattggcacccgttaccttacccgtcccctgtaa

SEQ ID NO: 1585 - DNA, 2211 bp, synthetic construct
  source 1..2211: mol_type = other DNA; note = Description of Artificial Sequence: Synthetic polynucleotide
atggctgccgatggttatcttccagattggctcgaggacaacctctctgagggcattcgcgagtggtgggacttgaaacctggagccccgaaacccaaagccaaccagcaaaagcaggacgacggccggggtctggtgcttcctggctacaagtacctcggacccttcaacggactcgacaagggggagcccgtcaacgcggcggacgcagcggccctcgagcacgacaaggcctacgaccagcagctcaaagcgggtgacaatccgtacctgcggtataaccacgccgacgccgagtttcaggagcgtctgcaagaagatacgtcttttgggggcaacctcgggcgagcagtcttccaggccaaaaagcgggttctcgaaccttttggtctggttgaggaaggcgctaagacggctcctggaaagaaacgtccggtagagcagtcgccacaagagccagactcctcctcgggcatcggcaagacaggccagcagcccgctaaaaagagactcaattttggtcagactggcgactcagagtcagtccccgacccacaacctctcggagaacctccagcaacccccgctgctgtgggacctactacaatggcttcaggcggtggcgcaccaatggcagacaataacgaaggcgccgacggagtgggtaatgcctcaggaaattggcattgcgattccacatggctgggcgacagagtcatcaccaccagcacccgcacctgggccttgcccacctacaataaccacctctacaagcaaatctccagtgcttcaacgggggccagcaacgacaaccactacttcggctacagcaccccctgggggtattttgatttcaacagattccactgccacttttcaccacgtgactggcagcgactcatcaacaacaattggggattccggcccaagagactcaacttcaagctcttcaacatccaagtcaaggaggtcacgacgaatgatggcgtcacaaccatcgctaataaccttaccagcacggttcaagtcttctcggactcggagtaccagcttccgtacgtcctcggctctgcgcaccagggctgcctccctccgttcccggcggacgtgttcatgattccgcaatacggctacctgacgctcaacaatggcagccaagccgtgggacgttcatccttttattgcctggaatatttcccatcgcagatgctgagaacgggcaataactttaccttcagctacacctttgaggacgtgcctttccacagcagctacgcgcacagccagagcctggaccggctgatgaatcctctcatcgaccagtacctgtattacctgaacagaactcagaaccagtccggaagtgcccaaaacaaggacttgctgtttagccgggggtctccagctggcatgtctgttcagctcaaaaactggctacctggaccctgttatcggcagcagcgcgtttctaaaacaaaaacagacaacaacaacagcaattttacctggactggtgcttcaaaatataaccttaatgggcgtgaatccatcatcaaccctggcactgctatggcctcacacaaagacgacgaagacaagttctttcccatgagcggtgtcatgatttttggaaaagagagcgccggagcttcaaacactgcattggacaatgtcatgattacagacgaagaggaaattaaagccactaaccctgtggccaccgaaagatttgggaccgtggcagtcaatttccagagcagcagcacagaccctgcgaccggagatgtgcatgttatgggagcattacctggcatggtgtggcaagatagagacgtgtacctgcagggtcccatttgggccaaaattcctcacacagatggacactttcacccgtctcctcttatgggcggctttggactcaaacacccgcctcctcagatcctcatcaaaaacacacctgttcctgcgaatcctccggcggagttttcagctacaaagtttgcttcattcatcacccaatactccacaggacaagtgagcgtggaaattgaatgggagctgcagaaagaaaacagcaagcgctggaatcccgaagtgcagtacacatccaattatgcaaaatctgccaacgttgattttaccgtggacaacaatggactttatactgagcctcgccccattggcacccgttaccttacccgtcccctgtaa

SEQ ID NO: 1586 - DNA, 2211 bp, synthetic construct
  source 1..2211: mol_type = other DNA; note = Description of Artificial Sequence: Synthetic polynucleotide
atggctgccgatggttatcttccagattggctcgaggacaacctctctgagggcattcgcgagtggtgggacttgaaacctggagccccgaaacccaaagccaaccagcaaaagcaggacgacggccggggtctggtgcttcctggctacaagtacctcggacccttcaacggactcgacaagggggagcccgtcaacgcggcggacgcagcggccctcgagcacgacaaggcctacgaccagcagctcaaagcgggtgacaatccgtacctgcggtataaccacgccgacgccgagtttcaggagcgtctgcaagaagatacgtcttttgggggcaacctcgggcgagcagtcttccaggccaagaagcgggttctcgaaccttttggtctggttgaggaaggtgctaagacggctcctggaaagaagagaccggtagagcagtcgccccaagaaccagactcctcatcgggcatcggcaaatcaggccagcagcccgctaaaaagagactcaattttggtcagactggcgactcagagtcagtccccgacccacaacctctcggagaacctccagcaacccccgctgctgtgggacctactacaatggcttcaggcggtggcgcaccaatggcagacaataacgaaggcgccgacggagtgggtaatgcctcaggaaattggcattgcgattccacatggctgggcgacagagtcattaccaccagcacccgaacctgggccctgcccacctataacaaccacctctacaaacaaatctccagcgcttcaacgggggccagcaacgacaaccactacttcggctacagcaccccctgggggtattttgattttaacagattccactgccacttctcaccacgtgactggcagcgactcatcaacaacaattggggattccggcccaagagactcaacttcaagctcttcaacatccaagtcaaggaggtcacgacgaacgatggcgtcacgaccatcgctaataaccttaccagcacggttcaagtcttctcggactcggagtaccagttgccgtacgtcctcggctctgcgcaccagggctgcctccctccgttcccggcggacgtgttcatgattccgcagtacggctacctaacactcaacaatggcagccaggccgtgggacgttcatccttttactgcctggaatatttcccatcgcagatgctgagaacgggcaataactttaccttcagctacacattcgaggacgtgcctttccacagcagctacgcgcacagccaaagcctggaccggctgatgaatcctctcatcgaccagtacttgtattacctaaacagaactcaaaatcagtccggaagtgcccaaaacaaggacttgctgtttagccgggggtctccagctggcatgtctgttcagcccaaaaactggctacctggaccctgttatcggcagcagcgcgtttctaaaacaaaaacagacaacaacaacagcaactttacctggactggtgcttcaaaatataaccttaatgggcgtgaatctataatcaaccctggcactgctatggcttcacacaaagacgacgaagacaagttctttccaatgagcggtgtcatgatttttggcaaggagagcgccggagcttcaaacactgcattggacaatgtcatgattacagacgaagaggaaattaaagccactaaccctgtggccaccgaaagatttgggaccgtggcagtcaatttccagagcagcagcacagaccctgcgaccggagatgtgcatgttatgggagcattacctggcatggtgtggcaagatagagacgtgtacctgcagggtccaatttgggccaaaattcctcacacagatggacactttcacccgtctcctcttatgggcggctttggacttaagcacccgcctcctcagatcctcatcaaaaacacgcctgttcctgcgaatcctccggcagagttttcggctacaaagtttgcttcattcatcacccagtattccacaggacaagtgagtgtggaaattgaatgggagttgcagaaagaaaacagcaagcgttggaatcccgaagtgcagtacacatctaattatgcaaaatctgccaacgttgatttcactgtggacaacaatggactttatactgagcctcgccccattggcacccgttacctcacccgtcccctgtaa

SEQ ID NO: 1587 - DNA, 2211 bp, synthetic construct
  source 1..2211: mol_type = other DNA; note = Description of Artificial Sequence: Synthetic polynucleotide
atggctgccgatggttatcttccagattggctcgaggacaacctctctgagggcattcgcgagtggtgggacttgaaacctggagccccgaaacccaaagccaaccagcaaaagcaggacgacggccggggtctggtgcttcctggctacaagtacctcggacccttcaacggactcgacaagggggagcccgtcaacgcggcggacgcagcggccctcgagcacgacaaggcctacgaccagcagctcaaagcgggtgacaatccgtacctgcggtataaccacgccgacgccgagtttcaggagcgtctgcaagaagatacgtcttttgggggcaacctcgggcgagcagtcttccaggccaagaagagggttctcgaaccttttggtctggttgaggaaggtgctaagacggctcctggaaagaaacgtccggtagagcagtcaccccaagaaccagactcctcctcgggcattggcaaatcaggccagcagcccgctaaaaagagactcaattttggtcagactggcgactcagagtcagtccccgacccacaacctctcggagaacctccagcaacccccgctgctttgggacctactacaatggcttcaggcggtggcgcaccaatggcagacaataacgaaggcgccgacggagtgggtaatgcctcaggaaattggcattgcgattccacatggctgggcgacagagtcatcaccaccagcacccgcacctgggccttgcccacctacaataaccacctctacaagcaaatctccagtgcttcaacgggggccagcaacgacaaccactacttcggctacagcaccccctgggggtattttgatttcaacagattccactgccatttctcaccacgtgactggcagcgactcatcaacaacaactggggattccggcccaagagactcaacttcaagctcttcaacatccaagtcaaggaggtcacgacgaacgatggcgtcacgaccatcgctaataaccttaccagcacggttcaagtcttctcggactcggagtaccagcttccgtacgtcctcggctctgcgcaccagggctgcctccctccgttcccggcggacgtgttcatgattccgcagtacggctacctgacgctcaacaatggcagcaaagccgtgggacgttcatccttttactgcctggaatatttcccttctcagatgctgagaacgggcaacaactttaccttcagctacacctttgaggaagtgcctttccacagcagctacgcgcacagccagagcctggaccggctgatgaatcctctcatcgaccaatacctgtattacctgaacagaactcaaaatcagtccggaagtgcccaaaacaaggacttgctgtttagccgtgggtctccagctggcatgtctgttcagcccaaaaactggctacctggaccctgttatcggcagcagcgcgtttctaaaacaaaaacagacaacaacaacagcaattttacctggactggtgcttcaaaatataacctcaatgggcgtgaatccatcatcaaccctggcactgctatggcctcacacaaagacgacgaagacaagttctttcccatgagcggtgtcatgatttttggaaaagagagcgccggagcttcaaacactgcattggacaatgtcatgattacagacgaagaggaaattaaagccactaaccctgtggccaccgaaagatttgggaccgtggcagtcaatttccagagcagcagcacagaccctgcgaccggagatgtgcatgttatgggagcattacctggcatggtgtggcaagatagagacgtgtacctgcagggtcccatttgggccaaaattcctcacacggatggacactttcacccgtctcctcttatgggcggctttggactcaagcacccgcctcctcagatcctcatcaaaaacacacctgttcctgcgaatcctccggcagagttttcggctacaaagtttgcttcattcatcacccagtactccacaggacaagtgagcgtggaaattgaatgggagttgcagaaagaaaacagtaagcgctggaatcccgaagtgcagtacacatctaattatgcaaaatctgccaacgttgacttcactgtggacaacaatggactttatactgagcctcgccccattggcacccgttacctcacccgtcccctgtaa

SEQ ID NO: 1588 - DNA, 2970 bp, synthetic construct
  source 1..2970: mol_type = other DNA; note = Description of Artificial Sequence: Synthetic polynucleotide
agatgaccgccaaggtcgtagagtccgccaaggccattctgggcggcagcaaggtgcgcgtggaccaaaaatgcaaggcctctgcgcagatcgaccccacccccgtgatcgtcacctccaacaccaacatgtgcgccgtgattgacgggaacagcaccaccttcgagcaccagcagcccctgcaggaccggatgttcaagtttgaactcacccgccgcctcgactacgactttggcaaggtcaccaagcaggaagtcaaggactttttccggtgggcggctgatcacgtgactgacgtggctcatgagttttacgtcacaaagggtggagctaagaaaaggcccgccccctctgacgaggatataagcgagcccaagcggccgcgcgtgtcatttgcgcagccggagacgtcagacgcggaagctcccggagacttcgccgacaggtaccaaaacaaatgttctcgtcacgcgggtatgctgcagatgctctttccctgcaagacgtgcgagagaatgaatcagaattccaacgtctgcttcacgcacggtcagaaagattgcggggagtgctttcccgggtcagaatctcaaccggtttctgtcgtcagaaaaacgtatcagaaactgtgcatccttcatcagctccggggggcacccgagatcgcctgctctgcttgcgaccaactcaaccccgatttggacgattgccaatttgagcaataaatgactgaaatcaggtatggctgctgacggttatcttccagattggctcgaggacaacctctctgaaggcattcgcgagtggtgggcgctgaaacctggagctccacaacccaaggccaaccaacagcatcaggacaacggcaggggtcttgtgcttcctgggtacaagtacctcggacccttcaacggactcgacaagggagagccggtcaacgaggcagacgccgcggccctcgagcacgacaaggcctacgacaagcagctcgagcagggggacaacccgtatctcaagtacaaccacggcgacgccgagttccagcagcgcttggcgaccgacacctcttttgggggcaacctcgggcgagcagtcttccaggccaaaaagaggattctcgagcctctgggtctggttgaagagggcgttaaaacggctcctggaaagaaacgcccattagaaaagactccaaatcggccgaccaacccggactctgggaaggccccggccaagaaaaagcaaaaagacggcgaaccagccgactctgctagaaggacactcgactttgaagactctggagcaggagacggaccccctgagggatcatcttccggagaaatgtctcatgatgctgagatgcgtgcggcgccaggcggaaatgctgtcgaggcgggacaaggtgccgatggagtgggtaatgcctccggtgattggcattgcgattccacctggtcagagggccgagtcaccaccaccagcacccgaacctgggtcctacccacgtacaacaaccacctgtacctgcgaatcggaacaacggccaacagcaacacctacaacggattctccaccccctggggatactttgactttaaccgcttccactgccacttttccccacgcgactggcagcgactcatcaacaacaactggggactcaggccgaaatcgatgcgtgttaaaatcttcaacatacaggtcaaggaggtcacgacgtcaaacggcgagactacggtcgctaataaccttaccagcacggttcagatctttgcggattcgacgtatgaactcccatacgtgatggacgccggtcaggaggggagctttcctccgtttcccaacgacgtctttatggttccccaatacggatactgcggagttgtcactggaaaaaaccagaaccagacagacagaaatgccttttactgcctggaatactttccatcccaaatgctaagaactggcaacaattttgaagtcagttaccaatttgaaaaagttcctttccattcaatgtacgcgcacagccagagcctggacagaatgatgaatcctttactggatcagtacctgtggcatctgcaatcgaccactaccggaaattcccttaatcaaggaacagctaccaccacgtacgggaaaattaccactggagactttgcctactacaggaaaaactggttgcctggagcctgcattaaacaacaaaaattttcaaagaatgccaatcaaaactacaagattcccgccagcgggggagacgcccttttaaagtatgacacgcataccactctaaatgggcgatggagtaacatggctcctggacctccaatggcaaccgcaggtgccggggactcggattttagcaacagccagctgatctttgccggacccaatccgagcggtaacacgaccacatcttcaaacaatttgttgtttacctcagaagaggagattgccacaacaaacccacgagacacggacatgtttggacagattgcagataataatcaaaatgccaccaccgcccctcacatcgctaacctggacgctatgggaattgttcccggaatggtctggcaaaacagagacatctactaccagggccctatttgggccaaggtccctcacacggacggacactttcacccttcgccgctgatgggaggatttggactgaaacacccgcctccacagattttcatcaaaaacacccccgtacccgccaatcccaatactacctttagcgctgcaaggattaattcttttctgacgcagtacagcaccggacaagttgccgttcagatcgactgggaaattcagaaggagcattccaaacgctggaatcccgaagttcaatttacttcaaactacggcactcaaaattctatgctgtgggctcccgacaatgctggcaactaccacgaactccgggctattgggtcccgtttcctcacccaccacttgtaa

SEQ ID NO: 1589 - protein, 736 aa, synthetic construct
  source 1..736: note = Description of Artificial Sequence: Synthetic polypeptide
MAADGYLPDWLEDNLSEGIREWWDLKPGAPKPKANQQKQDDGRGLVLPGYKYLGPFNGLDKGEPVNAADAAALEHDKAYDQQLKAGDNPYLRYNHADAEFQERLQEDTSFGGNLGRAVFQAKKRVLEPFGLVEEGAKTAPGKKRPVEQSPQEPDSSSGIGKTGQQPAKKRLNFGQTGDSESVPDPQPLGEPPATPAAVGPTTMASGGGAPMADNNEGADGVGNASGNWHCDSTWLGDRVITTSTRTWALPTYNNHLYKQISSASTGASNDNHYFGYSTPWGYFDFNRFHCHFSPRDWQRLINNNWGFRPKRLNFKLFNIQVKEVTTSDGVTTIANNLTSTVQVFSDSEYQLPYVLGSAHQGCLPPFPADVFMIPQYGYLTLNNGSQAVGRSSFYCLEYFPSQMLRTGNNFTFSYTFEEVPFHSSYAHSQSLDRLMNPLIDQYLYYLNRTQNQSGSAQNKDLLFSRGSPAGMSVQPKNWLPGPCYRQQRVSKTKTGNNNSNFTWTGASKYNLNGHESIINPGTAMASHKDDEDKFFPMSGVMIFGKESAGASNTALDNVMITDEEEIKATNPVATERFGTVAVNFQSSSTHPATGDVHVMGALPGMVWQDRDVYLQGPIWAKIPHTDGHFHPSPLMGGFGLKHPPPQILIKNTPVPANPPAEFSATKFASFITQYSTGQVSVEIEWELQKENSKRWNPEVQYTSNYAKSANVDFTVDNNGLYTEPRPIGTRYLTRPL

SEQ ID NO: 1590 - protein, 736 aa, synthetic construct; identical to SEQ ID NO: 1589
  source 1..736: note = Description of Artificial Sequence: Synthetic polypeptide

SEQ ID NO: 1591 - protein, 733 aa, synthetic construct
  source 1..733: note = Description of Artificial Sequence: Synthetic polypeptide
MTDGYLPDWLEDNLSEGVREWWALQPGAPKPKANQQHQDNARGLVLPGYKYLGPGNGLDKGEPVNAADAAALEHDKAYDQQLKAGDNPYLKYNHADAEFQERLQEDTSFGGNLGRAVFQAKKRILEPLGLVEEAAKTAPGKKRPVEQSPAEPDSSSGIGKSGQQPARKRLNFGQTGDTESVPDPQPLGQPPAAPSGVGSTTMASGGGAPMADNNEGADGVGNSSGNWHCDSQWLGDRVITTSTRTWALPTYNNHLYKQISSQSGATNDNHYFGYSTPWGYFDFNRFHCHFSPRDWQRLINNNWGFRPKRLNFKLFNIQVKEVTQNDGTTTIANNLTSTVQVFTDSEYQLPYVLGSAHQGCLPPFPADVFMVPQYGYLTLNNGSQAVGRSSFYCLEYFPSQMLRTGNNFQFSYTFEDVPFHSSYAHSQSLDRLMNPLIDQYLYYLNRTQTASGTQQSRLLFSQAGPTSMSLQAKNWLPGPCYRQQRLSKQANDNNNSNFPWTGATKYHLNGRDSLVNPGPAMASHKDDKEKFFPMHGTLIFGKEGTNANNADLENVMITDEEEIRTTNPVATEQYGTVSNNLQNSNAGPTTGTVNHQGALPGMVWQDRDVYLQGPIWAKIPHTDGHFHPSPLMGGFGLKHPPPQIMIKNTPVPANPPTNFSAAKFASFITQYSTGQVSVEIEWELQKENSKRWNPEIQYTSNYNKSVNVDFTVDTNGVYSEPRPIGTRYLTRNL

SEQ ID NO: 1592 - protein, 736 aa, synthetic construct; identical to SEQ ID NO: 757
  source 1..736: note = Description of Artificial Sequence: Synthetic polypeptide

SEQ ID NO: 1593 - protein, 736 aa, synthetic construct
  source 1..736: note = Description of Artificial Sequence: Synthetic polypeptide
MAADGYLPDWLEDNLSEGIRKWWDLKPGAPKPKANQQKQDDGRGLVLPGYKYLGPFNGLDKGEPVNAADAAALEHDKAYDQQLKAGDNPYLRYNHADAEFQERLQEDTSFGGNLGRAVFQAKKRVLEPFGLVEEGAKTAPGKKRPVEQSPQEPDSSSGIGKTGQQPAKKRLNFGQTGDSESVPDPQPLGEPPATPAAVGPTTMASGGGAPMADNNEGADGVGNASGNWHCDSTWLGDRVITTSTRTWALPTYNNHLYKQISSASTGASNDNHYFGYSTPWGYFDFNRFHCHFSPRDWQRLINNNWGFRPKRLNFKLFNIQVKEVTTNDGVTTIANNLTSTVQVFSDSEYQLPYVLGSAHQGCLPPFPADVFMIPQYGYLTLNNGSQAVGRSSFYCLEYFPSQMLRTGNNFTFSYTFEEVPFHSSYAHSQSLDRLMNPLIDQYLYYLNRTQNQSGSAQNKDLLFSRGSPAGMSVQPKNWLPGPCYRQQRVSKTKTDNNNSNFTWTGASKYNLNGRESIINPGTAMASHKDDKDKFFPMSGVMIFGKESAGASNTALDNVMITDEEEIKATNPVATERFGTVAVNFQSSSTDPATGDVHVMGALPGMVWQDRDVYLQGPIWAKIPHTDGHFHPSPLMGGFGLKHPPPQILIKNTPVPANPPAEFSATKFASFITQYSTGQVSVEIEWELQKENSKRWNPEVQYTSNYAKSANVDFTVDNNGLYTEPRPIGTRYLTRPL

SEQ ID NO: 1594 - protein, 736 aa, synthetic construct
  source 1..736: note = Description of Artificial Sequence: Synthetic polypeptide
MAADGYLPDWLEDNLSEGIREWWDLKPGAPKPKANQQKQDNGRGLVLPGYKYLGPFNGLDKGEPVNAADAAALEHDKAYDQQLKAGDNPYLRYNHADAEFQERLQEDTSFGGNLGRAVFQAKKRVLEPFGLVEEGAKTAPGKKRPVEQSPQEPDSSSGIGKTGQQPAKKRLNFGQTGDSESVPDPQPLGEPPATPAAVGPTTMASGGGAPMADNNEGADGVGNASGNWHCDSTWLGDRVITTSTRTWALPTYNNHLYKQISSASTGASNDNHYFGYSTPWGYFDFNRFHCHFSPRDWQRLINNNWGFRPKRLNFKLFNIQVKEVTTNDGVTTIANNLTSTVQVFSDSEYQLPYVLGSAHQGCLPPFPADVFMIPQYGYLTLNNGSQAVGRSSFYCLEYFPSQMLRTGNNFTFSYTFEEVPFHSSYAHSQSLDRLMNPLIDQYLYYLNRTQNQSGSAQNKDLLFSRGSPAGMSVQPKNWLPGPCYRQQRVSKTKTDNNNSNFTWTGASKYNLNGRESIINPGTAMASHKDDEDKFFPMSGVMIFGKESAGASNTALDNVMITDEEEIKATNPVATERFGTVAVNFQSSSTHPATGDVHVMGALPGMVWQDRDVYLQGPIWAKIPHTDGHFHPSPLMGGFGLKHPPPQILIKNTPVPANPPAEFSATKFASFITQYSTGQVSVEIEWELQKENSKRWNPEVQYTSNYAKSANVDFTVDNNGLYTEPRPIGTRYLTRPL

SEQ ID NO: 1595 - protein, 736 aa, synthetic construct
  source 1..736: note = Description of Artificial Sequence: Synthetic polypeptide
MAADGYLPDWLEDNLSEGIREWWDLKPGAPKPKANQQKQDDGRGLVLPGYKYLGPFNGLDKGEPVNAADAAALEHDKAYDQQLKAGDNPYLRYNHADAEFQERLQEDTSFGGNLGRAVFQAKKRVLEPFGLVEEGAKTAPGKKRPVEQSPQEPDSSSGIGKTGQQPAKKRLNFGQTGDSESVPDPQPLGEPPATPAAVGPTTMASGGGAPMADNNEGADGVGNASGNWHCDSTWLGDRVITTSTRTWALPTYNNHLYKQISSASTGASNDNHYFGYSTPWGYFDFNRFHCHFSPRDWQRLINNNWGFRPKRLNFKLFNIQVKEVTTNDGVTTIANNLTSTVQVFSDSEYQLPYVLGSAHQGCLPPFPADVFMIPQYGYLTLNNGSQAVGRSSFYCLEYFPSQMLRTGNNFTFSYTFEDVPFHSSYAHSQSLDRLMNPLIDQYLYYLNRTQNQSGSAQNKDLLFSRGSPAGMSVQLKNWLPGPCYRQQRVSKTKTDNNNSNFTWTGASKYNLNGRESIINPGTAMASHKDDEDKFFPMSGVMIFGKESAGASNTALDNVMITDEEEIKATNPVATERFGTVAVNFQSSSTDPATGDVHVMGALPGMVWQDRDVYLQGPIWAKIPHTDGHFHPSPLMGGFGLKHPPPQILIKNTPVPANPPAEFSATKFASFITQYSTGQVSVEIEWELQKENSKRWNPEVQYTSNYAKSANVDFTVDNNGLYTEPRPIGTRYLTRPL

SEQ ID NO: 1596 - protein, 736 aa, synthetic construct
  source 1..736: note = Description of Artificial Sequence: Synthetic polypeptide
MAADGYLPDWLEDNLSEGIREWWDLKPGAPKPKANQQKQDDGRGLVLPGYKYLGPFNGLDKGEPVNAADAAALEHDKAYDQQLKAGDNPYLRYNHADAEFQERLQEDTSFGGNLGRAVFQAKKRVLEPFGLVEEGAKTAPGKKRPVEQSPQEPDSSSGIGKSGQQPAKKRLNFGQTGDSESVPDPQPLGEPPATPAAVGPTTMASGGGAPMADNNEGADGVGNASGNWHCDSTWLGDRVITTSTRTWALPTYNNHLYKQISSASTGASNDNHYFGYSTPWGYFDFNRFHCHFSPRDWQRLINNNWGFRPKRLNFKLFNIQVKEVTTNDGVTTIANNLTSTVQVFSDSEYQLPYVLGSAHQGCLPPFPADVFMIPQYGYLTLNNGSQAVGRSSFYCLEYFPSQMLRTGNNFTFSYTFEDVPFHSSYAHSQSLDRLMNPLIDQYLYYLNRTQNQSGSAQNKDLLFSRGSPAGMSVQPKNWLPGPCYRQQRVSKTKTDNNNSNFTWTGASKYNLNGRESIINPGTAMASHKDDEDKFFPMSGVMIFGKGSAGASNTALDNVMITDEEEIKATNPVATERFGTVAVNFQSSSTDPATGDVHVMGALPGMVWQDRDVYLQGPIWAKIPHTDGHFHPSPLMGGFGLKHPPPQILIKNTPVPANPPAEFSATKFASFITQYSTGQVSVEIEWELQKENSKRWNPEVQYTSNYAKSANVDFTVDNNGLYTEPRPIGTRYLTRPL

SEQ ID NO: 1597 - protein, 736 aa, synthetic construct; identical to SEQ ID NO: 688
  source 1..736: note = Description of Artificial Sequence: Synthetic polypeptide

SEQ ID NO: 1598 - protein, 742 aa, synthetic construct
  source 1..742: note = Description of Artificial Sequence: Synthetic polypeptide
MAADGYLPDWLEDNLSEGIREWWALKPGAPQPKANQQHQDNGRGLVLPGYKYLGPFNGLDKGEPVNEADAAALEHDKAYDKQLEQGDNPYLKYNHADAEFQQRLATDTSFGGNLGRAVFQAKKRILEPLGLVEEGVKTAPGKKRPLEKTPNRPTNPDSGKAPAKKKQKDGEPADSARRTLDFEDSGAGDGPPEGSSSGEMSHDAEMRAAPGGNAVEAGQGADGVGNASGDWHCDSTWSEGRVTTTSTRTWVLPTYNNHLYLRIGTTANSNTYNGFSTPWGYFDFNRFHCHFSPRDWQRLINNNWGLRPKSMRVKIFNIQVKEVTTSNGETTVANNLTSTVQIFADSTYELPYVMDAGQEGSFPPFPNDVFMVPQYGYCGVVTGKNQNQTDRNAFYCLEYFPSQMLRTGNNFEVSYQFEKVPFHSMYAHSQSLDRMMNPLLDQYLWHLQSTTTGNSLNQGTATTTYGKITTGDFAYYRKNWLPGACIKQQKFSKNANQNYKIPASGGDALLKYDTHTTLNGRWSNMAPGPPMATAGAGDSDFSNSQLIFAGPNPSGNTTTSSNNLLFTSEEEIATTNPRDTDMFGQIADNNQNATTAPHIANLDAMGIVPGMVWQNRDIYYQGPIWAKVPHTDGHFHPSPLMGGFGLKHPPPQIFIKNTPVPANPNTTFSAARINSFLTQYSTGQVAVQIDWEIQKEHSKRWNPEVQFTSNYGTQNSMLWAPDNAGNYHELRAIGSRFLTHHL

SEQ ID NO: 1599 - DNA, 2211 bp, synthetic construct
  source 1..2211: mol_type = other DNA; note = Description of Artificial Sequence: Synthetic polynucleotide
atggctgccgatggttatcttccagattggctcgaggacaacctctctgagggcattcgcgagtggtgggacttgaaacctggagccccgaagcccaaagccaaccagcaaaagcaggacgacggccggggtctggtgcttcctggctacaagtacctcggacccttcaacggactcgacaagggggagcccgtcaacgcggcggacgcagcggccctcgagcacgacaaggcctacgaccagcagctcaaagcgggtgacaatccgtacctgcggtataaccacgccgacgccgagtttcaggagcgtctgcaagaagatacgtcttttgggggcaacctcgggcgagcagtcttccaggccaagaagcgggttctcgaacctctcggtctggttgaggaaggcgctaaggcggctcctggaaagaaacgtccggtagagcagtcgccacaagagccagactcctcctcgggcatcggcaagacaggccagcagcccgctaaaaagagactcaattttggtcagactggcgactcagagtcagtccccgatccacaacctctcggagaacctccagcagccccctcaggtctgggacctaatacaatggcttcaggcggtggcgctccaatggcagacaataacgaaggcgccgacggagtgggtaattcctcgggaaattggcattgcgattccacatggctgggggacagagtcatcaccaccagcacccgaacctgggccctgcccacctacaacaaccacctctacaagcaaatctccaacggcacctcgggaggaagcaccaacgacaacacctattttggctacagcaccccctgggggtattttgacttcaacagattccactgtcacttttcaccacgtgactggcaacgactcatcaacaacaattggggattccggcccaaaagactcaacttcaagctgttcaacatccaggtcaaggaagtcacgacgaacgaaggcaccaagaccatcgccaataatctcaccagcaccgtgcaggtctttacggactcggagtaccagttaccgtacgtgctaggatccgctcaccagggatgtctgcctccgttcccggcggacgtcttcatggttcctcagtacggctatttaactttaaacaatggaagccaagccctgggacgttcctccttctactgtctggagtatttcccatcgcagatgctgagaaccggcaacaactttcagttcagctacaccttcgaggacgtgcctttccacagcagctacgcgcacagccagagcctggacaggctgatgaatcccctcatcgaccagtacctgtactacctggtcagaacgcaaacgactggaactggagggacgcagactctggcattcagccaagcgggtcctagctcaatggccaaccaggctagaaattgggtgcccggaccttgctaccggcagcagcgcgtctccacgacaaccaaccagaacaacaacagcaactttgcctggacgggagctgccaagtttaagctgaacggccgagactctctaatgaatccgggcgtggcaatggcttcccacaaggatgacgacgaccgcttcttcccttcgagcggggtcctgatttttggcaagcaaggagccgggaacgatggagtggattacagccaagtgctgattacagatgaggaagaaatcaaggctaccaaccccgtggccacagaagaatatggagcagtggccatcaacaaccaggccgccaatacgcaggcgcagaccggactcgtgcacaaccagggggtgattcccggcatggtgtggcagaatagagacgtgtacctgcagggtcccatctgggccaaaattcctcacacggacggcaactttcacccgtctcccctgatgggcggctttggactgaagcacccgcctcctcaaattctcatcaagaacacaccggttccagcggacccgccgcttaccttcaaccaggccaagctgaactctttcatcacgcagtacagcaccggacaggtcagcgtggaaatcgagtgggagctgcagaaagaaaacagcaaacgctggaatccagagattcaatacacttccaactactacaaatctacaaatgtggactttgctgtcaacacggagggggtttatagcgagcctcgccccattggcacccgttacctcacccgcaacctgtaa

SEQ ID NO: 1600 - DNA, 2592 bp, synthetic construct
  source 1..2592: mol_type = other DNA; note = Description of Artificial Sequence: Synthetic polynucleotide
ctggctgccgatggttatcttccagattggctcgaggacaacctctctgagggcattcgcgagtggtgggacttgaaacctggagccccgaagcccaaagccaaccagcaaaagcaggacgacggccggggtctggtgcttcctggctacaagtacctcggacccttcaacggactcgacaagggggagcccgtcaacgcggcggacgcagcggccctcgagcacgacaaggcctacgaccagcagctcaaagcgggtgacaatccgtacctgcggtataaccacgccgacgccgagtttcaggagcgtctgcaagaagatacgtcttttgggggcaacctcgggcgagcagtcttccaggccaagaagcgggttctcgaacctctcggtctggttgaggaaggcgctaagatggaagtgcagctccaagccagtggtggcggactggtgcaggcaggaggcagcttgaggctcagctgtgccgccagcggcttcaagatcacccactacaccatgggctggttccggcaggcccctggcaaggagagggagttcgtgagcaggattacctggggtggtgacaacaccttctacagcaacagcgtgaagggcaggttcaccatcagcagggacaacgccaagaacaccgtgtacctgcagatgaacagcctgaagcccgaggacaccgccgactactactgtgcagccggcagtaccagcaccgctacccccctgagggtggactactggggcaaaggcactcaggtgacagtgtcttcaggagggggtggcagcgctcctggaaagaaacgtccggtagagcagtcgccacaagagccagactcctcctcgggcatcggcaagacaggccagcagcccgctaaaaagagactcaattttggtcagactggcgactcagagtcagtccccgatccacaacctctcggagaacctccagcagccccctcaggtctgggacctaatacaatggcttcaggcggtggcgctccaatggcagacaataacgaaggcgccgacggagtgggtaattcctcgggaaattggcattgcgattccacatggctgggggacagagtcatcaccaccagcacccgaacctgggccctgcccacctacaacaaccacctctacaagcaaatctccaacggcacctcgggaggaagcaccaacgacaacacctattttggctacagcaccccctgggggtattttgacttcaacagattccactgtcacttttcaccacgtgactggcaacgactcatcaacaacaattggggattccggcccaaaagactcaacttcaagctgttcaacatccaggtcaaggaagtcacgacgaacgaaggcaccaagaccatcgccaataatctcaccagcaccgtgcaggtctttacggactcggagtaccagttaccgtacgtgctaggatccgctcaccagggatgtctgcctccgttcccggcggacgtcttcatggttcctcagtacggctatttaactttaaacaatggaagccaagccctgggacgttcctccttctactgtctggagtatttcccatcgcagatgctgagaaccggcaacaactttcagttcagctacaccttcgaggacgtgcctttccacagcagctacgcgcacagccagagcctggacaggctgatgaatcccctcatcgaccagtacctgtactacctggtcagaacgcaaacgactggaactggagggacgcagactctggcattcagccaagcgggtcctagctcaatggccaaccaggctagaaattgggtgcccggaccttgctaccggcagcagcgcgtctccacgacaaccaaccagaacaacaacagcaactttgcctggacgggagctgccaagtttaagctgaacggccgagactctctaatgaatccgggcgtggcaatggcttcccacaaggatgacgacgaccgcttcttcccttcgagcggggtcctgatttttggcaagcaaggagccgggaacgatggagtggattacagccaagtgctgattacagatgaggaagaaatcaaggctaccaaccccgtggccacagaagaatatggagcagtggccatcaacaaccaggccgccaatacgcaggcgcagaccggactcgtgcacaaccagggggtgattcccggcatggtgtggcagaatagagacgtgtacctgcagggtcccatctgggccaaaattcctcacacggacggcaactttcacccgtctcccctgatgggcggctttggactgaagcacccgcctcctcaaattctcatcaagaacacaccggttccagcggacccgccgcttaccttcaaccaggccaagctgaactctttcatcacgcagtacagcaccggacaggtcagcgtggaaatcgagtgggagctgcagaaagaaaacagcaaacgctggaatccagagattcaatacacttccaactactacaaatctacaaatgtggactttgctgtcaacacggagggggtttatagcgagcctcgccccattggcacccgttacctcacccgcaacctgtaa

SEQ ID NO: 1601 - DNA, 2601 bp, synthetic construct
  source 1..2601: mol_type = other DNA; note = Description of Artificial Sequence: Synthetic polynucleotide
ctggctgccgatggttatcttccagattggctcgaggacaacctctctgagggcattcgcgagtggtgggacttgaaacctggagccccgaagcccaaagccaaccagcaaaagcaggacgacggccggggtctggtgcttcctggctacaagtacctcggacccttcaacggactcgacaagggggagcccgtcaacgcggcggacgcagcggccctcgagcacgacaaggcctacgaccagcagctcaaagcgggtgacaatccgtacctgcggtataaccacgccgacgccgagtttcaggagcgtctgcaagaagatacgtcttttgggggcaacctcgggcgagcagtcttccaggccaagaagcgggttctcgaacctctcggtctggttgaggaaggcgctaagatggaggtgcagctgcaggcttctggaggaggactggtgcaggctggagggagtctgaggctgtcttgcagtgcctcagtgaggactttctccatctacgccatgggctggtttaggcaggctcccgggaaggagcgcgaattcgtggccggaatcaaccggtctggcgacgtgaccaagtacgctgatttcgtgaaaggccggtttagcatttccagagacaacgccaagaatatggtgtatctgcagatgaactccctgaaacctgaagacacagctctgtactattgtgccgctacttgggcctacgataccgtgggggctctgacatcaggatataatttttggggccaggggacccaggtgacagtgagctccggaggaggaggaagcgctcctggaaagaaacgtccggtagagcagtcgccacaagagccagactcctcctcgggcatcggcaagacaggccagcagcccgctaaaaagagactcaattttggtcagactggcgactcagagtcagtccccgatccacaacctctcggagaacctccagcagccccctcaggtctgggacctaatacaatggcttcaggcggtggcgctccaatggcagacaataacgaaggcgccgacggagtgggtaattcctcgggaaattggcattgcgattccacatggctgggggacagagtcatcaccaccagcacccgaacctgggccctgcccacctacaacaaccacctctacaagcaaatctccaacggcacctcgggaggaagcaccaacgacaacacctattttggctacagcaccccctgggggtattttgacttcaacagattccactgtcacttttcaccacgtgactggcaacgactcatcaacaacaattggggattccggcccaaaagactcaacttcaagctgttcaacatccaggtcaaggaagtcacgacgaacgaaggcaccaagaccatcgccaataatctcaccagcaccgtgcaggtctttacggactcggagtaccagttaccgtacgtgctaggatccgctcaccagggatgtctgcctccgttcccggcggacgtcttcatggttcctcagtacggctatttaactttaaacaatggaagccaagccctgggacgttcctccttctactgtctggagtatttcccatcgcagatgctgagaaccggcaacaactttcagttcagctacaccttcgaggacgtgcctttccacagcagctacgcgcacagccagagcctggacaggctgatgaatcccctcatcgaccagtacctgtactacctggtcagaacgcaaacgactggaactggagggacgcagactctggcattcagccaagcgggtcctagctcaatggccaaccaggctagaaattgggtgcccggaccttgctaccggcagcagcgcgtctccacgacaaccaaccagaacaacaacagcaactttgcctggacgggagctgccaagtttaagctgaacggccgagactctctaatgaatccgggcgtggcaatggcttcccacaaggatgacgacgaccgcttcttcccttcgagcggggtcctgatttttggcaagcaaggagccgggaacgatggagtggattacagccaagtgctgattacagatgaggaagaaatcaaggctaccaaccccgtggccacagaagaatatggagcagtggccatcaacaaccaggccgccaatacgcaggcgcagaccggactcgtgcacaaccagggggtgattcccggcatggtgtggcagaatagagacgtgtacctgcagggtcccatctgggccaaaattcctcacacggacggcaactttcacccgtctcccctgatgggcggctttggactgaagcacccgcctcctcaaattctcatcaagaacacaccggttccagcggacccgccgcttaccttcaaccaggccaagctgaactctttcatcacgcagtacagcaccggacaggtcagcgtggaaatcgagtgggagctgcagaaagaaaacagcaaacgctggaatccagagattcaatacacttccaactactacaaatctacaaatgtggactttgctgtcaacacggagggggtttatagcgagcctcgccccattggcacccgttacctcacccgcaacctgtaa

SEQ ID NO: 1602 - DNA, 2367 bp, synthetic construct
  source 1..2367: mol_type = other DNA; note = Description of Artificial Sequence: Synthetic polynucleotide
ctggctgccgatggttatcttccagattggctcgaggacaacctctctgagggcattcgcgagtggtgggacttgaaacctggagccccgaagcccaaagccaaccagcaaaagcaggacgacggccggggtctggtgcttcctggctacaagtacctcggacccttcaacggactcgacaagggggagcccgtcaacgcggcggacgcagcggccctcgagcacgacaaggcctacgaccagcagctcaaagcgggtgacaatccgtacctgcggtataaccacgccgacgccgagtttcaggagcgtctgcaagaagatacgtcttttgggggcaacctcgggcgagcagtcttccaggccaagaagcgggttctcgaacctctcggtctggttgaggaaggcgctaagatgccaagcagtgtaatcgatgcgctgcagtacaagctggagggcaccacgaggctgaccaggaagaggggtctgaagctggccacggccctcagccttagcaataagttcgtagagggcagccccagcggcggcggcggcagcggcggcggcggcagcgctcctggaaagaaacgtccggtagagcagtcgccacaagagccagactcctcctcgggcatcggcaagacaggccagcagcccgctaaaaagagactcaattttggtcagactggcgactcagagtcagtccccgatccacaacctctcggagaacctccagcagccccctcaggtctgggacctaatacaatggcttcaggcggtggcgctccaatggcagacaataacgaaggcgccgacggagtgggtaattcctcgggaaattggcattgcgattccacatggctgggggacagagtcatcaccaccagcacccgaacctgggccctgcccacctacaacaaccacctctacaagcaaatctccaacggcacctcgggaggaagcaccaacgacaacacctattttggctacagcaccccctgggggtattttgacttcaacagattccactgtcacttttcaccacgtgactggcaacgactcatcaacaacaattggggattccggcccaaaagactcaacttcaagctgttcaacatccaggtcaaggaagtcacgacgaacgaaggcaccaagaccatcgccaataatctcaccagcaccgtgcaggtctttacggactcggagtaccagttaccgtacgtgctaggatccgctcaccagggatgtctgcctccgttcccggcggacgtcttcatggttcctcagtacggctatttaactttaaacaatggaagccaagccctgggacgttcctccttctactgtctggagtatttcccatcgcagatgctgagaaccggcaacaactttcagttcagctacaccttcgaggacgtgcctttccacagcagctacgcgcacagccagagcctggacaggctgatgaatcccctcatcgaccagtacctgtactacctggtcagaacgcaaacgactggaactggagggacgcagactctggcattcagccaagcgggtcctagctcaatggccaaccaggctagaaattgggtgcccggaccttgctaccggcagcagcgcgtctccacgacaaccaaccagaacaacaacagcaactttgcctggacgggagctgccaagtttaagctgaacggccgagactctctaatgaatccgggcgtggcaatggcttcccacaaggatgacgacgaccgcttcttcccttcgagcggggtcctgatttttggcaagcaaggagccgggaacgatggagtggattacagccaagtgctgattacagatgaggaagaaatcaaggctaccaaccccgtggccacagaagaatatggagcagtggccatcaacaaccaggccgccaatacgcaggcgcagaccggactcgtgcacaaccagggggtgattcccggcatggtgtggcagaatagagacgtgtacctgcagggtcccatctgggccaaaattcctcacacggacggcaactttcacccgtctcccctgatgggcggctttggactgaagcacccgcctcctcaaattctcatcaagaacacaccggttccagcggacccgccgcttaccttcaaccaggccaagctgaactctttcatcacgcagtacagcaccggacaggtcagcgtggaaatcgagtgggagctgcagaaagaaaacagcaaacgctggaatccagagattcaatacacttccaactactacaaatctacaaatgtggactttgctgtcaacacggagggggtttatagcgagcctcgccccattggcacccgttacctcacccgcaacctgtaa

SEQ ID NO: 1603 - DNA, 2328 bp, synthetic construct
  source 1..2328: mol_type = other DNA; note = Description of Artificial Sequence: Synthetic polynucleotide
ctggctgccgatggttatcttccagattggctcgaggacaacctctctgagggcattcgcgagtggtgggacttgaaacctggagccccgaagcccaaagccaaccagcaaaagcaggacgacggccggggtctggtgcttcctggctacaagtacctcggacccttcaacggactcgacaagggggagcccgtcaacgcggcggacgcagcggccctcgagcacgacaaggcctacgaccagcagctcaaagcgggtgacaatccgtacctgcggtataaccacgccgacgccgagtttcaggagcgtctgcaagaagatacgtcttttgggggcaacctcgggcgagcagtcttccaggccaagaagcgggttctcgaacctctcggtctggttgaggaaggcgctaagatgtataccatctggatgcccgagaaccccaggcccggtaccccctgcgacatcttcaccaacagcaggggcaagcgagccagcaacggcggcggcggcggcagcggcggcggcggcagcgctcctggaaagaaacgtccggtagagcagtcgccacaagagccagactcctcctcgggcatcggcaagacaggccagcagcccgctaaaaagagactcaattttggtcagactggcgactcagagtcagtccccgatccacaacctctcggagaacctccagcagccccctcaggtctgggacctaatacaatggcttcaggcggtggcgctccaatggcagacaataacgaaggcgccgacggagtgggtaattcctcgggaaattggcattgcgattccacatggctgggggacagagtcatcaccaccagcacccgaacctgggccctgcccacctacaacaaccacctctacaagcaaatctccaacggcacctcgggaggaagcaccaacgacaacacctattttggctacagcaccccctgggggtattttgacttcaacagattccactgtcacttttcaccacgtgactggcaacgactcatcaacaacaattggggattccggcccaaaagactcaacttcaagctgttcaacatccaggtcaaggaagtcacgacgaacgaaggcaccaagaccatcgccaataatctcaccagcaccgtgcaggtctttacggactcggagtaccagttaccgtacgtgctaggatccgctcaccagggatgtctgcctccgttcccggcggacgtcttcatggttcctcagtacggctatttaactttaaacaatggaagccaagccctgggacgttcctccttctactgtctggagtatttcccatcgcagatgctgagaaccggcaacaactttcagttcagctacaccttcgaggacgtgcctttccacagcagctacgcgcacagccagagcctggacaggctgatgaatcccctcatcgaccagtacctgtactacctggtcagaacgcaaacgactggaactggagggacgcagactctggcattcagccaagcgggtcctagctcaatggccaaccaggctagaaattgggtgcccggaccttgctaccggcagcagcgcgtctccacgacaaccaaccagaacaacaacagcaactttgcctggacgggagctgccaagtttaagctgaacggccgagactctctaatgaatccgggcgtggcaatggcttcccacaaggatgacgacgaccgcttcttcccttcgagcggggtcctgatttttggcaagcaaggagccgggaacgatggagtggattacagccaagtgctgattacagatgaggaagaaatcaaggctaccaaccccgtggccacagaagaatatggagcagtggccatcaacaaccaggccgccaatacgcaggcgcagaccggactcgtgcacaaccagggggtgattcccggcatggtgtggcagaatagagacgtgtacctgcagggtcccatctgggccaaaattcctcacacggacggcaactttcacccgtctcccctgatgggcggctttggactgaagcacccgcctcctcaaattctcatcaagaacacaccggttccagcggacccgccgcttaccttcaaccaggccaagctgaactctttcatcacgcagtacagcaccggacaggtcagcgtggaaatcgagtgggagctgcagaaagaaaacagcaaacgctggaatccagagattcaatacacttccaactactacaaatctacaaatgtggactttgctgtcaacacggagggggtttatagcgagcctcgccccattggcacccgttacctcacccgcaacctgtaa

SEQ ID NO: 1604 - DNA, 2298 bp, synthetic construct
  source 1..2298: mol_type = other DNA; note = Description of Artificial Sequence: Synthetic polynucleotide
ctggctgccgatggttatcttccagattggctcgaggacaacctctctgagggcattcgcgagtggtgggacttgaaacctggagccccgaagcccaaagccaaccagcaaaagcaggacgacggccggggtctggtgcttcctggctacaagtacctcggacccttcaacggactcgacaagggggagcccgtcaacgcggcggacgcagcggccctcgagcacgacaaggcctacgaccagcagctcaaagcgggtgacaatccgtacctgcggtataaccacgccgacgccgagtttcaggagcgtctgcaagaagatacgtcttttgggggcaacctcgggcgagcagtcttccaggccaagaagcgggttctcgaacctctcggtctggttgaggaaggcgctaagatgaccttcttctacggcggcagcaggggcaagaggaacaacttcaagaccgaggagtacggcggcggcggcagcggcggcggcggcagcgctcctggaaagaaacgtccggtagagcagtcgccacaagagccagactcctcctcgggcatcggcaagacaggccagcagcccgctaaaaagagactcaattttggtcagactggcgactcagagtcagtccccgatccacaacctctcggagaacctccagcagccccctcaggtctgggacctaatacaatggcttcaggcggtggcgctccaatggcagacaataacgaaggcgccgacggagtgggtaattcctcgggaaattggcattgcgattccacatggctgggggacagagtcatcaccaccagcacccgaacctgggccctgcccacctacaacaaccacctctacaagcaaatctccaacggcacctcgggaggaagcaccaacgacaacacctattttggctacagcaccccctgggggtattttgacttcaacagattccactgtcacttttcaccacgtgactggcaacgactcatcaacaacaattggggattccggcccaaaagactcaacttcaagctgttcaacatccaggtcaaggaagtcacgacgaacgaaggcaccaagaccatcgccaataatctcaccagcaccgtgcaggtctttacggactcggagtaccagttaccgtacgtgctaggatccgctcaccagggatgtctgcctccgttcccggcggacgtcttcatggttcctcagtacggctatttaactttaaacaatggaagccaagccctgggacgttcctccttctactgtctggagtatttcccatcgcagatgctgagaaccggcaacaactttcagttcagctacaccttcgaggacgtgcctttccacagcagctacgcgcacagccagagcctggacaggctgatgaatcccctcatcgaccagtacctgtactacctggtcagaacgcaaacgactggaactggagggacgcagactctggcattcagccaagcgggtcctagctcaatggccaaccaggctagaaattgggtgcccggaccttgctaccggcagcagcgcgtctccacgacaaccaaccagaacaacaacagcaactttgcctggacgggagctgccaagtttaagctgaacggccgagactctctaatgaatccgggcgtggcaatggcttcccacaaggatgacgacgaccgcttcttcccttcgagcggggtcctgatttttggcaagcaaggagccgggaacgatggagtggattacagccaagtgctgattacagatgaggaagaaatcaaggctaccaaccccgtggccacagaagaatatggagcagtggccatcaacaaccaggccgccaatacgcaggcgcagaccggactcgtgcacaaccagggggtgattcccggcatggtgtggcagaatagagacgtgtacctgcagggtcccatctgggccaaaattcctcacacggacggcaactttcacccgtctcccctgatgggcggctttggactgaagcacccgcctcctcaaattctcatcaagaacacaccggttccagcggacccgccgcttaccttcaaccaggccaagctgaactctttcatcacgcagtacagcaccggacaggtcagcgtggaaatcgagtgggagctgcagaaagaaaacagcaaacgctggaatccagagattcaatacacttccaactactacaaatctacaaatgtggactttgctgtcaacacggagggggtttatagcgagcctcgccccattggcacccgttacctcacccgcaacctgtaa

SEQ ID NO: 1605 - DNA, 2211 bp, synthetic construct
  source 1..2211: mol_type = other DNA; note = Description of Artificial Sequence: Synthetic polynucleotide
atggctgccgatggttatcttccagattggctcgaggacaaccttagtgaaggaattcgcgagtggtgggctttgaaacctggagcccctcaacccaaggcaaatcaacaacatcaagacaacgctcgaggtcttgtgcttccgggttacaaataccttggacccggcaacggactcgacaagggggagccggtcaacgcagcagacgcggcggccctcgagcacgacaaggcctacgaccagcagctcaaggccggagacaacccgtacctcaagtacaaccacgccgacgccgagttccaggagcggctcaaagaagatacgtcttttgggggcaacctcgggcgagcagtcttccaggccaaaaagaggcttcttgaacctcttggtctggttgaggaagcggctaaggcggctcctggaaagaagaggcctgtagagcagtctcctcaggaaccggactcctccgcgggtattggcaaatcgggtgcacagcccgctaaaaagagactcaatttcggtcagactggcgacacagagtcagtcccagaccctcaaccaatcggagaacctcccgcagccccctcaggtgtgggatctcttacaatggcttcaggtggtggcgcaccagtggcagacaataacgaaggtgccgatggagtgggtagttcctcgggaaattggcattgcgattcccaatggctgggggacagagtcatcaccaccagcacccgaacctgggccctgcccacctacaacaatcacctctacaagcaaatctccaacagcacatctggaggatcttcaaatgacaacgcctacttcggctacagcaccccctgggggtattttgacttcaacagattccactgccacttctcaccacgtgactggcagcgactcatcaacaacaactggggattccggcctaagcgactcaacttcaagctcttcaacattcaggtcaaagaggttacggacaacaatggagtcaagaccatcgccaataaccttaccagcacggtccaggtcttcacggactcagactatcagctcccgtacgtgctcgggtcggctcacgagggctgcctcccgccgttcccagcggacgttttcatgattcctcagtacgggtatctgacgcttaatgatggaagccaggccgtgggtcgttcgtccttttactgcctggaatatttcccgtcgcaaatgctaagaacgggtaacaacttccagttcaactacgagtttgagaacgtacctttccatagcagctacgctcacagccaaagcctggaccgactaatgaatccactcatcgaccaatacttgtactatctctcaaagactattaacgattctggacagaatcaacaaacgctaaaattcagtgtggccggacccagcaacatggctgtccagggaagaaactacatacctggacccagctaccgacaacaacgtgtctcaaccactgtgactcaaaacaacaacagcgaatttgcttggcctggagcttcttcttgggctctcaatggacgtaatagcttgatgaatcctggacctgctatggccagccacaaagaaggagaggaccgtttctttcctttgtctggatctttaatttttggcaaacaaggaactggaagagacaacgtggatgcggacgaagtcatgataaccaacgaagaagaaattaaaactactaacccggtagcaacggagtcctatggacaagtggccataaaccaccagagtgcccaagcacaggcgcagaccggctgggttcaaaaccaaggaatacttccgggtatggtttggcaggacagagatgtgtacctgcaaggacccatttgggccaaaattcctcacacggacggcaactttcacccttctccgctgatgggagggtttggaatgaagcacccgcctcctcagatcctcatcaaaaacacacctgtacctgcggatcctccaacggccttcaacaaggacaagctgaactctttcatcacccagtattctactggccaagtcagcgtggagatcgagtgggagctgcagaaggaaaacagcaagcgctggaacccggagatccagtacacttccaactattacaagtctaataatgttgaatttgctgttaatactgaaggtgtatatagtgaaccccgccccattggcaccagatacctgactcgtaatctgtaa

SEQ ID NO: 1606 - DNA, 2277 bp, synthetic construct
  source 1..2277: mol_type = other DNA; note = Description of Artificial Sequence: Synthetic polynucleotide
ctggctgccgatggttatcttccagattggctcgaggacaaccttagtgaaggaattcgcgagtggtgggctttgaaacctggagcccctcaacccaaggcaaatcaacaacatcaagacaacgctcgaggtcttgtgcttccgggttacaaataccttggacccggcaacggactcgacaagggggagccggtcaacgcagcagacgcggcggccctcgagcacgacaaggcctacgaccagcagctcaaggccggagacaacccgtacctcaagtacaaccacgccgacgccgagttccaggagcggctcaaagaagatacgtcttttgggggcaacctcgggcgagcagtcttccaggccaaaaagaggcttcttgaacctcttggtctggttgaggaagcggctaagatgaacaaccagaagatcgtgaacctgaaggagaaggtggcccagctggaggccggcggcggcggcagcgctcctggaaagaagaggcctgtagagcagtctcctcaggaaccggactcctccgcgggtattggcaaatcgggtgcacagcccgctaaaaagagactcaatttcggtcagactggcgacacagagtcagtcccagaccctcaaccaatcggagaacctcccgcagccccctcaggtgtgggatctcttacaatggcttcaggtggtggcgcaccagtggcagacaataacgaaggtgccgatggagtgggtagttcctcgggaaattggcattgcgattcccaatggctgggggacagagtcatcaccaccagcacccgaacctgggccctgcccacctacaacaatcacctctacaagcaaatctccaacagcacatctggaggatcttcaaatgacaacgcctacttcggctacagcaccccctgggggtattttgacttcaacagattccactgccacttctcaccacgtgactggcagcgactcatcaacaacaactggggattccggcctaagcgactcaacttcaagctcttcaacattcaggtcaaagaggttacggacaacaatggagtcaagaccatcgccaataaccttaccagcacggtccaggtcttcacggactcagactatcagctcccgtacgtgctcgggtcggctcacgagggctgcctcccgccgttcccagcggacgttttcatgattcctcagtacgggtatctgacgcttaatgatggaagccaggccgtgggtcgttcgtccttttactgcctggaatatttcccgtcgcaaatgctaagaacgggtaacaacttccagttcaactacgagtttgagaacgtacctttccatagcagctacgctcacagccaaagcctggaccgactaatgaatccactcatcgaccaatacttgtactatctctcaaagactattaacgattctggacagaatcaacaaacgctaaaattcagtgtggccggacccagcaacatggctgtccagggaagaaactacatacctggacccagctaccgacaacaacgtgtctcaaccactgtgactcaaaacaacaacagcgaatttgcttggcctggagcttcttcttgggctctcaatggacgtaatagcttgatgaatcctggacctgctatggccagccacaaagaaggagaggaccgtttctttcctttgtctggatctttaatttttggcaaacaaggaactggaagagacaacgtggatgcggacgaagtcatgataaccaacgaagaagaaattaaaactactaacccggtagcaacggagtcctatggacaagtggccataaaccaccagagtgcccaagcacaggcgcagaccggctgggttcaaaaccaaggaatacttccgggtatggtttggcaggacagagatgtgtacctgcaaggacccatttgggccaaaattcctcacacggacggcaactttcacccttctccgctgatgggagggtttggaatgaagcacccgcctcctcagatcctcatcaaaaacacacctgtacctgcggatcctccaacggccttcaacaaggacaagctgaactctttcatcacccagtattctactggccaagtcagcgtggagatcgagtgggagctgcagaaggaaaacagcaagcgctggaacccggagatccagtacacttccaactattacaagtctaataatgttgaatttgctgttaatactgaaggtgtatatagtgaaccccgccccattggcaccagatacctgactcgtaatctgtaa

SEQ ID NO: 1607 - DNA, 2313 bp, synthetic construct
  source 1..2313: mol_type = other DNA; note = Description of Artificial Sequence: Synthetic polynucleotide
ctggctgccgatggttatcttccagattggctcgaggacaaccttagtgaaggaattcgcgagtggtgggctttgaaacctggagcccctcaacccaaggcaaatcaacaacatcaagacaacgctcgaggtcttgtgcttccgggttacaaataccttggacccggcaacggactcgacaagggggagccggtcaacgcagcagacgcggcggccctcgagcacgacaaggcctacgaccagcagctcaaggccggagacaacccgtacctcaagtacaaccacgccgacgccgagttccaggagcggctcaaagaagatacgtcttttgggggcaacctcgggcgagcagtcttccaggccaaaaagaggcttcttgaacctcttggtctggttgaggaagcggctaagatgtataccatctggatgcccgagaaccccaggcccggtaccccctgcgacatcttcaccaacagcaggggcaagcgagccagcaacggcggcggcggcggcagcgctcctggaaagaagaggcctgtagagcagtctcctcaggaaccggactcctccgcgggtattggcaaatcgggtgcacagcccgctaaaaagagactcaatttcggtcagactggcgacacagagtcagtcccagaccctcaaccaatcggagaacctcccgcagccccctcaggtgtgggatctcttacaatggcttcaggtggtggcgcaccagtggcagacaataacgaaggtgccgatggagtgggtagttcctcgggaaattggcattgcgattcccaatggctgggggacagagtcatcaccaccagcacccgaacctgggccctgcccacctacaacaatcacctctacaagcaaatctccaacagcacatctggaggatcttcaaatgacaacgcctacttcggctacagcaccccctgggggtattttgacttcaacagattccactgccacttctcaccacgtgactggcagcgactcatcaacaacaactggggattccggcctaagcgactcaacttcaagctcttcaacattcaggtcaaagaggttacggacaacaatggagtcaagaccatcgccaataaccttaccagcacggtccaggtcttcacggactcagactatcagctcccgtacgtgctcgggtcggctcacgagggctgcctcccgccgttcccagcggacgttttcatgattcctcagtacgggtatctgacgcttaatgatggaagccaggccgtgggtcgttcgtccttttactgcctggaatatttcccgtcgcaaatgctaagaacgggtaacaacttccagttcaactacgagtttgagaacgtacctttccatagcagctacgctcacagccaaagcctggaccgactaatgaatccactcatcgaccaatacttgtactatctctcaaagactattaacgattctggacagaatcaacaaacgctaaaattcagtgtggccggacccagcaacatggctgtccagggaagaaactacatacctggacccagctaccgacaacaacgtgtctcaaccactgtgactcaaaacaacaacagcgaatttgcttggcctggagcttcttcttgggctctcaatggacgtaatagcttgatgaatcctggacctgctatggccagccacaaagaaggagaggaccgtttctttcctttgtctggatctttaatttttggcaaacaaggaactggaagagacaacgtggatgcggacgaagtcatgataaccaacgaagaagaaattaaaactactaacccggtagcaacggagtcctatggacaagtggccataaaccaccagagtgcccaagcacaggcgcagaccggctgggttcaaaaccaaggaatacttccgggtatggtttggcaggacagagatgtgtacctgcaaggacccatttgggccaaaattcctcacacggacggcaactttcacccttctccgctgatgggagggtttggaatgaagcacccgcctcctcagatcctcatcaaaaacacacctgtacctgcggatcctccaacggccttcaacaaggacaagctgaactctttcatcacccagtattctactggccaagtcagcgtggagatcgagtgggagctgcagaaggaaaacagcaagcgctggaacccggagatccagtacacttccaactattacaagtctaataatgttgaatttgctgttaatactgaaggtgtatatagtgaaccccgccccattggcaccagatacctgactcgtaatctgtaa

SEQ ID NO: 1608 - DNA, 2283 bp, synthetic construct
  source 1..2283: mol_type = other DNA; note = Description of Artificial Sequence: Synthetic polynucleotide
ctggctgccgatggttatcttccagattggctcgaggacaaccttagtgaaggaattcgcgagtggtgggctttgaaacctggagcccctcaacccaaggcaaatcaacaacatcaagacaacgctcgaggtcttgtgcttccgggttacaaataccttggacccggcaacggactcgacaagggggagccggtcaacgcagcagacgcggcggccctcgagcacgacaaggcctacgaccagcagctcaaggccggagacaacccgtacctcaagtacaaccacgccgacgccgagttccaggagcggctcaaagaagatacgtcttttgggggcaacctcgggcgagcagtcttccaggccaaaaagaggcttcttgaacctcttggtctggttgaggaagcggctaagatgaccttcttctacggcggcagcaggggcaagaggaacaacttcaagaccgaggagtacggcggcggcggcagcgctcctggaaagaagaggcctgtagagcagtctcctcaggaaccggactcctccgcgggtattggcaaatcgggtgcacagcccgctaaaaagagactcaatttcggtcagactggcgacacagagtcagtcccagaccctcaaccaatcggagaacctcccgcagccccctcaggtgtgggatctcttacaatggcttcaggtggtggcgcaccagtggcagacaataacgaaggtgccgatggagtgggtagttcctcgggaaattggcattgcgattcccaatggctgggggacagagtcatcaccaccagcacccgaacctgggccctgcccacctacaacaatcacctctacaagcaaatctccaacagcacatctggaggatcttcaaatgacaacgcctacttcggctacagcaccccctgggggtattttgacttcaacagattccactgccacttctcaccacgtgactggcagcgactcatcaacaacaactggggattccggcctaagcgactcaacttcaagctcttcaacattcaggtcaaagaggttacggacaacaatggagtcaagaccatcgccaataaccttaccagcacggtccaggtcttcacggactcagactatcagctcccgtacgtgctcgggtcggctcacgagggctgcctcccgccgttcccagcggacgttttcatgattcctcagtacgggtatctgacgcttaatgatggaagccaggccgtgggtcgttcgtccttttactgcctggaatatttcccgtcgcaaatgctaagaacgggtaacaacttccagttcaactacgagtttgagaacgtacctttccatagcagctacgctcacagccaaagcctggaccgactaatgaatccactcatcgaccaatacttgtactatctctcaaagactattaacgattctggacagaatcaacaaacgctaaaattcagtgtggccggacccagcaacatggctgtccagggaagaaactacatacctggacccagctaccgacaacaacgtgtctcaaccactgtgactcaaaacaacaacagcgaatttgcttggcctggagcttcttcttgggctctcaatggacgtaatagcttgatgaatcctggacctgctatggccagccacaaagaaggagaggaccgtttctttcctttgtctggatctttaatttttggcaaacaaggaactggaagagacaacgtggatgcggacgaagtcatgataaccaacgaagaagaaattaaaactactaacccggtagcaacggagtcctatggacaagtggccataaaccaccagagtgcccaagcacaggcgcagaccggctgggttcaaaaccaaggaatacttccgggtatggtttggcaggacagagatgtgtacctgcaaggacccatttgggccaaaattcctcacacggacggcaactttcacccttctccgctgatgggagggtttggaatgaagcacccgcctcctcagatcctcatcaaaaacacacctgtacctgcggatcctccaacggccttcaacaaggacaagctgaactctttcatcacccagtattctactggccaagtcagcgtggagatcgagtgggagctgcagaaggaaaacagcaagcgctggaacccggagatccagtacacttccaactattacaagtctaataatgttgaatttgctgttaatactgaaggtgtatatagtgaaccccgccccattggcaccagatacctgactcgtaatctgtaa

SEQ ID NO: 1609 - DNA, 2283 bp, synthetic construct
  source 1..2283: mol_type = other DNA; note = Description of Artificial Sequence: Synthetic polynucleotide
ctggctgccgatggttatcttccagattggctcgaggacaaccttagtgaaggaattcgcgagtggtgggctttgaaacctggagcccctcaacccaaggcaaatcaacaacatcaagacaacgctcgaggtcttgtgcttccgggttacaaataccttggacccggcaacggactcgacaagggggagccggtcaacgcagcagacgcggcggccctcgagcacgacaaggcctacgaccagcagctcaaggccggagacaacccgtacctcaagtacaaccacgccgacgccgagttccaggagcggctcaaagaagatacgtcttttgggggcaacctcgggcgagcagtcttccaggccaaaaagaggcttcttgaacctcttggtctggttgaggaagcggctaagatggcagctgcggccgccgcggctgcagcggctgcagccgccgcagctgcggctgcagcgggcggcggcggcagcgctcctggaaagaagaggcctgtagagcagtctcctcaggaaccggactcctccgcgggtattggcaaatcgggtgcacagcccgctaaaaagagactcaatttcggtcagactggcgacacagagtcagtcccagaccctcaaccaatcggagaacctcccgcagccccctcaggtgtgggatctcttacaatggcttcaggtggtggcgcaccagtggcagacaataacgaaggtgccgatggagtgggtagttcctcgggaaattggcattgcgattcccaatggctgggggacagagtcatcaccaccagcacccgaacctgggccctgcccacctacaacaatcacctctacaagcaaatctccaacagcacatctggaggatcttcaaatgacaacgcctacttcggctacagcaccccctgggggtattttgacttcaacagattccactgccacttctcaccacgtgactggcagcgactcatcaacaacaactggggattccggcctaagcgactcaacttcaagctcttcaacattcaggtcaaagaggttacggacaacaatggagtcaagaccatcgccaataaccttaccagcacggtccaggtcttcacggactcagactatcagctcccgtacgtgctcgggtcggctcacgagggctgcctcccgccgttcccagcggacgttttcatgattcctcagtacgggtatctgacgcttaatgatggaagccaggccgtgggtcgttcgtccttttactgcctggaatatttcccgtcgcaaatgctaagaacgggtaacaacttccagttcaactacgagtttgagaacgtacctttccatagcagctacgctcacagccaaagcctggaccgactaatgaatccactcatcgaccaatacttgtactatctctcaaagactattaacgattctggacagaatcaacaaacgctaaaattcagtgtggccggacccagcaacatggctgtccagggaagaaactacatacctggacccagctaccgacaacaacgtgtctcaaccactgtgactcaaaacaacaacagcgaatttgcttggcctggagcttcttcttgggctctcaatggacgtaatagcttgatgaatcctggacctgctatggccagccacaaagaaggagaggaccgtttctttcctttgtctggatctttaatttttggcaaacaaggaactggaagagacaacgtggatgcggacgaagtcatgataaccaacgaagaagaaattaaaactactaacccggtagcaacggagtcctatggacaagtggccataaaccaccagagtgcccaagcacaggcgcagaccggctgggttcaaaaccaaggaatacttccgggtatggtttggcaggacagagatgtgtacctgcaaggacccatttgggccaaaattcctcacacggacggcaactttcacccttctccgctgatgggagggtttggaatgaagcacccgcctcctcagatcctcatcaaaaacacacctgtacctgcggatcctccaacggccttcaacaaggacaagctgaactctttcatcacccagtattctactggccaagtcagcgtggagatcgagtgggagctgcagaaggaaaacagcaagcgctggaacccggagatccagtacacttccaactattacaagtctaataatgttgaatttgctgttaatactgaaggtgtatatagtgaaccccgccccattggcaccagatacctgactcgtaatctgtaa

SEQ ID NO: 1610 - protein, 726 aa, synthetic construct
  source 1..726: note = Description of Artificial Sequence: Synthetic polypeptide
MEVQLQASGGGLVQAGGSLRLSCAASGFKITHYTMGWFRQAPGKEREFVSRITWGGDNTFYSNSVKGRFTISRDNAKNTVYLQMNSLKPEDTADYYCAAGSTSTATPLRVDYWGKGTQVTVSSGGGGSAPGKKRPVEQSPQEPDSSSGIGKTGQQPAKKRLNFGQTGDSESVPDPQPLGEPPAAPSGLGPNTMASGGGAPMADNNEGADGVGNSSGNWHCDSTWLGDRVITTSTRTWALPTYNNHLYKQISNGTSGGSTNDNTYFGYSTPWGYFDFNRFHCHFSPRDWQRLINNNWGFRPKRLNFKLFNIQVKEVTTNEGTKTIANNLTSTVQVFTDSEYQLPYVLGSAHQGCLPPFPADVFMVPQYGYLTLNNGSQALGRSSFYCLEYFPSQMLRTGNNFQFSYTFEDVPFHSSYAHSQSLDRLMNPLIDQYLYYLVRTQTTGTGGTQTLAFSQAGPSSMANQARNWVPGPCYRQQRVSTTTNQNNNSNFAWTGAAKFKLNGRDSLMNPGVAMASHKDDDDRFFPSSGVLIFGKQGAGNDGVDYSQVLITDEEEIKATNPVATEEYGAVAINNQAANTQAQTGLVHNQGVIPGMVWQNRDVYLQGPIWAKIPHTDGNFHPSPLMGGFGLKHPPPQILIKNTPVPADPPLTFNQAKLNSFITQYSTGQVSVEIEWELQKENSKRWNPEIQYTSNYYKSTNVDFAVNTEGVYSEPRPIGTRYLTRNL

SEQ ID NO: 1611 - protein, 729 aa, synthetic construct
  source 1..729: note = Description of Artificial Sequence: Synthetic polypeptide
MEVQLQASGGGLVQAGGSLRLSCSASVRTFSIYAMGWFRQAPGKEREFVAGINRSGDVTKYADFVKGRFSISRDNAKNMVYLQMNSLKPEDTALYYCAATWAYDTVGALTSGYNFWGQGTQVTVSSGGGGSAPGKKRPVEQSPQEPDSSSGIGKTGQQPAKKRLNFGQTGDSESVPDPQPLGEPPAAPSGLGPNTMASGGGAPMADNNEGADGVGNSSGNWHCDSTWLGDRVITTSTRTWALPTYNNHLYKQISNGTSGGSTNDNTYFGYSTPWGYFDFNRFHCHFSPRDWQRLINNNWGFRPKRLNFKLFNIQVKEVTTNEGTKTIANNLTSTVQVFTDSEYQLPYVLGSAHQGCLPPFPADVFMVPQYGYLTLNNGSQALGRSSFYCLEYFPSQMLRTGNNFQFSYTFEDVPFHSSYAHSQSLDRLMNPLIDQYLYYLVRTQTTGTGGTQTLAFSQAGPSSMANQARNWVPGPCYRQQRVSTTTNQNNNSNFAWTGAAKFKLNGRDSLMNPGVAMASHKDDDDRFFPSSGVLIFGKQGAGNDGVDYSQVLITDEEEIKATNPVATEEYGAVAINNQAANTQAQTGLVHNQGVIPGMVWQNRDVYLQGPIWAKIPHTDGNFHPSPLMGGFGLKHPPPQILIKNTPVPADPPLTFNQAKLNSFITQYSTGQVSVEIEWELQKENSKRWNPEIQYTSNYYKSTNVDFAVNTEGVYSEPRPIGTRYLTRNL

SEQ ID NO: 1612 - protein, 651 aa, synthetic construct
  source 1..651: note = Description of Artificial Sequence: Synthetic polypeptide
MPSSVIDALQYKLEGTTRLTRKRGLKLATALSLSNKFVEGSPSGGGGSGGGGSAPGKKRPVEQSPQEPDSSSGIGKTGQQPAKKRLNFGQTGDSESVPDPQPLGEPPAAPSGLGPNTMASGGGAPMADNNEGADGVGNSSGNWHCDSTWLGDRVITTSTRTWALPTYNNHLYKQISNGTSGGSTNDNTYFGYSTPWGYFDFNRFHCHFSPRDWQRLINNNWGFRPKRLNFKLFNIQVKEVTTNEGTKTIANNLTSTVQVFTDSEYQLPYVLGSAHQGCLPPFPADVFMVPQYGYLTLNNGSQALGRSSFYCLEYFPSQMLRTGNNFQFSYTFEDVPFHSSYAHSQSLDRLMNPLIDQYLYYLVRTQTTGTGGTQTLAFSQAGPSSMANQARNWVPGPCYRQQRVSTTTNQNNNSNFAWTGAAKFKLNGRDSLMNPGVAMASHKDDDDRFFPSSGVLIFGKQGAGNDGVDYSQVLITDEEEIKATNPVATEEYGAVAINNQAANTQAQTGLVHNQGVIPGMVWQNRDVYLQGPIWAKIPHTDGNFHPSPLMGGFGLKHPPPQILIKNTPVPADPPLTFNQAKLNSFITQYSTGQVSVEIEWELQKENSKRWNPEIQYTSNYYKSTNVDFAVNTEGVYSEPRPIGTRYLTRNL

SEQ ID NO: 1613 - protein, 638 aa, synthetic construct
  source 1..638: note = Description of Artificial Sequence: Synthetic polypeptide
MYTIWMPENPRPGTPCDIFTNSRGKRASNGGGGGSGGGGSAPGKKRPVEQSPQEPDSSSGIGKTGQQPAKKRLNFGQTGDSESVPDPQPLGEPPAAPSGLGPNTMASGGGAPMADNNEGADGVGNSSGNWHCDSTWLGDRVITTSTRTWALPTYNNHLYKQISNGTSGGSTNDNTYFGYSTPWGYFDFNRFHCHFSPRDWQRLINNNWGFRPKRLNFKLFNIQVKEVTTNEGTKTIANNLTSTVQVFTDSEYQLPYVLGSAHQGCLPPFPADVFMVPQYGYLTLNNGSQALGRSSFYCLEYFPSQMLRTGNNFQFSYTFEDVPFHSSYAHSQSLDRLMNPLIDQYLYYLVRTQTTGTGGTQTLAFSQAGPSSMANQARNWVPGPCYRQQRVSTTTNQNNNSNFAWTGAAKFKLNGRDSLMNPGVAMASHKDDDDRFFPSSGVLIFGKQGAGNDGVDYSQVLITDEEEIKATNPVATEEYGAVAINNQAANTQAQTGLVHNQGVIPGMVWQNRDVYLQGPIWAKIPHTDGNFHPSPLMGGFGLKHPPPQILIKNTPVPADPPLTFNQAKLNSFITQYSTGQVSVEIEWELQKENSKRWNPEIQYTSNYYKSTNVDFAVNTEGVYSEPRPIGTRYLTRNL

SEQ ID NO: 1614 - protein, 628 aa, synthetic construct
  source 1..628: note = Description of Artificial Sequence: Synthetic polypeptide
MTFFYGGSRGKRNNFKTEEYGGGGSGGGGSAPGKKRPVEQSPQEPDSSSGIGKTGQQPAKKRLNFGQTGDSESVPDPQPLGEPPAAPSGLGPNTMASGGGAPMADNNEGADGVGNSSGNWHCDSTWLGDRVITTSTRTWALPTYNNHLYKQISNGTSGGSTNDNTYFGYSTPWGYFDFNRFHCHFSPRDWQRLINNNWGFRPKRLNFKLFNIQVKEVTTNEGTKTIANNLTSTVQVFTDSEYQLPYVLGSAHQGCLPPFPADVFMVPQYGYLTLNNGSQALGRSSFYCLEYFPSQMLRTGNNFQFSYTFEDVPFHSSYAHSQSLDRLMNPLIDQYLYYLVRTQTTGTGGTQTLAFSQAGPSSMANQARNWVPGPCYRQQRVSTTTNQNNNSNFAWTGAAKFKLNGRDSLMNPGVAMASHKDDDDRFFPSSGVLIFGKQGAGNDGVDYSQVLITDEEEIKATNPVATEEYGAVAINNQAANTQAQTGLVHNQGVIPGMVWQNRDVYLQGPIWAKIPHTDGNFHPSPLMGGFGLKHPPPQILIKNTPVPADPPLTFNQAKLNSFITQYSTGQVSVEIEWELQKENSKRWNPEIQYTSNYYKSTNVDFAVNTEGVYSEPRPIGTRYLTRNL

SEQ ID NO: 1615 - protein, 621 aa, synthetic construct
  source 1..621: note = Description of Artificial Sequence: Synthetic polypeptide
MNNQKIVNLKEKVAQLEAGGGGSAPGKKRPVEQSPQEPDSSAGIGKSGAQPAKKRLNFGQTGDTESVPDPQPIGEPPAAPSGVGSLTMASGGGAPVADNNEGADGVGSSSGNWHCDSQWLGDRVITTSTRTWALPTYNNHLYKQISNSTSGGSSNDNAYFGYSTPWGYFDFNRFHCHFSPRDWQRLINNNWGFRPKRLNFKLFNIQVKEVTDNNGVKTIANNLTSTVQVFTDSDYQLPYVLGSAHEGCLPPFPADVFMIPQYGYLTLNDGSQAVGRSSFYCLEYFPSQMLRTGNNFQFNYEFENVPFHSSYAHSQSLDRLMNPLIDQYLYYLSKTINDSGQNQQTLKFSVAGPSNMAVQGRNYIPGPSYRQQRVSTTVTQNNNSEFAWPGASSWALNGRNSLMNPGPAMASHKEGEDRFFPLSGSLIFGKQGTGRDNVDADEVMITNEEEIKTTNPVATESYGQVAINHQSAQAQAQTGWVQNQGILPGMVWQDRDVYLQGPIWAKIPHTDGNFHPSPLMGGFGMKHPPPQILIKNTPVPADPPTAFNKDKLNSFITQYSTGQVSVEIEWELQKENSKRWNPEIQYTSNYYKSNNVEFAVNTEGVYSEPRPIGTRYLTRNL

SEQ ID NO: 1616 - protein, 633 aa, synthetic construct
  source 1..633: note = Description of Artificial Sequence: Synthetic polypeptide
MYTIWMPENPRPGTPCDIFTNSRGKRASNGGGGGSAPGKKRPVEQSPQEPDSSAGIGKSGAQPAKKRLNFGQTGDTESVPDPQPIGEPPAAPSGVGSLTMASGGGAPVADNNEGADGVGSSSGNWHCDSQWLGDRVITTSTRTWALPTYNNHLYKQISNSTSGGSSNDNAYFGYSTPWGYFDFNRFHCHFSPRDWQRLINNNWGFRPKRLNFKLFNIQVKEVTDNNGVKTIANNLTSTVQVFTDSDYQLPYVLGSAHEGCLPPFPADVFMIPQYGYLTLNDGSQAVGRSSFYCLEYFPSQMLRTGNNFQFNYEFENVPFHSSYAHSQSLDRLMNPLIDQYLYYLSKTINDSGQNQQTLKFSVAGPSNMAVQGRNYIPGPSYRQQRVSTTVTQNNNSEFAWPGASSWALNGRNSLMNPGPAMASHKEGEDRFFPLSGSLIFGKQGTGRDNVDADEVMITNEEEIKTTNPVATESYGQVAINHQSAQAQAQTGWVQNQGILPGMVWQDRDVYLQGPIWAKIPHTDGNFHPSPLMGGFGMKHPPPQILIKNTPVPADPPTAFNKDKLNSFITQYSTGQVSVEIEWELQKENSKRWNPEIQYTSNYYKSNNVEFAVNTEGVYSEPRPIGTRYLTRNL

SEQ ID NO: 1617 - protein, 623 aa, synthetic construct
  source 1..623: note = Description of Artificial Sequence: Synthetic polypeptide
MTFFYGGSRGKRNNFKTEEYGGGGSAPGKKRPVEQSPQEPDSSAGIGKSGAQPAKKRLNFGQTGDTESVPDPQPIGEPPAAPSGVGSLTMASGGGAPVADNNEGADGVGSSSGNWHCDSQWLGDRVITTSTRTWALPTYNNHLYKQISNSTSGGSSNDNAYFGYSTPWGYFDFNRFHCHFSPRDWQRLINNNWGFRPKRLNFKLFNIQVKEVTDNNGVKTIANNLTSTVQVFTDSDYQLPYVLGSAHEGCLPPFPADVFMIPQYGYLTLNDGSQAVGRSSFYCLEYFPSQMLRTGNNFQFNYEFENVPFHSSYAHSQSLDRLMNPLIDQYLYYLSKTINDSGQNQQTLKFSVAGPSNMAVQGRNYIPGPSYRQQRVSTTVTQNNNSEFAWPGASSWALNGRNSLMNPGPAMASHKEGEDRFFPLSGSLIFGKQGTGRDNVDADEVMITNEEEIKTTNPVATESYGQVAINHQSAQAQAQTGWVQNQGILPGMVWQDRDVYLQGPIWAKIPHTDGNFHPSPLMGGFGMKHPPPQILIKNTPVPADPPTAFNKDKLNSFITQYSTGQVSVEIEWELQKENSKRWNPEIQYTSNYYKSNNVEFAVNTEGVYSEPRPIGTRYLTRNL

SEQ ID NO: 1618 - protein, 623 aa, synthetic construct
  source 1..623: note = Description of Artificial Sequence: Synthetic polypeptide
MAAAAAAAAAAAAAAAAAAAGGGGSAPGKKRPVEQSPQEPDSSAGIGKSGAQPAKKRLNFGQTGDTESVPDPQPIGEPPAAPSGVGSLTMASGGGAPVADNNEGADGVGSSSGNWHCDSQWLGDRVITTSTRTWALPTYNNHLYKQISNSTSGGSSNDNAYFGYSTPWGYFDFNRFHCHFSPRDWQRLINNNWGFRPKRLNFKLFNIQVKEVTDNNGVKTIANNLTSTVQVFTDSDYQLPYVLGSAHEGCLPPFPADVFMIPQYGYLTLNDGSQAVGRSSFYCLEYFPSQMLRTGNNFQFNYEFENVPFHSSYAHSQSLDRLMNPLIDQYLYYLSKTINDSGQNQQTLKFSVAGPSNMAVQGRNYIPGPSYRQQRVSTTVTQNNNSEFAWPGASSWALNGRNSLMNPGPAMASHKEGEDRFFPLSGSLIFGKQGTGRDNVDADEVMITNEEEIKTTNPVATESYGQVAINHQSAQAQAQTGWVQNQGILPGMVWQDRDVYLQGPIWAKIPHTDGNFHPSPLMGGFGMKHPPPQILIKNTPVPADPPTAFNKDKLNSFITQYSTGQVSVEIEWELQKENSKRWNPEIQYTSNYYKSNNVEFAVNTEGVYSEPRPIGTRYLTRNL

SEQ ID NO: 1619 - DNA, 2214 bp, synthetic construct
  source 1..2214: mol_type = other DNA; note = Description of Artificial Sequence: Synthetic polynucleotide
atggctgccgatggttatcttccagattggctcgaggacaacctctctgagggcattcgcgagtggtgggacttgaaacctggagccccgaagcccaaagccaaccagcaaaagcaggacgacggccggggtctggtgcttcctggctacaagtacctcggacccttcaacggactcgacaagggggagcccgtcaacgcggcggacgcagcggccctcgagcacgacaaggcctacgaccagcagctcaaagcgggtgacaatccgtacctgcggtataaccacgccgacgtcgagtttcaggagcgtctgcaagaagatacgtcttttgggggcaacctcgggcgagcagtcttccaggccaagaagagggttctcgaaccttttggtctggttgaggaaggcgctaagacggctcctggaaagaaacgtccggtagagcagtcgccacaagagccagactcctcctcgggcatcggcaagaaaggccaacagcccgccagaaaaagactcaattttggccagactggcgactcagagtcagttccagaccctcaacctctcggagaacctccagcagcgccctctggtgtgggacctaatacaatggctgcaggcggtggcgcaccaatggcagacaataacgagggcgccgacggagtgggtaattcctcgggaaattggcattgcgattccacatggatgggggacagagtcatcaccaccagcacccgaacctgggccctgcccacctacaacaaccacctctacaagcaaatctccaacggcacctcgggaggaagcaccaacgacaacacctattttggctacagcaccccctgggggtattttgatttcaacagattccactgccacttctcaccacgtgactggcagcgactcatcaacaacaactggggattccggccaaaaagactcagcttcaagctcttcaacatccaggtcaaggaggtcacgcagaatgaaggcaccaagaccatcgccaataaccttaccagcacgattcaggtatttacggactcggaataccagctgccatacgtcctcggctccgcgcaccagggctgcctgcctccgttcccggcggacgtcttcatgattccccagtacggctaccttacactgaacaatggaagtcaagccgtaggccgttcctccttctactgcctggaatattttccttctcaaatgctgagaacgggcaacaactttgagttcagctaccagtttgaggacgtgccttttcacagcagctacgcgcacagccaaagcctggaccggctgatgaaccccctcatcgaccagtacctgtactacctgtctcggactcagtccacgggaggtaccgcaagaactcagcagttgctattttctcaggccgggcctaatacaatggccaatcaggcaaagaactggctgccaggaccctgttaccgccaacaacgcgtctcaacgacaaccgggcaaaacaacaatagcaactctgcctggactgctgggaccaaataccatctgaatggaagaaattcattggctaatcctggcatcgctatggcaacacacaaagacgacgaggagcgtttttttcccagtaacgggatcctgatttttggcaaacaaaatgctgccagagacaatgcggattacagcgatgtcatgctcaccagcgaggaagaaatcaaaaccactaaccctgtggctacagaggaatacggtatcgtggcagataacttgcagcagcaaaacacggctcctcaaattggaactgtcaacagccagggggccttacccggtatggtctggcagaaccgggacgtgtacctgcagggtcccatctgggccaagattcctcacacggacggcaacttccacccatctccgctgatgggcggctttggcctgaaacatcctccgcctcagatcctgatcaagaacacgcctgtacctgcggatcctccgaccaccttcaaccagtcaaagctgaactctttcatcacgcaatacagcaccggacaggtcagcgtggaaattgaatgggagctacagaaggaaaacagcaagcgctggaaccccgagatccagtacacctccaactactacaaatctacaagtgtggactttgctgttaatacagaaggcgtgtactctgaaccccgccccattggcacccgttacctcacccgtaatctgtaa

SEQ ID NO: 1620 - DNA, 2214 bp, synthetic construct
  source 1..2214: mol_type = other DNA; note = Description of Artificial Sequence: Synthetic polynucleotide
atggctgccgatggttatcttccagattggctcgaggacaacctctctgagggcattcgcgagtggtgggcgctgaaacctggagccccgaagcccaaagccaaccagcaaaagcaggacgacggccggggtctggtgcttcctggctacaagtacctcggacccttcaacggactcgacaagggggagcccgtcaacgcggcggacgcagcggccctcgagcacgacaaggcctacgaccagcagctcaaagcgggtgacaatccgtacctgcggtataaccacgccgacgccgagtttcaggagcgtctgcaagaagatacgtcttttgggggcaacctcgggcgagcagtcttccaggccaagaagcgggttctcgaacctctcggtctggttgaggacggcgctaagacggctcctggaaagaagagaccagtagagcagtcaccccaagaaccagactcctcctcgggcatcggcaagaaaggccaacagcccgccagaaaaagactcaattttggccagactggcgactcagagtcagttccagaccctcaacctctcggagaacctccagcaacccccgctgctgtgggacctactacaatggcttcaggcggtggcgcaccaatggcagacaataacgaaggcgccgacggagtgggtagttcctcgggaaattggcattgcgattccacatggctgggcgacagagtcatcaccaccagcacccgaacctgggccctgcccacctacaacaaccacctctacaagcaaatctccaacgggacatcgggaggagccaccaacgacaacacctacttcggctacagcaccccctgggggtattttgactttaacagattccactgccacttttcaccacgtgactggcagcgactcatcaacaacaactggggattccggcccaagagactcagcttcaagctcttcaacatccaggtcaaggaggtcacgcagaatgaaggcaccaagaccatcgccaataacctcaccagcaccatccaggtgtttacggactcggagtaccagctgccgtacgttctcggctctgcccaccagggctgcctgcctccgttcccggcggacgtgttcatgattccccagtacggctacctaacactcaacaacggtagtcaggccgtgggacgctcctccttctactgcctggaatactttccttcgcagatgctgagaaccggcaacaacttccagtttacttacaccttcgaggacgtgcctttccacagcagctacgcccacagccagagcttggaccggctgatgaatcctctgattgaccagtacctgtactacttgtctcggactcaaacaacaggaggcacggcaaatacgcagactctgggcttcagccaaggtgggcctaatacaatggccaatcaggcaaagaactggctgccaggaccctgttaccgccaacaacgcgtctcaacgacaaccgggcaaaacaacaatagcaactttgcctggactgctgggaccaaataccatctgaatggaagaaattcattggctaatcctggcatcgctatggcaacacacaaggacgacgaggagcgtttttttcccagtaacgggatcctgatttttggcaaacaaaatgctgccagagacaatgcggattacagcgatgtcatgctcaccagcgaggaagaaatcaaaaccactaaccctgtggctacagaggaatacggtatcgtggcagataacttgcagcagcaaaacacggctcctcaaattggaactgtcaacagccagggggccttacccggtatggtctggcagaaccgggacgtgtacctgcagggtcccatctgggccaagattcctcacacggacggcaacttccacccgtctccgctgatgggcggctttggcctgaaacatcctccgcctcagatcctgatcaagaacacgcctgtacctgcggatcctccgaccaccttcaaccagtcaaagctgaactctttcatcacgcaatacagcaccggacaggtcagcgtggaaatcgagtgggagctgcagaaagaaaacagcaagcgctggaaccccgagatccagtacacctccaactactacaaatctacaaatgtggactttgctgtcaacacggagggggtttatagcgagcctcgccccattggcacccgttacctcacccgcaacctgtaa

SEQ ID NO: 1621 - DNA, 2211 bp, synthetic construct
  source 1..2211: mol_type = other DNA; note = Description of Artificial Sequence: Synthetic polynucleotide
  misc_difference 715: note = misc_feature - n is a, c, g, or t
atggctgccgatggttatcttccagattggctcgaggacaacctctctgagggcattcgcgagtggtgggcgctgaaacctggagccccgaagcccaaagccaaccagcaaaagcaggacgacggccggggtctggtgcttcctggctacaagtacctcggacccttcaacggactcgacaagggggagcccgtcaacgcggcggacgcagcggccctcgagcacgacaaggcctacgaccagcagctcaaagcgggtgacaatccgtacctgcggtataaccacgccgacgccgagtttcaggagcgtctgcaagaagatacgtcttttgggggcaacctcgggcgagcagtcttccaggccaagaagcgggttctcgaacctctcggtctggttgaggaaggcgctaagacggctcctggaaagaaacgtccggtagagcagtcgccacaagagccagactcctcctcgggcatcggcaagacaggccagcagcccgctaaaaagaggctcaattttggtcagactggcgactcagagtcagtccccgacccacaacctctcggagaacctccagcaacccccgctgctgtgggacctactacaatggcttcaggcggtggcgcaccaatggcagacaataacgaaggcgccgacggagtgggtaatgcctcaggaaattggcattgcgattccacatggctgggcgacagantcatcaccaccagcacccgaacatgggccttgcccacctataacaaccacctctacaagcaaatctccagtgcttcaacgggggccagcaacgacaaccactacttcggctacagcaccccctgggggtattttgatttcaacagattccactgccatttctcaccacgtgactggcagcgactcatcaacaacaattggggattccggcccaagagactcaacttcaagctcttcaacatccaagtcaaggaggtcacgcagaatgaaggcaccaagaccatcgccaataacctcaccagcaccatccaggtgtttacggactcggagtaccagctgccgtacgttctcggctctgcccaccagggctgcctgcctccgttcccggcggacgtgttcatgattccccagtacggctacctaacactcaacaacggtagtcaggccgtgggacgctcctccttctactgcctggaatattttccatctcaaatgctgcgaactggaaacaattttgaattcagctacaccttcgaggacgtgcctttccacagcagctacgcacacagccagagcttggaccgactgatgaatcctctcatcgaccagtacctgtactacttgtctcggactcaaacaacaggaggcacggcaaatacgcagactctgggcttcagccaaggtgggcctaatacaatggccaatcaggcaaagaactggctgccaggaccctgttaccgccaacaacgcgtctcaacgacaaccgggcaaaacaacaatagcaactttgcctggactgctgggaccaaataccatctgaatggaagaaattcattggctaatcctggcatcgctatggcaacacacaaagacgacgaggagcgtttttttcccagtaacgggatcctgatttttggcaaacaaaatgctgccagagacaatgcggattacagcgatgtcatgctcaccagcgaggaagaaatcaaaaccactaaccctgtggctacagaggaatacggtatcgtggcagataacttgcagcagcaaaacacggctcctcaaattggaactgtcaacagccaggggaccttacccggtatggtctggcagaaccgggacgtgtacctgcagggtcccatctgggccaagattcctcacacggacggcaacttccacccgtctccgctgatgggcggctttggcctgaaacatcctccgcctcagatcctgatcaagaacacgcctgtacctgcggatcctccgaccaccttcaaccagtcaaagctgaactctttcatcacgcaatacagcaccggacaggtcagcgtggaaattgaatgggagctacagaaggaaaacagcaagcgctggaaccccgagatccagtacacctccaattactacaaatctacaagtgtggactttgctgttaatacagaaggcgtgtactctgaaccccgccccattggcacgcgtttcctcacccgtaatctgtaa

SEQ ID NO: 1622 - DNA, 2214 bp, synthetic construct
  source 1..2214: mol_type = other DNA; note = Description of Artificial Sequence: Synthetic polynucleotide
atggctgccgatggttatcttccagattggctcgaggacaacctctctgagggcattcgcgagtggtgggcgctgaaacctggagccccgaagcccaaagccaaccagcaaaagcaggacgacggccggggtctggtgcttcctggctacaagtacctcggacccttcaacggactcgacaagggggagcccgtcaacgcggcggacgcagcggccctcgagcacgacaaggcctacgaccagcagctcaaagcgggtgacaatccgtacctgcggtataaccacgccgacgccgagtttcaggagcgtctgcaagaagatacgtcttttgggggcaacctcgggcgagcagtcttccaggccaagaagcgggttctcgaacctctcggtctggttgaggaaggcgctaagacggctcctggaaagaaacgtccggtagagcagtcgccacaagagccagactcctcctcgggcatcggcaagacaggccagcagcccgctaaaaagaggctcaattttggccagactggcgactcagagtcagttccagaccctcaacctctcggagaacctccagcagcgccctctggtgtgggacctaatacaatggctgcaggcggtggcgcaccaatggcagacaataacgaaggcgccgacggagtgggtagttcctcgggaaattggcattgcgattccacatggctgggcgacagagtcatcaccaccagcacccgaacctgggccctgcccacctacaacaaccacctctacaagcaaatctccaacgggacatcgggaggagccaccaacgacaacacctacttcggctacagcaccccctgggggtattttgactttaacagattccactgccacttttcaccacgtgactggcagcgactcatcaacaacaactggggattccggcccaagagactcagcttcaagctcttcaacatccaggtcaaggaggtcacgcagaatgaaggcaccaagaccatcgccaataacctcaccagcaccatccaggtgtttacggactcggagtaccagctgccgtacgtactaggatccgctcaccagggatgtctgcctccgttcccggcggacgtgttcatgattccccagtacggctacctaacactcaacaacggtagtcaggccgtgggacgctcctccttctactgcctggaatattttccatctcagatgctgagaacgggcaataactttaccttcagctacaccttcgaggacgtgcctttccacagcagctatgcccacagccagagcttggaccggctgatgaatcctctgattgaccagtacctgtactacttgtctcggactcaaacaacaggaggcacggcaaatacgcagactctgggcttcagccaaggtgggcctaatacaatggccaatcaggcaaagaactggctgccaggaccctgttaccgccaacaacgcgtctcaacgacaaccgggcaaaacaacaatagcaactttgcctggactgctgggaccaaataccatctgaatggaagaaattcattggctaatcctggcatcgctatggcaacacacaaagacgacgaggagcgtttttttcccagtaacgggatcctgatttttggcaaacaaaatgctgccagagacaatgcggattacagcgatgtcatgctcaccagcgaggaagaaatcaaaaccactaaccctgtggctacagaggaatacggtatcgtggcagataacttgcagcagcaaaacacggctcctcaaattggaactgtcaacagccagggggccttacccggtatggtctggcagaaccgggacgtgtacctgcagggtcccatctgggccaagattcctcacacggacggcaacttccacccgtctccgctaatgggaggatttggactgaagcacccacctcctcagatcctgatcaagaacacgccggtacctgcggatcctccgaccaccttcaaccagtcaaagctgtactctttcatcacgcaatacagcaccggacaggtcagcgtggaaattgaatgggagctgcagaaggaaaacagcaagcgctggaaccccgagatccaatacacctccaactactacaaatctacaagtgtggactttgctgttaatacagaaggcgtgtactctgaaccccgccccattggcacccgttacctcacccgtaatctgtaa

SEQ ID NO: 1623 - protein, 737 aa, synthetic construct
  source 1..737: note = Description of Artificial Sequence: Synthetic polypeptide
MAADGYLPDWLEDNLSEGIREWWDLKPGAPKPKANQQKQDDGRGLVLPGYKYLGPFNGLDKGEPVNAADAAALEHDKAYDQQLKAGDNPYLRYNHADVEFQERLQEDTSFGGNLGRAVFQAKKRVLEPFGLVEEGAKTAPGKKRPVEQSPQEPDSSSGIGKKGQQPARKRLNFGQTGDSESVPDPQPLGEPPAAPSGVGPNTMAAGGGAPMADNNEGADGVGNSSGNWHCDSTWMGDRVITTSTRTWALPTYNNHLYKQISNGTSGGSTNDNTYFGYSTPWGYFDFNRFHCHFSPRDWQRLINNNWGFRPKRLSFKLFNIQVKEVTQNEGTKTIANNLTSTIQVFTDSEYQLPYVLGSAHQGCLPPFPADVFMIPQYGYLTLNNGSQAVGRSSFYCLEYFPSQMLRTGNNFEFSYQFEDVPFHSSYAHSQSLDRLMNPLIDQYLYYLSRTQSTGGTARTQQLLFSQAGPNTMANQAKNWLPGPCYRQQRVSTTTGQNNNSNSAWTAGTKYHLNGRNSLANPGIAMATHKDDEERFFPSNGILIFGKQNAARDNADYSDVMLTSEEEIKTTNPVATEEYGIVADNLQQQNTAPQIGTVNSQGALPGMVWQNRDVYLQGPIWAKIPHTDGNFHPSPLMGGFGLKHPPPQILIKNTPVPADPPTTFNQSKLNSFITQYSTGQVSVEIEWELQKENSKRWNPEIQYTSNYYKSTSVDFAVNTEGVYSEPRPIGTRYLTRNL

SEQ ID NO: 1624 - protein, 737 aa, synthetic construct
  source 1..737: note = Description of Artificial Sequence: Synthetic polypeptide
MAADGYLPDWLEDNLSEGIREWWALKPGAPKPKANQQKQDDGRGLVLPGYKYLGPFNGLDKGEPVNAADAAALEHDKAYDQQLKAGDNPYLRYNHADAEFQERLQEDTSFGGNLGRAVFQAKKRVLEPLGLVEDGAKTAPGKKRPVEQSPQEPDSSSGIGKKGQQPARKRLNFGQTGDSESVPDPQPLGEPPATPAAVGPTTMASGGGAPMADNNEGADGVGSSSGNWHCDSTWLGDRVITTSTRTWALPTYNNHLYKQISNGTSGGATNDNTYFGYSTPWGYFDFNRFHCHFSPRDWQRLINNNWGFRPKRLSFKLFNIQVKEVTQNEGTKTIANNLTSTIQVFTDSEYQLPYVLGSAHQGCLPPFPADVFMIPQYGYLTLNNGSQAVGRSSFYCLEYFPSQMLRTGNNFQFTYTFEDVPFHSSYAHSQSLDRLMNPLIDQYLYYLSRTQTTGGTANTQTLGFSQGGPNTMANQAKNWLPGPCYRQQRVSTTTGQNNNSNFAWTAGTKYHLNGRNSLANPGIAMATHKDDEERFFPSNGILIFGKQNAARDNADYSDVMLTSEEEIKTTNPVATEEYGIVADNLQQQNTAPQIGTVNSQGALPGMVWQNRDVYLQGPIWAKIPHTDGNFHPSPLMGGFGLKHPPPQILIKNTPVPADPPTTFNQSKLNSFITQYSTGQVSVEIEWELQKENSKRWNPEIQYTSNYYKSTNVDFAVNTEGVYSEPRPIGTRYLTRNL

SEQ ID NO: 1625 - protein, 736 aa, synthetic construct
  source 1..736: note = Description of Artificial Sequence: Synthetic polypeptide
  VARIANT 239: note = misc_feature - Xaa can be any naturally occurring amino acid
MAADGYLPDWLEDNLSEGIREWWALKPGAPKPKANQQKQDDGRGLVLPGYKYLGPFNGLDKGEPVNAADAAALEHDKAYDQQLKAGDNPYLRYNHADAEFQERLQEDTSFGGNLGRAVFQAKKRVLEPLGLVEEGAKTAPGKKRPVEQSPQEPDSSSGIGKTGQQPAKKRLNFGQTGDSESVPDPQPLGEPPATPAAVGPTTMASGGGAPMADNNEGADGVGNASGNWHCDSTWLGDRXITTSTRTWALPTYNNHLYKQISSASTGASNDNHYFGYSTPWGYFDFNRFHCHFSPRDWQRLINNNWGFRPKRLNFKLFNIQVKEVTQNEGTKTIANNLTSTIQVFTDSEYQLPYVLGSAHQGCLPPFPADVFMIPQYGYLTLNNGSQAVGRSSFYCLEYFPSQMLRTGNNFEFSYTFEDVPFHSSYAHSQSLDRLMNPLIDQYLYYLSRTQTTGGTANTQTLGFSQGGPNTMANQAKNWLPGPCYRQQRVSTTTGQNNNSNFAWTAGTKYHLNGRNSLANPGIAMATHKDDEERFFPSNGILIFGKQNAARDNADYSDVMLTSEEEIKTTNPVATEEYGIVADNLQQQNTAPQIGTVNSQGTLPGMVWQNRDVYLQGPIWAKIPHTDGNFHPSPLMGGFGLKHPPPQILIKNTPVPADPPTTFNQSKLNSFITQYSTGQVSVEIEWELQKENSKRWNPEIQYTSNYYKSTSVDFAVNTEGVYSEPRPIGTRFLTRNL

SEQ ID NO: 1626 - protein, 737 aa, synthetic construct
  source 1..737: note = Description of Artificial Sequence: Synthetic polypeptide
MAADGYLPDWLEDNLSEGIREWWALKPGAPKPKANQQKQDDGRGLVLPGYKYLGPFNGLDKGEPVNAADAAALEHDKAYDQQLKAGDNPYLRYNHADAEFQERLQEDTSFGGNLGRAVFQAKKRVLEPLGLVEEGAKTAPGKKRPVEQSPQEPDSSSGIGKTGQQPAKKRLNFGQTGDSESVPDPQPLGEPPAAPSGVGPNTMAAGGGAPMADNNEGADGVGSSSGNWHCDSTWLGDRVITTSTRTWALPTYNNHLYKQISNGTSGGATNDNTYFGYSTPWGYFDFNRFHCHFSPRDWQRLINNNWGFRPKRLSFKLFNIQVKEVTQNEGTKTIANNLTSTIQVFTDSEYQLPYVLGSAHQGCLPPFPADVFMIPQYGYLTLNNGSQAVGRSSFYCLEYFPSQMLRTGNNFTFSYTFEDVPFHSSYAHSQSLDRLMNPLIDQYLYYLSRTQTTGGTANTQTLGFSQGGPNTMANQAKNWLPGPCYRQQRVSTTTGQNNNSNFAWTAGTKYHLNGRNSLANPGIAMATHKDDEERFFPSNGILIFGKQNAARDNADYSDVMLTSEEEIKTTNPVATEEYGIVADNLQQQNTAPQIGTVNSQGALPGMVWQNRDVYLQGPIWAKIPHTDGNFHPSPLMGGFGLKHPPPQILIKNTPVPADPPTTFNQSKLYSFITQYSTGQVSVEIEWELQKENSKRWNPEIQYTSNYYKSTSVDFAVNTEGVYSEPRPIGTRYLTRNL

SEQ ID NO: 1627 - DNA, 2208 bp, synthetic construct
  source 1..2208: mol_type = other DNA; note = Description of Artificial Sequence: Synthetic polynucleotide
atggctgccgatggttatcttccagattggctcgaggacaacctctctgagggcattcgcgagtggtgggacttgaaacctggagccccgaaacccaaagccaaccagcaaaagcaggacgacggccggggtctggtgcttcctggctacaagtacctcggacccttcaacggactcgacaagggggagcccgtcaacgcggcggatgcagcggccctcgagcacgacaaagcctacgaccggcagctcgacagcggagacaacccgtacctcaagtacaaccacgccgacgcggagtttcaggagcgccttaaagaagatacgtcttttgggggcaacctcggacgagcagtcttccaggccaagaagagggttctcgaaccttttggtctggttgaggaaggtgctaagacggctcctggaaagaaacgtccggtagagcagtcgccacaagagccagactcctcctcgggcattggcaagacaggccagcagcccgctaaaaagagactcaattttggtcagactggcgactcagagtcagtccccgacccacaacctctcggagaacctccagcaacccccgctgctgtgggacctactacaatggcttcaggtggtggcgcaccagtggcagacaataacgaaggcgccgacggagtgggtagttcctcgggaaattggcattgcgattccacatggctgggcgacagagtcatcaccaccagcacccgaacatgggccttgcccacctataacaaccacctctacaagcaaatctccagtgcttcgacgggggccagcaacgacaaccactacttcggctacagcaccccctgggggtattttgatttcaacaggttccactgccatttctcaccacgtgactggcagcgactcatcaacaacaattggggattccggcccaaaagactcaacttcaagctgttcaacatccaggtcaaggaagtcacgacgaacgaaggcaccaagaccatcgccaataatctcaccagcaccgtgcaggtctttacggactcggagtaccagttaccgtacgtgctaggatccgctcaccagggatgtctgcctccgttcccggcggacgtcttcatggttcctcagtacggctatttaactttaaacaatggaagccaagccctgggacgttcctccttctactgtctggagtatttcccatcgcagatgctgagaacgggcaacaactttacctttagctacaccttcgaggacgtgcctttccacagcagctacgcgcacagccagagcctggacaggctgatgaatcccctcatcgaccagtacctgtactacctggtcagaacgcaaacgactggaactggagggacgcagactctggcattcagccaagcgggtcctagctcaatggccaaccaggctagaaattgggtgcccggaccttgctaccggcagcagcgcgtctccacgacaaccaaccagaacaacaacagcaactttgcctggacgggagctgccaagtttaagctgaacggccgagactctctaatgaatccgggcgtggcaatggcttcccacaaggatgacgacgaccgcttcttcccttcgagcggggtcctgatttttggcaagcaaggagccgggaacgatggagtggattacagccaagtgctgattacagatgaggaagaaatcaaggctaccaaccccgtggccacagaagaatatggagcagtggccatcaacaaccaggccgccaatacgcaggcgcagaccggactcgtgcacaaccagggggtgattcccggcatggtgtggcagaatagagacgtgtacctgcagggtcccatctgggccaaaattcctcacacggacggcaactttcacccgtctcccctgatgggcggctttggactgaagcacccgcctcctcaaattctcatcaagaacacaccggttccagcggacccgccgcttaccttcaaccaggccaagctgaactctttcatcacgcagtacagcaccggacaggtcagcgtggaaatcgagtgggagctgcagaaagaaaacagcaaacgctggaatccagagattcaatacacttccaactactacaaatctacaaatgtggactttgctgtcaacacggagggggtttatagcgagcctcgccccattggcacccgttacctcacccgcaacctgtaa

SEQ ID NO: 1628 - DNA, 2211 bp, synthetic construct
  source 1..2211: mol_type = other DNA; note = Description of Artificial Sequence: Synthetic polynucleotide
  misc_difference 337: note = misc_feature - n is a, c, g, or t
atggctgccgatggttatcttccagattggctcgaggacactctctctgaaggaataagacagtggtggaagctcaaacctggcccaccaccaccaaagcccgcagagcggcataaggacgacagcaggggtcttgtgcttcctggctacaagtacctcggacccttcaacggactcgacaagggggagcccgtcaacgcggcggacgcagcgaccctcgagcacgacaaggcctacgaccagcagctcaaagcgggtgacaatccgtacctgcggtataaccacgccgacgccgagtttcaggagcgtctgcaagaagatacgtcttttgggggcnacctcgggcgagcagtcttccaggccaagaagcgggttctcgaacctctcggtctggttgaggaagctgctaagacggctcctggaaagaagagaccagtagagccatcaccccagcgttctccagactcctctacgggcatcggcaagaaaggccaacagcccgccagaaaaagactcaattttggtcagactggcgactcagagtcagttccagaccctcaacctctcggagaacctccagcagcgccctctggtgtgggacctaatacaatggctgcaggcggtggcgcaccaatggcagacaataacgaaggcgccgacggagtgggtagttcctcgggaaattggcattgcgattccacatggctgggcgacagagtcatcaccaccagcacccgaacctgggccctgcccacctacaacaaccacctctacaagcaaatctccagtgcttcaacgggggccagcaacgacaaccactacttcggctacagcaccccctgggggtattttgatttcaacagattccactgccatttctcaccacgtgactggcagcgactcatcaacaacaattggggattccggcccaagagactcaacttcaagctcttcaacatccaagtcaaggaggtcacgacgaatgatggcgtcacgaccatcgctaataaccttaccagcacggttcaagtcttctcggactcagactatcagctcccgtacgtgctcgggtcggctcacgagggctgcctcccgccgttcccagcggacgttttcatgattcctcagtacggctatttaactttaaacaatggaagccaagccctgggacgttcctccttctactgtctggagtatttcccatcgcagatgctgagaaccggcaacaactttcagttcagctacaccttcgaggacgtgcctttccacagcagctacgcgcacagccagagcctggacaggctgatgaatcccctcatcgaccagtacctgtactacctggtcagaacgcaaacgactggaactggagggacgcagactctggcattcagccaagcgggtcctagctcaatggccaaccaggctagaaattgggtgcccggaccttgctaccggcagcagcgcgtctccacgacaaccaaccagaacaacaacagcaactttgcctggacgggagctgccaagtttaagctgaacggccgagactctctaatgaatccgggcgtggcaatggcttcccacaaggatgacgacgaccgcttcttcccttcgagcggggtcctgatttttggcaagcaaggagccgggaacgatggagtggattacagccaagtgctgattacagatgaggaagaaatcaaggctaccaaccccgtagccacagaagaatatggagcagtggccatcaacaaccaggccgccaatacgcaggcgcagaccggactcgtgcacaaccagggggtgattcccggaatggtgtggcaagacagagacgtatacctgcagggtcctatttgggccaaaattcctcacacggatggacactttcacccgtctcctctcatgggcggctttggacttaagcacccgcctcctcagatcctcatcaaaaacacgcctgttcctgcgaatcctccggcagagttttcggctacaaagtttgcttcattcatcacccagtattccacaggacaagtgagcgtggagattgaatgggagctgcagaaagaaaacagcaaacgctggaatcccgaagtgcagtatacatctaactatgcaaaatctgccaacgttgatttcactgtggacaacaatggactttatactgagcctcgccccattggcacccgttacctcacccgtcccctgtaa

SEQ ID NO: 1629 - DNA, 2214 bp, synthetic construct
  source 1..2214: mol_type = other DNA; note = Description of Artificial Sequence: Synthetic polynucleotide
  misc_difference 335: note = misc_feature - n is a, c, g, or t
atgactgacggttaccttccagattggctagaggacaacctctctgaaggcgttcgagagtggtgggcgctgcaacctggagccccgaagcccaaagccaaccagcaaaagcaggacgacggccggggtctggtgcttcctggctacaagtacctcggacccttcaacggactcgacaagggggagcccgtcaacgcggcggacgcagcggccctcgagcacgacaaggcctacgaccagcagctcaaagcgggtgacaatccgtacctgcggtataaccacgccgacgccgagtttcaggagcgtctgcaagaagatacgtcttttgggggcancctcgggcgagcagtcttccaggccaagaagcgggttctcgaacctctcggtctggttgaggaaggcgctaagacggctcctggaaagaaacgtccggtagagccatcaccccagcgttctccagactcctctacgggcatcggcaagaaaggccaacagcccgccagaaaaagactcaattttggtcagactggcgactcagagtcagttccagaccctcaacctctcggagaacctccagcagcgccctcaggtgtgggatctcttacaatggcttcaggtggtggcgcaccagtggcagacaataacgaaggtgccgatggagtgggtagttcctcgggaaattggcattgcgattcccaatggctgggggacagagtcatcaccaccagcacccgaacctgggccctgcccacctacaacaatcacctctacaagcaaatctccaacagcacatctggaggatcttcaaatgacaacgcctacttcggctacagcaccccctgggggtattttgacttcaacagattccactgccacttctcaccacgtgactggcagcgactcatcaacaacaactggggattccggcccaagagactcagcttcaagctcttcaacatccaggtcaaggaggtcacgcagaatgaaggcaccaagaccatcgccaataacctcaccagcaccatccaggtgtttacggactcggagtaccagctgccgtacgttctcggctctgcccaccagggctgcctgcctccgttcccggcggacgtgttcatgattccccagtacggctacctaacactcaacaacggtagtcaggccgtgggacgctcctccttctactgcctggaatactttccttcgcagatgctgagaaccggcaacaacttccagtttacttacaccttcgaggacgtgcctttccacagcagctacgcccacagccagagcttggaccggctgatgaatcctctgattgaccagtacctgtactacttgtctcggactcaaacaacaggaggcacggcaaatacgcagactctgggcttcagccaaggtgggcctaatacaatggccaatcaggcaaagaactggctgccaggaccctgttaccgccaacaacgcgtctcaacgacaaccgggcaaaacaacaatagcaactttgcctggactgctgggaccaaataccatctgaatggaagaaattcattggctaatcctggcatcgctatggcaacacacaaagacgacgaggagcgtttttttcccagtaacgggatcctgatttttggcaaacaaaatgctgccagagacaatgcggattacagcgatgtcatgctcaccagcgaggaagaaatcaaaaccactaaccctgtggctacagaggaatacggtatcgtggcagataacttgcagcagcaaaacacggctcctcaaattggaactgtcaacagccagggggccttacccggtatggtctggcagaaccgggacgtgtacctgcagggtcccatctgggccaagattcctcacacggacggcaacttccacccgtctccgctgatgggcggctttggcctgaaacatcctccgcctcagatcctgatcaagaacacgcctgtacctgcggatcctccgaccaccttaaaccaggccaagctgaactctttcatcacgcaatacagcaccggacaggtcagcgtggaaattgaatgggagctgcagaaggaaaacagcaagcgctggaacccagagattcagtacacttcaaactactacaaatctacaaatgtggactttgctgtcaatacagagggaacttatagtgaaccccgccccattggcaccagatttctgactcgtaatctgtaa

SEQ ID NO: 1630 - DNA, 2211 bp, synthetic construct
  source 1..2211: mol_type = other DNA; note = Description of Artificial Sequence: Synthetic polynucleotide
  misc_difference 338: note = misc_feature - n is a, c, g, or t
atggctgccgatggttatcttccagattggctcgaggacactctctctgaaggaataagacagtggtggaagctcaaacctggcccaccaccaccaaagcccgcagagcggcataaggacgacagcaggggtcttgtgcttcctgggtacaagtacctcggccccttcaacggactcgacaagggggagcccgtcaacgcggcggacgcagcggccctcgagcacgacaaggcctacgaccagcagctcgaagcgggtgacaatccgtacctgcggtataaccacgccgacgccgagtttcaggagcgtctgcaagaagatacgtcttttgggggcancctcgggcgagcagtcttccaggccaagaagcgggttctcgaacctctcggtctggttgaggaaggcgctaagacggctcctggaaagaagagaccagtagagcagtcaccccaagaaccagactcctcctcgggcatcggcaggaaaggccaacagcccgccagaaaaagactcaattttggccagactggcgactcagagtcagttccagaccctcaacctctcggagaacctccagcagcgccctctggtgtgggacctaatacaatggcttcaggcggtggcgctccaatggcagacaataacgaaggcgccgacggagtgggtaatgcctcaggaaattggcattgcgattccacatggctgggcgacagagtcatcaccaccagcacccgcacctgggccttgcccacctacaataaccacctctacaagcaaatctccagtgcttcaacgggggccagcaacgacaaccactacttcggctacagcaccccctgggggtattttgatttcaacagattccactgccacttttcaccacgtgactggcagcgactcatcaacaacaattggggattccggcccaagagactcaacttcaaactcttcaacatccaggtcaaggaggtcacgcagaatgaaggcactaagaccatcgccaataaccttaccagcacgattcaggtatttacggactcggaataccagctgccgtacgtcctcggctccgcgcaccagggctgcctgcctccgttcccggcggacgtcttcatgattccccagtacggctaccttacactgaacaatggaagtcaagccgtaggccgttcctccttctactgcctggaatattttccatctcaaatgctgcgaactggcaacaacttccagtttacctacaccttcgaggacgtgcctttccacagcagctacgcccacagccagagcttggaccggctgatgaatcctctgattgaccagtacctgtactacttgtctcggactcagtccacaggaggaactcaaggtacccagcaattgttattttctcaagctgggcctgcaaacatgtcggctcaggctaagaactggctacctggaccttgctaccggcagcagcgagtctctacgacactgtcgcaaaacaacaacagcaactttgcttggactggtgccaccaaatatcacctgaacggaagagactctttggtaaatcccggtgtcgccatggcaacccacaaggacgacgaggaacgcttcttcccgtcgagtggagtcctgatgtttggaaaacagggtgctggaagagacaatgtggactacagcagcgttatgctaaccagcgaagaagaaattaaaaccactaaccctgtagccacagaacaatacggtgtggtggttgataacttgcagcaaaccaatacggggcctattgtgggaaatgtcaacagccaaggagccttacctggtatggtctggcagaaccgggacgtgtacctgcagggtcccatctgggccaagattcctcacacggacggcaacttccacccgtctccgctgatgggcggctttggcctgaaacatcctccgcctcagatcctcatcaaaaacacacctgtacctgcggatcctccaacggccttcaacaaggacaagctgaactctttcatcacccagtattctactggccaagtcagcgtggagatcgagtgggagctgcagaaggaaaacagcaagcgctggaacccggagatccagtacacttccaactattacaagtctaataatgttgaatttgctgttaatactgaaggtgtatatagtgaaccccgccccattggcaccagatacctgactcgtaatctgtaa

SEQ ID NO: 1631 - protein, 735 aa, synthetic construct
  source 1..735: note = Description of Artificial Sequence: Synthetic polypeptide
MAADGYLPDWLEDNLSEGIREWWDLKPGAPKPKANQQKQDDGRGLVLPGYKYLGPFNGLDKGEPVNAADAAALEHDKAYDRQLDSGDNPYLKYNHADAEFQERLKEDTSFGGNLGRAVFQAKKRVLEPFGLVEEGAKTAPGKKRPVEQSPQEPDSSSGIGKTGQQPAKKRLNFGQTGDSESVPDPQPLGEPPATPAAVGPTTMASGGGAPVADNNEGADGVGSSSGNWHCDSTWLGDRVITTSTRTWALPTYNNHLYKQISSASTGASNDNHYFGYSTPWGYFDFNRFHCHFSPRDWQRLINNNWGFRPKRLNFKLFNIQVKEVTTNEGTKTIANNLTSTVQVFTDSEYQLPYVLGSAHQGCLPPFPADVFMVPQYGYLTLNNGSQALGRSSFYCLEYFPSQMLRTGNNFTFSYTFEDVPFHSSYAHSQSLDRLMNPLIDQYLYYLVRTQTTGTGGTQTLAFSQAGPSSMANQARNWVPGPCYRQQRVSTTTNQNNNSNFAWTGAAKFKLNGRDSLMNPGVAMASHKDDDDRFFPSSGVLIFGKQGAGNDGVDYSQVLITDEEEIKATNPVATEEYGAVAINNQAANTQAQTGLVHNQGVIPGMVWQNRDVYLQGPIWAKIPHTDGNFHPSPLMGGFGLKHPPPQILIKNTPVPADPPLTFNQAKLNSFITQYSTGQVSVEIEWELQKENSKRWNPEIQYTSNYYKSTNVDFAVNTEGVYSEPRPIGTRYLTRNL

SEQ ID NO: 1632 - protein, 736 aa, synthetic construct
  source 1..736: note = Description of Artificial Sequence: Synthetic polypeptide
  VARIANT 113: note = misc_feature - Xaa can be any naturally occurring amino acid
MAADGYLPDWLEDTLSEGIRQWWKLKPGPPPPKPAERHKDDSRGLVLPGYKYLGPFNGLDKGEPVNAADAATLEHDKAYDQQLKAGDNPYLRYNHADAEFQERLQEDTSFGGXLGRAVFQAKKRVLEPLGLVEEAAKTAPGKKRPVEPSPQRSPDSSTGIGKKGQQPARKRLNFGQTGDSESVPDPQPLGEPPAAPSGVGPNTMAAGGGAPMADNNEGADGVGSSSGNWHCDSTWLGDRVITTSTRTWALPTYNNHLYKQISSASTGASNDNHYFGYSTPWGYFDFNRFHCHFSPRDWQRLINNNWGFRPKRLNFKLFNIQVKEVTTNDGVTTIANNLTSTVQVFSDSDYQLPYVLGSAHEGCLPPFPADVFMIPQYGYLTLNNGSQALGRSSFYCLEYFPSQMLRTGNNFQFSYTFEDVPFHSSYAHSQSLDRLMNPLIDQYLYYLVRTQTTGTGGTQTLAFSQAGPSSMANQARNWVPGPCYRQQRVSTTTNQNNNSNFAWTGAAKFKLNGRDSLMNPGVAMASHKDDDDRFFPSSGVLIFGKQGAGNDGVDYSQVLITDEEEIKATNPVATEEYGAVAINNQAANTQAQTGLVHNQGVIPGMVWQDRDVYLQGPIWAKIPHTDGHFHPSPLMGGFGLKHPPPQILIKNTPVPANPPAEFSATKFASFITQYSTGQVSVEIEWELQKENSKRWNPEVQYTSNYAKSANVDFTVDNNGLYTEPRPIGTRYLTRPL

SEQ ID NO: 1633 - protein, 737 aa, synthetic construct
  source 1..737: note = Description of Artificial Sequence: Synthetic polypeptide
  VARIANT 112: note = misc_feature - Xaa can be any naturally occurring amino acid
MTDGYLPDWLEDNLSEGVREWWALQPGAPKPKANQQKQDDGRGLVLPGYKYLGPFNGLDKGEPVNAADAAALEHDKAYDQQLKAGDNPYLRYNHADAEFQERLQEDTSFGGXLGRAVFQAKKRVLEPLGLVEEGAKTAPGKKRPVEPSPQRSPDSSTGIGKKGQQPARKRLNFGQTGDSESVPDPQPLGEPPAAPSGVGSLTMASGGGAPVADNNEGADGVGSSSGNWHCDSQWLGDRVITTSTRTWALPTYNNHLYKQISNSTSGGSSNDNAYFGYSTPWGYFDFNRFHCHFSPRDWQRLINNNWGFRPKRLSFKLFNIQVKEVTQNEGTKTIANNLTSTIQVFTDSEYQLPYVLGSAHQGCLPPFPADVFMIPQYGYLTLNNGSQAVGRSSFYCLEYFPSQMLRTGNNFQFTYTFEDVPFHSSYAHSQSLDRLMNPLIDQYLYYLSRTQTTGGTANTQTLGFSQGGPNTMANQAKNWLPGPCYRQQRVSTTTGQNNNSNFAWTAGTKYHLNGRNSLANPGIAMATHKDDEERFFPSNGILIFGKQNAARDNADYSDVMLTSEEEIKTTNPVATEEYGIVADNLQQQNTAPQIGTVNSQGALPGMVWQNRDVYLQGPIWAKIPHTDGNFHPSPLMGGFGLKHPPPQILIKNTPVPADPPTTLNQAKLNSFITQYSTGQVSVEIEWELQKENSKRWNPEIQYTSNYYKSTNVDFAVNTEGTYSEPRPIGTRFLTRNL

SEQ ID NO: 1634 - protein, 736 aa, synthetic construct
  source 1..736: note = Description of Artificial Sequence: Synthetic polypeptide
  VARIANT 113: note = misc_feature - Xaa can be any naturally occurring amino acid
MAADGYLPDWLEDTLSEGIRQWWKLKPGPPPPKPAERHKDDSRGLVLPGYKYLGPFNGLDKGEPVNAADAAALEHDKAYDQQLEAGDNPYLRYNHADAEFQERLQEDTSFGGXLGRAVFQAKKRVLEPLGLVEEGAKTAPGKKRPVEQSPQEPDSSSGIGRKGQQPARKRLNFGQTGDSESVPDPQPLGEPPAAPSGVGPNTMASGGGAPMADNNEGADGVGNASGNWHCDSTWLGDRVITTSTRTWALPTYNNHLYKQISSASTGASNDNHYFGYSTPWGYFDFNRFHCHFSPRDWQRLINNNWGFRPKRLNFKLFNIQVKEVTQNEGTKTIANNLTSTIQVFTDSEYQLPYVLGSAHQGCLPPFPADVFMIPQYGYLTLNNGSQAVGRSSFYCLEYFPSQMLRTGNNFQFTYTFEDVPFHSSYAHSQSLDRLMNPLIDQYLYYLSRTQSTGGTQGTQQLLFSQAGPANMSAQAKNWLPGPCYRQQRVSTTLSQNNNSNFAWTGATKYHLNGRDSLVNPGVAMATHKDDEERFFPSSGVLMFGKQGAGRDNVDYSSVMLTSEEEIKTTNPVATEQYGVVVDNLQQTNTGPIVGNVNSQGALPGMVWQNRDVYLQGPIWAKIPHTDGNFHPSPLMGGFGLKHPPPQILIKNTPVPADPPTAFNKDKLNSFITQYSTGQVSVEIEWELQKENSKRWNPEIQYTSNYYKSNNVEFAVNTEGVYSEPRPIGTRYLTRNL

SEQ ID NO: 1635 - DNA, 2211 bp, synthetic construct
  source 1..2211: mol_type = other DNA; note = Description of Artificial Sequence: Synthetic polynucleotide
atggccgccgacggctacctgcccgactggctggaggacaacctgagcgagggcatccgcgagtggtgggccctgaagcccggcgccccccagcccaaggccaaccagcagcaccaggacaacgcccgcggcctggtgctgcccggctacaagtacctgggccccggcaacggcctggacaagggcgagcccgtgaacgccgccgacgccgccgccctggagcacgacaaggcctacgaccagcagctgaaggccggcgacaacccctacctgaagtacaaccacgccgacgccgagttccaggagcgcctgaaggaggacaccagcttcggcggcaacctgggccgcgccgtgttccaggccaagaagcgcctgctggagcccctgggcctggtggaggaggccgccaagaccgcccccggcaagaagcgccccgtggagcagagcccccaggagcccgacagcagcgccggcatcggcaagagcggcgcccagcccgccaagaagcgcctgaacttcggccagaccggcgacaccgagagcgtgcccgacccccagcccatcggcgagccccccgccgcccccagcggcgtgggcagcctgaccatggccagcggcggcggcgcccccgtggccgacaacaacgagggcgccgacggcgtgggcagcagcagcggcaactggcactgcgacagccagtggctgggcgaccgcgtgatcaccaccagcacccgcacctgggccctgcccacctacaacaaccacctgtacaagcagatcagcaacagcaccagcggcggcagcagcaacgacaacgcctacttcggctacagcaccccctggggctacttcgacttcaaccgcttccactgccacttcagcccccgcgactggcagcgcctgatcaacaacaactggggcttccgccccaagcgcctgaacttcaagctgttcaacatccaggtgaaggaggtgaccgacaacaacggcgtgaagaccatcgccaacaacctgaccagcaccgtgcaggtgttcaccgacagcgactaccagctgccctacgtgctgggcagcgcccacgagggctgcctgccccccttccccgccgacgtgttcatgatcccccagtacggctacctgaccctgaacgacggcagccaggccgtgggccgcagcagcttctactgcctggagtacttccccagccagatgctgcgcaccggcaacaacttccagttcagctacgagttcgagaacgtgcccttccacagcagctacgcccacagccagagcctggaccgcctgatgaaccccctgatcgaccagtacctgtactacctgagcaagaccatcaacggcagcggccagaaccagcagaccctgaagttcagcgtggccggccccagcaacatggccgtgcagggccgcaactacatccccggccccagctaccgccagcagcgcgtgagcaccaccgtgacccagaacaacaacagcgagttcgcctggcccggcgccagcagctgggccctgaacggccgcaacagcctgatgaaccccggccccgccatggccagccacaaggagggcgaggaccgcttcttccccctgagcggcagcctgatcttcggcaagcagggcaccggccgcgacaacgtggacgccgacaaggtgatgatcaccaacgaggaggagatcaagaccaccaaccccgtggccaccgagagctacggccaggtggccaccaaccaccagagcgcccaggcccaggcccagaccggctgggtgcagaaccagggcatcctgcccggcatggtgtggcaggaccgcgacgtgtacctgcagggccccatctgggccaagatcccccacaccgacggcaacttccaccccagccccctgatgggcggcttcggcatgaagcacccccccccccagatcctgatcaagaacacccccgtgcccgccgacccccccaccgccttcaacaaggacaagctgaacagcttcatcacccagtacagcaccggccaggtgagcgtggagatcgagtgggagctgcagaaggagaacagcaagcgctggaaccccgagatccagtacaccagcaactactacaagagcaacaacgtggagttcgccgtgaacaccgagggcgtgtacagcgagccccgccccatcggcacccgctacctgacccgcaacctgtaa

SEQ ID NO: 1636 - DNA, 2211 bp, synthetic construct
  source 1..2211: mol_type = other DNA; note = Description of Artificial Sequence: Synthetic polynucleotide
atggctgccgatggttatcttccagattggctcgaggacactctctctgaaggaataagacagtggtggaagctcaaacctggcccaccaccaccaaagcccgcagagcggcataaggacgacagcaggggtcttgtgcttcctgggtacaagtacctcggacccttcaacggactcgacaagggagagccggtcaacgaggcagacgccgcggccctcgagcacgacaaggcctacgaccagcagctcaaggccggagacaacccgtacctcaagtacaaccacgccgacgccgagttccaggagcggctcaaagaagatacgtcttttgggggcaacctcggacgagcagtcttccaggccaagaagcgggttctcgaacctctcggtctggttgaggaaggcgctaagacggctcctggaaagaaacgtccggtagagcagtcgccacaagagccagactcctcctcgggcattggcaagacaggccagcagcccgctaaaaagagactcaattttggtcagactggcgactcagagtcagtccccgacccacaacctctcggagaacctccagcaacccccgctgctgtgggacctactacaatggcttcaggcggtggcgcaccaatggcggacaataacgaaggcgccgatggagtgggtagttcctcgggaaattggcattgcgattcccaatggctgggggacagagtcatcaccaccagcacccgaacatgggccttgcccacctataacaaccacctctacaagcaaatctccagtgcttcaacgggggccagcaacgacaaccactacttcggctacagcaccccctgggggtattttgacttcaacagattccactgccacttctcaccacgtgactggcagcgactcatcaacaacaactggggattccgacccaagagactcaacttcaagctctttaacattcaagtcaaggaggtcacgcagaatgaaggcaccaagaccatcgccaataacctcaccagcaccatccaggtgtttacggactcggagtaccagctgccgtacgttctcggctccgcccaccagggctgcctgcctccgttcccggcggacgtgttcatgattccccagtacggctacctaacactcaacaacggtagtcaggccgtgggacgctcctccttctactgcctggaatactttccttcgcagatgctgagaaccggcaacaacttccagtttacttacaccttcgaggacgtgcctttccacagcagctacgcccacagccagagcttggaccggctgatgaatcctctgattgaccagtacctgtactacttgtctcggactcaaacaacaggaggcacggcaaatacgcagactctgggcttcagccaaggtgggcctaatacaatggccaatcaggcaaagaactggctgccaggaccctgttaccgccaacaacgcgtctcaacgacaaccgggcaaaacaacaatagcaactttgcctggactgctgggaccaaataccatctgaatggaagaaattcattggctaatcctggcatcgctatggcaacacacaaagacgacaaggagcgtttttttcccagtaacgggatcctgatttttggcaaacaaaatgctgccagagacaatgcggattacagcgatgtcatgctcaccagcgaggaagaaatcaaaaccactaaccctgtggctacagaggaatacggtatcgtggcagataacttgcagcagcaaaacacggctcctcaaattggaactgtcaacagccagggggccttacccggtatggtctggcagaaccgggacgtgtacctgcagggtcccatctgggccaagattcctcacacggacggcaacttccacccgtctccgctgatgggcggctttggcctgaaacatcctccgcctcagatcctgatcaagaacacgcctgtacctgcggatcctccgaccaccttcaaccagtcaaagctgaactctttcatcacgcaatacagcaccggacaggtcagcgtggaaattgaatgggagctgcagaaagaaaacagcaaacgctggaacccagagattcaatacacttccaactactacaaatctacaagtgtggactttgctgttaatacagaaggcgtgtactctgaaccccaccccattggcacccgttacctcacccgtcccctgtaa

SEQ ID NO: 1637 - DNA, 2211 bp, synthetic construct
  source 1..2211: mol_type = other DNA; note = Description of Artificial Sequence: Synthetic polynucleotide
atggctgccgatggttatcttccagattggctcgaggacaacctctctgagggcattcgcgagtggtgggcgctgaaacctggagccccgaagcccaaagccaaccagcaaaagcaggacgacggccggggtctggtgcttcctggctacaagtacctcggacccttcaacggactcgacaagggggagccggtcaacgcagcagacgcggcggccctcgagcacgacaaggcctacgaccagcagctcaaggccggagacaacccgtacctcaagtacaaccacgccgacgccgagttccaggagcggctcaaagaagatacgtcttttgggggcaacctcgggcgagcagtcttccaggccaaaaagaggcttcttgaacctcttggtctggttgaggaagcggctaagacggctcctggaaagaagaggcctgtagagcagtctcctcaggaaccggactcctccgcgggtattggcaaatcgggtgcacagcccgctaaaaagagactcaattttggtcagactggcgactcagagtcagtccccgacccacaacctctcggagaacctccagcaacccccgctgctgtgggacctactacaatggcttcaggcggtggcgcaccaatggcagacaataacgaaggcgccgacggagtgggtaatgcctcaggaaattggcattgcgattccacatggctgggcgacagagtcatcaccaccagcacccgaacctgggccctgcccacctacaataaccacctctacaagcaaatctccagtgcttcaacgggggccagcaacgacaaccactacttcggctacagcaccccctgggggtattttgatttcaacagattccactgccacttttcaccacgtgactggcagcgactcatcaacaacaattggggattccggcccaagagactcaacttcaaactcttcaacatccaagtcaaggaggtcacgcagaatgaaggcaccaagaccatcgccaataacctcaccagcaccatccaggtgtttacggactcggagtaccagctgccgtacgttctcggctctgcccaccagggctgcctgcctccgttcccggcggacgtgttcatgattccccagtacggctacctaacactcaacaacggtagtcaggccgtgggacgctcctccttctactgcctggaatactttccttcgcagatgctgagaaccggcaacaacttccagtttacttacaccttcgaggacgtgcctttccacagcagctacgcccacagccagagcttggaccggctgatgaatcctctgattgaccagtacctgtactacttgtctcggactcaaacaacaggaggcacggcaaatacgcagactctgggcttcagccaaggtgggcctaatacaatggccaatcaggcaaagaactggctgccaggaccctgttaccgccaacaacgcgtctcaacgacaaccgggcaaaacaacaatagcaactttgcctggactgctgggaccaaataccatctgaatggaagaaattcattggctaatcctggcatcgctatggcaacacacaaagacgacaaggagcgtttttttcccagtaacgggatcctgatttttggcaaacaaaatgctgccagagacaatgcggattacagcgatgtcatgctcaccagcgaggaagaaatcaaagccactaaccctgtggctacagaggaatacggtatcgtggcagataacttgcagcagcaaaacacggctcctcaaattggaactgtcaacagccagggggccttacccggtatggtttggcagaaccgggacgtgtacctgcagggtcccatctgggccaagattcctcacacggacggcaacttccacccgtctccgctgatgggcggctttggcctgaaacatcctccgcctcagatcctgatcaagaacacgcctgtacctgcggatcctccgaccaccttcaaccagtcaaagctgaactctttcatcacgcaatacagcaccggacaggtcagcgtggaaattgaatgggagctgcagaaggaaaacagcaagcgctggaaccccgagatccagtacacctccaactactacaaatctacaagtgtggactttgctgttaatacagaaggcgtgtactctgaaccccaccccattggcacccgttacctcacccgtcccctgtaa

SEQ ID NO: 1638 - DNA, 2214 bp, synthetic construct
  source 1..2214: mol_type = other DNA; note = Description of Artificial Sequence: Synthetic polynucleotide
atggctgccgatggttatcttccagattggctcgaggacaacctctctgagggcattcgcgagtggtgggacttgaaacctggagccccgaagcccaaagccaaccagcaaaagcaggacgacggccggggtctggtgcttcctggctacaagtacctcggacccttcaacggactcgacaagggggagcccgtcaacgcggcggacgcagcggccctcgagcacgacaaggcctacgaccagcagctcaaagcgggtgacaatccgtacctgcggtataaccacgccgacgccgagtttcaggagcgtctgcaagaagatacgtcttttgggggcaacctcgggcgagcagtcttccaggccaagaagcgggttctcgaacctctcggtctggttgaggaaggcgctaatacggctcctggaaagaaacgtccggtagagcagtcgccacaagagccagactcctccgcgggtattggcaaatcgggtgcacagcccgctaaaaagagactcaatttcggtcagactggcgacacagagtcagtcccagaccctcaaccaatcggagaacctcccgcagccccctcaggtgtgggatctcttacaatggcttcaggtggtggcgcaccagtggcagacaataacgaaggtgccgatggagtgggtagttcctcgggaaattggcattgcgattcccaatggctgggggacagagtcatcaccaccagcacccgaacctgggccctgcccacctacaacaatcacctctacaagcaaatctccaacagcacatctggaggatcttcaaatgacaacgcctacttcggctacagcaccccctgggggtattttgacttcaacagattccactgccacttctcaccacgtgactggcagcgactcatcaacaacaactggggattccggcctaagcgactcaacttcaagctcttcaacattcaggtcaaagaggttacggacaacaatggagtcaagaccatcgccaataacctcaccagcaccatccaggtgtttacggactcggagtaccagctgccgtacgttctcggctccgcccaccagggctgcctgcctccgttcccggcggacgtgttcatgattccccagtacggctacctaacactcaacaacggtagtcaggccgtgggacgctcctccttctactgcctggaatactttccttcgcagatgctgagaaccggcaacaacttccagtttacttacaccttcgaggacgtgcctttccacagcagctacgcccacagccagagcttggaccggctgatgaatcctctgattgaccagtacctgtactacttgtctcggactcaaacaacaggaggcacggcaaatacgcagactctgggcttcagccaaggtgggcctaatacaatggccaatcaggcaaagaactggctgccaggaccctgttaccgccaacaacgcgtctcaacgacaaccgggcaaaacaacaatagcaactttgcctggactgctgggaccaaataccatctgaatggaagaaattcattggctaatcctggcatcgctatggcctcacacaaagacgacaaggagcgtttttttcccagtaacgggatcctgatttttggcaaacaaaatgctgccagagacaatgcggattacagcgatgtcatgctcaccagcgaggaagaaatcaaaaccactaaccctgtggctacagaggaatacggtatcgtggcagataacttgcagcagcaaaacacggctcctcaaattggaactgtcaacagtcaaggagccttacctggcatggtctggcagaaccgggacgtgtacctgcagggtcccatctgggccaagattcctcacacggacggcaacttccacccgtctccgctgatgggcggctttggcctgaaacatcctccgcctcagatcctgatcaagaacacgcctgtacctgcggatcctccgaccaccttcaaccagtcaaagctgaactctttcatcacgcaatacagcaccggacaggtcagcgtggaaattgaatgggagctgcagaaggaaaacagcaagcgctggaaccccgagatccagtacaccaccaactactacaaatctacaagtgtggactttgctgttaatacagaaggcgtgtactctgaaccccaccccattggcacccgttacctcacccgtcccctgtaa

SEQ ID NO: 1639 - DNA, 2211 bp, synthetic construct
  source 1..2211: mol_type = other DNA; note = Description of Artificial Sequence: Synthetic polynucleotide
atggctgccgatggttatcttccagattggctcgaggacaacctctctgagggcattcgcgagtggtgggcgctgaaacctggagccccgaagcccaaagccaaccagcaaaagcaggacgacggccggggtctggtgcttcctggctacaagtacctcggacccttcaacggactcgacaaaggagagccggtcaacgaggcggacgcggcagccctcgaacacgacaaagcttacgaccagcagctcaaggccggtgacaatccgtacctgcggtataaccacgccgacgccgagtttcaggagcgtcttcaagaagatacgtcttttgggggcaacctcgggcgagcagtcttccaggccaagaagcgggttctcgaacctctcggtctggttgaggaaggcgctaagacggctcctggaaagaaacgtccggtagagcagtcgccacaagagccagactcctcctcgggcatcggcaagacaggccagcagcccgctaaaaagagactcaattttggtcagactggcgactcagagtcagtccccgacccacaacctctcggagaacctccagcaacccccgctgctgtgggacctactacaatggcttcaggcggtggcgcaccaatggcagacaataacgaaggcgccgacggagtgggtaatgcctcaggaaattggcattgcgattccacatggctgggcgacagagtcatcaccaccagcacccgcacctgggccttgcccacctacaataaccacctctacaagcaaatctccagtgcttcaacgggggccagcaacgacaaccactacttcggctacagcaccccctgggggtattttgactttaacagattccactgccacttttcaccacgtgactggcaaagactcatcaacaacaactggggattccggcccaagagactcaacttcaagctcttcaacatccaggtcaaggaggtcacgcagaatgaaggcaccaagaccatcgccaataaccttaccagcacgattcaggtctttacggactcggaataccagctcccgtacgtcctcggctctgcgcaccagggctgcctccctccgttcccggcggacgtgttcatgattccgcagtacggctacctaacactcaacaacggtagtcaggccgtgggacgctcctccttctactgcctggaatactttccttcgcagatgctgagaaccggcaacaacttccagtttacttacaccttcgaggacgtgcctttccacagcagctacgcccacagccagagcttggaccggctgatgaatcctctgattgaccagtacctgtactacttgtctcggactcaaacaacaggaggcacggcaaatacgcagactctgggcttcagccaaggtgggcctaatacaatggccaatcaggcaaagaactggctgccaggaccctgttaccgccaacaacgcgtctcaacgacaaccgggcaaaacaacaatagcaactttgcctggactgctgggaccaaataccatctgaatggaagaaattcattggctaatcctggcatcgctatggcaacacacaaagacgacaaggagcgtttttttcccagtaacgggatcctgatttttggcaaacaaaatgctgccagagacaatgcggattacagcgatgtcatgctcaccagcgaggaagaaatcaaaaccactaaccctgtggctacagaggaatacggtatcgtggcagataacttgcagcagcaaaacacggctcctcaaattggaactgtcaacagccagggggccttacccggtatggtctggcagaaccgggacgtgtacctgcagggtcccatctgggccaagattcctcacacggacggcaacttccacccgtctccgctgatgggcggctttggcctgaaacatcctccgcctcagatcctgatcaagaacacgcctgtacctgcggatcctccgaccaccttcaaccagtcaaagctgaactctttcatcacgcaatacagcaccggacaggtcagcgtggaaattgaatgggagctgcagaaggaaaacagcaagcgctggaaccccgagatccagtacacctccaactactacaaatctacaagtgtggactttgctgttaatacagaaggcgtgtactctgaaccccaccccattggcacccgttacctcacccgtcccctgtaa

SEQ ID NO: 1640 - DNA, 2211 bp, synthetic construct
  source 1..2211: mol_type = other DNA; note = Description of Artificial Sequence: Synthetic polynucleotide
atggctgccgatggttatcttccagattggctcgaggacaacctctctgagggcattcgcgagtggtgggcgctgaaacctggagccccgaagcccaaagccaaccagcaaaagcaggacgacggccggggtctggtgcttcctggctacaagtacctcggacccttcaacggactcgacaaaggagagccggtcaacgaggcggacgcggcagccctcgaacacgacaaagcttacgaccagcagctcaaagcgggtgacaatccgtacctgcggtataaccacgccgacgccgagtttcaggagcgtctgcaagaagatacgtcttttgggggcaacctcgggcgagcagtcttccaggccaagaagagggttctcgaaccttttggtctggttgaggaaggtgctaagacggctcctggaaagaaacgtccggtagagcagtcgccacaagagccagactcctcctcgggcattggcaagacaggccagcagcccgctaaaaagagactcaattttggtcagactggcgactcagagtcagtccccgacccacaacctctcggagaacctccagcaacccccgctgctgtgggacctactacaatggcttcaggcggtggcgcaccaatggcagacaataacgaaggcgccgacggagtgggtaatgcctcaggaaattggcattgcgattcccaatggctgggcgacagagtcatcaccaccagcaccagaacctgggccttgcccacctataacaaccacctctacaagcaaatctccagtgcttcaacgggggccagcaacgacaaccactacttcggctacagcaccccctgggggtattttgatttcaacagattccactgccacttctcaccacgtgactggcagcgactcatcaacaacaactggggattccggcctaagcgactcaacttcaagctcttcaacattcaggtcaaagaggttacggacaacaatggagtcaagaccatcgccaataaccttaccagcacggttcaagtcttctcggactcggagtaccagttgccgtacgtcctcggctctgcgcaccagggctgcctccctccgttcccggcggacgtgttcatgattccccagtacggctacctaacactcaacaacggtagtcaggccgtgggacgctcctccttctactgcctggaatactttccttcgcagatgctgagaaccggcaacaacttccagtttacttacaccttcgaggacgtgcctttccacagcagctacgcgcacagccagagcttggaccggctgatgaatcctctgattgaccagtacctgtactacttgtctcggactcaaacaacaggaggcacggcaaatacgcagactctgggcttcagccaaggtgggcctaatacaatggccaatcaggcaaagaactggctgccaggaccctgttaccgccaacaacgcgtctcaacgacaaccgggcaaaacaacaatagcaactttgcctggactgctgggaccaaataccatctgaatggaagaaattcattggctaatcctggcatcgctatggcaacacacaaagacgacaaggagcgtttttttcccagtaacgggatcctgatttttggcaaacaaaatgctgccagagacaatgcggattacagcgatgtcatgctcaccagcgaggaagaaatcaaaaccactaaccctgtggctacagaggaatacggtatcgtggcagataacttgcagcagcaaaacacggctcctcaaattggaactgtcaacagccagggggccttacccggtatggtctggcagaaccgggacgtgtacctgcagggtcccatctgggccaagattcctcacacggacggcaacttccacccgtctccgctgatgggcggctttggcctgaaacatcctccgcctcagatcctgatcaagaacacgcctgtacctgcggatcctccgaccaccttcaaccagtcaaagctgaactctttcatcacgcaatacagcaccggacaggtcagcgtggaaattgaatgggagctgcagaaggaaaacagcaagcgctggaaccccgagatccagtacacctccaactactacaaatctacaagtgtggactttgctgttaatacagaaggcgtgtactctgaaccccaccccattggcacccgttacctcacccgtcccctgtaa

SEQ ID NO: 1641 - DNA, 2244 bp, synthetic construct
  source 1..2244: mol_type = other DNA; note = Description of Artificial Sequence: Synthetic polynucleotide
  misc_difference 2241: note = misc_feature - n is a, c, g, or t
atggctgccgatggttatcttccagattggctcgaggacactctctctgaaggaataagacagtggtggaagctcaaacctggcccaccaccaccaaagcccgcagagcggcataaggacgacagcaggggtcttgtgcttcctgggtacaagtacctcggacccttcaacggactcgacaagggagagccggtcaacgaggcagacgccgcggccctcgagcacgacaaagcctacgaccggcagctcgacagcggagacaacccgtacctcaagtacaaccacgccgacgcggagtttcaggagcgccttaaagaagatacgtcttttgggggcaacctcgggcgagcagtcttccaggccaagaagagggttctcgaaccttttggtctggttgaggaaggtgctaagacggctcctggaaagaaacgtccggtagagcagtcgccacaagagccagactcctcctcgggcattggcaagacaggccagcagcccgctaaaaagagactcaattttggtcagactggcgactcagagtcagtccccgacccacaacctctcggagaacctccagcaacccccgctgctgtgggacctactacaatggcttcaggcggtggcgcaccaatggcagacaataacgaaggcgccgacggagtgggtaatgcctcaggaaattggcattgcgattccacatggctgggcgacagagtcatcaccaccagcacccgaacatgggccttgcccacctataacaaccacctctacaagcaaatctccagtgcttcaacgggggccagcaacgacaaccactacttcggctacagcaccccctgggggtattttgacttcaacagattccactgccacttctcaccacgtgactggcagcgactcatcaacaacaactggggattccggcctaagcgactcaacttcaagctcttcaacattcaggtcaaagaggttacggacaacaatggagtcaagaccatcgccaataaccttaccagcacggtccaggtcttcacggactcagactatcagctcccgtacgtgctcgggtcggctcacgagggctgcctcccgccgttcccagcggacgttttcatgattcctcagtacggctacctaacactcaacaacggtagtcaggccgtgggacgctcctccttctactgcctggaatactttccttcgcagatgctgagaaccggcaacaacttccagtttacttacaccttcgaggacgtgcctttccacagcagctacgcgcacagccagagcttggaccggctgatgaatcctctgattgaccagtacctgtactacttgtctcggactcaaacaacaggaggcacggcaaatacgcagactctgggcttcagccaaggtgggcctaatacaatggccaatcaggcaaagaactggctgccaggaccctgttaccgccaacaacgcgtctcaacgacaaccgggcaaaacaacaatagcaactttgcctggactgctgggaccaaataccatctgaatggaagaaattcattggctaatcctggcatcgctatggcaacacacaaagacgacaaggagcgtttttttcccagtaacgggatcctgatttttggcaaacaaaatgctgccagagacaatgcggattacagcgatgtcatgctcaccagcgaggaagaaatcaaaaccactaaccctgtggctacagaggaatacggtatcgtggcagataacttgcagcagcaaaacacggctcctcaaattggaactgtcaacagccagggggccttacccggtatggtctggcagaaccgggacgtgtacctgcagggtcccatctgggccaagattcctcacacggacggcaacttccacccgtctccgctgatgggcggctttggcctgaaacatcctccgcctcagatcctgatcaagaacacgcctgtacctgcggatcctccgaccaccttcaaccagtcaaagctgaactctttcatcacgcaatacagcaccggacaggtcagcgtggaaattgaatgggagctgcagaaggaaaacagcaagcgctggaaccccgagatccagtacacctccaactactacaaatctacaagtgtggactttgctgttaatacagaaggcgtgtactctgaaccccaccccattggcaccagatacctgactcgtaatctgtaattgcttgttaatcaataaaccgtttaattnttt

SEQ ID NO: 1642 - DNA, 2217 bp, synthetic construct
  source 1..2217: mol_type = other DNA; note = Description of Artificial Sequence: Synthetic polynucleotide
atggctgccgatggttatcttccagattggctcgaggacaacctctctgagggcattcgcgagtggtgggacttgaaacctggagccccgaaacccaaagccaaccagcaaaagcaggacgacggccggggtctggtgcttcctggctacaagtacctcggacccttcaacggactcgacaagggggagcccgtcaacgcggcggacgcagcggccctcgagcacgacaaggcctacgaccagcagctccaagcgggtgacaatccgtacctgcggtataaccacgccgacgccgagtttcaggagcgtctgcaagaagatacgtcttttgggggcaacctcggacgagcagtcttccaggcgaaaaagagggttctcgaacctctcggtctggttgaggaaggcgctaagacggctcctggaaagaagagaccggtagagccatcaccccagcgttctccagactcctctacgggcatcggcaagaaaggccaacagcccgccagaaaaagactcaattttggtcagactggcgactcagagtcagttccagaccctcaacctctcggagaacctccagcagcgccctctggtgtgggacctaatacaatggctgcaggcggtggcgcaccaatggcagacaataacgaaggcgccgacggagtgggtagttcctcgggaaattggcattgcgattcccaatggctgggggacagagtcatcaccaccagcacccgaacctgggccctgcccacctacaacaatcacctctacaagcaaatctccaacagcacatctggaggatcttcaaatgacaacgcctacttcggctacagcaccccctgggggtattttgacttcaaccgcttccactgccacttctcaccacgtgactggcagcgactcatcaacaacaactggggattccggcccaagagactcagcttcaaactcttcaacatccaggtcaaggaggtcacgcagaatgaaggcaccaagaccatcgccaataacctcaccagcaccatccaggtgtttacggactcggagtaccagctgccgtacgttctcggctctgcccaccagggctgcctgcctccgttcccggcggacgtgttcatgattcctcagtacggctacctaacgctcaacaatggcagccaggcagtgggacggtcatccttttactgcctggaatatttcccatcgcagatgctgagaacgggcaacaactttaccttcagctacacctttgaggacgttcctttccacagcagctacgctcacagccagagtctggaccgtctcatgaatcctctgattgaccagtacctgtactacttgtctcggactcaaacaacaggaggcacggcaaatacgcagactctgggcttcagccaaggtgggcctaatacaatggccaatcaggcaaagaactggctgccaggaccctgttaccgccaacaacgcgtctcaacgacaaccgggcaaaacaacaatagcaactttgcctggactgctgggaccaaataccatctgaatggaagaaattcattggctaatcctggcatcgctatggcaacacacaaagacgacaaggagcgtttttttcccagtaacgggatcctgatttttggcaaacaaaatgctgccagagacaatgcggattacagcgatgtcatgctcaccagcgaggaagaaatcaaaaccactaaccctgtggctacagaggaatacggtatcgtggcagataacttgcagcagcaaaacacggctcctcaaattggaactgtcaacagccagggggccttacccggtatggtctggcagaaccgggacgtgtacctgcagggtcccatctgggccaagattcctcacacggacggcaacttccacccgtctccgctgatgggcggctttggacttaagcacccgcctcctcagatcctcatcaaaaacacgcctgttcctgcggatcctccgaccaccttcaaccagtcaaagctgaactctttcatcacgcaatacagcaccggacaggtcagcgtggaaattgaatgggagctgcagaaggaaaacagcaagcgctggaaccccgagatccagtacacctccaactactacaaatctacaagtgtggactttgctgttaatacagaaggcgtgtactctgaaccccaccccattggcacccgttacctcacccgtcccctgtaa

SEQ ID NO: 1643 - DNA, 2214 bp, synthetic construct
  source 1..2214: mol_type = other DNA; note = Description of Artificial Sequence: Synthetic polynucleotide
atggctgccgatggttatcttccagattggctcgaggacaacctctctgagggcattcgcgagtggtgggacttgaaacctggagccccgaagcccaaagccaaccagcaaaagcaggacgacggccggggtctggtgcttcctggctacaagtacctcggacccttcaacggactcgacaagggggagcccgtcaacgcggcggatgcagcggccctcgagcacgacaaagcctacgaccagcagctcaaagcgggtgacaatccgtacctgcggtataaccacgccgacgccgagtttcaggagcgtctgcaagaagatacgtcttttgggggcaacctcgggcgagcagtcttccaggccaagaagagggttctcgaaccttttggtctggttgaggaaggtgctaagacggctcctggaaagaaacgtccggtagagcagtcgccacaagagccagactcctcctcgggcattggcaagacaggccagcagcccgctaaaaagagactcaattttggtcagactggcgactcagagtcagtccccgacccacaacctctcggagaacctccagcaacccccgctgctgtgggacctactacaatggcttcaggcggtggcgcacccatgcaagacaataacgaaggcgccgacggagtgggtagttcctcgggaaattggcattgcgattccacatggctgggcgacagagtcatcaccaccagcacccgaacctgggccctgcccacctacaacaaccacctctacaagcaaatctccaacgggacatcgggaggagccaccaacgacaacacctacttcggctacagcaccccctgggggtattttgactttaacagattccactgccacttttcaccacgtgactggcagcgactcatcaacaacaactggggattccggcccaagagactcaacttcaagctcttcaacatccaggtcaaggaggtcacgcagaatgaaggcaccaagaccatcgccaataaccttaccagcacgattcaggtctttacggattcggaataccagctcccgtacgtcctcggctctgcgcaccagggctgcctccctccgttcccggcggacgtgttcatgattccgcagtacggctacctaacgctcaacaatggtagccaggcagtgggacggtcatccttttactgcctggaatatttcccatcgcagatgctgagaacgggcaacaactttaccttcagctacacctttgaggacgttcctttccacagcagctacgctcacagccagagtctggaccgtctcatgaatcctctgattgaccagtacctgtactacttgtctcggactcaaacaacaggaggcacggcaaatacgcagactctgggcttcagccaaggtgggcctaatacaatggccaatcaggcaaagaactggctgccaggaccctgttaccgccaacaacgcgtctcaacgacaaccgggcaaaacaacaatagcaactttgcctggactgctgggaccaaataccatctgaatggaagaaattcattggctaatcctggcatcgctatggcaacacacaaagacgacaaggagcgtttttttcccagtaacgggatcctgatttttggcaaacaaaatgctgccagagacaatgcggattacagcgatgtcatgctcaccagcgaggaagaaatcaaaaccactaaccctgtggctacagaggaatacggtatcgtggcagataacttgcagcagcaaaacacggctcctcaaattggaactgtcaacagccagggggccttacccggtatggtctggcagaaccgggacgtgtacctgcagggtcccatctgggccaagattcctcacacggacggcaacttccacccgtctccgctgatgggcggctttggcctgaaacatcctccgcctcagatcctgatcaagaacacgcctgtacctgcggatcctccgaccaccttcaaccagtcaaagctgaactctttcatcacgcaatacagcaccggacaggtcagcgtggaaattgaatgggagctgcagaaggaaaacagcaagcgctggaaccccgagatccagtacacctccaactactacaaatctacaagtgtggactttgctgttaatacagaaggcgtgtactctgaaccccaccccattggcacccgttacctcacccgtcccctgtaa

SEQ ID NO: 1644 - DNA, 2211 bp, synthetic construct
  source 1..2211: mol_type = other DNA; note = Description of Artificial Sequence: Synthetic polynucleotide
atggctgccgatggttatcttccagattggctcgaggacaacctctctgagggcattcgcgagtggtgggcgctgaaacctggagccccgaagcccaaagccaaccagcaaaagcaggacgacggccggggtctggtgcttcctggctacaagtacctcggacccttcaacggactcgacaagggggagcccgtcaacgcggcggacgcagcggccctcgagcacgacaaggcctacgaccagcagctcaaagcgggtgacaatccgtacctgcggtataaccacgccgacgccgagtttcaggagcgtctgcaagaagatacgtcttttgggggcaacctcgggcgagcagtcttccaggccaagaagcgggttctcgaacctctcggtctggttgaggaaggcgctaagacggctcctggaaagaaacgtccggtagagcagtcgccacaagagccagactcctcctcgggcatcggcaagacaggccagcagcccgctaaaaagagactcaattttggtcagactggcgactcagagtcagtccccgacccacaacctctcggagaacctccagcaacccccgctgctgtgggacctactacaatggcttcaggcggtggcgcaccaatggcagacaataacgaaggcgccgacggagtgggtagttcctcgggaaattggcattgcgattccacatggctgggcgacagagtcatcaccaccagcacccgcacctgggccttgcccacctacaataaccacctctacaagcaaatctccagtgcttcaacgggggccagcaacgacaaccactacttcggctacagcaccccctgggggtattttgacttcaacagattccactgccacttctcaccacgtgactggcagcgactcatcaacaacaactggggattccggcctaagcgactcaacttcaagctcttcaacattcaggtcaaagaggttacggacaacaatggagtcaagaccatcgccaataaccttaccagcacggtccaggtcttcacggactcagactatcagctcccgtacgtgctcgggtcggctcacgagggctgcctcccgccgttcccagcggacgttttcatgattcctcagtacgggtatctgacgctcaacaatggcagccaggcagtgggacggtcatccttttactgcctggaatatttcccatcgcagatgctgagaacgggcaataactttaccttcagctacaccttcgaggacgtgcctttccacagcagctacgcgcacagccagagcctggaccggctgatgaatcctctgattgaccagtacctgtactacttgtctcggactcaaacaacaggaggcacggcaaatacgcagactctgggcttcagccaaggtgggcctaatacaatggccaatcaggcaaagaactggctgccaggaccctgttaccgccaacaacgcgtctcaacgacaaccgggcaaaacaacaatagcaactttgcctggactgctgggaccaaataccatctgaatggaagaaattcattggctaatcctggcatcgctatggcaacacacaaagacgacaaggagcgtttttttcccagtaacgggatcctgatttttggcaaacaaaatgctgccagagacaatgcggattacagcgatgtcatgctcaccagcgaggaagaaatcaaaaccactaaccctgtggctacagaggaatacggtatcgtggcagataacttgcagcagcaaaacacggctcctcaaattggaactgtcaacagccagggggccttacccggtatggtctggcagaaccgggacgtgtacctgcagggtcccatctgggccaagattcctcacacggacggcaacttccacccgtctccgctgatgggcggctttggcctgaaacatcctccgcctcagatcctgatcaagaacacgcctgtacctgcggatcctccgaccaccttcaaccagtcaaagctgaactctttcatcacgcaatacagcaccggacaggtcagcgtggaaattgaatgggagctgcagaaggaaaacagcaagcgctggaaccccgagatccagtacacctccaactactacaaatctacaagtgtggactttgctgttaatacagaaggcgtgtactctgaaccccaccccattggcacccgttacctcacccgtcccctgtaa

SEQ ID NO: 1645 - DNA, 2214 bp, synthetic construct
  source 1..2214: mol_type = other DNA; note = Description of Artificial Sequence: Synthetic polynucleotide
atggctgccgatggttatcttccagattggctcgaggacaacctctctgagggcattcgcgagtggtgggacttgaaacctggagccccgaaacccaaagccaaccagcaaaagcaggacgacggccggggtctggtgcttcctggctacaagtacctcggacccttcaacggactcgacaagggggagcccgtcaacgcggcggatgcagcggccctcgagcacgacaaggcctacgaccagcagctcaaagcgggtgacaatccgtacctgcggtataaccacgccgacgccgagtttcaggagcgtctgcaagaagatacgtcttttgggggcaacctcgggcgagcagtcttccaggccaagaagcgggttctcgaacctctcggtctggttgaggaaggcgctaagacggctcctggaaagaagagaccggtagagccatcaccccagcgttctccagactcctctacgggcatcggcaagaaaggccaacagcccgccagaaaaagactcaattttggtcagactggcgactcagagtcagtccccgacccacaacctctcggagaacctccagcaacccccgctgctgtgggacctactacaatggcttcaggcggtggcgcaccaatggcagacaataacgaaggcgccgacggagtgggtaatgcctcaggaaattggcattgcgattccacatggctgggcgacagagtcatcaccaccagcacccgaacatgggccttgcccacctataacaaccacctctacaagcaaatctccagtgcttcaacgggggccagcaacgacaaccactacttcggctacagcaccccctgggggtattttgatttcaacagattccactgccatttctcaccacgtgactggcagcgactcatcaacaacaatttgggatcccggcccaagagactcaacttcaagctcttcatcatccaagtcaaggaggtcacgacgaatgatggcgtcacgaccatcgctaataaccttaccagcacggttcaagtcttctcggactcggagtaccagttgccgtacgtcctcggctctgcgcaccagggctgcctccctccgttcccggcggacgtgttcatgattccgcagtacggctacctaacgctcaacaatggcagccaggcagtgggacggtcatccttttactgcctggaatatttcccatcgcagatgctgagaacgggcaataactttaccttcagctacaccttcgaggacgtgcctttccacagcagctacgcgcacagccagagcctggaccggctgatgaatcctctcatcgaccagtacctgtattacctgaacagaactcagaatcagtccggaagtgcccaaaacaaggacttgctgtttagccgggggtctccagctggcatgtctgttcagcccaaaaactggctacctggaccctgttaccggcagcagcgcgtttctaaaacaaaaacagacaacaacaacagcaactttacctggactggtgcttcaaaatataaccttaatgggcgtgaatctataatcaaccctggcactgctatggcctcacacaaagacgacaaagacaagttctttcccatgagcggtgtcatgatttttggaaaggagagcgccggagcttcaaacactgcattggacaatgtcatgatcacagacgaagaggaaatcaaagccactaaccccgtggccaccgaaagatttgggactgtggcagtcaatctccagagcagcagcacagaccctgcgaccggagatgtgcatgttatgggagccttacctggaatggtgtggcaagacagagacgtatacctgcagggtcctatttgggccaaaattcctcacacggatggacactttcacccgtctcctctcatgggcggctttggacttaagcacccgcctcctcagatcctcatcaaaaacacgcctgttcctgcgaatcctccggcagagttttcggctacaaagtttgcttcattcatcacccagtattccacaggacaagtgagcgtggagattgaatgggagctgcagaaagaaaacagcaaacgctggaatcccgaagtgcagtatacatctaactatgcaaaatctgccaacgttgatttcactgtggacaacaatggactttatactgagcctcgccccattggcacccgttacctcacccgtcccctgtaa

SEQ ID NO: 1646 - DNA, 2211 bp, synthetic construct
  source 1..2211: mol_type = other DNA; note = Description of Artificial Sequence: Synthetic polynucleotide
atggctgccgatggttatcttccagattggctcgaggacaacctctctgagggcattcgcgagtggtgggcgctgaaacctggagccccgaaacccaaagccaaccagcaaaagcaggacgacggccggggtctggtgcttcctggctacaagtacctcggacccttcaacggactcgacaagggggagcccgtcaacgcggcggacgcagcggccctcgagcacgacaaggcctacgaccagcagctcaaggcgggtgacaatccgtacctgcggtataaccacgccgacgccgagtttcaggagcgtctgcaagaagatacgtcttttgggggcaacctcgggcgagcagtcttccaggccaaaaagaggcttcttgaacctcttggtctggttgaggaagcggctaagacggctcctggaaagaaacgtccggtagagcagtcgccacaagagccagactcctcctcgggcattggcaagacaggccagcagcccgctaaaaagagactcaactttgggcagactggcgactcagagtcagtgcccgaccctcaaccaatcggagaacctccagcaacccccgctgctgtgggacctactacaatggcttcaggcggtggcgcaccaatggcggacaataacgaaggcgccgatggagtgggtaattcctcgggaaattggcattgcgattccacatggctgggcgacagagtcatcaccaccagcacccgaacctgggccctgcccacctacaacaatcacctctacaagcaaatctccagtgcttcaacgggggccagcaacgacaaccactacttcggctacagcaccccctgggggtattttgatttcaacagattccactgccacttttcaccacgtgactggcagcgactcatcaacaacaactggggattccggcccaagagactcaacttcaagctcttcaacatccaggtcaaggaggtcacgcagaatgaaggcaccaagaccatcgccaataacctcaccagcaccatccaggtgtttacggactcggagtaccagctgccgtacgttctcggctccgcccaccagggctgcctgcctccgttcccggcggacgtgttcatgattccgcagtacggctacctaacgctcaacaatggcagccaggcagtgggacggtcatccttttactgcctggaatatttcccatcgcagatgctgagaacgggcaacaactttaccttcagctacacctttgaggacgttcctttccacagcagctacgctcacagccagagtctggaccgtctcatgaatcctctgattgaccagtacctgtactacttgtctcggactcaaacaacaggaggcacggcaaatacgcagactctgggcttcagccaaggtgggcctaatacaatggccaatcaggcaaagaactggctgccaggaccctgttaccgccaacaacgcgtctcaacgacaaccgggcaaaacaacaatagcaactttgcctggactgctgggaccaaataccatctgaatggaagaaattcattggctaatcctggcatcgctatggcaacacacaaagacgacaaggagcgtttttttcccagtaacgggatcctgatttttggcaaacaaaatgctgccagagacaatgcggattacagcgatgtcatgctcaccagcgaggaagaaatcaaaaccactaaccctgtggctacagaggaatacggtatcgtggcagataacttgcagcagcaaaacacggctcctcaaattggaactgtcaacagccagggggccttacccggtatggtctggcagaaccgggacgtgtacctgcagggtcccatctgggccaagattcctcacacggacggcaacttccacccgtctccgctgatgggcggctttggcctgaaacatcctccgcctcagatcctgatcaagaacacgcctgtacctgcggatcctccgaccaccttcaaccagtcaaagctgaactctttcatcacgcaatacagcaccggacaggtcagcgtggaaattgaatgggagctgcagaaggaaaacagcaagcgctggaaccccgagatccagtacacctccaactactacaaatctacaagtgtggactttgctgttaatacagaaggcgtgtactctgatccccaccccattggcacccgttacctcacccgtcccctgtaa

SEQ ID NO: 1647 - DNA, 2211 bp, synthetic construct
  source 1..2211: mol_type = other DNA; note = Description of Artificial Sequence: Synthetic polynucleotide
atggctgccgatggttatcttccagattggctcgaggacaacctctctgagggcattcgcgagtggtgggcgctgaaacctggagccccgaagcccaaagccaaccagcaagagcaggacgacggccggggtctggtgcttcctggctacaagtacctcggacccttcaacggactcgacaagggagagcccgtcaacgcggcggatgcagcggccctcgagcacgacaaagcctacgaccagcagctcaaagcgggtgacaatccgtacctgcggtataaccacgccgacgccgagtttcaggagcgtctgcaagaagatacgtcttttgggggcaacctcgggcgagcagtcttccaggccaagaagagggttctcgaaccttttggtctggttgaggaaggtgctaagacggctcctggaaagaaacgtccggtagagcagtcgccacaagagccagactcctcctcgggcattggcaagacaggccagcagcccgctaaaaagagactcaattttggtcagactggcgactcagagtcagttccagaccctcaacctctcggagaacctccagcagcgccctctggtgtgggacctaatacaatggctgcaggcggtggcgcaccaatggcagacaataacgaaggcgccgacggagtgggtagttcctcgggaaattggcattgcgattccacatggctgggcgacagagtcatcaccaccagcacccgaacctgggccctgcccacctacaacaaccacctctacaagcaaatctccagtgcttcaacgggggccagcaacgacaaccactacttcggctacagcaccccctgggggtattttgactttaacagattccactgccacttttcaccacgtgactggcagcgactcatcaacaacaactggggattccggcccaagagactcaacttcaagctcttcaacatccaggtcaaggaggtcacgcagaatgaaggcaccaagaccatcgccaataaccttaccagcacgattcaggtctttacggattcggaataccagctcccgtacgtcctcggctctgcgcaccagggctgcctccctccgttcccggcggacgtgttcatgattccgcagtacggctacctaacgctcaacaatggtagccaggcagtgggacggtcatcctttttctgcctggaatatttcccatcgcagatgctgagaacgggcaacaactttaccttcagctacacctttgaggacgttcctttccacagcagctacgctcacagccagagtctggaccgtctcatgaatcctctgattgaccagtacctgtactacttgtctcggactcaaacaacaggaggcacggcaaatacgcagactctgggcttcagccaaggtgggcctaatacaatggccaatcaggcaaagaactggctgccaggaccctgttaccgccaacaacgcgtctcaacgacaaccgggcaaaacaacaatagcaactttgcctggactgctgggaccaaataccatctgaatggaagaaattcattggctaatcctggcatcgctatggcaacacacaaagacgacaaggagcgtttttttcccagtaacgggatcctgatttttggcaaacaaaatgctgccagagacaatgcggattacagcgatgtcatgctcaccagcgaggaagaaatcaaaaccactaaccctgtggctacagaggaatacggtatcgtggcagataacttgcagcagcaaaacacggctcctcaaattggaactgtcaacagccagggggccttacccggtatggtctggcagaaccgagacgtgtacctgcagggtcccatctgggccaagattcctcacacggacggcaacttccacccgtctccgctgatgggcggctttggcctgaaacatcctccgcctcagatcctgatcaagaacacgcctgtacctgcggatcctccgaccaccttcaaccagtcaaagctgaactctttcatcacgcaatacagcaccggacaggtcagcgtggaaattgaatgggagctgcagaaggaaaacagcaagcgctggaaccccgagatccagtacacctccaactactacaaatctacaagtgtggactttgctgttaatacagaaggcgtgtactctgaaccccaccccattggcacccgttacctcacccgtcccctgtaa

SEQ ID NO: 1648 - DNA, 2211 bp, synthetic construct
  source 1..2211: mol_type = other DNA; note = Description of Artificial Sequence: Synthetic polynucleotide
atggctgccgatggttatcttccagattggctcgaggacaacctctctgagggcattcgcgagtggtgggacttgaaacctggagccccgaagcccaaagccaaccagcaaaagcaggacgacggccggggtctggtgcttcctggctacaagtacctcggacccttcaacggactcgacaagggggagcccgtcaacgcggcggacgcagcggccctcgagcacgacaaggcctacgaccagcagctcaaagcgggtgacaatccgtacctgcggtataaccacgccgacgccgagtttcaggagcgtctgcaagaagatacgtcttttgggggcaacctcgggcgagcagtcttccaggccaagaagcgggttctcgaacctctcggtctggttgaggaaggcgctaagacggctcctggaaagaaacgtccggtagagcagtcaccacaagagccagactcctcctcgggcatcggcaagacaggccagcagcccgctaaaaagagactcaattttggtcagactggcgactcagagtcagtccccgacccacaacctctcggagaacctccagcaacccccgctgctgtgggacctactacaatggcttcaggcggtggcgcaccaatggcggacaataacgaaggcgccgacggagtgggtaatgcctcaggaaattggcattgcgattccacatggctgggcgacagagtcatcaccaccagcacccgaacatgggccttgcccacctataacaaccacctctacaagcaaatctccagtgcttcaacgggggccagcaacgacaaccactacttcggctacagcaccccctgggggtattttgatttcaacagattccactgccatttctcaccacgtgactggcagcgactcatcaacaacaattggggattccggcccaagagactcaacttcaagctcttcaacatccaagtcaaggaggtcacgacgaatgatggcgtcacgaccatcgctaataaccttaccagcacggttcaagtcttctcggactcggagtaccagttgccgtacgtcctcggctctgcgcaccagggctgcctccctccgttcccggcggacgtgttcatgattccgcagtacggctacctaacgctcaacaatggcagccaggcagtgggacggtcatccttttactgcctggaatatttcccatcgcagatgctgagaacgggcaataactttaccttcagctacaccttcgaggacgtgcctttccacagcagctacgcgcacagccagagcctggaccggctgatgaatcctctcatcgaccagtacctgtattacctgaacagaactcagaatcagtccggaagtgcccaaaacaaggacttgctgtttagccgggggtctccagctggcatgtctgttcagcccaaaaactggctacctggaccctgttaccggcagcagcgcgtttctaaaacaaaaacagacaacaacaacagcaactttacctggacaggtgcttcaaaatataaccttaatgggcgtgaatctataatcaaccctggcactgctatggcctcacacaaagacgacaaagacaagttctttcccatgagcggtgtcatgatttttggaaaggagagcgccggagcttcaaacactgcattggacaatgtcatgatcacagacgaagaggaaatcaaagccactaaccccgtggccaccgaaagatttgggactgtggcagtcaatctccagaacagcagcacagaccctgcgaccggagatgtgcatgttatgggagccttacctggaatggtgtggcaagacagagacgtatacctgcagggtcctatttgggccaaaattcctcacacggatggacactttcacccgtctcctctcatgggcggctttggacttaagcacccgcctcctcagatcctcatcaaaaacacgcctgttcctgcgaatcctccggcagagttttcggctacaaagtttgcttcattcatcacccagtattccacaggacaagtgagcgtggagattgaatgggagctgcagaaagaaaacagcaaacgctggaatcccgaagtgcagtatacatctaactatgcaaaatctgccaacgttgatttcactgtagacaacaatggactttatactgtgcctcgccccattggcacccgttacctcacccgtcccctgtaa

SEQ ID NO: 1649 - DNA, 2211 bp, synthetic construct
  source 1..2211: mol_type = other DNA; note = Description of Artificial Sequence: Synthetic polynucleotide
atggctgccgatggttatcttccagattggctcgaggacaacctctctgagggcattcgcgagtggtgggcgctgaaacctggagccccgaagcccaaagccaaccagcaaaagcaggacgacggccggggtctggtgcttcctggctacaagtacctcggacccttcaacggactcgacaaaggagagccggtcaacgcggcggacgcggcggccctcgaacacgacaaggcttacgaccagcagctcaaggcgggtgacaacccctacctgcggtataaccacgccgacgccgagttccaggagcggctgcaagaagatacgtcttttgggggcaacctcgggcgagcagtcttccaggccaaaaagaggcttcttgaacctcttggtctggttgaggaaggcgctaagacggctcctggaaagaagaggcctgtagagcagtctcctcaagaaccggactcctcctcgggtattggcaaaacaggtgagcagcccgctaaaaagagactcaattttggtcagactggcgactcagagtcagtccccgacccacaacctctcggagaacctccagcaacccccgctgctgtgggacctactacaatggcttcaggcggtggcgcaccaatggcagacaataacgaaggcgccgacggagtgggtagtgcctcaggaaattggcattgcgattccacatggctgggcgacagagtcatcaccaccagcacccgaacctgggccctgcccacctataacaaccatctctacaagcaaatctccagtgcttcaacgggggccagcaacgacaaccactacttcggctacagcaccccctgggggtattttgacttcaacagattccactgccacttctcaccacgtgactggcagcgactcatcaacaacaactggggattccggcctaagcgactcaacttcaagctcttcaacattcaggtcaaagaggttacggacaacaatggagtcaagaccatcgccaataacctcaccagcaccatccaggtgttcacggactcagagtatcagctgccgtacgtgctcgggtcggctcaccagggctgcctccctccgttcccagcggacgtgttcatgattcctcagtacgggtatctgacactcaacaacggcagtcaggcagtgggacggtcatccttctactgcctggaatattttccatcgcagatgctgagaaccggcaacaactttccgttcagttacaccttcgaggacgtgcctttccacagcagctacgcgcacagccagagcctggaccggctgatgaatcctctgattgaccagtacctgtactacttgtctcggactcaaacaacaggaggcacggcaaatacgcagactctgggcttcagccaaggtgggcctaatacaatggccaatcaggcaaagaactggctgccaggaccctgttaccgccaacaacgcgtctcaacgacaaccgggcaaaacaacaatagcaactttgcctggactgctgggaccaaataccatctgaatggaagaaattcattggctaatcctggcatcgctatggcaacacacaaagacgacaaggagcgtttttttcccagtaacgggatcctgatttttggcaaacaaaatgctgccagagacaatgcggattacagcgatgtcatgctcaccagcgaggaagaaatcaaaaccactaaccctgtggctacagaggaatacggtatcgtggcagataacttgcagcagcaaaacacggctcctcaaattggaactgtcaacagccagggggccttacccggtatggtctggcagaaccgggacgtgtacctgcagggtcccatctgggccaagattcctcacacggacggcaacttccacccgtctccgctgatgggcggctttggcctgaaacatcctccgcctcagatcctgatcaagaacacgcctgtacctgcggatcctccgaccaccttcaaccagtcaaagctgaactctttcatcacgcaatacagcaccggacaggtcagcgtggaaattgaatgggagctgcagaaggaaaacagcaagcgctggaaccccgagatccagtacacctccaactactacaaatctacaagtgtggactttgctgttaatacagaaggcgtgtactctgaaccccaccccattggcacccgttacctcacccgtcccctgtaa

SEQ ID NO: 1650 - DNA, 2211 bp, synthetic construct
  source 1..2211: mol_type = other DNA; note = Description of Artificial Sequence: Synthetic polynucleotide
atggctgccgatggttatcttccagattggctcgaggacaacctctctgagggcattcgcgagtggtgggcgctgaaacctggagccccgaagcccaaagccaaccagcaaaagcaggacgacggccggggtctggtgcttcctggctacaagtacctcggacccttcaacggactcgacaagggggagcccgtcaacgcggcggacgcagcggccctcgagcacgacaaggcctacgaccagcagctcaaagcgggtgacaatccgtacctgcggtataaccacgccgacgccgagtttcaggagcgtctgcaagaagatacgtcttttgggggcaacctcgggcgagcagtcttccaggccaagaagcgggttctcgaacctctcggtctggttgaggaaggcgctaagacggctcctggaaagaaacgtccggtagaacagtcgccacaagagccagactcctcctcgggcatcggcaagacaggccagcagcccgctaaaaagagactcaattttggtcagactggcgactcagagtcagtccccgatccacaacctctcggagaacctccagcaacccccgctgctgtgggacctactacaatggcttcaggcggtggcgcaccaatggcagacaataacgaaggcgccgacggagtgggtagttcctcgggaaattggcattgcgattcccaatggctgggggacagagtcatcaccaccagcacccgaacctgggccctgcccacctacaacaaccacctctacaagcaaatctccagtgcttcaacgggggccagcaacgacaaccactacttcggctacagcaccccctgggggtattttgatttcaacagattccactgccatttctcaccacgtgactggcagcgactcatcaacaacaactggggattccggcctaagcgactcaacttcaagctcttcaacattcaggtcaaagaggttacggacaacaatggagtcaagaccatcgccaataaccttaccagcacggtccaggtcttcacggactcggagtaccagttgccgtacgtcctcggctctgcgcaccaggactgcctccctccgttcccggcggacgtgttcatgattccgcagtacggctacctaacgctcaacaatggcagccaggcagtgggacggtcatccttttactgcctggaatatttcccatcgcagatgctgagaacgggcaacaactttaccttcagctacacctttgaggacgttcctttccacagcagctacgctcacagccagagtctggaccgtctcatgaatcctctgattgaccagtacctgtactacttgtctcggactcaaacaacaggaggcacggcaaatacgcagactctgggcttcagccaaggtgggcctaatacaatggccaatcaggcaaagaactggctgccaggaccctgttaccgccaacaacgcgtctcaacgacaaccggacaaaacaacaatagcaactttgcctggactgctgggaccaaataccatctgaatggaagaaattcattggctaatcctggcatcgctatggcaacacacaaagacgacaaggagcgtttttttcccagtaacgggatcctgatttttggcaaacaaaatgctgccagagacaatgcggattacagcgatgtcatgctcaccagcgaggaagaaatcaaaaccactaaccctgtggctacagaggaatacggtatcgtggcagataacttgcagcagcaaaacacggctcctcaaattggaactgtcaacagccagggggccttacccggtatggtctggcagaaccgggacgtgtacctgcagggtcccatctgggccaagattcctcacacggacggcaacttccacccgtctccgctgatgggcggctttggcctgaaacatcctccgcctcagatcctgatcaagaacacgcctgtacctgcggatcctccgaccaccttcaaccagtcaaagctgaactctttcatcacgcaatacagcaccggacaggtcagcgtggaaattgaatgggagctgcagaaggaaaacagcaagcgctggaaccccgagatccagtacacctccaactactacaaatctacaagtgtggactttgctgttaatacagaaggcgtgtactctgaaccccaccccattggcacccgttacctcacccgtcccctgtaa

SEQ ID NO: 1651 - DNA, 2211 bp, synthetic construct
  source 1..2211: mol_type = other DNA; note = Description of Artificial Sequence: Synthetic polynucleotide
atggctgccgatggttatcttccagattggctcgaggacaacctctctgagggcattcgcgagtggtgggacttgaaacctggagccccgaagcccaaagccaaccagcaaaagcaggacgacggccggggtctggtgcttcctggctacaagtacctcggacccttcaacggactcgacaagggggagcccgtcaacgcggcggacgcagcggccctcgagcacgacaaggcctacgaccagcagctcaaagcgggtgacaatccgtacctgcggtataaccacgccgacgccgagtttcaggagcgtctgcaagaagatacgtcttttgggggcaacctcgggcgagcagtcttccaggccaagaagcgggttctcgaacctctcggtctggttgaggaaggcgctaagacggctcctggaaagaaacgtccggtagagcagtcaccacaagagccagactcctcctcgggcatcggcaagacaggccagcagcccgctaaaaagagactcaattttggtcagactggcgactcagagtcagtccccgacccacaacctctcggagaacctccagcaacccccgctgctgtgggacctactacaatggcttcaggcggtggcgcaccaatggcagacaataacgaaggtgccgacggagtgggtaatgcctcaggaaattggcattgcgattccacatggctgggcgactgagtcatcaccaccagcacccgcacctgggccttgcccacctacaataaccacctctacaagcaaatctccagtgcttcaacgggggccagcaacgacaaccactacttcggctacagcaccccctgggggtattttgatttcaacagattccactgccacttttcaccacgtgactggcagcgactcatcaacaacaattggggattccggcccaagagactcaacttcaaactcttcaacatccaagtcaaggaggtcacgcagaatgaaggcaccaagaccatcgccaataacctcaccagcaccatccaggtgtttacggactcggagtaccagctgccgtacgttctcggctctgcccaccagggctgcctgcctccgttcccggcggacgtgttcatgattccccagtacggctacctaacgctcaacaatggcagccaggcagtgggacggtcatccttttactgcctggaatactttccttcgcagatgctgagaaccggcaacaacttccagtttacttacaccttcgaggacgtgcctttccacagcagctacgcccacagccagagcttggaccggctgatgaatcctctgattgaccagtacctgtactacttgtctcggactcaaacaacaggaggcacggcaaatacgcagactctgggcttcagccaaggtgggcctaatacaatggccaatcaggcaaagaactggctgccaggaccctgttaccgccaacaacgcgtctcaacgacaaccgggcaaaacaacaatagcaactttgcctggactgctgggaccaaataccatctgaatggaagaaattcattggctaatcctggcatcgctatggcaacacacaaagacgacaaggagcgtttttttcccagtaacgggatcctgatttttggcaaacaaaatgctgccagagacaatgcggattacagcgatgtcatactcaccagcgaggaagaaatcaaaaccactaaccctgtggctacagaggaatacggtatcgtggcagataacttgcagcagcaaaacacggctcctcaaattggaactgtcaacagccagggggccttacccggtatggtctggcagaaccgggacgtgtacctgcagggtcccatctgggccaagattcctcacacggacggcaacttccacccgtctccgctgatgggcggctttggcctgaaacatcctccgcctcagatcctgatcaagaacacgcctgtacctgcggatcctccgaccaccttcaaccagtcaaagctgaactctttcatcacgcaatacagcaccggacaggtcagcgtggaaattgaatgggagctgcagaaggaaaacagcaagcgctggaaccccgagatccagtacacctccaactactacaaatctacaagtgtggactttgctgttaatacagaaggcgtgtactctgaaccccaccccattggcacccgttacctcacccgtcccctgtaa

SEQ ID NO: 1652 - DNA, 2211 bp, synthetic construct
  source 1..2211: mol_type = other DNA; note = Description of Artificial Sequence: Synthetic polynucleotide
atggctgccgatggttatcttccagattggctcgaggacactctctctgaaggaataagacagtggtggaagctcaaacctggcccaccaccaccaaagcccgcagagcggcataaggacgacagcaggggtcttgtgcttcctgggtacaagtacctcggacccttcaacggactcgacaagggagagccggtcaacgaggcagacgccgcggccctcgagcacgacaaagcctacgaccggcagctcgacagcggagacaacccgtacctcaagtacaaccacgccgacgcggagtttcaggagcgccttaaagaagatacgtcttttgggggcaacctcgggcgagcagtcttccaggccaagaagagggttctcgaaccttttggtctggttgaggaaggtgctaagacggctcctggaaagaaacgtccggtagagcagtcgccacaagagccagactcctcctcgggcattggcaagacaggccagcagcccgctaaaaagagactcaattttggtcagactggcgactcagagtcagtccccgacccacaacctctcggagaacctccagcaacccccgctgctgtgggacctactacaatggcttcaggcggtggcgcaccaatggcagacaataacgaaggcgccgacggagtgggtaatgcctcaggaaattggcattgcgattccacatggctgggcgacagagtcatcaccaccagcacccgaacatgggccttgcccacctataacaaccacctctacaagcaaatctccagtacttcaacgggggccagtaacgacaaccactacttcggctacagcaccccctgggggtattttgacttcaacagattccactgccacttctcaccacgtgactggcagcgactcatcaacaacaactggggattccggcctaagcgactcaacttcaagctcttcaacattcaggtcaaagaggttacggacaacaatggagtcaagaccatcgccaataaccttaccagcacggtccaggtcttcacggactcggagtaccagttgccgtacgtcctcggctctgcgcaccagggctgcctgcctccgttcccggcggacgtgttcatgattccgcagtacggctacctaacgctcaacaatggcagccaggcagtgggacggtcatccttttactgcctggaatatttcccatcgcagatgctgagaacgggcaacaactttaccttcagctacacttttgaggacgttcctttccacagcagctacgctcacagccagagtctggaccgtctcatgaatcctctgattgaccagtacctgtactacttgtctcggactcaaacaacaggaggcacggcaaatacgcagactctgggcttcagccaaggtgggcctaatacaatggccaatcaggcaaagaactggctgccaggaccctgttaccgccaacaacgcgtctcaacgacaaccggacaaaacaacaatagcaactttgcctggactgctgggaccaaataccatctgaatggaagaaattcattggctaatcctggcatcgctatggcaacacacaaagacgacaaggagcgtttttttcccagtaacgggatcctgatttttggcaaacaaaatgctgccagagacaatgcggattacagcgatgtcatgctcaccagcgaggaagaaatcaaaaccactaaccctgtggctacagaggaatacggtatcgtggcagataacttgcagcagcaaaacacggctcctcaaattggaactgtcaacagccagggggccttacccggtatggtctggcagaaccgggacgtgtacctgcagggtcccatctgggccaagattcctcacacggacggcaacttccacccgtctccgctgatgggcggctttggcctgaaacatcctccgcctcagatcctgatcaagaacacgcctgtacctgcggatcctccgaccaccttcaaccagtcaaagctgaactctttcatcacgcaatacagcaccggacaggtcagcgtggaaattgaatgggagctgcagaaggaaaacagcaagcgctggaaccccgagatccagtacacctccaactactacaaatctacaagtgtggactttgctgttaatacagaaggcgtgtactctgaaccccaccccattggcacccgttacctcacccgtcccctgtaa

SEQ ID NO: 1653 - DNA, 2208 bp, synthetic construct
  source 1..2208: mol_type = other DNA; note = Description of Artificial Sequence: Synthetic polynucleotide
atggctgccgatggttatcttccagattggctcgaggacaacctctctgagggcattcgcgagtggtgggacttgaaacctggagccccgaagcccaaagccaaccagcaaaagcaggacgacggccggggtctggtgcttcctggctacaagtacctcggacccttcaacggactcgacaagggggagcccgtcaacgcggcggatgcagcggccctcgagcacgacaaggcctacgaccggcagctcgacagcggagacaacccgtacctgcggtataaccacgccgacgcggagtttcaggagcgccttaaagaagatacgtcttttgggggcaacctcgggcgagcagtcttccaggccaagaagagggttctcgaaccttttggtctggttgaggaaggtgctaagacggctcctggaaagaaacgtccggtagagcagtcgccacaagagccagactcctcctcgggcattggcaagacaggccagcagcccgctaaaaagagactcaattttggtcagactggcgactcagagtcagtccccgacccacaacctctcggagaacctccagcaacccccgctgctgtgggacctactacaatggcttcaggcggtggcgcaccaatggcagacaataacgaaggcgccgacggagtgggtaatgcctcaggaaattggcattgcgattccacatggctgggcgacagagtcatcaccaccagcacccgcacctgggccttgcccacctacaataaccacctctacaagcaaatctccagtgcttcaacgggggccagcaacgacaaccactacttcggctacagcaccccctgggggtattttgactttaacagattccactgccacttttcaccacgtgactggcaaagactcatcaacaacaactggggattccggcccaagagactcaacttcaagctcttcaacatccaggtcaaggaggtcacgcagaatgaaggcaccaagaccatcgccaataaccttaccagcacgattcaggtctttacggactcggaataccagctcccgtacgtcctcggctctgcgcaccagggctgcctccctccgttcccggcggacgtgttcatgattccgcagtacggctacctaacactcaacaacggtagtcaggccgtgggacgctcctccttctactgcctggaatactttccttcgcagatgctgagaaccggcaacaacttccagtttacttacaccttcgaggacgtgcctttccacagcagctacgcccacagccagagcttggaccggctgatgaatcctctgattgaccagtacctgtactacttgtctcggactcaaacaacaggaggcacggcaaatacgcagactctgggcttcagccaaggtgggcctaatacaatggccaatcaggcaaagaactggctgccaggaccctgttaccgccaacaacgcgtctcaacgacaaccgggcaaaacaacaatagcaactttgcctggactgctgggaccaaataccatctgaatggaagaaattcactggctaatcctggcatcgctatggcaacacacaaagacgacaggagcgtttttttccagtaccgggatcctgattttggcaaacaaaatgctgccagagacaatgcggattacagcgatgtcatgctcaccagcgaggaagaaatcaaaaccactaaccctgtggctacagaggaatacggtatcgtggcagataacttgcagcagcaaaacacggctcctcaaattggaactgtcaacagccagggggccttacccggtatggtctggcagaaccgggacgtgtacctgcagggtcccatctgggccaagattcctcacacggacggcaacttccacccgtctccgctgatgggcggctttggcctgaaacatcctccgcctcagatcctgatcaagaacacgcctgtacctgcggatcctccgaccaccttcaaccagtcaaagctgaactctttcatcacgcaatacagcaccggacaggtcagcgtggaaattgaatgggagctgcagaaggaaaacagcaagcgctggaaccccgagatccagtacacctccaactactacaaatctacaagtgtggactttgctgttaatacagaaggcgtgtactctgaaccccaccccattggcacccgttacctcacccgtcccctgtaa

SEQ ID NO: 1654 - DNA, 2211 bp, synthetic construct
  source 1..2211: mol_type = other DNA; note = Description of Artificial Sequence: Synthetic polynucleotide
atggctgccgatggttatcttccagattggctcgaggacaacctctctgagggcattcgcgagtggtgggcgctgaaacctggagccccgaagcccaaagccaaccagcaaaagcaggacgacggccggggtctggtgcttcctggctacaagtacctcggacccttcaacggactcgacaagggggagcccgtcaacgcggcggatgcagcagccctcgaacacgacaaagcttacgaccagcagctcaaggccggtgacaacccctacctcaagtataaccacgccgacgccgagtttcaggagcgtcttcaaggagatacgtcttttgggggcaacctcggacgagcagtcttccaggccaagaagcgggttctcgaacctcttggtctggttgaggaagcggctaagacggctcctggaaagaagaggcctgtagagcagtctcctcaggaaccggactcctccgcgggtattggcaaatcgggtgcacagcccgctaaaaagagactcaatttcggtcagactggcgacacagagtcagtcccagaccctcaacctctcggagaacctccagcagcgccctctggtgtgggacctaatacaatggctgcaggcggtggcgcaccaatggcagacaataacgaaggtgccgatggagtgggtagttcctcgggaaattggcattgcgattcccaatggctgggggacagagtcatcaccaccagcacccgaacctgggccctgcccacctacaacaaccacctctacaagcaaatctccagtgcttcaacgggggccagcaacgacaaccactacttcggctacagcaccccttgggggtattttgacttcaacagattccactgccacttttcaccacgtgactggcagcgactcatcaacaacaactggggattccggcctaagcgactcaacttcaagctcttcaacattcaggtcaaagaggttacggacaacaatggagtcaagaccatcgccaataaccttaccagcacggtccaggtcttcacggactcagactatcagctcccgtacgtgctcgggtcggctcacgagggctgcctccctccgttcccggcggacgtgttcatgattccgcagtacggctacctaacgctcaacaatggcagccaggcagtgggacggtcatccttttactgcctggaatactttccttcgcagatgctgagaaccggcaacaacttccagtttacttacaccttcgaggacgtgcctttccacagcagctacgctcacagccagagtctggaccgtctcatgaatcctctgattgaccagtacctgtactacttgtctcggactcaaacaacaggaggcacggcaaatacgcagactctgggcttcagccaaggtgggcctaatacaatggccaatcaggcaaagaactggctgccaggaccctgttaccgccaacaacgcgtctcaacgacaaccgggcaaaacaacaatagcaactttgcctggactgctgggaccaaataccatctgaatggaagaaattcattggctaatcctggcatcgctatggcaacacacaaagacgacaaggagcgtttttttcccagtaacgggatcctgatttttggcaaacaaaatgctgccagagacaatgcggattacagcgatgtcatgctcaccagcgaggaagaaatcaaaaccactaaccctgtggctacagaggaatacggtatcgtagcagataacttgcagcagcaaaacacggctcctcaaattggaactgtcaacagccagggggccttacccggtatggtctggcagaaccgggacgtgtacctgcagggtcccatctgggccaagattcctcacacggacggcaacttccacccgtctccgctgatgggcggctttggcctgaaacatcctccgcctcagatcctgatcaagaacacgcctgtacctgcggatcctccgaccaccttcaaccagtcaaagctgaactctttcatcacgcaatacagcaccggacaggtcagcgtggaaattgaatgggagctgcagaaggaaaacagcaagcgctggaaccccgagatccagtacacctccaactactacaaatctacaagtgtggactttgctgttaatacagaaggcgtgtactctgaaccccaccccattggcacccgttacctcacccgtcccctgtaa

SEQ ID NO: 1655 - DNA, 2211 bp, synthetic construct
  source 1..2211: mol_type = other DNA; note = Description of Artificial Sequence: Synthetic polynucleotide
atggctgccgatggttatcttccagattggctcgaggacactctctctgaaggaataagacagtggtggaagctcaaacctggcccaccaccaccaaagcccgcagagcggcataaggacgacagcaggggtcttgtgcttcctgggtacaagtacctcggacccttcaacggactcgacaagggagagccggtcaacgaggcagacgccgcggccctcgagcacgacaaagcctacgaccggcagctcgacagcggagacaacccgtacctcaagtacaaccacgccgacgcggagtttcaggagcgccttaaagaagatacgtcttttgggggcaacctcgggcgagcagtcttccaggccaagaagagggttctcgaaccttttggtctggttgaggaagcggctaagacggctcctggaaagaaacgtccggtagagcagtcgccacaagagccagactcctcctcgggcattggcaagacaggccagcagcccgctaaaaagagactcaattttggtcagactggcgactcagagtcagtccccgacccacaacctctcggagaacctccagcaacccccgctgctgtgggacctactacaatggcttcaggcggtggcgcaccaatggcagacaataacgaaggcgccgacggagtgggtaatgcctcaggaaattggcattgcgattccacatggctgggcgacagagtcatcaccaccagcacccgaacatgggccttgcccacctataacaaccacctctacaagcaaatctccagtgcttcaacgggggccagcaacgacaaccactacttcggctacagcaccccctgggggtattttgacttcaacagattccactgccacttctcaccacgtgactggcagcgactcatcaacaacaactggggattccggcctaagcgactcaacttcaagctcttcaacattcaggtcaaagaggttacggacaacaatggagtcaagaccatcgccaataaccttaccagcacggtccaggtcttcacggactcagactatcagctcccgtacgtgctcgggtcggctcacgagggctgcctcccgccgttcccagcggacgttttcatgattcctcagtacggctacctaacactcaacaacggtagtcaggccgtgggacgctcctccttctactgcctggaatactttccttcgcagatgctgagaacgggcaacaactttaccttcagctacacctttgaggacgttcctttccacagcagctacgctcacagccagagtctggaccgtctcatgaatcctctgattgaccagtacctgtactacttgtctcggactcaaacaacaggaggcacggcaaatacgcagactctgggcttcagccaaggtgggcctaatacaatggccaatcaggcaaagaactggctgccaggaccctgttaccgccaacaacgcgtctcaacgacaaccgggcaaaacaacaatagcaactttgcctggactgctgggacaaaataccatctgaatggaagaaattcattggctaatcctggcatcgctatggcaacacacaaagacgacaaggagcgtttttttcccagtaacgggattctgatttttggcaaacaaaatgctgccagagacaatgcggattacagcgatgtcatgctcaccagcgaggaagaaatcaaaaccactaaccctgtggctacagaggaatacggtatcgtggcagataacttgcagcagcaaaacacggctcctcaaattggaactgtcaacagccagggggccttacccggtatggtctggcagaaccgggacgtgtacctgcagggtcccatctgggccaagattcctcacacggacggcaacttccacccgtctccgctgatgggcggctttggacttaagcacccgcctcctcagatcctcatcaaaaacacgcctgttcctgcggatcctccgaccaccttcaaccagtcaaagctgaactctttcatcacgcaatacagcaccggacaggtcagcgtggaaattgaatgggagctgcagaaggaaaacagcaagcgctggaaccccgagatccagtacacctccaactactacaaatctacaagtgtggactttgctgttaatacagaaggcgtgtactctgaaccccaccccattggcacccgttacctcacccgtcccctgtaa

SEQ ID NO: 1656 - DNA, 2211 bp, synthetic construct
  source 1..2211: mol_type = other DNA; note = Description of Artificial Sequence: Synthetic polynucleotide
atggctgccgatggttatcttccagattggctcgaggacaacctctctgagggcattcgcgagtggtgggcgctgaaacctggagccccgaagcccaaagccaaccagcaaaagcaggacgacggccggggtctggtgcttcctggctacaagtacctcggacccttcaacggactcgacaaaggagagccggtcaacgcggcggacgcagcggccctcgagcacgacaaggcctacgaccagcagctcaaagcgggtgacaatccgtacctgcggtataaccacgccgacgccgagtttcaggagcgtctgcaagaagatacgtcttttgggggcaacctcgggcgagcagtcttccaggccaagaagcgggttctcgaacctctcggtctggttgaggaaggcgctaagacggctcctggaaagaaacgtccggtagagcagtcgccacaagagccagactcctcctcgggcatcggcaagacaggccagcagcccgctaaaaagagactcaattttggtcagactggcgactcagagtcagtccccgacccacaacctctcggagaacctccagcaacccccgctgctgtgggacctactacaatggcttcaggcggtggcgcaccaatggcagacaataacgaaggcgccgacggagtgggtagttcctcgggaaattggcattgcgattccacatggctgggcgacagagtcatcaccaccagcacccgcacctgggccttgcccacctacaataaccacctctacaagcaaatctccagtgcttcaacgggggccagcaacgacaaccactacttcggctacagcaccccctgggggtattttgacttcaacagattccactgccacttctcaccacgtgactggcagcgactcatcaacaacaactggggattccggcctaagcgactcaacttcaagctcttcaacattcaggtcaaagaggttacggacaacaatggagtcaagaccatcgccaataaccttaccagcacggtccaggtcttcacggactcggagtaccagttgccgtacgtcctcggctctgcgcaccagggctgcctccctccgttcccggcggacgtgttcatgattccgcagtacggctacctaacgctcaacaatggcagccaggcagtgggacggtcatccttttactgcctggaatatttcccatcgcagatgctgagaacgggcaacaactttaccttcagctacacctttgaggacgttcctttccacagcagctacgctcacagccagagtctggaccgtctcatgaatcctctgattgaccagtacctgtactacttgtctcggactcaaacaacaggaggcacggcaaatacgcagactctgggcttcagccaaggtgggcctaatacaatggccaatcaggcaaagaactggctgccaggaccctgttaccgccaacaacgcgtctcaacgacaaccgggcaaaacaacaatagcaactttgcctggactgctgggaccaaataccatctgaatggaagaaattcattggctaatcctggcatcgctatggcaacacacaaagacgacaaggagcgtttttttcccagtaacgggatcctgatttttggcaaacaaaatgctgccagagacaatgcggattacagcgatgtcatgctcaccagcgaggaagaaatcaaaaccactaaccctgtggctacagaggaatacggtatcgtggcagataacttgcagcagcaaaacacggctcctcaaattggaactgtcaacagccagggggccttacccggtatggtctggcagaaccgggatgtgtacctgcagggtcccatctgggccaagattcctcacacggacggcaacttccacccgtctccgctgatgggcggctttggcctgaaacatcctccgcctcagatcctgatcaagaacacgcctgtacctgcggatcctccgaccaccttcaaccagtcaaagctgaactctttcatcacgcaatacagcaccggacaggtcagcgtggaaattgaatgggagctgcagaaggaaaacagcaagcgctggaaccccgagatccagtacacctccaactactacaaatctacaagtgtggactttgctgttaatacagaaggcgtgtactctgaaccccaccccattggcacccgttacctcacccgtcccctgtaa

SEQ ID NO: 1657 - DNA, 2214 bp, synthetic construct
  source 1..2214: mol_type = other DNA; note = Description of Artificial Sequence: Synthetic polynucleotide
atggctgccgatggttatcttccagattggctcgaggacaaccttagtgaaggaattcgcgagtggtgggcgctgaaacctggagccccgaagcccaaagccaaccagcaaaagcaggacgacggccggggtctggtgcttcctggctacaagtacctcggacccttcaacggactcgacaagggggagcccgtcaacgcggcggacgcagcggccctcgagcacgacaaggcctacgaccagcagctcaaagcgggtgacaatccgtacctgcggtataaccacgccgacgccgagtttcaggagcgtctgcaagaagatacgtcttttgggggcaacctcgggcgagcagtcttccaggccaagaagcgggttctcgaacctctcggtctggttgaggaaggcgctaagacggctcctggaaagaaacgtccggtagagcagtcgccacaagagccagactcctcctcgggcatcggcaagacaggccagcagcccgctaaaaagagactcaatttcggtcagactggcgacacagagtcagtcccagaccctcaaccaatcggagaacctcccgcagccccctcaggtgtgggatctcttacaatggcttcaggtggtggcgcaccagtggcagacaataacgaaggtgccgatggagtgggtagttcctcgggaaattggcattgcgattcccaatggctgggggacagagtcatcaccaccagcaccagaacctgggccttgcccacctacaataaccacctctacaagcaaatctccaacagcacatctggaggatcttcaaatgacaacgcctacttcggctacagcaccccctgggggtattttgactttaacagattccactgccacttttcaccacgtgactggcagcgactcatcaacaacaactggggattccgacccaagagactcaacttcaagctcttcaacatccaggtcaaggaggtcacgcagaacgaaggcaccaagaccatcgccaataacctcaccagcaccatccaggtgtttacggactcggagtaccagctgccgtacgttctcggctccgcccaccagggctgcctgcctccgttcccggcggacgtgttcatgattccccagtacggctacctaacgctcaacaacggtagtcaggccgtgggacgctcctccttctactgcctggaatactttccttcgcagatgctgagaaccggcaacaacttccagtttacttacaccttcgaggacgtgcctttccacagcagctacgcgcacagccagagcttggaccggctgatgaatcctctgattgaccagtacctgtactacttgtctcggactcaaacaacaggaggcacggcaaatacgcagactctgggcttcagccaaggtgggcctaatacaatggccaatcaggcaaagaactggctgccaggaccctgttaccgccaacaacgcgtctcaacgacaaccgggcaaaacaacaatagcaactttgcctggactgctgggaccaaataccatctgaatggaagaaattcattggctaatcctggcatcgctatggcaacacacaaagacgacaaggagcgtttttttcccagtaacgggatcctgatttttggcaaacaaaatgctgccagagacaatgcggattacagcgatgtcatgctcaccagcgaggaagaaatcaaaaccactaaccctgtggctacagaggaatacggtatcgtggcagataacttgcagcagcaaaacacggctcctcaaattggaactgtcaacagccagggggccttacccggtatggtctggcagaaccgggacgtgtacctgcagggtcccatctgggccaagattcctcacacggacggcaacttccacccgtctccgctgatgggcggctttggcctgaaacatcctccgcctcagatcctgatcaagaacacgcctgtacctgcggatcctccgaccaccttcaaccagtcaaagctgaactctttcatcacgcaatacagcaccggacaggtcagcgtggaaattgaatgggagctgcagaaggaaaacagcaagcgctggaaccccgagatccagtacacctccaactactacaaatctacaagtgtggactttgctgttaatacagaaggcgtgtactctgaaccccaccccattggcactcgttacctcacccgtcccctgtaa

SEQ ID NO: 1658 - DNA, 2211 bp, synthetic construct
  source 1..2211: mol_type = other DNA; note = Description of Artificial Sequence: Synthetic polynucleotide
atggctgccgatggttatcttccagattggctcgaggacaacctctctgagggcattcgcgagtggtgggcgctgaaacctggagccccgaagcccaaagccaaccagcaaaagcaggacgacggccggggtctggtgcttcctggctacaagtacctcggacccttcaacggactcgacaagggggagcccgtcaacgcggcggatgcagcagccctcgaacacgacaaagcttacgaccagcagctcaaggccggtgacaacccctacctcaagtataaccacgccgacgccgagtttcaggagcgtcttcaaggagatacgtcttttgggggcaacctcggacgagcagtcttccaggccaagaagcgggttctcgaacctcttggtctggttgaggaagcggctaagacggctcctggaaagaagaggcctgtagagcagtctcctcaggaaccggactcctccgcgggtattggcaaatcgggtgcacagcccgctaaaaagagactcaatttcggtcagactggcgacacagagtcagtcccagaccctcaacctctcggagaacctccagcagcgccctctggtgtgggacctaatacaatggctgcaggcggtggcgcaccaatggcagacaataacgaaggtgccgatggagtgggtagttcctcgggaaattggcattgcgattcccaatggctgggggacagagtcatcaccaccagcacccgaacctgggccctgcccacctacaacaaccacctctacaagcaaatctccagtgcttcaacgggggccagcaacgacaaccactacttcggctacagcaccccttgggggtattttgacttcaacagattccactgccacttctcaccacgtgactggcagcgactcatcaacaacaactggggattccggcctaagcgactcaacttcaagctcttcaacattcaggtcaaagaggttacggacaacaatggagtcaagaccatcgccaataaccttaccagcacggtccaggtcttcacggactcggagtaccagttgccgtacgtcctcggctctgcgcaccagggctgcctccctccgttcccggcggacgtgttcatgattccgcagtacggctacctaacgctcaacaatggcagccaggcagtgggacggtcatccttttactgcctggaatatttcccatcgcagatgctgagaacgggcaacaactttaccttcagctacacctttgaggacgttcctttccacagcagctacgctcacagccagagtctggaccgtctcatgaatcctctgattgaccagtacctgtactacttgtctcggactcaaacaacaggaggcacggcaaatacgcagactctgggcttcagccaaggtgggcctaatacaatggccaatcaggcaaagaactggctgccaggaccctgttaccgccaacaacgcgtctcaacgacaaccgggcaaaacaacaatagcaactttgcctggactgctgggaccaaataccatctgaatggaagaaattcattggctaatcctggcatcgctatggcaacacacaaagacgacaaggagcgtttttttcccagtaacgggatcctgatttttgacaaacaaaatgctgccagagacaatgcggattacagcgatgtcatgctcaccagcgaggaagaaatcaaaaccactaaccctgtggctacagaggaatacggtatcgtggcagataacttgcagcagcaaaacacggctcctcaaattggaactgtcaacagccagggggccttacccggtatggtctggcagaaccgggatgtgtacctgcagggtcccatctgggccaagattcctcacacggacggcaacttccacccgtctccgctgatgggcggctttggcctgaaacatcctccgcctcagatcctgatcaagaacacgcctgtacctgcggatcctccgaccaccttcaaccagtcaaagctgaactctttcatcacgcaatacagcaccggacaggtcagcgtggaaattgaatgggagctgcagaaggaaaacagcaagcgctggaaccccgagatccagtacacctccaactactacaaatctacaagtgtggactttgctgttaatacagaaggcgtgtactctgaaccccaccccattggcacccgttacctcacccgtcccctgtaa

SEQ ID NO: 1659 - DNA, 2211 bp, synthetic construct
  source 1..2211: mol_type = other DNA; note = Description of Artificial Sequence: Synthetic polynucleotide
atggctgccgatggttatcttccagattggctcgaggacactctctctgaaggaataagacagtggtggaagctcaaacctggcccaccaccaccaaagcccgcagagcggcataaggacgacagcaggggtcttgtgcttcctgggtacaagtacctcggacccttcaacggactcgacaagggagagccggtcaacgaggcagacgccgcggccctcgagcacgacaaagcctacgaccggcagctcgacagcggagacaacccgtacctcaagtacaaccacgccgacgcggagtttcaggagcgccttaaagaagatacgtcttttgggggcaacctcggacgagcagtcttccaggcgaaaaagagggttcttgaacctctgggcctggttgaggaacctgttaagacggctccgggaaaaaagaggccggtagagcactctcctgtggagccagactcctcctcgggaaccggaaaggcgggccagcagcctgcaagaaaaagattgaattttggtcagactggcgactcagagtcagtccccgacccacaacctctcggagaacctccagcaacccccgctgctgtgggacctaatacgatggctacaggcagtggcgcaccaatggcagacaataacgagggcgccgacggagtgggtaattcctcgggaaattggcattgcgattccacatggatgggcgacagagtcatcaccaccagcaccagaacctgggccctgcccacttacaacaaccatctctacaagcaaatctccagtgcttcaacgggggccagcaacgacaaccactacttcggctacagcaccccctgggggtattttgacttcaacagattccactgccacttctcaccacgtgactggcagcgactcatcaacaacaactggggattccggcctaagcgactcaacttcaagctcttcaacattcaggtcaaagaggttacggacaacaatggagtcaagaccatcgccaataaccttaccagcaccatccaggtctttacggactcggaataccagctgccgtacgttctcggctctgcccaccagggctgcctgcctccgttcccggcggacgtgttcatgattccccagtacggctacctaacactcaacaacggtagtcaggccgtgggacgctcctccttctactgcctggaatatttcccatcgcagatgctgagaacgggcaacaactttaccttcagctacacctttgaggacgttcctttccacagcagctacgctcacagccagagtctggaccgtctcatgaatcctctgattgaccagtacctgtactacttgtctcggactcaaacaacaggaggcaaggcaaatacgcagactctgggcttcagccaaggtgggcctaatacaatggccaatcaggcaaagaactggctgccaggaccctgttaccgccaacaacgcgtctcaacgacaaccgggcaaaacaacaatagcaactttgcctggactgctgggaccaaataccatctgaatggaagaaattcattggctaatcctggcatcgctatggcaacacacaaagacgacaaggagcgtttttttcccagtaacgggatcctgatttttggcaaacaaaatgctgccagagacaatgcggattacagcgatgtcatgctcaccagcgaggaagaaatcaaaaccactaaccctgtggctacagaggaatacggtatcgtggcagataacttgcagcagcaaaacacggctcctcaaattggaactgtcaacagccagggggccttacccggtatggtctggcagaaccgggacgtgtacctgcagggtcccatctgggccaagattcctcacacggacggcaacttccacccgtctccgctgatgggcggctttggcctgaaacatcctccgcctcagatcctgatcaagaacacgcctgtacctgcggatcctccgaccaccttcaaccagtcaaagctgaactctttcatcacgcaatacagcaccggacaggtcagcgtggaaattgaatgggagctgcagaaggaaaacagcaagcgctggaaccccgagatccagtacacctccaactactacaaatctacaagtgtggactttgctgttaatacagaaggcgtgtactctgaaccccaccccattggcacccgttacctcacccgtcccctgtaa

SEQ ID NO: 1660 - DNA, 2211 bp, synthetic construct
  source 1..2211: mol_type = other DNA; note = Description of Artificial Sequence: Synthetic polynucleotide
atggctgccgatggttatcttccagattggctcgaggacaacctctctgagggcattcgcgagtggtgggcgctgaaacctggagccccgaagcccaaagccaaccagcaaaagcaggacgacggccggggtctggtgcttcctggctacaagtacctcggacccttcaacggactcgacaagggggagcccgtcaacgcggcggacgcagcggccctcgagcacgacaaggcctacgaccagcagctcaaagcgggtgacaatccgtacctgcggtataaccacgccgacgccgagtttcaggagcgtctgcaagaagatacgtcttttgggggcaacctcgggcgagcagtcttccaggccaagaagcgggttctcgaaccttttggtctggttgaggaaggtgctaagacggctcctggaaagaaacgtccggtagagcagtcgccacaagagccagactcctcctcgggcatcggcaagacaggccagcagcccgctaaaaagagactcaattttggtcagactggcgactcagagtcagtccccgacccacaacctctcggagaacctccagcaacccccgctgctgtgggacctactacaatggcttcaggcggtggcgcaccaatggcggacaataacgaaggcgccgacggagtgggtaatgcctcaggaaattggcattgcgattccacatggctgggcgacagagtcatcaccaccagcacccgcacctgggccttgcccacctacaataaccacctctacaagcaaatctccagtgcttcaacgggggccagcaacgacaaccactacttcggctacagcaccccctgggggtattttgacttcaacagattccactgccacttttcaccacgtgactggcaaagactcatcaacaacaactggggattccggcctaagcgactcaacttcaagctcttcaacattcaggtcaaagaggttacggacaacaatggagtcaagaccatcgccaataaccttaccagcacggtccaggtcttcacggactcggagtaccagttgccgtacgtcctcggctctgcgcaccagggctgcctccctccgttcccggcggacgtgttcatgattccgcagtacggctacctaacgctcaacaatggcagccaggcagtgggacggtcatccttttactgcctggaatatttcccatcgcagatgctgagaacgggcaacaactttaccttcagctacacctttgaggacgttcctttccacagcagctacgctcacagccagagtctggaccgtctcatgaatcctctgattgaccagtacctgtactacttgtctcggactcaaacaacaggaggcacgggaaatacgcagactctgggcttcagccaaggtgggcctaatacaatggccaatcaggcaaagaactggctgccaggaccctgttaccgccaacaacgcgtctcaacgacaaccgggcaaaacaacaatagcaactttgcctggactgctgggaccaaataccatctgaatggaagaaattcattggctaatcctggcatcgctatggcaacacacaaagacgacaaggagcgtttttttcccagtaacgggatcctgatttttggcaaacaaaatgctgccagagacaatgcggattacagcgatgtcatgctcaccagcgaggaagaaatcaaaaccactaaccctgtggctacagaggaatacggtatcgtggcagataacttgcagcagcaaaacacggctcctcaaattggaactgtcaacagccagggggccttacccggtatggtctggcagaaccgggacgtgtacctgcagggtcccatctgggccaagattcctcacacggacggcaacttccacccgtctccgctgatgggcggctttggcctgaaacatcctccgcctcagatcctgatcaagaacacgcctgtacctgcggatcctccgaccaccttcaaccagtcaaagctgaactctttcatcacgcaatacagcaccggacaggtcagcgtggaaattgaatgggagctgcagaaggaaaacagcaagcgctggaaccccgagatccagtacacctccaactactacaaatctacaagtgtggactttgctgttaatacagaaggcgtgtactctgaaccccaccccattggcacccgttacctcacccgtcccctgtaa

SEQ ID NO: 1661 - DNA, 2211 bp, synthetic construct
  source 1..2211: mol_type = other DNA; note = Description of Artificial Sequence: Synthetic polynucleotide
atggctgccgatggttatcttccagattggctcgaggacaacctctctgagggcattcgcgagtggtgggacttgaaacctggagccccgaaacccaaagccaaccagcaaaagcaggacgacggccggggtctggtgcttcctggctacaagtacctcggacccttcaacggactcgacaagggggagcccgtcaacgcggcggacgcagcggccctcgagcacgacaaggcctacgaccagcagctcaaagcgggtgacaatccgtacctgcggtataaccacgccgacgccgagtttcaggagcgtctgcaagaagatacgtcttttgggggcaacctcgggcgagcagtcttccaggccaagaagcgggttctcgaacctctcggtctggttgaggaaggcgctaagacggctcctggaaagaagaggcctgtagagcagtcgccacaagagccagactcctcctcgggcatcggcaagacaggccagcagcccgctaaaaagagactcaattttggtcagactggcgactcagagtcagtccccgatccacaacctctcggagaacctccagcaacccccgctgctgtgggacctactacaatggcttcaggcggtggcgcaccaatggcagacaataacgaaggcgccgacggagtgggtagttcctcgggaaattggcattgcgattccacatggctgggcgacagagtcatcaccaccagcacccgaacatgggccttgcccacctataacaaccacctctacaagcaaatctccagtgcttcaacgggggccagcaacgacaaccactacttcggctacagcaccccctgggggtattttgacttcaacagattccactgccacttctcaccacgtgactggcagcgactcatcaacaacaactggggattccggcctaagcgactcaacttcaagctcttcaacatccaggtcaaggaggtcacgcagaatgaaggcaccaagaccatcgccaataacctcaccagcaccatccaggtgtttacggactcggagtaccagcttccgtacgtcctcggctctgcgcaccagggctgcctccctccgttcccggcggacgtgttcatgattccgcagtacggctacctaacgctcaacaatggcagccaggcagtgggacggtcatccttttactgcctggaatatttcccatcgcagatgctgagaacgggcaacaactttaccttcagctacacctttgaggacgttcctttccacagcagctacgcgcacagccagagcttggaccggctgatgaatcctctgattgaccagtacctgtactacttgtctcggactcaaacaacaggaggcacggcaaatacgcagactctgggcttcagccaaggtgggcctaatacaatggccaatcaggcaaagaactggctgccaggaccctgttaccgccaacaacgcgtctcaacgacaaccgggcaaaacaacaatagcaactttgcctggactgctgggaccaaataccatctgaatggaagaaattcattggctaatcctggcatcgctatggcaacacacaaagacgacaaggagcgtttttttcccagtaacgggatcctgatttttggcaaacaaaatgctgccagagacaatgcggattacagcgatgtcatgctcaccagcgaggaagaaatcaaaaccactaaccctgtggctacagaggaatacggtatcgtggcagataacttgcagcagcaaaacacggctcctcaaattggaactgtcaacagccagggggccttacccggtatggtctggcagaaccgggacgtgtacctgcagggtcccatctgggccaagattcctcacacggacggcaacttccacccgtctccgctgatgggcggctttggcctgaaacatcctccgcctcagatcctgatcaagaacacgcctgtacctgcggatcctccgaccaccttcaaccagtcaaagctgaactctttcatcacgcaatacagcaccggacaggtcagcgtggaaattgaatgggagctgcagaaggaaaacagcaagcgctggaaccccgagatccagtacacctccaactactacaaatctacaagtgtggactttgctgttaatacagaaggcgtgtactctgaaccccaccccattggcacccgttacctcacccgtcccctgtaa

SEQ ID NO: 1662 - DNA, 2211 bp, synthetic construct
  source 1..2211: mol_type = other DNA; note = Description of Artificial Sequence: Synthetic polynucleotide
atggctgccgatggttatcttccagattggctcgaggacaacctctctgagggcattcgcgagtggtgggcgctgaaacctggagccccgaagcccaaagccaaccagcaaaagcaggacgacggccggggtctggtgcttcctggctacaagtacctcggacccttcaacggactcgacaagggggagcccgtcaacgcggcggatgcagcggccctcgagcacgacaaggcctacgaccagcagctcaaagcgggtgacaatccgtacctgcggtataaccacgccgacgccgagtttcaggagcgtctgcaagaagatacgtcttttgggggcaacctcgggcgagcagtcttccaggccaagaagcgggttctcgaacctctcggtctggttgaggaaggcgctaagacggctcctggaaagaaacgtccggtagagcagtcgccacaagagccagactcctcctcgggcatcggcaagacaggccagcagcccgctaaaaagagactcaattttggtcagactggcgactcagagtcagtccccgacccacaacctctcggagaacctccagcaacccccgctgctgtgggacctactacaatggctgcaggcggtggcgcaccaatggcagacaataacgaaggcgccgacggagtgggtagttcctcgggaaattggcattgcgattccacatggatgggcgacagagtcatcaccaccagcacccgaacctgggccttgcccacctataacaaccatctctacaagcaaatctccagtgcttcaacgggggccagcaacgacaaccactacttcggctacagcaccccctgggggtattttgacttcaacagattccactgccacttctcaccacgtgactggcagcgactcatcaacaacaactggggattccggcccaagagactcagcttcaagctcttcaacatccaggtcaaggaggtcacgcagaatgaaggcaccaagaccatcgccaataacctcaccagcaccatccaggtgtttacggactcggagtaccagctgccgtacgtcctcggctctgcgcaccagggctgcctccctccgttcccggcggacgtgttcatgattccgcagtacggctacctaacgctcaacaatggcagccaggcagtgggacggtcatccttttactgcctggaatatttcccatcgcagatgctgagaacgggcaacaactttaccttcagctacacctttgaggacgttcctttccacagcagctacgctcacagccagagcttggaccggctgatgaatcctctgattgaccagtacctgtactacttgtctcggactcaaacaacaggaggcacggcaaatacgcagactctgggtttcagccaaggtgggcctaatacaatggccaatcaggcaaagaactggctgcaaggaccctgttaccgccaacaacgcgtctcaacgacaaccgggcaaaacaacaatagcaactttgcctggactgctgggaccaaataccatctgaatggaagaaattcattggctaatcctggcatcgctatggcaacacacaaagacgacaaggagcgtttttttcccagtaacgggatcctgatttttggcaaacaaaatgctgccagagacaatgcggattacagcgatgtcatgctcaccagcgaggaagaaatcaaaaccactaaccctgtggctacagaggaatacggtatcgtggcagataacttgcagcagcaaaacacggctcctcaaattggaactgtcaacagccagggggccttacccggtatggtctggcagaacctggacgtgtacctgcagggtcccatctgggccaagattcctcacacggacggcaacttccacccgtctccgctgatgggcggctttggcctgaaacatcctccgcctcagatcctgatcaagaacacgcctgtacctgcggatcctccgaccaccttcaaccagtcaaagctgaactctttcatcacgcaatacagcaccggacaggtcagcgtggaaattgaatgggagctgcagaaggaaaacagcaagcgctggaaccccgagatccagtacacctccaactactacaaatctacaagtgtggactttgctgttaatacagaaggcgtgtactctgaaccccaccccattggcacccgttacctcacccgtcccctgtaa

SEQ ID NO: 1663 - DNA, 2214 bp, synthetic construct
  source 1..2214: mol_type = other DNA; note = Description of Artificial Sequence: Synthetic polynucleotide
atggctgccgatggttatcttccagattggctcgaggacaacctctctgagggcattcgcgagtggtgggcgctgaaacctggagccccgaagcccaaagccaaccagcaaaagcaggacgacggccggggtctggtgcttcctggctacaagtacctcggacccttcaacggactcgacaagggagagcccgtcaacgcggcggacgcagcggccctcgagcacgacaaggcctacgaccagcagctcaaagcgggtgacaatccgtacctgcggtataaccacgccgacgccgagtttcaggagcgtctgcaagaagatacgtcttttgggggcaacctcgggcgagcagtcttccaggccaagaagcgggttctcgaacctctcggtctggttgaggaaggcgctaagacggctcctggaaagaagagaccggtagagccatcaccccagcgttctccagactcctcctcgggcatcggcaagacaggccagcagcccgctaaaaagagactcaattttggtcagactggcgactcagagtcagtccccgacccacaacctctcggagaacctccagcaacccccgctgctgtgggacctactacaatggcttcaggtggtggcgcaccaatggcagacaataacgaaggcgccgacggagtgggtaatgcctcaggaaattggcattgcgattcccaatggctgggcgacagagtcatcaccaccagcacccgaacatgggccttgcccacctataacaaccacctctacaagcaaatctccagtgcttcaacgggggccagcaacgacaaccactacttcggctacagcaccccctgggggtattttgacttcaacagattccactgccacttttcaccacgtgactggcagcgactcatcaacaacaactggggattccggcctaagcgactcaacttcaagctcttcaacattcaggtcaaagaggttacggacaacaatggagtcaagaccatcgccaataaccttaccagcacggtccaggtcttcacggactcagactatcagctcccgtacgtgctcgggtcggctcacgagggctgcctcccgccgttcccagcggacgttttcatgattccccagtacggctacctaacactcaacaacggtagtcaggccgtgggacgctcctccttctactgcctggaatactttccttcgcagatgctgagaaccggcaacaacttccagtttacttacaccttcgaggacgtgcctttccacagcagctacgctcacagccagagcttggaccggctgatgaatcctctgattgaccagtacctgtactacttgtctcggactcaaacaacaggaggcacggcaaatacgcagactttgggcttcagccaaggtgggcctaatacaatggccaatcaggcaaagaactgggtgccaggaccctgttaccgccaacaacgggtttcaacggcaaccgggcaaaacaacaatagcaactttgcctggactgctgggaccaaataccatctgaaaggaagaaattcattggctaatcctggcatcgctatggcaacacacaaagacgacaaggagcgtttttttcccagtaacgggatcctgatttttggcaaacaaaatgctgccagagacaatgcggattacagcgatgtcatgctcaccagcgaggaagaaatcaaaaccactaaccctgtggctacagaggaatacggtatcgtggcagataacttgcagcagcaaaacacggctcctcaaattggaactgtcaacagccagggggccttacccggtatggtctggcagaaccgggacgtgtacctgcagggtcccatctgggccaagattcctcacacggacggcaacttccacccgtctccgctgatgggcggctttggcctgaaacatcctccgcctcagatcctgatcaagaacacgcctgtacctgcggatcctccgaccaccttcaaccagtcaaagctgaactctttcatcacgcaatacagcaccggacaggtcagcgtggaaattgaatgggagctgcagaaggaaaacagcaaacgctggaacccagagattcaatacacttccaactactacaaatctacaagtgtggactttgctgttaatacagaaggcgtgtactctgaaccccaccccattggcacccgttacctcacccgtcccctgtaa

SEQ ID NO: 1664 - DNA, 2214 bp, synthetic construct
  source 1..2214: mol_type = other DNA; note = Description of Artificial Sequence: Synthetic polynucleotide
  misc_difference 676: note = misc_feature - n is a, c, g, or t
  misc_difference 697: note = misc_feature - n is a, c, g, or t
  misc_difference 715: note = misc_feature - n is a, c, g, or t
  misc_difference 748: note = misc_feature - n is a, c, g, or t
  misc_difference 750: note = misc_feature - n is a, c, g, or t
  misc_difference 757: note = misc_feature - n is a, c, g, or t
  misc_difference 763: note = misc_feature - n is a, c, g, or t
atggctgccgatggttatcttccagattggctcgaggacactctctctgaaggaataagacagtggtggaagctcaaacctggcccaccaccaccaaagcccgcagagcggcataaggacgacagcaggggtcttgtgcttcctgggtacaagtacctcggacccttcaacggactcgacaagggagagccggtcaacgaggcagacgccgcggccctcgagcacgacaaagcctacgaccggcagctcgacagcggagacaacccgtacctcaagtacaaccacgccgacgcggagtttcaggagcgccttaaagaagatacgtcttttgggggcaacctcggacgagcagtcttccaggcgaaaaagagggttcttgaacctctcggtctggttgaggaaggcgctaagacggctcctggaaagaaacgtccggtagagcagtcgccacaagagccagactcctcctcgggcatcggcaagacaggccagcagcccgctaaaaagagactcaattttggtcagactggcgactcagagtcagtccccgacccacaacctctcggagaacctccagcaacgccctctggtgtgggacctaatacaatggctgcaggcggtggcgctccaatggcagacaataacgaaggcgccgacggagtgggtagttcctcangaaattggcattgcgattccncatggctgggcgacagantcatcaccaccagcacccgaacctgggccctgncnacctacnacaacnacctctacaagcaaatctccaacagcacatctggaggagccaccaacgacaacacctacttcggctacagcaccccctgggggtattttgactttaacagattccactgccacttttcaccacgtgactggcagcgactcatcaacaacaactggggattccggcctaagcgactcaacttcaagctcttcaacatccaggtcaaggaggtcacgcagaatgaaggcaccaagaccatcgccaataacctcaccagcaccatccaggtgtttacggactcggagtaccagctgccgtacgttctcggctctgcccaccagggctgcctgcctccgttcccggcggacgtgttcatgattccccagtacggctacctaacactcaacaacggtagtcaggccgtgggacgctcctccttctactgcctggaatactttccttcgcagatgctgagaaccggcaacaacttccagtttacttacaccttcgaggacgtgcctttccacagcagctacgcccacagccagagcttggaccggctgatgaatcctctgattgaccagtacctgtactacttgtctcggactcaaacaacaggaggcacggcaaatacgcagactctgggcttcagccaaggtgggcctaatacaatggccaatcaggcaaagaactggctgccaggaccctgttaccgccaacaacgcgtctcaacgacaaccgggcaaaacaacaatagcaactttgcctggactgctgggaccaaataccatctgaatggaagaaattcattggctaatcctggcatcgctatggcaacacacaaagacgacaaggagcgtttttttcccagtaacgggatcctgatttttggcaaacaaaatgctgccagagacaatgcggattacagcgatgtcatgctcaccagcgaggaagaaatcaaaaccactaaccctgtggctacagaggaatacggtatcgtggcagataacttgcagcagcaaaacacggctcctcaaattggaactgtcaacagccagggggccttacccggtatggtttggcagaaccgggacgtgtacctgcagggtcctatctgggccaagattcctcacacggacggaaactttcatccctcgccgctgatgggaggctttggactgaaacacccgcctcctcagatcctgattaagaatacacctgttcccgcggatcctccaactaccttcagtcaagctaagctggcgtcgttcatcacgcaatacagcacaggacaagtgagtgtggaaattgaatgggagctgcagaaagaaaacagcaagcgctggaatcccgaagtgcagtacacatccaattatgcaaaatctgccaacgttgattttactgtggacaacaatggactttatactgagcctcgccccattggcacccgttaccttacccgtcccctgtaa

SEQ ID NO: 1665 - DNA, 2214 bp, synthetic construct
  source 1..2214: mol_type = other DNA; note = Description of Artificial Sequence: Synthetic polynucleotide
atggctgccgatggttatcttccagattggctcgaggacaacctctctgagggcattcgcgagtggtgggacttgaaacctggagccccgaagcccaaagccaaccagcaaaagcaggacgacggccggggtctggtgcttcctggctacaagtacctcggacccttcaacggactcgacaagggggagcccgtcaacgcggcggacgcagcggccctcgagcacgacaaggcctacgaccagcagctcaaagcgggtgacaatccgtacctgcggtataaccacgccgacgccgagtttcaggagcgtctgcaagaagatacgtcttttgggggcaacctcgggcgagcagtcttccaggccaagaagcgggttctcgaacctctcggtctggttgaggaaggcgctaagacggctcctggaaagaagagaccggtagagccatcaccccagcgttctccagactcctctacgggcatcggcaagaaaggccagcagcccgcgaaaaagagactcaactttgggcagactggcgactcagagtcagtgcccgaccctcaaccaatcggagaaccccccgcaggcccctctggtgtgggatctcttacaatggcttcaggtggtggcgcaccagtggcagacaataacgaaggtgccgatggagtgggtagttcctcgggaaattggcattgcgattcccaatggctgggggacagagtcatcaccaccagcacccgaacatgggccttgcccacctataacaaccacctctacaagcaaatctccagtgcttcaacgggggccagcaacgacaaccactacttcggctacagcaccccctgggggtattttgactttaacagattccactgccacttctcaccacgtgactggcagcgactcatcaacaacaactggggattccggcccaagagactcaacttcaagctcttcaacatccaggtcaaggaggtcacggacaatgatggagtcaagaccatcgccaataaccttaccagcacgattcaggtctttacggactcggaataccagttgccgtacgtcctcggctctgcgcaccagggctgcctgcctccgttcccggcggacgtgttcatgattccgcagtacggctacctaacgctcaacaatggcagccaggcagtgggacggtcatccttttactgcctggaatatttcccatcgcagatgctgagaacgggcaacaactttaccttcagctacacttttgaggacgttcctttccacagcagctacgctcacagccagagtctggaccgtctcatgaatcctctgattgaccagtacctgtactacttgtctcggactcaaacaacaggaggcacggcaaatacgcagactctgggcttcagccaaggtgggcctaatacaatggccaatcacgcaaagaactggctgccaggaccctgttaccgccaacaacgcgtctcaacgacaaccggacaaaacaacaatagcaactttgcctggactgctgggaccaaataccatctgaatggaagaaattcattggctaatcctggcatcgctatggcaacacacaaagacgacaaggagcgtttttttcccagtaacgggatcctgatttttggcaaacaaaatgctgccagagacaatgcggattacagcgatgtcatgctcaccagcgaggaagaaatcaaaaccactaaccctgtggctacagaggaatacggtatcgtggcagataacttgcagcagcaaaacacggctcctcaaattggaactgtcaacagccagggggccttacccggtatggtctggcagaaccgggacgtgtacctgcagggtcccatctgggccaagattcctcacacggacggcaacttccacccgtctccgctgatgggcggctttggcctgaaacatcctccgcctcagatcctgatcaagaacacgcctgtacctgcggatcctccgaccaccttcaaccagtcaaagctgaactctttcatcacgcaatacagcaccggacaggtcagcgtggaaattgaatgggagctgcagaaggaaaacagcaagcgctggaaccccgagatccagtacacctccaactactacaaatctacaagtgtggactttgctgttaatacagaaggcgtgtactctgaaccccaccccattggcacccgttacctcacccgtcccctgtaa

SEQ ID NO: 1666 - DNA, 2211 bp, synthetic construct
  source 1..2211: mol_type = other DNA; note = Description of Artificial Sequence: Synthetic polynucleotide
atggctgccgatggttatcttccagattggctcgaggacactctctctgaaggaataagacagtggtggaagctcaaacctggcccaccaccaccaaagcccgcagagcggcacaaggacgacagcaggggtcttgtgcttcctgggtacaagtacctcggacccttcaacggactcgacaagggagagccggtcaacgaggcagacgccgcggccctcgagcacgacaaagcctacgaccggcagctcgacagcggagacaacccgtacctcaagtacaaccacgccgacgcggagtttcaggagcgccttaaagaagatacgtcttttgggggcaacctcggacgagcagtcttccaggcgaaaaagagggttcttgaacctctgggcctggttgaggaacctgttaagacggctccgggaaaaaagaggccggtagagcactctcctgtggagccagactcctcctcgggaaccggaaaggcgggccagcagcctgctaaaaagagactcaattttggtcagactggcgactcagagtcagtccccgacccacaacctctcggagaacctccagcaacccccgctgctgtgggacctactacaatggcttcaggtggtggcgcaccaatggcagacaataacgaaggcgccgacggagtgggtaatgcctcaggaaattggcattgcgattccacatggctgggcgacagagtcatcaccaccagcacccgcacctgggccttgcccacctacaataaccacctctacaagcaaatctccagtgcttcaacgggggccagcaacgacaaccactacttcggctacagcaccccctgggggtattttgacttcaacagattccactgccacttctcaccacgtgactggcagcgactcatcaacaacaactggggattccggcccaagagactcaacttcaaactcttcaacatccaagtcaaggaggtcacgcagaatgaaggcaccaagaccatcgccaataacctcaccagcaccatccaggtgtttacggactcggagtaccagctgccgtacgttctcggctctgcccaccagggctgcctgcctccgttcccggcggacgtgttcatgattccccagtacggctacctaacactcaacaacggtagtcaggccgtgggacgctcctccttctactgcctggaatactttccttcgcagatgctgagaaccggcaacaacttccagtttacttacaccttcgaggacgtgcctttccacagcagctacgcgcacagccagagcttggaccggctgatgaatcctctgattgaccagtacctgtactacttgtctcggactcaaacaacaggaggcacggcaaatacgcagactctgggcttcagccaaggtgggcctaatacaatggccaatcaggcaaagaactggctgccaggaccctgttaccgccaacaacgcgtctcaacgacaaccgggcaaaacaacaatagcaactttgcctggactgctgggaccaaataccatctgaatggaagaaattcattggctaatcctggcatcgctatggcaacacacaaagacgacaaggagcgtttttttcccagtaacgggatcctgatttttggcaaacaaaatgctgccagagacaatgcggattacagcgatgtcatgctcaccagcgaggaagaaatcaaaaccactaaccctgtggctacagaggaatacggtatcgtggcagataacttgcagcagcaaaacacggctcctcaaattggaactgtcaacagccagggggccttacccggtatggtctggcagaaccgggacgtgtacctgcagggtcccatctgggccaagattcctcacacggacggcaacttccacccgtctccgctgatgggcggctttggcctgaaacatcctccgcctcagatcctgatcaagaacacgcctgtacctgcggatcctccgaccaccttcaaccagtcaaagctgaactctttcatcacgcaatacagcaccggacaggtcagcgtggaaattgaatgggagctgcagaaggaaaacagcaagcgctggaaccccgagatccagtacacctccaactactacaaatctacaagtgtggactttgctgttaatacagaaggcgtgtactctgaaccccaccccattggcacccgttacctcacccgtcccctgtaa

SEQ ID NO: 1667 - DNA, 2211 bp, synthetic construct
  source 1..2211: mol_type = other DNA; note = Description of Artificial Sequence: Synthetic polynucleotide
atggctgccgatggttatcttccagattggctcgaggacaacctctctgagggcattcgcgagtggtgggcgctgaaacctggagccccgaagcccaaagccaaccagcaaaagcaggacgacggccggggtctggtgcttcctggctacaagtacctcggacccttcaacggactcgacaagggggagcccgtcaacgcggcggatgcagcggccctcgagcacgacaaggcctacgaccagcagctccaagcgggtgacaatccgtacctgcggtataaccacgccgacgccgagtttcaggagcgtcttcaaggagatacgtcttttgggggcaacctcggacgagcagtcttccaggccaagaagcgggttctcgaacctctcggtctggttgaggaaggcgctaagacggctcctggaaagaaacgtccggtagagcagtcgccacaagagccagactcctcctcgggcatcggcaagacaggccagcagcccgctaaaaagagactcaattttggtcagactggcgactcagagtcagtccccgacccacaacctctcggagaacctccagcaacccccgctgctgtgggacctactacaatggcttcaggcggtggcgcaccaatggcggacaataacgaaggcgccgatggagtgggtaatgcctcaggaaattggcattgcgattccacatggctgggcgacagagtcatcaccaccagcacccgcacctgggccttgcccacctacaataaccacctctacaagcaaatctccagtgcttcaacgggggccagcaacgacaaccactacttcggctacagcaccccctgggggtattttgacttcaacagattccactgccacttctcaccacgtgactggcagcgactcatcaacaacaactggggattccggcctaagcgactcaacttcaagctcttcaacattcaggtcaaagaggttacggacaacaatggagtcaagaccatcgccaataacctcaccagcaccatccaggtgtttacggactcggagtaccagctgccgtacgttctcggctctgcccaccagggctgcctgcctccgttcccggcggacgtgttcatgattccccagtacggctacctaacactcaacaacggtagtcaggccgtgggacgctcctccttctactgcctggaatactttccttcgcagatgctgagaaccggcaacaacttccagtttacttacaccttcgaggacgtgcctttccacagcagctacgcccacagccagagcttggaccggctgatgaatcctctgattgaccagtacctgtactacttgtctcggactcaaacaacaggaggcacggcaaatacgcagactctgggcttcagccaaggtgggcctaatacaatggccaatcaggcaaagaactggctgccaggaccctgttaccgccaacaacgcgtctcaacgacaaccgggcaaaacaacaatagcaactttgcctggactgctgggaccaaataccatctgaatggaagaaattcattggctaatcctggcatcgctatggcaacacacaaagacgacaaggagcgtttttttcccagtaacgggatcctgatttttggcaaacaaaatgctgccagagacaatgcggattacagcgatgtcatgctcaccagcgaggaagaaatcaaaaccactaaccctgtggctacagaggaatacggtatcgtggcagataacttgcagcagcaaaacacggctcctcaaattggaactgtcaacagccagggggccttacccggtatggtctggcagaaccgggacgtgtacctgcagggtcccatctgggccaagattcctcacacggacggcaacttccacccgtctccgctgatgggcggctttggcctgaaacatcctccgcctcagatcctgatcaagaacacgcctgtacctgcggatcctccgaccaccttcaaccagtcaaagctgaactctttcatcacgcaatacagcaccggacaggtcagcgtggaaattgaatgggagctgcagaaggaaaacagcaagcgctggaaccccgagatccagtacacctccaactactacaaatctacaagtgtggactttgctgttaatacagaaggcgtgtactctgaaccccaccccattggcacccgttacctcacccgtcccctgtaa

SEQ ID NO: 1668 - DNA, 2217 bp, synthetic construct
  source 1..2217: mol_type = other DNA; note = Description of Artificial Sequence: Synthetic polynucleotide
atggctgccgatggttatcttccagattggctcgaggacactctctctgaaggaataagacagtggtggaagctcaaacctggcccaccaccaccaaagcccgcagagcggcataaggacgacagcaggggtcttgtgcttcctgggtacaagtacctcggacccttcaacggactcgacaagggggagcccgtcaacgcggcggatgcagcggccctcgagcacgacaaggcctacgaccagcagctcaaagcgggtgacaatccgtacctgcggtataaccacgccgacgcggagtttcaggagcgccttaaagaagatacgtcttttgggggcaacctcggacgagcagtcttccaggcgaaaaagagggttcttgaacctctcggtctggttgaggaaggcgctaagacggctcctggaaagaagagaccggtagagccatcaccccagcgttctccagactcctctacgggcatcggcaagaaaggccaacagcccgccagaaaaagactcaattttggtcagactggcgactcagagtcagttccagaccctcaacctctcggagaacctccagcagcgccctctggtgtgggacctaatacaatggctgcaggcggtggcgcaccaatggcagacaataacgaaggcgccgacggagtgggtagttcctcgggaaattggcattgcgattcccaatggctgggggacagagtcatcaccaccagcaccagaacctgggccctgcccacctacaacaatcacctctacaagcaaatctccaacagcacatctggaggatcttcaaatgacaacgcctacttcggctacagcaccccctgggggtattttgacttcaaccgcttccactgccacttctcaccacgtgactggcagcgactcatcaacaacaactggggattccggcccaagagactcaacttcaagctcttcaacattcaggtcaaagaggttacggacaacaatggagtcaagaccatcgccaataaccttaccagcacggtccaggtctttacggactcggagtaccagttgccgtacgtcctcggctctgcgcaccagggctgcctccctccgttcccggcggacgtgttcatgattccccagtacggctacctaacactcaacaacggtagtcaggccgtgggacgctcctccttctactgcctggaatatttcccttctcagatgctgagaacgggcaacaactttaccttcagctacacctttgaggacgttcctttccacagcagctacgctcacagccagagtctggaccgtctcatgaatcctctgattgaccagtacctgtactacttgtctcggactcaaacaacaggaggcacggcaaatacgcagactctgggcttcagccaaggtgggcctaatacaatggccaatcaggcaaagaactggctgccaggaccctgttaccgccaacaacgcgtctcaacgacaaccgggcaaaacaacaatagcaactttgcctggactgctgggaccaaataccatctgaatggaagaaattcattggctaatcctggcatcgctatggcaacacacaaagacgacaaggagcgtttttttcccagtaacgggatcctgatttttggcaaacaaaatgctgccagagacaatgcggattacagcgatgtcatgctcaccagcgaggaagaaatcaaaaccactaaccctgtggctacagaggaatacggtatcgtggcagataacttgcagcagcaaaacacggctcctcaaattggaactgtcaacagccagggggccttacccggtatggtctggcagaaccgggacgtgtacctgcagggtcccatctgggcaaagattccacacacggacggacattttcacccctctcccctcatgggtggattcggacttaaacaccctcctccacagattctcatcaagaacaccccggtacctgcgaatcctccgaccaccttcaaccagtcaaagctgaactctttcatcacgcaatacagcacaggacaagtgagtgtggaaattgaatgggagctgcagaaagaaaacagcaagcgctggaatcccgaagtgcagtacacatccaattatgcaaaatctgccaacgttgattttactgtggacaacaatggactttatactgagcctcgccccattggcacccgttaccttacccgtcccctgtaa

SEQ ID NO: 1669 - DNA, 2211 bp, synthetic construct
  source 1..2211: mol_type = other DNA; note = Description of Artificial Sequence: Synthetic polynucleotide
atggctgccgatggttatcttccagattggctcgaggacaacctctctgagggcattcgcgagtggtgggcgctgaaacctggagccccgaaacccaaagccaaccagcaaaagcaggacgacggccggggtctggtgcttcctggctacaagtacctcggacccttcaacggactcgacaagggggagcccgtcaacgcggcggacgcagcggccctcgagcacgacaaggcctacgaccagcagctcaaggcgggtgacaatccgtacctgcggtataaccacgccgacgccgagtttcaggagcgtctgcaagaagatacgtcttttgggggcaacctcgggcgagcagtcttccaggccaaaaagaggcttcttgaacctcttggtctggttgaggaaggggctaagacggctcctggaaagaaacgtccggtagagcagtcgccacaagagccagactcctcctcgggcattggcaagacaggccagcagcccgctaaaaagagactcaactttgggcagactggcgactcagagtcagtgcccgatcctcaacctctcggagaacctccagcaacccccgctgctgtgggacctactacaatggcttcaggcggtggcgcaccaatggcggacaataacgaaggcgccgatggagtgggtaattcctcgggaaattggcattgcgattccacatggatgggcgacagagtcatcaccaccagcacccgaacctgggccctgcccacctacaacaatcacctctacaagcaaatctccagtgcttcaacgggggccagcaacgacaaccactacttcggctacagcaccccctgggggtattttgatttcaacagattccactgccatttttcaccacgtgactggcagcgactcatcaacaacaactggggattccggcccaagagactcaacttcaagctcttcaacatccaggtcaaggaggtcacgcagaatgaaggcaccaagaccatcgccaataaccttaccagcacgattcaggtctttacggattcggaataccagctcccgtacgtcctcggctctgcgcaccagggctgcctccctccgttcccggcggacgtgttcattattccgcagtacggctacctaacgctcaacaatggtagccaggcagtgggacggtcatccttttactgcctggaatatttcccatcgcagatgctgagaacgggcaacaactttaccttcagctacacctttgaggacgttcctttccacagcagctacgctcacagccagagtctggaccgtctcatgaatcctctgattgaccagtacctgtactacttgtctcggactcaaacaacaggaggcacggcaaatacgcagactctgggcttcagccaaggtgggcctaatacaatggccaatcaggcaaagaactggctgccaggaccctgttaccgccaacaacgcgtctcaacgacaaccgggcaaaacaacaatagcaactttgcctggactgctgggaccaaataccatctgaatggaagaaattcattggctaatcctggcatcgctatggcaacacacaaagacgacaaggagcgtttttttcccagtaacgggatcctgatttttggcaaacaaaatgctgccagagacaatgcggattacagcgatgtcatgctcaccagcgaggaagaaatcaaaaccactaaccctgtggctacagaggaatacggtatcgtggcagataacttgcagcagcaaaacacggctcctcaaattggaactgtcaacagccagggggccttacccggtatggtctggcagaaccgggacgtgtacctgcagggtcccatctgggccaagattcctcacacggacggcaacttccacccgtctccgctgatgggcggctttggcctgaaacatcctccgcctcagatcctgatcaagaacacgccagtacctgcggatcctccgaccaccttcaaccagtcaaagctgaactctttcatcacgcaatacagcaccggacaggtcagcgtggaaattgaatgggagctgcagaaggaaaacagcaagcgctggaaccccgagatccagtacacctccaactactacaaatctacaagtgtggactttgctgttaatacagaaggcgtgtactctgaaccccaccccattggcacccgttacctcacccgtcccctgtaa

SEQ ID NO: 1670 - DNA, 2211 bp, synthetic construct
  source 1..2211: mol_type = other DNA; note = Description of Artificial Sequence: Synthetic polynucleotide
atggctgccgatggttatcttccagattggctcgaggacaacctctctgagggcattcgcgagtggtgggcgctgaaacctggagccccgaaacccaaagccaaccagcaaaagcaggacgacggccggggtctggtgcttcctggctacaagtacctcggacccttcaacggactcgacaagggggagcccgtcaacgcggcggatgcagcggccctcgagcacgacaaggcctacgaccagcagctcaaggcgggtgacaatccgtacctgcggtataaccacgccgacgccgagtttcaggagcgtctgcaagaagatacgtcttttgggggcaacctcgggcgagcagtcttccaggccaaaaagagggttcttgaaccttttggtctggttgaggaagctgctaagacggctcctggaaagaaacgtccggtagagcagtcgccacaagagccagactcctcctcgggcattggcaagacaggccagcagcccgctaaaaagagactcaattttggtcagactggcgactcagagtcagtgcccgaccctcaacctctcggagaacctccagcaacccccgctgctgtgggacctactacaatggcttcaggcggtggcgcaccaatggcagacaataacgaaggcgccgatggagtgggtaatgcctcaggaaattggcattgcgattccacatggctgggcgacagagtcatcaccaccagcacccgaacctgggccctgcccacctacaacaatcacctctacaagcaaatctccagtgcttcaacgggggccagcaacgacaaccactacttcggctacagcaccccctgggggtattttgactttaacagattccactgccacttttcaccacgtgactggcagcgactcatcaacaacaactggggattccggcccaagagactcaacttcaagctcttcaacatccaggtcaaggaggtcacgcagaatgaaggcaccaagaccatcgccaataacctcaccagcaccattcaggtctttacggattcggaataccagctcccgtacgtcctcggctctgcccaccagggctgcctccctccgttcccggcggacgtgttcatgattccgcagtacggctacctaacgctcaacaatggtagccaggcagtgggacggtcatccttttactgcctggaatatttcccatcgcagatgctgagaacgggcaacaactttaccttcagctacacctttgaggacgttcctttccacagcagctacgctcacagccagagtctggaccgtctcatgaatcctctgattgaccagtacctgtactacttgtctcggactcaaacaacaggaggcacggcaaatacgcagactctgggcttcagccaaggtgggcctaatacaatggccaatcacgcaaagaactggctgccaggaccctgttaccgccaacaacgcgtctcaacgacaaccgggcaaaacaacaatagcaactttgcctggactgctgggaccaaataccatctgaatggaagaaattcattggctaatcctggcatcgctatggcaacacacaaagacgacaaggagcgtttttttcccagtaacgggatcctgatttttggcaaacaaaatgctgccagagacaatgcggattacagcgatgtcatgctcaccagcgaggaagaaatcaaaaccactaaccctgtggctacagaggaatacggtatcgtggcagataacttgcagcagcaaaacacggctcctcaaattggaactgtcaacagccagggggccttacccggtatggtctggcagaaccgggacgtgtacctgcagggtcccatctgggccaagattcctcacacggacggcaacttccacccgtctccgctgatgggcggctttggcctgaaacatcctccgcctcagatcctgatcaagaacacgcctgtacctgcggatcctccgaccaccttcaaccagtcaaagctgaactctttcatcacgcaatacagcaccggacaggtcagcgtggaaattgaatgggagctgcagaaggaaaacagcaagcgctggaaccccgagatccagtacacctccaactactacaaatctacaagtgtggactttgctgttaatacagaaggcgtgtactctgaaccccaccccattggcacccgttacctcacccgtcccctgtaa

SEQ ID NO: 1671 - DNA, 2211 bp, synthetic construct
  source 1..2211: mol_type = other DNA; note = Description of Artificial Sequence: Synthetic polynucleotide
atggctgccgatggttatcttccagattggctcgaggacaacctctctgagggcattcgcgagtggtgggcgctgaaacctggagccccgaagcccaaagccaaccagcaaaagcaggacgacggccggggtctggtgcttcctggctacaagtacctcggacccttcaacggactcgacaaaggagagcccgtcaacgaggcggacgcggcggccctcgaacacgacaaggcttacgaccagcagctcaaggccggtgacaacccctacctgcggtacaaccacgccgacgccgagttccaggagcggctgcaagaagatacgtcttttgggggcaacctcgggcgagcagtcttccaggccaagaagaggcttcttgaacctcttggtctggttgaggaagcggctaagacggctcctggaaagaagaggcctgtagagcagtctcctcaggaaccggactcctccgcgggtattggcaaatcaggtgcacagcccgctaaaaagagactcaattttggtcagactggcgactcagagtcagtccccgacccacaacctctcggagaacctccagcaacccccgctgctgtgggacctactacaatggcttcaggcggtggcgcaccaatggcagacaataacgaaggcgccgatggagtgggtaatgcctcaggaaattggcattgcgattccacatggctgggcgacagagtcatcaccaccagcacccgaacctgggccctgcccacctataacaaccatctctacaagcaaatctccagtgcttcaacgggggccagtaacgacaaccactacttcggctacagcaccccctgggggtattttgactttaacagattccactgccacttctcaccacgtgactggcagcgactcatcaacaacaactggggattccggcccaagcgactcaacttcaagctcttcaacattcaggtcaaagaggttacggacaacgatggagtcaagaccatcgccaataaccttaccagcaccattcaggtgtttacggactcggaataccagctgccgtacgttctcggctccgcccaccagggctgcctgcctccgttcccggcggacgtgttcatgattccccagtacggctacctaacactcaacaacggtagtcaggccgtgggacgctcctccttctactgcctggaatactttccttcgcagatgctgagaactggcaacaacttccagtttacttacaccttcgaggacgtgcctttccacagcagctacgcccacagccagagcttggaccggctgatgaatcctctgattgaccagtacctgtactacttgtctcggactcaaacaacaggaggcacggcaaatacgcagactctgggcttcagccaaggtgggcctaatacaatggccaatcaggcaaagaactggctgccaggaccctgttaccgccaacaacgcgtctcaacgacaaccgggcaaaacaacaatagcaactttgcctggactgctgggaccaaataccatctgaatggaagaaattcattggctaatcctggcatcgctatggcaacacacaaagacgacaaggagcgtttttttcccagtaacgggatcctgatttttggcaaacaaaatgctgccagagacaatgcggattacagcgatgtcatgctcaccagcgaggaagaaatcaaaaccactaaccctgtggctacagaggaatacggtatcgtggcagataacttgcagcagcaaaacacggctcctcaaattggaactgtcaacagccagggggccttacccggtatggtctggcagaaccgggacgtgtacctgcagggtcccatctgggccaagattcctcacacggacggcaacttccacccgtctccgctgatgggcggctttggcctgaaacatcctccgcctcagatcctgatcaagaacacgcctgtacctgcggatcctccgaccaccttcaaccagtcaaagctgaactctttcatcacgcaatacagcaccggacaggtcagcgtggaaattgaatgggagctgcagaaggaaaacagcaagcgctggaaccccgagatccagtacacctccaactactacaaatctacaagtgtggactttgctgttaatacagaaggcgtgtactctgaaccccaccccattggcacccgttacctcacccgtcccctgtaa

SEQ ID NO: 1672 - DNA, 2211 bp, synthetic construct
  source 1..2211: mol_type = other DNA; note = Description of Artificial Sequence: Synthetic polynucleotide
atggctgccgatggttatcttccagattggctcgaggacaacctctctgagggcattcgcgagtggtgggcgctgaaacctggagccccgaagcccaaagccaaccagcaaaagcaggacgacggccggggtctggtgcttcctggctacaagtacctcggacccttcaacggactcgacaagggggagcccgtcaacgcggcggatgcagcggccctcgagcacgacaaagcctacgaccagcagctcaaagcgggtgacaatccgtacctgcggtataaccacgccgacgccgagtttcaggagcgtctgcaagaagatacgtcttttgggggcaacctcgggcgagcagtcttccaggccaagaagagggttctcgaacctttgggtctggttgaggaaggggctaagacggctcctggaaagaaaaggccggtagagcagtctcctcaggaaccggactcctccgcgggtattggcaagacaggtgcacagcccgctaaaaagagactcaattttggtcagactggcgactcagagtcagtccccgacccacaacctctcggagaacctccagcaacccccgctgctgtgggacctactacaatggcttcaggcggtggcgcaccaatggcagacaataacgaaggcgccgacggagtgggtagtgcctcgggaaattggcattgcgattccacatggctgggcgacagagtcatcaccaccagcacccgaacctgggccctgcccacctataacaaccatctctacaagcaaatctccagtgcttcaacgggggccagtaacgacaaccactacttcggctacagcaccccctgggggtattttgacttcaacagattccactgccacttctcaccacgtgactggcagcgactcatcaacaacaactggggattccggcccaagcgactcaacttcaagctcttcaacattcaggtcaaagaggttacggacaacaatggagtcaagaccatcgccaataaccttaccagcacgatccaggtctttacggactcggagtaccagctgccgtacgtcctcggctctgcgcaccagggctgcctgcctccgttcccggcggacgtgttcatgattccgcagtacggctacctaacgctcaacaatggtagccaggcagtgggacggtcatccttttactgcctggaatatttcccatcgcagatgctgagaacgggcaacaactttaccttcagctacacctttgaggacgttcctttccacagcagctacgctcacagccagagtctggaccgtctcatgaatcctctgattgaccagtacctgtactacttgtctcggactcaaacaacaggaggcacggcaaatacgcagactctgggcttcagccaaggtgggcctaatacaatggccaatcaggcaaagaactggctgccaggaccctgttaccgccaacaacgcgtctcaacgacaaccgggcaaaacaacaatagcaactttgcctggactgctgggaccaaataccatctgaatggaagaaattcattggctaatcctggcatcgctatggcaacacacaaagacgacaaggagcgtttttttcccagtaacgggatcctgatttttggcaaacaaaatgctgccagagacaatgcggattacagcgatgtcatgctcaccagcgaggaagaaatcaaaaccactaaccctgtggctacagaggaatacggtatcgtggcagataacttgcagcagcaaaacacggctcctcaaattggaactgtcaacagccagggggccttacccggtatggtctggcagaaccgggacgtgtacctgcagggtcccatctgggccaagattcctcacacggacggcaacttccacccgtctccgctgatgggcggctttggcctgaaacatcctccgcctcagatcctgatcaagaacacgcctgtacctgcggatcctccgaccaccttcaaccagtcaaagctgaactctttcatcacgcaatacagcaccggacaggtcagcgtggaaattgaatgggagctgcagaaggaaaacagcaagcgctggaaccccgagatccagtacacctccaactactacaaatctacaagtgtggactttgctgttaatacagaaggcgtgtactctgaaccccaccccattggcacccgttacctcacccgtcccctgtaa

SEQ ID NO: 1673 - DNA, 2211 bp, synthetic construct
  source 1..2211: mol_type = other DNA; note = Description of Artificial Sequence: Synthetic polynucleotide
atggctgccgatggttatcttccagattggctcgaggacaacctctctgagggcattcgcgagtggtgggacttgaaacctggagccccgaagcccaaagccaaccagcaaaagcaggacgacggccggggtctggtgcttcctggctacaagtacctcggacccttcaacggactcgacaagggggagcccgtcaacgcggcggacgcagcggccctcgagcacgacaaggcctacgaccagcagctcaaagcgggtgacaatccgtacctgcggtataaccacgccgacgccgagtttcaggagcgtctgcaagaagatacgtcttttgggggcaacctcggacgagcagtcttccaggccaaaaagaggcttcttgaacctcttggtctggttgaggaagcggctaagacggctcctggaaagaagaggcctgtagagcagtctcctcaggaaccggactcctccgcgggtattggcaaatcgggtgcacagcccgctaaaaagagactcaatttcggtcagactggcgacacagagtcagtcccagaccctcaaccaatcggagaacctccagcagcgccctctggtgtgggacctaatacaatggctgcaggcggtggcgcaccaatggcagacaataacgaaggtgccgatggagtgggtagttcctcgggaaattggcattgcgattcccaatggctgggggacagagtcatcaccaccagcacccgaacctgggccctgcccacctataacaaccacctctacaagcaaatctccagtgcttcaacgggggccagcaacgacaaccactactttggctacagcaccccttgggggtattttgacttcaacagattccactgccacttttcaccacgtgactggcaaagactcatcaacaacaactggggattccgacccaagagactcaacttcaagctcttcaacatccaggtcaaggaggtcacgcagaatgaaggcaccaagaccatcgccaataacctcaccagcaccatccaggtgtttacggactcggagtaccagctgccgtacgttctcggctctgcccaccagggctgcctgcctccgttcccggcggacgtgttcatgattccccagtacggctacctaacactcaacaacggtagtcaggccgtgggacgctcctccttctactgcctggaatactttccttcgcagatgctgagaaccggcaacaacttccagtttacttacaccttcgaggacgtgcctttccacagcagctacgcgcacagccagagcttggaccggctgatgaatcctctgattgaccagtacctgtactacttgtctcggactcaaacaacaggaggcacggcaaatacgcagactctgggcttcagccaaggtgggcctaatacaatggccaatcacgcaaagaactggctgccaggaccctgttaccgccaacaacgcgtctcaacgacaaccgggcaaaacaacaatagcaactttgcctggactgctgggaccaaataccatctgaatggaagaaattcattggctaatcctggcatcgctatggcaacacacaaagacgacaaggagcgtttttttcccagtaacgggatcctgatttttggcaaacaaaatgctgccagagacaatgcggattacagcgatgtcatgctcaccagcgaggaagaaatcaaaaccactaaccctgtggctacagaggaatacggtatcgtggcagataacttgcagcagcaaaacacggctcctcaaattggaactgtcaacagccagggggccttacccggtatggtctggcagaaccgggacgtgtacctgcagggtcccatctgggccaagattcctcacacggacggcaacttccacccgtctccgctgatgggcggctttggcctgaaacatcctccgcctcagatcctgatcaagaacacgcctgtacctgcggatcctccgaccaccttcaaccagtcaaagctgaactctttcatcacgcaatacagcaccggacaggtcagcgtggaaattgaatgggagctgcagaaggaaaacagcaagcgctggaaccccgagatccagtacacctccaactactacaaatctacaagtgtggactttgctgttaatacagaaggcgtgtactctgaaccccaccccattggcacccgttacctcacccgtcccctgtaa

SEQ ID NO: 1674 - DNA, 2214 bp, synthetic construct
  source 1..2214: mol_type = other DNA; note = Description of Artificial Sequence: Synthetic polynucleotide
atggctgccgatggttatcttccagattggctcgaggacaaccttagtgaaggaattcgcgagtggtgggcgctgaaacctggagccccgaagcccaaagccaaccagcaaaagcaggacgacggccggggtctggtgcttcctggctacaagtacctcggacccttcaacggactcgacaagggggagcccgtcaacgcggcggacgcagcggccctcgagcacgacaaggcctacgaccagcagctcaaagcgggtgacaatccgtacctgcggtataaccacgccgacgccgagtttcaggagcgtctgcaagaagatacgtcttttgggggcaacctcgggcgagcagtcttccaggccaagaagcgggttctcgaacctctcggtctggttgaggaaggcgctaagacggctcctggaaagaaacgtccggtagagcagtcgccacaagagccagactcctcctcgggcatcggcaagacaggccagcagcccgctaaaaagagactcaatttcggtcagactggcgacacagagtcagtcccagaccctcaaccaatcggagaacctcccgcagccccctcaggtgtgggatctcttacaatggcttcaggtggtggcgcaccagtggcagacaataacgaaggtgccgatggagtgggtagttcctcgggaaattggcattgcgattcccaatggctgggggacagagtcatcaccaccagcaccagaacctgggccttgcccacctacaataaccacctctacaagcaaatctccaacagcacatctggaggatcttcaaatgacaacgcctacttcggctacagcaccccctgggggtattttgactttaacagattccactgccacttttcaccacgtgactggcagcgactcatcaacaacaactggggattccgacccaagagactcaacttcaagctcttcaacatccaggtcaaggaggtcacgcagaacgaaggcaccaagaccatcgccaataacctcaccagcaccatccaggtgtttacggactcggagtaccagctgccgtacgttctcggctccgcccaccagggctgcctgcctccgttcccggcggacgtgttcatgattccccagtacggctacctaacgctcaacaacggtagtcaggccgtgggacgctcctccttctactgcctggaatactttccttcgcagatgctgagaaccggcaacaacttccagtttacttacaccttcgaggacgtgcctttccacagcagctacgcgcacagccagagcttggaccggctgatgaatcctctgattgaccagtacctgtactacttgtctcggactcaaacaacaggaggcacggcaaatacgcagactctgggcttcagccaaggtgggcctaatacaatggccaatcaggcaaagaactggctgccaggaccctgttaccgccaacaacgcgtctcaacgacaaccgggcaaaacaacaatagcaactttgcctggactgctgggaccaaataccatctgaatggaagaaattcattggctaatcctggcatcgctatggcaacacacaaagacgacaaggagcgtttttttcccagtaacgggatcctgatttttggcaaacaaaatgctgccagagacaatgcggattacagcgatgtcatgctcaccagcgaggaagaaatcaaaaccactaaccctgtggctacagaggaatacggtatcgtggcagataacttgcagcagcaaaacacggctcctcaaattggaactgtcaacagccagggggccttacccggtatggtctggcagaaccgggacgtgtacctgcagggtcccatctgggccaagattcctcacacggacggcaacttccacccgtctccgctgatgggcggctttggcctgaaacatcctccgcctcagatcctgatcaagaacacgcctgtacctgcggatcctccgaccaccttcaaccagtcaaagctgaactctttcatcacgcaatacagcaccggacaggtcagcgtggaaattgaatgggagctgcagaaggaaaacagcaagcgctggaaccccgagatccagtacacctccaactactacaaatctacaagtgtggactttgctgttaatacagaaggcgtgtactctgaaccccaccccattggcacccgttacctcacccgtcccctgtaa

SEQ ID NO: 1675 - DNA, 2214 bp, synthetic construct
  source 1..2214: mol_type = other DNA; note = Description of Artificial Sequence: Synthetic polynucleotide
atggctgccgatggttatcttccagattggctcgaggacaaccttagtgaaggaattcgcgagtggtgggcgctgaaacctggagccccgaagcccaaagccaaccagcaaaagcaggacgacggccggggtctggtgcttcctggctacaagtacctcggacccttcaacggactcgacaagggggagcccgtcaacgcggcggacgcagcggccctcgagcacgacaaggcctacgaccagcagctcaaagcgggtgacaatccgtacctgcggtataaccacgccgacgcggagtttcaggagcgccttaaagaagatacgtcttttgggggcaacctcgggcgagcagtcttccaggccaagaagagggttctcgaaccttttggtctggttgaggaaggtgctaagacggctcctggaaagaaacgtccggtagagcagtcgccacaagagccagactcctcctcgggcatcggcaagacaggccagcagcccgctaaaaagagactcaattttggtcagactggcgactcagagtcagttccagaccctcaacctctcggagaacctccagcagcgccctctggtgtgggacctaatacaatggctgcaggcggtggcgcaccaatggcagacaataacgaaggtgccgatggagtgggtagttcctcgggaaattggcattgcgattcccaatggctggggaacagagtcatcaccaccagcacccgaacctgggccctgcccacctacaacaatcacctctacaagcaaatctccaacagcacatctggaggatcttcaaatgacaacgcctacttcggctacagcaccccctgggggtattttgacttcaacagattccactgccacttctcaccacgtgactggcagcgactcatcaacaacaactggggattccggcccaagagactcaacttcaagctcttcaacattcaggtcaaagaggttacggacaacaatggagtcaagaccatcgccaataaccttaccagcacggtccaggtcttcacggactcggagtaccagttgccgtacgtcctcggctctgcgcaccagggctgcctccctccgttcccggcggacgtgttcatgattccgcaatacggctacctgacgctcaacaacggtagccaagccgtgggacgttcatccttttactgcctggaatatttcccttctcagatgctgagaaccggcaacaacttccagtttacttacaccttcgaggacgtgcctttccacagcagctacgcgcacagccagagcttggaccggctgatgaatcctctgattgaccagtacctgtactacttgtctcggactcaaacaacaggaggcacggcaaatacgcagactctgggcttcagccaaggtgggcctaatacaatggccaatcaggcaaagaactggctgccaggaccctgttaccgccaacaacgcgtctcaacgacaaccgggcaaaacaacaatagcaactttgcctggactgctgggaccaaataccatctgaatggaagaaattcattggctaatcctggcatcgctatggcaacacacaaagacgacaaggagcgtttttttcccagtaacgggatcctgatttttggcaaacaaaatgctgccagagacaatgcggattacagcgatgtcatgctcaccagcgaggaagaaatcaaaaccactaaccctgtggctacagaggaatacggtatcgtggcagataacttgcagcagcaaaacacggctcctcaaattggaactgtcaacagccagggggccttacccggtatggtctggcagaaccgggacgtgtacctgcagggtcccatctgggccaagattcctcacacggacggcaacttccacccgtctccgctgatgggcggctttggcctgaaacatcctccgcctcagatcctgatcaagaacacgcctgtacctgcggatcctccgaccaccttcaaccagtcaaagctgaactctttcatcacgcaatacagcaccggacaggtcagcgtggaaattgaatgggagctgcagaaggaaaacagcaagcgctggaaccccgagatccagtacacctccaactactacaaatctacaagtgtggactttgctgttaatacagaaggcgtgtactctgaaccccaccccattggcacccgttacctcacccgtcccctgtaa

SEQ ID NO: 1676 - DNA, 2211 bp, synthetic construct
  source 1..2211: mol_type = other DNA; note = Description of Artificial Sequence: Synthetic polynucleotide
atggctgccgatggttatcttccagattggctcgaggacaacctctctgagggcattcgcgagtggtgggacttgaaacctggagccccgaagcccaaagccaaccagcaaaagcaggacgacggccggggtctggtgcttcctggctacaagtacctcggacccttcaacggactcgacaggggggagcccgtcaacgcggcggacgcagcggccctcgagcacgacaaggcctacgaccagcagctcaaagcgggtgacaatccgtacctgcggtataaccacgccgacgccgagtttcaggagcgtctgcaagaagatacgtcttttgggggcaacctcgggcgagcagtcttccaggccaagaagcgggttctcgaacctctcggtctggttgaggaaggcgctaagacggctcctggaaagaaacgtccggtagagcagtcgccacaagagccagactcctcctcgggcatcggcaagacaggccagcagcccgctaaaaagagactcaattttggtcagactggcgactcagagtcagtccccgacccacaacctctcggagaacctccagcaacccccgctgctgtgggacctactacaatggcttcaggcggtggcgcaccaatggcagacaataacgaaggcgccgacggagtgggtaatgcctcaggaaattggcattgcgattccacatggctgggcgacagagtcatcaccaccagcacccgaacctgggccttgcccacctataacaaccacctctacaagcaaatctccagtgcttcaacgggggccagcaacgacaaccactacttcggctacagcaccccctgggggtattttgacttcaacagattccactgccacttctcaccacgtgactggcagcgactcatcaacaacaactggggattccggcctaagcgactcaacttcaagctcttcaacattcaggtcaaagaggttacggacaacaatggagtcaagaccatcgccaataacctcaccagcaccatccaggtgtttacggactcggagtaccagctgccgtacgttctcggctctgcccaccagggctgcctgcctccgttcccggcggacgtgttcatgattccccagtacggctacctaacactcaacaacggtagtcaggccgtgggacgctcctccttctactgcctggaatactttccttcgcagatgctgagaaccggcaacaacttccagtttacttacaccttcgaggacgtgcctttccacagcagctacgcccacagccagagcttggaccggctgatgaatcctctgattgaccagtacctgtactacttgtctcggactcaaacaacaggaggcacggcaaatacgcagactctgggcttcagccaaggtgggcctaatacaatggccaatcaggcaaagaactggctgccaggaccctgttaccgccaacaacgcgtctcaacgacaaccgggcaaaacaacaatagcaactttgcctggactgctgggaccaaataccatctgaatggaagaaattcattggctaatcctggcatcgctatggcaacacacaaagacgacaaggagcgtttttttcccagtaacgggatcctgatttttggcaaacaaaatgctgccagagacaatgcggattacagcgatgtcatgctcaccagcgaggaagaaatcaaaaccactaaccctgtggctacagaggaatacggtatcgtggcagataacttgcagcagcaaaacacggctcctcaaattggaactgtcaacagccagggggccttacccggtatggtctggcagaaccgggacgtgtacctgcagggtcccatctgggccaagattcctcacacggacggcaacttccacccgtctccgctgatgggcggctttggcctgaaacatcctccgcctcagatcctgatcaagaacacgcctgtacctgcggatcctccgaccaccttcaaccagtcaaagctgaactctttcatcacgcaatacagcaccggacaggtcagcgtggaaattgaatgggagctgcagaaggaaaacagcaagcgctggaaccccgagatccagtacacctccaactactacaaatctacaagtgtggactttgctgttaatacagaaggcgtgtactctgaaccccaccccattggcacccgttacctcacccgtcccctgtaa

SEQ ID NO: 1677 - DNA, 2211 bp, synthetic construct
  source 1..2211: mol_type = other DNA; note = Description of Artificial Sequence: Synthetic polynucleotide
atggctgccgatggttatcttccagattggctcgaggacaacctctctgagggcattcgcgagtggtgggacttgaaacctggagccccgaagcccaaagccaaccagcaaaagcaggacgacggccggggtctggtgcttcctggctacaagtacctcggacccttcaacggactcgacaagggggagcccgtcaacgcggcggacgcagcggccctcgagcacgacaaggcctacgaccagcagctcaaagcgggtgacaatccgtacctgcggtataaccacgccgacgccgagtttcaggagcgtctgcaagaagatacgtcttttgggggcaacctcgggcgagcagtcttccaggccaagaagcgggttctcgaacctctcggtctggttgaggaaggcgctaagacggctcctggaaagaaacgtccggtagagcagtcgccacaagagccagactcctcctcgggcatcggcaagaaaggccaacagcccgccagaaaaagactcaattttggtcagactggcgactcagagtcagttccagaccctcaacctctcggagaacctcccgcagccccctcaggtgtgggatctcttacaatggcttcaggcggtggcgcaccaatggcagacaataacgaaggcgccgacggagtgggtaatgcctcaggaaattggcattgcgattccacatggctgggcgacagagtcatcaccaccagcacccgaacatgggccttgcccacttacaacaaccatctctacaagcaaatctccagtgcttcaacgggggccagcaacgacaaccactacttcggctacagcaccccctgggggtattttgatttcaacagattccactgccacttttcaccacgtgactggcaaagactcatcaacaacaactggggattccgacccaagagactcaacttcaagctctttaacattcaagtcaaagaggtcacgcagaatgaaggcaccaagaccatcgccaataaccttaccagcacggtccaggtcttcacggactcagactatcagctcccgtacgttctcggctccgcccaccagggctgcctgcctccgttcccggcggacgtgttcatgattccccagtacggctacctaacactcaacaacggtagtcaggccgtgggacgctcctccttctactgcctggaatactttccttcgcagatgctgagaaccggcaacaacttccagtttacttacacctttgaggacgttcctttccacagcagctacgctcacagccagagtctggaccgtctcatgaatcctctgattgaccagtacctgtactacttgtctcggactcaaacaacaggaggcacggcaaatacgcagactctgggcttcagccaaggtgggcctaatacaatggccaatcaggcaaagaactggctgccaggaccctgttaccgccaacaacgcgtctcaacgacaaccgggcaaaacaacaatagcaactttgcctggactgctggaaccaaataccatctgaatggaagaaattcattgtctaatcctggcatcgctatggcgacacacaaagacgacaaggagcgtttttttcccagtaacgggatcctgatttttggcaaacaaaatgctgccagagacaatgcggattacagcgatgtcatgctcaccagcgaggaagaaatcaaaaccactaaccctgtggctacagaggaatacggtatcgtggcagataacttgcagcagcaaaacacggctcctcaaattggaactgtcaacagccagggggccttacccggtatggtctggcagaaccgggacatgtacctgcagggtcccatctgggccaagattcctcacacggacggcaacttccacccgtctccgctgatgggcggctttggcctgaaacatcctccgcctcagatcctgatcaagaacacgcctgtacctgcggatcctccgaccaccttcaaccagtcaaagctgaactctttcatcacgcaatacagcaccggacaggtcagcgtggaaattgaatgggagctgcagaaggaaaacagcaagcgctggaaccccgagatccagtacacctccaactactacaaatctacaagtgtggactttgctgttaatacagaaggcgtgtactctgaaccccaccccattggcacccgttacctcacccgtcccctgtaa

SEQ ID NO: 1678 - DNA, 2211 bp, synthetic construct
  source 1..2211: mol_type = other DNA; note = Description of Artificial Sequence: Synthetic polynucleotide
atggctgccgatggttatcttccagattggctcgaggacaacctctctgagggcattcgcgagtggtgggcgctgaaacctggagccccgaagcccaaagccaaccagcaaaagcaggacgacggccggggtctggtgcttcctggctacaagtacctcggacccttcaacggactcgacaagggggagcccgtcaacgcggcggatgcagcggccctcgagcacgacaaggcctacgaccagcagctcaaagcgggtgacaatccgtacctgcggtataaccacgccgacgccgagtttcaggagcgtctgcaggaagatacgtcttttgggggcaacctcgggcgagcagtcttccaggccaagaagagggttctcgaaccttttggtctggttgaggaaggcgctaagacggctcctggaaagaaacgtccggtagagcagtcgccacaagagccagactcctcctcgggcatcggcaagacaggccagcagcccgctaaaaagagactcaattttggtcagactggcggctcagagtcagtccccgacccacaacctctcggagaacctccagcaacccccgctgctgtgggacctactacaatggctgcaggcggtggcgcaccaatggcagacaataacgaaggcgccgacggagtgggtagttcctcgggaaattggcattgcgattccacatggctgggcgacagagtcatcaccaccagcaccagaacctgggccttgcccacctataacaaccacctctacaagcaaatctccagtgcttcaacgggggccagcaacgacaaccactacttcggctacagcaccccctgggggtattttgatttcaacagattccactgccatttctcaccacgtgactggcagcgactcatcaacaacaactggggattccggcccaagagactcaacttcaaactcttcaacattcaggtcaaagaggttacggacaacaatggagtcaagaccatcgccaataaccttaccagcacggtccaggtgtttacggactcggagtaccagctgccgtacgttctcggctctgcccaccagggctgcctccctccgttcccggcggacgtgttcatgattccgcagtacggctacctaacgctcaacaatggcagccaggcagtgggacggtcatccttttactgcctggaatatttcccttctcagatgctgagaacgggcaacaactttaccttcagctacacctttgaggaagtgcctttccacagcagctacgcgcacagccagagcctggaccggctgatgaatcctctgattgaccagtacctgtactacttgtctcggactcaaacaacaggaggcacggcaaatacgcagactctgggcttcagccaaggtgggcctaatacaatggccaatcaggcaaagaactggctgccaggaccctgttaccgccaacaacgcgtctcaacgacaaccgggcaaaacaacaatagcaactttgcctggactgctgggaccaaataccatctgaatggaagaaattcattggctaatcctggcatcgctatggcctcacacaaagacgacaaggagcgtttttttcccagtaacgggatcctgatttttggcaaacaaaatgctgccagagacaatgcggattacagcgatgtcatgctcaccagcgaggaagaaatcaaaaccactaaccctgtggctacagaggaatacggtatcgtggcagataacttgcagcagcaaaacacggctcctcaaattggaactgtcaacagccagggggccttacccggtatggtctggcagaaccgggacgtgtacctgcagggtcccatctgggccaagattcctcacacggacggcaacttccacccgtctccgctgatgggcggctttggcctgaaacatcctccgcctcagatcctgatcaagaacacgcctgtacctgcggatcctccgaccaccttcaaccagtcaaagctgaactctttcatcacgcaatacagcaccggacaggtcagcgtggaaattgaatgggagctgcagaaggaaaacagcaagcgctggaaccccgagatccagtacacctccaactactacaaatctacaagtgtggactttgctgttaatacagaaggcgtgtactctgaaccccaccccattggcacccgttacctcacccgtcccctgtaa

SEQ ID NO: 1679 - protein, 736 aa, synthetic construct
  source 1..736: note = Description of Artificial Sequence: Synthetic polypeptide
MAADGYLPDWLEDTLSEGIRQWWKLKPGPPPPKPAERHKDDSRGLVLPGYKYLGPFNGLDKGEPVNEADAAALEHDKAYDQQLKAGDNPYLKYNHADAEFQERLKEDTSFGGNLGRAVFQAKKRVLEPLGLVEEGAKTAPGKKRPVEQSPQEPDSSSGIGKTGQQPAKKRLNFGQTGDSESVPDPQPLGEPPATPAAVGPTTMASGGGAPMADNNEGADGVGSSSGNWHCDSQWLGDRVITTSTRTWALPTYNNHLYKQISSASTGASNDNHYFGYSTPWGYFDFNRFHCHFSPRDWQRLINNNWGFRPKRLNFKLFNIQVKEVTQNEGTKTIANNLTSTIQVFTDSEYQLPYVLGSAHQGCLPPFPADVFMIPQYGYLTLNNGSQAVGRSSFYCLEYFPSQMLRTGNNFQFTYTFEDVPFHSSYAHSQSLDRLMNPLIDQYLYYLSRTQTTGGTANTQTLGFSQGGPNTMANQAKNWLPGPCYRQQRVSTTTGQNNNSNFAWTAGTKYHLNGRNSLANPGIAMATHKDDKERFFPSNGILIFGKQNAARDNADYSDVMLTSEEEIKTTNPVATEEYGIVADNLQQQNTAPQIGTVNSQGALPGMVWQNRDVYLQGPIWAKIPHTDGNFHPSPLMGGFGLKHPPPQILIKNTPVPADPPTTFNQSKLNSFITQYSTGQVSVEIEWELQKENSKRWNPEIQYTSNYYKSTSVDFAVNTEGVYSEPHPIGTRYLTRPL

SEQ ID NO: 1680 - protein, 736 aa, synthetic construct
  source 1..736: note = Description of Artificial Sequence: Synthetic polypeptide
MAADGYLPDWLEDNLSEGIREWWALKPGAPKPKANQQKQDDGRGLVLPGYKYLGPFNGLDKGEPVNAADAAALEHDKAYDQQLKAGDNPYLKYNHADAEFQERLKEDTSFGGNLGRAVFQAKKRLLEPLGLVEEAAKTAPGKKRPVEQSPQEPDSSAGIGKSGAQPAKKRLNFGQTGDSESVPDPQPLGEPPATPAAVGPTTMASGGGAPMADNNEGADGVGNASGNWHCDSTWLGDRVITTSTRTWALPTYNNHLYKQISSASTGASNDNHYFGYSTPWGYFDFNRFHCHFSPRDWQRLINNNWGFRPKRLNFKLFNIQVKEVTQNEGTKTIANNLTSTIQVFTDSEYQLPYVLGSAHQGCLPPFPADVFMIPQYGYLTLNNGSQAVGRSSFYCLEYFPSQMLRTGNNFQFTYTFEDVPFHSSYAHSQSLDRLMNPLIDQYLYYLSRTQTTGGTANTQTLGFSQGGPNTMANQAKNWLPGPCYRQQRVSTTTGQNNNSNFAWTAGTKYHLNGRNSLANPGIAMATHKDDKERFFPSNGILIFGKQNAARDNADYSDVMLTSEEEIKATNPVATEEYGIVADNLQQQNTAPQIGTVNSQGALPGMVWQNRDVYLQGPIWAKIPHTDGNFHPSPLMGGFGLKHPPPQILIKNTPVPADPPTTFNQSKLNSFITQYSTGQVSVEIEWELQKENSKRWNPEIQYTSNYYKSTSVDFAVNTEGVYSEPHPIGTRYLTRPL

SEQ ID NO: 1681 - protein, 737 aa, synthetic construct
  source 1..737: note = Description of Artificial Sequence: Synthetic polypeptide
MAADGYLPDWLEDNLSEGIREWWDLKPGAPKPKANQQKQDDGRGLVLPGYKYLGPFNGLDKGEPVNAADAAALEHDKAYDQQLKAGDNPYLRYNHADAEFQERLQEDTSFGGNLGRAVFQAKKRVLEPLGLVEEGANTAPGKKRPVEQSPQEPDSSAGIGKSGAQPAKKRLNFGQTGDTESVPDPQPIGEPPAAPSGVGSLTMASGGGAPVADNNEGADGVGSSSGNWHCDSQWLGDRVITTSTRTWALPTYNNHLYKQISNSTSGGSSNDNAYFGYSTPWGYFDFNRFHCHFSPRDWQRLINNNWGFRPKRLNFKLFNIQVKEVTDNNGVKTIANNLTSTIQVFTDSEYQLPYVLGSAHQGCLPPFPADVFMIPQYGYLTLNNGSQAVGRSSFYCLEYFPSQMLRTGNNFQFTYTFEDVPFHSSYAHSQSLDRLMNPLIDQYLYYLSRTQTTGGTANTQTLGFSQGGPNTMANQAKNWLPGPCYRQQRVSTTTGQNNNSNFAWTAGTKYHLNGRNSLANPGIAMASHKDDKERFFPSNGILIFGKQNAARDNADYSDVMLTSEEEIKTTNPVATEEYGIVADNLQQQNTAPQIGTVNSQGALPGMVWQNRDVYLQGPIWAKIPHTDGNFHPSPLMGGFGLKHPPPQILIKNTPVPADPPTTFNQSKLNSFITQYSTGQVSVEIEWELQKENSKRWNPEIQYTTNYYKSTSVDFAVNTEGVYSEPHPIGTRYLTRPL

SEQ ID NO: 1682 - protein, 736 aa, synthetic construct
  source 1..736: note = Description of Artificial Sequence: Synthetic polypeptide
MAADGYLPDWLEDNLSEGIREWWALKPGAPKPKANQQKQDDGRGLVLPGYKYLGPFNGLDKGEPVNEADAAALEHDKAYDQQLKAGDNPYLRYNHADAEFQERLQEDTSFGGNLGRAVFQAKKRVLEPLGLVEEGAKTAPGKKRPVEQSPQEPDSSSGIGKTGQQPAKKRLNFGQTGDSESVPDPQPLGEPPATPAAVGPTTMASGGGAPMADNNEGADGVGNASGNWHCDSTWLGDRVITTSTRTWALPTYNNHLYKQISSASTGASNDNHYFGYSTPWGYFDFNRFHCHFSPRDWQRLINNNWGFRPKRLNFKLFNIQVKEVTQNEGTKTIANNLTSTIQVFTDSEYQLPYVLGSAHQGCLPPFPADVFMIPQYGYLTLNNGSQAVGRSSFYCLEYFPSQMLRTGNNFQFTYTFEDVPFHSSYAHSQSLDRLMNPLIDQYLYYLSRTQTTGGTANTQTLGFSQGGPNTMANQAKNWLPGPCYRQQRVSTTTGQNNNSNFAWTAGTKYHLNGRNSLANPGIAMATHKDDKERFFPSNGILIFGKQNAARDNADYSDVMLTSEEEIKTTNPVATEEYGIVADNLQQQNTAPQIGTVNSQGALPGMVWQNRDVYLQGPIWAKIPHTDGNFHPSPLMGGFGLKHPPPQILIKNTPVPADPPTTFNQSKLNSFITQYSTGQVSVEIEWELQKENSKRWNPEIQYTSNYYKSTSVDFAVNTEGVYSEPHPIGTRYLTRPL

SEQ ID NO: 1683 - protein, 736 aa, synthetic construct
  source 1..736: note = Description of Artificial Sequence: Synthetic polypeptide
MAADGYLPDWLEDNLSEGIREWWALKPGAPKPKANQQKQDDGRGLVLPGYKYLGPFNGLDKGEPVNEADAAALEHDKAYDQQLKAGDNPYLRYNHADAEFQERLQEDTSFGGNLGRAVFQAKKRVLEPFGLVEEGAKTAPGKKRPVEQSPQEPDSSSGIGKTGQQPAKKRLNFGQTGDSESVPDPQPLGEPPATPAAVGPTTMASGGGAPMADNNEGADGVGNASGNWHCDSQWLGDRVITTSTRTWALPTYNNHLYKQISSASTGASNDNHYFGYSTPWGYFDFNRFHCHFSPRDWQRLINNNWGFRPKRLNFKLFNIQVKEVTDNNGVKTIANNLTSTVQVFSDSEYQLPYVLGSAHQGCLPPFPADVFMIPQYGYLTLNNGSQAVGRSSFYCLEYFPSQMLRTGNNFQFTYTFEDVPFHSSYAHSQSLDRLMNPLIDQYLYYLSRTQTTGGTANTQTLGFSQGGPNTMANQAKNWLPGPCYRQQRVSTTTGQNNNSNFAWTAGTKYHLNGRNSLANPGIAMATHKDDKERFFPSNGILIFGKQNAARDNADYSDVMLTSEEEIKTTNPVATEEYGIVADNLQQQNTAPQIGTVNSQGALPGMVWQNRDVYLQGPIWAKIPHTDGNFHPSPLMGGFGLKHPPPQILIKNTPVPADPPTTFNQSKLNSFITQYSTGQVSVEIEWELQKENSKRWNPEIQYTSNYYKSTSVDFAVNTEGVYSEPHPIGTRYLTRPL

SEQ ID NO: 1684 - protein, 736 aa, synthetic construct
  source 1..736: note = Description of Artificial Sequence: Synthetic polypeptide
MAADGYLPDWLEDTLSEGIRQWWKLKPGPPPPKPAERHKDDSRGLVLPGYKYLGPFNGLDKGEPVNEADAAALEHDKAYDRQLDSGDNPYLKYNHADAEFQERLKEDTSFGGNLGRAVFQAKKRVLEPFGLVEEGAKTAPGKKRPVEQSPQEPDSSSGIGKTGQQPAKKRLNFGQTGDSESVPDPQPLGEPPATPAAVGPTTMASGGGAPMADNNEGADGVGNASGNWHCDSTWLGDRVITTSTRTWALPTYNNHLYKQISSASTGASNDNHYFGYSTPWGYFDFNRFHCHFSPRDWQRLINNNWGFRPKRLNFKLFNIQVKEVTDNNGVKTIANNLTSTVQVFTDSDYQLPYVLGSAHEGCLPPFPADVFMIPQYGYLTLNNGSQAVGRSSFYCLEYFPSQMLRTGNNFQFTYTFEDVPFHSSYAHSQSLDRLMNPLIDQYLYYLSRTQTTGGTANTQTLGFSQGGPNTMANQAKNWLPGPCYRQQRVSTTTGQNNNSNFAWTAGTKYHLNGRNSLANPGIAMATHKDDKERFFPSNGILIFGKQNAARDNADYSDVMLTSEEEIKTTNPVATEEYGIVADNLQQQNTAPQIGTVNSQGALPGMVWQNRDVYLQGPIWAKIPHTDGNFHPSPLMGGFGLKHPPPQILIKNTPVPADPPTTFNQSKLNSFITQYSTGQVSVEIEWELQKENSKRWNPEIQYTSNYYKSTSVDFAVNTEGVYSEPHPIGTRYLTRNL

SEQ ID NO: 1685 - protein, 738 aa, synthetic construct
  source 1..738: note = Description of Artificial Sequence: Synthetic polypeptide
MAADGYLPDWLEDNLSEGIREWWDLKPGAPKPKANQQKQDDGRGLVLPGYKYLGPFNGLDKGEPVNAADAAALEHDKAYDQQLQAGDNPYLRYNHADAEFQERLQEDTSFGGNLGRAVFQAKKRVLEPLGLVEEGAKTAPGKKRPVEPSPQRSPDSSTGIGKKGQQPARKRLNFGQTGDSESVPDPQPLGEPPAAPSGVGPNTMAAGGGAPMADNNEGADGVGSSSGNWHCDSQWLGDRVITTSTRTWALPTYNNHLYKQISNSTSGGSSNDNAYFGYSTPWGYFDFNRFHCHFSPRDWQRLINNNWGFRPKRLSFKLFNIQVKEVTQNEGTKTIANNLTSTIQVFTDSEYQLPYVLGSAHQGCLPPFPADVFMIPQYGYLTLNNGSQAVGRSSFYCLEYFPSQMLRTGNNFTFSYTFEDVPFHSSYAHSQSLDRLMNPLIDQYLYYLSRTQTTGGTANTQTLGFSQGGPNTMANQAKNWLPGPCYRQQRVSTTTGQNNNSNFAWTAGTKYHLNGRNSLANPGIAMATHKDDKERFFPSNGILIFGKQNAARDNADYSDVMLTSEEEIKTTNPVATEEYGIVADNLQQQNTAPQIGTVNSQGALPGMVWQNRDVYLQGPIWAKIPHTDGNFHPSPLMGGFGLKHPPPQILIKNTPVPADPPTTFNQSKLNSFITQYSTGQVSVEIEWELQKENSKRWNPEIQYTSNYYKSTSVDFAVNTEGVYSEPHPIGTRYLTRPL

SEQ ID NO: 1686 - protein, 737 aa, synthetic construct
  source 1..737: note = Description of Artificial Sequence: Synthetic polypeptide
MAADGYLPDWLEDNLSEGIREWWDLKPGAPKPKANQQKQDDGRGLVLPGYKYLGPFNGLDKGEPVNAADAAALEHDKAYDQQLKAGDNPYLRYNHADAEFQERLQEDTSFGGNLGRAVFQAKKRVLEPFGLVEEGAKTAPGKKRPVEQSPQEPDSSSGIGKTGQQPAKKRLNFGQTGDSESVPDPQPLGEPPATPAAVGPTTMASGGGAPMQDNNEGADGVGSSSGNWHCDSTWLGDRVITTSTRTWALPTYNNHLYKQISNGTSGGATNDNTYFGYSTPWGYFDFNRFHCHFSPRDWQRLINNNWGFRPKRLNFKLFNIQVKEVTQNEGTKTIANNLTSTIQVFTDSEYQLPYVLGSAHQGCLPPFPADVFMIPQYGYLTLNNGSQAVGRSSFYCLEYFPSQMLRTGNNFTFSYTFEDVPFHSSYAHSQSLDRLMNPLIDQYLYYLSRTQTTGGTANTQTLGFSQGGPNTMANQAKNWLPGPCYRQQRVSTTTGQNNNSNFAWTAGTKYHLNGRNSLANPGIAMATHKDDKERFFPSNGILIFGKQNAARDNADYSDVMLTSEEEIKTTNPVATEEYGIVADNLQQQNTAPQIGTVNSQGALPGMVWQNRDVYLQGPIWAKIPHTDGNFHPSPLMGGFGLKHPPPQILIKNTPVPADPPTTFNQSKLNSFITQYSTGQVSVEIEWELQKENSKRWNPEIQYTSNYYKSTSVDFAVNTEGVYSEPHPIGTRYLTRPL

SEQ ID NO: 1687 - protein, 736 aa, synthetic construct
  source 1..736: note = Description of Artificial Sequence: Synthetic polypeptide
MAADGYLPDWLEDNLSEGIREWWALKPGAPKPKANQQKQDDGRGLVLPGYKYLGPFNGLDKGEPVNAADAAALEHDKAYDQQLKAGDNPYLRYNHADAEFQERLQEDTSFGGNLGRAVFQAKKRVLEPLGLVEEGAKTAPGKKRPVEQSPQEPDSSSGIGKTGQQPAKKRLNFGQTGDSESVPDPQPLGEPPATPAAVGPTTMASGGGAPMADNNEGADGVGSSSGNWHCDSTWLGDRVITTSTRTWALPTYNNHLYKQISSASTGASNDNHYFGYSTPWGYFDFNRFHCHFSPRDWQRLINNNWGFRPKRLNFKLFNIQVKEVTDNNGVKTIANNLTSTVQVFTDSDYQLPYVLGSAHEGCLPPFPADVFMIPQYGYLTLNNGSQAVGRSSFYCLEYFPSQMLRTGNNFTFSYTFEDVPFHSSYAHSQSLDRLMNPLIDQYLYYLSRTQTTGGTANTQTLGFSQGGPNTMANQAKNWLPGPCYRQQRVSTTTGQNNNSNFAWTAGTKYHLNGRNSLANPGIAMATHKDDKERFFPSNGILIFGKQNAARDNADYSDVMLTSEEEIKTTNPVATEEYGIVADNLQQQNTAPQIGTVNSQGALPGMVWQNRDVYLQGPIWAKIPHTDGNFHPSPLMGGFGLKHPPPQILIKNTPVPADPPTTFNQSKLNSFITQYSTGQVSVEIEWELQKENSKRWNPEIQYTSNYYKSTSVDFAVNTEGVYSEPHPIGTRYLTRPL

SEQ ID NO: 1688 - protein, 737 aa, synthetic construct
  source 1..737: note = Description of Artificial Sequence: Synthetic polypeptide
MAADGYLPDWLEDNLSEGIREWWDLKPGAPKPKANQQKQDDGRGLVLPGYKYLGPFNGLDKGEPVNAADAAALEHDKAYDQQLKAGDNPYLRYNHADAEFQERLQEDTSFGGNLGRAVFQAKKRVLEPLGLVEEGAKTAPGKKRPVEPSPQRSPDSSTGIGKKGQQPARKRLNFGQTGDSESVPDPQPLGEPPATPAAVGPTTMASGGGAPMADNNEGADGVGNASGNWHCDSTWLGDRVITTSTRTWALPTYNNHLYKQISSASTGASNDNHYFGYSTPWGYFDFNRFHCHFSPRDWQRLINNNLGSRPKRLNFKLFIIQVKEVTTNDGVTTIANNLTSTVQVFSDSEYQLPYVLGSAHQGCLPPFPADVFMIPQYGYLTLNNGSQAVGRSSFYCLEYFPSQMLRTGNNFTFSYTFEDVPFHSSYAHSQSLDRLMNPLIDQYLYYLNRTQNQSGSAQNKDLLFSRGSPAGMSVQPKNWLPGPCYRQQRVSKTKTDNNNSNFTWTGASKYNLNGRESIINPGTAMASHKDDKDKFFPMSGVMIFGKESAGASNTALDNVMITDEEEIKATNPVATERFGTVAVNLQSSSTDPATGDVHVMGALPGMVWQDRDVYLQGPIWAKIPHTDGHFHPSPLMGGFGLKHPPPQILIKNTPVPANPPAEFSATKFASFITQYSTGQVSVEIEWELQKENSKRWNPEVQYTSNYAKSANVDFTVDNNGLYTEPRPIGTRYLTRPL

SEQ ID NO: 1689 - protein, 736 aa, synthetic construct
  source 1..736: note = Description of Artificial Sequence: Synthetic polypeptide
MAADGYLPDWLEDNLSEGIREWWALKPGAPKPKANQQKQDDGRGLVLPGYKYLGPFNGLDKGEPVNAADAAALEHDKAYDQQLKAGDNPYLRYNHADAEFQERLQEDTSFGGNLGRAVFQAKKRLLEPLGLVEEAAKTAPGKKRPVEQSPQEPDSSSGIGKTGQQPAKKRLNFGQTGDSESVPDPQPIGEPPATPAAVGPTTMASGGGAPMADNNEGADGVGNSSGNWHCDSTWLGDRVITTSTRTWALPTYNNHLYKQISSASTGASNDNHYFGYSTPWGYFDFNRFHCHFSPRDWQRLINNNWGFRPKRLNFKLFNIQVKEVTQNEGTKTIANNLTSTIQVFTDSEYQLPYVLGSAHQGCLPPFPADVFMIPQYGYLTLNNGSQAVGRSSFYCLEYFPSQMLRTGNNFTFSYTFEDVPFHSSYAHSQSLDRLMNPLIDQYLYYLSRTQTTGGTANTQTLGFSQGGPNTMANQAKNWLPGPCYRQQRVSTTTGQNNNSNFAWTAGTKYHLNGRNSLANPGIAMATHKDDKERFFPSNGILIFGKQNAARDNADYSDVMLTSEEEIKTTNPVATEEYGIVADNLQQQNTAPQIGTVNSQGALPGMVWQNRDVYLQGPIWAKIPHTDGNFHPSPLMGGFGLKHPPPQILIKNTPVPADPPTTFNQSKLNSFITQYSTGQVSVEIEWELQKENSKRWNPEIQYTSNYYKSTSVDFAVNTEGVYSDPHPIGTRYLTRPL

SEQ ID NO: 1690 - protein, 736 aa, synthetic construct
  source 1..736: note = Description of Artificial Sequence: Synthetic polypeptide
MAADGYLPDWLEDNLSEGIREWWALKPGAPKPKANQQEQDDGRGLVLPGYKYLGPFNGLDKGEPVNAADAAALEHDKAYDQQLKAGDNPYLRYNHADAEFQERLQEDTSFGGNLGRAVFQAKKRVLEPFGLVEEGAKTAPGKKRPVEQSPQEPDSSSGIGKTGQQPAKKRLNFGQTGDSESVPDPQPLGEPPAAPSGVGPNTMAAGGGAPMADNNEGADGVGSSSGNWHCDSTWLGDRVITTSTRTWALPTYNNHLYKQISSASTGASNDNHYFGYSTPWGYFDFNRFHCHFSPRDWQRLINNNWGFRPKRLNFKLFNIQVKEVTQNEGTKTIANNLTSTIQVFTDSEYQLPYVLGSAHQGCLPPFPADVFMIPQYGYLTLNNGSQAVGRSSFFCLEYFPSQMLRTGNNFTFSYTFEDVPFHSSYAHSQSLDRLMNPLIDQYLYYLSRTQTTGGTANTQTLGFSQGGPNTMANQAKNWLPGPCYRQQRVSTTTGQNNNSNFAWTAGTKYHLNGRNSLANPGIAMATHKDDKERFFPSNGILIFGKQNAARDNADYSDVMLTSEEEIKTTNPVATEEYGIVADNLQQQNTAPQIGTVNSQGALPGMVWQNRDVYLQGPIWAKIPHTDGNFHPSPLMGGFGLKHPPPQILIKNTPVPADPPTTFNQSKLNSFITQYSTGQVSVEIEWELQKENSKRWNPEIQYTSNYYKSTSVDFAVNTEGVYSEPHPIGTRYLTRPL

SEQ ID NO: 1691 - protein, 736 aa, synthetic construct
  source 1..736: note = Description of Artificial Sequence: Synthetic polypeptide
MAADGYLPDWLEDNLSEGIREWWDLKPGAPKPKANQQKQDDGRGLVLPGYKYLGPFNGLDKGEPVNAADAAALEHDKAYDQQLKAGDNPYLRYNHADAEFQERLQEDTSFGGNLGRAVFQAKKRVLEPLGLVEEGAKTAPGKKRPVEQSPQEPDSSSGIGKTGQQPAKKRLNFGQTGDSESVPDPQPLGEPPATPAAVGPTTMASGGGAPMADNNEGADGVGNASGNWHCDSTWLGDRVITTSTRTWALPTYNNHLYKQISSASTGASNDNHYFGYSTPWGYFDFNRFHCHFSPRDWQRLINNNWGFRPKRLNFKLFNIQVKEVTTNDGVTTIANNLTSTVQVFSDSEYQLPYVLGSAHQGCLPPFPADVFMIPQYGYLTLNNGSQAVGRSSFYCLEYFPSQMLRTGNNFTFSYTFEDVPFHSSYAHSQSLDRLMNPLIDQYLYYLNRTQNQSGSAQNKDLLFSRGSPAGMSVQPKNWLPGPCYRQQRVSKTKTDNNNSNFTWTGASKYNLNGRESIINPGTAMASHKDDKDKFFPMSGVMIFGKESAGASNTALDNVMITDEEEIKATNPVATERFGTVAVNLQNSSTDPATGDVHVMGALPGMVWQDRDVYLQGPIWAKIPHTDGHFHPSPLMGGFGLKHPPPQILIKNTPVPANPPAEFSATKFASFITQYSTGQVSVEIEWELQKENSKRWNPEVQYTSNYAKSANVDFTVDNNGLYTVPRPIGTRYLTRPL

SEQ ID NO: 1692 - protein, 736 aa, synthetic construct
  source 1..736: note = Description of Artificial Sequence: Synthetic polypeptide
MAADGYLPDWLEDNLSEGIREWWALKPGAPKPKANQQKQDDGRGLVLPGYKYLGPFNGLDKGEPVNAADAAALEHDKAYDQQLKAGDNPYLRYNHADAEFQERLQEDTSFGGNLGRAVFQAKKRLLEPLGLVEEGAKTAPGKKRPVEQSPQEPDSSSGIGKTGEQPAKKRLNFGQTGDSESVPDPQPLGEPPATPAAVGPTTMASGGGAPMADNNEGADGVGSASGNWHCDSTWLGDRVITTSTRTWALPTYNNHLYKQISSASTGASNDNHYFGYSTPWGYFDFNRFHCHFSPRDWQRLINNNWGFRPKRLNFKLFNIQVKEVTDNNGVKTIANNLTSTIQVFTDSEYQLPYVLGSAHQGCLPPFPADVFMIPQYGYLTLNNGSQAVGRSSFYCLEYFPSQMLRTGNNFPFSYTFEDVPFHSSYAHSQSLDRLMNPLIDQYLYYLSRTQTTGGTANTQTLGFSQGGPNTMANQAKNWLPGPCYRQQRVSTTTGQNNNSNFAWTAGTKYHLNGRNSLANPGIAMATHKDDKERFFPSNGILIFGKQNAARDNADYSDVMLTSEEEIKTTNPVATEEYGIVADNLQQQNTAPQIGTVNSQGALPGMVWQNRDVYLQGPIWAKIPHTDGNFHPSPLMGGFGLKHPPPQILIKNTPVPADPPTTFNQSKLNSFITQYSTGQVSVEIEWELQKENSKRWNPEIQYTSNYYKSTSVDFAVNTEGVYSEPHPIGTRYLTRPL

SEQ ID NO: 1693 - protein, 736 aa, synthetic construct
  source 1..736: note = Description of Artificial Sequence: Synthetic polypeptide
MAADGYLPDWLEDNLSEGIREWWALKPGAPKPKANQQKQDDGRGLVLPGYKYLGPFNGLDKGEPVNAADAAALEHDKAYDQQLKAGDNPYLRYNHADAEFQERLQEDTSFGGNLGRAVFQAKKRVLEPLGLVEEGAKTAPGKKRPVEQSPQEPDSSSGIGKTGQQPAKKRLNFGQTGDSESVPDPQPLGEPPATPAAVGPTTMASGGGAPMADNNEGADGVGSSSGNWHCDSQWLGDRVITTSTRTWALPTYNNHLYKQISSASTGASNDNHYFGYSTPWGYFDFNRFHCHFSPRDWQRLINNNWGFRPKRLNFKLFNIQVKEVTDNNGVKTIANNLTSTVQVFTDSEYQLPYVLGSAHQDCLPPFPADVFMIPQYGYLTLNNGSQAVGRSSFYCLEYFPSQMLRTGNNFTFSYTFEDVPFHSSYAHSQSLDRLMNPLIDQYLYYLSRTQTTGGTANTQTLGFSQGGPNTMANQAKNWLPGPCYRQQRVSTTTGQNNNSNFAWTAGTKYHLNGRNSLANPGIAMATHKDDKERFFPSNGILIFGKQNAARDNADYSDVMLTSEEEIKTTNPVATEEYGIVADNLQQQNTAPQIGTVNSQGALPGMVWQNRDVYLQGPIWAKIPHTDGNFHPSPLMGGFGLKHPPPQILIKNTPVPADPPTTFNQSKLNSFITQYSTGQVSVEIEWELQKENSKRWNPEIQYTSNYYKSTSVDFAVNTEGVYSEPHPIGTRYLTRPL

SEQ ID NO: 1694 - protein, 735 aa, synthetic construct
  source 1..735: note = Description of Artificial Sequence: Synthetic polypeptide
MAADGYLPDWLEDNLSEGIREWWDLKPGAPKPKANQQKQDDGRGLVLPGYKYLGPFNGLDKGEPVNAADAAALEHDKAYDQQLKAGDNPYLRYNHADAEFQERLQEDTSFGGNLGRAVFQAKKRVLEPLGLVEEGAKTAPGKKRPVEQSPQEPDSSSGIGKTGQQPAKKRLNFGQTGDSESVPDPQPLGEPPATPAAVGPTTMASGGGAPMADNNEGADGVGNASGNWHCDSTWLGDVITTSTRTWALPTYNNHLYKQISSASTGASNDNHYFGYSTPWGYFDFNRFHCHFSPRDWQRLINNNWGFRPKRLNFKLFNIQVKEVTQNEGTKTIANNLTSTIQVFTDSEYQLPYVLGSAHQGCLPPFPADVFMIPQYGYLTLNNGSQAVGRSSFYCLEYFPSQMLRTGNNFQFTYTFEDVPFHSSYAHSQSLDRLMNPLIDQYLYYLSRTQTTGGTANTQTLGFSQGGPNTMANQAKNWLPGPCYRQQRVSTTTGQNNNSNFAWTAGTKYHLNGRNSLANPGIAMATHKDDKERFFPSNGILIFGKQNAARDNADYSDVILTSEEEIKTTNPVATEEYGIVADNLQQQNTAPQIGTVNSQGALPGMVWQNRDVYLQGPIWAKIPHTDGNFHPSPLMGGFGLKHPPPQILIKNTPVPADPPTTFNQSKLNSFITQYSTGQVSVEIEWELQKENSKRWNPEIQYTSNYYKSTSVDFAVNTEGVYSEPHPIGTRYLTRPL

SEQ ID NO: 1695 - protein, 736 aa, synthetic construct
  source 1..736: note = Description of Artificial Sequence: Synthetic polypeptide
MAADGYLPDWLEDTLSEGIRQWWKLKPGPPPPKPAERHKDDSRGLVLPGYKYLGPFNGLDKGEPVNEADAAALEHDKAYDRQLDSGDNPYLKYNHADAEFQERLKEDTSFGGNLGRAVFQAKKRVLEPFGLVEEGAKTAPGKKRPVEQSPQEPDSSSGIGKTGQQPAKKRLNFGQTGDSESVPDPQPLGEPPATPAAVGPTTMASGGGAPMADNNEGADGVGNASGNWHCDSTWLGDRVITTSTRTWALPTYNNHLYKQISSTSTGASNDNHYFGYSTPWGYFDFNRFHCHFSPRDWQRLINNNWGFRPKRLNFKLFNIQVKEVTDNNGVKTIANNLTSTVQVFTDSEYQLPYVLGSAHQGCLPPFPADVFMIPQYGYLTLNNGSQAVGRSSFYCLEYFPSQMLRTGNNFTFSYTFEDVPFHSSYAHSQSLDRLMNPLIDQYLYYLSRTQTTGGTANTQTLGFSQGGPNTMANQAKNWLPGPCYRQQRVSTTTGQNNNSNFAWTAGTKYHLNGRNSLANPGIAMATHKDDKERFFPSNGILIFGKQNAARDNADYSDVMLTSEEEIKTTNPVATEEYGIVADNLQQQNTAPQIGTVNSQGALPGMVWQNRDVYLQGPIWAKIPHTDGNFHPSPLMGGFGLKHPPPQILIKNTPVPADPPTTFNQSKLNSFITQYSTGQVSVEIEWELQKENSKRWNPEIQYTSNYYKSTSVDFAVNTEGVYSEPHPIGTRYLTRPL

SEQ ID NO: 1696 - protein, 735 aa, synthetic construct
  source 1..735: note = Description of Artificial Sequence: Synthetic polypeptide
MAADGYLPDWLEDNLSEGIREWWDLKPGAPKPKANQQKQDDGRGLVLPGYKYLGPFNGLDKGEPVNAADAAALEHDKAYDRQLDSGDNPYLRYNHADAEFQERLKEDTSFGGNLGRAVFQAKKRVLEPFGLVEEGAKTAPGKKRPVEQSPQEPDSSSGIGKTGQQPAKKRLNFGQTGDSESVPDPQPLGEPPATPAAVGPTTMASGGGAPMADNNEGADGVGNASGNWHCDSTWLGDRVITTSTRTWALPTYNNHLYKQISSASTGASNDNHYFGYSTPWGYFDFNRFHCHFSPRDWQRLINNNWGFRPKRLNFKLFNIQVKEVTQNEGTKTIANNLTSTIQVFTDSEYQLPYVLGSAHQGCLPPFPADVFMIPQYGYLTLNNGSQAVGRSSFYCLEYFPSQMLRTGNNFQFTYTFEDVPFHSSYAHSQSLDRLMNPLIDQYLYYLSRTQTTGGTANTQTLGFSQGGPNTMANQAKNWLPGPCYRQQRVSTTTGQNNNSNFAWTAGTKYHLNGRNSLANPGIAMATHKDDRSVFFQYRDPDFGKQNAARDNADYSDVMLTSEEEIKTTNPVATEEYGIVADNLQQQNTAPQIGTVNSQGALPGMVWQNRDVYLQGPIWAKIPHTDGNFHPSPLMGGFGLKHPPPQILIKNTPVPADPPTTFNQSKLNSFITQYSTGQVSVEIEWELQKENSKRWNPEIQYTSNYYKSTSVDFAVNTEGVYSEPHPIGTRYLTRPL

SEQ ID NO: 1697 - protein, 736 aa, synthetic construct
  source 1..736: note = Description of Artificial Sequence: Synthetic polypeptide
MAADGYLPDWLEDNLSEGIREWWALKPGAPKPKANQQKQDDGRGLVLPGYKYLGPFNGLDKGEPVNAADAAALEHDKAYDQQLKAGDNPYLKYNHADAEFQERLQGDTSFGGNLGRAVFQAKKRVLEPLGLVEEAAKTAPGKKRPVEQSPQEPDSSAGIGKSGAQPAKKRLNFGQTGDTESVPDPQPLGEPPAAPSGVGPNTMAAGGGAPMADNNEGADGVGSSSGNWHCDSQWLGDRVITTSTRTWALPTYNNHLYKQISSASTGASNDNHYFGYSTPWGYFDFNRFHCHFSPRDWQRLINNNWGFRPKRLNFKLFNIQVKEVTDNNGVKTIANNLTSTVQVFTDSDYQLPYVLGSAHEGCLPPFPADVFMIPQYGYLTLNNGSQAVGRSSFYCLEYFPSQMLRTGNNFQFTYTFEDVPFHSSYAHSQSLDRLMNPLIDQYLYYLSRTQTTGGTANTQTLGFSQGGPNTMANQAKNWLPGPCYRQQRVSTTTGQNNNSNFAWTAGTKYHLNGRNSLANPGIAMATHKDDKERFFPSNGILIFGKQNAARDNADYSDVMLTSEEEIKTTNPVATEEYGIVADNLQQQNTAPQIGTVNSQGALPGMVWQNRDVYLQGPIWAKIPHTDGNFHPSPLMGGFGLKHPPPQILIKNTPVPADPPTTFNQSKLNSFITQYSTGQVSVEIEWELQKENSKRWNPEIQYTSNYYKSTSVDFAVNTEGVYSEPHPIGTRYLTRPL

SEQ ID NO: 1698 - protein, 736 aa, synthetic construct
  source 1..736: note = Description of Artificial Sequence: Synthetic polypeptide
MAADGYLPDWLEDTLSEGIRQWWKLKPGPPPPKPAERHKDDSRGLVLPGYKYLGPFNGLDKGEPVNEADAAALEHDKAYDRQLDSGDNPYLKYNHADAEFQERLKEDTSFGGNLGRAVFQAKKRVLEPFGLVEEAAKTAPGKKRPVEQSPQEPDSSSGIGKTGQQPAKKRLNFGQTGDSESVPDPQPLGEPPATPAAVGPTTMASGGGAPMADNNEGADGVGNASGNWHCDSTWLGDRVITTSTRTWALPTYNNHLYKQISSASTGASNDNHYFGYSTPWGYFDFNRFHCHFSPRDWQRLINNNWGFRPKRLNFKLFNIQVKEVTDNNGVKTIANNLTSTVQVFTDSDYQLPYVLGSAHEGCLPPFPADVFMIPQYGYLTLNNGSQAVGRSSFYCLEYFPSQMLRTGNNFTFSYTFEDVPFHSSYAHSQSLDRLMNPLIDQYLYYLSRTQTTGGTANTQTLGFSQGGPNTMANQAKNWLPGPCYRQQRVSTTTGQNNNSNFAWTAGTKYHLNGRNSLANPGIAMATHKDDKERFFPSNGILIFGKQNAARDNADYSDVMLTSEEEIKTTNPVATEEYGIVADNLQQQNTAPQIGTVNSQGALPGMVWQNRDVYLQGPIWAKIPHTDGNFHPSPLMGGFGLKHPPPQILIKNTPVPADPPTTFNQSKLNSFITQYSTGQVSVEIEWELQKENSKRWNPEIQYTSNYYKSTSVDFAVNTEGVYSEPHPIGTRYLTRPL

SEQ ID NO: 1699 - protein, 736 aa, synthetic construct
  source 1..736: note = Description of Artificial Sequence: Synthetic polypeptide
MAADGYLPDWLEDNLSEGIREWWALKPGAPKPKANQQKQDDGRGLVLPGYKYLGPFNGLDKGEPVNAADAAALEHDKAYDQQLKAGDNPYLRYNHADAEFQERLQEDTSFGGNLGRAVFQAKKRVLEPLGLVEEGAKTAPGKKRPVEQSPQEPDSSSGIGKTGQQPAKKRLNFGQTGDSESVPDPQPLGEPPATPAAVGPTTMASGGGAPMADNNEGADGVGSSSGNWHCDSTWLGDRVITTSTRTWALPTYNNHLYKQISSASTGASNDNHYFGYSTPWGYFDFNRFHCHFSPRDWQRLINNNWGFRPKRLNFKLFNIQVKEVTDNNGVKTIANNLTSTVQVFTDSEYQLPYVLGSAHQGCLPPFPADVFMIPQYGYLTLNNGSQAVGRSSFYCLEYFPSQMLRTGNNFTFSYTFEDVPFHSSYAHSQSLDRLMNPLIDQYLYYLSRTQTTGGTANTQTLGFSQGGPNTMANQAKNWLPGPCYRQQRVSTTTGQNNNSNFAWTAGTKYHLNGRNSLANPGIAMATHKDDKERFFPSNGILIFGKQNAARDNADYSDVMLTSEEEIKTTNPVATEEYGIVADNLQQQNTAPQIGTVNSQGALPGMVWQNRDVYLQGPIWAKIPHTDGNFHPSPLMGGFGLKHPPPQILIKNTPVPADPPTTFNQSKLNSFITQYSTGQVSVEIEWELQKENSKRWNPEIQYTSNYYKSTSVDFAVNTEGVYSEPHPIGTRYLTRPL

SEQ ID NO: 1700 - protein, 737 aa, synthetic construct
  source 1..737: note = Description of Artificial Sequence: Synthetic polypeptide
MAADGYLPDWLEDNLSEGIREWWALKPGAPKPKANQQKQDDGRGLVLPGYKYLGPFNGLDKGEPVNAADAAALEHDKAYDQQLKAGDNPYLRYNHADAEFQERLQEDTSFGGNLGRAVFQAKKRVLEPLGLVEEGAKTAPGKKRPVEQSPQEPDSSSGIGKTGQQPAKKRLNFGQTGDTESVPDPQPIGEPPAAPSGVGSLTMASGGGAPVADNNEGADGVGSSSGNWHCDSQWLGDRVITTSTRTWALPTYNNHLYKQISNSTSGGSSNDNAYFGYSTPWGYFDFNRFHCHFSPRDWQRLINNNWGFRPKRLNFKLFNIQVKEVTQNEGTKTIANNLTSTIQVFTDSEYQLPYVLGSAHQGCLPPFPADVFMIPQYGYLTLNNGSQAVGRSSFYCLEYFPSQMLRTGNNFQFTYTFEDVPFHSSYAHSQSLDRLMNPLIDQYLYYLSRTQTTGGTANTQTLGFSQGGPNTMANQAKNWLPGPCYRQQRVSTTTGQNNNSNFAWTAGTKYHLNGRNSLANPGIAMATHKDDKERFFPSNGILIFGKQNAARDNADYSDVMLTSEEEIKTTNPVATEEYGIVADNLQQQNTAPQIGTVNSQGALPGMVWQNRDVYLQGPIWAKIPHTDGNFHPSPLMGGFGLKHPPPQILIKNTPVPADPPTTFNQSKLNSFITQYSTGQVSVEIEWELQKENSKRWNPEIQYTSNYYKSTSVDFAVNTEGVYSEPHPIGTRYLTRPL

SEQ ID NO: 1701 - protein, 736 aa, synthetic construct
  source 1..736: note = Description of Artificial Sequence: Synthetic polypeptide
MAADGYLPDWLEDNLSEGIREWWALKPGAPKPKANQQKQDDGRGLVLPGYKYLGPFNGLDKGEPVNAADAAALEHDKAYDQQLKAGDNPYLKYNHADAEFQERLQGDTSFGGNLGRAVFQAKKRVLEPLGLVEEAAKTAPGKKRPVEQSPQEPDSSAGIGKSGAQPAKKRLNFGQTGDTESVPDPQPLGEPPAAPSGVGPNTMAAGGGAPMADNNEGADGVGSSSGNWHCDSQWLGDRVITTSTRTWALPTYNNHLYKQISSASTGASNDNHYFGYSTPWGYFDFNRFHCHFSPRDWQRLINNNWGFRPKRLNFKLFNIQVKEVTDNNGVKTIANNLTSTVQVFTDSEYQLPYVLGSAHQGCLPPFPADVFMIPQYGYLTLNNGSQAVGRSSFYCLEYFPSQMLRTGNNFTFSYTFEDVPFHSSYAHSQSLDRLMNPLIDQYLYYLSRTQTTGGTANTQTLGFSQGGPNTMANQAKNWLPGPCYRQQRVSTTTGQNNNSNFAWTAGTKYHLNGRNSLANPGIAMATHKDDKERFFPSNGILIFDKQNAARDNADYSDVMLTSEEEIKTTNPVATEEYGIVADNLQQQNTAPQIGTVNSQGALPGMVWQNRDVYLQGPIWAKIPHTDGNFHPSPLMGGFGLKHPPPQILIKNTPVPADPPTTFNQSKLNSFITQYSTGQVSVEIEWELQKENSKRWNPEIQYTSNYYKSTSVDFAVNTEGVYSEPHPIGTRYLTRPL

SEQ ID NO: 1702 - protein, 736 aa, synthetic construct
  source 1..736: note = Description of Artificial Sequence: Synthetic polypeptide
MAADGYLPDWLEDTLSEGIRQWWKLKPGPPPPKPAERHKDDSRGLVLPGYKYLGPFNGLDKGEPVNEADAAALEHDKAYDRQLDSGDNPYLKYNHADAEFQERLKEDTSFGGNLGRAVFQAKKRVLEPLGLVEEPVKTAPGKKRPVEHSPVEPDSSSGTGKAGQQPARKRLNFGQTGDSESVPDPQPLGEPPATPAAVGPNTMATGSGAPMADNNEGADGVGNSSGNWHCDSTWMGDRVITTSTRTWALPTYNNHLYKQISSASTGASNDNHYFGYSTPWGYFDFNRFHCHFSPRDWQRLINNNWGFRPKRLNFKLFNIQVKEVTDNNGVKTIANNLTSTIQVFTDSEYQLPYVLGSAHQGCLPPFPADVFMIPQYGYLTLNNGSQAVGRSSFYCLEYFPSQMLRTGNNFTFSYTFEDVPFHSSYAHSQSLDRLMNPLIDQYLYYLSRTQTTGGKANTQTLGFSQGGPNTMANQAKNWLPGPCYRQQRVSTTTGQNNNSNFAWTAGTKYHLNGRNSLANPGIAMATHKDDKERFFPSNGILIFGKQNAARDNADYSDVMLTSEEEIKTTNPVATEEYGIVADNLQQQNTAPQIGTVNSQGALPGMVWQNRDVYLQGPIWAKIPHTDGNFHPSPLMGGFGLKHPPPQILIKNTPVPADPPTTFNQSKLNSFITQYSTGQVSVEIEWELQKENSKRWNPEIQYTSNYYKSTSVDFAVNTEGVYSEPHPIGTRYLTRPL

SEQ ID NO: 1703 - protein, 736 aa, synthetic construct
  source 1..736: note = Description of Artificial Sequence: Synthetic polypeptide
MAADGYLPDWLEDNLSEGIREWWALKPGAPKPKANQQKQDDGRGLVLPGYKYLGPFNGLDKGEPVNAADAAALEHDKAYDQQLKAGDNPYLRYNHADAEFQERLQEDTSFGGNLGRAVFQAKKRVLEPFGLVEEGAKTAPGKKRPVEQSPQEPDSSSGIGKTGQQPAKKRLNFGQTGDSESVPDPQPLGEPPATPAAVGPTTMASGGGAPMADNNEGADGVGNASGNWHCDSTWLGDRVITTSTRTWALPTYNNHLYKQISSASTGASNDNHYFGYSTPWGYFDFNRFHCHFSPRDWQRLINNNWGFRPKRLNFKLFNIQVKEVTDNNGVKTIANNLTSTVQVFTDSEYQLPYVLGSAHQGCLPPFPADVFMIPQYGYLTLNNGSQAVGRSSFYCLEYFPSQMLRTGNNFTFSYTFEDVPFHSSYAHSQSLDRLMNPLIDQYLYYLSRTQTTGGTGNTQTLGFSQGGPNTMANQAKNWLPGPCYRQQRVSTTTGQNNNSNFAWTAGTKYHLNGRNSLANPGIAMATHKDDKERFFPSNGILIFGKQNAARDNADYSDVMLTSEEEIKTTNPVATEEYGIVADNLQQQNTAPQIGTVNSQGALPGMVWQNRDVYLQGPIWAKIPHTDGNFHPSPLMGGFGLKHPPPQILIKNTPVPADPPTTFNQSKLNSFITQYSTGQVSVEIEWELQKENSKRWNPEIQYTSNYYKSTSVDFAVNTEGVYSEPHPIGTRYLTRPL

SEQ ID NO: 1704 - protein, 736 aa, synthetic construct
  source 1..736: note = Description of Artificial Sequence: Synthetic polypeptide
MAADGYLPDWLEDNLSEGIREWWDLKPGAPKPKANQQKQDDGRGLVLPGYKYLGPFNGLDKGEPVNAADAAALEHDKAYDQQLKAGDNPYLRYNHADAEFQERLQEDTSFGGNLGRAVFQAKKRVLEPLGLVEEGAKTAPGKKRPVEQSPQEPDSSSGIGKTGQQPAKKRLNFGQTGDSESVPDPQPLGEPPATPAAVGPTTMASGGGAPMADNNEGADGVGSSSGNWHCDSTWLGDRVITTSTRTWALPTYNNHLYKQISSASTGASNDNHYFGYSTPWGYFDFNRFHCHFSPRDWQRLINNNWGFRPKRLNFKLFNIQVKEVTQNEGTKTIANNLTSTIQVFTDSEYQLPYVLGSAHQGCLPPFPADVFMIPQYGYLTLNNGSQAVGRSSFYCLEYFPSQMLRTGNNFTFSYTFEDVPFHSSYAHSQSLDRLMNPLIDQYLYYLSRTQTTGGTANTQTLGFSQGGPNTMANQAKNWLPGPCYRQQRVSTTTGQNNNSNFAWTAGTKYHLNGRNSLANPGIAMATHKDDKERFFPSNGILIFGKQNAARDNADYSDVMLTSEEEIKTTNPVATEEYGIVADNLQQQNTAPQIGTVNSQGALPGMVWQNRDVYLQGPIWAKIPHTDGNFHPSPLMGGFGLKHPPPQILIKNTPVPADPPTTFNQSKLNSFITQYSTGQVSVEIEWELQKENSKRWNPEIQYTSNYYKSTSVDFAVNTEGVYSEPHPIGTRYLTRPL

SEQ ID NO: 1705 - protein, 736 aa, synthetic construct
  source 1..736: note = Description of Artificial Sequence: Synthetic polypeptide
MAADGYLPDWLEDNLSEGIREWWALKPGAPKPKANQQKQDDGRGLVLPGYKYLGPFNGLDKGEPVNAADAAALEHDKAYDQQLKAGDNPYLRYNHADAEFQERLQEDTSFGGNLGRAVFQAKKRVLEPLGLVEEGAKTAPGKKRPVEQSPQEPDSSSGIGKTGQQPAKKRLNFGQTGDSESVPDPQPLGEPPATPAAVGPTTMAAGGGAPMADNNEGADGVGSSSGNWHCDSTWMGDRVITTSTRTWALPTYNNHLYKQISSASTGASNDNHYFGYSTPWGYFDFNRFHCHFSPRDWQRLINNNWGFRPKRLSFKLFNIQVKEVTQNEGTKTIANNLTSTIQVFTDSEYQLPYVLGSAHQGCLPPFPADVFMIPQYGYLTLNNGSQAVGRSSFYCLEYFPSQMLRTGNNFTFSYTFEDVPFHSSYAHSQSLDRLMNPLIDQYLYYLSRTQTTGGTANTQTLGFSQGGPNTMANQAKNWLQGPCYRQQRVSTTTGQNNNSNFAWTAGTKYHLNGRNSLANPGIAMATHKDDKERFFPSNGILIFGKQNAARDNADYSDVMLTSEEEIKTTNPVATEEYGIVADNLQQQNTAPQIGTVNSQGALPGMVWQNLDVYLQGPIWAKIPHTDGNFHPSPLMGGFGLKHPPPQILIKNTPVPADPPTTFNQSKLNSFITQYSTGQVSVEIEWELQKENSKRWNPEIQYTSNYYKSTSVDFAVNTEGVYSEPHPIGTRYLTRPL

SEQ ID NO: 1706 - protein, 737 aa, synthetic construct
  source 1..737: note = Description of Artificial Sequence: Synthetic polypeptide
MAADGYLPDWLEDNLSEGIREWWALKPGAPKPKANQQKQDDGRGLVLPGYKYLGPFNGLDKGEPVNAADAAALEHDKAYDQQLKAGDNPYLRYNHADAEFQERLQEDTSFGGNLGRAVFQAKKRVLEPLGLVEEGAKTAPGKKRPVEPSPQRSPDSSSGIGKTGQQPAKKRLNFGQTGDSESVPDPQPLGEPPATPAAVGPTTMASGGGAPMADNNEGADGVGNASGNWHCDSQWLGDRVITTSTRTWALPTYNNHLYKQISSASTGASNDNHYFGYSTPWGYFDFNRFHCHFSPRDWQRLINNNWGFRPKRLNFKLFNIQVKEVTDNNGVKTIANNLTSTVQVFTDSDYQLPYVLGSAHEGCLPPFPADVFMIPQYGYLTLNNGSQAVGRSSFYCLEYFPSQMLRTGNNFQFTYTFEDVPFHSSYAHSQSLDRLMNPLIDQYLYYLSRTQTTGGTANTQTLGFSQGGPNTMANQAKNWVPGPCYRQQRVSTATGQNNNSNFAWTAGTKYHLKGRNSLANPGIAMATHKDDKERFFPSNGILIFGKQNAARDNADYSDVMLTSEEEIKTTNPVATEEYGIVADNLQQQNTAPQIGTVNSQGALPGMVWQNRDVYLQGPIWAKIPHTDGNFHPSPLMGGFGLKHPPPQILIKNTPVPADPPTTFNQSKLNSFITQYSTGQVSVEIEWELQKENSKRWNPEIQYTSNYYKSTSVDFAVNTEGVYSEPHPIGTRYLTRPL

SEQ ID NO: 1707 - protein, 737 aa, synthetic construct
  source 1..737: note = Description of Artificial Sequence: Synthetic polypeptide
  VARIANT 226: note = misc_feature - Xaa can be any naturally occurring amino acid
  VARIANT 233: note = misc_feature - Xaa can be any naturally occurring amino acid
  VARIANT 239: note = misc_feature - Xaa can be any naturally occurring amino acid
  VARIANT 250: note = misc_feature - Xaa can be any naturally occurring amino acid
  VARIANT 253: note = misc_feature - Xaa can be any naturally occurring amino acid
  VARIANT 255: note = misc_feature - Xaa can be any naturally occurring amino acid
MAADGYLPDWLEDTLSEGIRQWWKLKPGPPPPKPAERHKDDSRGLVLPGYKYLGPFNGLDKGEPVNEADAAALEHDKAYDRQLDSGDNPYLKYNHADAEFQERLKEDTSFGGNLGRAVFQAKKRVLEPLGLVEEGAKTAPGKKRPVEQSPQEPDSSSGIGKTGQQPAKKRLNFGQTGDSESVPDPQPLGEPPATPSGVGPNTMAAGGGAPMADNNEGADGVGSSSXNWHCDSXWLGDRXITTSTRTWALXTYXNXLYKQISNSTSGGATNDNTYFGYSTPWGYFDFNRFHCHFSPRDWQRLINNNWGFRPKRLNFKLFNIQVKEVTQNEGTKTIANNLTSTIQVFTDSEYQLPYVLGSAHQGCLPPFPADVFMIPQYGYLTLNNGSQAVGRSSFYCLEYFPSQMLRTGNNFQFTYTFEDVPFHSSYAHSQSLDRLMNPLIDQYLYYLSRTQTTGGTANTQTLGFSQGGPNTMANQAKNWLPGPCYRQQRVSTTTGQNNNSNFAWTAGTKYHLNGRNSLANPGIAMATHKDDKERFFPSNGILIFGKQNAARDNADYSDVMLTSEEEIKTTNPVATEEYGIVADNLQQQNTAPQIGTVNSQGALPGMVWQNRDVYLQGPIWAKIPHTDGNFHPSPLMGGFGLKHPPPQILIKNTPVPADPPTTFSQAKLASFITQYSTGQVSVEIEWELQKENSKRWNPEVQYTSNYAKSANVDFTVDNNGLYTEPRPIGTRYLTRPL

SEQ ID NO: 1708 - protein, 737 aa, synthetic construct
  source 1..737: note = Description of Artificial Sequence: Synthetic polypeptide
MAADGYLPDWLEDNLSEGIREWWDLKPGAPKPKANQQKQDDGRGLVLPGYKYLGPFNGLDKGEPVNAADAAALEHDKAYDQQLKAGDNPYLRYNHADAEFQERLQEDTSFGGNLGRAVFQAKKRVLEPLGLVEEGAKTAPGKKRPVEPSPQRSPDSSTGIGKKGQQPAKKRLNFGQTGDSESVPDPQPIGEPPAGPSGVGSLTMASGGGAPVADNNEGADGVGSSSGNWHCDSQWLGDRVITTSTRTWALPTYNNHLYKQISSASTGASNDNHYFGYSTPWGYFDFNRFHCHFSPRDWQRLINNNWGFRPKRLNFKLFNIQVKEVTDNDGVKTIANNLTSTIQVFTDSEYQLPYVLGSAHQGCLPPFPADVFMIPQYGYLTLNNGSQAVGRSSFYCLEYFPSQMLRTGNNFTFSYTFEDVPFHSSYAHSQSLDRLMNPLIDQYLYYLSRTQTTGGTANTQTLGFSQGGPNTMANHAKNWLPGPCYRQQRVSTTTGQNNNSNFAWTAGTKYHLNGRNSLANPGIAMATHKDDKERFFPSNGILIFGKQNAARDNADYSDVMLTSEEEIKTTNPVATEEYGIVADNLQQQNTAPQIGTVNSQGALPGMVWQNRDVYLQGPIWAKIPHTDGNFHPSPLMGGFGLKHPPPQILIKNTPVPADPPTTFNQSKLNSFITQYSTGQVSVEIEWELQKENSKRWNPEIQYTSNYYKSTSVDFAVNTEGVYSEPHPIGTRYLTRPL

SEQ ID NO: 1709 - protein, 736 aa, synthetic construct
  source 1..736: note = Description of Artificial Sequence: Synthetic polypeptide
MAADGYLPDWLEDTLSEGIRQWWKLKPGPPPPKPAERHKDDSRGLVLPGYKYLGPFNGLDKGEPVNEADAAALEHDKAYDRQLDSGDNPYLKYNHADAEFQERLKEDTSFGGNLGRAVFQAKKRVLEPLGLVEEPVKTAPGKKRPVEHSPVEPDSSSGTGKAGQQPAKKRLNFGQTGDSESVPDPQPLGEPPATPAAVGPTTMASGGGAPMADNNEGADGVGNASGNWHCDSTWLGDRVITTSTRTWALPTYNNHLYKQISSASTGASNDNHYFGYSTPWGYFDFNRFHCHFSPRDWQRLINNNWGFRPKRLNFKLFNIQVKEVTQNEGTKTIANNLTSTIQVFTDSEYQLPYVLGSAHQGCLPPFPADVFMIPQYGYLTLNNGSQAVGRSSFYCLEYFPSQMLRTGNNFQFTYTFEDVPFHSSYAHSQSLDRLMNPLIDQYLYYLSRTQTTGGTANTQTLGFSQGGPNTMANQAKNWLPGPCYRQQRVSTTTGQNNNSNFAWTAGTKYHLNGRNSLANPGIAMATHKDDKERFFPSNGILIFGKQNAARDNADYSDVMLTSEEEIKTTNPVATEEYGIVADNLQQQNTAPQIGTVNSQGALPGMVWQNRDVYLQGPIWAKIPHTDGNFHPSPLMGGFGLKHPPPQILIKNTPVPADPPTTFNQSKLNSFITQYSTGQVSVEIEWELQKENSKRWNPEIQYTSNYYKSTSVDFAVNTEGVYSEPHPIGTRYLTRPL

SEQ ID NO: 1710 - protein, 736 aa, synthetic construct
  source 1..736: note = Description of Artificial Sequence: Synthetic polypeptide
MAADGYLPDWLEDNLSEGIREWWALKPGAPKPKANQQKQDDGRGLVLPGYKYLGPFNGLDKGEPVNAADAAALEHDKAYDQQLQAGDNPYLRYNHADAEFQERLQGDTSFGGNLGRAVFQAKKRVLEPLGLVEEGAKTAPGKKRPVEQSPQEPDSSSGIGKTGQQPAKKRLNFGQTGDSESVPDPQPLGEPPATPAAVGPTTMASGGGAPMADNNEGADGVGNASGNWHCDSTWLGDRVITTSTRTWALPTYNNHLYKQISSASTGASNDNHYFGYSTPWGYFDFNRFHCHFSPRDWQRLINNNWGFRPKRLNFKLFNIQVKEVTDNNGVKTIANNLTSTIQVFTDSEYQLPYVLGSAHQGCLPPFPADVFMIPQYGYLTLNNGSQAVGRSSFYCLEYFPSQMLRTGNNFQFTYTFEDVPFHSSYAHSQSLDRLMNPLIDQYLYYLSRTQTTGGTANTQTLGFSQGGPNTMANQAKNWLPGPCYRQQRVSTTTGQNNNSNFAWTAGTKYHLNGRNSLANPGIAMATHKDDKERFFPSNGILIFGKQNAARDNADYSDVMLTSEEEIKTTNPVATEEYGIVADNLQQQNTAPQIGTVNSQGALPGMVWQNRDVYLQGPIWAKIPHTDGNFHPSPLMGGFGLKHPPPQILIKNTPVPADPPTTFNQSKLNSFITQYSTGQVSVEIEWELQKENSKRWNPEIQYTSNYYKSTSVDFAVNTEGVYSEPHPIGTRYLTRPL

SEQ ID NO: 1711 - protein, 738 aa, synthetic construct
  source 1..738: note = Description of Artificial Sequence: Synthetic polypeptide
MAADGYLPDWLEDTLSEGIRQWWKLKPGPPPPKPAERHKDDSRGLVLPGYKYLGPFNGLDKGEPVNAADAAALEHDKAYDQQLKAGDNPYLRYNHADAEFQERLKEDTSFGGNLGRAVFQAKKRVLEPLGLVEEGAKTAPGKKRPVEPSPQRSPDSSTGIGKKGQQPARKRLNFGQTGDSESVPDPQPLGEPPAAPSGVGPNTMAAGGGAPMADNNEGADGVGSSSGNWHCDSQWLGDRVITTSTRTWALPTYNNHLYKQISNSTSGGSSNDNAYFGYSTPWGYFDFNRFHCHFSPRDWQRLINNNWGFRPKRLNFKLFNIQVKEVTDNNGVKTIANNLTSTVQVFTDSEYQLPYVLGSAHQGCLPPFPADVFMIPQYGYLTLNNGSQAVGRSSFYCLEYFPSQMLRTGNNFTFSYTFEDVPFHSSYAHSQSLDRLMNPLIDQYLYYLSRTQTTGGTANTQTLGFSQGGPNTMANQAKNWLPGPCYRQQRVSTTTGQNNNSNFAWTAGTKYHLNGRNSLANPGIAMATHKDDKERFFPSNGILIFGKQNAARDNADYSDVMLTSEEEIKTTNPVATEEYGIVADNLQQQNTAPQIGTVNSQGALPGMVWQNRDVYLQGPIWAKIPHTDGHFHPSPLMGGFGLKHPPPQILIKNTPVPANPPTTFNQSKLNSFITQYSTGQVSVEIEWELQKENSKRWNPEVQYTSNYAKSANVDFTVDNNGLYTEPRPIGTRYLTRPL

SEQ ID NO: 1712 - protein, 738 aa, synthetic construct; identical to SEQ ID NO: 1711
  source 1..738: note = Description of Artificial Sequence: Synthetic polypeptide

SEQ ID NO: 1713 - protein, 736 aa, synthetic construct
  source 1..736: note = Description of Artificial Sequence: Synthetic polypeptide
MAADGYLPDWLEDNLSEGIREWWALKPGAPKPKANQQKQDDGRGLVLPGYKYLGPFNGLDKGEPVNAADAAALEHDKAYDQQLKAGDNPYLRYNHADAEFQERLQEDTSFGGNLGRAVFQAKKRLLEPLGLVEEGAKTAPGKKRPVEQSPQEPDSSSGIGKTGQQPAKKRLNFGQTGDSESVPDPQPLGEPPATPAAVGPTTMASGGGAPMADNNEGADGVGNSSGNWHCDSTWMGDRVITTSTRTWALPTYNNHLYKQISSASTGASNDNHYFGYSTPWGYFDFNRFHCHFSPRDWQRLINNNWGFRPKRLNFKLFNIQVKEVTQNEGTKTIANNLTSTIQVFTDSEYQLPYVLGSAHQGCLPPFPADVFIIPQYGYLTLNNGSQAVGRSSFYCLEYFPSQMLRTGNNFTFSYTFEDVPFHSSYAHSQSLDRLMNPLIDQYLYYLSRTQTTGGTANTQTLGFSQGGPNTMANQAKNWLPGPCYRQQRVSTTTGQNNNSNFAWTAGTKYHLNGRNSLANPGIAMATHKDDKERFFPSNGILIFGKQNAARDNADYSDVMLTSEEEIKTTNPVATEEYGIVADNLQQQNTAPQIGTVNSQGALPGMVWQNRDVYLQGPIWAKIPHTDGNFHPSPLMGGFGLKHPPPQILIKNTPVPADPPTTFNQSKLNSFITQYSTGQVSVEIEWELQKENSKRWNPEIQYTSNYYKSTSVDFAVNTEGVYSEPHPIGTRYLTRPL

SEQ ID NO: 1714 - protein, 736 aa, synthetic construct
  source 1..736: note = Description of Artificial Sequence: Synthetic polypeptide
MAADGYLPDWLEDNLSEGIREWWALKPGAPKPKANQQKQDDGRGLVLPGYKYLGPFNGLDKGEPVNAADAAALEHDKAYDQQLKAGDNPYLRYNHADAEFQERLQEDTSFGGNLGRAVFQAKKRVLEPFGLVEEAAKTAPGKKRPVEQSPQEPDSSSGIGKTGQQPAKKRLNFGQTGDSESVPDPQPLGEPPATPAAVGPTTMASGGGAPMADNNEGADGVGNASGNWHCDSTWLGDRVITTSTRTWALPTYNNHLYKQISSASTGASNDNHYFGYSTPWGYFDFNRFHCHFSPRDWQRLINNNWGFRPKRLNFKLFNIQVKEVTQNEGTKTIANNLTSTIQVFTDSEYQLPYVLGSAHQGCLPPFPADVFMIPQYGYLTLNNGSQAVGRSSFYCLEYFPSQMLRTGNNFTFSYTFEDVPFHSSYAHSQSLDRLMNPLIDQYLYYLSRTQTTGGTANTQTLGFSQGGPNTMANHAKNWLPGPCYRQQRVSTTTGQNNNSNFAWTAGTKYHLNGRNSLANPGIAMATHKDDKERFFPSNGILIFGKQNAARDNADYSDVMLTSEEEIKTTNPVATEEYGIVADNLQQQNTAPQIGTVNSQGALPGMVWQNRDVYLQGPIWAKIPHTDGNFHPSPLMGGFGLKHPPPQILIKNTPVPADPPTTFNQSKLNSFITQYSTGQVSVEIEWELQKENSKRWNPEIQYTSNYYKSTSVDFAVNTEGVYSEPHPIGTRYLTRPL

SEQ ID NO: 1715 - protein, 736 aa, synthetic construct
  source 1..736: note = Description of Artificial Sequence: Synthetic polypeptide
MAADGYLPDWLEDNLSEGIREWWALKPGAPKPKANQQKQDDGRGLVLPGYKYLGPFNGLDKGEPVNEADAAALEHDKAYDQQLKAGDNPYLRYNHADAEFQERLQEDTSFGGNLGRAVFQAKKRLLEPLGLVEEAAKTAPGKKRPVEQSPQEPDSSAGIGKSGAQPAKKRLNFGQTGDSESVPDPQPLGEPPATPAAVGPTTMASGGGAPMADNNEGADGVGNASGNWHCDSTWLGDRVITTSTRTWALPTYNNHLYKQISSASTGASNDNHYFGYSTPWGYFDFNRFHCHFSPRDWQRLINNNWGFRPKRLNFKLFNIQVKEVTDNDGVKTIANNLTSTIQVFTDSEYQLPYVLGSAHQGCLPPFPADVFMIPQYGYLTLNNGSQAVGRSSFYCLEYFPSQMLRTGNNFQFTYTFEDVPFHSSYAHSQSLDRLMNPLIDQYLYYLSRTQTTGGTANTQTLGFSQGGPNTMANQAKNWLPGPCYRQQRVSTTTGQNNNSNFAWTAGTKYHLNGRNSLANPGIAMATHKDDKERFFPSNGILIFGKQNAARDNADYSDVMLTSEEEIKTTNPVATEEYGIVADNLQQQNTAPQIGTVNSQGALPGMVWQNRDVYLQGPIWAKIPHTDGNFHPSPLMGGFGLKHPPPQILIKNTPVPADPPTTFNQSKLNSFITQYSTGQVSVEIEWELQKENSKRWNPEIQYTSNYYKSTSVDFAVNTEGVYSEPHPIGTRYLTRPL

SEQ ID NO: 1716 - protein, 736 aa, synthetic construct
  source 1..736: note = Description of Artificial Sequence: Synthetic polypeptide
MAADGYLPDWLEDNLSEGIREWWALKPGAPKPKANQQKQDDGRGLVLPGYKYLGPFNGLDKGEPVNAADAAALEHDKAYDQQLKAGDNPYLRYNHADAEFQERLQEDTSFGGNLGRAVFQAKKRVLEPLGLVEEGAKTAPGKKRPVEQSPQEPDSSAGIGKTGAQPAKKRLNFGQTGDSESVPDPQPLGEPPATPAAVGPTTMASGGGAPMADNNEGADGVGSASGNWHCDSTWLGDRVITTSTRTWALPTYNNHLYKQISSASTGASNDNHYFGYSTPWGYFDFNRFHCHFSPRDWQRLINNNWGFRPKRLNFKLFNIQVKEVTDNNGVKTIANNLTSTIQVFTDSEYQLPYVLGSAHQGCLPPFPADVFMIPQYGYLTLNNGSQAVGRSSFYCLEYFPSQMLRTGNNFTFSYTFEDVPFHSSYAHSQSLDRLMNPLIDQYLYYLSRTQTTGGTANTQTLGFSQGGPNTMANQAKNWLPGPCYRQQRVSTTTGQNNNSNFAWTAGTKYHLNGRNSLANPGIAMATHKDDKERFFPSNGILIFGKQNAARDNADYSDVMLTSEEEIKTTNPVATEEYGIVADNLQQQNTAPQIGTVNSQGALPGMVWQNRDVYLQGPIWAKIPHTDGNFHPSPLMGGFGLKHPPPQILIKNTPVPADPPTTFNQSKLNSFITQYSTGQVSVEIEWELQKENSKRWNPEIQYTSNYYKSTSVDFAVNTEGVYSEPHPIGTRYLTRPL

SEQ ID NO: 1717 - protein, 736 aa, synthetic construct
  source 1..736: note = Description of Artificial Sequence: Synthetic polypeptide
MAADGYLPDWLEDNLSEGIREWWDLKPGAPKPKANQQKQDDGRGLVLPGYKYLGPFNGLDKGEPVNAADAAALEHDKAYDQQLKAGDNPYLRYNHADAEFQERLQEDTSFGGNLGRAVFQAKKRLLEPLGLVEEAAKTAPGKKRPVEQSPQEPDSSAGIGKSGAQPAKKRLNFGQTGDTESVPDPQPIGEPPAAPSGVGPNTMAAGGGAPMADNNEGADGVGSSSGNWHCDSQWLGDRVITTSTRTWALPTYNNHLYKQISSASTGASNDNHYFGYSTPWGYFDFNRFHCHFSPRDWQRLINNNWGFRPKRLNFKLFNIQVKEVTQNEGTKTIANNLTSTIQVFTDSEYQLPYVLGSAHQGCLPPFPADVFMIPQYGYLTLNNGSQAVGRSSFYCLEYFPSQMLRTGNNFQFTYTFEDVPFHSSYAHSQSLDRLMNPLIDQYLYYLSRTQTTGGTANTQTLGFSQGGPNTMANHAKNWLPGPCYRQQRVSTTTGQNNNSNFAWTAGTKYHLNGRNSLANPGIAMATHKDDKERFFPSNGILIFGKQNAARDNADYSDVMLTSEEEIKTTNPVATEEYGIVADNLQQQNTAPQIGTVNSQGALPGMVWQNRDVYLQGPIWAKIPHTDGNFHPSPLMGGFGLKHPPPQILIKNTPVPADPPTTFNQSKLNSFITQYSTGQVSVEIEWELQKENSKRWNPEIQYTSNYYKSTSVDFAVNTEGVYSEPHPIGTRYLTRPL

SEQ ID NO: 1718 - protein, 737 aa, synthetic construct; identical to SEQ ID NO: 1700
  source 1..737: note = Description of Artificial Sequence: Synthetic polypeptide

SEQ ID NO: 1719 - protein, 737 aa, synthetic construct
  source 1..737: note = Description of Artificial Sequence: Synthetic polypeptide
MAADGYLPDWLEDNLSEGIREWWALKPGAPKPKANQQKQDDGRGLVLPGYKYLGPFNGLDKGEPVNAADAAALEHDKAYDQQLKAGDNPYLRYNHADAEFQERLKEDTSFGGNLGRAVFQAKKRVLEPFGLVEEGAKTAPGKKRPVEQSPQEPDSSSGIGKTGQQPAKKRLNFGQTGDSESVPDPQPLGEPPAAPSGVGPNTMAAGGGAPMADNNEGADGVGSSSGNWHCDSQWLGNRVITTSTRTWALPTYNNHLYKQISNSTSGGSSNDNAYFGYSTPWGYFDFNRFHCHFSPRDWQRLINNNWGFRPKRLNFKLFNIQVKEVTDNNGVKTIANNLTSTVQVFTDSEYQLPYVLGSAHQGCLPPFPADVFMIPQYGYLTLNNGSQAVGRSSFYCLEYFPSQMLRTGNNFQFTYTFEDVPFHSSYAHSQSLDRLMNPLIDQYLYYLSRTQTTGGTANTQTLGFSQGGPNTMANQAKNWLPGPCYRQQRVSTTTGQNNNSNFAWTAGTKYHLNGRNSLANPGIAMATHKDDKERFFPSNGILIFGKQNAARDNADYSDVMLTSEEEIKTTNPVATEEYGIVADNLQQQNTAPQIGTVNSQGALPGMVWQNRDVYLQGPIWAKIPHTDGNFHPSPLMGGFGLKHPPPQILIKNTPVPADPPTTFNQSKLNSFITQYSTGQVSVEIEWELQKENSKRWNPEIQYTSNYYKSTSVDFAVNTEGVYSEPHPIGTRYLTRPL

SEQ ID NO: 1720 - protein, 736 aa, synthetic construct
  source 1..736: note = Description of Artificial Sequence: Synthetic polypeptide
MAADGYLPDWLEDNLSEGIREWWDLKPGAPKPKANQQKQDDGRGLVLPGYKYLGPFNGLDRGEPVNAADAAALEHDKAYDQQLKAGDNPYLRYNHADAEFQERLQEDTSFGGNLGRAVFQAKKRVLEPLGLVEEGAKTAPGKKRPVEQSPQEPDSSSGIGKTGQQPAKKRLNFGQTGDSESVPDPQPLGEPPATPAAVGPTTMASGGGAPMADNNEGADGVGNASGNWHCDSTWLGDRVITTSTRTWALPTYNNHLYKQISSASTGASNDNHYFGYSTPWGYFDFNRFHCHFSPRDWQRLINNNWGFRPKRLNFKLFNIQVKEVTDNNGVKTIANNLTSTIQVFTDSEYQLPYVLGSAHQGCLPPFPADVFMIPQYGYLTLNNGSQAVGRSSFYCLEYFPSQMLRTGNNFQFTYTFEDVPFHSSYAHSQSLDRLMNPLIDQYLYYLSRTQTTGGTANTQTLGFSQGGPNTMANQAKNWLPGPCYRQQRVSTTTGQNNNSNFAWTAGTKYHLNGRNSLANPGIAMATHKDDKERFFPSNGILIFGKQNAARDNADYSDVMLTSEEEIKTTNPVATEEYGIVADNLQQQNTAPQIGTVNSQGALPGMVWQNRDVYLQGPIWAKIPHTDGNFHPSPLMGGFGLKHPPPQILIKNTPVPADPPTTFNQSKLNSFITQYSTGQVSVEIEWELQKENSKRWNPEIQYTSNYYKSTSVDFAVNTEGVYSEPHPIGTRYLTRPL

SEQ ID NO: 1721 - protein, 736 aa, synthetic construct
  source 1..736: note = Description of Artificial Sequence: Synthetic polypeptide
MAADGYLPDWLEDNLSEGIREWWDLKPGAPKPKANQQKQDDGRGLVLPGYKYLGPFNGLDKGEPVNAADAAALEHDKAYDQQLKAGDNPYLRYNHADAEFQERLQEDTSFGGNLGRAVFQAKKRVLEPLGLVEEGAKTAPGKKRPVEQSPQEPDSSSGIGKKGQQPARKRLNFGQTGDSESVPDPQPLGEPPAAPSGVGSLTMASGGGAPMADNNEGADGVGNASGNWHCDSTWLGDRVITTSTRTWALPTYNNHLYKQISSASTGASNDNHYFGYSTPWGYFDFNRFHCHFSPRDWQRLINNNWGFRPKRLNFKLFNIQVKEVTQNEGTKTIANNLTSTVQVFTDSDYQLPYVLGSAHQGCLPPFPADVFMIPQYGYLTLNNGSQAVGRSSFYCLEYFPSQMLRTGNNFQFTYTFEDVPFHSSYAHSQSLDRLMNPLIDQYLYYLSRTQTTGGTANTQTLGFSQGGPNTMANQAKNWLPGPCYRQQRVSTTTGQNNNSNFAWTAGTKYHLNGRNSLSNPGIAMATHKDDKERFFPSNGILIFGKQNAARDNADYSDVMLTSEEEIKTTNPVATEEYGIVADNLQQQNTAPQIGTVNSQGALPGMVWQNRDMYLQGPIWAKIPHTDGNFHPSPLMGGFGLKHPPPQILIKNTPVPADPPTTFNQSKLNSFITQYSTGQVSVEIEWELQKENSKRWNPEIQYTSNYYKSTSVDFAVNTEGVYSEPHPIGTRYLTRPL

SEQ ID NO: 1722 - protein, 736 aa, synthetic construct
  source 1..736: note = Description of Artificial Sequence: Synthetic polynucleotide
MAADGYLPDWLEDNLSEGIREWWALKPGAPKPKANQQKQDDGRGLVLPGYKYLGPFNGLDKGEPVNAADAAALEHDKAYDQQLKAGDNPYLRYNHADAEFQERLQEDTSFGGNLGRAVFQAKKRVLEPFGLVEEGAKTAPGKKRPVEQSPQEPDSSSGIGKTGQQPAKKRLNFGQTGGSESVPDPQPLGEPPATPAAVGPTTMAAGGGAPMADNNEGADGVGSSSGNWHCDSTWLGDRVITTSTRTWALPTYNNHLYKQISSASTGASNDNHYFGYSTPWGYFDFNRFHCHFSPRDWQRLINNNWGFRPKRLNFKLFNIQVKEVTDNNGVKTIANNLTSTVQVFTDSEYQLPYVLGSAHQGCLPPFPADVFMIPQYGYLTLNNGSQAVGRSSFYCLEYFPSQMLRTGNNFTFSYTFEEVPFHSSYAHSQSLDRLMNPLIDQYLYYLSRTQTTGGTANTQTLGFSQGGPNTMANQAKNWLPGPCYRQQRVSTTTGQNNNSNFAWTAGTKYHLNGRNSLANPGIAMASHKDDKERFFPSNGILIFGKQNAARDNADYSDVMLTSEEEIKTTNPVATEEYGIVADNLQQQNTAPQIGTVNSQGALPGMVWQNRDVYLQGPIWAKIPHTDGNFHPSPLMGGFGLKHPPPQILIKNTPVPADPPTTFNQSKLNSFITQYSTGQVSVEIEWELQKENSKRWNPEIQYTSNYYKSTSVDFAVNTEGVYSEPHPIGTRYLTRPL

SEQ ID NO: 1723 - DNA, 2211 bp, synthetic construct
  source 1..2211: mol_type = other DNA; note = Description of Artificial Sequence: Synthetic polynucleotide
atggctgccgatggttatcttccagattggctcgaggacaacctctctgagggcattcgcgagtggtgggacttgaaacctgcatccccgaaacccaaagccaaccagcaaaagcaggacgacggccggggtctggtgcttcctggctacaagtacctcggacccttcaacggactcgacaagggggagcccgtcaacgcggcggacgcagcggccctcgagcacgacaaggcctacgaccagcagctcaaagcgggtgacaatccgtacctgcggtataaccacgccgacgccgagtttcaggagcgtctgcaagaagatacgtcttttgggggcaacctcgggcgagcagtcttccaggccaaaaagaggcttcttgaacctcttggtctggttgaggaagcggctaagacggctcctggaaagaagaggcctgtagagcagtctcctcaggaaccggactcctccgcgggtattggcaaatcgggtgcacagcccgccaaaaagagactcaatttcggtcagactggcggcacagagtcagttccagaccctcaacctctcggagaacctccagcagcgccctctggtgtgggacctaatacaatggctgcaggcggtggcgcaccaatggcagacaataacgaaggcgccgacggagtgggtagttcctcgggaaattggcattgcgattccacatggctgggcgacagagtcatcaccaccagcaccagaacctgggccctgcccacttacaacaaccatctctacaagcaaatctccagtgcttcaacgggggccagcaacgacaaccactacttcggctacagcaccccctgggggtattttgatttcaacagattccactgccacttctcaccacgtgactggcagcgactcatcaacaacaactggggattccggcccaagagactcagcttcaagctcttcaacatccaggtcaaggaggtcacgcagaatgaaggcaccaagaccatcgccaataacctcaccagcaccatccaggtgtttacggactcggagtaccagctgccgtacgttctcggctctgcccaccagggctgcctgcctccgttcccggcggacgtgttcatgattccccagtacggatacctaacactcaacaacggtagtcaggccgtgggacgctcctccttctactgcctggaatactttccttcgcagatgctgagaaccggcaacaacttccagtttacttacaccttcgaggacgtgcctttccacagcagctacgcccacagccagagcttggaccggctgatgaatcctctgattgaccagtacctgtactacttgtctcggactcaaacaacaggaggcacggcaaatacgcagactctgggcttcagccaaggtgggcctaatacaatggccaatcaggcaaagaactggctgccaggaccctgttaccgccaacaacgcgtctcaacgacaaccgggcaaaacaacaatagcaactttgcctggactgctgggaccaaataccatctgaatggaagaaattcattggctaatcctggcatcgctatggcaacacacaaagacgacaaggagcgtttttttcccagtaacgggatcctgatttttggcaaacaaaatgctgccagagacaatgcggattacagcgatgtcatgctcaccagcgaggaagaaatcaaaaccactaaccctgtggctacagaggaatacggtatcgtggcagataacttgcagcagcaaaacacggctcctcaaattggaactgtcaacagccagggggccttacccggtatggtctggcagaaccgggacgtgtacctgcagggtcccatctgggccaagattcctcacacggacggcaacttccacccgtctccgctgatgggcggctttggcctgaaacatcctccgcctcagatcctgatcaagaacacgcctgtacctgcggatcctccgaccaccttcaaccagtcaaagctgaactctttcatcacgcaatacagcaccggacaggtcagcgtggaaattgaatgggagctgcagaaggaaaacagcaagcgctggaaccccgagatccagtacacctccaactactacaaatctacaagtgtggactttgctgttaatacagaaggcgtgtactctgaaccccaccccattggcacccgttacctcacccgtcccctgtaa

SEQ ID NO: 1724 - DNA, 2211 bp, synthetic construct
  source 1..2211: mol_type = other DNA; note = Description of Artificial Sequence: Synthetic polynucleotide
atggctgccgatggttatcttccagattggctcgaggacaacctctctgagggcattcgcgagtggtgggacttgaaacctggagccccgaaacccaaagccaaccagcaaaagcaggacgacggccggggtctggtgcttcctggctacaagtacctcggacccttcaacggactcgacaagggggagcccgtcaacgcggcggacgcagcggccctcgagcacgacaaggcctacgaccagcagctcaaagcgggtgacaatccgtacctgcggtataaccacgccgacgccgagtttcaggagcgtctgcaagaagatacgtcttttgggggcaacctcgggcgagcagtcttccaggccaagaagagggttctcgaaccttttggtctggttgaggaaggcgctaagacggctcctggaaagaaacgtccggtagagcagtcgccacaagagccagactcctcctcgggcattggcaagacaggccagcagcccgctaaaaagagactcaattttggtcagactggcgactcagagtcagtccccgacccacaacctctcggagaacctccagcaacccccgctgctgtgggacctactacaatggcttcaggtggtggcgcaccaatggcagacaataacgaaggcgccgacggagtgggtaatgcctcaggaaattggcattgcgattcccaatggctgggggacagagtcatcaccaccagcacccgaacctgggccctgcccacctacaacaatcacctctacaagcaaatctccagtgcttcaacgggggccagcaacgacaaccactacttcggctacagcaccccctgggggtattttgatttcaacagattccactgccatttctcaccacgtgactggcagcgactcatcaacaacaattggggattccggcccaagagactcaacttcaaactcttcaacatccaagtcaaggaggtcacgcagaatgaaggcaccaagaccatcgccaataacctcaccagcaccatccaggtgtttacggactcggagtaccagctgccgtacgttctcggctccgcccaccagggctgcctgcctccgttcccggcggacgtgttcatgattccccagtacggctacctaacactcaacaacggtagtcaggccgtgggacgctcctccttctactgcctggaatactttccttcgcagatgctgagaaccggcaacaacttccagtttacttacaccttcgaggacgtgcctttccacagcagctacgcccacagccagagcttggaccggctgatgaatcctctgattgaccagtacctgtactacttgtctcggactcaaacaacaggaggcacggcaaatacgcagactctgggcttcagccaaggtgggcctaatacaatggccaatcaggcaaagaactggctgccaggaccctgttaccgccaacaacgcgtctcaacgacaaccgggcaaaacaacaatagcaactttgcctggactgctgggaccaaataccatctgaatggaagaaattcattggctaatcctggcatcgctatggcaacacacaaagacgacaaggagcgtttttttcccagtaacgggatcctgatttttggcaaacaaaatgctgccagagacaatgcggattacagcgatgtcatgctcaccagcgaggaagaaatcaaaaccactaaccctgtggctacagaggaatacggtatcgtggcagataacttgcagcagcaaaacacggctcctcaaattggaactgtcaacagccagggggccttacccggtatggtctggcagaaccgggacgtgtacctgcagggtcccatctgggccaagattcctcacacggacggcaacttccacccgtctccgctgatgggcggctttggcctgaaacatcctccgcctcagatcctgatcaagaacacgcctgtacctgcggatcctccgaccaccttcaaccagtcaaagctgaactctttcatcacgcaatacagcaccggacaggtcagcgtggaaattgaatgggagctgcagaaggaaaacagcaagcgctggaaccccgagatccagtacacctccaactactacaaatctacaagtgtggactttgctgttaatacagaaggcgtgtactctgaaccccaccccattggcacccgttacctcacccgtcccctgtaa

SEQ ID NO: 1725 - DNA, 2211 bp, synthetic construct
  source 1..2211: mol_type = other DNA; note = Description of Artificial Sequence: Synthetic polynucleotide
atggctgccgatggttatcttccagattggctcgaggacaacctctctgagggcattcgcgagtggtgggacttggaacctggagccccgaagcccaaagccaaccagcaaaagcaggacgacggccggggtctggtgcttcctggctacaagtacctcggacccttcaacggactcgacaagggggagcccgtcaacgcggcggacgcagcggccctcgagcacgacaaggcctacgaccagcagctcaaagcgggtgacaatccgtacctgcggtataaccacgccgacgccgagtttcaggagcgtctgcaagaagatacgtcttttgggggcaacctcgggcgagcagtcttccaggccaagaagcgggttctcgaacctctcggtctggttgaggaaggcgctaagacggctcctggaaagaaacgtccggtagagcagtcgccacaagagccagactcctcctcgggcatcggcaagacaggccagcagcccgctaaaaagagactcaattttggtcagactggcgactcagagtcagtccccgatccacaacctctcggagaacctccagcaacccccgctgctgtgggacctactacaatggcttcaggcggtggcgcaccaatggcagacaataacgaaggcgccgacggagtgggtaatgcctcaggaaattggcattgcgattccacatggctgggcgacagagtcatcaccaccagcacccgcacctgggccttgcccacctacaataaccacctctacaagcaaatctccagtgcttcaacaggggccagcaacgacaaccactacttcggctacagcaccccctgggggtattttgacttcaacagattccactgccacttctcaccacgtgactggcagcgactcatcaacaacaactggggattccggcctaagcgactcaacttcaagctcttcaacattcaggtcaaagaggttacggacaacaatggagtcaagaccatcgccaataaccttaccagcacggtccaggtcttcacggactcggagtaccagttgccgtacgtcctcggctctgcgcaccagggctgcctccctccgttcccggcggacgtgttcatgattccgcagtacggctacctaacgctcaacaacggtagtcaggccgtgggacgctcctccttctactgcctggaatactttccttcgcagatgctgagaaccggcaacaacttccagtttacttacaccttcgaggacgtgcctttccacagcagctacgcccacagccagagcttggaccggctgatgaatcctctgattgaccagtacctgtactacttgtctcggactcaaacaacaggaggcacggcaaatacgcagactctgggcttcagccaaggtgggcctaatacaatggccaatcaggcaaagaactggctgccaggaccctgttaccgccaacaacgcgtctcaacgacaaccgggcaaaacaacaatagcaactttgcctggactgctgggaccaaataccatctgaatggaagaaattcattggctaatcctggcatcgctatggcaacacacaaagacgacaaggagcgtttttttcccagtaacgggatcctgatttttggcaaacaaaatgctgccagagacaatgcggattacagcgatgtcatgctcaccagcgaggaagaaatcaaaaccactaaccctgtggctacagaggaatacggtatcgtggcagataacttgcagcagcaaaacacggctcctcaaattggaactgtcaacagccagggggccttacccggtatggtctggcagaaccgggacgtgtacctgcagggtcccatctgggccaagattcctcacacggacggcaacttccacccgtctccgctgatgggcggctttggcctgaaacatcctccgcctcagatcctgatcaagaacacgcctgtacctgcggatcctccgaccaccttcaaccagtcaaagctgaactctttcatcacgcaatacagcaccggacaggtcagcgtggaaattgaatgggagctgcagaaggaaaacagcaagcgctggaaccccgagatccagtacacctccaactactacaaatctacaagtgtggactttgctgttaatacagaaggcgtgtactctgaaccccaccccattggcacccgttacctcacccgtcccctgtaa

SEQ ID NO: 1726 - DNA, 2211 bp, synthetic construct
  source 1..2211: mol_type = other DNA; note = Description of Artificial Sequence: Synthetic polynucleotide
atggctgccgatggttatcttccagattggctcgaggacactctctctgaaggaataagacagtggtggaagctcaaacctggcccaccaccaccaaagcccgcagagcggcataaggacgacagcaggggtcttgtgcttcctgggtacaagtacctcggacccttcaacggactcgacaagggagagccggtcaacgaggcagacgccgcggccctcgagcacgacaaagcctacgaccggcagctcgacagcggagacaacccgtacctcaagtacaaccacgccgacgcggagtttcaggagcgccttaaagaagatacgtcttttgggggcaacctcgggcgagcagtcttccaggccaagaagagggttctcgaaccttttggtctggttgaggaaggtgctaagacggctcctggaaagaaacgtccggtagagcagtcgccacaagagccagactcctcctcgggcattggcaagacaggccagcagcccgctaaaaagagactcaattttggtcagactggcgactcagagtcagtccccgacccacaacctctcggagaacctccagcaacccccgctgctgtgggacctactacaatggcttcaggcggtggcgcaccaatggcagacaataacgaaggcgccgacggagtgggtaatgcctcaggaaattggcattgcgattccacatggctgggcgacagagtcatcaccaccagcacccgaacatgggccttgcccacctataacaaccacctctacaagcaaatctccagtgcttcaacgggggccagcaacgacaaccactacttcggctacagcaccccctgggggtattttgacttcaacagattccactgccacttctcaccacgtgactggcagcgactcatcaacaacaactggggattccggcctaagcgactcaacttcaagctcttcaacattcaggtcaaagaggttacggacaacaatggagtcaagaccatcgccaataaccttaccagcacggtccaggtcttcacggactcagactatcagctcccgtacgtgctcgggtcggctcacgagggctgcctcccgccgttcccagcggacgttttcatgattcctcagtacggctacctaacactcaacaacggtagtcaggccgtgggacgctcctccttctactgcctggaatactttccttcgcagatgctgagaaccggcaacaacttccagtttacttacaccttcgaggacgtgcctttccacagcagctacgcgcacagccagagtctggaccggctgatgaatcctctgattgaccagtacctgtactacttgtctcggactcaaacaacaggaggcacggcaaatacgcagactctgggcttcagccaaggtgggcctaatacaatggccaatcaggcaaagaactggctgccaggaccctgttaccgccaacaacgcgtctcaacgacaaccgggcaaaacaacaatagcaactttgcctggactgctgggaccaaataccatctgaatggaagaaattcattggctaatcctggcatcgctatggcaacacacaaagacgacaaggagcgtttttttcccagtaacgggatcctgattttcggcaaacaaaatgctgccagagacaatgcggattacagcgatgtcatgctcaccagcgaggaagaaatcaaaaccactaaccctgtggctacagaggaatacggtatcgtggcagataacttgcagcagcaaaacacggctcctcaaattggaactgtcaacagccagggggccttacccggtatggtctggcagaaccgggacgtgtacctgcagggtcccatctgggccaagattcctcacacggacggcaacttccacccgtctccgctgatgggcggctttggcctgaaacatcctccgcctcagatcctgatcaagaacacgcctgtacctgcggatcctccgaccaccttcaaccagtcaaagctgaactctttcatcacgcaatacagcaccggacaggtcagcgtggaaattgaatgggagctgcagaaggaaaacagcaagcgctggaaccccgagatccagtacacctccaactactacaaatctacaagtgtggactttgctgttaatacagaaggcgtgtactctgaaccccaccccattggcaccagatacctgactcgtaatctgtaa

SEQ ID NO: 1727 - DNA, 2208 bp, synthetic construct
  source 1..2208: mol_type = other DNA; note = Description of Artificial Sequence: Synthetic polynucleotide
atggctgccgatggttatcttccagattggctcgaggacactctctctgaaggaataagacagtggtggaagctcaaacctggcccaccaccaccaaagcccgcagagcggcataaggacgacagcaggggtcttgtgcttcctgggtacaagtacctcggacccttcaacggactcgacaagggagagccggtcaacgaggcagacgccgcggccctcgagcacgacaaagcctacgaccggcagctcgacagcggagacaacccgtacctcaagtacaaccacgccgacgcggagtttcaggagcgccttaaagaagatacgtcttttgggggcaacctcggacgagcagtcttccaggcgaaaaagagggttcttgaacctctgggcctggttgaggaacctgttaagacggctccgggaaaaaagaggccggtagagcagtcgccacaagagccagactcctcctcgggcatcggcaagaaaggccagcagcccgctaaaaagagactcaattttggtcagactggcgactcagagtcagtccccgacccacaacctctcggagaacctccagcaacccccgctgctgtgggacctactacaatggcttcaggcggtggcgcaccaatggcggacaataacgaaggcgccgatggagtgggtaatgcctcaggaaattggcattgcgattccacatggctgggcgacagagtcatcaccaccagcacccgaacatgggccttgcccacctataacaaccacctctacaagcaaatctccagtgcttcaacgggggccagcaacgacaaccactacttcggctacagcaccccctgggggtattttgacttcaacagattccactgccacttctcaccacgtgactggcagcgactcatcaacaacaactggggattccggcctaagcgactcaacttcaagctcttcaacattcaggtcaaagaggttacggacaacaatggagtcaagaccatcgccaataaccttaccagcacggtccaggtcttcacggactcagactatcagctcccgtacgttctcggctctgcccaccagggctgcctgcctccgttcccggcggacgtgttcatgattccccagtacggctacctaacactcaacaacggtagtcaggccgtgggacgctcctccttctactgcctggaatactttccttcgcagatgctgagaaccggcaacaacttccagtttacttacaccttcgaggacgtgcctttccacagcagctacgcccacagccagagcttggaccggctgatgaatcctctgattgaccagtacctgtactacttgtctcggactcaaacaacaggaggcacggcaaatacgcagactctgggcttcagccaaggtgggcctaatacaatggccaatcaggcaaagaactggctgccaggaccctgttaccgccaacaacgcgtctcaacgacaaccgggcaaaacaacaatagcaactttgcctggactgctgggaccaaataccatctgaatggaagaaattcattggctaatcctggcatcgctatggcaacacacaaagacgacaaggagcgtttttttcccagtaacgggatcctgatttttggcaaacaaaatgctgccagagacaatgcggattacagcgatgtcatgctcaccagcgaggaagaaatcaaaaccactaaccctgtggctacagaggaatacggtatcgtggcagataacttgcagcagcaaaacacggctcctcaaattggaactgtcaacagccagggggccttacccggtatggtctggcagaaccgggacgtgtacctgcagggtcccatctgggccaagattcctcacacggacggcaacttccacccgtctccgctgatgggcggctttggcctgaaacatcctccgcctcagatcctgatcaagaacacgcctgtacctgcggatcctccgaccaccttcaaccagtcaaagctgaactctttcatcacgcaatacagcaccggacaggtcagcgtggaaattgaatgggagctgcagaaggaaaacagcaagcgctggaaccccgagatccagtacacctccaactactacaaatctacaagtgtggactttgctgttaatacagaaggcgtgtactctgaaccccaccccattggcacccgttacctcacccgtcccctg

SEQ ID NO: 1728 - DNA, 2211 bp, synthetic construct
  source 1..2211: mol_type = other DNA; note = Description of Artificial Sequence: Synthetic polynucleotide
atggctgccgatggttatcttccagattggctcgaggacactctctctgaaggaataagacagtggtggaagctcaaacctggcccaccaccaccaaagcccgcagagcggcataaggacgacagcaggggtcttgtgcttcctgggtacaagtacctcggacccttcaacggactcgacaagggagagccggtcaacgaggcagacgccgcggccctcgagcacgacaaagcctacgaccagcagctccaagcgggtgacaatccgtacctgcggtataaccacgccgacgccgagtttcaggagcgtcttcaaggagatacgtcttttgggggcaacctcggacgagcagtcttccaggccaaaaagaggcttcttgaacctcttggtctggttgaggaagcggctaagacggctcctggaaagaagaggcctgtagagcagtctcctcaggaaccggactcctccgcgggtattggcaaatcgggtgcacagcccgctaaaaagagactcaatttcggtcagactggcgacacagagtcagtcccagaccctcaaccaatcggagaacctcccgcagccccctcaggtgtgggatctcttacaatggcttcaggtggtggcgcaccagtggcagacaataacgaaggtgccgatggagtgggtagttcctcgggaaattggcattgcgattcccaatggctgggggacagagtcatcaccaccagcacccgaacatgggccttgcccacctataacaaccacctctacaagcaaatctccagtgcttcaacgggggccagcaacgacaaccactacttcggctacagcaccccctgggggtattttgacttcaaccgcttccactgccacttctcaccacgtgactggcagcgactcatcaacaacaactggggattccggcccaagagactcagcttcaagctcttcaaccatccaggtcaaggaggtcacgcagaatgaaggcaccaagaccatcgccaataacctcaccagcacatccaggtgtttacggactcggagtaccagctgccgtacgttctcggctctgcccaccagggctgcctgcctccgttcccggcggacgtgttcatgattccccagtacggctacctaacactcaacaacggtagtcaggccgtgggacgctcctccttctactgcctggaatactttccttcgcagatgctgagaaccggcaacaacttccagttcacttacaccttcgaggacgtgcctttccacagcagctacgcgcacagccagagcttggaccggctgatgaatcctctgattgaccagtacctgtactacttgtctcggactcaaacaacaggaggcacggcaaatacgcagactctgggcttcagccaaggtgggcctaatacaatggccaatcaggcaaagaactggctgccaggaccctgttaccgccaacaacgcgtctcaacgacaaccgggcaaaacaacaatagcaactttgcctggactgctgggaccaaataccatctgaatggaagaaattcattgggtaatcctggcatcgctatggcaacacacaaagacgacaaggagcgtttttttcccagtaacgggatcctgatttttggcaaacaaaatgctgccagagacaatgcggattacagcgatgtcatgctcaccagcgaggaagaaatcaaaaccactaaccctgtggctacagaggaatacggtatcgtggcagataacttgcagcagcaaaacacggctcctcaaattggaactgtcaacagccagggggccttacccggtatggtctggcagaaccgggacgtgtacctgcagggtcccatctgggccaagattcctcacacggacggcaacttccacccgtctccgctgatgggcggctttggcctgaaacatcctccgcctcagatcctcatcaaaaacacacctgtacctgcggatcctccaacggccttcaaccagtcaaagctgaactctttcatcacgcaatacagcaccggacaggtcagcgtggaaattgaatgggagctgcagaaggaaaacagcaagcgctggaaccccgagatccagtacacctccaactactacaaatctacaagtgtggactttgctgttaatacagaaggcgtgtactctgaaccccaccccattggcacccgttacctcacccgtcccctgtaa

SEQ ID NO: 1729 - DNA, 2214 bp, synthetic construct
  source 1..2214: mol_type = other DNA; note = Description of Artificial Sequence: Synthetic polynucleotide
atggctgccgatggttatcttccagattggctcgaggacaacctctctgagggcattcgcgagtggtgggacttgaaacatggagccccgaaacccaaagccaaccagcaaaagcaggacgacggccggggtctggtgcttcctggctacaagtacctcggacccttcaacggactcgacaagggggagcccgtcaacgcggcggatgcagcggccctcgagcacgacaaggcctacgaccagcagctcaaagcgggtgacaatccgtacctgcggtataaccacgccgacgccgagtttcaggagcgtctgcaagaagatacgtcttttgggggcaacctcgggcgagcagtcttccaggccaagaagagggttctcgaaccttttggtctggttgaggaaggtgctaagacggctcctggaaagaaacgtccggtagagcagtcgccacaagagccagactcctcctcgggcattggcaagacaggccagcagcccgctaaaaagagactcaattttggtcagactggcgactcagagtcagtccccgacccacaacctctcggagaacctccagcaacccccgctgctgtgggacctactacaatggcttcaggcggtggcgcaccaatggcagacaataacgaaggcgccgacggagtgggtaatgcctcaggaaattggcattgcgattccacatggctgggcgacagagtcatcaccaccagcacccgaacatgggccttgcccacctataacaaccacctctacaagcaaatctccaacgggacttcgggaggaagcaccaacgacaacacctacttcggctacagcaccccctgggggtattttgactttaacagattccactgccacttctcaccacgtgactggcagcgactcatcaacaacaactggggattccggcccaagagactcaacttcaaactcttcaacatccaagtcaaggaggtcacgcagaatgaaggcaccaagaccatcgccaataacctcaccagcaccatccaggtgtttacggactcggagtaccagctgccgtacgttctcggctccgcccaccagggctgcctgcctccgttcccggcggacgtgttcatgattccccagtacggctacctaacactcaacaacggtagtcaggccgtgggacgctcctccttctactgcctggaatactttccttcgcagatgctgagaacgggcaacaactttaccttcagctacacctttgaggacgttcctttccacagcagctacgctcacagccagagtctggaccgtctcatgaatcctctgattgaccagtacctgtactacttgtctcggactcaaacaacaggaggcacggcaaatacgcagactctgggcttcagccaaggtgggcctaatacaatggccaatcaggcaaagaactggctgccaggaccctgttaccgccaacaacgcgtctcaacgacaaccgggcaaaacaacaatagcaactttgcctggactgctgggaccaaataccatctgaatggaagaaattcattggctaatcctggcatcgctatggcaacacacaaagacgacaaggagcgtttttttcccagtaacgggatcctgatttttggcaaacaaaatgctgccagagacaatgcggattacagcgatgtcatgctcaccagcgaggaagaaatcaaaaccactaaccctgtggctacagaggaatacggtatcgtggcagataacttgcagcagcaaaacacggctcctcaaattggaactgtcaacagccagggggccttacccggtatggtctggcagaaccgggacgtgtacctgcagggtcccatctgggccaagattcctcacacggacggcaacttccacccgtctccgctgatgggcggctttggcctgaaacatcctccgcctcagatcctgatcaagaacacgcctgtacctgcggatcctccgaccaccttcaaccagtcaaagctgaactctttcatcacgcaatacagcaccggacaggtcagcgtggaaattgaatgggagctgcagaaggaaaacagcaagcgctggaaccccgagatccagtacacctccaactactacaaatctacaagtgtggactttgctgttaatacagaaggcgtgtactctgatccccaccccattggcacccgttacctcacccgtcccctgtaa

SEQ ID NO: 1730 - DNA, 2214 bp, synthetic construct
  source 1..2214: mol_type = other DNA; note = Description of Artificial Sequence: Synthetic polynucleotide
atggctgccgatggttatcttccagattggctcgaggacaacctctctgagggcattcgcgagtggtgggcgctgaaacctggagccccgaagcccaaagccaaccagcaaaagcaggacgacggccggggtctggtgcttcctggctacaagtacctcggacccttcaacggactcgacaaaggagagccggtcaacgaggcggacgcggcagccctcgaacacgacaaggcctacgaccagcagctcaaagcgggtgacaatccgtacctgcggtataaccacgccgacgccgagtttcaggagcgtctgcaagaagatacgtcttttgggggcaacctcgggcgagcagtcttccaggccaagaagcgggttctcgaacctctcggtctggttgaggaaggcgctaagacggctcctggaaagaagagaccggtagagccatcaccccagcgttctccagactcctctacgggcatcggcaagaaaggccagcagcccgccagaaaaagactcaattttggtcagactggcgactcagagtcagttccagaccctcaacctctcggagaacctccagcagcgccctctggtgtgggacctaatacaatggcttcaggcggtggcgcaccaatggcagacaataacgagggcgccgacggagtgggtaattcctcgggaaattggcattgcgattccacatggatgggcgacagagtcatcaccaccagcacccgaacctgggccctgcccacctacaacaaccacctctacaagcaaatctccagtgcttcaacgggggccagcaacgacaaccactacttcggctacagcaccccctgggggtattttgactttaacagattccactgccacttttcaccacgtgactggcagcgactcatcaacaacaactggggattccggcccaagagactcaacttcaagctcttcaacatccaagtcaaggaggtcacgcagaatgaaggcaccaagaccatcgccaataacctcaccagcaccatccaggtgtttacggactcggagtaccagctgccgtacgttctcggctctgcccaccagggctgcctgcctccgttcccggcggacgtgttcatgattccccagtacggctacctaacactcaacaacggtagtcaggccgtgggacgctcctccttctactgcctggaatactttccttcgcagatgctgagaaccggcaacaacttccagtttacttacaccttcgaggacgtgcctttccacagcagctacgcgcacagccagagcttggaccggctgatgaatcctctgattgaccagtacctgtactacttgtctcggactcaaacaacaggaggcacggcaaatacgcagactctgggcttcagccaaggtgggcctaatacaatggccaatcaggcaaagaactggctgccaggaccctgttaccgccaacaacgcgtctcaacgacaaccgggcaaaacaacaatagcaactttgcctggactgctgggaccaaataccatctgaatggaagaaattcattggctaatcctggcatcgctatggcaacacacaaagacgacaaggagcgtttttttcccagtaacgggatcctgatttttggcaaacaaaatgctgccagagacaatgcggattacagcgatgtcatgctcaccagcgaggaagaaatcaaaaccactaaccctgtggctacagaggaatacggtatcgtggcagataacttgcagcagcaaaacacggctcctcaaattggaactgtcaacagccagggggccttacccggtatggtctggcagaaccgggacgtgtacctgcagggtcccatctgggccaagattcctcacacggacggcaacttccacccgtctccgctgatgggcggctttggcctgaaacatcctccgcctcagatcctgatcaagaacacgcctgtacctgcggatcctccgaccaccttcaaccagtcaaagctgaactctttcatcacacaatacagcaccggacaggtcagcgtggaaattgaatgggagctgcagaaggaaaacagcaagcgctggaaccccgagatccagtacacctccaactactacaaatctacaagtgtggactttgctgttaatacagaaggcgtgtactctgaaccccaccccattggcacccgttacctcacccgtcccctgtaa

SEQ ID NO: 1731 - DNA, 2211 bp, synthetic construct
  source 1..2211: mol_type = other DNA; note = Description of Artificial Sequence: Synthetic polynucleotide
  misc_difference 676: note = misc_feature - n is a, c, g, or t
atggctgccgatggttatcttccagattggctcgaggacactctctctgaaggaataagacagtggtggaagctcaaacctggcccaccaccaccaaagcccgcagagcggcataaggacgacagcaggggtcttgtgcttcctgggtacaagtacctcggacccttcaacggactcgacaagggagagccggtcaacgaggcagacgccgcggccctcgagcacgacaaagcctacgaccggcagctcgacagcggagacaacccgtacctcaagtacaaccacgccgacgcggagtttcaggagcgccttaaagaagatacgtcttttgggggcaacctcggacgagcagtcttccaggcgaaaaagagggttcttgaacctctgggcctggttgaggaacctgttaagacggctccgggaaaaaagaggccggtagagcagtcgccacaagagccagactcctcctcgggcatcggcaagaaaggccagcagcccgctaaaaagagactcaattttggtcagactggcgactcagagtcagtccccgacccacaacctctcggagaacctccagcaacccccgctgctgtgggacctactacaatggcttcaggcggtggcgcaccaatggcggacaataacgaaggcgccgatggagtgggtaatgcctcangaaattggcattgcgattccacatggctgggcgacagagtcatcaccaccagcacccgaacatgggccttgccacctataacaaccacctctacaagcaaatctccagtgcttcaacgggggcgcagcaacgacaaccactacttcggctacagcaccccctgggggtattttgacttcaacagattccactgccacttctcaccacgtgactggcagcgactcatcaacaacaactggggattccggcctaagcgactcaacttcaagctcttcaacattcaggtcaaagaggttacggacaacaatggagtcaagaccatcgccaataaccttaccagcacggtccaggtcttcacggactcagactatcagctcccgtacgttctcggctctgcccaccagggctgcctgcctccgttcccggcggacgtgttcatgattccccagtacggctacctaacactcaacaacggtagtcaggccgtgggacgctcctccttctactgcctggaatactttccttcgcagatgctgagaaccggcaacaacttccagtttacttacaccttcgaggacgtgcctttccacagcagctacgcccacagccagagcttggaccggctgatgaatcctctgattgaccagtacctgtactacttgtctcggactcaaacaacaggaggcacggcaaatacgcagactctgggcttcagccaaggtgggcctaatacaatggccaatcaggcaaagaactggctgccaggaccctgttaccgccaacaacgcgtctcaacgacaaccgggcaaaacaacaatagcaactttgcctggactgctgggaccaaataccatctgaatggaagaaattcattggctaatcctggcatcgctatggcaacacacaaagacgacaaggagcgtttttttcccagtaacgggatcctgatttttggcaaacaaaatgctgccagagacaatgcggattacagcgatgtcatgctcaccagcgaggaagaaatcaaaaccactaaccctgtggctacagaggaatacggtatcgtggcagataacttgcagcagcaaaacacggctcctcaaattggaactgtcaacagccagggggccttacccggtatggtttggcagaaccgggacgtgtacctgcagggtcccatctgggccaagattcctcacacggacggcaacttccacccgtctccgctgatgggcggctttggcctgaaacatcctccgcctcagatcctgatcaagaacacgcctgtacctgcggatcctccgaccaccttcaaccagtcaaagctgaactctttcatcacacagtactccacgggacaggtcagcgtggaaattgaatgggagctgcagaaggaaaacagcaagcgctggaacccggagatccagtacacttccaactactacaaatctacaaatgtggactttgctgttaacacagaaggcgtgtactctgaaccccaccccattggcacccgttacctcacccgtcccctgtaa

SEQ ID NO: 1732 - DNA, 2211 bp, synthetic construct
  source 1..2211: mol_type = other DNA; note = Description of Artificial Sequence: Synthetic polynucleotide
  misc_difference 715: note = misc_feature - n is a, c, g, or t
atggctgccgatggttatcttccagattggctcgaggacaacctctctgagggcattcgcgagtggtgggacttgaaacctggagccccgaaacccaaagccaaccagcaaaagcaggacgacggccggggtctggtgcttcctggctacaagtacctcggacccttcaacggactcgacaagggggagcccgtcaacgcggcggatgcagcggccctcgagcacgacaaggcctacgaccagcagctccaagcgggtgacaatccgtacctgcggtataaccacgccgacgccgagtttcaggagcgtcttcaaggagatacgtcttttgggggcaacctcggacgagcagtcttccaggccaagaagcgggttctcgaacctctcggtctggttgaggaagcggctaagacggctcctggaaagaagaggcctgtagagcagtctcctcaggaaccggactcctccgcgggtattggcaaatcgggtgcacagcccgctaaaaagagactcaatttcggtcagactggcgacacagagtcagtcccagaccctcaaccaatcggagaacctcccgcagccccctctggtgtgggacctaatacaatggctgcaggcggtggcgcaccaatggcagacaataacgaaggcgccgatggagtgggtagttcctcgggaaattggcattgcgattccacatggctgggcgacagantcatcaccaccagcacccgaacctgggccctgcccacctataacaaccatctctacaagcaaatctccagtgcttcaacgggggccagcaacgacaaccactacttcggctacagcaccccctgggggtattttgacttcaacagattccactgccacttctcaccacgtgactggcagcgactcatcaacaacaactggggattccggcctaagcgactcaacttcaagctcttcaacattcaggtcaaagaggttacggacaacaatggagtcaagaccatcgccaataaccttaccagcacggtccaggtcttcacggactcggagtaccagttgccgtacgtcctcggctctgcgcaccagggctgcctgcctccgttcccggcggacgtgttcatgattccgcagtacggctacctaacgctcaacaatggcagccaggcagtgggacggtcatccttttactgcctggaatatttcccatcgcagatgctgagaacgggcaacaactttaccttcagctacacttttgaggacgttcctttccacagcagctacgctcacagccagagtctggaccgtctcatgaatcctctgattgaccagtacctgtactacttgtctcggactcaaacaacaggaggcacggcaaatacgcagactctgggcttcagccaaggtgggcctaatacaatggccaatcaggcaaagaactggctgccaggaccctgttaccgccaacaacgcgtctcaacgacaaccggacaaaacaacaatagcaactttgcctggactgctgggaccaaataccatctgaatggaagaaattcattggctaatcctggcatcgctatggcaacacacaaagacgacaaggagcgtttttttcccagtaacgggatcctgatttttggcaaacaaaatgctgccagagacaatgcggattacagcgatgtcatgctcaccagcgaggaagaaatcaaaaccactaaccctgtggctacagaggaatacggtatcgtggcagataactttcagcagcaaaacacggctcctcaaattggaactgtcaacagccagggggccttacccggtatggtctggcagaaccgggacgtgtacctgcagggtcccatctgggccaagattcctcacacggacggcaacttccacccgtctccgctgatgggcggctttggcctgaaacatcctccgcctcagatcctgatcaagaacacgcctgtacctgcggatcctccgaccaccttcaaccagtcaaagctgaactctttcatcacgcaatacagcaccggacaggtcagcgtggaaattgaatgggagctgcagaaggaaaacagcaagcgctggaaccccgagatccagtacacctccaactactacaaatctacaagtgtggactttgctgttaatacagaaggcgtgtactctgaaccccaccccattggcacccgttacctcacccgtcccctgtaa

SEQ ID NO: 1733 - DNA, 2211 bp, synthetic construct
  source 1..2211: mol_type = other DNA; note = Description of Artificial Sequence: Synthetic polynucleotide
atggctgccgatggttatcttccagattggctcgaggacaacctctctgagggcattcgcgagtggtgggcgctgaaacctggagccccgaagcccaaagccaaccagcaaaagcaggacgacggccggggtctggtgcttcctggctacaagtacctcggacccttcaacggactcgacaaaggagagccggtcaacgaggcggacgcggcagccctcgaacacgacaaagcttacgaccagcagctcaaggccggtgacaacccctacctcaagtataaccacgccgacgccgagtttcaggagcgtctgcaagaagatacgtcttttgggggcaacctcgggcgagcagtcttccaggccaaaaagaggcttcttgaacctcttggtctggttgaggaagcggctaagacggctcctggaaagaagaggcctgtagagcagtctcctcaggaaccggactcctccgcgggtattggcaaatcgggtgcacagcccgctaaaaagagactcaatttcggtcagactggcgacacagagtcagtcccagacccacaacctctcggagaacctccagcaacccccgctgctgtgggacctactacaatggcttcaggcggtggcgcaccaatggcggacaataacgaaggcgccgatggagtgggtaatgcctcaggaaattggcattgcgattccacatggctgggcgacagagtcatcaccaccagcacccgaacatgggccttgcccacctataacaaccacctctacaagcaaatctccagtgcttcaacgggggccagcaacgacaaccactacttcggctacagcaccccctgggggtattttgacttcaacagattccactgccacttctcaccacgtgactggcagcgactcatcaacaacaactggggattccggcccaagagactcagcttcaagctcttcaacatccaggtcaaggaggtcacgcagaatgaaggcaccaagaccatcgccaataacctcaccagcaccatccaggtgtttacggactcggagtaccagctgccgtacgttctcggctccgcccaccagggctgcctgcctccgttcccggcggacgtgttcatgattccccagtacggctacctaacactcaacaacggtagtcaggccgtgggacgctcctccttctactgcctggaatactttccttcgcagatgctgagaaccggcaacaacttccagtttacttacaccttcgaggacgtgcctttccacagcagctacgcccacagccagagcttggaccggctgatgaatcctctgattgaccagtacctgtactacttgtctcggactcaaacaacaggaggcacggcaaatacgcagactctgggcttcagccaaggtgggcctaatacaatggccaatcaggcaaagaactggctgccaggaccctgttaccgccaacaacgcgtctcaacgacaaccgggcaaaacaacaatagcaactttgcctggactgctgggaccaaataccatctgaatggaagaaattcattggctaatcctggcatcgctatggcaacacacaaagacgacaaggagcgtttttttcccagtaacgggatcctgatttttggcaaacaaaatgctgccagagacaatgcggattacagcgatgtcatgctcaccagcgaggaagaaatcaaaaccactaaccctgtggctacagaggaatacggtatcgtggcagataacttgcagcagcaaaacacggctcctcaaattggaactgtcaacagccagggggccttacccggtatggtctggcagaaccgggacgtgtacctgcagggtcccatctgggccaagattcctcacacggacggcaacttccacccgtctccgctgatgggcggctttggcctgaaacatcctccgcctcagatcctgatcaagaacacgcctgtacctgcggatcctccgaccaccttcaaccagtcaaagctgaactctttcatcacgcaatacagcaccggacaggtcagcgtggaaattgaatgggagctgcagaaggaaaacagcaagcgctggaaccccgagatccagtacacctccaactactacaaatctacaagtgtggactttgctgttaatacagaaggcgtgtactctgaaccccaccccattggcacccgttacctcacccgtcccctgtaa

SEQ ID NO: 1734 - DNA, 2211 bp, synthetic construct
  source 1..2211: mol_type = other DNA; note = Description of Artificial Sequence: Synthetic polynucleotide
atggctgccgatggttatcttccagattggctcgaggacactctctctgaaggaataagacagtggtggaagctcaaacctggcccaccaccaccaaagcccgcagagcggcataaggacgacagcaggggtcttgtgcttcctgggtacaagtacctcggacccttcaacggactcgacaagggagagccggtcaacgaggcagacgccgcggccctcgagcacgacaaagcctacgaccagcagctccaagcgggtgacaatccgtacctgcggtataaccacgccgacgccgagtttcaggagcgtcttcaaggagatacgtcttttgggggcaacctcggacgagcagtcttccaggccaaaaagaggcttcttgaacctcttggtctggttgaggaagcggctaagacggctcctggaaagaagaggcctgtagagcagtctcctcaggaaccggactcctccgcgggtattggcaaatcgggtgcacagcccgctaaaaagagactcaatttcggtcagactggcgacacagagtcagtcccagaccctcaaccaatcggagaacctcccgcagccccctcaggtgtgggatctcttacaatggcttcaggtggtggcgcaccagtggcagacaataacgaaggtgccgatggagtgggtagttcctcgggaaattggcattgcgattcccaatggctgggggacagagtcatcaccaccagcacccgaacatgggccttgcccacctataacaaccacctctacaagcaaatctccagtgcttcaacgggggccagcaacgacaaccactacttcggctacagcaccccctgggggtattttgacttcaaccgcttccactgccacttctcaccacgtgactggcagcgactcatcaacaacaactggggattccggcccaagagactcagcttcaagctcttcaacatccaggtcaaggaggtcacgcagaatgaaggcaccaagaccatcgccaataacctcaccagcaccatccaggtgtttacggactcggagtaccagctgccgtacgttctcggctctgcccaccagggctgcctgcctccgttcccggcggacgtgttcatgattccccagtacggctacctaacactcaacaacggtagtcaggccgtgggacgctcctccttctactgcctggaatactttccttcgcagatgctgagaaccggcaacaacttccagtttacttacaccttcgaggacgtgcctttccacagcagctacgcccacagccagagcttggaccggctgatgaatcctctgattgaccagtacctgtactacttgtctcggactcaaacaacaggaggcacggcaaatacgcagactctgggcttcagccaaggtgggcctaatacaatggccaatcaggcaaagaactggctgccaggaccctgttaccgccaacaacgcgtctcaacgacaaccgggcaaaacaacaatagcaactttgcctggactgctgggaccaaataccatctgaatggaagaaattcattggctaatcctggcatcgctatggcaacacacaaagacgacaaggagcgtttttttcccagtaacgggatcctgatttttggcaaacaaaatgctgccagagacaatgcggattacagcgatgtcatgctcaccagcgaggaagaaatcaaaaccactaaccctgtggctacagaggaatacggtatcgtggcagataacttgcagcagcaaaacacggctcctcaaattggaactgtcaacagccagggggccttacccggtatggtctggcagaaccgggacgtgtacctgcagggtcccatctgggccaagattcctcacacggacggcaacttccacccgtctccgctgatgggcggctttggcctgaaacatcctccgcctcagatcctgatcaagaacacgcctgtacctgcggatcctccgaccaccttcaaccagtcaaagctgaactctttcatcacgcaatacagcaccggacaggtcagcgtggaaattgaatgggagctgcagaaggaaaacagcaagcgctggaaccccgagatccagtacacctccaactactacaaatctacaagtgtggactttgctgttaatacagaaggcgtgtactctgaaccccaccccattggcacccgttacctcacccgtcccctgtaa

SEQ ID NO: 1735 - DNA, 2217 bp, synthetic construct
  source 1..2217: mol_type = other DNA; note = Description of Artificial Sequence: Synthetic polynucleotide
atggctgccgatggttatcttccagattggctcgaggacaacctctctgagggaataagacagtggtggaagctcaaacctggcccaccaccaccaaagcccgcagagcggcataaggacgacagcaggggtcttgtgcttcctgggtacaagtacctcggacccttcaacggactcgacaagggagagccggtcaacgcggcggacgcagcggccctcgagcacgacaaggcctacgaccagcagctcaaagcgggtgacaatccgtacctgcggtataaccacgccgacgccgagtttcaggagcgtctgcaagaagatacgtcttttgggggcaacctcgggcgagcagtcttccaggccaagaagcgggttctcgaacctctcggtctggttgaggaaggcgctaagacggctcctggaaagaagagaccggtagagccatcaccccagcgttctccagactcctctacgggcatcggcaagaaaggccagcagcccgctaaaaagagactcaattttggtcagactggcgactcagagtcagtccccgacccacaacctctcggagaacctccagcaacccccgctgctgtgggacctactacaatggcttcaggcggtggcgcaccaatggcagacaataacgaaggcgccgacggagtgggtaatgcctcaggaaattggcattgcgattccacatggctgggggacagagtcatcaccaccagcacccgaacctgggccctgcccacctacaacaaccacctctacaagcaaatctccaacgggacttcgggaggaagcaccaacgacaacacctacttcggctgcgtcacgccctgggggtattttgactttaacaaattccactgccacttttcaccggatgactggcaacgactcatcaacaacggctggggattccggactaagcgactcaacttcaagctcttcagcatgaaagtcaaaaagggtacggacaacactggaatcaagaccatcgcgaataaccttaccaacacggtccatgtcttcgcggactcggagtaccagttgccgtacgtcctcggctctgcgcaccagggctgcctccctccgttcccggcggacgtgttcatgattccgcagtacggctacctaacgctcaacaatggcagccaggcagtgggacggtcatccttttactgcctggaatatttcccatcgcagatgctgagaacgggcaacaactttaccttcagctacacctttgaggacgttcctttccacagcagctacgctcacagccagagtctggaccgtctcatgaatcctctgattgaccagtacctgtactacttgtctcggactcaaacaacaggaggcacggcaaatacgcagactctgggcttcagccaaggtgggcctaatacaatggccaatcaggcaaagaactggctgccaggaccctgttaccgccaacaacgcgtctcaacgacaaccgggcaaaacaacaatagcaactttgcctggactgctgggaccaaataccatctgaatggaagaaattcattggctaatcctggcatcgctatggcaacacacaaagacgacaaggagcgtttttttcccagtaacgggatcctgatttttggcaaacaaaatgctgccagagacaatgcggattacagcgatgtcatgctcaccagcgaggaagaaatcaaaaccactaaccctgtggctacagaggaatacggtatcgtggcagataacttgcagcagcaaaacacggctcctcaaattggaactgtcaacagccagggggccttacccggtatggtctggcagaaccgggacgtgtacctgcagggtcccatctgggccaagattcctcacacggacggcaacttccacccgtctccgctgatgggcggctttggcctgaaacatcctccgcctcagatcctgatcaagaacacgcctgtacctgcggatcctccgaccaccttcaaccagtcaaagctgaactctttcatcacgcaatacagcaccggacaggtcagcgtggagatcgagtgggagctgcagaaggaaaacagcaagcgctggaacccggagatccagtacacctccaactactacaaatctacaagtgtggactttgctgttaatacagaaggcgtgtactctgaaccccaccccattggcacccgttacctcacccgtcccctgtaa

SEQ ID NO: 1736 - DNA, 2214 bp, synthetic construct
  source 1..2214: mol_type = other DNA; note = Description of Artificial Sequence: Synthetic polynucleotide
atggctgccgatggttatcttccagattggctcgaggacactctctctgaaggaataagacagtggtggaagctcaaacctggcccaccaccaccaaagcccgcagagcggcataaggacgacagcaggggtcttgtgcttcctgggtacaagtacctcggacccttcaacggactcgacaagggggagcccgtcaacgcggcggacgcagcggccctcgagcacgacaaggcctacgaccagcagctcaaagcgggtgacaatccgtacctgcggtataaccacgccgacgccgagtttcaggagcgtctgcaagaagatacgtcttttgggggcaacctcgggcgagcagtcttccaggccaagaagcgggttctcgaacctctcggtctggttgaggaaggcgctaagacggctcctggaaagaagagaccggtagagccatcaccccagcgttctccagactcctctacgggcatcggcaagaaaggccagcagcccgcgaaaaagagactcaactttgggcagactggcgactcagagtcagtgcccgaccctcaaccaatcggagaaccccccgcaggcccctctggtctgggatctggtacaatggctgcaggcggtggcgctccaatggcagacaataacgaaggcgccgatggagtgggtagttcctcgggaaattggcattgcgattccacatggctgggggacagagtcatcaccaccagcacccgaacctgggccctgcccacctacaacaaccacctctacaaacaaatttccagcgcttcaacgggagcctcgaacgacaatcactactttggctacagcaccccctgggggtattttgacttcaacagattccactgccacttctcaccacgtgactggcagcgactcatcaacaacaactggggattccggcctaagcgactcaacttcaagctcttcaacattcaggtcaaagaggttacggacaacaatggagtcaagaccatcgccaataaccttaccagcacggtccaggtcttcacggactcggagtaccagttgccgtacgtcctcggctctgcgcaccagggctgcctccctccgttcccggcggacgtgttcatgattccgcagtacggctacctaacgctcaacaatggcagccaggcagtgggacggtcatccttttactgcctggaatatttcccatcgcagatgctgagaacgggcaacaactttaccttcagctacacctttgaggacgttcctttccacagcagctacgctcacagccagagtctggaccgtctcatgaatcctctgattgaccagtacctgtactacttgtctcggactcaaacaacaggaggcacggcaaatacgcagactctgggcttcagccaaggtgggcctaatacaatggccaatcaggcaaagaactggctgccaggaccctgttaccgccaacaacgcgtctcaacgacaaccgggcaaaacaacaatagcaactttgcctggactgctgggaccaaataccatctgaatggaagaaattcattggctaatcctggcatcgctatggcaacacacaaagacgacaaggagcgtttttttcccagtaacgggatcctgatttttggcaaacaaaatgctgccagagacaatgcggattacagcgatgtcatgctcaccagcgaggaagaaatcaaaaccactaaccctgtggctacagaggaatacggtatcgtggcagataacctgcagcagcaaaacacggctcctcaaattggaactgtcaacagccagggggccttacccggtatggtctggcagaaccgggacgtgtacctgcagggtcccatctgggccaagattcttcacacggacggcaactttcacccttctccgctgatgggagggtttggaatgaagcacccgcctcctccgatcctgatcaagaacacgcctgtacctgcggatcctccgaccaccttcaaccagtcaaagctgaactctttcatcacgcaatacagcaccggacaggtcagcgtggaaattgaatgggagctgccgaaggaaaacagcaagcgctggaaccccgagatccagtacacctccaactactacaaatctacaagtgtggactttgctgttaatacagaaggtgtgtactatgaaccccaccccattggcacccgttacctcacccctcccctgtaa

SEQ ID NO: 1737 - DNA, 2214 bp, synthetic construct
  source 1..2214: mol_type = other DNA; note = Description of Artificial Sequence: Synthetic polynucleotide
atggctgccgatggttatcttccagattggctcgaggacaacctctctgagggcattcgcgagtggtgggcgctgaaacctggagccccgaagcccaaagccaaccagcaaaagcaggacgacggccggggtctggtgcttcctggctacaagtacctcggacccttcaacggactcgacaagggggagcccgtcaacgcggcggacgcagcggccctcgagcacgacaaggcctacgaccagcagctcaaagcgggtgacaatccgtacctgcggtataaccacgccgacgccgagtttcaggagcgtctgcaagaagatacgtcttttgggggcaacctcgggcgagcagtcttccaggccaagaagcgggttctcgaacctctcggtctggttgaggaaggcgctaagacggctcctggaaagaagagaccggtagagccatcaccccagcgctctccagactcctctacgggcatcggcaagaaaggccaacagcccgccagaaaaagactcaattttggtcagactggcgactcagagtcagttccagaccctcaacctctcggagaacctccagcagcgccctctggtgtggcacctaatacaatggctgcaggcggtggcgcaccaatggcagacaataacgaaggcgccgacggagtgggtaatgcctcaggaaattggcattgcgattccacatggctgggcgacagagtcatcaccaccagcacccgaacatgggccttgcccacctataacaaccacctctacaagcaaatctccagtgcttcaacgggggccagcaacgacaaccactacttcggctacagcaccccctgggggtattttgatttcaacagattccactgccacttttcaccacgtgactggcagcgactcatcacaacaattgggggattccggcctaagcgactcaacttcaagctcttcaacattcaggtcaaagaggttacggacaacaatggagtcaagaccatcgccaataaccttaccagcacggtccaggtcttcacggactcggagtaccagttgccgtacgtcctcggctctgcgcaccagggctgcctccctccgttcccggcggacgtgttcatgattccgcagtacggctacctaacgctcaacaatggcagccaggcagtgggacggtcatccttttactgcctggaatatttcccatcgcagatgctgagaacgggcaacaactttaccttcagctacacctttgaggacgttcctttccacagcagctacgctcacagccagagtctggaccggctgatgaatcctctgattgaccagtacctgtactacttgtctcggactcaaacaacaggaggcacggcaaatacgcagactctgggcttcagccaaggtgggcctaatacaatggccaatcaggcaaagaactggctgccaggaccctgttaccgccaacaacgcgtctcaacgacaaccgggcaaaacaacaatagcaactttgcctggactgctgggaccaaataccatctgaatggaagaaattcattggctaatcctggcatcgctatggcaacacacaaagacgacaaggagcgtttttttcccagtaacgggatcctgatttttggcaaacaaaatgctgccagagacaatgcggattacagcgatgtcatgctcaccagcgaggaagaaatcaaaaccactaaccctgtggctacagaggaatacggtatcgtggcagataacttgcagcagcaaaacacggctcctcaaattggaactgtcaacagccagggggccttacccggtatggtctggcagaaccgggacgtgtacctgcagggtcccatctgggccaagattcctcacacggacggcaacttccacccgtctccgctgatgggcggctttggcctgaaacatcctccgcctcagatcctgatcaagaacacgcctgtacctgcggatcctccgaccaccttcaaccagtcaaagctgaactctttcatcacgcaatacagcaccggacaggtcagcgtggaaattgaatgggagctgcagaaggaaaacagcaagcgctggaaccccgagatccagtacacctccaactactacaaatctacaagtgtggactttgctgttaatacagaaggcgtgtactctgaaccccaccccattggcacccgttacctcacccgtcccctgtaa

SEQ ID NO: 1738 - DNA, 2211 bp, synthetic construct
  source 1..2211: mol_type = other DNA; note = Description of Artificial Sequence: Synthetic polynucleotide
atggctgccgatggttatcttccagattggctcgaggacactctctctgaaggaataagacagtggtggaagctcaaacctggcccaccaccaccaaagcccgcagagcggcataaggacgacggccggggtctggtgcttcctggctacaagtacctcggacccttcaacggactcgacaagggggagcccgtcaacgcggcggacgcagcggccctcgagcacgacaaggcctacgaccagcagctcaaagcgggtgacaatccgtacctgcggtataaccacgccgacgccgagtttcaggagcgtctgcaagaagatacgtcttttgggggcaacctcggacgagcagtcttccaggcgaaaaagagggttcttgaacctctgggcctggttgaggaacctgttaagacggctccgggaaaaaagaggccggtagagcagtcgccacaagagccagactcctcctcgggcatcggcaagaaaggccagcagcccgctaaaaagagactcaattttggtcagactggcgactcagagtcagtccccgacccacaacctctcggagaacctccagcaacccccgctgctgtgggacctactacaatggcttcaggcggtggcgcaccaatggcagacaataacgaaggcgccgacggagtgggtaatgcctcaggaaattggcattgcgattccacatggatgggcgacagagtcatcaccaccagcacccgaacatgggccttgcccacctataacaaccacctctacaagcaaatctccagtgcttcaacgggggccagcaacgacaaccactacttcggctacagcaccccctgggggtattttgactttaacagattccactgccacttttcaccacgtgactggcagcgactcatcaacaacaactggggattccggcctaagcgactcaacttcaagctcttcaacattcaggtcaaggaggtcacgcagaatgaaggcaccaagaccatcgccaataacctcaccagcaccatccaggtgtttacggactcggagtaccagctgccgtacgttctcggctccgcccaccagggctgcctgcctccgttcccggcggacgtgttcatgatcccccagtacggctacctaacactcaacaacggtagtcaggccgtgggacgctcctccttctactgcctggaatactttccttcgcagatgctgagaaccggcaacaacttccagtttacttacaccttcgaggacgtgcctttccacagcagctacgcgcacagccagagcttggaccggctgatgaatcctctgattgaccagtacctgtactacttgtctcggactcaaacaacaggaggcacggcaaatacgcagactctgggcttcagccaaggtgggcctaatacaatggccaatcacgcaaagaactggctgccaggaccctgttaccgccaacaacgcgtctcaacgacaaccgggcaaaacaacaatagcaactttgcctggactgctgggaccaaataccatctgaatggaagaaattcattggctaatcctggcatcgctatggcaacacacaaagacgacaaggagcgtttttttcccagtaacgggatcctgatttttggcaaacaaaatgctgccagagacaatgcggattacagcgatgtcatgctcaccagcgaggaagaaatcaaaaccactaaccctgtggctacagaggaatacggtatcgtggcagataacttgcagcagcaaaacacggctcctcaaattggaactgtcaacagccagggggccttacccggtatggtctggcagaaccgggacgtgtacctgcagggtcccatctgggccaagattcctcacacggacggcaacttccacccgtctccgctgatgggcggcttcggcctgaaacatcctccgcctcagatcctgatcaagaacacgcctgtacctgcggatcctccgaccaccttcaaccagtcaaagctgaactctttcatcacgcaatacagcaccggacaggtcagcgtggaaattgaatgggagctgcagaaggaaaacagcaagcgctggaaccccgagatccagtacacctccaactactacaaatctacaagtgtggactttgctgttaatacagaaggcgtgtactctgaaccccaccccattggcacccgttacctcacccgtcccctgtaa

SEQ ID NO: 1739 - DNA, 2214 bp, synthetic construct
  source 1..2214: mol_type = other DNA; note = Description of Artificial Sequence: Synthetic polynucleotide
atggctgccgatggttatcttccagattggctcgaggacaacctctctcagggcattcgcgagtggtgggacttgaaacctggagccccgaaacccaaagccaaccagcaaaagcaggacgacggccggggtctggtgcttcctggctacaagtacctcggacccttcaacggactcgacaagggggagcccgtcaacgcggcggacgcagcggccctcgagcacgacaaggcctacgaccagcagctcaaagcgggtgacaatccgtacctgcggtataaccacgccgacgccgagtttcaggagcgtctgcaagaagatacgtcttttgggggcaacctcggacgagcagtcttccaggccaagaagcgggttctcgaacctctcggtctggttgaggaaggcgctaagacggctcctggaaagaagagaccggtagagccatcaccccagcgttctccagactcctctacgggcatcggcaagaaaggccaacagcccgccagaaaaagactcaattttggtcagactggcgactcagagtcagttccagaccctcaacctctcggagaacctccagcagcgcccgctgctgtgggacctactacaatggcttcaggcggtggcgcaccaatggcagacaataacgaaggcgccgacggagtgggtagttcctcgggaaattggcattgcgattcccaatggctgggggacagagtcatcaccaccagcacccgaacctgggccctgcccacctacaacaaccacctctacaagcaaatctccagtgcttcaacgggggccagcaacgacaaccactacttcggctacagcaccccctgggggtattttgacttcaacagattccactgccacttttcaccacgtgactggcaaagactcatcaacaacaactggggattccggcccaagagactcagcttcaagctcttcaacatccaggtcaaggaggtcacgcagaatgaaggcaccaagaccatcgccaataacctcaccagcaccatccaggtgtttacggactcggagtaccagctgccgtacgttctcggctctgcccaccagggctgcctgcctccgttcccggcggacgtgttcatgattccccagtacgggtacctgactctgaacaatggcagtcaggccgtgggccgttcctccttctactgcctggagtactttccttctcaaatgctgagaaccggcaacaacttccagtttacttacaccttcgaggacgtgcctttccacagcagctacgcccacagccagagcttggaccggctgatgaatcctctgattgaccagtacctgtactacttgtctcggactcaaacaacaggaggcacgacaaatgcgcagactctgggcttcagccaaggtgggcctaatacaatggccaatcaggcaaagaactggctgccaggaccctgttaccgccaacaacgcgtctcaacgacaaccgggcaaaacaacaatagcaactttgcctggactgctgggaccaaataccatctgaatggaagaaattcattggctaatcctggcatcgctatggcaacacacaaagacgacaaggagcgtttttttcccagtaacgggatcctgatttttggcaaacaaaatgctgccagagacaatgcggattacagcgatgtcatgctcaccagcgaggaagaaatcaaaaccactaaccctgtggctacagaggaatacggtatcgtggcagataacttgcagcagcaaaacacggctcctcaaattggaactgtcaacagccagggggccttacccggtatggtctggcagaaccgggacgtgtacctgcagggtcccatctgggccaagattcctcacacggacggcaacttccacccgtctccgctgatgggcggctttggcctgaaacatcctccgcctcagatcctgatcaagaacacgcctgtacctgcggatcctccgaccaccttcaaccagtcaaagctgaactctttcatcacacagtactccacgggacaggtcagcgtggaaattgaatgggagctgcagaaggaaaacagcaagcgctggaacccggagatccagtacacttccaactactacaaatctacaaatgtggactttgctgttaacacagaaggcgtgtactctgaaccccaccccattggcacccgttacctcacccgtcccctgtaa

SEQ ID NO: 1740 - DNA, 2211 bp, synthetic construct
  source 1..2211: mol_type = other DNA; note = Description of Artificial Sequence: Synthetic polynucleotide
atggctgccgatggttatcttccagattggctcgaggacaacctctctgagggcattcgcgagtggtgggacttgaaacctggagccccgaaacccaaagccaaccagcaaaagcaggacgacggccggggtctggtgcttcctggctacaagtacctcggacccttcaacggactcgacaagggggagcccgtcaacgcggcggacgcagcggccctcgagcacgacaaggcctacgaccagcagctcaaagcgggtgacaatccgtacctgcggtataaccacgccgacgccgagtttcaggagcgtctgcaagaagatacgtcttttgggggcaacctcgggcgagcagtcttccaggccaagaagagggttctcgaaccttttggtctggttgaggaaggcgctaagacggctcctggaaagaaacgtccggtagagcagtcgccacaagagccagactcctcctcgggcatcggcaagacaggccagcagcccgctaaaaagagactcaatttcggtcagactggcgacacagagtcagtcccagaccctcaaccaatcggagaacctcccgcagccccctcaggtgtgggacctaatacaatggctgcaggcggtggcgcaccaatggcagacaataacgaaggcgccgacggagtgggtagttcctcgggaaattggcattgcgattccacatggatgggtgacagagtcatcaccaccagcacccgaacctgggccctgcccacctacaataaccacctctacaagcaaatctccagtgcttcaacgggggccagcaacgacaaccactacttcggctacagcaccccctgggggtattttgacttcaacagattccactgccacttctcaccacgtgactggcagcgactcatcaacaacaactggggattccggcctaagcgactcaacttcaagctcttcaacattcaggtcaaggaggtcacgcagaatgaaggcaccaagaccatcgccaataacctcaccagcaccatccaggtgtttacggactcggagtaccagctgccgtacgttctcggctctgcccaccagggctgcctgcctccgttcccggcggacgtgttcatgattccccagtacggctacctaacactcaacaacggtagtcaggccgtgggacgctcctccttctactgcctggaatactttccttcgcagatgctgagaaccggcaacaacttccagtttacttacaccttcgaggacgtgcctttccacagcagctacgcccacagccagagcttggaccggctgatgaatcctctgattgaccagtacctgtactacttgtctcggactcaaacaacaggaggcacggcaaatacgcagactctgggcttcagccaaggtgggcctaatacaatggccaatcaggcaaagaactggctgccaggaccctgttaccgccaacaacgcgtctcaacgacaaccgggcaaaacaacaatagcaactttgcctggactgctgggaccaaataccatctgaatggaagaaattcattggctaatcctggcatcgctatggcaacacacaaagacgacaaggagcgtttttttcccagtaacgggatcctgatttttggcaaacaaaatgctgccagagacaatgcggattacagcgatgtcatgctcaccagcgaggaagaaatcaaaaccactaaccctgtggctacagaggaatacggtatcgtggcagataacttgcagcagcaaaacacggctcctcaaattggaactgtcaacagccagggggccttacccggtatggtctggcagaaccgggacgtgtacctgcagggtcccatctgggccaagattcctcacacggacggcaacttccacccgtctccgctgatgggcggctttggcctgaaacatcctccgcctcagatcctgatcaagaacacgcctgtacctgcggatcctccgaccaccttcaaccagtcaaagctgaactctttcatcacacagtactccacgggacaggtcagcgtggaaattgaatgggagctgcagaaggaaaacagcaagcgctggaacccggagatccagtacacttccaactactacaaatctacaaatgtggactttgctgttaacacagaaggcgtgtactctgaaccccaccccattggcacccgttacttcacccgtcccctgtaa

SEQ ID NO: 1741 - DNA, 2211 bp, synthetic construct
  source 1..2211: mol_type = other DNA; note = Description of Artificial Sequence: Synthetic polynucleotide
atggctgccgatggttatcttccagattggctcgaggacaacctctctgagggcattcgcgagtggtgggacttgaaacctggagccccgaaacccaaagccaaccagcaaaagcaggacgacggccggggtctggtgcttcctggctacaagtacctcggacccttcaacggactcgacaagggggagcccgtcaacgcggcggacgcagcggccctcgagcacgacaaggcctacgaccagcagctcaaagcgggtgacaatccgtacctgcggtataaccacgccgacgccgagtttcaggagcgtctgcaagaagatacgtcttttgggggcaacctcgggcgagcagtcttccaggccaagaagcgggttctcgaacctctcggtctggttgaggaaggcgctaagacggctcctggaaagaaacgtccggtagagcagtcgccacaagagccagactcctcctcgggcatcggcaagacaggccagcagcccgctaaaaaaagactcaattttggtcagactggcgactcagagtcagttccagaccctcaacctctcggagaacctccagcaacccccgctgctgtgggacctactacaatggcttcaggtggtggcgcaccaatggcagacaataacgagggcgccgacggagtgggtaattcctcgggaaattggcattgcgattccacatggatgggcgacagagtcatcaccaccagcacccgaacctgggccctgcccacctacaacaatcacctctacaagcaaatctccagtgcttcaacgggggccagcaacgacaaccactacttcggctacagcaccccctgggggtattttgacttcaacagattccactgccacttctcaccacgtgactggcagcgactcatcaacaacaactggggattccggcctaagcgactcaacttcaagctcttcaacattcaggtcaaagaggttacggacaacaatggagtcaagaccatcgccaataaccttaccagcacggtccaggtcttcacggactcggagtaccagttgccgtacgtcctcggctctgcgcaccagggctgcctccctccgttcccggcggacgtgttcatgattccgcagtacggctacctaacgctcaacaacggtagtcaggccgtgggacgctcctccttctactgcctggaatactttccttcgcagatgctgagaaccggcaacaacttccagtttacttacaccttcgaggacgtgcctttccacagcagctacgcccacagccagagcttggaccggctgatgaatcctctgattgaccagtacctgtactacttgtctcggactcaaacaacaggaggcacggcaaatacgcagactctgggcttcagccaaggtgggcctaatacaatggccaatcaggcaaagaactggctgccaggaccctgttaccgccaacaacgcgtctcgacgacaaccgggcaaaacaacaatagcaactttgcctggactgctgggaccaaataccatctgaatggaagaaattcattggctaatcctggcatcgctatggcaacacacaaagacgacaaggagcgtttttttcccagtaacgggatcctgatttttggcaaacaaaatgctgccagagacaatgcggattacagcgatgtcatgctcaccagcgaggaagaaatcaaaaccactaaccctgtggctacagaggaatacggtatcgtggcagataacttgcagcagcaaaacacggctcctcaaattggaactgtcaacagccagggggccttacccggtatggtttggcagaaccgggacgtgtacctgcagggtcccatctgggccaagattcctcacacggacggcaacttccacccgtctccgctgatgggcggctttggcctgaaacatcctccgcctcagatcctgatcaagaacacgcctgtacctgcggatcctccgaccaccttcaaccagtcaaagctgaactctttcatcacacagtactccacgggacaggtcagcgtggaaattgaatgggagctgcagaaggaaaacagcaagcgctggaacccggagatccagtacacttccaactactacaaatctacaaatgtggactttgctgttaacacagaaggcgtgtactctgaaccccaccccattggcacccgttacctcacccgtcccctgtaa

SEQ ID NO: 1742 - DNA, 2211 bp, synthetic construct
  source 1..2211: mol_type = other DNA; note = Description of Artificial Sequence: Synthetic polynucleotide
atggctgccgatggttatcttccagattggctcgaggacaacctctctgagggcattcgcgagtggtgggacttgaaacctggagccccgaagcccaaagccaaccagcaaaagcaggacgacggccggggtctggtgcttcctggctacaagtacctcggacccttcaacggactcgacaagggggagcccgtcaacgcggcggacgcagcggccctcgagcacgacaaggcctacgaccagcagctcaaagcgggtgacaatccgtacctgcggtataaccacgccgacgccgagtttcaggagcgtctgcaagaagatacgtcttttgggggcaacctcgggcgagcagtcttccaggccaagaagcgggttctcgaacctctcggtctggttgaggaaggcgctaagacggctcctggaaagaaacgtccggtagagcagtcaccacaagagccagactcctcctcgggcatcggcaagacaggccagcagcccgctaaaaagagactcaattttggtcagactggcgactcagagtcagtccccgacccacaacctctcggagaacctccagcaacccccgctgctgtgggacctactacaatggcttcaggcggtggcgcaccaatggcggacaataacgaaggcgccgatggagtgggtaatgcctcaggaaattggcattgcgattccacatggctgggcgacagagtcatcaccaccagcacccgaacatgggccttgcccacctataacaaccacctctacaagcaaatctccagtgcttcaacgggggccagcaacgacaaccactacttcggctacagcaccccctgggggtattttgactttaacagattccactgccacttctcaccacgtgactggcagcgactcatcaacaacaactggggattccggcccaagagactcaacttcaagctcttcaacatccaggtcaaggaggtcacgcagaatgaaggcaccaagaccatcgccaataacctcaccagcaccatccaggtgtttacggactcggagtaccagctgccgtacgttctcggctctgcccaccagggctgcctgcctccgttcccggcggacgtgttcatgattccccagtacggctacctgactctgaacaatggcagtcaggccgtgggccgttcctccttctactgcctagagtactttccttctcaaatgctgagaacgggcaacaactttgagttcagctaccagtttgaggacgtgccttttcacagcagctacgcgcacagccaaagcctggaccggctgatgaatcctctgattgaccagtacctgtactacttgtctcggactcaaacaacaggaggcacggcaaatacgcagactctgggcttcagccaaggtgggcctaatacaatggccaatcaggcaaagaactggctgccaggaccctgttaccgccaacaacgcgtctcaacgacaaccgggcaaaacaacaatagcaactttgcctggactgctgggaccaaataccatatgaatggaagaaattcattggttaatcctggcatcgctatggcaacacacaaagacgacaaggagcgtttttttcccagtaacgggatcctgatttttggcaaacaaaatgttgccagagacaatgcggattacagcgatgtcatgctcaccagcgaggaagaaatcaaaaccactaaccctgtggctacagaggaatacggtattgtggcagataacttgcagcagcaaaacacggctcctcaaattggaactgtcaacagccagggggccttacccggtatggtctggcagaaccgggacgtgtacctgcagggtcccatctgggccaagattcctcacacggacggcaacttccacccgtcgccgctgatgggcggctttggcctgaaacatcctccgcctcagatcctgatcaagaacacgcctgtacctgcggatcctccgaccaccttcaaccagtcaaagctgaactctttcatcacgcaatacagcaccggacaggtcagcgtggaaattgaatgggagctgcagaaggaaaacagcaagcgctggaaccccgagatccagtacacctccaactactacaaatctacaagtgtggactttgctgttaatacagaaggcgtgtactctgaaccccaccccattggcacccgttacctcacccgtcccctgtaa

SEQ ID NO: 1743 - protein, 736 aa, synthetic construct
  source 1..736: note = Description of Artificial Sequence: Synthetic polypeptide
MAADGYLPDWLEDTLSEGIRQWWKLKPGPPPPKPAERHKDDSRGLVLPGYKYLGPFNGLDKGEPVNEADAAALEHDKAYDRQLDSGDNPYLKYNHADAEFQERLKEDTSFGGNLGRAVFQAKKRVLEPLGLVEEPVKTAPGKKRPVEQSPQEPDSSSGIGKKGQQPAKKRLNFGQTGDSESVPDPQPLGEPPATPAAVGPTTMASGGGAPMADNNEGADGVGNASGNWHCDSTWMGDRVITTSTRTWALPTYNNHLYKQISSASTGASNDNHYFGYSTPWGYFDFNRFHCHFSPRDWQRLINNNWGFRPKRLNFRLFNIQVKEVTDNNGVKTIANNLTSTVQVFTDSEYQLPYVLGSAHQGCLPPFPADVFMIPQYGYLTLNNGSQAVGRSSFYCLEYFPSQMLRTGNNFTFSYTFEEVPFHSSYAHSQSLDRLMNPLIDQYLYYLSRTQTTGGTANTQTLGFSQGGPNTMANQAKNWLPGPCYRQQRVSTTTGQNNNSNFAWTAGTKYHLNGRNSLANPGIAMATHKDDKERFFPSNGILIFGKQNAARDNADYSDVMLTSEEEIKTTNPVATEEYGIVADNLQQQNTAPQIGTVNSQGALPGMVWQNRDVYLQGPIWAKIPHTDGNFHPSPLMGGFGLKHPPPQILIKNTPVPADPPTTFNQSKLNSFITQYSTGQVSVEIEWELQKENSKRWNPEIQYTSNYYKSTSVDFAVNTEGVYSEPHPIGTRYLTRPL

SEQ ID NO: 1744 - protein, 736 aa, synthetic construct
  source 1..736: note = Description of Artificial Sequence: Synthetic polypeptide
MAADGYLPDWLEDNLSEGIREWWDLKPASPKPKANQQKQDDGRGLVLPGYKYLGPFNGLDKGEPVNAADAAALEHDKAYDQQLKAGDNPYLRYNHADAEFQERLQEDTSFGGNLGRAVFQAKKRLLEPLGLVEEAAKTAPGKKRPVEQSPQEPDSSAGIGKSGAQPAKKRLNFGQTGGTESVPDPQPLGEPPAAPSGVGPNTMAAGGGAPMADNNEGADGVGSSSGNWHCDSTWLGDRVITTSTRTWALPTYNNHLYKQISSASTGASNDNHYFGYSTPWGYFDFNRFHCHFSPRDWQRLINNNWGFRPKRLSFKLFNIQVKEVTQNEGTKTIANNLTSTIQVFTDSEYQLPYVLGSAHQGCLPPFPADVFMIPQYGYLTLNNGSQAVGRSSFYCLEYFPSQMLRTGNNFQFTYTFEDVPFHSSYAHSQSLDRLMNPLIDQYLYYLSRTQTTGGTANTQTLGFSQGGPNTMANQAKNWLPGPCYRQQRVSTTTGQNNNSNFAWTAGTKYHLNGRNSLANPGIAMATHKDDKERFFPSNGILIFGKQNAARDNADYSDVMLTSEEEIKTTNPVATEEYGIVADNLQQQNTAPQIGTVNSQGALPGMVWQNRDVYLQGPIWAKIPHTDGNFHPSPLMGGFGLKHPPPQILIKNTPVPADPPTTFNQSKLNSFITQYSTGQVSVEIEWELQKENSKRWNPEIQYTSNYYKSTSVDFAVNTEGVYSEPHPIGTRYLTRPL

SEQ ID NO: 1745 - protein, 736 aa, synthetic construct; identical to SEQ ID NO: 1684
  source 1..736: note = Description of Artificial Sequence: Synthetic polypeptide

SEQ ID NO: 1746 - protein, 736 aa, synthetic construct
  source 1..736: note = Description of Artificial Sequence: Synthetic polypeptide
MAADGYLPDWLEDNLSEGIREWWDLEPGAPKPKANQQKQDDGRGLVLPGYKYLGPFNGLDKGEPVNAADAAALEHDKAYDQQLKAGDNPYLRYNHADAEFQERLQEDTSFGGNLGRAVFQAKKRVLEPLGLVEEGAKTAPGKKRPVEQSPQEPDSSSGIGKTGQQPAKKRLNFGQTGDSESVPDPQPLGEPPATPAAVGPTTMASGGGAPMADNNEGADGVGNASGNWHCDSTWLGDRVITTSTRTWALPTYNNHLYKQISSASTGASNDNHYFGYSTPWGYFDFNRFHCHFSPRDWQRLINNNWGFRPKRLNFKLFNIQVKEVTDNNGVKTIANNLTSTVQVFTDSEYQLPYVLGSAHQGCLPPFPADVFMIPQYGYLTLNNGSQAVGRSSFYCLEYFPSQMLRTGNNFQFTYTFEDVPFHSSYAHSQSLDRLMNPLIDQYLYYLSRTQTTGGTANTQTLGFSQGGPNTMANQAKNWLPGPCYRQQRVSTTTGQNNNSNFAWTAGTKYHLNGRNSLANPGIAMATHKDDKERFFPSNGILIFGKQNAARDNADYSDVMLTSEEEIKTTNPVATEEYGIVADNLQQQNTAPQIGTVNSQGALPGMVWQNRDVYLQGPIWAKIPHTDGNFHPSPLMGGFGLKHPPPQILIKNTPVPADPPTTFNQSKLNSFITQYSTGQVSVEIEWELQKENSKRWNPEIQYTSNYYKSTSVDFAVNTEGVYSEPHPIGTRYLTRPL

SEQ ID NO: 1747 - protein, 736 aa, synthetic construct; identical to SEQ ID NO: 1684
  source 1..736: note = Description of Artificial Sequence: Synthetic polypeptide

SEQ ID NO: 1748 - protein, 736 aa, synthetic construct
  source 1..736: note = Description of Artificial Sequence: Synthetic polypeptide
MAADGYLPDWLEDTLSEGIRQWWKLKPGPPPPKPAERHKDDSRGLVLPGYKYLGPFNGLDKGEPVNEADAAALEHDKAYDRQLDSGDNPYLKYNHADAEFQERLKEDTSFGGNLGRAVFQAKKRVLEPLGLVEEPVKTAPGKKRPVEQSPQEPDSSSGIGKKGQQPAKKRLNFGQTGDSESVPDPQPLGEPPATPAAVGPTTMASGGGAPMADNNEGADGVGNASGNWHCDSTWLGDRVITTSTRTWALPTYNNHLYKQISSASTGASNDNHYFGYSTPWGYFDFNRFHCHFSPRDWQRLINNNWGFRPKRLNFKLFNIQVKEVTDNNGVKTIANNLTSTVQVFTDSDYQLPYVLGSAHQGCLPPFPADVFMIPQYGYLTLNNGSQAVGRSSFYCLEYFPSQMLRTGNNFQFTYTFEDVPFHSSYAHSQSLDRLMNPLIDQYLYYLSRTQTTGGTANTQTLGFSQGGPNTMANQAKNWLPGPCYRQQRVSTTTGQNNNSNFAWTAGTKYHLNGRNSLANPGIAMATHKDDKERFFPSNGILIFGKQNAARDNADYSDVMLTSEEEIKTTNPVATEEYGIVADNLQQQNTAPQIGTVNSQGALPGMVWQNRDVYLQGPIWAKIPHTDGNFHPSPLMGGFGLKHPPPQILIKNTPVPADPPTTFNQSKLNSFITQYSTGQVSVEIEWELQKENSKRWNPEIQYTSNYYKSTSVDFAVNTEGVYSEPHPIGTRYLTRPL

SEQ ID NO: 1749 - protein, 734 aa, synthetic construct
  source 1..734: note = Description of Artificial Sequence: Synthetic polypeptide
MAADGYLPDWLEDTLSEGIRQWWKLKPGPPPPKPAERHKDDSRGLVLPGYKYLGPFNGLDKGEPVNEADAAALEHDKAYDQQLQAGDNPYLRYNHADAEFQERLQGDTSFGGNLGRAVFQAKKRLLEPLGLVEEAAKTAPGKKRPVEQSPQEPDSSAGIGKSGAQPAKKRLNFGQTGDTESVPDPQPIGEPPAAPSGVGSLTMASGGGAPVADNNEGADGVGSSSGNWHCDSQWLGDRVITTSTRTWALPTYNNHLYKQISSASTGASNDNHYFGYSTPWGYFDFNRFHCHFSPRDWQRLINNNWGFRPKRLSFKLFNHPGQGGHAERHQDHRQPHQHIQVFTDSEYQLPYVLGSAHQGCLPPFPADVFMIPQYGYLTLNNGSQAVGRSSFYCLEYFPSQMLRTGNNFQFTYTFEDVPFHSSYAHSQSLDRLMNPLIDQYLYYLSRTQTTGGTANTQTLGFSQGGPNTMANQAKNWLPGPCYRQQRVSTTTGQNNNSNFAWTAGTKYHLNGRNSLGNPGIAMATHKDDKERFFPSNGILIFGKQNAARDNADYSDVMLTSEEEIKTTNPVATEEYGIVADNLQQQNTAPQIGTVNSQGALPGMVWQNRDVYLQGPIWAKIPHTDGNFHPSPLMGGFGLKHPPPQILIKNTPVPADPPTAFNQSKLNSFITQYSTGQVSVEIEWELQKENSKRWNPEIQYTSNYYKSTSVDFAVNTEGVYSEPHPIGTRYLTRPL

SEQ ID NO: 1750 - protein, 737 aa, synthetic construct
  source 1..737: note = Description of Artificial Sequence: Synthetic polypeptide
MAADGYLPDWLEDNLSEGIREWWDLKHGAPKPKANQQKQDDGRGLVLPGYKYLGPFNGLDKGEPVNAADAAALEHDKAYDQQLKAGDNPYLRYNHADAEFQERLQEDTSFGGNLGRAVFQAKKRVLEPFGLVEEGAKTAPGKKRPVEQSPQEPDSSSGIGKTGQQPAKKRLNFGQTGDSESVPDPQPLGEPPATPAAVGPTTMASGGGAPMADNNEGADGVGNASGNWHCDSTWLGDRVITTSTRTWALPTYNNHLYKQISNGTSGGSTNDNTYFGYSTPWGYFDFNRFHCHFSPRDWQRLINNNWGFRPKRLNFKLFNIQVKEVTQNEGTKTIANNLTSTIQVFTDSEYQLPYVLGSAHQGCLPPFPADVFMIPQYGYLTLNNGSQAVGRSSFYCLEYFPSQMLRTGNNFTFSYTFEDVPFHSSYAHSQSLDRLMNPLIDQYLYYLSRTQTTGGTANTQTLGFSQGGPNTMANQAKNWLPGPCYRQQRVSTTTGQNNNSNFAWTAGTKYHLNGRNSLANPGIAMATHKDDKERFFPSNGILIFGKQNAARDNADYSDVMLTSEEEIKTTNPVATEEYGIVADNLQQQNTAPQIGTVNSQGALPGMVWQNRDVYLQGPIWAKIPHTDGNFHPSPLMGGFGLKHPPPQILIKNTPVPADPPTTFNQSKLNSFITQYSTGQVSVEIEWELQKENSKRWNPEIQYTSNYYKSTSVDFAVNTEGVYSDPHPIGTRYLTRPL

SEQ ID NO: 1751 - protein, 737 aa, synthetic construct
  source 1..737: note = Description of Artificial Sequence: Synthetic polypeptide
MAADGYLPDWLEDNLSEGIREWWALKPGAPKPKANQQKQDDGRGLVLPGYKYLGPFNGLDKGEPVNEADAAALEHDKAYDQQLKAGDNPYLRYNHADAEFQERLQEDTSFGGNLGRAVFQAKKRVLEPLGLVEEGAKTAPGKKRPVEPSPQRSPDSSTGIGKKGQQPARKRLNFGQTGDSESVPDPQPLGEPPAAPSGVGPNTMASGGGAPMADNNEGADGVGNSSGNWHCDSTWMGDRVITTSTRTWALPTYNNHLYKQISSASTGASNDNHYFGYSTPWGYFDFNRFHCHFSPRDWQRLINNNWGFRPKRLNFKLFNIQVKEVTQNEGTKTIANNLTSTIQVFTDSEYQLPYVLGSAHQGCLPPFPADVFMIPQYGYLTLNNGSQAVGRSSFYCLEYFPSQMLRTGNNFQFTYTFEDVPFHSSYAHSQSLDRLMNPLIDQYLYYLSRTQTTGGTANTQTLGFSQGGPNTMANQAKNWLPGPCYRQQRVSTTTGQNNNSNFAWTAGTKYHLNGRNSLANPGIAMATHKDDKERFFPSNGILIFGKQNAARDNADYSDVMLTSEEEIKTTNPVATEEYGIVADNLQQQNTAPQIGTVNSQGALPGMVWQNRDVYLQGPIWAKIPHTDGNFHPSPLMGGFGLKHPPPQILIKNTPVPADPPTTFNQSKLNSFITQYSTGQVSVEIEWELQKENSKRWNPEIQYTSNYYKSTSVDFAVNTEGVYSEPHPIGTRYLTRPL

SEQ ID NO: 1752 - protein, 736 aa, synthetic construct
  source 1..736: note = Description of Artificial Sequence: Synthetic polypeptide
  VARIANT 226: note = misc_feature - Xaa can be any naturally occurring amino acid
MAADGYLPDWLEDTLSEGIRQWWKLKPGPPPPKPAERHKDDSRGLVLPGYKYLGPFNGLDKGEPVNEADAAALEHDKAYDRQLDSGDNPYLKYNHADAEFQERLKEDTSFGGNLGRAVFQAKKRVLEPLGLVEEPVKTAPGKKRPVEQSPQEPDSSSGIGKKGQQPAKKRLNFGQTGDSESVPDPQPLGEPPATPAAVGPTTMASGGGAPMADNNEGADGVGNASXNWHCDSTWLGDRVITTSTRTWALPPITTTSTSKSPVLQRGRSNDNHYFGYSTPWGYFDFNRFHCHFSPRDWQRLINNNWGFRPKRLNFKLFNIQVKEVTDNNGVKTIANNLTSTVQVFTDSDYQLPYVLGSAHQGCLPPFPADVFMIPQYGYLTLNNGSQAVGRSSFYCLEYFPSQMLRTGNNFQFTYTFEDVPFHSSYAHSQSLDRLMNPLIDQYLYYLSRTQTTGGTANTQTLGFSQGGPNTMANQAKNWLPGPCYRQQRVSTTTGQNNNSNFAWTAGTKYHLNGRNSLANPGIAMATHKDDKERFFPSNGILIFGKQNAARDNADYSDVMLTSEEEIKTTNPVATEEYGIVADNLQQQNTAPQIGTVNSQGALPGMVWQNRDVYLQGPIWAKIPHTDGNFHPSPLMGGFGLKHPPPQILIKNTPVPADPPTTFNQSKLNSFITQYSTGQVSVEIEWELQKENSKRWNPEIQYTSNYYKSTNVDFAVNTEGVYSEPHPIGTRYLTRPL

SEQ ID NO: 1753 - protein, 736 aa, synthetic construct
  source 1..736: note = Description of Artificial Sequence: Synthetic polypeptide
  VARIANT 239: note = misc_feature - Xaa can be any naturally occurring amino acid
MAADGYLPDWLEDNLSEGIREWWDLKPGAPKPKANQQKQDDGRGLVLPGYKYLGPFNGLDKGEPVNAADAAALEHDKAYDQQLQAGDNPYLRYNHADAEFQERLQGDTSFGGNLGRAVFQAKKRVLEPLGLVEEAAKTAPGKKRPVEQSPQEPDSSAGIGKSGAQPAKKRLNFGQTGDTESVPDPQPIGEPPAAPSGVGPNTMAAGGGAPMADNNEGADGVGSSSGNWHCDSTWLGDRXITTSTRTWALPTYNNHLYKQISSASTGASNDNHYFGYSTPWGYFDFNRFHCHFSPRDWQRLINNNWGFRPKRLNFKLFNIQVKEVTDNNGVKTIANNLTSTVQVFTDSEYQLPYVLGSAHQGCLPPFPADVFMIPQYGYLTLNNGSQAVGRSSFYCLEYFPSQMLRTGNNFTFSYTFEDVPFHSSYAHSQSLDRLMNPLIDQYLYYLSRTQTTGGTANTQTLGFSQGGPNTMANQAKNWLPGPCYRQQRVSTTTGQNNNSNFAWTAGTKYHLNGRNSLANPGIAMATHKDDKERFFPSNGILIFGKQNAARDNADYSDVMLTSEEEIKTTNPVATEEYGIVADNFQQQNTAPQIGTVNSQGALPGMVWQNRDVYLQGPIWAKIPHTDGNFHPSPLMGGFGLKHPPPQILIKNTPVPADPPTTFNQSKLNSFITQYSTGQVSVEIEWELQKENSKRWNPEIQYTSNYYKSTSVDFAVNTEGVYSEPHPIGTRYLTRPL

SEQ ID NO: 1754 - protein, 736 aa, synthetic construct
  source 1..736: note = Description of Artificial Sequence: Synthetic polypeptide
MAADGYLPDWLEDNLSEGIREWWALKPGAPKPKANQQKQDDGRGLVLPGYKYLGPFNGLDKGEPVNEADAAALEHDKAYDQQLKAGDNPYLKYNHADAEFQERLQEDTSFGGNLGRAVFQAKKRLLEPLGLVEEAAKTAPGKKRPVEQSPQEPDSSAGIGKSGAQPAKKRLNFGQTGDTESVPDPQPLGEPPATPAAVGPTTMASGGGAPMADNNEGADGVGNASGNWHCDSTWLGDRVITTSTRTWALPTYNNHLYKQISSASTGASNDNHYFGYSTPWGYFDFNRFHCHFSPRDWQRLINNNWGFRPKRLSFKLFNIQVKEVTQNEGTKTIANNLTSTIQVFTDSEYQLPYVLGSAHQGCLPPFPADVFMIPQYGYLTLNNGSQAVGRSSFYCLEYFPSQMLRTGNNFQFTYTFEDVPFHSSYAHSQSLDRLMNPLIDQYLYYLSRTQTTGGTANTQTLGFSQGGPNTMANQAKNWLPGPCYRQQRVSTTTGQNNNSNFAWTAGTKYHLNGRNSLANPGIAMATHKDDKERFFPSNGILIFGKQNAARDNADYSDVMLTSEEEIKTTNPVATEEYGIVADNLQQQNTAPQIGTVNSQGALPGMVWQNRDVYLQGPIWAKIPHTDGNFHPSPLMGGFGLKHPPPQILIKNTPVPADPPTTFNQSKLNSFITQYSTGQVSVEIEWELQKENSKRWNPEIQYTSNYYKSTSVDFAVNTEGVYSEPHPIGTRYLTRPL

SEQ ID NO: 1755 - protein, 736 aa, synthetic construct
  source 1..736: note = Description of Artificial Sequence: Synthetic polypeptide
MAADGYLPDWLEDTLSEGIRQWWKLKPGPPPPKPAERHKDDSRGLVLPGYKYLGPFNGLDKGEPVNEADAAALEHDKAYDQQLQAGDNPYLRYNHADAEFQERLQGDTSFGGNLGRAVFQAKKRLLEPLGLVEEAAKTAPGKKRPVEQSPQEPDSSAGIGKSGAQPAKKRLNFGQTGDTESVPDPQPIGEPPAAPSGVGSLTMASGGGAPVADNNEGADGVGSSSGNWHCDSQWLGDRVITTSTRTWALPTYNNHLYKQISSASTGASNDNHYFGYSTPWGYFDFNRFHCHFSPRDWQRLINNNWGFRPKRLSFKLFNIQVKEVTQNEGTKTIANNLTSTIQVFTDSEYQLPYVLGSAHQGCLPPFPADVFMIPQYGYLTLNNGSQAVGRSSFYCLEYFPSQMLRTGNNFQFTYTFEDVPFHSSYAHSQSLDRLMNPLIDQYLYYLSRTQTTGGTANTQTLGFSQGGPNTMANQAKNWLPGPCYRQQRVSTTTGQNNNSNFAWTAGTKYHLNGRNSLANPGIAMATHKDDKERFFPSNGILIFGKQNAARDNADYSDVMLTSEEEIKTTNPVATEEYGIVADNLQQQNTAPQIGTVNSQGALPGMVWQNRDVYLQGPIWAKIPHTDGNFHPSPLMGGFGLKHPPPQILIKNTPVPADPPTTFNQSKLNSFITQYSTGQVSVEIEWELQKENSKRWNPEIQYTSNYYKSTSVDFAVNTEGVYSEPHPIGTRYLTRPL

SEQ ID NO: 1756 - protein, 738 aa, synthetic construct
  source 1..738: note = Description of Artificial Sequence: Synthetic polypeptide
MAADGYLPDWLEDNLSEGIRQWWKLKPGPPPPKPAERHKDDSRGLVLPGYKYLGPFNGLDKGEPVNAADAAALEHDKAYDQQLKAGDNPYLRYNHADAEFQERLQEDTSFGGNLGRAVFQAKKRVLEPLGLVEEGAKTAPGKKRPVEPSPQRSPDSSTGIGKKGQQPAKKRLNFGQTGDSESVPDPQPLGEPPATPAAVGPTTMASGGGAPMADNNEGADGVGNASGNWHCDSTWLGDRVITTSTRTWALPTYNNHLYKQISNGTSGGSTNDNTYFGCVTPWGYFDFNKFHCHFSPDDWQRLINNGWGFRTKRLNFKLFSMKVKKGTDNTGIKTIANNLTNTVHVFADSEYQLPYVLGSAHQGCLPPFPADVFMIPQYGYLTLNNGSQAVGRSSFYCLEYFPSQMLRTGNNFTFSYTFEDVPFHSSYAHSQSLDRLMNPLIDQYLYYLSRTQTTGGTANTQTLGFSQGGPNTMANQAKNWLPGPCYRQQRVSTTTGQNNNSNFAWTAGTKYHLNGRNSLANPGIAMATHKDDKERFFPSNGILIFGKQNAARDNADYSDVMLTSEEEIKTTNPVATEEYGIVADNLQQQNTAPQIGTVNSQGALPGMVWQNRDVYLQGPIWAKIPHTDGNFHPSPLMGGFGLKHPPPQILIKNTPVPADPPTTFNQSKLNSFITQYSTGQVSVEIEWELQKENSKRWNPEIQYTSNYYKSTSVDFAVNTEGVYSEPHPIGTRYLTRPL

SEQ ID NO: 1757 - protein, 737 aa, synthetic construct
  source 1..737: note = Description of Artificial Sequence: Synthetic polypeptide
MAADGYLPDWLEDTLSEGIRQWWKLKPGPPPPKPAERHKDDSRGLVLPGYKYLGPFNGLDKGEPVNAADAAALEHDKAYDQQLKAGDNPYLRYNHADAEFQERLQEDTSFGGNLGRAVFQAKKRVLEPLGLVEEGAKTAPGKKRPVEPSPQRSPDSSTGIGKKGQQPAKKRLNFGQTGDSESVPDPQPIGEPPAGPSGLGSGTMAAGGGAPMADNNEGADGVGSSSGNWHCDSTWLGDRVITTSTRTWALPTYNNHLYKQISSASTGASNDNHYFGYSTPWGYFDFNRFHCHFSPRDWQRLINNNWGFRPKRLNFKLFNIQVKEVTDNNGVKTIANNLTSTVQVFTDSEYQLPYVLGSAHQGCLPPFPADVFMIPQYGYLTLNNGSQAVGRSSFYCLEYFPSQMLRTGNNFTFSYTFEDVPFHSSYAHSQSLDRLMNPLIDQYLYYLSRTQTTGGTANTQTLGFSQGGPNTMANQAKNWLPGPCYRQQRVSTTTGQNNNSNFAWTAGTKYHLNGRNSLANPGIAMATHKDDKERFFPSNGILIFGKQNAARDNADYSDVMLTSEEEIKTTNPVATEEYGIVADNLQQQNTAPQIGTVNSQGALPGMVWQNRDVYLQGPIWAKILHTDGNFHPSPLMGGFGMKHPPPPILIKNTPVPADPPTTFNQSKLNSFITQYSTGQVSVEIEWELPKENSKRWNPEIQYTSNYYKSTSVDFAVNTEGVYYEPHPIGTRYLTPPL

SEQ ID NO: 1758 - protein, 737 aa, synthetic construct
  source 1..737: note = Description of Artificial Sequence: Synthetic polypeptide
MAADGYLPDWLEDNLSEGIREWWALKPGAPKPKANQQKQDDGRGLVLPGYKYLGPFNGLDKGEPVNAADAAALEHDKAYDQQLKAGDNPYLRYNHADAEFQERLQEDTSFGGNLGRAVFQAKKRVLEPLGLVEEGAKTAPGKKRPVEPSPQRSPDSSTGIGKKGQQPARKRLNFGQTGDSESVPDPQPLGEPPAAPSGVAPNTMAAGGGAPMADNNEGADGVGNASGNWHCDSTWLGDRVITTSTRTWALPTYNNHLYKQISSASTGASNDNHYFGYSTPWGYFDFNRFHCHFSPRDWQRLITTIGGFRPKRLNFKLFNIQVKEVTDNNGVKTIANNLTSTVQVFTDSEYQLPYVLGSAHQGCLPPFPADVFMIPQYGYLTLNNGSQAVGRSSFYCLEYFPSQMLRTGNNFTFSYTFEDVPFHSSYAHSQSLDRLMNPLIDQYLYYLSRTQTTGGTANTQTLGFSQGGPNTMANQAKNWLPGPCYRQQRVSTTTGQNNNSNFAWTAGTKYHLNGRNSLANPGIAMATHKDDKERFFPSNGILIFGKQNAARDNADYSDVMLTSEEEIKTTNPVATEEYGIVADNLQQQNTAPQIGTVNSQGALPGMVWQNRDVYLQGPIWAKIPHTDGNFHPSPLMGGFGLKHPPPQILIKNTPVPADPPTTFNQSKLNSFITQYSTGQVSVEIEWELQKENSKRWNPEIQYTSNYYKSTSVDFAVNTEGVYSEPHPIGTRYLTRPL

SEQ ID NO: 1759 - protein, 736 aa, synthetic construct
  source 1..736: note = Description of Artificial Sequence: Synthetic polypeptide
MAADGYLPDWLEDTLSEGIRQWWKLKPGPPPPKPAERHKDDGRGLVLPGYKYLGPFNGLDKGEPVNAADAAALEHDKAYDQQLKAGDNPYLRYNHADAEFQERLQEDTSFGGNLGRAVFQAKKRVLEPLGLVEEPVKTAPGKKRPVEQSPQEPDSSSGIGKKGQQPAKKRLNFGQTGDSESVPDPQPLGEPPATPAAVGPTTMASGGGAPMADNNEGADGVGNASGNWHCDSTWMGDRVITTSTRTWALPTYNNHLYKQISSASTGASNDNHYFGYSTPWGYFDFNRFHCHFSPRDWQRLINNNWGFRPKRLNFKLFNIQVKEVTQNEGTKTIANNLTSTIQVFTDSEYQLPYVLGSAHQGCLPPFPADVFMIPQYGYLTLNNGSQAVGRSSFYCLEYFPSQMLRTGNNFQFTYTFEDVPFHSSYAHSQSLDRLMNPLIDQYLYYLSRTQTTGGTANTQTLGFSQGGPNTMANHAKNWLPGPCYRQQRVSTTTGQNNNSNFAWTAGTKYHLNGRNSLANPGIAMATHKDDKERFFPSNGILIFGKQNAARDNADYSDVMLTSEEEIKTTNPVATEEYGIVADNLQQQNTAPQIGTVNSQGALPGMVWQNRDVYLQGPIWAKIPHTDGNFHPSPLMGGFGLKHPPPQILIKNTPVPADPPTTFNQSKLNSFITQYSTGQVSVEIEWELQKENSKRWNPEIQYTSNYYKSTSVDFAVNTEGVYSEPHPIGTRYLTRPL

SEQ ID NO: 1760 - protein, 737 aa, synthetic construct
  source 1..737: note = Description of Artificial Sequence: Synthetic polypeptide
MAADGYLPDWLEDNLSQGIREWWDLKPGAPKPKANQQKQDDGRGLVLPGYKYLGPFNGLDKGEPVNAADAAALEHDKAYDQQLKAGDNPYLRYNHADAEFQERLQEDTSFGGNLGRAVFQAKKRVLEPLGLVEEGAKTAPGKKRPVEPSPQRSPDSSTGIGKKGQQPARKRLNFGQTGDSESVPDPQPLGEPPAAPAAVGPTTMASGGGAPMADNNEGADGVGSSSGNWHCDSQWLGDRVITTSTRTWALPTYNNHLYKQISSASTGASNDNHYFGYSTPWGYFDFNRFHCHFSPRDWQRLINNNWGFRPKRLSFKLFNIQVKEVTQNEGTKTIANNLTSTIQVFTDSEYQLPYVLGSAHQGCLPPFPADVFMIPQYGYLTLNNGSQAVGRSSFYCLEYFPSQMLRTGNNFQFTYTFEDVPFHSSYAHSQSLDRLMNPLIDQYLYYLSRTQTTGGTTNAQTLGFSQGGPNTMANQAKNWLPGPCYRQQRVSTTTGQNNNSNFAWTAGTKYHLNGRNSLANPGIAMATHKDDKERFFPSNGILIFGKQNAARDNADYSDVMLTSEEEIKTTNPVATEEYGIVADNLQQQNTAPQIGTVNSQGALPGMVWQNRDVYLQGPIWAKIPHTDGNFHPSPLMGGFGLKHPPPQILIKNTPVPADPPTTFNQSKLNSFITQYSTGQVSVEIEWELQKENSKRWNPEIQYTSNYYKSTNVDFAVNTEGVYSEPHPIGTRYLTRPL

SEQ ID NO: 1761 - protein, 736 aa, synthetic construct
  source 1..736: note = Description of Artificial Sequence: Synthetic polypeptide
MAADGYLPDWLEDNLSEGIREWWDLKPGAPKPKANQQKQDDGRGLVLPGYKYLGPFNGLDKGEPVNAADAAALEHDKAYDQQLKAGDNPYLRYNHADAEFQERLQEDTSFGGNLGRAVFQAKKRVLEPFGLVEEGAKTAPGKKRPVEQSPQEPDSSSGIGKTGQQPAKKRLNFGQTGDTESVPDPQPIGEPPAAPSGVGPNTMAAGGGAPMADNNEGADGVGSSSGNWHCDSTWMGDRVITTSTRTWALPTYNNHLYKQISSASTGASNDNHYFGYSTPWGYFDFNRFHCHFSPRDWQRLINNNWGFRPKRLNFKLFNIQVKEVTQNEGTKTIANNLTSTIQVFTDSEYQLPYVLGSAHQGCLPPFPADVFMIPQYGYLTLNNGSQAVGRSSFYCLEYFPSQMLRTGNNFQFTYTFEDVPFHSSYAHSQSLDRLMNPLIDQYLYYLSRTQTTGGTANTQTLGFSQGGPNTMANQAKNWLPGPCYRQQRVSTTTGQNNNSNFAWTAGTKYHLNGRNSLANPGIAMATHKDDKERFFPSNGILIFGKQNAARDNADYSDVMLTSEEEIKTTNPVATEEYGIVADNLQQQNTAPQIGTVNSQGALPGMVWQNRDVYLQGPIWAKIPHTDGNFHPSPLMGGFGLKHPPPQILIKNTPVPADPPTTFNQSKLNSFITQYSTGQVSVEIEWELQKENSKRWNPEIQYTSNYYKSTNVDFAVNTEGVYSEPHPIGTRYFTRPL

SEQ ID NO: 1762 - protein, 736 aa, synthetic construct
  source 1..736: note = Description of Artificial Sequence: Synthetic polypeptide
MAADGYLPDWLEDNLSEGIREWWDLKPGAPKPKANQQKQDDGRGLVLPGYKYLGPFNGLDKGEPVNAADAAALEHDKAYDQQLKAGDNPYLRYNHADAEFQERLQEDTSFGGNLGRAVFQAKKRVLEPLGLVEEGAKTAPGKKRPVEQSPQEPDSSSGIGKTGQQPAKKRLNFGQTGDSESVPDPQPLGEPPATPAAVGPTTMASGGGAPMADNNEGADGVGNSSGNWHCDSTWMGDRVITTSTRTWALPTYNNHLYKQISSASTGASNDNHYFGYSTPWGYFDFNRFHCHFSPRDWQRLINNNWGFRPKRLNFKLFNIQVKEVTDNNGVKTIANNLTSTVQVFTDSEYQLPYVLGSAHQGCLPPFPADVFMIPQYGYLTLNNGSQAVGRSSFYCLEYFPSQMLRTGNNFQFTYTFEDVPFHSSYAHSQSLDRLMNPLIDQYLYYLSRTQTTGGTANTQTLGFSQGGPNTMANQAKNWLPGPCYRQQRVSTTTGQNNNSNFAWTAGTKYHLNGRNSLANPGIAMATHKDDKERFFPSNGILIFGKQNAARDNADYSDVMLTSEEEIKTTNPVATEEYGIVADNLQQQNTAPQIGTVNSQGALPGMVWQNRDVYLQGPIWAKIPHTDGNFHPSPLMGGFGLKHPPPQILIKNTPVPADPPTTFNQSKLNSFITQYSTGQVSVEIEWELQKENSKRWNPEIQYTSNYYKSTNVDFAVNTEGVYSEPHPIGTRYLTRPL

SEQ ID NO: 1763 - protein, 736 aa, synthetic construct
  source 1..736: note = Description of Artificial Sequence: Synthetic polypeptide
MAADGYLPDWLEDNLSEGIREWWDLKPGAPKPKANQQKQDDGRGLVLPGYKYLGPFNGLDKGEPVNAADAAALEHDKAYDQQLKAGDNPYLRYNHADAEFQERLQEDTSFGGNLGRAVFQAKKRVLEPLGLVEEGAKTAPGKKRPVEQSPQEPDSSSGIGKTGQQPAKKRLNFGQTGDSESVPDPQPLGEPPATPAAVGPTTMASGGGAPMADNNEGADGVGNASGNWHCDSTWLGDRVITTSTRTWALPTYNNHLYKQISSASTGASNDNHYFGYSTPWGYFDFNRFHCHFSPRDWQRLINNNWGFRPKRLNFKLFNIQVKEVTQNEGTKTIANNLTSTIQVFTDSEYQLPYVLGSAHQGCLPPFPADVFMIPQYGYLTLNNGSQAVGRSSFYCLEYFPSQMLRTGNNFEFSYQFEDVPFHSSYAHSQSLDRLMNPLIDQYLYYLSRTQTTGGTANTQTLGFSQGGPNTMANQAKNWLPGPCYRQQRVSTTTGQNNNSNFAWTAGTKYHMNGRNSLVNPGIAMATHKDDKERFFPSNGILIFGKQNVARDNADYSDVMLTSEEEIKTTNPVATEEYGIVADNLQQQNTAPQIGTVNSQGALPGMVWQNRDVYLQGPIWAKIPHTDGNFHPSPLMGGFGLKHPPPQILIKNTPVPADPPTTFNQSKLNSFITQYSTGQVSVEIEWELQKENSKRWNPEIQYTSNYYKSTSVDFAVNTEGVYSEPHPIGTRYLTRPL

SEQ ID NO: 1764 - DNA, 2217 bp, synthetic construct
  source 1..2217: mol_type = other DNA; note = Description of Artificial Sequence: Synthetic polynucleotide
atggctgccgatggttatcttccagattggctcgaggacaacctctctgagggcattcgcgagtggtgggcgctgaaacctggagccccgaagcccaaagccaaccagcaaaagcaggacgacggccggggtctggtgcttcctggctacaagtacctcggacccttcaacggactcgacaagggggagcccgtcaacgcggcggacgcagcggccctcgagcacgacaaggcctacgaccagcagctgcaggcgggtgacaatccgtacctgcggtataaccacgccgacgccgagtttcaggagcgtctgcaagaagatacgtcttttgggggcaacctcgggcgagcagtcttccaggccaagaagcgggttctcgaacctctcggtctggttgaggaaggcgctaagacggctcctggaaagaagagaccggtagagccatcaccccagcgttctccagactcctctacgggcatcggcaagaaaggccaacagcccgccagaaaaagactcaattttggtcagactggcgactcagagtcagttccagaccctcaacctctcggagaacctccagcagcgccctctggtgtgggacctaatacaatggctgcaggcggtggcgcaccaatggcagacaataacgaaggcgccgacggagtgggtagttcctcgggaaattggcattgcgattccacatggctgggcgacagagtcatcaccaccagcacccgaacctgggccctgcccacctacaacaaccacctctacaagcaaatctccaacgggacatcgggaggagccaccaacgacaacacctacttcggctacagcaccccctgggggtattttgactttaacagattccactgccacttttcaccacgtgactggcagcgactcatcaacaacaactggggattccggcccaagagactcagcttcaagctcttcaacatccaggtcaaggaggtcacgcagaatgaaggcaccaagaccatcgccaataacctcaccagcaccatccaggtgtttacggactcggagtaccagctgccgtacgttctcggctctgcccaccagggctgcctgcctccgttcccggcggacgtgttcatgattccccagtacggctacctaacactcaacaacggtagtcaggccgtgggacgctcctccttctactgcctggaatactttccttcgcagatgctgagaaccggcaacaacttccagtttacttacaccttcgaggacgtgcctttccacagcagctacgcccacagccagagcttggaccggctgatgaatcctctgattgaccagtacctgtactacttgtctcggactcaaacaacaggaggcacggcaaatacgcagactctgggcttcagccaaggtgggcctaatacaatggccaatcaggcaaagaactggctgccaggaccctgttaccgccaacaacgcgtctcaacgacaaccgggcaaaacaacaatagcaactttgcctggactgctgggaccaaataccatctgaatggaagaaattcattggctaatcctggcatcgctatggcaacacacaaagacgacgaggagcgtttttttcccagtaacgggatcctgatttttggcaaacaaaatgctgccagagacaatgcggattacagcgatgtcatgctcaccagcgaggaagaaatcaaaaccactaaccctgtggctacagaggaatacggtatcgtggcagataacttgcagcagcaaaacacggctcctcaaattggaactgtcaacagccagggggccttacccggtatggtttggcagaaccgggacgtgtacctgcagggtcccatctgggccaagattcctcacacggacggcaacttccacccgtctccgctgatgggcggctttggcctgaaacatcctccgcctcagatcctgatcaagaacacgcctgtacctgcggatcctccgaccaccttcaaccagtcaaagctgaactctttcatcacgcaatacagcaccggacaggtcagcgtggaaattgaatgggagctgcagaaggaaaacagcaagcgctggaaccccgagatccagtacacctccaactactacaaatctacaagtgtggactttgctgttaatacagaaggcgtgtactctgaaccccgccccattggcacccgttacctcacccgtaatctgtaa

SEQ ID NO: 1765 - protein, 738 aa, synthetic construct; identical to SEQ ID NO: 105
  source 1..738: note = Description of Artificial Sequence: Synthetic polypeptide

SEQ ID NO: 1766 - protein, 735 aa, synthetic construct
  source 1..735: note = Description of Artificial Sequence: Synthetic polypeptide
MAADGYLPDWLEDNLSEGVREWWALQPGAPKPKANQQHQDNARGLVLPGYKYLGPGNGLDKGEPVNAADAAALEHDKAYDQQLKAGDNPYLKYNHADAEFQQRLQGDTSFGGNLGRAVFQAKKRVLEPLGLVEQAGETAPGKKRPLIESPQQPDSSTGIGKKGKQPAKKKLVFEDETGAGDGPPEGSTSGAMSDDSEMRAAAGGAAVEGGQGADGVGNASGDWHCDSTWSEGHVTTTSTRTWVLPTYNNHLYKRLGESLQSNTYNGFSTPWGYFDFNRFHCHFSPRDWQRLINNNWGMRPKAMRVKIFNIQVKEVTTSNGETTVANNLTSTVQIFADSSYELPYVMDAGQEGSLPPFPNDVFMVPQYGYCGLVTGNTSQQQTDRNAFYCLEYFPSQMLRTGNNFEITYSFEKVPFHSMYAHSQSLDRLMNPLIDQYLWGLQSTTTGTTLNAGTATTNFTKLRPTNFSNFKKNWLPGPSIKQQGFSKTANQNYKIPATGSDSLIKYETHSTLDGRWSALTPGPPMATAGPADSKFSNSQLIFAGPKQNGNTATVPGTLIFTSEEELAATNATDTDMWGNLPGGDQSNSNLPTVDRLTALGAVPGMVWQNRDIYYQGPIWAKIPHTDGHFHPSPLIGGFGLKHPPPQIFIKNTPVPANPATTFSSTPVNSFITQYSTGQVSVQIDWEIQKERSKRWNPEVQFTSNYGQQNSLLWAPDAAGKYTEPRAIGTRYLTHHL

SEQ ID NO: 1767 - protein, 735 aa, synthetic construct
  source 1..735: note = Description of Artificial Sequence: Synthetic polypeptide
MAADGYLPDWLEDNLSEGVREWWALQPGAPKPKANQQHQDNARGLVLPGYKYLGPGNGLDKGEPVNAADAAALEHDKAYDQQLKAGDNPYLKYNHADAEFQQRLQGDTSFGGNLGRAVFQAKKRVLEPLGLVEQAGETAPGKKRPLIESPQQPDSSTGIGKKGKQPAKKKLVFEDETGAGDGPPEGSTSGAMSDDSEMRAAAGGAAVEGGQGADGVGNASGDWHCDSTWSEGHVTTTSTRTWVLPTYNNHLYKRLGESLQSNTYNGFSTPWGYFDFNRFHCHFSPRDWQRLINNNWGMRPKAMRVKIFNIQVKEVTTSNGETTVANNLTSTVQIFADSSYELPYVMDAGQEGSLPPFPNDVFMVPQYGYCGLVTGNTSQQQTDRNAFYCLEYFPSQMLRTGNNFEITYSFEKVPFHSMYAHSQSLDRLMNPLIDQYLWGLQSTTTGTTLNAGTATTNFTKLRPTNFSNFKKNWLPGPSIKQQGFSKTANQNYLIPATGSDSLIRYETHSTLDGRWSALTPGPPMATAGPADSKFSNSQLIFAGPKQNGNTATVPGTLIFTSEEELAATNATDTDMWGNLPFRDLSSSNLPTVDRSTPLGAVPGMVWQNRDIYYQGPIWAKIPHTDGHFHPSPLIGGFGLKHPPPQIFIKNTPVPANPATTFSSTPVNSFITQYSTGQVSVQIDWEIQKERSKRWNPEVQFTSNYGQQNSLLWAPDAAGKYTEPRAIGTRYLTHHL

SEQ ID NO: 1768 - protein, 735 aa, synthetic construct
  source 1..735: note = Description of Artificial Sequence: Synthetic polypeptide
MAADGYLPDWLEDNLSEGVREWWALQPGAPKPKANQQHQDNARGLVLPGYKYLGPGNGLDKGEPVNAADAAALEHDKAYDQQLKAGDNPYLKYNHADAEFQQRLQGDTSFGGNLGRAVFQAKKRVLEPLGLVEQAGETAPGKKRPLIESPQQPDSSTGIGKKGKQPAKKKLVFEDETGAGDGPPEGSTSGAMSDDSEMRAAAGGAAVEGGQGADGVGNASGDWHCDSTWSEGHVTTTSTRTWVLPTYNNHLYKRLGESLQSNTYNGFSTPWGYFDFNRFHCHFSPRDWQRLINNNWGMRPKAMRVKIFNIQVKEVTTSNGETTVANNLTSTVQIFADSSYELPYVMDAGQEGSLPPFPNDVFMVPQYGYCGLVTGNTSQQQTDRNAFYCLEYFPSQMLRTGNNFEITYSFEKVPFHSMYAHSQSLDRLMNPLIDQYLWGLQSTTTGTTLNAGTATTNFTKLRPTNFSNFKKNWLPGPSIKQQGFSKTANQNYYIPATGSDSLILYETHSTLDGRWSALTPGPPMATAGPADSKFSNSQLIFAGPKQNGNTATVPGTLIFTSEEELAATNATDTDMWGNLPGGDQSNSNLPTVDRLTALGAVPGMVWQNRDIYYQGPIWAKIPHTDGHFHPSPLIGGFGLKHPPPQIFIKNTPVPANPATTFSSTPVNSFITQYSTGQVSVQIDWEIQKERSKRWNPEVQFTSNYGQQNSLLWAPDAAGKYTEPRAIGTRYLTHHL

SEQ ID NO: 1769 - protein, 735 aa, synthetic construct
  source 1..735: note = Description of Artificial Sequence: Synthetic polypeptide
MAADGYLPDWLEDNLSEGVREWWALQPGAPKPKANQQHQDNARGLVLPGYKYLGPGNGLDKGEPVNAADAAALEHDKAYDQQLKAGDNPYLKYNHADAEFQQRLQGDTSFGGNLGRAVFQAKKRVLEPLGLVEQAGETAPGKKRPLIESPQQPDSSTGIGKKGKQPAKKKLVFEDETGAGDGPPEGSTSGAMSDDSEMRAAAGGAAVEGGQGADGVGNASGDWHCDSTWSEGHVTTTSTRTWVLPTYNNHLYKRLGESLQSNTYNGFSTPWGYFDFNRFHCHFSPRDWQRLINNNWGMRPKAMRVKIFNIQVKEVTTSNGETTVANNLTSTVQIFADSSYELPYVMDAGQEGSLPPFPNDVFMVPQYGYCGLVTGNTSQQQTDRNAFYCLEYFPSQMLRTGNNFEITYSFEKVPFHSMYAHSQSLDRLMNPLIDQYLWGLQSTTTGTTLNAGTATTNFTKLRPTNFSNFKKNWLPGPSIKQQGFSKTANQNYGIPATGSDSLIKYETHSTLDGRWSALTPGPPIATAGPADSKFSNSQLIFAGPKQNGNTATVPGTLIFTSEEELAATNATDTDMWGNLPLYDASSSNLPTVDRLTLLGAVPGMVWQNRDIYYQGPIWAKIPHTDGHFHPSPLIGGFGLKHPPPQIFIKNTPVPANPATTFSSTPVNSFITQYSTGQVSVQIDWEIQKERSKRWNPEVQFTSNYGQQNSLLWAPDAAGKYTEPRAIGTRYLTHHL

SEQ ID NO: 1770 - protein, 735 aa, synthetic construct
  source 1..735: note = Description of Artificial Sequence: Synthetic polypeptide
MAADGYLPDWLEDNLSEGVREWWALQPGAPKPKANQQHQDNARGLVLPGYKYLGPGNGLDKGEPVNAADAAALEHDKAYDQQLKAGDNPYLKYNHADAEFQQRLQGDTSFGGNLGRAVFQAKKRVLEPLGLVEQAGETAPGKKRPLIESPQQPDSSTGIGKKGKQPAKKKLVFEDETGAGDGPPEGSTSGAMSDDSEMRAAAGGAAVEGGQGADGVGNASGDWHCDSTWSEGHVTTTSTRTWVLPTYNNHLYKRLGESLQSNTYNGFSTPWGYFDFNRFHCHFSPRDWQRLINNNWGMRPKAMRVKIFNIQVKEVTTSNGETTVANNLTSTVQIFADSSYELPYVMDAGQEGSLPPFPNDVFMVPQYGYCGLVTGNTSQQQTDRNAFYCLEYFPSQMLRTGNNFEITYSFEKVPFHSMYAHSQSLDRLMNPLIDQYLWGLQSTTTGTTLNAGTATTNFTKLRPTNFSNFKKNWLPGPSIKQQGFSKTANQNYTIPATGSDSLITYETHSTLDGRWSALTPGPPGATAGPADSKFSNSQLIFAGPKQNGNTATVPGTLIFTSEEELAATNATDTDMWGNLPRVDTSASNLPTVDRYTNLGAVPGMVWQNRDIYYQGPIWAKIPHTDGHFHPSPLIGGFGLKHPPPQIFIKNTPVPANPATTFSSTPVNSFITQYSTGQVSVQIDWEIQKERSKRWNPEVQFTSNYGQQNSLLWAPDAAGKYTEPRAIGTRYLTHHL

SEQ ID NO: 1771 - protein, 735 aa, synthetic construct
  source 1..735: note = Description of Artificial Sequence: Synthetic polypeptide
MAADGYLPDWLEDNLSEGVREWWALQPGAPKPKANQQHQDNARGLVLPGYKYLGPGNGLDKGEPVNAADAAALEHDKAYDQQLKAGDNPYLKYNHADAEFQQRLQGDTSFGGNLGRAVFQAKKRVLEPLGLVEQAGETAPGKKRPLIESPQQPDSSTGIGKKGKQPAKKKLVFEDETGAGDGPPEGSTSGAMSDDSEMRAAAGGAAVEGGQGADGVGNASGDWHCDSTWSEGHVTTTSTRTWVLPTYNNHLYKRLGESLQSNTYNGFSTPWGYFDFNRFHCHFSPRDWQRLINNNWGMRPKAMRVKIFNIQVKEVTTSNGETTVANNLTSTVQIFADSSYELPYVMDAGQEGSLPPFPNDVFMVPQYGYCGLVTGNTSQQQTDRNAFYCLEYFPSQMLRTGNNFEITYSFEKVPFHSMYAHSQSLDRLMNPLIDQYLWGLQSTTTGTTLNAGTATTNFTKLRPTNFSNFKKNWLPGPSIKQQGFSKTANQNYSIPATGSDSLIKYETHSTLDGRWSALTPGPPFATAGPADSKFSNSQLIFAGPKQNGNTATVPGTLIFTSEEELAATNATDTDMWGNLPDYDSSLSNLPTVDRDTTLGAVPGMVWQNRDIYYQGPIWAKIPHTDGHFHPSPLIGGFGLKHPPPQIFIKNTPVPANPATTFSSTPVNSFITQYSTGQVSVQIDWEIQKERSKRWNPEVQFTSNYGQQNSLLWAPDAAGKYTEPRAIGTRYLTHHL

SEQ ID NO: 1772 - protein, 735 aa, synthetic construct
  source 1..735: note = Description of Artificial Sequence: Synthetic polypeptide
MAADGYLPDWLEDNLSEGVREWWALQPGAPKPKANQQHQDNARGLVLPGYKYLGPGNGLDKGEPVNAADAAALEHDKAYDQQLKAGDNPYLKYNHADAEFQQRLQGDTSFGGNLGRAVFQAKKRVLEPLGLVEQAGETAPGKKRPLIESPQQPDSSTGIGKKGKQPAKKKLVFEDETGAGDGPPEGSTSGAMSDDSEMRAAAGGAAVEGGQGADGVGNASGDWHCDSTWSEGHVTTTSTRTWVLPTYNNHLYKRLGESLQSNTYNGFSTPWGYFDFNRFHCHFSPRDWQRLINNNWGMRPKAMRVKIFNIQVKEVTTSNGETTVANNLTSTVQIFADSSYELPYVMDAGQEGSLPPFPNDVFMVPQYGYCGLVTGNTSQQQTDRNAFYCLEYFPSQMLRTGNNFEITYSFEKVPFHSMYAHSQSLDRLMNPLIDQYLWGLQSTTTGTTLNAGTATTNFTKLRPTNFSNFKKNWLPGPSIKQQGFSKTANQNYSIPATGSDSLIWYETHSTLDGRWSALTPGPPCATAGPADSKFSNSQLIFAGPKQNGNTATVPGTLIFTSEEELAATNATDTDMWGNLPQGDSSLSNLPTVDRMTVLGAVPGMVWQNRDIYYQGPIWAKIPHTDGHFHPSPLIGGFGLKHPPPQIFIKNTPVPANPATTFSSTPVNSFITQYSTGQVSVQIDWEIQKERSKRWNPEVQFTSNYGQQNSLLWAPDAAGKYTEPRAIGTRYLTHHL

SEQ ID NO: 1773 - protein, 735 aa, synthetic construct
  source 1..735: note = Description of Artificial Sequence: Synthetic polypeptide
MAADGYLPDWLEDNLSEGVREWWALQPGAPKPKANQQHQDNARGLVLPGYKYLGPGNGLDKGEPVNAADAAALEHDKAYDQQLKAGDNPYLKYNHADAEFQQRLQGDTSFGGNLGRAVFQAKKRVLEPLGLVEQAGETAPGKKRPLIESPQQPDSSTGIGKKGKQPAKKKLVFEDETGAGDGPPEGSTSGAMSDDSEMRAAAGGAAVEGGQGADGVGNASGDWHCDSTWSEGHVTTTSTRTWVLPTYNNHLYKRLGESLQSNTYNGFSTPWGYFDFNRFHCHFSPRDWQRLINNNWGMRPKAMRVKIFNIQVKEVTTSNGETTVANNLTSTVQIFADSSYELPYVMDAGQEGSLPPFPNDVFMVPQYGYCGLVTGNTSQQQTDRNAFYCLEYFPSQMLRTGNNFEITYSFEKVPFHSMYAHSQSLDRLMNPLIDQYLWGLQSTTTGTTLNAGTATTNFTKLRPTNFSNFKKNWLPGPSIKQQGFSKTANQNYCIPATGSDSLIRYETHSTLDGRWSALTPGPPLATAGPADSKFSNSQLIFAGPKQNGNTATVPGTLIFTSEEELAATNATDTDMWGNLPYKDSSRSNLPTVDRETSLGAVPGMVWQNRDIYYQGPIWAKIPHTDGHFHPSPLIGGFGLKHPPPQIFIKNTPVPANPATTFSSTPVNSFITQYSTGQVSVQIDWEIQKERSKRWNPEVQFTSNYGQQNSLLWAPDAAGKYTEPRAIGTRYLTHHL

SEQ ID NO: 1774 - protein, 735 aa, synthetic construct
  source 1..735: note = Description of Artificial Sequence: Synthetic polypeptide
MAADGYLPDWLEDNLSEGVREWWALQPGAPKPKANQQHQDNARGLVLPGYKYLGPGNGLDKGEPVNAADAAALEHDKAYDQQLKAGDNPYLKYNHADAEFQQRLQGDTSFGGNLGRAVFQAKKRVLEPLGLVEQAGETAPGKKRPLIESPQQPDSSTGIGKKGKQPAKKKLVFEDETGAGDGPPEGSTSGAMSDDSEMRAAAGGAAVEGGQGADGVGNASGDWHCDSTWSEGHVTTTSTRTWVLPTYNNHLYKRLGESLQSNTYNGFSTPWGYFDFNRFHCHFSPRDWQRLINNNWGMRPKAMRVKIFNIQVKEVTTSNGETTVANNLTSTVQIFADSSYELPYVMDAGQEGSLPPFPNDVFMVPQYGYCGLVTGNTSQQQTDRNAFYCLEYFPSQMLRTGNNFEITYSFEKVPFHSMYAHSQSLDRLMNPLIDQYLWGLQSTTTGTTLNAGTATTNFTKLRPTNFSNFKKNWLPGPSIKQQGFSKTANQNYIIPATGSDSLIYYETHSTLDGRWSALTPGPPRATAGPADSKFSNSQLIFAGPKQNGNTATVPGTLIFTSEEELAATNATDTDMWGNLPWIDNSRSNLPTVDRPTSLGAVPGMVWQNKNIYYQGPIWAKIPHTDGHFHPSPLIGGFGLKHPPPQIFIKNTPVPANPATTFTSTPVNSFITQYSTGQVSVQIDWEIQKERSKRWNPEVQFTSNYGQQNSLLWAPDAAGKYTEPRAIGTRYLTHHL

SEQ ID NO: 1775 - protein, 735 aa, synthetic construct
  source 1..735: note = Description of Artificial Sequence: Synthetic polypeptide
MAADGYLPDWLEDNLSEGVREWWALQPGAPKPKANQQHQDNARGLVLPGYKYLGPGNGLDKGEPVNAADAAALEHDKAYDQQLKAGDNPYLKYNHADAEFQQRLQGDTSFGGNLGRAVFQAKKRVLEPLGLVEQAGETAPGKKRPLIESPQQPDSSTGIGKKGKQPAKKKLVFEDETGAGDGPPEGSTSGAMSDDSEMRAAAGGAAVEGGQGADGVGNASGDWHCDSTWSEGHVTTTSTRTWVLPTYNNHLYKRLGESLQSNTYNGFSTPWGYFDFNRFHCHFSPRDWQRLINNNWGMRPKAMRVKIFNIQVKEVTTSNGETTVANNLTSTVQIFADSSYELPYVMDAGQEGSLPPFPNDVFMVPQYGYCGLVTGNTSQQQTDRNAFYCLEYFPSQMLRTGNNFEITYSFEKVPFHSMYAHSQSLDRLMNPLIDQYLWGLQSTTTGTTLNAGTATTNFTKLRPTNFSNFKKNWLPGPSIKQQGFSKTANQNYGIPATGSDSLIIYETHSTLDGRWSALTPGPPRATAGPADSKFSNSQLIFAGPKQNGNTATVPGTLIFTSEEELAATNATDTDMWGNLPGGDQSNSNLPTVDRLTALGAVPGMVWQNRDIYYQGPIWAKIPHTDGHFHPSPLIGGFGLKHPPPQIFIKNTPVPANPATTFSSTPVNSFITQYSTGQVSVQIDWEIQKERSKRWNPEVQFTSNYGQQNSLLWAPDAAGKYTEPRAIGTRYLTHHL

SEQ ID NO: 1776 - protein, 735 aa, synthetic construct
  source 1..735: note = Description of Artificial Sequence: Synthetic polypeptide
MAADGYLPDWLEDNLSEGVREWWALQPGAPKPKANQQHQDNARGLVLPGYKYLGPGNGLDKGEPVNAADAAALEHDKAYDQQLKAGDNPYLKYNHADAEFQQRLQGDTSFGGNLGRAVFQAKKRVLEPLGLVEQAGETAPGKKRPLIESPQQPDSSTGIGKKGKQPAKKKLVFEDETGAGDGPPEGSTSGAMSDDSEMRAAAGGAAVEGGQGADGVGNASGDWHCDSTWSEGHVTTTSTRTWVLPTYNNHLYKRLGESLQSNTYNGFSTPWGYFDFNRFHCHFSPRDWQRLINNNWGMRPKAMRVKIFNIQVKEVTTSNGETTVANNLTSTVQIFADSSYELPYVMDAGQEGSLPPFPNDVFMVPQYGYCGLVTGNTSQQQTDRNAFYCLEYFPSQMLRTGNNFEITYSFEKVPFHSMYAHSQSLDRLMNPLIDQYLWGLQSTTTGTTLNAGTATTNFTKLRPTNFSNFKKNWLPGPSIKQQGFSKTANQNYVIPATESDSLIYYETHSTLDGRWSALTPGPPYATAGPADSKFSNSQLIFAGPKQNGNTATVPGTLIFTSEEELAATNATDTDMWGNLPPRDDSTSNLPTVDRKTYLGAVPGMVWQNRDIYYQGPIWAKIPHTDGHFHPSPLIGGFGLKHPPPQIFIKNTPVPANPATTFSSTPVNSFITQYSTGQVSVQIDWEIQKERSKRWNPEVQFTSNYGQQNSLLWAPDAAGKYTEPRAIGTRYLTHHL

SEQ ID NO: 1777 - protein, 735 aa, synthetic construct
  source 1..735: note = Description of Artificial Sequence: Synthetic polypeptide
MAADGYLPDWLEDNLSEGVREWWALQPGAPKPKANQQHQDNARGLVLPGYKYLGPGNGLDKGEPVNAADAAALEHDKAYDQQLKAGDNPYLKYNHADAEFQQRLQGDTSFGGNLGRAVFQAKKRVLEPLGLVEQAGETAPGKKRPLIESPQQPDSSTGIGKKGKQPAKKKLVFEDETGAGDGPPEGSTSGAMSDDSEMRAAAGGAAVEGGQGADGVGNASGDWHCDSTWSEGHVTTTSTRTWVLPTYNNHLYKRLGESLQSNTYNGFSTPWGYFDFNRFHCHFSPRDWQRLINNNWGMRPKAMRVKIFNIQVKEVTTSNGETTVANNLTSTVQIFADSSYELPYVMDAGQEGSLPPFPNDVFMVPQYGYCGLVTGNTSQQQTDRNAFYCLEYFPSQMLRTGNNFEITYSFEKVPFHSMYAHSQSLDRLMNPLIDQYLWGLQSTTTGTTLNAGTATTNFTKLRPTNFSNFKKNWLPGPSIKQQGFSKTANQNYYIPATGSDSLIIYETHSTLDGRWSALTPGPPIATAGPADSKFSNSQLIFAGPKQNGNTATVPGTLIFTSEEELAATNSTDTDMWGNLPTDDDSRSNLPTVDRMTLLGAVPGMVWQNRDIYYQGPIWAKIPHTDGHFHPSPLIGGFGLKHPPPQIFIKNTPVPANPATTFSSTPVNSFITQYSTGQVSVQIDWEIQKERSKRWNPEVQFTSNYGQQNSLLWAPDAAGKYTEPRAIGTRYLTHHL

SEQ ID NO: 1778 - protein, 735 aa, synthetic construct
  source 1..735: note = Description of Artificial Sequence: Synthetic polypeptide
MAADGYLPDWLEDNLSEGVREWWALQPGAPKPKANQQHQDNARGLVLPGYKYLGPGNGLDKGEPVNAADAAALEHDKAYDQQLKAGDNPYLKYNHADAEFQQRLQGDTSFGGNLGRAVFQAKKRVLEPLGLVEQAGETAPGKKRPLIESPQQPDSSTGIGKKGKQPAKKKLVFEDETGAGDGPPEGSTSGAMSDDSEMRAAAGGAAVEGGQGADGVGNASGDWHCDSTWSEGHVTTTSTRTWVLPTYNNHLYKRLGESLQSNTYNGFSTPWGYFDFNRFHCHFSPRDWQRLINNNWGMRPKAMRVKIFNIQVKEVTTSNGETTVANNLTSTVQIFADSSYELPYVMDAGQEGSLPPFPNDVFMVPQYGYCGLVTGNTSQQQTDRNAFYCLEYFPSQMLRTGNNFEITYSFEKVPFHSMYAHSQSLDRLMNPLIDQYLWGLQSTTTGTTLNAGTATTNFTKLRPTNFSNFKKNWLPGPSIKQQGFSKTANQNYHIPATGSDSLIYYETHSTLDGRWSALTPGPPSATAGPADSKFSNSQLIFAGPKQNGNTATVPGTLIFTSEEELAATNATDTDMWGNLPRRDSSVSNLPTVDRYTDLGAVPGMVWQNRDIYYQGPIWAKIPHTDGHFHPSPLIGGFGLKHPPPQIFIKNTPVPANPATTFSSTPVNSFITQYSTGQVSVQIDWEIQKERSKRWNPEVQFTSNYGQQNSLLWAPDAAGKYTEPRAIGTRYLTHHL

SEQ ID NO: 1779 - protein, 735 aa, synthetic construct
  source 1..735: note = Description of Artificial Sequence: Synthetic polypeptide
MAADGYLPDWLEDNLSEGVREWWALQPGAPKPKANQQHQDNARGLVLPGYKYLGPGNGLDKGEPVNAADAAALEHDKAYDQQLKAGDNPYLKYNHADAEFQQRLQGDTSFGGNLGRAVFQAKKRVLEPLGLVEQAGETAPGKKRPLIESPQQPDSSTGIGKKGKQPAKKKLVFEDETGAGDGPPEGSTSGAMSDDSEMRAAAGGAAVEGGQGADGVGNASGDWHCDSTWSEGHVTTTSTRTWVLPTYNNHLYKRLGESLQSNTYNGFSTPWGYFDFNRFHCHFSPRDWQRLINNNWGMRPKAMRVKIFNIQVKEVTTSNGETTVANNLTSTVQIFADSSYELPYVMDAGQEGSLPPFPNDVFMVPQYGYCGLVTGNTSQQQTDRNAFYCLEYFPSQMLRTGNNFEITYSFEKVPFHSMYAHSQSLDRLMNPLIDQYLWGLQSTTTGTTLNAGTATTNFTKLRPTNFSNFKKNWLPGPSIKQQGFSKTANQNYSIPATGSDSLISYETHSTLDGRWSALTPGPPRATAGPADSKFSNSQLIFAGPKQNGNTATVPGTLIFTSEEELAATNATDTDMWGNLPRHDSSLSNLPTVDRNTGLGAVPGMVWQNRDIYYQGPIWAKIPHTDGHFHPSPLIGGFGLKHPPPQIFIKNTPVPANPATTFSSTPVNSFITQYSTGQVSVQIDWEIQKERSKRWNPEVQFTSNYGQQNSLLWAPDAAGKYTEPRAIGTRYLTHHL

SEQ ID NO: 1780 - protein, 735 aa, synthetic construct
  source 1..735: note = Description of Artificial Sequence: Synthetic polypeptide
MAADGYLPDWLEDNLSEGVREWWALQPGAPKPKANQQHQDNARGLVLPGYKYLGPGNGLDKGEPVNAADAAALEHDKAYDQQLKAGDNPYLKYNHADAEFQQRLQGDTSFGGNLGRAVFQAKKRVLEPLGLVEQAGETAPGKKRPLIESPQQPDSSTGIGKKGKQPAKKKLVFEDETGAGDGPPEGSTSGAMSDDSEMRAAAGGAAVEGGQGADGVGNASGDWHCDSTWSEGHVTTTSTRTWVLPTYNNHLYKRLGESLQSNTYNGFSTPWGYFDFNRFHCHFSPRDWQRLINNNWGMRPKAMRVKIFNIQVKEVTTSNGETTVANNLTSTVQIFADSSYELPYVMDAGQEGSLPPFPNDVFMVPQYGYCGLVTGNTSQQQTDRNAFYCLEYFPSQMLRTGNNFEITYSFEKVPFHSMYAHSQSLDRLMNPLIDQYLWGLQSTTTGTTLNAGTATTNFTKLRPTNFSNFKKNWLPGPSIKQQGFSKTANQNYFIPATGSDSLIRYETHSTLDGRWSALTPGPPLATAGPADSKFSNSQLIFAGPKQNGNTATVPGTLIFTSEEELAATNATDTDMWGNLPVIDFSKSNLPTVDRLTHLGAVPGMVWQNRDIYYQGPIWAKIPHTDGHFHPSPLIGGFGLKHPPPQIFIKNTPVPANPATTFSSTPVNSFITQYSTGQVSVQIDWEIQKERSKRWNPEVQFTSNYGQQNSLLWAPDAAGKYTEPRAIGTRYLTHHL

SEQ ID NO: 1781 - protein, 735 aa, synthetic construct
  source 1..735: note = Description of Artificial Sequence: Synthetic polypeptide
MAADGYLPDWLEDNLSEGVREWWALQPGAPKPKANQQHQDNARGLVLPGYKYLGPGNGLDKGEPVNAADAAALEHDKAYDQQLKAGDNPYLKYNHADAEFQQRLQGDTSFGGNLGRAVFQAKKRVLEPLGLVEQAGETAPGKKRPLIESPQQPDSSTGIGKKGKQPAKKKLVFEDETGAGDGPPEGSTSGAMSDDSEMRAAAGGAAVEGGQGADGVGNASGDWHCDSTWSEGHVTTTSTRTWVLPTYNNHLYKRLGESLQSNTYNGFSTPWGYFDFNRFHCHFSPRDWQRLINNNWGMRPKAMRVKIFNIQVKEVTTSNGETTVANNLTSTVQIFADSSYELPYVMDAGQEGSLPPFPNDVFMVPQYGYCGLVTGNTSQQQTDRNAFYCLEYFPSQMLRTGNNFEITYSFEKVPFHSMYAHSQSLDRLMNPLIDQYLWGLQSTTTGTTLNAGTATTNFTKLRPTNFSNFKKNWLPGPSIKQQGFSKTANQNYKIPATGSDSLIKYETHSTLDGRWSALTPGPPMATAGPADSKFSNSQLIFAGPKQNGNTATVPGTLIFTSEEELAATNATDTDMWGNLPVRDFSLSNLPTVDRTTKLGAVPGMVWQNRDIYYQGPIWAKIPHTDGHFHPSPLIGGFGLKHPPPQIFIKNTPVPANPATTFSSTPVNSFITQYSTGQVSVQIDWEIQKERSKRWNPEVQFTSNYGQQNSLLWAPDAAGKYTEPRAIGTRYLTHHL

SEQ ID NO: 1782 - protein, 735 aa, synthetic construct
  source 1..735: note = Description of Artificial Sequence: Synthetic polypeptide
MAADGYLPDWLEDNLSEGVREWWALQPGAPKPKANQQHQDNARGLVLPGYKYLGPGNGLDKGEPVNAADAAALEHDKAYDQQLKAGDNPYLKYNHADAEFQQRLQGDTSFGGNLGRAVFQAKKRVLEPLGLVEQAGETAPGKKRPLIESPQQPDSSTGIGKKGKQPAKKKLVFEDETGAGDGPPEGSTSGAMSDDSEMRAAAGGAAVEGGQGADGVGNASGDWHCDSTWSEGHVTTTSTRTWVLPTYNNHLYKRLGESLQSNTYNGFSTPWGYFDFNRFHCHFSPRDWQRLINNNWGMRPKAMRVKIFNIQVKEVTTSNGETTVANNLTSTVQIFADSSYELPYVMDAGQEGSLPPFPNDVFMVPQYGYCGLVTGNTSQQQTDRNAFYCLEYFPSQMLRTGNNFEITYSFEKVPFHSMYAHSQSLDRLMNPLIDQYLWGLQSTTTGTTLNAGTATTNFTKLRPTNFSNFKKNWLPGPSIKQQGFSKTANQNYFIPATGSDSLIQYETHSTLDGRWSALTPGPPMATAGPADSKFSNSQLIFAGPKQNGNTATVPGTLIFTSEEELAATNATDTDMWGNLPGGDQSNSNLPTVDRLTALGAVPGMVWQNRDIYYQGPIWAKIPHTDGHFHPSPLIGGFGLKHPPPQIFIKNTPVPANPATTFSSTPVNSFITQYSTGQVSVQIDWEIQKERSKRWNPEVQFTSNYGQQNSLLWAPDAAGKYTEPRAIGTRYLTHHL

SEQ ID NO: 1783 - protein, 735 aa, synthetic construct
  source 1..735: note = Description of Artificial Sequence: Synthetic polypeptide
MAADGYLPDWLEDNLSEGVREWWALQPGAPKPKANQQHQDNARGLVLPGYKYLGPGNGLDKGEPVNAADAAALEHDKAYDQQLKAGDNPYLKYNHADAEFQQRLQGDTSFGGNLGRAVFQAKKRVLEPLGLVEQAGETAPGKKRPLIESPQQPDSSTGIGKKGKQPAKKKLVFEDETGAGDGPPEGSTSGAMSDDSEMRAAAGGAAVEGGQGADGVGNASGDWHCDSTWSEGHVTTTSTRTWVLPTYNNHLYKRLGESLQSNTYNGFSTPWGYFDFNRFHCHFSPRDWQRLINNNWGMRPKAMRVKIFNIQVKEVTTSNGETTVANNLTSTVQIFADSSYELPYVMDAGQEGSLPPFPNDVFMVPQYGYCGLVTGNTSQQQTDRNAFYCLEYFPSQMLRTGNNFEITYSFEKVPFHSMYAHSQSLDRLMNPLIDQYLWGLQSTTTGTTLNAGTATTNFTKLRPTNFSNFKKNWLPGPSIKQQGFSKTANQNYEMPATGSDSLIIYETHSTLDGRWSALTPGPPFATAGPADSKFSNSQLIFAGPKQNGNTATVPGTLIFTSEEELAATNATDTDVWGNLPSGDHSQSNLPTVDRPTMLGAVPGMVWQNRDIYYQGPIWAKIPHTDGHFHPSPLIGGFGLKHPPPQIFIKNTPVPANPATTFISTPVNSFITQYSTGQVSVHIDWEIQKERSKRWNPEVQFTSDYGQHSSLLWAPDAAGKYTEPTAIGTRYLTHHL

SEQ ID NO: 1784 - protein, 734 aa, synthetic construct
  source 1..734: note = Description of Artificial Sequence: Synthetic polypeptide
MAADGYLPDWLEDNLSEGVREWWALQPGAPKPKANQQHQDNARGLVLPGYKYLGPGNGLDKGEPVNAADAAALEHDKAYDQQLKAGDNPYLKYNHADAEFQQRLQGDTSFGGNLGRAVFQAKKRVLEPLGLVEQAGETAPGKKRPLIESPQQPDSSTGIGKKGKQPAKKKLVFEDETGAGDGPPEGSTSGAMSDDSEMRAAAGGAAVEGGQGADGVGNASGDWHCDSTWSEGHVTTTSTRTWVLPTYNNHLYKRLGESLQSNTYNGFSTPWGYFDFNRFHCHFSPRDWQRLINNNWGMRPKAMRVKIFNIQVKEVTTSNGETTVANNLTSTVQIFADSSYELPYVMDAGQEGSLPPFPNDVFMVPQYGYCGLVTGNTSQQQTDRNAFYCLEYFPSQMLRTGNNFEITYSFEKVPFHSMYAHSQSLDRLMNPLIDQYLWGLQSTTTGTTLNAGTATTNFTKLRPTNFSNFKKNWLPGPSIKQQGFSKTANQNDIPATGSDSLIKYETHSTLDGRWSALTPGPPMATAGPADSKFSNSQLIFAGPKQNGNTATVPGTLIFTSEEELAATNATDTDMWGNLPGGDQSNSNLPTVDRLTALGAVPGMVWQNRDIYYQGPIWAKIPHTDGHFHPSPLIGGFGLKHPPPQIFIKNTPVPANPATTFSSTPVNSFITQYSTGQVSVQIDWEIQKERSKRWNPEVQFTSNYGQQNSLLWAPDAAGKYTEPRAIGTRYLTHHL

SEQ ID NO: 1785 - protein, 735 aa, synthetic construct
  source 1..735: note = Description of Artificial Sequence: Synthetic polypeptide
MAADGYLPDWLEDNLSEGVREWWALQPGAPKPKANQQHQDNARGLVLPGYKYLGPGNGLDKGEPVNAADAAALEHDKAYDQQLKAGDNPYLKYNHADAEFQQRLQGDTSFGGNLGRAVFQAKKRVLEPLGLVEQAGETAPGKKRPLIESPQQPDSSTGIGKKGKQPAKKKLVFEDETGAGDGPPEGSTSGAMSDDSEMRAAAGGAAVEGGQGADGVGNASGDWHCDSTWSEGHVTTTSTRTWVLPTYNNHLYKRLGESLQSNTYNGFSTPWGYFDFNRFHCHFSPRDWQRLINNNWGMRPKAMRVKIFNIQVKEVTTSNGETTVANNLTSTVQIFADSSYELPYVMDAGQEGSLPPFPNDVFMVPQYGYCGLVTGNTSQQQTDRNAFYCLEYFPSQMLRTGNNFEITYSFEKVPFHSMYAHSQSLDRLMNPLIDQYLWGLQSTTTGTTLNAGTATTNFTKLRPTNFSNFKKNWLPGPSIKQQGFSKTANQNYIIPATGSDSLITYETHSTLDGRWSALTPGPPVATAGPADSKFSNSQLIFAGPKQNGNTATVPGTLIFTSEEELAATNATDTDMWGNLPFNDDSSSNLPTVDRSTFLGAVPGMVWQNRDIYYQGPIWAKIPHTDGHFHPSPLIGGFGLKHPPPQIFIKNTPVPANPATTFSSTPVNSFITQYSTGQVSVQIDWEIQKERSKRWNPEVQFTSNYGQQNSLLWAPDAAGKYTEPRAIGTRYLTHHL

SEQ ID NO: 1786 - protein, 733 aa, synthetic construct
  source 1..733: note = Description of Artificial Sequence: Synthetic polypeptide
MAADGYLPDWLEDNLSEGIREWWDLKPGAPKPKANQQKQDDGRGLVLPGYKYLGPFNGLDKGEPVNAADAAALEHDKAYDQQLKAGDNPYLRYNHADAEFQERLQEDTSFGGNLGRAVFQAKKRVLEPLGLVEEGAKTAPGKKRPLESPQEPDSSSGIGKKGKQPARKRLNFEEDTGAGDGPPEGSDTSAMSSDIEMRAAPGGNAVDAGQGSDGVGNASGDWHCDSTWSEGKVTTTSTRTWVLPTYNNHLYLRLGTTSSSNTYNGFSTPWGYFDFNRFHCHFSPRDWQRLINNNWGLRPKAMRVKIFNIQVKEVTTSNGETTVANNLTSTVQIFADSSYELPYVMDAGQEGSLPPFPNDVFMVPQYGYCGIVTGENQNQTDRNAFYCLEYFPSQMLRTGNNFEMAYNFEKVPFHSMYAHSQSLDRLMNPLLDQYLWHLQSTTSGETLNQGNAATTFGKIRSGDFAFYRKNWLPGPCVKQQRFSKTASQNYKIPASGGNALLKYDTHYTLNNRWSNIAPGPPMATAGPSDGDFSNAQLIFPGPSVTGNTTTSANNLLFTSEEEIAATNPRDTDMFGQIADNNQNATTAPITGNVTAMGVLPGMVWQNRDIYYQGPIWAKIPHADGHFHPSPLIGGFGLKHPPPQIFIKNTPVPANPATTFTAARVDSFITQYSTGQVAVQIEWEIEKERSKRWNPEVQFTSNYGNQSSMLWAPDTTGKYTEPRVIGSRYLTNHL

SEQ ID NO: 1787 - protein, 742 aa, synthetic construct; identical to SEQ ID NO: 1598
  source 1..742: note = Description of Artificial Sequence: Synthetic polypeptide

SEQ ID NO: 1788 - protein, 733 aa, synthetic construct; identical to SEQ ID NO: 421
  source 1..733: note = Description of Artificial Sequence: Synthetic polypeptide

SEQ ID NO: 1789 - protein, 733 aa, synthetic construct; identical to SEQ ID NO: 138
  source 1..733: note = Description of Artificial Sequence: Synthetic polypeptide

SEQ ID NO: 1790 - protein, 733 aa, synthetic construct; identical to SEQ ID NO: 425
  source 1..733: note = Description of Artificial Sequence: Synthetic polypeptide

SEQ ID NO: 1791 - protein, 735 aa, synthetic construct
  source 1..735: note = Description of Artificial Sequence: Synthetic polypeptide
MAADGYLPDWLEDNLSEGVREWWALQPGAPKPKANQQHQDNARGLVLPGYKYLGPGNGLDKGEPVNAADAAALEHDKAYDQQLKAGDNPYLKYNHADAEFQQRLQGDTSFGGNLGRAVFQAKKRVLEPLGLVEQAGETAPGKKRPLIESPQQPDSSTGIGKKGKQPAKKKLVFEDETGAGDGPPEGSTSGAMSDDSEMRAAAGGAAVEGGQGADGVGNASGDWHCDSTWSEGHVTTTSTRTWVLPTYNNHLYKRLGESLQSNTYNGFSTPWGYFDFNRFHCHFSPRDWQRLINNNWGMRPKAMRVKIFNIQVKEVTTSNGETTVANNLTSTVQIFADSSYELPYVMDAGQEGSLPPFPNDVFMVPQYGYCGLVTGNTSQQQTDRNAFYCLEYFPSQMLRTGNNFEITYSFEKVPFHSMYAHSQSLDRLMNPLIDQYLWGLQSTTTGTTLNAGTATTNFTKLRPTNFSNFKKNWLPGPSIKQQGFSKTANQNYEIPATGSDSLIEYETHSTLDGRWSALTPGPPMATAGPADSKFSNSQLIFAGPKQNGNTATVPGTLIFTSEEELAATNATDTDMWGNLPGGDQSSSNLPTVDRLTALGAVPGMVWQNRDIYYQGPIWAKIPHTDGHFHPSPLIGGFGLKHPPPQIFIKNTPVPANPATTFSSTPVNSFITQYSTGQVSVQIDWEIQKERSKRWNPEVQFTSNYGQQNSLLWAPDAAGKYTEPRAIGTRYLTHHL

SEQ ID NO: 1792 - protein, 735 aa, synthetic construct
  source 1..735: note = Description of Artificial Sequence: Synthetic polypeptide
MAADGYLPDWLEDNLSEGVREWWALQPGAPKPKANQQHQDNARGLVLPGYKYLGPGNGLDKGEPVNAADAAALEHDKAYDQQLKAGDNPYLKYNHADAEFQQRLQGDTSFGGNLGRAVFQAKKRVLEPLGLVEQAGETAPGKKRPLIESPQQPDSSTGIGKKGKQPAKKKLVFEDETGAGDGPPEGSTSGAMSDDSEMRAAAGGAAVEGGQGADGVGNASGDWHCDSTWSEGHVTTTSTRTWVLPTYNNHLYKRLGESLQSNTYNGFSTPWGYFDFNRFHCHFSPRDWQRLINNNWGMRPKAMRVKIFNIQVKEVTTSNGETTVANNLTSTVQIFADSSYELPYVMDAGQEGSLPPFPNDVFMVPQYGYCGLVTGNTSQQQTDRNAFYCLEYFPSQMLRTGNNFEITYSFEKVPFHSMYAHSQSLDRLMNPLIDQYLWGLQSTTTGTTLNAGTATTNFTKLRPTNFSNFKKNWLPGPSIKQQGFSKTANQNYEIPATGSDSLIEYETHSTLDGRWSALTPGPPMATAGPADSKFSNSQLIFAGPKQNGNTATVPGTLIFTSEEELAATNATDTDMWGNLPGGDQSSSNLPVVRGLRALGAVPGMVWQNRDIYYQGPIWAKIPHTDGHFHPSPLIGGFGLKHPPPQIFIKNTPVPANPATTFSSTPVNSFITQYSTGQVSVQIDWEIQKERSKRWNPEVQFTSNYGQQNSLLWAPDAAGKYTEPRAIGTRYLTHHL

SEQ ID NO: 1793 - protein, 735 aa, synthetic construct
  source 1..735: note = Description of Artificial Sequence: Synthetic polypeptide
MAADGYLPDWLEDNLSEGVREWWALQPGAPKPKANQQHQDNARGLVLPGYKYLGPGNGLDKGEPVNAADAAALEHDKAYDQQLKAGDNPYLKYNHADAEFQQRLQGDTSFGGNLGRAVFQAKKRVLEPLGLVEQAGETAPGKKRPLIESPQQPDSSTGIGKKGKQPAKKKLVFEDETGAGDGPPEGSTSGAMSDDSEMRAAAGGAAVEGGQGADGVGNASGDWHCDSTWSEGHVTTTSTRTWVLPTYNNHLYKRLGESLQSNTYNGFSTPWGYFDFNRFHCHFSPRDWQRLINNNWGMRPKAMRVKIFNIQVKEVTTSNGETTVANNLTSTVQIFADSSYELPYVMDAGQEGSLPPFPNDVFMVPQYGYCGLVTGNTSQQQTDRNAFYCLEYFPSQMLRTGNNFEITYSFEKVPFHSMYAHSQSLDRLMNPLIDQYLWGLQSTTTGTTLNAGTATTNFTKLRPTNFSNFKKNWLPGPSIKQQGFSKTANQNYEIPATGSDSLIEYETHSTLDGRWSALTPGPPMATAGPADSKFSNSQLIFAGPKQNGNTATVPGTLIFTSEEELAATNATDTDMWGNLPGGDQSSSNLPVVNRLSALGAVPGMVWQNRDIYYQGPIWAKIPHTDGHFHPSPLIGGFGLKHPPPQIFIKNTPVPANPATTFSSTPVNSFITQYSTGQVSVQIDWEIQKERSKRWNPEVQFTSNYGQQNSLLWAPDAAGKYTEPRAIGTRYLTHHL

SEQ ID NO: 1794 - protein, 735 aa, synthetic construct
  source 1..735: note = Description of Artificial Sequence: Synthetic polypeptide
MAADGYLPDWLEDNLSEGVREWWALQPGAPKPKANQQHQDNARGLVLPGYKYLGPGNGLDKGEPVNAADAAALEHDKAYDQQLKAGDNPYLKYNHADAEFQQRLQGDTSFGGNLGRAVFQAKKRVLEPLGLVEQAGETAPGKKRPLIESPQQPDSSTGIGKKGKQPAKKKLVFEDETGAGDGPPEGSTSGAMSDDSEMRAAAGGAAVEGGQGADGVGNASGDWHCDSTWSEGHVTTTSTRTWVLPTYNNHLYKRLGESLQSNTYNGFSTPWGYFDFNRFHCHFSPRDWQRLINNNWGMRPKAMRVKIFNIQVKEVTTSNGETTVANNLTSTVQIFADSSYELPYVMDAGQEGSLPPFPNDVFMVPQYGYCGLVTGNTSQQQTDRNAFYCLEYFPSQMLRTGNNFEITYSFEKVPFHSMYAHSQSLDRLMNPLIDQYLWGLQSTTTGTTLNAGTATTNFTKLRPTNFSNFKKNWLPGPSIKQQGFSKTANQNYEIPATGSDSLIEYETHSTLDGRWSALTPGPPMATAGPADSKFSNSQLIFAGPKQNGNTATVPGTLIFTSEEELAATNATDTDMWGNLPGGDQSSSNLPPVMGLGALGAVPGMVWQNRDIYYQGPIWAKIPHTDGHFHPSPLIGGFGLKHPPPQIFIKNTPVPANPATTFSSTPVNSFITQYSTGQVSVQIDWEIQKERSKRWNPEVQFTSNYGQQNSLLWAPDAAGKYTEPRAIGTRYLTHHL

SEQ ID NO: 1795 - protein, 736 aa, synthetic construct
  source 1..736: note = Description of Artificial Sequence: Synthetic polypeptide
MAADGYLPDWLEDNLSEGVREWWALQPGAPKPKANQQHQDNARGLVLPGYKYLGPGNGLDKGEPVNAADAAALEHDKAYDQQLKAGDNPYLKYNHADAEFQQRLQGDTSFGGNLGRAVFQAKKRVLEPLGLVEQAGETAPGKKRPLIESPQQPDSSTGIGKKGKQPAKKKLVFEDETGAGDGPPEGSTSGAMSDDSEMRAAAGGAAVEGGQGADGVGNASGDWHCDSTWSEGHVTTTSTRTWVLPTYNNHLYKRLGESLQSNTYNGFSTPWGYFDFNRFHCHFSPRDWQRLINNNWGMRPKAMRVKIFNIQVKEVTTSNGETTVANNLTSTVQIFADSSYELPYVMDAGQEGSLPPFPNDVFMVPQYGYCGLVTGNTSQQQTDRNAFYCLEYFPSQMLRTGNNFEITYSFEKVPFHSMYAHSQSLDRLMNPLIDQYLWGLQSTTTGTTLNAGTATTNFTKLRPTNFSNFKKNWLPGPSIKQQGFSKTANQNYEIPATGSDSLIEYETHSTLDGRWSALTPGPPMATAGPADSKFSNSQLIFAGPKQNGNTATVPGTLIFTSEEELAATNATDTDMWGNLPGGDQSRVDRLPTVDRLTALGAVPGMVWQNRDIYYQGPIWAKIPHTDGHFHPSPLIGGFGLKHPPPQIFIKNTPVPANPATTFSSTPVNSFITQYSTGQVSVQIDWEIQKERSKRWNPEVQFTSNYGQQNSLLWAPDAAGKYTEPRAIGTRYLTHHL

SEQ ID NO: 1796 - protein, 736 aa, synthetic construct
  source 1..736: note = Description of Artificial Sequence: Synthetic polypeptide
MAADGYLPDWLEDNLSEGVREWWALQPGAPKPKANQQHQDNARGLVLPGYKYLGPGNGLDKGEPVNAADAAALEHDKAYDQQLKAGDNPYLKYNHADAEFQQRLQGDTSFGGNLGRAVFQAKKRVLEPLGLVEQAGETAPGKKRPLIESPQQPDSSTGIGKKGKQPAKKKLVFEDETGAGDGPPEGSTSGAMSDDSEMRAAAGGAAVEGGQGADGVGNASGDWHCDSTWSEGHVTTTSTRTWVLPTYNNHLYKRLGESLQSNTYNGFSTPWGYFDFNRFHCHFSPRDWQRLINNNWGMRPKAMRVKIFNIQVKEVTTSNGETTVANNLTSTVQIFADSSYELPYVMDAGQEGSLPPFPNDVFMVPQYGYCGLVTGNTSQQQTDRNAFYCLEYFPSQMLRTGNNFEITYSFEKVPFHSMYAHSQSLDRLMNPLIDQYLWGLQSTTTGTTLNAGTATTNFTKLRPTNFSNFKKNWLPGPSIKQQGFSKTANQNYEIPATGSDSLIEYETHSTLDGRWSALTPGPPMATAGPADSKFSNSQLIFAGPKQNGNTATVPGTLIFTSEEELAATNATDTDMWGNLPGGDQSRALRLPTVDRLTALGAVPGMVWQNRDIYYQGPIWAKIPHTDGHFHPSPLIGGFGLKHPPPQIFIKNTPVPANPATTFSSTPVNSFITQYSTGQVSVQIDWEIQKERSKRWNPEVQFTSNYGQQNSLLWAPDAAGKYTEPRAIGTRYLTHHL

SEQ ID NO: 1797 - DNA, 1172 bp, synthetic construct
  source 1..1172: mol_type = other DNA; note = Description of Artificial Sequence: Synthetic polynucleotide
cttaattaggctgcgcgctcgctcgctcactgaggccgcccgggcaaagcccgggcgtcgggcgacctttggtcgcccggcctcagtgagcgagcgagcgcgcagagagggagtggccaactccatcactaggggttccttgtagttaatgattaacccgccatgctacttatctaccagggtaatggggatcctctagaactatagctagtcgacattgattattgactagttattaatagtaatcaattacggggtcattagttcatagcccatatatggagttccgcgttacataacttacggtaaatggcccgcctggctgaccgcccaacgacccccgcccattgacgtcaataatgacgtatgttcccatagtaacgccaatagggactttccattgacgtcaatgggtggactatttacggtaaactgcccacttggcagtacatcaagtgtatcatatgccaagtacgccccctattgacgtcaatgacggtaaatggcccgcctggcattatgcccagtacatgaccttatgggactttcctacttggcagtacatctacgtattagtcatcgctattaccatgtcgaggccacgttctgcttcactctccccatctcccccccctccccacccccaattttgtatttatttattttttaattattttgtgcagcgatgggggcggggggggggggcgcgcgccaggcggggcggggcggggcgaggggcggggcggggcgaggcggagaggtgcggcggcagccaatcagagcggcgcgctccgaaagtttccttttatggcgaggcggcggcggcggcggccctataaaaagcgaagcgcgcggcgggcgggagcaagctttattgcggtagtttatcacagttaaattgctaacgcagtcagtgcttctgacacaacagtctcgaacttaagctgcagaagttggtcgtgaggcactgggcaggtaagtatcaaggttacaagacaggtttaaggagaccaatagaaactgggcttgtcgagacagagaagactcttgcgtttctgataggcacctattggtcttactgacatccactttgcctttctctccacaggtgtccactcccagttcaattacagctcttaaggctagagtacttaatacgactcsactatagg

SEQ ID NO: 1798 - DNA, 3231 bp, synthetic construct
  source 1..3231: mol_type = other DNA; note = Description of Artificial Sequence: Synthetic polynucleotide
taagaattcacgcgtggtacctctagagtcgacccgggcggcctcgaggacggggtgaactacgcctgaggatccgatctttttccctctgccaaaaattatggggacatcatgaagccccttgagcatctgacttctggctaataaaggaaatttattttcattgcaatagtgtgttggaattttttgtgtctctcactcggaagcaattcgttgatctgaatttcgaccacccataatacccattaccctggtagataagtagcatggcgggttaatcattaactacaaggaacccctagtgatggagttggccactccctctctgcgcgctcgctcgctcactgaggccgggcgaccaaaggtcgcccgacgcccgggctttgcccgggcggcctcagtgagcgagcgagcgcgcagccttaattaacctaattcactggccgtcgttttacaacgtcgtgactgggaaaaccctggcgttacccaacttaatcgccttgcagcacatccccctttcgccagctggcgtaatagcgaagaggcccgcaccgatcgcccttcccaacagttgcgcagcctgaatggcgaatgggacgcgccctgtagcggcgcattaagcgcggcgggtgtggtggttacgcgcagcgtgaccgctacacttgccagcgccctagcgcccgctcctttcgctttcttcccttcctttctcgccacgttcgccggctttccccgtcaagctctaaatcgggggctccctttagggttccgatttagtgctttacggcacctcgaccccaaaaaacttgattagggtgatggttcacgtagtgggccatcgccctgatagacggtttttcgccctttgacgttggagtccacgttctttaatagtggactcttgttccaaactggaacaacactcaaccctatctcggtctattcttttgatttataagggattttgccgatttcggcctattggttaaaaaatgagctgatttaacaaaaatttaacgcgaattttaacaaaatattaacgcttacaatttaggtggcacttttcggggaaatgtgcgcggaacccctatttgtttatttttctaaatacattcaaatatgtatccgctcatgagacaataaccctgataaatgcttcaataatattgaaaaaggaagagtatgagtattcaacatttccgtgtcgcccttattcccttttttgcggcattttgccttcctgtttttgctcacccagaaacgctggtgaaagtaaaagatgctgaagatcagttgggtgcacgagtgggttacatcgaactggatctcaacagcggtaagatccttgagagttttcgccccgaagaacgttttccaatgatgagcacttttaaagttctgctatgtggcgcggtattatcccgtattgacgccgggcaagagcaactcggtcgccgcatacactattctcagaatgacttggttgagtactcaccagtcacagaaaagcatcttacggatggcatgacagtaagagaattatgcagtgctgccataaccatgagtgataacactgcggccaacttacttctgacaacgatcggaggaccgaaggagctaaccgcttttttgcacaacatgggggatcatgtaactcgccttgatcgttgggaaccggagctgaatgaagccataccaaacgacgagcgtgacaccacgatgcctgtagcaatggcaacaacgttgcgcaaactattaactggcgaactacttactctagcttcccggcaacaattaatagactggatggaggcggataaagttgcaggaccacttctgcgctcggcccttccggctggctggtttattgctgataaatctggagccggtgagcgtgggtctcgcggtatcattgcagcactggggccagatggtaagccctcccgtatcgtagttatctacacgacggggagtcaggcaactatggatgaacgaaatagacagatcgctgagataggtgcctcactgattaagcattggtaactgtcagaccaagtttactcatatatactttagattgatttaaaacttcatttttaatttaaaaggatctaggtgaagatcctttttgataatctcatgaccaaaatcccttaacgtgagttttcgttccactgagcgtcagaccccgtagaaaagatcaaaggatcttcttgagatcctttttttctgcgcgtaatctgctgcttgcaaacaaaaaaaccaccgctaccagcggtggtttgtttgccggatcaagagctaccaactctttttccgaaggtaactggcttcagcagagcgcagataccaaatactgttcttctagtgtagccgtagttaggccaccacttcaagaactctgtagcaccgcctacatacctcgctctgctaatcctgttaccagtggctgctgccagtggcgataagtcgtgtcttaccgggttggactcaagacgatagttaccggataaggcgcagcggtcgggctgaacggggggttcgtgcacacagcccagcttggagcgaacgacctacaccgaactgagatacctacagcgtgagctatgagaaagcgccacgcttcccgaagggagaaaggcggacaggtatccggtaagcggcagggtcggaacaggagagcgcacgagggagcttccagggggaaacgcctggtatctttatagtcctgtcgggtttcgccacctctgacttgagcgtcgatttttgtgatgctcgtcaggggggcggagcctatggaaaaacgccagcaacgcggcctttttacggttcctggccttttgctggccttttgctcacatgttctttcctgcgttatcccctgattctgtggataaccgtattaccgcctttgagtgagctgataccgctcgccgcagccgaacgaccgagcgcagcgagtcagtgagcgaggaagcggaagagcgcccaatacgcaaaccgcctctccccgcgcgttggccgattcattaatgcagctggcacgacaggtttcccgactggaaagcgggcagtgagcgcaacgcaattaatgtgagttagctcactcattaggcaccccaggctttacactttatgcttccggctcgtatgttgtgtggaattgtgagcggataacaatttcacacaggaaacagctatgaccatgattacgccagatttaattaaggc

SEQ ID NO: 1799 - protein, 737 aa, synthetic construct
  source 1..737: note = Description of Artificial Sequence: Synthetic polypeptide
  VARIANT 264: note = misc_feature - Xaa can be any naturally occurring amino acid
  VARIANT 266: note = misc_feature - Xaa can be any naturally occurring amino acid
  VARIANT 268: note = misc_feature - Xaa can be any naturally occurring amino acid
  VARIANT 448: note = misc_feature - Xaa can be any naturally occurring amino acid
  VARIANT 459..460: note = misc_feature - Xaa can be any naturally occurring amino acid
  VARIANT 467: note = misc_feature - Xaa can be any naturally occurring amino acid
  VARIANT 470..471: note = misc_feature - Xaa can be any naturally occurring amino acid
  VARIANT 474: note = misc_feature - Xaa can be any naturally occurring amino acid
  VARIANT 495: note = misc_feature - Xaa can be any naturally occurring amino acid
  VARIANT 516: note = misc_feature - Xaa can be any naturally occurring amino acid
  VARIANT 533: note = misc_feature - Xaa can be any naturally occurring amino acid
  VARIANT 547: note = misc_feature - Xaa can be any naturally occurring amino acid
  VARIANT 551: note = misc_feature - Xaa can be any naturally occurring amino acid
  VARIANT 555: note = misc_feature - Xaa can be any naturally occurring amino acid
  VARIANT 557: note = misc_feature - Xaa can be any naturally occurring amino acid
  VARIANT 561: note = misc_feature - Xaa can be any naturally occurring amino acid
  VARIANT 563: note = misc_feature - Xaa can be any naturally occurring amino acid
  VARIANT 577: note = misc_feature - Xaa can be any naturally occurring amino acid
  VARIANT 583: note = misc_feature - Xaa can be any naturally occurring amino acid
  VARIANT 593: note = misc_feature - Xaa can be any naturally occurring amino acid
  VARIANT 596: note = misc_feature - Xaa can be any naturally occurring amino acid
  VARIANT 661..662: note = misc_feature - Xaa can be any naturally occurring amino acid
  VARIANT 664..665: note = misc_feature - Xaa can be any naturally occurring amino acid
  VARIANT 710: note = misc_feature - Xaa can be any naturally occurring amino acid
  VARIANT 717..719: note = misc_feature - Xaa can be any naturally occurring amino acid
  VARIANT 723: note = misc_feature - Xaa can be any naturally occurring amino acid
MAADGYLPDWLEDNLSEGIREWWDLKPGAPKPKANQQKQDDGRGLVLPGYKYLGPFNGLDKGEPVNAADAAALEHDKAYDQQLKAGDNPYLRYNHADAEFQERLQEDTSFGGNLGRAVFQAKKRVLEPLGLVEEGAKTAPGKKRPVEPSPQRSPDSSTGIGKKGQQPAKKRLNFGQTGDSESVPDPQPLGEPPAGPSGLGSGTMAAGGGAPMADNNEGADGVGNASGNWHCDSTWLGDRVITTSTRTWALPTYNNHLYKQISSXSXGXTNDNHYFGYSTPWGYFDFNRFHCHFSPRDWQRLINNNWGFRPKRLNFKLFNIQVKEVTTNDGVTTIANNLTSTVQVFSDSEYQLPYVLGSAHQGCLPPFPADVFMIPQYGYLTLNNGSQAVGRSSFYCLEYFPSQMLRTGNNFTFSYTFEDVPFHSSYAHSQSLDRLMNPLIDQYLYYLXRTQSTGGTAGXXELLFSQXGPXXMSXQAKNWLPGPCYRQQRVSKTLXQNNNSNFAWTGATKYHLNGRXSLVNPGVAMATHKDDEXRFFPSSGVLIFGKXGAGXNNTXLXNVMXTXEEEIKTTNPVATEXYGVVAXNLQSSNTAPXTGXVNSQGALPGMVWQNRDVYLQGPIWAKIPHTDGNFHPSPLMGGFGLKHPPPQILIKNTPVPANPPXXFXXAKFASFITQYSTGQVSVEIEWELQKENSKRWNPEIQYTSNYAKSXNVDFAVXXXGVYXEPRPIGTRYLTRNL

SEQ ID NO: 1800 - protein, 737 aa, synthetic construct
  source 1..737: note = Description of Artificial Sequence: Synthetic polypeptide
MAADGYLPDWLEDNLSEGIREWWDLKPGAPKPKANQQKQDDGRGLVLPGYKYLGPFNGLDKGEPVNAADAAALEHDKAYDQQLKAGDNPYLRYNHADAEFQERLQEDTSFGGNLGRAVFQAKKRVLEPLGLVEEGAKTAPGKKRPVEPSPQRSPDSSTGIGKKGQQPAKKRLNFGQTGDSESVPDPQPLGEPPAGPSGLGSGTMAAGGGAPMADNNEGADGVGNASGNWHCDSTWLGDRVITTSTRTWALPTYNNHLYKQISSASSGSTNDNHYFGYSTPWGYFDFNRFHCHFSPRDWQRLINNNWGFRPKRLNFKLFNIQVKEVTTNDGVTTIANNLTSTVQVFSDSEYQLPYVLGSAHQGCLPPFPADVFMIPQYGYLTLNNGSQAVGRSSFYCLEYFPSQMLRTGNNFTFSYTFEDVPFHSSYAHSQSLDRLMNPLIDQYLYYLARTQSTGGTAGNRELLFSQGGPSNMSAQAKNWLPGPCYRQQRVSKTLAQNNNSNFAWTGATKYHLNGRDSLVNPGVAMATHKDDEDRFFPSSGVLIFGKEGAGANNTALENVMLTNEEEIKTTNPVATEQYGVVASNLQSSNTAPATGAVNSQGALPGMVWQNRDVYLQGPIWAKIPHTDGNFHPSPLMGGFGLKHPPPQILIKNTPVPANPPATFTPAKFASFITQYSTGQVSVEIEWELQKENSKRWNPEIQYTSNYAKSTNVDFAVNNEGVYSEPRPIGTRYLTRNL

SEQ ID NO: 1801 - protein, 737 aa, synthetic construct
  source 1..737: note = Description of Artificial Sequence: Synthetic polypeptide
MAADGYLPDWLEDNLSEGIREWWDLKPGAPKPKANQQKQDDGRGLVLPGYKYLGPFNGLDKGEPVNAADAAALEHDKAYDQQLKAGDNPYLRYNHADAEFQERLQEDTSFGGNLGRAVFQAKKRVLEPLGLVEEGAKTAPGKKRPVEPSPQRSPDSSTGIGKKGQQPAKKRLNFGQTGDSESVPDPQPLGEPPAGPSGLGSGTMAAGGGAPMADNNEGADGVGNASGNWHCDSTWLGDRVITTSTRTWALPTYNNHLYKQISSQSSGSTNDNHYFGYSTPWGYFDFNRFHCHFSPRDWQRLINNNWGFRPKRLNFKLFNIQVKEVTTNDGVTTIANNLTSTVQVFSDSEYQLPYVLGSAHQGCLPPFPADVFMIPQYGYLTLNNGSQAVGRSSFYCLEYFPSQMLRTGNNFTFSYTFEDVPFHSSYAHSQSLDRLMNPLIDQYLYYLSRTQSTGGTAGNRELLFSQGGPANMSAQAKNWLPGPCYRQQRVSKTLSQNNNSNFAWTGATKYHLNGRDSLVNPGVAMATHKDDEERFFPSSGVLIFGKQGAGANNTTLDNVMMTSEEEIKTTNPVATEQYGVVASNLQSSNTAPQTGTVNSQGALPGMVWQNRDVYLQGPIWAKIPHTDGNFHPSPLMGGFGLKHPPPQILIKNTPVPANPPAVFSPAKFASFITQYSTGQVSVEIEWELQKENSKRWNPEIQYTSNYAKSTNVDFAVNSEGVYSEPRPIGTRYLTRNL

SEQ ID NO: 1802 - protein, 737 aa, synthetic construct
  source 1..737: note = Description of Artificial Sequence: Synthetic polypeptide
MAADGYLPDWLEDNLSEGIREWWDLKPGAPKPKANQQKQDDGRGLVLPGYKYLGPFNGLDKGEPVNAADAAALEHDKAYDQQLKAGDNPYLRYNHADAEFQERLQEDTSFGGNLGRAVFQAKKRVLEPLGLVEEGAKTAPGKKRPVEPSPQRSPDSSTGIGKKGQQPAKKRLNFGQTGDSESVPDPQPLGEPPAGPSGLGSGTMAAGGGAPMADNNEGADGVGNASGNWHCDSTWLGDRVITTSTRTWALPTYNNHLYKQISSASSGSTNDNHYFGYSTPWGYFDFNRFHCHFSPRDWQRLINNNWGFRPKRLNFKLFNIQVKEVTTNDGVTTIANNLTSTVQVFSDSEYQLPYVLGSAHQGCLPPFPADVFMIPQYGYLTLNNGSQAVGRSSFYCLEYFPSQMLRTGNNFTFSYTFEDVPFHSSYAHSQSLDRLMNPLIDQYLYYLARTQSTGGTAGTRELLFSQGGPSNMSAQAKNWLPGPCYRQQRVSKTLTQNNNSNFAWTGATKYHLNGRDSLVNPGVAMATHKDDEDRFFPSSGVLIFGKQGAGANNTALDNVMITNEEEIKTTNPVATEQYGVVASNLQSSNTAPATGTVNSQGALPGMVWQNRDVYLQGPIWAKIPHTDGNFHPSPLMGGFGLKHPPPQILIKNTPVPANPPTVFSPAKFASFITQYSTGQVSVEIEWELQKENSKRWNPEIQYTSNYAKSTNVDFAVNSEGVYTEPRPIGTRYLTRNL

SEQ ID NO: 1803 - protein, 737 aa, synthetic construct
  source 1..737: note = Description of Artificial Sequence: Synthetic polypeptide
  VARIANT 264: note = misc_feature - Xaa can be any naturally occurring amino acid
  VARIANT 448: note = misc_feature - Xaa can be any naturally occurring amino acid
  VARIANT 459: note = misc_feature - Xaa can be any naturally occurring amino acid
  VARIANT 470: note = misc_feature - Xaa can be any naturally occurring amino acid
  VARIANT 495: note = misc_feature - Xaa can be any naturally occurring amino acid
  VARIANT 533: note = misc_feature - Xaa can be any naturally occurring amino acid
  VARIANT 547: note = misc_feature - Xaa can be any naturally occurring amino acid
  VARIANT 555: note = misc_feature - Xaa can be any naturally occurring amino acid
  VARIANT 557: note = misc_feature - Xaa can be any naturally occurring amino acid
  VARIANT 561: note = misc_feature - Xaa can be any naturally occurring amino acid
  VARIANT 563: note = misc_feature - Xaa can be any naturally occurring amino acid
  VARIANT 593: note = misc_feature - Xaa can be any naturally occurring amino acid
  VARIANT 596: note = misc_feature - Xaa can be any naturally occurring amino acid
  VARIANT 661..662: note = misc_feature - Xaa can be any naturally occurring amino acid
  VARIANT 664: note = misc_feature - Xaa can be any naturally occurring amino acid
  VARIANT 718: note = misc_feature - Xaa can be any naturally occurring amino acid
  VARIANT 723: note = misc_feature - Xaa can be any naturally occurring amino acid
MAADGYLPDWLEDNLSEGIREWWDLKPGAPKPKANQQKQDDGRGLVLPGYKYLGPFNGLDKGEPVNAADAAALEHDKAYDQQLKAGDNPYLRYNHADAEFQERLQEDTSFGGNLGRAVFQAKKRVLEPLGLVEEGAKTAPGKKRPVEPSPQRSPDSSTGIGKKGQQPAKKRLNFGQTGDSESVPDPQPLGEPPAGPSGLGSGTMAAGGGAPMADNNEGADGVGNASGNWHCDSTWLGDRVITTSTRTWALPTYNNHLYKQISSXSSGSTNDNHYFGYSTPWGYFDFNRFHCHFSPRDWQRLINNNWGFRPKRLNFKLFNIQVKEVTTNDGVTTIANNLTSTVQVFSDSEYQLPYVLGSAHQGCLPPFPADVFMIPQYGYLTLNNGSQAVGRSSFYCLEYFPSQMLRTGNNFTFSYTFEDVPFHSSYAHSQSLDRLMNPLIDQYLYYLXRTQSTGGTAGXRELLFSQGGPXNMSAQAKNWLPGPCYRQQRVSKTLXQNNNSNFAWTGATKYHLNGRDSLVNPGVAMATHKDDEXRFFPSSGVLIFGKXGAGANNTXLXNVMXTXEEEIKTTNPVATEQYGVVASNLQSSNTAPXTGXVNSQGALPGMVWQNRDVYLQGPIWAKIPHTDGNFHPSPLMGGFGLKHPPPQILIKNTPVPANPPXXFXPAKFASFITQYSTGQVSVEIEWELQKENSKRWNPEIQYTSNYAKSTNVDFAVNXEGVYXEPRPIGTRYLTRNL

SEQ ID NO: 1804 - protein, 737 aa, synthetic construct
  source 1..737: note = Description of Artificial Sequence: Synthetic polypeptide
  VARIANT 264: note = misc_feature - Xaa can be any naturally occurring amino acid
  VARIANT 448: note = misc_feature - Xaa can be any naturally occurring amino acid
  VARIANT 470: note = misc_feature - Xaa can be any naturally occurring amino acid
  VARIANT 533: note = misc_feature - Xaa can be any naturally occurring amino acid
  VARIANT 547: note = misc_feature - Xaa can be any naturally occurring amino acid
  VARIANT 555: note = misc_feature - Xaa can be any naturally occurring amino acid
  VARIANT 557: note = misc_feature - Xaa can be any naturally occurring amino acid
  VARIANT 561: note = misc_feature - Xaa can be any naturally occurring amino acid
  VARIANT 563: note = misc_feature - Xaa can be any naturally occurring amino acid
  VARIANT 593: note = misc_feature - Xaa can be any naturally occurring amino acid
  VARIANT 596: note = misc_feature - Xaa can be any naturally occurring amino acid
  VARIANT 662: note = misc_feature - Xaa can be any naturally occurring amino acid
  VARIANT 664: note = misc_feature - Xaa can be any naturally occurring amino acid
  VARIANT 718: note = misc_feature - Xaa can be any naturally occurring amino acid
MAADGYLPDWLEDNLSEGIREWWDLKPGAPKPKANQQKQDDGRGLVLPGYKYLGPFNGLDKGEPVNAADAAALEHDKAYDQQLKAGDNPYLRYNHADAEFQERLQEDTSFGGNLGRAVFQAKKRVLEPLGLVEEGAKTAPGKKRPVEPSPQRSPDSSTGIGKKGQQPAKKRLNFGQTGDSESVPDPQPLGEPPAGPSGLGSGTMAAGGGAPMADNNEGADGVGNASGNWHCDSTWLGDRVITTSTRTWALPTYNNHLYKQISSXSSGSTNDNHYFGYSTPWGYFDFNRFHCHFSPRDWQRLINNNWGFRPKRLNFKLFNIQVKEVTTNDGVTTIANNLTSTVQVFSDSEYQLPYVLGSAHQGCLPPFPADVFMIPQYGYLTLNNGSQAVGRSSFYCLEYFPSQMLRTGNNFTFSYTFEDVPFHSSYAHSQSLDRLMNPLIDQYLYYLXRTQSTGGTAGNRELLFSQGGPXNMSAQAKNWLPGPCYRQQRVSKTLSQNNNSNFAWTGATKYHLNGRDSLVNPGVAMATHKDDEXRFFPSSGVLIFGKXGAGANNTXLXNVMXTXEEEIKTTNPVATEQYGVVASNLQSSNTAPXTGXVNSQGALPGMVWQNRDVYLQGPIWAKIPHTDGNFHPSPLMGGFGLKHPPPQILIKNTPVPANPPAXFXPAKFASFITQYSTGQVSVEIEWELQKENSKRWNPEIQYTSNYAKSTNVDFAVNXEGVYSEPRPIGTRYLTRNL

SEQ ID NO: 1805 - DNA, 2217 bp, synthetic construct
  source 1..2217: mol_type = other DNA; note = Description of Artificial Sequence: Synthetic polynucleotide
atggctgccgatggttatcttccagattggctcgaggacactctctctgaaggaataagacagtggtggaagctcaaacctggcccaccaccaccaaagcccgcagagcggcataaggacgacagcaggggtcttgtgcttcctgggtacaagtacctcggacccttcaacggactcgacaagggagagccggtcaacgaggcagacgccgcggccctcgagcacgacaaagcctacgaccggcagctcgacagcggagacaacccgtacctcaagtacaaccacgccgacgcggagtttcaggagcgccttaaagaagatacgtcttttgggggcaacctcggacgagcagtcttccaggcgaaaaagagggttcttgaacctctgggcctggttgaggaacctgttaagacggctccgggaaagaagagaccggtagagccatcaccccagcgttctccagactcctctacgggcatcggcaagaaaggccaacagcccgccagaaaaagactcaattttggtcagactggcgactcagagtcagttccagaccctcaacctctcggagaacctccagcagcgccctctggtgtgggacctaatacaatggctgcaggcggtggcgcaccaatggcagacaataacgaaggcgccgacggagtgggtagttcctcgggaaattggcattgcgattccacatggctgggcgacagagtcatcaccaccagcacccgaacctgggccctgcccacctacaacaaccacctctacaagcaaatctccaacgggacatcgggaggagccaccaacgacaacacctacttcggctacagcaccccctgggggtattttgactttaacagattccactgccacttttcaccacgtgactggcagcgactcatcaacaacaactggggattccggcccaagagactcagcttcaagctcttcaacatccaggtcaaggaggtcacgcagaatgaaggcaccaagaccatcgccaataacctcaccagcaccatccaggtgtttacggactcggagtaccagctgccgtacgttctcggctctgcccaccagggctgcctgcctccgttcccggcggacgtgttcatgattccccagtacggctacctaacactcaacaacggtagtcaggccgtgggacgctcctccttctactgcctggaatactttccttcgcagatgctgagaaccggcaacaacttccagtttacttacaccttcgaggacgtgcctttccacagcagctacgcccacagccagagcttggaccggctgatgaatcctctgattgaccagtacctgtactacttgtctcggactcaaacaacaggaggcacggcaaatacgcagactctgggcttcagccaaggtgggcctaatacaatggccaatcaggcaaagaactggctgccaggaccctgttaccgccaacaacgcgtctcaacgacaaccgggcaaaacaacaatagcaactttgcctggactgctgggaccaaataccatctgaatggaagaaattcattggctaatcctggcatcgctatggcaacacacaaagacgacgaggagcgtttttttcccagtaacgggatcctgatttttggcaaacaaaatgctgccagagacaatgcggattacagcgatgtcatgctcaccagcgaggaagaaatcaaaaccactaaccctgtggctacagaggaatacggtatcgtggcagataacttgcagcagcaaaacacggctcctcaaattggaactgtcaacagccagggggccttacccggtatggtctggcagaaccgggacgtgtacctgcagggtcccatctgggccaagattcctcacacggacggcaacttccacccgtctccgctgatgggcggctttggcctgaaacatcctccgcctcagatcctgatcaagaacacgcctgtacctgcggatcctccgaccaccttcaaccagtcaaagctgaactctttcatcacgcaatacagcaccggacaggtcagcgtggaaattgaatgggagctgcagaaggaaaacagcaagcgctggaaccccgagatccagtacacctccaactactacaaatctacaagtgtggactttgctgttaatacagaaggcgtgtactctgaaccccgccccattggcacccgttacctcacccgtaatctgtaa

SEQ ID NO: 1806 - protein, 733 aa, synthetic construct; identical to SEQ ID NO: 1591
  source 1..733: note = Description of Artificial Sequence: Synthetic polypeptide

SEQ ID NO: 1807 - DNA, 2203 bp, synthetic construct
  source 1..2203: mol_type = other DNA; note = Description of Artificial Sequence: Synthetic polynucleotide
atgtcttttgttgatcaccctccagattggttggaagaagttggtgaaggtcttcgcgagtttttgggccttgaagcgggcccaccgaaaccaaaacccaatcagcagcatcaagatcaagcccgtggtcttgtgctgcctggttataactatctcggacccggaaacggtctcgatcgaggagagcctgtcaacagggcagacgaggtcgcgcgagagcacgacatctcgtacaacgagcagcttgaggcgggagacaacccctacctcaagtacaaccacgcggacgccgagtttcaggagaagctcgccgacgacacatccttcgggggaaacctcggaaaggcagtctttcaggccaagaaaagggttctcgaaccttttggcctggttgaagagggtgctaagacggcccctaccggaaagcggatagacgaccactttccaaaaagaaagaaggctcggaccgaagaggactccaagccttccacctcgtcagacgccgaagctggacccagcggatcccagcagctgcaaatcccagcccaaccagcctcaagtttgggagctgatacaatgtctgcgggaggtggcggcccattgggcgacaataaccaaggtgccgatggagtgggcaatgcctcgggagattggcattgcgattccacgtggatgggggacagagtcgtcaccaagtccacccgaacctgggtgctgcccagctacaacaaccaccagtaccgagagatcaaaagcggctccgtcgacggaagcaacgccaacgcctactttggatacagcaccccctgggggtactttgactttaaccgcttccacagccactggagcccccgagactggcaaagactcatcaacaactactggggcttcagaccccggtccctcagagtcaaaatcttcaacattcaagtcaaagaggtcacggtgcaggactccaccaccaccatcgccaacaacctcacctccaccgtccaagtgtttacggacgacgactaccagctgccctacgtcgtcggcaacgggaccgagggatgcctgccggccttccctccgcaggtctttacgctgccgcagtacggttacgcgacgctgaaccgcgacaacacagaaaatcccaccgagaggagcagcttcttctgcctagagtactttcccagcaagatgctgagaacgggcaacaactttgagtttacctacaactttgaggaggtgcccttccactccagcttcgctcccagtcagaacctgttcaagctggccaacccgctggtggaccagtacttgtaccgcttcgtgagcacaaataacactggcggagtccagttcaacaagaacctggccgggagatacgccaacacctacaaaaactggttcccggggcccatgggccgaacccagggctggaacctgggctccggggtcaaccgcgccagtgtcagcgccttcgccacgaccaataggatggagctcgagggcgcgagttaccaggtgcccccgcagccgaacggcatgaccaacaacctccagggcagcaacacctatgccctggagaacactatgatcttcaacagccagccggcgaacccgggcaccaccgccacgtacctcgagggcaacatgctcatcaccagcgagagcgagacgcagccggtgaaccgcgtggcgtacaacgtcggcgggcaggtggccaccaacaaccagagctccaccactgcccccgcgaccggcacgtacaacctccaggaaatcgtgcccggcagcgtgtggatggagagggacgtgtacctccaaggacccatctgggccaagatcccagagacgggggcgcactttcacccctctccggccatgggcggattcggactcaaacacccaccgcccatgatgctcatcaagaacacgcctgtgcccggaaatatcaccagcttctcggacgtgcccgtcagcagcttcatcacccagtacagcaccgggcaggtcaccgtggagatggagtgggagctcaagaaggaaaactccaagaggtggaacccagagatccagtacacaaacaactacaacgacccccagtttgtggactttgccccggacagcaccggggaatacagaaccaccagacctatcggaacccgataccttacccgacccctttaacccattcatgtcgcataccctcaataaa

SEQ ID NO: 1808 - protein, 724 aa, synthetic construct
  source 1..724: note = Description of Artificial Sequence: Synthetic polypeptide
MSFVDHPPDWLEEVGEGLREFLGLEAGPPKPKPNQQHQDQARGLVLPGYNYLGPGNGLDRGEPVNRADEVAREHDISYNEQLEAGDNPYLKYNHADAEFQEKLADDTSFGGNLGKAVFQAKKRVLEPFGLVEEGAKTAPTGKRIDDHFPKRKKARTEEDSKPSTSSDAEAGPSGSQQLQIPAQPASSLGADTMSAGGGGPLGDNNQGADGVGNASGDWHCDSTWMGDRVVTKSTRTWVLPSYNNHQYREIKSGSVDGSNANAYFGYSTPWGYFDFNRFHSHWSPRDWQRLINNYWGFRPRSLRVKIFNIQVKEVTVQDSTTTIANNLTSTVQVFTDDDYQLPYVVGNGTEGCLPAFPPQVFTLPQYGYATLNRDNTENPTERSSFFCLEYFPSKMLRTGNNFEFTYNFEEVPFHSSFAPSQNLFKLANPLVDQYLYRFVSTNNTGGVQFNKNLAGRYANTYKNWFPGPMGRTQGWNLGSGVNRASVSAFATTNRMELEGASYQVPPQPNGMTNNLQGSNTYALENTMIFNSQPANPGTTATYLEGNMLITSESETQPVNRVAYNVGGQVATNNQSSTTAPATGTYNLQEIVPGSVWMERDVYLQGPIWAKIPETGAHFHPSPAMGGFGLKHPPPMMLIKNTPVPGNITSFSDVPVSSFITQYSTGQVTVEMEWELKKENSKRWNPEIQYTNNYNDPQFVDFAPDSTGEYRTTRPIGTRYLTRPL

SEQ ID NO: 1809 - DNA, 2203 bp, synthetic construct
  source 1..2203: mol_type = other DNA; note = Description of Artificial Sequence: Synthetic polynucleotide
atgtcttttgttgatcaccctccagattggttggaagaagttggtgaaggtcttcgcgagtttttgggccttgaagcgggcccaccgaaaccaaaacccaatcagcagcatcaagatcaagcccgtggtcttgtgctgcctggttataactatctcggacccggaaacggtctcgatcgaggagagcctgtcaacagggcagacgaggtcgcgcgagagcacgacatctcgtacaacgagcagcttgaggcgggagacaacccctacctcaagtacaaccacgcggacgccgagtttcaggagaagctcgccgacgacacatccttcgggggaaacctcggaaaggcagtctttcaggccaagaaaagggttctcgaaccttttggcctggttgaagagggtgctaagacggcccctaccggaaagcggatagacgaccactttccaaaaagaaagaaggctcggaccgaagaggactccaagccttccacctcgtcagacgccgaagctggacccagcggatcccagcagctgcaaatcccagcccaaccagcctcaagtttgggagctgatacaatgtctgcgggaggtggcggcccattgggcgacaataaccaaggtgccgatggagtgggcaatgcctcgggagattggcattgcgattccacgtggatgggggacagagtcgtcaccaagtccacccgaacctgggtgctgcccagctacaacaaccaccagtaccgagagatcaaaagcggctccgtcgacggaagcaacgccaacgcctactttggatacagcaccccctgggggtactttgactttaaccgcttccacagccactggagcccccgagactggcaaagactcatcaacaactactggggcttcagaccccggtccctcagagtcaaaatcttcaacattcaagtcaaagaggtcacggtgcaggactccaccaccaccatcgccaacaacctcacctccaccgtccaagtgtttacggacgacgactaccagctgccctacgtcgtcggcaacgggaccgagggatgcctgccggccttccctccgcaggtctttacgctgccgcagtacggttacgcgacgctgaaccgcgacaacacagaaaatcccaccgagaggagcagcttcttctgcctagagtactttcccagcaagatgctgagaacgggcaacaactttgagtttacctacaactttgaggaggtgcccttccactccagcttcgctcccagtcagaacctgttcaagctggccaacccgctggtggaccagtacttgtaccgcttcgtgagcacaaataacactggcggagtccagttcaacaagaacctggccgggagatacgccaacacctacaaaaactggttcccggggcccatgggccgaacccagggctggaacctgggctccggggtcaaccgcgccagtgtcagcgccttcgccacgaccaataggatggagctcgagggcgcgagttaccaggtgcccccgcagccgaacggcatgaccaacaacctccagggcagcaacacctatgccctggagaacactatgatcttcaacagccagccggcgaacccgggcaccaccgccacgtacctcgagggcaacatgctcatcaccagcgagagcgagacgcagccggtgaaccgcgtggcgtacaacgtcggcgggcagatggccaccaacaaccagagctccaccactgcccccgcgaccggcacggtcaacctccaggaaatcgtgcccggcagcgtgtggatggagagggacgtgtacctccaaggacccatctgggccaagatcccagagacgggggcgcactttcacccctctccggccatgggcggattcggactcaaacacccaccgcccatgatgctcatcaagaacacgcctgtgcccggaaatatcaccagcttctcggacgtgcccgtcagcagcttcatcacccagtacagcaccgggcaggtcaccgtggagatggagtgggagctcaagaaggaaaactccaagaggtggaacccagagatccagtacacaaacaactacaacgacccccagtttgtggactttgccccggacagcaccggggaatacagaaccaccagacctatcggaacccgataccttacccgacccctttaacccattcatgtcgcataccctcaataaa

SEQ ID NO: 1810 - protein, 724 aa, synthetic construct
  source 1..724: note = Description of Artificial Sequence: Synthetic polypeptide
MSFVDHPPDWLEEVGEGLREFLGLEAGPPKPKPNQQHQDQARGLVLPGYNYLGPGNGLDRGEPVNRADEVAREHDISYNEQLEAGDNPYLKYNHADAEFQEKLADDTSFGGNLGKAVFQAKKRVLEPFGLVEEGAKTAPTGKRIDDHFPKRKKARTEEDSKPSTSSDAEAGPSGSQQLQIPAQPASSLGADTMSAGGGGPLGDNNQGADGVGNASGDWHCDSTWMGDRVVTKSTRTWVLPSYNNHQYREIKSGSVDGSNANAYFGYSTPWGYFDFNRFHSHWSPRDWQRLINNYWGFRPRSLRVKIFNIQVKEVTVQDSTTTIANNLTSTVQVFTDDDYQLPYVVGNGTEGCLPAFPPQVFTLPQYGYATLNRDNTENPTERSSFFCLEYFPSKMLRTGNNFEFTYNFEEVPFHSSFAPSQNLFKLANPLVDQYLYRFVSTNNTGGVQFNKNLAGRYANTYKNWFPGPMGRTQGWNLGSGVNRASVSAFATTNRMELEGASYQVPPQPNGMTNNLQGSNTYALENTMIFNSQPANPGTTATYLEGNMLITSESETQPVNRVAYNVGGQMATNNQSSTTAPATGTVNLQEIVPGSVWMERDVYLQGPIWAKIPETGAHFHPSPAMGGFGLKHPPPMMLIKNTPVPGNITSFSDVPVSSFITQYSTGQVTVEMEWELKKENSKRWNPEIQYTNNYNDPQFVDFAPDSTGEYRTTRPIGTRYLTRPL

SEQ ID NO: 1811 - DNA, 2203 bp, synthetic construct
  source 1..2203: mol_type = other DNA; note = Description of Artificial Sequence: Synthetic polynucleotide
atgtcttttgttgatcaccctccagattggttggaagaagttggtgaaggtcttcgcgagtttttgggccttgaagcgggcccaccgaaaccaaaacccaatcagcagcatcaagatcaagcccgtggtcttgtgctgcctggttataactatctcggacccggaaacggtctcgatcgaggagagcctgtcaacagggcagacgaggtcgcgcgagagcacgacatctcgtacaacgagcagcttgaggcgggagacaacccctacctcaagtacaaccacgcggacgccgagtttcaggagaagctcgccgacgacacatccttcgggggaaacctcggaaaggcagtctttcaggccaagaaaagggttctcgaaccttttggcctggttgaagagggtgctaagacggcccctaccggaaagcggatagacgaccactttccaaaaagaaagaaggctcggaccgaagaggactccaagccttccacctcgtcagacgccgaagctggacccagcggatcccagcagctgcaaatcccagcccaaccagcctcaagtttgggagctgatacaatgtctgcgggaggtggcggcccattgggcgacaataaccaaggtgccgatggagtgggcaatgcctcgggagattggcattgcgattccacgtggatgggggacagagtcgtcaccaagtccacccgaacctgggtgctgcccagctacaacaaccaccagtaccgagagatcaaaagcggctccgtcgacggaagcaacgccaacgcctactttggatacagcaccccctgggggtactttgactttaaccgcttccacagccactggagcccccgagactggcaaagactcatcaacaactactggggcttcagaccccggtccctcagagtcaaaatcttcaacattcaagtcaaagaggtcacggtgcaggactccaccaccaccatcgccaacaacctcacctccaccgtccaagtgtttacggacgacgactaccagctgccctacgtcgtcggcaacgggaccgagggatgcctgccggccttccctccgcaggtctttacgctgccgcagtacggttacgcgacgctgaaccgcgacaacacagaaaatcccaccgagaggagcagcttcttctgcctagagtactttcccagcaagatgctgagaacgggcaacaactttgagtttacctacaactttgaggaggtgcccttccactccagcttcgctcccagtcagaacctgttcaagctggccaacccgctggtggaccagtacttgtaccgcttcgtgagcacaaataacactggcggagtccagttcaacaagaacctggccgggagatacgccaacacctacaaaaactggttcccggggcccatgggccgaacccagggctggaacctgggctccggggtcaaccgcgccagtgtcagcgccttcgccacgaccaataggatggagctcgagggcgcgagttaccaggtgcccccgcagccgaacggcatgaccaacaacctccagggcagcaacacctatgccctggagaacactatgatcttcaacagccagccggcgaacccgggcaccaccgccacgtacctcgagggcaacatgctcatcaccagcgagagcgagacgcagccggtgaaccgcgtggcgtacaacgtcggcgggcagatggccaccaacaaccagagctccaccactgcccccgcgaccggcacgtacaacacccaggaaatcgtgcccggcagcgtgtggatggagagggacgtgtacctccaaggacccatctgggccaagatcccagagacgggggcgcactttcacccctctccggccatgggcggattcggactcaaacacccaccgcccatgatgctcatcaagaacacgcctgtgcccggaaatatcaccagcttctcggacgtgcccgtcagcagcttcatcacccagtacagcaccgggcaggtcaccgtggagatggagtgggagctcaagaaggaaaactccaagaggtggaacccagagatccagtacacaaacaactacaacgacccccagtttgtggactttgccccggacagcaccggggaatacagaaccaccagacctatcggaacccgataccttacccgacccctttaacccattcatgtcgcataccctcaataaa

SEQ ID NO: 1812 - protein, 724 aa, synthetic construct
  source 1..724: note = Description of Artificial Sequence: Synthetic polypeptide
MSFVDHPPDWLEEVGEGLREFLGLEAGPPKPKPNQQHQDQARGLVLPGYNYLGPGNGLDRGEPVNRADEVAREHDISYNEQLEAGDNPYLKYNHADAEFQEKLADDTSFGGNLGKAVFQAKKRVLEPFGLVEEGAKTAPTGKRIDDHFPKRKKARTEEDSKPSTSSDAEAGPSGSQQLQIPAQPASSLGADTMSAGGGGPLGDNNQGADGVGNASGDWHCDSTWMGDRVVTKSTRTWVLPSYNNHQYREIKSGSVDGSNANAYFGYSTPWGYFDFNRFHSHWSPRDWQRLINNYWGFRPRSLRVKIFNIQVKEVTVQDSTTTIANNLTSTVQVFTDDDYQLPYVVGNGTEGCLPAFPPQVFTLPQYGYATLNRDNTENPTERSSFFCLEYFPSKMLRTGNNFEFTYNFEEVPFHSSFAPSQNLFKLANPLVDQYLYRFVSTNNTGGVQFNKNLAGRYANTYKNWFPGPMGRTQGWNLGSGVNRASVSAFATTNRMELEGASYQVPPQPNGMTNNLQGSNTYALENTMIFNSQPANPGTTATYLEGNMLITSESETQPVNRVAYNVGGQMATNNQSSTTAPATGTYNTQEIVPGSVWMERDVYLQGPIWAKIPETGAHFHPSPAMGGFGLKHPPPMMLIKNTPVPGNITSFSDVPVSSFITQYSTGQVTVEMEWELKKENSKRWNPEIQYTNNYNDPQFVDFAPDSTGEYRTTRPIGTRYLTRPL

SEQ ID NO: 1813 - DNA, 2203 bp, synthetic construct
  source 1..2203: mol_type = other DNA; note = Description of Artificial Sequence: Synthetic polynucleotide
atgtcttttgttgatcaccctccagattggttggaagaagttggtgaaggtcttcgcgagtttttgggccttgaagcgggcccaccgaaaccaaaacccaatcagcagcatcaagatcaagcccgtggtcttgtgctgcctggttataactatctcggacccggaaacggtctcgatcgaggagagcctgtcaacagggcagacgaggtcgcgcgagagcacgacatctcgtacaacgagcagcttgaggcgggagacaacccctacctcaagtacaaccacgcggacgccgagtttcaggagaagctcgccgacgacacatccttcgggggaaacctcggaaaggcagtctttcaggccaagaaaagggttctcgaaccttttggcctggttgaagagggtgctaagacggcccctaccggaaagcggatagacgaccactttccaaaaagaaagaaggctcggaccgaagaggactccaagccttccacctcgtcagacgccgaagctggacccagcggatcccagcagctgcaaatcccagcccaaccagcctcaagtttgggagctgatacaatgtctgcgggaggtggcggcccattgggcgacaataaccaaggtgccgatggagtgggcaatgcctcgggagattggcattgcgattccacgtggatgggggacagagtcgtcaccaagtccacccgaacctgggtgctgcccagctacaacaaccaccagtaccgagagatcaaaagcggctccgtcgacggaagcaacgccaacgcctactttggatacagcaccccctgggggtactttgactttaaccgcttccacagccactggagcccccgagactggcaaagactcatcaacaactactggggcttcagaccccggtccctcagagtcaaaatcttcaacattcaagtcaaagaggtcacggtgcaggactccaccaccaccatcgccaacaacctcacctccaccgtccaagtgtttacggacgacgactaccagctgccctacgtcgtcggcaacgggaccgagggatgcctgccggccttccctccgcaggtctttacgctgccgcagtacggttacgcgacgctgaaccgcgacaacacagaaaatcccaccgagaggagcagcttcttctgcctagagtactttcccagcaagatgctgagaacgggcaacaactttgagtttacctacaactttgaggaggtgcccttccactccagcttcgctcccagtcagaacctgttcaagctggccaacccgctggtggaccagtacttgtaccgcttcgtgagcacaaataacactggcggagtccagttcaacaagaacctggccgggagatacgccaacacctacaaaaactggttcccggggcccatgggccgaacccagggctggaacctgggctccggggtcaaccgcgccagtgtcagcgccttcgccacgaccaataggatggagctcgagggcgcgagttaccaggtgcccccgcagccgaacggcatgaccaacaacctccagggcagcaacacctatgccctggagaacactatgatcttcaacagccagccggcgaacccgggcaccaccgccacgtacctcgagggcaacatgctcatcaccagcgagagcgagacgcagccggtgaaccgcgtggcgtacaacgtcggcgggcagatggccaccaacaaccagagctccaccactgcccccgcgaccggcacggtcaacacccaggaaatcgtgcccggcagcgtgtggatggagagggacgtgtacctccaaggacccatctgggccaagatcccagagacgggggcgcactttcacccctctccggccatgggcggattcggactcaaacacccaccgcccatgatgctcatcaagaacacgcctgtgcccggaaatatcaccagcttctcggacgtgcccgtcagcagcttcatcacccagtacagcaccgggcaggtcaccgtggagatggagtgggagctcaagaaggaaaactccaagaggtggaacccagagatccagtacacaaacaactacaacgacccccagtttgtggactttgccccggacagcaccggggaatacagaaccaccagacctatcggaacccgataccttacccgacccctttaacccattcatgtcgcataccctcaataaa

SEQ ID NO: 1814 - protein, 724 aa, synthetic construct
  source 1..724: note = Description of Artificial Sequence: Synthetic polypeptide
MSFVDHPPDWLEEVGEGLREFLGLEAGPPKPKPNQQHQDQARGLVLPGYNYLGPGNGLDRGEPVNRADEVAREHDISYNEQLEAGDNPYLKYNHADAEFQEKLADDTSFGGNLGKAVFQAKKRVLEPFGLVEEGAKTAPTGKRIDDHFPKRKKARTEEDSKPSTSSDAEAGPSGSQQLQIPAQPASSLGADTMSAGGGGPLGDNNQGADGVGNASGDWHCDSTWMGDRVVTKSTRTWVLPSYNNHQYREIKSGSVDGSNANAYFGYSTPWGYFDFNRFHSHWSPRDWQRLINNYWGFRPRSLRVKIFNIQVKEVTVQDSTTTIANNLTSTVQVFTDDDYQLPYVVGNGTEGCLPAFPPQVFTLPQYGYATLNRDNTENPTERSSFFCLEYFPSKMLRTGNNFEFTYNFEEVPFHSSFAPSQNLFKLANPLVDQYLYRFVSTNNTGGVQFNKNLAGRYANTYKNWFPGPMGRTQGWNLGSGVNRASVSAFATTNRMELEGASYQVPPQPNGMTNNLQGSNTYALENTMIFNSQPANPGTTATYLEGNMLITSESETQPVNRVAYNVGGQMATNNQSSTTAPATGTVNTQEIVPGSVWMERDVYLQGPIWAKIPETGAHFHPSPAMGGFGLKHPPPMMLIKNTPVPGNITSFSDVPVSSFITQYSTGQVTVEMEWELKKENSKRWNPEIQYTNNYNDPQFVDFAPDSTGEYRTTRPIGTRYLTRPL

SEQ ID NO: 1815 - DNA, 2203 bp, synthetic construct
  source 1..2203: mol_type = other DNA; note = Description of Artificial Sequence: Synthetic polynucleotide
atgtcttttgttgatcaccctccagattggttggaagaagttggtgaaggtcttcgcgagtttttgggccttgaagcgggcccaccgaaaccaaaacccaatcagcagcatcaagatcaagcccgtggtcttgtgctgcctggttataactatctcggacccggaaacggtctcgatcgaggagagcctgtcaacagggcagacgaggtcgcgcgagagcacgacatctcgtacaacgagcagcttgaggcgggagacaacccctacctcaagtacaaccacgcggacgccgagtttcaggagaagctcgccgacgacacatccttcgggggaaacctcggaaaggcagtctttcaggccaagaaaagggttctcgaaccttttggcctggttgaagagggtgctaagacggcccctaccggaaagcggatagacgaccactttccaaaaagaaagaaggctcggaccgaagaggactccaagccttccacctcgtcagacgccgaagctggacccagcggatcccagcagctgcaaatcccagcccaaccagcctcaagtttgggagctgatacaatgtctgcgggaggtggcggcccattgggcgacaataaccaaggtgccgatggagtgggcaatgcctcgggagattggcattgcgattccacgtggatgggggacagagtcgtcaccaagtccacccgaacctgggtgctgcccagctacaacaaccaccagtaccgagagatcaaaagcggctccgtcgacggaagcaacgccaacgcctactttggatacagcaccccctgggggtactttgactttaaccgcttccacagccactggagcccccgagactggcaaagactcatcaacaactactggggcttcagaccccggtccctcagagtcaaaatcttcaacattcaagtcaaagaggtcacggtgcaggactccaccaccaccatcgccaacaacctcacctccaccgtccaagtgtttacggacgacgactaccagctgccctacgtcgtcggcaacgggaccgagggatgcctgccggccttccctccgcaggtctttacgctgccgcagtacggttacgcgacgctgaaccgcgacaacacagaaaatcccaccgagaggagcagcttcttctgcctagagtactttcccagcaagatgctgagaacgggcaacaactttgagtttacctacaactttgaggaggtgcccttccactccagcttcgctcccagtcagaacctgttcaagctggccaacccgctggtggaccagtacttgtaccgcttcgtgagcacaaataacactggcggagtccagttcaacaagaacctggccgggagatacgccaacacctacaaaaactggttcccggggcccatgggccgaacccagggctggaacctgggctccggggtcaaccgcgccagtgtcagcgccttcgccacgaccaataggatggagctcgagggcgcgagttaccaggtgcccccgcagccgaacggcatgaccaacaacctccagggcagcaacacctatgccctggagaacactatgatcttcaacagccagccggcgaacccgggcaccaccgccacgtacctcgagggcaacatgctcatcaccagcgagagcgagacgcagccggtgaaccgcgtggcgtacaacgtcggcgggcagatggccaccaacaaccagagctccaccactgcccccgcgaccggcacgtacaacctccaggaaatcgtgcccggcagcgtgtggatggagagggacgtgtacctccaaggacccatctgggccaagatcccagagacgggggcgcactttcacccctctccggccatgggcggattcggactcaaacacccaccgcccatgatgctcatcaagaacacgcctgtgcccggaaatatcaccagcttctcggccgtgcccgtcagcagcttcatcacccagtacagcaccgggcaggtcaccgtggagatggagtgggagctcaagaaggaaaactccaagaggtggaacccagagatccagtacacaaacaactacaacgacccccagtttgtggactttgccccggacagcaccggggaatacagaaccaccagacctatcggaacccgataccttacccgacccctttaacccattcatgtcgcataccctcaataaa

SEQ ID NO: 1816 - protein, 724 aa, synthetic construct
  source 1..724: note = Description of Artificial Sequence: Synthetic polypeptide
MSFVDHPPDWLEEVGEGLREFLGLEAGPPKPKPNQQHQDQARGLVLPGYNYLGPGNGLDRGEPVNRADEVAREHDISYNEQLEAGDNPYLKYNHADAEFQEKLADDTSFGGNLGKAVFQAKKRVLEPFGLVEEGAKTAPTGKRIDDHFPKRKKARTEEDSKPSTSSDAEAGPSGSQQLQIPAQPASSLGADTMSAGGGGPLGDNNQGADGVGNASGDWHCDSTWMGDRVVTKSTRTWVLPSYNNHQYREIKSGSVDGSNANAYFGYSTPWGYFDFNRFHSHWSPRDWQRLINNYWGFRPRSLRVKIFNIQVKEVTVQDSTTTIANNLTSTVQVFTDDDYQLPYVVGNGTEGCLPAFPPQVFTLPQYGYATLNRDNTENPTERSSFFCLEYFPSKMLRTGNNFEFTYNFEEVPFHSSFAPSQNLFKLANPLVDQYLYRFVSTNNTGGVQFNKNLAGRYANTYKNWFPGPMGRTQGWNLGSGVNRASVSAFATTNRMELEGASYQVPPQPNGMTNNLQGSNTYALENTMIFNSQPANPGTTATYLEGNMLITSESETQPVNRVAYNVGGQMATNNQSSTTAPATGTYNLQEIVPGSVWMERDVYLQGPIWAKIPETGAHFHPSPAMGGFGLKHPPPMMLIKNTPVPGNITSFSAVPVSSFITQYSTGQVTVEMEWELKKENSKRWNPEIQYTNNYNDPQFVDFAPDSTGEYRTTRPIGTRYLTRPL

SEQ ID NO: 1817 - DNA, 2203 bp, synthetic construct
  source 1..2203: mol_type = other DNA; note = Description of Artificial Sequence: Synthetic polynucleotide
atgtcttttgttgatcaccctccagattggttggaagaagttggtgaaggtcttcgcgagtttttgggccttgaagcgggcccaccgaaaccaaaacccaatcagcagcatcaagatcaagcccgtggtcttgtgctgcctggttataactatctcggacccggaaacggtctcgatcgaggagagcctgtcaacagggcagacgaggtcgcgcgagagcacgacatctcgtacaacgagcagcttgaggcgggagacaacccctacctcaagtacaaccacgcggacgccgagtttcaggagaagctcgccgacgacacatccttcgggggaaacctcggaaaggcagtctttcaggccaagaaaagggttctcgaaccttttggcctggttgaagagggtgctaagacggcccctaccggaaagcggatagacgaccactttccaaaaagaaagaaggctcggaccgaagaggactccaagccttccacctcgtcagacgccgaagctggacccagcggatcccagcagctgcaaatcccagcccaaccagcctcaagtttgggagctgatacaatgtctgcgggaggtggcggcccattgggcgacaataaccaaggtgccgatggagtgggcaatgcctcgggagattggcattgcgattccacgtggatgggggacagagtcgtcaccaagtccacccgaacctgggtgctgcccagctacaacaaccaccagtaccgagagatcaaaagcggctccgtcgacggaagcaacgccaacgcctactttggatacagcaccccctgggggtactttgactttaaccgcttccacagccactggagcccccgagactggcaaagactcatcaacaactactggggcttcagaccccggtccctcagagtcaaaatcttcaacattcaagtcaaagaggtcacggtgcaggactccaccaccaccatcgccaacaacctcacctccaccgtccaagtgtttatggacgacgactaccagctgccctacgtcgtcggcaacgggaccgagggatgcctgccggccttccctccgcaggtctttacgctgccgcagtacggttacgcgacgctgaaccgcgacaacacagaaaatcccaccgagaggagcagcttcttctgcctagagtactttcccagcaagatgctgagaacgggcaacaactttgagtttacctacaactttgaggaggtgcccttccactccagcttcgctcccagtcagaacctgttcaagctggccaacccgctggtggaccagtacttgtaccgcttcgtgagcacaaataacactggcggagtccagttcaacaagaacctggccgggagatacgccaacacctacaaaaactggttcccggggcccatgggccgaacccagggctggaacctgggctccggggtcaaccgcgccagtgtcagcgccttcgccacgaccaataggatggagctcgagggcgcgagttaccaggtgcccccgcagccgaacggcatgaccaacaacctccagggcagcaacacctatgccctggagaacactatgatcttcaacagccagccggcgaacccgggcaccaccgccacgtacctcgagggcaacatgctcatcaccagcgagagcgagacgcagccggtgaaccgcgtggcgtacaacgtcggcgggcagatggccaccaacaaccagagctccaccactgcccccgcgaccggcacgtacaacctccaggaaatcgtgcccggcagcgtgtggatggagagggacgtgtacctccaaggacccatctgggccaagatcccagagacgggggcgcactttcacccctctccggccatgggcggattcggactcaaacacccaccgcccatgatgctcatcaagaacacgcctgtgcccggaaatatcaccagcttctcggacgtgcccgtcagcagcttcatcacccagtacagcaccgggcaggtcaccgtggagatggagtgggagctcaagaaggaaaactccaagaggtggaacccagagatccagtacacaaacaactacaacgacccccagtttgtggactttgccccggacagcaccggggaatacagaaccaccagacctatcggaacccgataccttacccgacccctttaacccattcatgtcgcataccctcaataaa

SEQ ID NO: 1818 - protein, 724 aa, synthetic construct
  source 1..724: note = Description of Artificial Sequence: Synthetic polypeptide
MSFVDHPPDWLEEVGEGLREFLGLEAGPPKPKPNQQHQDQARGLVLPGYNYLGPGNGLDRGEPVNRADEVAREHDISYNEQLEAGDNPYLKYNHADAEFQEKLADDTSFGGNLGKAVFQAKKRVLEPFGLVEEGAKTAPTGKRIDDHFPKRKKARTEEDSKPSTSSDAEAGPSGSQQLQIPAQPASSLGADTMSAGGGGPLGDNNQGADGVGNASGDWHCDSTWMGDRVVTKSTRTWVLPSYNNHQYREIKSGSVDGSNANAYFGYSTPWGYFDFNRFHSHWSPRDWQRLINNYWGFRPRSLRVKIFNIQVKEVTVQDSTTTIANNLTSTVQVFMDDDYQLPYVVGNGTEGCLPAFPPQVFTLPQYGYATLNRDNTENPTERSSFFCLEYFPSKMLRTGNNFEFTYNFEEVPFHSSFAPSQNLFKLANPLVDQYLYRFVSTNNTGGVQFNKNLAGRYANTYKNWFPGPMGRTQGWNLGSGVNRASVSAFATTNRMELEGASYQVPPQPNGMTNNLQGSNTYALENTMIFNSQPANPGTTATYLEGNMLITSESETQPVNRVAYNVGGQMATNNQSSTTAPATGTYNLQEIVPGSVWMERDVYLQGPIWAKIPETGAHFHPSPAMGGFGLKHPPPMMLIKNTPVPGNITSFSDVPVSSFITQYSTGQVTVEMEWELKKENSKRWNPEIQYTNNYNDPQFVDFAPDSTGEYRTTRPIGTRYLTRPL

SEQ ID NO: 1819 - DNA, 2203 bp, synthetic construct
  source 1..2203: mol_type = other DNA; note = Description of Artificial Sequence: Synthetic polynucleotide
atgtcttttgttgatcaccctccagattggttggaagaagttggtgaaggtcttcgcgagtttttgggccttgaagcgggcccaccgaaaccaaaacccaatcagcagcatcaagatcaagcccgtggtcttgtgctgcctggttataactatctcggacccggaaacggtctcgatcgaggagagcctgtcaacagggcagacgaggtcgcgcgagagcacgacatctcgtacaacgagcagcttgaggcgggagacaacccctacctcaagtacaaccacgcggacgccgagtttcaggagaagctcgccgacgacacatccttcgggggaaacctcggaaaggcagtctttcaggccaagaaaagggttctcgaaccttttggcctggttgaagagggtgctaagacggcccctaccggaaagcggatagacgaccactttccaaaaagaaagaaggctcggaccgaagaggactccaagccttccacctcgtcagacgccgaagctggacccagcggatcccagcagctgcaaatcccagcccaaccagcctcaagtttgggagctgatacaatgtctgcgggaggtggcggcccattgggcgacaataaccaaggtgccgatggagtgggcaatgcctcgggagattggcattgcgattccacgtggatgggggacagagtcgtcaccaagtccacccgaacctgggtgctgcccagctacaacaaccaccagtaccgagagatcaaaagcggctccgtcgacggaagcaacgccaacgcctactttggatacagcaccccctgggggtactttgactttaaccgcttccacagccactggagcccccgagactggcaaagactcatcaacaactactggggcttcagaccccggtccctcagagtcaaaatcttcaacattcaagtcaaagaggtcacggtgcaggactccaccaccaccatcgccaacaacctcacctccaccgtcgatgtgtttacggacgacgactaccagctgccctacgtcgtcggcaacgggaccgagggatgcctgccggccttccctccgcaggtctttacgctgccgcagtacggttacgcgacgctgaaccgcgacaacacagaaaatcccaccgagaggagcagcttcttctgcctagagtactttcccagcaagatgctgagaacgggcaacaactttgagtttacctacaactttgaggaggtgcccttccactccagcttcgctcccagtcagaacctgttcaagctggccaacccgctggtggaccagtacttgtaccgcttcgtgagcacaaataacactggcggagtccagttcaacaagaacctggccgggagatacgccaacacctacaaaaactggttcccggggcccatgggccgaacccagggctggaacctgggctccggggtcaaccgcgccagtgtcagcgccttcgccacgaccaataggatggagctcgagggcgcgagttaccaggtgcccccgcagccgaacggcatgaccaacaacctccagggcagcaacacctatgccctggagaacactatgatcttcaacagccagccggcgaacccgggcaccaccgccacgtacctcgagggcaacatgctcatcaccagcgagagcgagacgcagccggtgaaccgcgtggcgtacaacgtcggcgggcagatggccaccaacaaccagagctccaccactgcccccgcgaccggcacgtacaacctccaggaaatcgtgcccggcagcgtgtggatggagagggacgtgtacctccaaggacccatctgggccaagatcccagagacgggggcgcactttcacccctctccggccatgggcggattcggactcaaacacccaccgcccatgatgctcatcaagaacacgcctgtgcccggaaatatcaccagcttctcggacgtgcccgtcagcagcttcatcacccagtacagcaccgggcaggtcaccgtggagatggagtgggagctcaagaaggaaaactccaagaggtggaacccagagatccagtacacaaacaactacaacgacccccagtttgtggactttgccccggacagcaccggggaatacagaaccaccagacctatcggaacccgataccttacccgacccctttaacccattcatgtcgcataccctcaataaa

SEQ ID NO: 1820 - protein, 724 aa, synthetic construct
  source 1..724: note = Description of Artificial Sequence: Synthetic polypeptide
MSFVDHPPDWLEEVGEGLREFLGLEAGPPKPKPNQQHQDQARGLVLPGYNYLGPGNGLDRGEPVNRADEVAREHDISYNEQLEAGDNPYLKYNHADAEFQEKLADDTSFGGNLGKAVFQAKKRVLEPFGLVEEGAKTAPTGKRIDDHFPKRKKARTEEDSKPSTSSDAEAGPSGSQQLQIPAQPASSLGADTMSAGGGGPLGDNNQGADGVGNASGDWHCDSTWMGDRVVTKSTRTWVLPSYNNHQYREIKSGSVDGSNANAYFGYSTPWGYFDFNRFHSHWSPRDWQRLINNYWGFRPRSLRVKIFNIQVKEVTVQDSTTTIANNLTSTVDVFTDDDYQLPYVVGNGTEGCLPAFPPQVFTLPQYGYATLNRDNTENPTERSSFFCLEYFPSKMLRTGNNFEFTYNFEEVPFHSSFAPSQNLFKLANPLVDQYLYRFVSTNNTGGVQFNKNLAGRYANTYKNWFPGPMGRTQGWNLGSGVNRASVSAFATTNRMELEGASYQVPPQPNGMTNNLQGSNTYALENTMIFNSQPANPGTTATYLEGNMLITSESETQPVNRVAYNVGGQMATNNQSSTTAPATGTYNLQEIVPGSVWMERDVYLQGPIWAKIPETGAHFHPSPAMGGFGLKHPPPMMLIKNTPVPGNITSFSDVPVSSFITQYSTGQVTVEMEWELKKENSKRWNPEIQYTNNYNDPQFVDFAPDSTGEYRTTRPIGTRYLTRPL

SEQ ID NO: 1821 - DNA, 2203 bp, synthetic construct
  source 1..2203: mol_type = other DNA; note = Description of Artificial Sequence: Synthetic polynucleotide
atgtcttttgttgatcaccctccagattggttggaagaagttggtgaaggtcttcgcgagtttttgggccttgaagcgggcccaccgaaaccaaaacccaatcagcagcatcaagatcaagcccgtggtcttgtgctgcctggttataactatctcggacccggaaacggtctcgatcgaggagagcctgtcaacagggcagacgaggtcgcgcgagagcacgacatctcgtacaacgagcagcttgaggcgggagacaacccctacctcaagtacaaccacgcggacgccgagtttcaggagaagctcgccgacgacacatccttcgggggaaacctcggaaaggcagtctttcaggccaagaaaagggttctcgaaccttttggcctggttgaagagggtgctaagacggcccctaccggaaagcggatagacgaccactttccaaaaagaaagaaggctcggaccgaagaggactccaagccttccacctcgtcagacgccgaagctggacccagcggatcccagcagctgcaaatcccagcccaaccagcctcaagtttgggagctgatacaatgtctgcgggaggtggcggcccattgggcgacaataaccaaggtgccgatggagtgggcaatgcctcgggagattggcattgcgattccacgtggatgggggacagagtcgtcaccaagtccacccgaacctgggtgctgcccagctacaacaaccaccagtaccgagagatcaaaagcggctccgtcgacggaagcaacgccaacgcctactttggatacagcaccccctgggggtactttgactttaaccgcttccacagccactggagcccccgagactggcaaagactcatcaacaactactggggcttcagaccccggtccctcagagtcaaaatcttcaacattcaagtcaaagaggtcacggtgcaggactccaccaccaccatcgccaacaacctcacctccaccgtccaagtgtttacggacgacgactaccagctgccctacgtcgtcggcaacgggacccagggatgcctgccggccttccctccgcaggtctttacgctgccgcagtacggttacgcgacgctgaaccgcgacaacacagaaaatcccaccgagaggagcagcttcttctgcctagagtactttcccagcaagatgctgagaacgggcaacaactttgagtttacctacaactttgaggaggtgcccttccactccagcttcgctcccagtcagaacctgttcaagctggccaacccgctggtggaccagtacttgtaccgcttcgtgagcacaaataacactggcggagtccagttcaacaagaacctggccgggagatacgccaacacctacaaaaactggttcccggggcccatgggccgaacccagggctggaacctgggctccggggtcaaccgcgccagtgtcagcgccttcgccacgaccaataggatggagctcgagggcgcgagttaccaggtgcccccgcagccgaacggcatgaccaacaacctccagggcagcaacacctatgccctggagaacactatgatcttcaacagccagccggcgaacccgggcaccaccgccacgtacctcgagggcaacatgctcatcaccagcgagagcgagacgcagccggtgaaccgcgtggcgtacaacgtcggcgggcagatggccaccaacaaccagagctccaccactgcccccgcgaccggcacgtacaacctccaggaaatcgtgcccggcagcgtgtggatggagagggacgtgtacctccaaggacccatctgggccaagatcccagagacgggggcgcactttcacccctctccggccatgggcggattcggactcaaacacccaccgcccatgatgctcatcaagaacacgcctgtgcccggaaatatcaccagcttctcggacgtgcccgtcagcagcttcatcacccagtacagcaccgggcaggtcaccgtggagatggagtgggagctcaagaaggaaaactccaagaggtggaacccagagatccagtacacaaacaactacaacgacccccagtttgtggactttgccccggacagcaccggggaatacagaaccaccagacctatcggaacccgataccttacccgacccctttaacccattcatgtcgcataccctcaataaa

SEQ ID NO: 1822 - protein, 724 aa, synthetic construct
  source 1..724: note = Description of Artificial Sequence: Synthetic polypeptide
MSFVDHPPDWLEEVGEGLREFLGLEAGPPKPKPNQQHQDQARGLVLPGYNYLGPGNGLDRGEPVNRADEVAREHDISYNEQLEAGDNPYLKYNHADAEFQEKLADDTSFGGNLGKAVFQAKKRVLEPFGLVEEGAKTAPTGKRIDDHFPKRKKARTEEDSKPSTSSDAEAGPSGSQQLQIPAQPASSLGADTMSAGGGGPLGDNNQGADGVGNASGDWHCDSTWMGDRVVTKSTRTWVLPSYNNHQYREIKSGSVDGSNANAYFGYSTPWGYFDFNRFHSHWSPRDWQRLINNYWGFRPRSLRVKIFNIQVKEVTVQDSTTTIANNLTSTVQVFTDDDYQLPYVVGNGTQGCLPAFPPQVFTLPQYGYATLNRDNTENPTERSSFFCLEYFPSKMLRTGNNFEFTYNFEEVPFHSSFAPSQNLFKLANPLVDQYLYRFVSTNNTGGVQFNKNLAGRYANTYKNWFPGPMGRTQGWNLGSGVNRASVSAFATTNRMELEGASYQVPPQPNGMTNNLQGSNTYALENTMIFNSQPANPGTTATYLEGNMLITSESETQPVNRVAYNVGGQMATNNQSSTTAPATGTYNLQEIVPGSVWMERDVYLQGPIWAKIPETGAHFHPSPAMGGFGLKHPPPMMLIKNTPVPGNITSFSDVPVSSFITQYSTGQVTVEMEWELKKENSKRWNPEIQYTNNYNDPQFVDFAPDSTGEYRTTRPIGTRYLTRPL

SEQ ID NO: 1823 - DNA, 2203 bp, synthetic construct
  source 1..2203: mol_type = other DNA; note = Description of Artificial Sequence: Synthetic polynucleotide
atgtcttttgttgatcaccctccagattggttggaagaagttggtgaaggtcttcgcgagtttttgggccttgaagcgggcccaccgaaaccaaaacccaatcagcagcatcaagatcaagcccgtggtcttgtgctgcctggttataactatctcggacccggaaacggtctcgatcgaggagagcctgtcaacagggcagacgaggtcgcgcgagagcacgacatctcgtacaacgagcagcttgaggcgggagacaacccctacctcaagtacaaccacgcggacgccgagtttcaggagaagctcgccgacgacacatccttcgggggaaacctcggaaaggcagtctttcaggccaagaaaagggttctcgaaccttttggcctggttgaagagggtgctaagacggcccctaccggaaagcggatagacgaccactttccaaaaagaaagaaggctcggaccgaagaggactccaagccttccacctcgtcagacgccgaagctggacccagcggatcccagcagctgcaaatcccagcccaaccagcctcaagtttgggagctgatacaatgtctgcgggaggtggcggcccattgggcgacaataaccaaggtgccgatggagtgggcaatgcctcgggagattggcattgcgattccacgtggatgggggacagagtcgtcaccaagtccacccgaacctgggtgctgcccagctacaacaaccaccagtaccgagagatcaaaagcggctccgtcgacggaagcaacgccaacgcctactttggatacagcaccccctgggggtactttgactttaaccgcttccacagccactggagcccccgagactggcaaagactcatcaacaactactggggcttcagaccccggtccctcagagtcaaaatcttcaacattcaagtcaaagaggtcacggtgcaggactccaccaccaccatcgccaacaacctcacctccaccgtccaagtgtttacggacgacgactaccagctgccctacgtcgtcggcaacgggaccgagggatgcctgccggccttccctccgcaggtctttacgctgccgcagtacggttacgcgacgctgaaccgcgacaacacagaaaatcccaccgagaggagcagcttcttctgcctagagtactttcccagcaagatgctgagaacgggcaacaactttgagtttacctacaactttgaggaggtgcccttccactccagcttcgctcccagtcagaacctgttcaagctggccaacccgctggtggaccagtacttgtaccgcttcgtgagcacaaataacactggcggagtccagttcaacaagaacctggccgggagatacgccaacacctacaaaaactggttcccggggcccatgggccgaacccagggctggaacctgggctccggggtcaaccgcgccagtgtcagcgccttcgccacgaccaataggatggagctcgagggcgcgagttaccaggtgcccccgcagccgaacggcatgaccaacaacctccagggcagcaacacctatgccctggagaacactatgatcttcaacagccagtcggcgaacccgggcaccaccgccacgtacctcgagggcaacatgctcatcaccagcgagagcgagacgcagccggtgaaccgcgtggcgtacaacgtcggcgggcagatggccaccaacaaccagagctccaccactgcccccgcgaccggcacgtacaacctccaggaaatcgtgcccggcagcgtgtggatggagagggacgtgtacctccaaggacccatctgggccaagatcccagagacgggggcgcactttcacccctctccggccatgggcggattcggactcaaacacccaccgcccatgatgctcatcaagaacacgcctgtgcccggaaatatcaccagcttctcggacgtgcccgtcagcagcttcatcacccagtacagcaccgggcaggtcaccgtggagatggagtgggagctcaagaaggaaaactccaagaggtggaacccagagatccagtacacaaacaactacaacgacccccagtttgtggactttgccccggacagcaccggggaatacagaaccaccagacctatcggaacccgataccttacccgacccctttaacccattcatgtcgcataccctcaataaa

SEQ ID NO: 1824 - protein, 724 aa, synthetic construct
  source 1..724: note = Description of Artificial Sequence: Synthetic polypeptide
MSFVDHPPDWLEEVGEGLREFLGLEAGPPKPKPNQQHQDQARGLVLPGYNYLGPGNGLDRGEPVNRADEVAREHDISYNEQLEAGDNPYLKYNHADAEFQEKLADDTSFGGNLGKAVFQAKKRVLEPFGLVEEGAKTAPTGKRIDDHFPKRKKARTEEDSKPSTSSDAEAGPSGSQQLQIPAQPASSLGADTMSAGGGGPLGDNNQGADGVGNASGDWHCDSTWMGDRVVTKSTRTWVLPSYNNHQYREIKSGSVDGSNANAYFGYSTPWGYFDFNRFHSHWSPRDWQRLINNYWGFRPRSLRVKIFNIQVKEVTVQDSTTTIANNLTSTVQVFTDDDYQLPYVVGNGTEGCLPAFPPQVFTLPQYGYATLNRDNTENPTERSSFFCLEYFPSKMLRTGNNFEFTYNFEEVPFHSSFAPSQNLFKLANPLVDQYLYRFVSTNNTGGVQFNKNLAGRYANTYKNWFPGPMGRTQGWNLGSGVNRASVSAFATTNRMELEGASYQVPPQPNGMTNNLQGSNTYALENTMIFNSQSANPGTTATYLEGNMLITSESETQPVNRVAYNVGGQMATNNQSSTTAPATGTYNLQEIVPGSVWMERDVYLQGPIWAKIPETGAHFHPSPAMGGFGLKHPPPMMLIKNTPVPGNITSFSDVPVSSFITQYSTGQVTVEMEWELKKENSKRWNPEIQYTNNYNDPQFVDFAPDSTGEYRTTRPIGTRYLTRPL

SEQ ID NO: 1825 - DNA, 2203 bp, synthetic construct
  source 1..2203: mol_type = other DNA; note = Description of Artificial Sequence: Synthetic polynucleotide
atgtcttttgttgatcaccctccagattggttggaagaagttggtgaaggtcttcgcgagtttttgggccttgaagcgggcccaccgaaaccaaaacccaatcagcagcatcaagatcaagcccgtggtcttgtgctgcctggttataactatctcggacccggaaacggtctcgatcgaggagagcctgtcaacagggcagacgaggtcgcgcgagagcacgacatctcgtacaacgagcagcttgaggcgggagacaacccctacctcaagtacaaccacgcggacgccgagtttcaggagaagctcgccgacgacacatccttcgggggaaacctcggaaaggcagtctttcaggccaagaaaagggttctcgaaccttttggcctggttgaagagggtgctaagacggcccctaccggaaagcggatagacgaccactttccaaaaagaaagaaggctcggaccgaagaggactccaagccttccacctcgtcagacgccgaagctggacccagcggatcccagcagctgcaaatcccagcccaaccagcctcaagtttgggagctgatacaatgtctgcgggaggtggcggcccattgggcgacaataaccaaggtgccgatggagtgggcaatgcctcgggagattggcattgcgattccacgtggatgggggacagagtcgtcaccaagtccacccgaacctgggtgctgcccagctacaacaaccaccagtaccgagagatcaaaagcggctccgtcgacggaagcaacgccaacgcctactttggatacagcaccccctgggggtactttgactttaaccgcttccacagccactggagcccccgagactggcaaagactcatcaacaactactggggcttcagaccccggtccctcagagtcaaaatcttcaacattcaagtcaaagaggtcacggtgcaggactccaccaccaccatcgccaacaacctcacctccaccgtccaagtgtttacggacgacgactaccagctgccctacgtcgtcggcaacgggaccgagggatgcctgccggccttccctccgcaggtctttacgctgccgcagtacggttacgcgacgctgaaccgcgacaacacagaaaatcccaccgagaggagcagcttcttctgcctagagtactttcccagcaagatgctgagaacgggcaacaactttgagtttacctacaactttgaggaggtgcccttccactccagcttcgctcccagtcagaacctgttcaagctggccaacccgctggtggaccagtacttgtaccgcttcgtgagcacaaataacactggcggagtccagttcaacaagaacctggccgggagatacgccaacacctacaaaaactggttcccggggcccatgggccgaacccagggctggaacctgggctccggggtcaaccgcgccagtgtcagcgccttcgccacgaccaataggatggagctcgagggcgcgagttaccaggtgcccccgcagccgaacggcatgaccaacaacctccagggcagcaacacctatgccctggagaacactatgatcttcaacagccagggggcgaacccgggcaccaccgccacgtacctcgagggcaacatgctcatcaccagcgagagcgagacgcagccggtgaaccgcgtggcgtacaacgtcggcgggcagatggccaccaacaaccagagctccaccactgcccccgcgaccggcacgtacaacctccaggaaatcgtgcccggcagcgtgtggatggagagggacgtgtacctccaaggacccatctgggccaagatcccagagacgggggcgcactttcacccctctccggccatgggcggattcggactcaaacacccaccgcccatgatgctcatcaagaacacgcctgtgcccggaaatatcaccagcttctcggacgtgcccgtcagcagcttcatcacccagtacagcaccgggcaggtcaccgtggagatggagtgggagctcaagaaggaaaactccaagaggtggaacccagagatccagtacacaaacaactacaacgacccccagtttgtggactttgccccggacagcaccggggaatacagaaccaccagacctatcggaacccgataccttacccgacccctttaacccattcatgtcgcataccctcaataaa

SEQ ID NO: 1826 - protein, 724 aa, synthetic construct
  source 1..724: note = Description of Artificial Sequence: Synthetic polypeptide
MSFVDHPPDWLEEVGEGLREFLGLEAGPPKPKPNQQHQDQARGLVLPGYNYLGPGNGLDRGEPVNRADEVAREHDISYNEQLEAGDNPYLKYNHADAEFQEKLADDTSFGGNLGKAVFQAKKRVLEPFGLVEEGAKTAPTGKRIDDHFPKRKKARTEEDSKPSTSSDAEAGPSGSQQLQIPAQPASSLGADTMSAGGGGPLGDNNQGADGVGNASGDWHCDSTWMGDRVVTKSTRTWVLPSYNNHQYREIKSGSVDGSNANAYFGYSTPWGYFDFNRFHSHWSPRDWQRLINNYWGFRPRSLRVKIFNIQVKEVTVQDSTTTIANNLTSTVQVFTDDDYQLPYVVGNGTEGCLPAFPPQVFTLPQYGYATLNRDNTENPTERSSFFCLEYFPSKMLRTGNNFEFTYNFEEVPFHSSFAPSQNLFKLANPLVDQYLYRFVSTNNTGGVQFNKNLAGRYANTYKNWFPGPMGRTQGWNLGSGVNRASVSAFATTNRMELEGASYQVPPQPNGMTNNLQGSNTYALENTMIFNSQGANPGTTATYLEGNMLITSESETQPVNRVAYNVGGQMATNNQSSTTAPATGTYNLQEIVPGSVWMERDVYLQGPIWAKIPETGAHFHPSPAMGGFGLKHPPPMMLIKNTPVPGNITSFSDVPVSSFITQYSTGQVTVEMEWELKKENSKRWNPEIQYTNNYNDPQFVDFAPDSTGEYRTTRPIGTRYLTRPL

SEQ ID NO: 1827 - DNA, 2194 bp, synthetic construct
  source 1..2194: mol_type = other DNA; note = Description of Artificial Sequence: Synthetic polynucleotide
atgtcttttgttgatcaccctccagattggttggaagaagttggtgaaggtcttcgcgagtttttgggccttgaagcgggcccaccgaaaccaaaacccaatcagcagcatcaagatcaagcccgtggtcttgtgctgcctggttataactatctcggacccggaaacggtctcgatcgaggagagcctgtcaacagggcagacgaggtcgcgcgagagcacgacatctcgtacaacgagcagcttgaggcgggagacaacccctacctcaagtacaaccacgcggacgccgagtttcaggagaagctcgccgacgacacatccttcgggggaaacctcggaaaggcagtctttcaggccaagaaaagggttctcgaaccttttggcctggttgaagagggtgctaagacggcccctaccggaaagcggatagacgaccactttccaaaaagaaagaaggctcggaccgaagaggactccaagccttccacctcgtcagacgccgaagctggacccagcggatcccagcagctgcaaatcccagcccaaccagcctcaagtttgggagctgatacaatgtctgcgggaggtggcggcccattgggcgacaataaccaaggtgccgatggagtgggcaatgcctcgggagattggcattgcgattccacgtggatgggggacagagtcgtcaccaagtccacccgaacctgggtgctgcccagctacaacaaccaccagtaccgagagatcaaaagcggctccgtcgacggaagcaacgccaacgcctactttggatacagcaccccctgggggtactttgactttaaccgcttccacagccactggagcccccgagactggcaaagactcatcaacaactactggggcttcagaccccggtccctcagagtcaaaatcttcaacattcaagtcaaagaggtcacggtgcaggactccaccaccaccatcgccaacaacctcacctccaccgtccaagtgtttacggacgacgactaccagctgccctacgtcgtcggcaacgggaccgagggatgcctgccggccttccctccgcaggtctttacgctgccgcagtacggttacgcgacgctgaaccgcgacaacacagaaaatcccaccgagaggagcagcttcttctgcctagagtactttcccagcaagatgctgagaacgggcaacaactttgagtttacctacaactttgaggaggtgcccttccactccagcttcgctcccagtcagaacctgttcaagctggccaacccgctggtggaccagtacttgtaccgcttcgtgagcacaaataacactggcggagtccagttcaacaagaacctggccgggagatacgccaacacctacaaaaactggttcccggggcccatgggccgaacccagggctggaacctgggctccggggtcaaccgcgccagtgtcagcgccttcgccacgaccaataggatggagctcgagggcgcgagttaccaggtgcccccgcagccgaacggcatgaccaacaacctccagggcagcaacacctatgccctggagaacactatgatcttcgggaagcaaggctcagagaaaacaaatgtggacattgaaaaggtcatgatcaccagcgagagcgagacgcagccggtgaaccgcgtggcgtacaacgtcggcgggcagatggccaccaacaaccagagctccaccactgcccccgcgaccggcacgtacaacctccaggaaatcgtgcccggcagcgtgtggatggagagggacgtgtacctccaaggacccatctgggccaagatcccagagacgggggcgcactttcacccctctccggccatgggcggattcggactcaaacacccaccgcccatgatgctcatcaagaacacgcctgtgcccggaaatatcaccagcttctcggacgtgcccgtcagcagcttcatcacccagtacagcaccgggcaggtcaccgtggagatggagtgggagctcaagaaggaaaactccaagaggtggaacccagagatccagtacacaaacaactacaacgacccccagtttgtggactttgccccggacagcaccggggaatacagaaccaccagacctatcggaacccgataccttacccgacccctttaacccattcatgtcgcataccctcaataaa

SEQ ID NO: 1828 - protein, 721 aa, synthetic construct
  source 1..721: note = Description of Artificial Sequence: Synthetic polypeptide
MSFVDHPPDWLEEVGEGLREFLGLEAGPPKPKPNQQHQDQARGLVLPGYNYLGPGNGLDRGEPVNRADEVAREHDISYNEQLEAGDNPYLKYNHADAEFQEKLADDTSFGGNLGKAVFQAKKRVLEPFGLVEEGAKTAPTGKRIDDHFPKRKKARTEEDSKPSTSSDAEAGPSGSQQLQIPAQPASSLGADTMSAGGGGPLGDNNQGADGVGNASGDWHCDSTWMGDRVVTKSTRTWVLPSYNNHQYREIKSGSVDGSNANAYFGYSTPWGYFDFNRFHSHWSPRDWQRLINNYWGFRPRSLRVKIFNIQVKEVTVQDSTTTIANNLTSTVQVFTDDDYQLPYVVGNGTEGCLPAFPPQVFTLPQYGYATLNRDNTENPTERSSFFCLEYFPSKMLRTGNNFEFTYNFEEVPFHSSFAPSQNLFKLANPLVDQYLYRFVSTNNTGGVQFNKNLAGRYANTYKNWFPGPMGRTQGWNLGSGVNRASVSAFATTNRMELEGASYQVPPQPNGMTNNLQGSNTYALENTMIFGKQGSEKTNVDIEKVMITSESETQPVNRVAYNVGGQMATNNQSSTTAPATGTYNLQEIVPGSVWMERDVYLQGPIWAKIPETGAHFHPSPAMGGFGLKHPPPMMLIKNTPVPGNITSFSDVPVSSFITQYSTGQVTVEMEWELKKENSKRWNPEIQYTNNYNDPQFVDFAPDSTGEYRTTRPIGTRYLTRPL

SEQ ID NO: 1829 - protein, 519 aa, synthetic construct
  source 1..519: note = Description of Artificial Sequence: Synthetic polypeptide
DGVGSSSGNWHCDSTWLGDRVITTSTRTWALPTYNNHLYKQISNGTSGGATNDNTYFGYSTPWGYFDFNRFHCHFSPRDWQRLINNNWGFRPKRLSFKLFNIQVKEVTQNEGTKTIANNLTSTIQVFTDSEYQLPYVLGSAHQGCLPPFPADVFMIPQYGYLTLNNGSQAVGRSSFYCLEYFPSQMLRTGNNFQFTYTFEDVPFHSSYAHSQSLDRLMNPLIDQYLYYLSRTQTTGGTANTQTLGFSQGGPNTMANQAKNWLPGPCYRQQRVSTTTGQNNNSNFAWTAGTKYHLNGRNSLANPGIAMATHKDDEERFFPSNGILIFGKQNAARDNADYSDVMLTSEEEIKTTNPVATEEYGIVADNLQQQNTAPQIGTVNSQGALPGMVWQNRDVYLQGPIWAKIPHTDGNFHPSPLMGGFGLKHPPPQILIKNTPVPADPPTTFNQSKLNSFITQYSTGQVSVEIEWELQKENSKRWNPEIQYTSNYYKSTSVDFAVNTEGVYSEPRPIGTRYLTRNL

SEQ ID NO: 1830 - protein, 738 aa, synthetic construct
  source 1..738: note = Description of Artificial Sequence: Synthetic polypeptide
MAADGYLPDWLEDNLSEGIREWWALQPGAPKPKANQQHQDNARGLVLPGYKYLGPGNGLDKGEPVNAADAAALEHDKAYDQQLKAGDNPYLKYNHADAEFQERLKEDTSFGGNLGRAVFQAKKRLLEPLGLVEEAAKTAPGKKRPVEPSPQRSPDSSTGIGKKGQQPARKRLNFGQTGDSESVPDPQPLGEPPAAPSGVGPNTMAAGGGAPMADNNEGADGVGSSSGNWHCDSTWLGDRVITTSTRTWALPTYNNHLYKQISNGTSGGATNDNTYFGYSTPWGYFDFNRFHCHFSPRDWQRLINNNWGFRPKRLSFKLFNIQVKEVTQNEGTKTIANNLTSTIQVFTDSEYQLPYVLGSAHQGCLPPFPADVFMIPQYGYLTLNNGSQAVGRSSFYCLEYFPSQMLRTGNNFQFTYTFEDVPFHSSYAHSQSLDRLMNPLIDQYLYYLSRTQTTGGTANTQTLGFSQGGPNTMANQAKNWLPGPCYRQQRVSTTTGQNNNSNFAWTAGTKYHLNGRNSLANPGIAMATHKDDEERFFPSNGILIFGKQNAARDNADYSDVMLTSEEEIKTTNPVATEEYGIVADNLQQQNTAPQIGTVNSQGALPGMVWQNRDVYLQGPIWAKIPHTDGNFHPSPLMGGFGLKHPPPQILIKNTPVPADPPTTFNQSKLNSFITQYSTGQVSVEIEWELQKENSKRWNPEIQYTSNYYKSTSVDFAVNTEGVYSEPRPIGTRYLTRNL

SEQ ID NO: 1831 - protein, 725 aa, synthetic construct
  source 1..725: note = Description of Artificial Sequence: Synthetic polypeptide
MAADGYLPDWLEDNLSEGIREWWALQPGAPKPKANQQHQDNARGLVLPGYKYLGPGNGLDKGEPVNAADAAALEHDKAYDQQLKAGDNPYLKYNHADAEFQERLKEDTSFGGNLGRAVFQAKKRLLEPLGLVEEAAKTAPTGKRIDDHFPKRKKARTEEDSKPSTSSDAEAGPSGSQQLQIPAQPASSLGADTMSAGGGGPLGDNNQGADGVGNASGDWHCDSTWMGDRVVTKSTRTWVLPSYNNHQYREIKSGSVDGSNANAYFGYSTPWGYFDFNRFHSHWSPRDWQRLINNYWGFRPRSLRVKIFNIQVKEVTVQDSTTTIANNLTSTVQVFTDDDYQLPYVVGNGTEGCLPAFPPQVFTLPQYGYATLNRDNTENPTERSSFFCLEYFPSKMLRTGNNFEFTYNFEEVPFHSSFAPSQNLFKLANPLVDQYLYRFVSTNNTGGVQFNKNLAGRYANTYKNWFPGPMGRTQGWNLGSGVNRASVSAFATTNRMELEGASYQVPPQPNGMTNNLQGSNTYALENTMIFNSQPANPGTTATYLEGNMLITSESETQPVNRVAYNVGGQMATNNQSSTTAPATGTYNLQEIVPGSVWMERDVYLQGPIWAKIPETGAHFHPSPAMGGFGLKHPPPMMLIKNTPVPGNITSFSDVPVSSFITQYSTGQVTVEMEWELKKENSKRWNPEIQYTNNYNDPQFVDFAPDSTGEYRTTRPIGTRYLTRPL

SEQ ID NO: 1832 - protein, 736 aa, synthetic construct
  source 1..736: note = Description of Artificial Sequence: Synthetic polypeptide
MAADGYLPDWLEDNLSEGIREWWALKPGAPKPKANQQKQDDGRGLVLPGYKYLGPFNGLDKGEPVNAADAAALEHDKAYDQQLQAGDNPYLRYNHADAEFQERLQEDTSFGGNLGRAVFQAKKRVLEPLGLVEEGAKTAPGKKRPVDQSPQEPDSSSGVGKSGKQPARKRLNFGQTGDSESVPDPQPLGEPPAAPTSLGSNTMASGGGAPMADNNEGADGVGNSSGNWHCDSQWLGDRVITTSTRTWALPTYNNHLYKQISSQSGASNDNHYFGYSTPWGYFDFNRFHCHFSPRDWQRLINNNWGFRPKKLSFKLFNIQVKEVTQNDGTTTIANNLTSTVQVFTDSEYQLPYVLGSAHQGCLPPFPADVFMVPQYGYLTLNNGSQAVGRSSFYCLEYFPSQMLRTGNNFQFSYTFEDVPFHSSYAHSQSLDRLMNPLIDQYLYYLNRTQGTTSGTTNQSRLLFSQAGPQSMSLQARNWLPGPCYRQQRLSKTANDNNNSNFPWTAASKYHLNGRDSLVNPGPAMASHKDDEEKFFPMHGNLIFGKEGTTASNAELDNVMITDEEEIRTTNPVATEQYGTVANNLQSSNTAPTTRTVNDQGALPGMVWQDRDVYLQGPIWAKIPHTDGHFHPSPLMGGFGLKHPPPQIMIKNTPVPANPPTTFSPAKFASFITQYSTGQVSVEIEWELQKENSKRWNPEIQYTSNYNKSVNVDFTVDTNGVYSEPRPIGTRYLTRNL

SEQ ID NO: 1833 - protein, 735 aa, synthetic construct
  source 1..735: note = Description of Artificial Sequence: Synthetic polypeptide
MSFVDHPPDWLEEVGEGLREFLGLEAGPPKPKPNQQHQDQARGLVLPGYNYLGPGNGLDRGEPVNRADEVAREHDISYNEQLEAGDNPYLKYNHADAEFQEKLADDTSFGGNLGKAVFQAKKRVLEPFGLVEEGAKTAPGKKRPVDQSPQEPDSSSGVGKSGKQPARKRLNFGQTGDSESVPDPQPLGEPPAAPTSLGSNTMASGGGAPMADNNEGADGVGNSSGNWHCDSQWLGDRVITTSTRTWALPTYNNHLYKQISSQSGASNDNHYFGYSTPWGYFDFNRFHCHFSPRDWQRLINNNWGFRPKKLSFKLFNIQVKEVTQNDGTTTIANNLTSTVQVFTDSEYQLPYVLGSAHQGCLPPFPADVFMVPQYGYLTLNNGSQAVGRSSFYCLEYFPSQMLRTGNNFQFSYTFEDVPFHSSYAHSQSLDRLMNPLIDQYLYYLNRTQGTTSGTTNQSRLLFSQAGPQSMSLQARNWLPGPCYRQQRLSKTANDNNNSNFPWTAASKYHLNGRDSLVNPGPAMASHKDDEEKFFPMHGNLIFGKEGTTASNAELDNVMITDEEEIRTTNPVATEQYGTVANNLQSSNTAPTTRTVNDQGALPGMVWQDRDVYLQGPIWAKIPHTDGHFHPSPLMGGFGLKHPPPQIMIKNTPVPANPPTTFSPAKFASFITQYSTGQVSVEIEWELQKENSKRWNPEIQYTSNYNKSVNVDFTVDTNGVYSEPRPIGTRYLTRPL

SEQ ID NO: 1834 - protein, 736 aa, synthetic construct
  source 1..736: note = Description of Artificial Sequence: Synthetic polypeptide
MAADGYLPDWLEDNLSEGIREWWALKPGAPKPKANQQKQDDGRGLVLPGYKYLGPFNGLDKGEPVNAADAAALEHDKAYDQQLQAGDNPYLRYNHADAEFQERLQEDTSFGGNLGRAVFQAKKRVLEPLGLVEEGAKTAPGKKRPVEPSPQRSPDSSTGIGKKGQQPARKRLNFGQTGDSESVPDPQPLGEPPAAPSGVGPNTMAAGGGAPMADNNEGADGVGSSSGNWHCDSTWLGDRVITTSTRTWALPTYNNHLYKQISSQSGASNDNHYFGYSTPWGYFDFNRFHCHFSPRDWQRLINNNWGFRPKRLSFKLFNIQVKEVTQNEGTKTIANNLTSTIQVFTDSEYQLPYVLGSAHQGCLPPFPADVFMIPQYGYLTLNNGSQAVGRSSFYCLEYFPSQMLRTGNNFQFTYTFEDVPFHSSYAHSQSLDRLMNPLIDQYLYYLSRTQTTGGTANTQTLGFSQGGPNTMANQAKNWLPGPCYRQQRVSTTTGQNNNSNFAWTAGTKYHLNGRNSLANPGIAMATHKDDEERFFPSNGILIFGKQGTTASNAELDNVMITDEEEIKTTNPVATEEYGIVADNLQQQNTAPQIGTVNSQGALPGMVWQNRDVYLQGPIWAKIPHTDGNFHPSPLMGGFGLKHPPPQILIKNTPVPADPPTTFNQSKLNSFITQYSTGQVSVEIEWELQKENSKRWNPEIQYTSNYNKSVNVDFTVDTNGVYSEPRPIGTRYLTRNL

SEQ ID NO: 1835 - protein, 736 aa, synthetic construct
  source 1..736: note = Description of Artificial Sequence: Synthetic polypeptide
MAADGYLPDWLEDNLSEGIREWWALKPGAPKPKANQQKQDDGRGLVLPGYKYLGPFNGLDKGEPVNAADAAALEHDKAYDQQLQAGDNPYLRYNHADAEFQERLQEDTSFGGNLGRAVFQAKKRVLEPLGLVEEGAKTAPGKKRPVEPSPQRSPDSSTGIGKKGQQPARKRLNFGQTGDSESVPDPQPLGEPPAAPSGVGPNTMAAGGGAPMADNNEGADGVGSSSGNWHCDSTWLGDRVITTSTRTWALPTYNNHLYKQISSQSGASNDNHYFGYSTPWGYFDFNRFHCHFSPRDWQRLINNNWGFRPKRLSFKLFNIQVKEVTQNEGTKTIANNLTSTIQVFTDSEYQLPYVLGSAHQGCLPPFPADVFMIPQYGYLTLNNGSQAVGRSSFYCLEYFPSQMLRTGNNFQFTYTFEDVPFHSSYAHSQSLDRLMNPLIDQYLYYLSRTQTTGGTANTQTLGFSQGGPNTMANQAKNWLPGPCYRQQRVSTTTGQNNNSNFAWTAGTKYHLNGRNSLANPGIAMATHKDDEERFFPSNGILIFGKQNAARDNADYSDVMLTSEEEIKTTNPVATEEYGIVADNLQQQNTAPQIGTVNSQGALPGMVWQNRDVYLQGPIWAKIPHTDGNFHPSPLMGGFGLKHPPPQILIKNTPVPADPPTTFNQSKLNSFITQYSTGQVSVEIEWELQKENSKRWNPEIQYTSNYYKSTSVDFAVNTEGVYSEPRPIGTRYLTRNL

SEQ ID NO: 1836 - protein, 736 aa, synthetic construct
  source 1..736: note = Description of Artificial Sequence: Synthetic polypeptide
MAADGYLPDWLEDNLSEGIREWWDLKPGAPKPKANQQKQDDGRGLVLPGYKYLGPFNGLDKGEPVNAADAAALEHDKAYDQQLKAGDNPYLRYNHADAEFQERLQEDTSFGGNLGRAVFQAKKRVLEPLGLVEEGAKTAPGKKRPVEQSPQEPDSSSGIGKTGQQPAKKRLNFGQTGDTESVPDPQPLGEPPAAPSGLGPNTMASGGGAPMADNNEGADGVGNSSGNWHCDSTWLGDRVITTSTRTWALPTYNNHLYKQISNGTSGGSTNDNTYFGYSTPWGYFDFNRFHCHFSPRDWQRLINNNWGFRPKRLNFKLFNIQVKEVTTNEGTKTIANNLTSTVQVFTDSEYQLPYVLGSAHQGCLPPFPADVFMVPQYGYLTLNNGSQALGRSSFYCLEYFPSQMLRTGNNFQFSYTFEDVPFHSSYAHSQSLDRLMNPLIDQYLYYLVRTQTTGTGGTQTLAFSQAGPSSMASQARNWVPGPSYRQQRVSTTTNQNNNSNFAWTGAAKFKLNGRDSLMNPGVAMASHKDDEDRFFPSSGVLIFGKQGAGNDGVDYSQVLITDEEEIKATNPVATEEYGAVAINNQAANTQAQTGLVHNQGVIPGMVWQNRDVYLQGPIWAKIPHTDGNFHPSPLMGGFGLKHPPPQILIKNTPVPADPPLTFNQAKLNSFITQYSTGQVSVEIEWELQKENSKRWNPEIQYTSNYYKSTNVDFAVNTEGVYSEPRPIGTRYLTRNL

SEQ ID NO: 1837 - DNA, 3695 bp, synthetic construct
  source 1..3695: mol_type = other DNA; note = Description of Artificial Sequence: Synthetic polynucleotide
ctctttgcgcttgcgttttcccttgtccagatagcccagtagctgacattcatccggggtcagcaccgtttctgcggactggctttctacgtgaaaaggatctaggtgaagatcctttttgataatctcatgcctgacatttatattccccagaacatcaggttaatggcgtttttgatgtcattttcgcggtggctgagatcagccacttcttccccgataacggagaccggcacactggccatatcggtggtcatcatgcgccagctttcatccccgatatgcaccaccgggtaaagttcacgggagactttatctgacagcagacgtgcactggccagggggatcaccatccgtcgccccggcgtgtcaataatatcactctgtacatccacaaacagacgataacggctctctcttttataggtgtaaaccttaaactgccgtacgtataggctgcgcaactgttgggaagggcgatcggtgcgggcctcttcgctattacgccagctggcgaaagggggatgtgctgcaaggcgattaagttgggtaacgccagggttttcccagtcacgacgttgtaaaacgacggccagtgaattgtaatacgactcactatagggcgaattgaatttagcggccgcgaattcgcccttatgatatctggtgggaggagggcaagatgacggccaaggtcgtggagtccgccaaggccattctcggcggcagcaaagtgcgcgtggaccaaaagtgcaagtcgtccgcccagatcgatcccactcccgtcattgtcacctccaacaccaacatgtgcgccgtgattgacgggaacagcaccaccttcgagcaccagcagccgttgcaggaccggatgttcaaatttgaacttacccgccgtctggagcatgactttggcaaggtgacaaagcaggaagtcaaagagttcttccgctgggcgcaggatcacgtgaccgaggtggcgcatgagttccacgtcagaaagggtggagccaacaagagacccgcccccgatgacgctgataaaagcgagcccaagcgggcctgcccctcagtcgcagatccatcgacgtcagacgcggaaggagctccggtggactttgccgacaggtaccaaaacaaatgttctcgtcacgcgggcatgcttcagatgctgtttccctgcaagacatgcgagagaatgaatcagaatttcaacatttgcttcacgcacgggaccagggactgttcggagtgcttccccggcgtgtcagaatctcaaccggtcgtcagaaaaaggacgtatcggaaactctgtgccattcatcatctgctggggagggctcccgagattgcttgctcggcctgcgatctggtcaacgtggacctggatgactgtgtctctgagcaataaatgacttaaaccaggtatggctgccgatggttatcttccagattggctcgaggacaacctctctgagggcattcgcgagtggtgggacttgaaacctggagccccgaaacccaaagccaaccagcaaaagcaggacgacggccggggtctggtgcttcctggctacaagtacctcggacccttcaacggactcgacaagggggagcccgtcaacgcggcggacgcagcggccctcgagcacgacaaggcctacgaccagcagctcaaagcgggtgacaatccgtacctgcggtataaccacgccgacgccgagtttcaggagcgtctgcaagaagatacgtcttttgggggcaacctcgggcgagcagtcttccaggccaagaagcgggttctcgaacctctcggtctggttgaggaaggcgctaagacggctcctggaaagaagagaccggtagagcagtcaccccaagaaccagactcctcatcgggcatcggcaagacaggccagcagcccgctaaaaagagactcaattttggtcagactggcgacacagagtcagtccccgacccacaacctctcggagaacctccagcagccccctcaggtctgggacctaatacaatggcttcaggcggtggcgctccaatggcagacaataacgaaggcgccgacggagtgggtaattcctcgggaaattggcattgcgattccacatggctgggggacagagtcatcaccaccagcacccgaacctgggccctgcccacctacaacaaccacctctacaagcaaatctccaacggcacctcgggaggaagcaccaacgacaacacctactttggctacagcaccccctgggggtattttgacttcaacagattccactgccacttttcaccacgtgactggcagcgactcatcaacaacaattggggattccggcccaagagactcaacttcaagctcttcaacatccaggtcaaggaagtcacgacgaacgaaggcaccaagaccatcgccaataatctcaccagcaccgtgcaggtctttacggactcggagtaccagctaccgtacgtgctaggatcagctcaccagggatgtctgcctccgttcccggcggacgtcttcatggttcctcagtacggttatctaactctgaacaatggcagccaggccctgggacgttcctccttctactgcctggagtatttcccatcgcagatgctgagaaccggcaacaactttcagttcagctacaccttcgaggacgtgcctttccacagcagctacgcgcacagccaaagcctggacaggctgatgaatcccctcatcgaccagtacctgtattacctggtcagaacgcagacaaccgggactggagggacgcagactctggcattcagccaagcaggccctagctcaatggccagccaggctagaaactgggtgcccggaccgagctaccggcagcagcgcgtctccacgacaaccaaccagaacaacaacagcaactttgcctggacgggagctgccaaatttaaactgaacggccgagactctctaatgaaccccggcgtggccatggcttcacacaaggatgacgaggaccgcttcttcccttctagcggggtcctgattttcggcaagcaaggagccgggaatgatggagtggattacagccaagtgctgattacagatgaggaagaaatcaaggctaccaaccccgtggcaacagaggaatatggagcagtggccatcaacaaccaggccgctaatacgcaggcgcagaccggactcgtgcacaaccagggggtgattcccggcatggtgtggcagaacagagacgtgtacctgcagggtcccatctgggccaaaattcctcacacggacggcaactttcacccgtctcccctgatgggcggctttggactgaagcacccgcctcctcaaattctcatcaagaacacaccggttccagcggacccgccgcttaccttcaaccaggccaagctgaactctttcatcacgcagtacagcaccggacaggtcagcgtggaaatcgagtgggagctgcagaaagaaaacagcaaacgctggaatccagagattcagtacacttccaactactacaaatctacaaatgtggactttgctgtcaacacggaaggagtgtatagcgagcctcgccccattggcacccgttacctcacccgcaacctgtaattgcctgttaatcaataaaccggttaattcgtttcagtaaggaagaattcgtttaaa

SEQ ID NO: 1838 - protein, 736 aa, synthetic construct; identical to SEQ ID NO: 507
  source 1..736: note = Description of Artificial Sequence: Synthetic polypeptide

SEQ ID NO: 1839 - protein, 736 aa, synthetic construct
  source 1..736: note = Description of Artificial Sequence: Synthetic polypeptide
MAADGYLPDWLEDNLSEGIREWWDLKPGAPKPKANQQKQDDGRGLVLPGYKYLGPFNGLDKGEPVNAADAAALEHDKAYDQQLKAGDNPYLRYNHADAEFQERLQEDTSFGGNLGRAVFQAKKRVLEPLGLVEEGAKTAPGKKRPVEQSPQEPDSSSGIGKTGQQPAKKRLNFGQTGDTESVPDPQPLGEPPAAPSGLGPNTMASGGGAPMADNNEGADGVGNSSGNWHCDSTWLGDRVITTSTRTWALPTYNNHLYKQISNGTSGGSTNDNTYFGYSTPWGYFDFNRFHCHFSPRDWQRLINNNWGFRPKRLNFKLFNIQVKEVTTNEGTKTIANNLTSTVQVFTDSEYQLPYVLGSAHQGCLPPFPADVFMVPQYGYLTLNNGSQALGRSSFYCLEYFPSQMLRTGNNFQFSYTFEDVPFHSSYAHSQSLDRLMNPLIDQYLYYLVRTQTTGTGGTQTLAFSQAGPSNMASQARNWVPGPSYRQQRVSTTTNQNNNSNFAWTGAAKFKLNGRDSLMNPGVAMASHKDDEDRFFPSSGVLIFGKQGAGNDGVDYSQVLITDEEEIKATNPVATEEYGAVAINNQAANTQAQTGLVHNQGVIPGMVWQNRDVYLQGPIWAKIPHTDGNFHPSPLMGGFGLKHPPPQILIKNTPVPADPPLTFNQAKLNSFITQYSTGQVSVEIEWELQKENSKRWNPEIQYTSNYYKSTNVDFAVNTEGVYSEPRPIGTRYLTRNL

SEQ ID NO: 1840 - protein, 738 aa, synthetic construct; identical to SEQ ID NO: 1534
  source 1..738: note = Description of Artificial Sequence: Synthetic polypeptide

SEQ ID NO: 1841 - protein, 736 aa, synthetic construct
  source 1..736: note = Description of Artificial Sequence: Synthetic polypeptide
MAADGYLPDWLEDNLSEGIREWWALQPGAPKPKANQQHQDNARGLVLPGYKYLGPGNGLDKGEPVNAADAAALEHDKAYDQQLKAGDNPYLKYNHADAEFQERLKEDTSFGGNLGRAVFQAKKRILEPLGLVEEAAKTAPGKKRPVDQSPQEPDSSSGVGKSGKQPARKRLNFGQTGDSESVPDPQPLGEPPAAPTSLGSNTMASGGGAPMADNNEGADGVGNSSGNWHCDSQWLGDRVITTSTRTWALPTYNNHLYKQISSQSGASNDNHYFGYSTPWGYFDFNRFHCHFSPRDWQRLINNNWGFRPKKLSFKLFNIQVKEVTQNDGTTTIANNLTSTVQVFTDSEYQLPYVLGSAHQGCLPPFPADVFMVPQYGYLTLNNGSQAVGRSSFYCLEYFPSQMLRTGNNFQFSYTFEDVPFHSSYAHSQSLDRLMNPLIDQYLYYLNRTQGTTSGTTNQSRLLFSQAGPQSMSLQARNWLPGPCYRQQRLSKTANDNNNSNFPWTAASKYHLNGRDSLVNPGPAMASHKDDEEKFFPMHGNLIFGKEGTTASNAELDNVMITDEEEIRTTNPVATEQYGTVANNLQSSNTAPTTRTVNDQGALPGMVWQDRDVYLQGPIWAKIPHTDGHFHPSPLMGGFGLKHPPPQIMIKNTPVPANPPTTFSPAKFASFITQYSTGQVSVEIEWELQKENSKRWNPEIQYTSNYNKSVNVDFTVDTNGVYSEPRPIGTRYLTRPL

SEQ ID NO: 1842 - protein, 736 aa, synthetic construct
  source 1..736: note = Description of Artificial Sequence: Synthetic polypeptide
MAADGYLPDWLEDNLSEGIREWWALQPGAPKPKANQQHQDNARGLVLPGYKYLGPGNGLDKGEPVNAADAAALEHDKAYDQQLKAGDNPYLKYNHADAEFQERLKEDTSFGGNLGRAVFQAKKRLLEPLGLVEEAAKTAPGKKRPVDQSPQEPDSSSGVGKSGKQPARKRLNFGQTGDSESVPDPQPLGEPPAAPTSLGSNTMASGGGAPMADNNEGADGVGNSSGNWHCDSQWLGDRVITTSTRTWALPTYNNHLYKQISSQSGASNDNHYFGYSTPWGYFDFNRFHCHFSPRDWQRLINNNWGFRPKKLSFKLFNIQVKEVTQNDGTTTIANNLTSTVQVFTDSEYQLPYVLGSAHQGCLPPFPADVFMVPQYGYLTLNNGSQAVGRSSFYCLEYFPSQMLRTGNNFQFSYTFEDVPFHSSYAHSQSLDRLMNPLIDQYLYYLNRTQGTTSGTTNQSRLLFSQAGPQSMSLQARNWLPGPCYRQQRLSKVANDNNNSNFPWTAASKYHLNGRDSLVNPGPAMASHKDDEEKFFPMHGNLIFGKEGTTASNAELDNVMITDEEEIRTTNPVATEQYGTVANNLQSSNTAPTTRTVNDQGALPGMVWQDRDVYLQGPIWAKIPHTDGHFHPSPLMGGFGLKHPPPQIMIKNTPVPANPPTTFVPAKFASFITQYSTGQVSVEIEWELQKENSKRWNPEIQYTSNYNKSVNVDFTVDTNGVYSEPRPIGTRYLTRPL

SEQ ID NO: 1843 - protein, 736 aa, synthetic construct
  source 1..736: note = Description of Artificial Sequence: Synthetic polypeptide
  VARIANT 168: note = misc_feature - Xaa can be any naturally occurring amino acid
  VARIANT 204: note = misc_feature - Xaa can be any naturally occurring amino acid
  VARIANT 266: note = misc_feature - Xaa can be any naturally occurring amino acid
  VARIANT 311: note = misc_feature - Xaa can be any naturally occurring amino acid
  VARIANT 411: note = misc_feature - Xaa can be any naturally occurring amino acid
  VARIANT 460: note = misc_feature - Xaa can be any naturally occurring amino acid
  VARIANT 493: note = misc_feature - Xaa can be any naturally occurring amino acid
  VARIANT 562: note = misc_feature - Xaa can be any naturally occurring amino acid
  VARIANT 576: note = misc_feature - Xaa can be any naturally occurring amino acid
  VARIANT 587: note = misc_feature - Xaa can be any naturally occurring amino acid
  VARIANT 609: note = misc_feature - Xaa can be any naturally occurring amino acid
MAADGYLPDWLEDNLSEGIREWWDLKPGAPKPKANQQKQDDGRGLVLPGYKYLGPFNGLDKGEPVNAADAAALEHDKAYDQQLKAGDNPYLRYNHADAEFQERLQEDTSFGGNLGRAVFQAKKRVLEPLGLVEEGAKTAPGKKRPVEQSPQEPDSSSGIGKKGQQPAXKRLNFGQTGDSESVPDPQPLGEPPAAPSGVGSNTMXAGGGAPMADNNEGADGVGNASGNWHCDSTWLGDRVITTSTRTWALPTYNNHLYKQISSQSGXSTNDNTYFGYSTPWGYFDFNRFHCHFSPRDWQRLINNNWGFRPKXLNFKLFNIQVKEVTTNDGTTTIANNLTSTVQVFTDSEYQLPYVLGSAHQGCLPPFPADVFMIPQYGYLTLNNGSQAVGRSSFYCLEYFPSQMLRTGNNFXFSYTFEDVPFHSSYAHSQSLDRLMNPLIDQYLYYLSRTQTTSGTAGNRXLQFSQAGPSSMANQAKNWLPGPCYRQQRVSKTXNQNNNSNFAWTGATKYHLNGRDSLVNPGPAMATHKDDEDKFFPMSGVLIFGKQGAGNSNVDLDNVMITXEEEIKTTNPVATEXYGTVATNLQSXNTAPATGTVNSQGALPGMVWQXRDVYLQGPIWAKIPHTDGHFHPSPLMGGFGLKHPPPQILIKNTPVPANPPTTFSPAKFASFITQYSTGQVSVEIEWELQKENSKRWNPEIQYTSNYNKSTNVDFAVDTNGVYSEPRPIGTRYLTRNL

SEQ ID NO: 1844 - DNA, 2208 bp, synthetic construct
  source 1..2208: mol_type = other DNA; note = Description of Artificial Sequence: Synthetic polynucleotide
  misc_difference 502..504: note = misc_feature - n is a, c, g, or t
  misc_difference 610..612: note = misc_feature - n is a, c, g, or t
  misc_difference 796..798: note = misc_feature - n is a, c, g, or t
  misc_difference 931..933: note = misc_feature - n is a, c, g, or t
  misc_difference 1231..1233: note = misc_feature - n is a, c, g, or t
  misc_difference 1378..1380: note = misc_feature - n is a, c, g, or t
  misc_difference 1477..1479: note = misc_feature - n is a, c, g, or t
  misc_difference 1684..1686: note = misc_feature - n is a, c, g, or t
  misc_difference 1726..1728: note = misc_feature - n is a, c, g, or t
  misc_difference 1759..1761: note = misc_feature - n is a, c, g, or t
  misc_difference 1825..1827: note = misc_feature - n is a, c, g, or t
atggctgccgatggttatcttccagattggctcgaggacaacctctctgagggcattcgcgagtggtgggacttgaaacctggagccccgaaacccaaagccaaccagcaaaagcaggacgacggccggggtctggtgcttcctggctacaagtacctcggacccttcaacggactcgacaagggggagcccgtcaacgcggcggacgcagcggccctcgagcacgacaaggcctacgaccagcagctcaaagcgggtgacaatccgtacctgcggtataaccacgccgacgccgagtttcaggagcgtctgcaagaagatacgtcttttgggggcaacctcgggcgagcagtcttccaggccaagaagcgggttctcgaacctctcggtctggttgaggaaggcgctaagacggctcctggaaagaagagaccggtagagcaatcaccccaggaaccagactcctcttcgggcatcggcaagaaaggccagcagcccgcgnnnaagagactcaactttgggcagacaggcgactcagagtcagtgcccgaccctcaaccactcggagaaccccccgcagccccctctggtgtgggatctaatacaatgnnngcaggcggtggcgctccaatggcagacaataacgaaggcgccgacggagtgggtaacgcctcaggaaattggcattgcgattccacatggctgggcgacagagtcatcaccaccagcacccgaacctgggccctccccacctacaacaaccacctctacaagcaaatctccagccaatcgggannnagcaccaacgacaacacctacttcggctacagcaccccctgggggtattttgactttaacagattccactgccacttctcaccacgtgactggcagcgactcatcaacaacaactggggattccggcccaagnnnctcaacttcaagctcttcaacatccaggtcaaggaggtcacgacgaatgatggcaccacgaccatcgccaataaccttaccagcacggttcaggtctttacggactcggaataccagctcccgtacgtcctcggctctgcgcaccagggctgcctgcctccgttcccggcggacgtcttcatgattcctcagtacgggtacctgactctgaacaatggcagtcaggccgtgggccgttcctccttctactgcctggagtactttccttctcaaatgctgagaacgggcaacaactttnnnttcagctacacgtttgaggacgtgccttttcacagcagctacgcgcacagccaaagcctggaccggctgatgaaccccctcatcgaccagtacctgtactacctgtctcggactcagaccacgagtggtaccgcaggaaatcggnnnttgcaattttctcaggccgggcctagtagcatggcgaatcaggccaaaaactggctacccgggccctgctaccggcagcaacgcgtctccaagacannnaatcaaaataacaacagcaactttgcctggaccggtgccaccaagtatcatctgaatggcagagactctctggtaaatcccggtcccgctatggcaacccacaaggacgacgaagacaaattttttccgatgagcggagtcttaatatttgggaaacagggagctggaaatagcaacgtggaccttgacaacgttatgataaccnnngaggaagaaattaaaaccaccaacccagtggccacagaannntacggcacggtggccactaacctgcaatcgnnnaacaccgctcctgctacagggaccgtcaacagtcaaggagccttacctggcatggtctggcagnnncgggacgtgtacctgcagggtcctatctgggccaagattcctcacacggacggacactttcatccctcgccgctgatgggaggctttggactgaaacacccgcctcctcagatcctgattaagaatacacctgttcccgcgaatcctccaactaccttcagtccagctaagtttgcgtcgttcatcacgcagtacagcaccggacaggtcagcgtggaaattgaatgggagctgcagaaagaaaacagcaaacgctggaacccagagattcaatacacttccaactacaacaaatctacaaatgtggactttgctgttgacacaaatggcgtttattctgagcctcgccccatcggcacccgttacctcacccgtaatctg

SEQ ID NO: 1845 - protein, 737 aa, synthetic construct
  source 1..737: note = Description of Artificial Sequence: Synthetic polypeptide
  VARIANT 157: note = misc_feature - Xaa can be any naturally occurring amino acid
  VARIANT 168: note = misc_feature - Xaa can be any naturally occurring amino acid
  VARIANT 262..263: note = misc_feature - Xaa can be any naturally occurring amino acid
  VARIANT 312: note = misc_feature - Xaa can be any naturally occurring amino acid
  VARIANT 412: note = misc_feature - Xaa can be any naturally occurring amino acid
  VARIANT 460..461: note = misc_feature - Xaa can be any naturally occurring amino acid
  VARIANT 552: note = misc_feature - Xaa can be any naturally occurring amino acid
  VARIANT 556..557: note = misc_feature - Xaa can be any naturally occurring amino acid
  VARIANT 563: note = misc_feature - Xaa can be any naturally occurring amino acid
  VARIANT 580: note = misc_feature - Xaa can be any naturally occurring amino acid
  VARIANT 588: note = misc_feature - Xaa can be any naturally occurring amino acid
  VARIANT 664: note = misc_feature - Xaa can be any naturally occurring amino acid
MAADGYLPDWLEDNLSEGIREWWDLKPGAPKPKANQQKQDDGRGLVLPGYKYLGPFNGLDKGEPVNAADAAALEHDKAYDQQLKAGDNPYLRYNHADAEFQERLQEDTSFGGNLGRAVFQAKKRVLEPLGLVEEGAKTAPGKKRPVEQSPQEPDSSXGIGKKGQQPAXKRLNFGQTGDSESVPDPQPLGEPPAAPSGVGSNTMAAGGGAPMADNNEGADGVGNASGNWHCDSTWLGDRVITTSTRTWALPTYNNHLYKQISXXQSGGSTNDNTYFGYSTPWGYFDFNRFHCHFSPRDWQRLINNNWGFRPKXLNFKLFNIQVKEVTTNDGTTTIANNLTSTVQVFTDSEYQLPYVLGSAHQGCLPPFPADVFMIPQYGYLTLNNGSQAVGRSSFYCLEYFPSQMLRTGNNFXFSYTFEDVPFHSSYAHSQSLDRLMNPLIDQYLYYLSRTQTTGGTAGNXXLQFSQAGPSSMANQAKNWLPGPCYRQQRVSKTTNQNNNSNFAWTGATKYHLNGRDSLVNPGVAMATHKDDEDRFFPSSGVLIFGKQGAGNXNVDXXNVMITXEEEIKTTNPVATEEYGXVATNLQSXNTAPQTGTVNSQGALPGMVWQNRDVYLQGPIWAKIPHTDGNFHPSPLMGGFGLKHPPPQILIKNTPVPANPPTTFXPAKFASFITQYSTGQVSVEIEWELQKENSKRWNPEIQYTSNYNKSTNVDFAVDTEGVYSEPRPIGTRYLTRNL

SEQ ID NO: 1846 - DNA, 2211 bp, synthetic construct
  source 1..2211: mol_type = other DNA; note = Description of Artificial Sequence: Synthetic polynucleotide
  misc_difference 469..471: note = misc_feature - n is a, c, g, or t
  misc_difference 502..504: note = misc_feature - n is a, c, g, or t
  misc_difference 784..789: note = misc_feature - n is a, c, g, or t
  misc_difference 934..936: note = misc_feature - n is a, c, g, or t
  misc_difference 1234..1236: note = misc_feature - n is a, c, g, or t
  misc_difference 1378..1383: note = misc_feature - n is a, c, g, or t
  misc_difference 1654..1656: note = misc_feature - n is a, c, g, or t
  misc_difference 1666..1671: note = misc_feature - n is a, c, g, or t
  misc_difference 1687..1689: note = misc_feature - n is a, c, g, or t
  misc_difference 1738..1740: note = misc_feature - n is a, c, g, or t
  misc_difference 1762..1764: note = misc_feature - n is a, c, g, or t
  misc_difference 1990..1992: note = misc_feature - n is a, c, g, or t
atggctgccgatggttatcttccagattggctcgaggacaacctctctgagggcattcgcgagtggtgggacttgaaacctggagccccgaaacccaaagccaaccagcaaaagcaggacgacggccggggtctggtgcttcctggctacaagtacctcggacccttcaacggactcgacaagggggagcccgtcaacgcggcggacgcagcggccctcgagcacgacaaggcctacgaccagcagctcaaagcgggtgacaatccgtacctgcggtataaccacgccgacgccgagtttcaggagcgtctgcaagaagatacgtcttttgggggcaacctcgggcgagcagtcttccaggccaagaagcgggttctcgaacctctcggtctggttgaggaaggcgctaagacggctcctggaaagaagagaccggtagagcaatcaccccaggaaccagactcctctnnnggcatcggcaagaaaggccagcagcccgcgnnnaagagactcaactttgggcagactggcgactcagagtcagtgcccgaccctcaaccactcggagaaccccccgcagccccctctggtgtgggatctaatacaatggctgcaggcggtggcgctccaatggcagacaataacgaaggcgccgacggagtgggtaatgcctcaggaaattggcattgcgattccacatggctgggcgacagagtcatcaccaccagcacccgaacctgggccctccccacctacaacaaccacctctacaagcaaatctccnnnnnncaatcgggaggaagcaccaacgacaacacctacttcggctacagcaccccctgggggtattttgactttaacagattccactgccacttctcaccacgtgactggcagcgactcatcaacaacaactggggattccggcccaagnnnctcaacttcaagctcttcaacatccaggtcaaggaggtcacgacgaatgatggcaccacgaccatcgccaataaccttaccagcacggttcaggtctttacggactcggaataccagctcccgtacgtcctcggctctgcgcaccagggctgcctgcctccgttcccggcggacgtcttcatgattcctcagtacgggtacctgactctgaacaatggcagtcaggccgtgggccgttcctccttctactgcctggagtactttccttctcaaatgctgagaacgggcaacaactttnnnttcagctacacgtttgaggacgtgccttttcacagcagctacgcgcacagccaaagcctggaccggctgatgaaccccctcatcgaccagtacctgtactacctgtctcggactcagaccacgggaggtaccgcaggaaatnnnnnnttgcaattttctcaggccgggcctagtagcatggcgaatcaggccaaaaactggctacccgggccctgctaccggcagcaacgcgtctccaagacaacgaatcaaaataacaacagcaactttgcctggaccggtgccaccaagtatcatctgaatggcagagactctctggtaaatcccggtgtcgctatggcaacccacaaggacgacgaagaccgattttttccgtccagcggagtcttaatatttgggaaacagggagctggaaatnnnaacgtggacnnnnnnaacgttatgataaccnnngaggaagaaattaaaaccaccaacccagtggccacagaagagtacggcnnngtggccactaacctgcaatcgnnnaacaccgctcctcaaacagggaccgtcaacagtcaaggagccttacctggcatggtctggcagaaccgggacgtgtacctgcagggtcctatctgggccaagattcctcacacggacggaaactttcatccctcgccgctgatgggaggctttggactgaaacacccgcctcctcagatcctgattaagaatacacctgttcccgcgaatcctccaactaccttcnnnccagctaagtttgcgtcgttcatcacgcagtacagcaccggacaggtcagcgtggaaattgaatgggagctgcagaaagaaaacagcaaacgctggaacccagagattcaatacacttccaactacaacaaatctacaaatgtggactttgctgttgacacagaaggcgtttattctgagcctcgccccatcggcacccgttacctcacccgtaatctg

SEQ ID NO: 1847 - protein, 738 aa, synthetic construct
  source 1..738: note = Description of Artificial Sequence: Synthetic polypeptide
  VARIANT 158: note = misc_feature - Xaa can be any naturally occurring amino acid
  VARIANT 169: note = misc_feature - Xaa can be any naturally occurring amino acid
  VARIANT 564: note = misc_feature - Xaa can be any naturally occurring amino acid
MAADGYLPDWLEDNLSEGIREWWDLKPGAPKPKANQQKQDDGRGLVLPGYKYLGPFNGLDKGEPVNAADAAALEHDKAYDQQLKAGDNPYLRYNHADAEFQERLQEDTSFGGNLGRAVFQAKKRVLEPLGLVEEGAKTAPGKKRPVEQSPQREPDSSXGIGKKGQQPAXKRLNFGQTGDSESVPDPQPLGEPPAAPSGVGSNTMAAGGGAPMADNNEGADGVGNSSGNWHCDSTWLGDRVITTSTRTWALPTYNNHLYKQISNGTSGGSTNDNTYFGYSTPWGYFDFNRFHCHFSPRDWQRLINNNWGFRPKRLNFKLFNIQVKEVTTNEGTKTIANNLTSTVQVFTDSEYQLPYVLGSAHQGCLPPFPADVFMIPQYGYLTLNNGSQAVGRSSFYCLEYFPSQMLRTGNNFQFSYTFEDVPFHSSYAHSQSLDRLMNPLIDQYLYYLSRTQTTGGTAGTQTLQFSQAGPSSMANQAKNWLPGPCYRQQRVSTTTNQNNNSNFAWTGATKYHLNGRDSLVNPGVAMATHKDDEDRFFPSSGVLIFGKQGAGNDNVDYSNVMITXEEEIKTTNPVATEEYGVVATNLQSANTAPQTGTVNSQGALPGMVWQNRDVYLQGPIWAKIPHTDGNFHPSPLMGGFGLKHPPPQILIKNTPVPADPPTTFNQAKLNSFITQYSTGQVSVEIEWELQKENSKRWNPEIQYTSNYYKSTNVDFAVNTEGVYSEPRPIGTRYLTRNL

SEQ ID NO: 1848 - DNA, 2214 bp, synthetic construct
  source 1..2214: mol_type = other DNA; note = Description of Artificial Sequence: Synthetic polynucleotide
  misc_difference 472..474: note = misc_feature - n is a, c, g, or t
  misc_difference 505..507: note = misc_feature - n is a, c, g, or t
  misc_difference 1690..1692: note = misc_feature - n is a, c, g, or t
atggctgccgatggttatcttccagattggctcgaggacaacctctctgagggcattcgcgagtggtgggacctgaaacctggagccccgaaacccaaagccaaccagcaaaagcaggacgacggccggggtctggtgcttcctggctacaagtacctcggacccttcaacggactcgacaagggggagcccgtcaacgcggcggacgcagcggccctcgagcacgacaaggcctacgaccagcagctcaaagcgggtgacaatccgtacctgcggtataatcacgccgacgccgagtttcaggagcgtctgcaagaagatacgtcttttgggggcaacctcgggcgagcagtcttccaggccaagaagcgggttctcgaacctctcggtctggttgaggaaggcgctaagacggctcctggaaagaagagaccggtagagcagtcaccacagcgtgagcccgactcctccnnnggcatcggcaagaaaggccagcagcccgccnnnaagagactcaatttcggtcagactggcgactcagagtcagtccccgaccctcaacctctcggagaacctccagcagcgccctctggtgtgggatctaatacaatggctgcaggcggtggcgcaccaatggcagacaataacgaaggtgccgacggagtgggtaattcctcgggaaattggcattgcgattccacatggctgggcgacagagtcatcaccaccagcacccgaacctgggccctgcccacctacaacaaccacctctacaagcaaatctccaacgggacctcgggaggcagcaccaacgacaacacctactttggctacagcaccccctgggggtattttgactttaacagattccactgccacttctcaccacgtgactggcagcgactcatcaacaacaactggggattccggcccaagagactcaacttcaagctcttcaacatccaggtcaaagaggtcacgacgaatgaaggcaccaagaccatcgccaataacctcaccagcaccgtccaggtgtttacggactcggaataccagctgccgtacgtcctcggctctgcccaccagggctgcctgcctccgttcccggcggacgtcttcatgattcctcagtacggctacctgactctcaacaacggtagtcaggccgtgggacgttcctccttctactgcctggagtacttcccctctcagatgctgagaacgggcaacaactttcaattcagctacactttcgaggacgtgcctttccacagcagctacgcgcacagccagagtttggacaggctgatgaatcctctcatcgaccagtacctgtactacctgtcaagaacccagactacgggaggcacagcgggaacccagacgttgcagttttctcaggccgggcctagcagcatggcgaatcaggccaaaaactggctgcctggaccctgctacagacagcagcgcgtctccacgacaacgaatcaaaacaacaacagcaactttgcctggactggtgccaccaagtatcatctgaacggcagagactctctggtgaatccgggcgtcgccatggcaacccacaaggacgacgaggaccgcttcttcccatccagcggcgtcctcatatttggcaagcagggagctggaaatgacaacgtggactatagcaacgtgatgataaccnnngaggaagaaatcaagaccaccaaccccgtggccacagaagagtatggcgtggtggctactaacctacagtcggcaaacaccgctcctcaaacggggaccgtcaacagccagggagccttacctggcatggtctggcagaaccgggacgtgtacctgcagggtcctatttgggccaagattcctcacacagatggcaactttcacccgtctcctttaatgggcggctttggacttaaacatccgcctcctcagatcctcatcaaaaacactcctgttcctgcggatcctccaacaacgttcaaccaggccaagctgaattctttcatcacgcagtacagcaccggacaagtcagcgtggagatcgagtgggagctgcagaaggagaacagcaagcgctggaacccagagattcagtatacttccaactactacaaatctacaaatgtggactttgctgttaatactgagggtgtttactctgagcctcgccccattggcactcgttacctcacccgtaatctg

SEQ ID NO: 1849 - protein, 738 aa, synthetic construct
  source 1..738: note = Description of Artificial Sequence: Synthetic polypeptide
  VARIANT 158: note = misc_feature - Xaa can be any naturally occurring amino acid
  VARIANT 169: note = misc_feature - Xaa can be any naturally occurring amino acid
  VARIANT 315: note = misc_feature - Xaa can be any naturally occurring amino acid
  VARIANT 413: note = misc_feature - Xaa can be any naturally occurring amino acid
  VARIANT 472: note = misc_feature - Xaa can be any naturally occurring amino acid
  VARIANT 534: note = misc_feature - Xaa can be any naturally occurring amino acid
  VARIANT 542: note = misc_feature - Xaa can be any naturally occurring amino acid
  VARIANT 595: note = misc_feature - Xaa can be any naturally occurring amino acid
MAADGYLPDWLEDNLSEGIREWWDLKPGAPKPKANQQKQDDGRGLVLPGYKYLGPFNGLDKGEPVNAADAAALEHDKAYDQQLKAGDNPYLRYNHADAEFQERLQEDTSFGGNLGRAVFQAKKRVLEPLGLVEEGAKTAPGKKRPVEQSPQREPDSSXGIGKKGQQPAXKRLNFGQTGDSESVPDPQPLGEPPAAPSGVGSNTMAAGGGAPMADNNEGADGVGSSSGNWHCDSTWLGDRVITTSTRTWALPTYNNHLYKQISNGTSGGSTNDNTYFGYSTPWGYFDFNRFHCHFSPRDWQRLINNNWGFRPKRLXFKLFNIQVKEVTQNEGTKTIANNLTSTIQVFTDSEYQLPYVLGSAHQGCLPPFPADVFMIPQYGYLTLNNGSQAVGRSSFYCLEYFPSQMLRTGNNFXFSYTFEDVPFHSSYAHSQSLDRLMNPLIDQYLYYLSRTQTTGGTAGTQTLQFSQAGPSXMANQAKNWLPGPCYRQQRVSTTTSQNNNSNFAWTGATKYHLNGRDSLVNPGVAMATHKDDEXRFFPSSGXLIFGKQGAGKDNVDYSNVMLTSEEEIKTTNPVATEEYGVVADNLQQQNTAPQXGTVNSQGALPGMVWQNRDVYLQGPIWAKIPHTDGNFHPSPLMGGFGLKHPPPQILIKNTPVPADPPTTFNQAKLNSFITQYSTGQVSVEIEWELQKENSKRWNPEIQYTSNYYKSTNVDFAVNTEGVYSEPRPIGTRYLTRNL

SEQ ID NO: 1850 - DNA, 2214 bp, synthetic construct
  source 1..2214: mol_type = other DNA; note = Description of Artificial Sequence: Synthetic polynucleotide
  misc_difference 472..474: note = misc_feature - n is a, c, g, or t
  misc_difference 505..507: note = misc_feature - n is a, c, g, or t
  misc_difference 943..945: note = misc_feature - n is a, c, g, or t
  misc_difference 1237..1239: note = misc_feature - n is a, c, g, or t
  misc_difference 1414..1416: note = misc_feature - n is a, c, g, or t
  misc_difference 1600..1602: note = misc_feature - n is a, c, g, or t
  misc_difference 1624..1626: note = misc_feature - n is a, c, g, or t
  misc_difference 1783..1785: note = misc_feature - n is a, c, g, or t
atggctgccgatggttatcttccagattggctcgaggacaacctctctgagggcattcgcgagtggtgggacctgaaacctggagccccgaaacccaaagccaaccagcaaaagcaggacgacggccggggtctggtgcttcctggctacaagtacctcggacccttcaacggactcgacaagggggagcccgtcaacgcggcggacgcagcggccctcgagcacgacaaggcctacgaccagcagctcaaagcgggtgacaatccgtacctgcggtataatcacgccgacgccgagtttcaggagcgtctgcaagaagatacgtcttttgggggcaacctcgggcgagcagtcttccaggccaagaagcgggttctcgaacctctcggtctggttgaggaaggcgctaagacggctcctggaaagaagagaccggtagagcagtcaccacagcgtgagcccgactcctccnnnggcatcggcaagaaaggccagcagcccgccnnnaagagactcaatttcggtcagactggcgactcagagtcagtccccgaccctcaacctctcggagaacctccagcagcgccctctggtgtgggatctaatacaatggctgcaggcggtggcgcaccaatggcagacaataacgaaggtgccgacggagtgggtagttcctcgggaaattggcattgcgattccacatggctgggcgacagagtcatcaccaccagcacccgaacctgggccctgcccacctacaacaaccacctctacaagcaaatctccaacgggacctcgggaggcagcaccaacgacaacacctactttggctacagcaccccctgggggtattttgactttaacagattccactgccacttctcaccacgtgactggcagcgactcatcaacaacaactggggattccggcccaagagactcnnnttcaagctcttcaacatccaggtcaaagaggtcacgcagaatgaaggcaccaagaccatcgccaataacctcaccagcaccatccaggtgtttacggactcggaataccagctgccgtacgtcctcggctctgcccaccagggctgcctgcctccgttcccggcggacgtcttcatgattcctcagtacggctacctgactctcaacaacggtagtcaggccgtgggacgttcctccttctactgcctggagtacttcccctctcagatgctgagaacgggcaacaactttnnnttcagctacactttcgaggacgtgcctttccacagcagctacgcgcacagccagagtttggacaggctgatgaatcctctcatcgaccagtacctgtactacctgtcaagaacccagactacgggaggcacagcgggaacccagacgttgcagttttctcaggccgggcctagcnnnatggcgaatcaggccaaaaactggctgcctggaccctgctacagacagcagcgcgtctccacgacaacgtcgcaaaacaacaacagcaactttgcctggactggtgccaccaagtatcatctgaacggcagagactctctggtgaatccgggcgtcgccatggcaacccacaaggacgacgagnnncgcttcttcccatccagcggcnnnctcatatttggcaagcagggagctggaaaagacaacgtggactatagcaacgtgatgctaaccagcgaggaagaaatcaagaccaccaaccccgtggccacagaagagtatggcgtggtggctgataacctacagcagcaaaacaccgctcctcaannngggaccgtcaacagccagggagccttacctggcatggtctggcagaaccgggacgtgtacctgcagggtcctatttgggccaagattcctcacacagatggcaactttcacccgtctcctttaatgggcggctttggacttaaacatccgcctcctcagatcctcatcaaaaacactcctgttcctgcggatcctccaacaacgttcaaccaggccaagctgaattctttcatcacgcagtacagcaccggacaagtcagcgtggagatcgagtgggagctgcagaaggagaacagcaagcgctggaacccagagattcagtatacttccaactactacaaatctacaaatgtggactttgctgttaatactgagggtgtttactctgagcctcgccccattggcactcgttacctcacccgtaatctg

SEQ ID NO: 1851 - protein, 738 aa, synthetic construct
  source 1..738: note = Description of Artificial Sequence: Synthetic polypeptide
  VARIANT 169: note = misc_feature - Xaa can be any naturally occurring amino acid
  VARIANT 315: note = misc_feature - Xaa can be any naturally occurring amino acid
  VARIANT 534: note = misc_feature - Xaa can be any naturally occurring amino acid
  VARIANT 542: note = misc_feature - Xaa can be any naturally occurring amino acid
MAADGYLPDWLEDNLSEGIREWWDLKPGAPKPKANQQKQDDGRGLVLPGYKYLGPFNGLDKGEPVNAADAAALEHDKAYDQQLKAGDNPYLRYNHADAEFQERLQEDTSFGGNLGRAVFQAKKRVLEPLGLVEEGAKTAPGKKRPVEPSPQRSPDSSTGIGKKGQQPAXKRLNFGQTGDSESVPDPQPIGEPPAAPSGVGSGTMAAGGGAPMADNNEGADGVGSSSGNWHCDSTWLGDRVITTSTRTWALPTYNNHLYKQISNGTSGGSTNDNTYFGYSTPWGYFDFNRFHCHFSPRDWQRLINNNWGFRPKRLXFKLFNIQVKEVTQNEGTKTIANNLTSTIQVFTDSEYQLPYVLGSAHQGCLPPFPADVFMIPQYGYLTLNNGSQAVGRSSFYCLEYFPSQMLRTGNNFEFSYTFEDVPFHSSYAHSQSLDRLMNPLIDQYLYYLSRTQSTGGTAGTQQLLFSQAGPSNMSAQAKNWLPGPCYRQQRVSTTLSQNNNSNFAWTGATKYHLNGRDSLVNPGVAMATHKDDEXRFFPSSGXLMFGKQGAGKDNVDYSNVMLTSEEEIKTTNPVATEQYGVVADNLQQQNTAPIVGAVNSQGALPGMVWQNRDVYLQGPIWAKIPHTDGNFHPSPLMGGFGLKHPPPQILIKNTPVPADPPTTFNQAKLNSFITQYSTGQVSVEIEWELQKENSKRWNPEIQYTSNYYKSTNVDFAVNTEGVYSEPRPIGTRYLTRNL

SEQ ID NO: 1852 - DNA, 2214 bp, synthetic construct
  source 1..2214: mol_type = other DNA; note = Description of Artificial Sequence: Synthetic polynucleotide
  misc_difference 505..507: note = misc_feature - n is a, c, g, or t
  misc_difference 943..945: note = misc_feature - n is a, c, g, or t
  misc_difference 1600..1602: note = misc_feature - n is a, c, g, or t
  misc_difference 1624..1626: note = misc_feature - n is a, c, g, or t
atggctgccgatggttatcttccagattggctcgaggacaacctctctgagggcattcgcgagtggtgggacctgaaacctggagccccgaaacccaaagccaaccagcaaaagcaggacgacggccggggtctggtgcttcctggctacaagtacctcggacccttcaacggactcgacaagggggagcccgtcaacgcggcggacgcagcggccctcgagcacgacaaggcctacgaccagcagctcaaagcgggtgacaatccgtacctgcggtataatcacgccgacgccgagtttcaggagcgtctgcaagaagatacgtcttttgggggcaacctcgggcgagcagtcttccaggccaagaagcgggttctcgaacctctcggtctggttgaggaaggcgctaagacggctcctggaaagaagagaccggtagagccgtcaccacagcgttcccccgactcctccacgggcatcggcaagaaaggccagcagcccgccnnnaagagactcaatttcggtcagactggcgactcagagtcagtccccgaccctcaacctatcggagaacctccagcagcgccctctggtgtgggatctggtacaatggctgcaggcggtggcgcaccaatggcagacaataacgaaggtgccgacggagtgggtagttcctcgggaaattggcattgcgattccacatggctgggcgacagagtcatcaccaccagcacccgaacctgggccctgcccacctacaacaaccacctctacaagcaaatctccaacgggacctcgggaggcagcaccaacgacaacacctactttggctacagcaccccctgggggtattttgactttaacagattccactgccacttctcaccacgtgactggcagcgactcatcaacaacaactggggattccggcccaagagactcnnnttcaagctcttcaacatccaggtcaaagaggtcacgcagaatgaaggcaccaagaccatcgccaataacctcaccagcaccatccaggtgtttacggactcggaataccagctgccgtacgtcctcggctctgcccaccagggctgcctgcctccgttcccggcggacgtcttcatgattcctcagtacggctacctgactctcaacaacggtagtcaggccgtgggacgttcctccttctactgcctggagtacttcccctctcagatgctgagaacgggcaacaactttgagttcagctacactttcgaggacgtgcctttccacagcagctacgcgcacagccagagtttggacaggctgatgaatcctctcatcgaccagtacctgtactacctgtcaagaacccagtctacgggaggcacagcgggaacccagcagttgctgttttctcaggccgggcctagcaacatgtcggctcaggccaaaaactggctgcctggaccctgctacagacagcagcgcgtctccacgacactgtcgcaaaacaacaacagcaactttgcctggactggtgccaccaagtatcatctgaacggcagagactctctggtgaatccgggcgtcgccatggcaacccacaaggacgacgagnnncgcttcttcccatccagcggcnnnctcatgtttggcaagcagggagctggaaaagacaacgtggactatagcaacgtgatgctaaccagcgaggaagaaatcaagaccaccaaccccgtggccacagaacagtatggcgtggtggctgataacctacagcagcaaaacaccgctcctattgtgggggccgtcaacagccagggagccttacctggcatggtctggcagaaccgggacgtgtacctgcagggtcctatttgggccaagattcctcacacagatggcaactttcacccgtctcctttaatgggcggctttggacttaaacatccgcctcctcagatcctcatcaaaaacactcctgttcctgcggatcctccaacaacgttcaaccaggccaagctgaattctttcatcacgcagtacagcaccggacaagtcagcgtggagatcgagtgggagctgcagaaggagaacagcaagcgctggaacccagagattcagtatacttccaactactacaaatctacaaatgtggactttgctgttaatactgagggtgtttactctgagcctcgccccattggcactcgttacctcacccgtaatctg

SEQ ID NO: 1853 - protein, 738 aa, synthetic construct
  source 1..738: note = Description of Artificial Sequence: Synthetic polypeptide
  VARIANT 471: note = misc_feature - Xaa can be any naturally occurring amino acid
MAADGYLPDWLEDNLSEGIREWWDLKPGAPKPKANQQKQDDGRGLVLPGYKYLGPFNGLDKGEPVNAADAAALEHDKAYDQQLKAGDNPYLRYNHADAEFQERLQEDTSFGGNLGRAVFQAKKRVLEPLGLVEEGAKTAPGKKRPVEPSPQRSPDSSTGIGKKGQQPAKKRLNFGQTGDSESVPDPQPIGEPPAGPSGLGSGTMAAGGGAPMADNNEGADGVGSSSGNWHCDSTWLGDRVITTSTRTWALPTYNNHLYKQISNGTSGGSTNDNTYFGYSTPWGYFDFNRFHCHFSPRDWQRLINNNWGFRPKRLNFKLFNIQVKEVTQNEGTKTIANNLTSTIQVFTDSEYQLPYVLGSAHQGCLPPFPADVFMIPQYGYLTLNNGSQAVGRSSFYCLEYFPSQMLRTGNNFEFSYTFEDVPFHSSYAHSQSLDRLMNPLIDQYLYYLSRTQSTGGTAGTQQLLFSQAGPXNMSAQAKNWLPGPCYRQQRVSTTLSQNNNSNFAWTGATKYHLNGRDSLVNPGVAMATHKDDEERFFPSSGVLMFGKQGAGKDNVDYSSVMLTSEEEIKTTNPVATEQYGVVADNLQQQNTAPIVGAVNSQGALPGMVWQNRDVYLQGPIWAKIPHTDGNFHPSPLMGGFGLKHPPPQILIKNTPVPADPPTTFSQAKLASFITQYSTGQVSVEIEWELQKENSKRWNPEIQYTSNYYKSTNVDFAVNTEGTYSEPRPIGTRYLTRNL

SEQ ID NO: 1854 - DNA, 2214 bp, synthetic construct
  source 1..2214: mol_type = other DNA; note = Description of Artificial Sequence: Synthetic polynucleotide
  misc_difference 1411..1413: note = misc_feature - n is a, c, g, or t
atggctgccgatggttatcttccagattggctcgaggacaacctctctgagggcattcgcgagtggtgggacttgaaacctggagccccgaaacccaaagccaaccagcaaaagcaggacgacggccggggtctggtgcttcctggctacaagtacctcggacccttcaacggactcgacaagggggagcccgtcaacgcggcggacgcagcggccctcgagcacgacaaggcctacgaccagcagctcaaagcgggtgacaatccgtacctgcggtataaccacgccgacgccgagtttcaggagcgtctgcaagaagatacgtcttttgggggcaacctcgggcgagcagtcttccaggccaagaagcgggttctcgaacctctcggtctggttgaggaaggcgctaagacggctcctggaaagaagagaccggtagagccatcaccccagcgttctccagactcctctacgggcatcggcaagaaaggccagcagcccgcgaaaaagagactcaactttgggcagactggcgactcagagtcagtgcccgaccctcaaccaatcggagaaccccccgcaggcccctctggtctgggatctggtacaatggctgcaggcggtggcgctccaatggcagacaataacgaaggcgccgacggagtgggtagttcctcaggaaattggcattgcgattccacatggctgggcgacagagtcatcaccaccagcacccgaacctgggccctccccacctacaacaaccacctctacaagcaaatctccaacgggacttcgggaggaagcaccaacgacaacacctacttcggctacagcaccccctgggggtattttgactttaacagattccactgccacttctcaccacgtgactggcagcgactcatcaacaacaactggggattccggcccaagagactcaacttcaagctcttcaacatccaggtcaaggaggtcacgcagaatgaaggcaccaagaccatcgccaataaccttaccagcacgattcaggtctttacggactcggaataccagctcccgtacgtcctcggctctgcgcaccagggctgcctgcctccgttcccggcggacgtcttcatgattcctcagtacgggtacctgactctgaacaatggcagtcaggccgtgggccgttcctccttctactgcctggagtactttccttctcaaatgctgagaacgggcaacaactttgagttcagctacacgtttgaggacgtgccttttcacagcagctacgcgcacagccaaagcctggaccggctgatgaaccccctcatcgaccagtacctgtactacctgtctcggactcagtccacgggaggtaccgcaggaactcagcagttgctattttctcaggccgggcctnnnaacatgtcggctcaggccaaaaactggctacccgggccctgctaccggcagcaacgcgtctccacgacactgtcgcaaaataacaacagcaactttgcctggaccggtgccaccaagtatcatctgaatggcagagactctctggtaaatcccggtgtcgctatggcaacccacaaggacgacgaagagcgattttttccgtccagcggagtcttaatgtttgggaaacagggagctggaaaagacaacgtggactatagcagcgttatgctaaccagtgaggaagaaattaaaaccaccaacccagtggccacagaacagtacggcgtggtggccgataacctgcaacagcaaaacaccgctcctattgtaggggccgtcaacagtcaaggagccttacctggcatggtctggcagaaccgggacgtgtacctgcagggtcctatctgggccaagattcctcacacggacggaaactttcatccctcgccgctgatgggaggctttggactgaaacacccgcctcctcagatcctgattaagaatacacctgttcccgcggatcctccaactaccttcagtcaagctaagctggcgtcgttcatcacgcagtacagcaccggacaggtcagcgtggaaattgaatgggagctgcagaaagaaaacagcaaacgctggaacccagagattcaatacacttccaactactacaaatctacaaatgtggactttgctgttaacacagaaggcacttattctgagcctcgccccatcggcacccgttacctcacccgtaatctg

SEQ ID NO: 1855 - protein, 737 aa, synthetic construct
  source 1..737: note = Description of Artificial Sequence: Synthetic polypeptide
  VARIANT 148: note = misc_feature - Xaa can be any naturally occurring amino acid
  VARIANT 169: note = misc_feature - Xaa can be any naturally occurring amino acid
  VARIANT 314: note = misc_feature - Xaa can be any naturally occurring amino acid
  VARIANT 466: note = misc_feature - Xaa can be any naturally occurring amino acid
  VARIANT 563: note = misc_feature - Xaa can be any naturally occurring amino acid
  VARIANT 580: note = misc_feature - Xaa can be any naturally occurring amino acid
  VARIANT 588: note = misc_feature - Xaa can be any naturally occurring amino acid
MAADGYLPDWLEDNLSEGIREWWDLKPGAPKPKANQQKQDDGRGLVLPGYKYLGPFNGLDKGEPVNAADAAALEHDKAYDQQLKAGDNPYLRYNHADAEFQERLQEDTSFGGNLGRAVFQAKKRVLEPLGLVEEGAKTAPGKKRPVEXSPQRSPDSSTGIGKKGQQPAXKRLNFGQTGDSESVPDPQPLGEPPAAPSGVGSGTMAAGGGAPMADNNEGADGVGNASGNWHCDSTWLGDRVITTSTRTWALPTYNNHLYKQISSQSAGSTNDNTYFGYSTPWGYFDFNRFHCHFSPRDWQRLINNNWGFRPKKLXFKLFNIQVKEVTTNDGVTTIANNLTSTVQVFSDSEYQLPYVLGSAHQGCLPPFPADVFMIPQYGYLTLNNGSQSVGRSSFYCLEYFPSQMLRTGNNFEFSYTFEDVPFHSSYAHSQSLDRLMNPLIDQYLYYLARTQSTTGGTAGNRELQFXQAGPSTMAEQAKNWLPGPCYRQQRVSKTLDQNNNSNFAWTGATKYHLNGRNSLVNPGVAMATHKDDEDRFFPSSGVLIFGKTGAANKTTLENVLMTXEEEIKTTNPVATEEYGXVSSNLQSXNTAPQTQTVNSQGALPGMVWQNRDVYLQGPIWAKIPHTDGNFHPSPLMGGFGLKHPPPQILIKNTPVPANPPEVFTPAKFASFITQYSTGQVSVEIEWELQKENSKRWNPEIQYTSNYDKSTNVDFAVDSEGVYSEPRPIGTRYLTRNL

SEQ ID NO: 1856 - DNA, 2211 bp, synthetic construct
  source 1..2211: mol_type = other DNA; note = Description of Artificial Sequence: Synthetic polynucleotide
  misc_difference 442..444: note = misc_feature - n is a, c, g, or t
  misc_difference 505..507: note = misc_feature - n is a, c, g, or t
  misc_difference 940..942: note = misc_feature - n is a, c, g, or t
  misc_difference 1396..1398: note = misc_feature - n is a, c, g, or t
  misc_difference 1687..1689: note = misc_feature - n is a, c, g, or t
  misc_difference 1738..1740: note = misc_feature - n is a, c, g, or t
  misc_difference 1762..1764: note = misc_feature - n is a, c, g, or t
atggctgccgatggttatcttccagattggctcgaggacaacctctctgagggcattcgcgagtggtgggacctgaaacctggagccccgaaacccaaagccaaccagcaaaagcaggacgacggccggggtctggtgcttcctggctacaagtacctcggacccttcaacggactcgacaagggggagcccgtcaacgcggcggacgcagcggccctcgagcacgacaaggcctacgaccagcagctcaaagcgggtgacaatccgtacctgcggtataaccacgccgacgccgagtttcaggagcgtctgcaagaagatacgtcatttgggggcaacctcgggcgagcagtcttccaggccaagaagcgggttctcgaacctctcggtctggttgaggaaggcgctaagacggctcctggaaagaagagaccggtagagnnntcacctcagcgttcccccgactcctccacgggcatcggcaagaaaggccagcagcccgccnnnaagagactcaatttcggtcagactggcgactcagagtcagtccccgaccctcaacctctcggagaacctccagcagcgccctctggtgtgggatctggtacaatggctgcaggcggtggcgcaccaatggcagacaataacgaaggtgccgacggagtgggtaatgcctcaggaaattggcattgcgattccacatggctgggcgacagagtcattaccaccagcacccgaacctgggccctgcccacctacaacaaccacctctacaagcaaatctccagtcaaagtgcaggtagtaccaacgacaacacctacttcggctacagcaccccctgggggtattttgactttaacagattccactgccacttctcaccacgtgactggcagcgactcatcaacaacaactggggattccggcccaagaagctgnnnttcaagctcttcaacatccaggtcaaggaggtcacgacgaatgacggcgttacgaccatcgctaataaccttaccagcacggttcaggtattctcggactcggaataccagctgccgtacgtcctcggctctgcgcaccagggctgcctgcctccgttcccggcggacgtcttcatgattcctcagtacggctacctgactctcaacaatggcagtcagtctgtgggacgttcctccttctactgcctggagtacttcccctctcagatgctgagaacgggcaacaactttgagttcagctacaccttcgaggacgtgcctttccacagcagctacgcacacagccagagcctggaccggctgatgaatcccctcatcgaccagtacttgtactacctggccagaacacagagtaccacaggaggcacagctggcaatcgggaactgcagtttnnncaggccgggccttcaactatggccgaacaagccaagaattggttacctggaccttgctaccggcaacaaagagtctccaaaacgctggatcaaaacaacaacagcaactttgcttggactggtgccaccaaatatcacctgaacggcagaaactcgttggttaatcccggcgtcgccatggcaactcacaaggacgacgaggaccgctttttcccatccagcggagtcctgatttttggaaaaactggagcagctaacaaaactacattggaaaatgtgttaatgacannngaagaagaaattaaaactactaatcctgtagccacggaagaatacgggnnngtcagcagcaacttacaatcgnnnaatactgcaccccagacacaaactgtcaacagccagggagccttacctggcatggtctggcagaaccgggacgtgtacctgcagggtcccatctgggccaagattcctcacacggatggcaactttcacccgtctcctttgatgggcggctttggacttaaacatccgcctcctcagatcctgatcaagaacactcccgttcccgctaatcctccggaggtgtttactcctgccaagtttgcttcgttcatcacacagtacagcaccggacaagtcagcgtggaaatcgagtgggagctgcagaaggaaaacagcaagcgctggaacccggagattcagtacacctccaactatgataagtcgactaatgtggactttgccgttgacagcgagggtgtttactctgagcctcgccctattggcactcgttacctcacccgtaatctg

SEQ ID NO: 1857 - protein, 735 aa, synthetic construct
  source 1..735: note = Description of Artificial Sequence: Synthetic polypeptide
  VARIANT 162: note = misc_feature - Xaa can be any naturally occurring amino acid
  VARIANT 168: note = misc_feature - Xaa can be any naturally occurring amino acid
  VARIANT 224: note = misc_feature - Xaa can be any naturally occurring amino acid
  VARIANT 310: note = misc_feature - Xaa can be any naturally occurring amino acid
  VARIANT 410: note = misc_feature - Xaa can be any naturally occurring amino acid
  VARIANT 446: note = misc_feature - Xaa can be any naturally occurring amino acid
  VARIANT 461: note = misc_feature - Xaa can be any naturally occurring amino acid
  VARIANT 471: note = misc_feature - Xaa can be any naturally occurring amino acid
  VARIANT 708: note = misc_feature - Xaa can be any naturally occurring amino acid
MAADGYLPDWLEDNLSEGIREWWDLKPGAPKPKANQQKQDDGRGLVLPGYKYLGPFNGLDKGEPVNAADAAALEHDKAYDQQLKAGDNPYLRYNHADAEFQERLQEDTSFGGNLGRAVFQAKKRVLEPLGLVEEGAKTAPGKKRPVEQSPQEPDSSSGIGKXGQQPAXKRLNFGQTGDSESVPDPQPLGEPPAAPSGVGSNTMASGGGAPMADNNEGADGVGNXSGNWHCDSTWLGDRVITTSTRTWALPTYNNHLYKQISSQSGASNDNHYFGYSTPWGYFDFNRFHCHFSPRDWQRLINNNWGFRPKXLNFKLFNIQVKEVTTNDGTTTIANNLTSTVQVFTDSEYQLPYVLGSAHQGCLPPFPADVFMIPQYGYLTLNNGSQAVGRSSFYCLEYFPSQMLRTGNNFXFSYTFEDVPFHSSYAHSQSLDRLMNPLIDQYLYYLXRTQTTSGTAQNRELXFSQAGPSSMXNQAKNWLPGPCYRQQRVSKTANDNNNSNFAWTGATKYHLNGRDSLVNPGPAMASHKDDEDKFFPMSGVLIFGKQGAGASNVDLDNVMITDEEEIKTTNPVATEQYGTVATNLQSSNTAPATGTVNSQGALPGMVWQDRDVYLQGPIWAKIPHTDGHFHPSPLMGGFGLKHPPPQILIKNTPVPANPPTTFSPAKFASFITQYSTGQVSVEIEWELQKENSKRWNPEIQYTSNYNKSXNVDFTVDTNGVYSEPRPIGTRYLTRNL

SEQ ID NO: 1858 - DNA, 2205 bp, synthetic construct
  source 1..2205: mol_type = other DNA; note = Description of Artificial Sequence: Synthetic polynucleotide
  misc_difference 484..486: note = misc_feature - n is a, c, g, or t
  misc_difference 502..504: note = misc_feature - n is a, c, g, or t
  misc_difference 670..672: note = misc_feature - n is a, c, g, or t
  misc_difference 928..930: note = misc_feature - n is a, c, g, or t
  misc_difference 1228..1230: note = misc_feature - n is a, c, g, or t
  misc_difference 1336..1338: note = misc_feature - n is a, c, g, or t
  misc_difference 1381..1383: note = misc_feature - n is a, c, g, or t
  misc_difference 1411..1413: note = misc_feature - n is a, c, g, or t
  misc_difference 2122..2124: note = misc_feature - n is a, c, g, or t
atggctgccgatggttatcttccagattggctcgaggacaacctctctgagggcattcgcgagtggtgggacttgaaacctggagccccgaaacccaaagccaaccagcaaaagcaggacgacggccggggtctggtgcttcctggctacaagtacctcggacccttcaacggactcgacaagggggagcccgtcaacgcggcggatgcagcggccctcgagcacgacaaggcctacgaccagcagctcaaagcgggtgacaatccgtacctgcggtataaccacgccgacgccgagtttcaggagcgtctgcaagaagatacgtcttttgggggcaacctcgggcgagcagtcttccaggccaagaagagggttctcgaacctcttggtctggttgaggaaggtgctaagacggctcctggaaagaaacgtccggtagagcagtcgccacaagagccagactcctcctcgggcattggcaagnnnggccagcagcccgctnnnaagagactcaattttggtcagactggcgactcagagtcagtccccgacccacaacctctcggagaacctccagcagccccctctggtgtgggatctaatacaatggcttcaggcggtggcgcaccaatggcagacaataacgaaggcgccgacggagtgggtaatnnntcaggaaattggcattgcgattccacatggctgggcgacagagtcatcaccaccagcacccgaacatgggccttgcccacctataacaaccacctctacaagcaaatctccagtcaatcaggggccagcaacgacaaccactacttcggctacagcaccccctgggggtattttgatttcaacagattccactgccatttctcaccacgtgactggcagcgactcatcaacaacaattggggattccggcccaagnnnctcaacttcaagctcttcaacatccaagtcaaggaggtcacgacgaatgatggcaccacgaccatcgctaataaccttaccagcacggttcaagtcttcacggactcggagtaccagttgccgtacgtcctcggctctgcgcaccagggctgcctccctccgttcccggcggacgtgttcatgattccgcagtacggctacctaacgctcaacaatggcagccaggcagtgggacggtcatccttttactgcctggaatatttcccatcgcagatgctgagaacgggcaataactttnnnttcagctacaccttcgaggacgtgcctttccacagcagctacgcgcacagccagagcctggaccggctgatgaatcctctcatcgaccagtacctgtattacctgnnnagaactcagactacgtccggaactgcccaaaacagggagttgnnntttagccaggcgggtccatctagcatgnnnaatcaggccaaaaactggctacctggaccctgttaccggcagcagcgcgtttctaaaacagcaaatgacaacaacaacagcaactttgcctggactggtgctacaaaatatcaccttaatgggcgtgattctttagtcaaccctggccctgctatggcctcacacaaagacgacgaagacaagttctttcccatgagcggtgtcttgatttttggaaagcagggcgccggagcttcaaacgttgatttggacaatgtcatgatcacagacgaagaggaaatcaaaaccactaaccccgtggccaccgaacaatatgggactgtggcaaccaatctccagagcagcaacacagcccctgcgaccggaactgtgaattctcagggagccttacctggaatggtgtggcaagacagagacgtatacctgcagggtcctatttgggccaaaattcctcacacggatggacactttcacccgtctcctctcatgggcggctttggacttaagcacccgcctcctcagatcctcatcaaaaacacgcctgttcctgcgaatcctccgacaacgttttcgcctgcaaagtttgcttcattcatcacccagtattccacaggacaagtgagcgtggagattgaatgggagctgcagaaagaaaacagcaaacgctggaatcccgaaatacagtatacatctaactataataaatctnnnaacgttgatttcactgtggacaccaatggagtttatagtgagcctcgccccattggcacccgttacctcacccgtaacctg

SEQ ID NO: 1859 - protein, 735 aa, synthetic construct
  source 1..735: note = Description of Artificial Sequence: Synthetic polypeptide
  VARIANT 42: note = misc_feature - Xaa can be any naturally occurring amino acid
  VARIANT 168: note = misc_feature - Xaa can be any naturally occurring amino acid
  VARIANT 310: note = misc_feature - Xaa can be any naturally occurring amino acid
  VARIANT 410: note = misc_feature - Xaa can be any naturally occurring amino acid
  VARIANT 446: note = misc_feature - Xaa can be any naturally occurring amino acid
  VARIANT 461: note = misc_feature - Xaa can be any naturally occurring amino acid
  VARIANT 471: note = misc_feature - Xaa can be any naturally occurring amino acid
  VARIANT 475: note = misc_feature - Xaa can be any naturally occurring amino acid
  VARIANT 504: note = misc_feature - Xaa can be any naturally occurring amino acid
  VARIANT 539: note = misc_feature - Xaa can be any naturally occurring amino acid
MAADGYLPDWLEDNLSEGIREWWDLKPGAPQPKANQQHQDDXRGLVLPGYKYLGPFNGLDKGEPVNEADAAALEHDKAYDQQLKAGDNPYLKYNHADAEFQERLQEDTSFGGNLGRAVFQAKKRVLEPLGLVEEAAKTAPGKKRPVEQSPQEPDSSSGIGKSGQQPAXKRLNFGQTGDSESVPDPQPLGEPPAAPSGVGSNTMASGGGAPMADNNEGADGVGNSSGNWHCDSTWLGDRVITTSTRTWALPTYNNHLYKQISSQSGASNDNHYFGYSTPWGYFDFNRFHCHFSPRDWQRLINNNWGFRPKXLNFKLFNIQVKEVTQNDGTTTIANNLTSTVQVFTDSEYQLPYVLGSAHQGCLPPFPADVFMIPQYGYLTLNNGSQAVGRSSFYCLEYFPSQMLRTGNNFXFSYTFEDVPFHSSYAHSQSLDRLMNPLIDQYLYYLXRTQTTSGTTQQSRLXFSQAGPSSMXQQAXNWLPGPCYRQQRVSKTANDNNNSNFAWTXATKYHLNGRDSLVNPGPAMASHKDDEEKFFPMHGXLIFGKQGTGASNVDLDNVMITDEEEIRTTNPVATEQYGTVATNLQSSNTAPATGTVNSQGALPGMVWQDRDVYLQGPIWAKIPHTDGHFHPSPLMGGFGLKHPPPQILIKNTPVPANPPTTFSPAKFASFITQYSTGQVSVEIEWELQKENSKRWNPEIQYTSNYNKSVNVDFTVDTNGVYSEPRPIGTRYLTRNL

SEQ ID NO: 1860 - DNA, 2205 bp, synthetic construct
  source 1..2205: mol_type = other DNA; note = Description of Artificial Sequence: Synthetic polynucleotide
  misc_difference 124..126: note = misc_feature - n is a, c, g, or t
  misc_difference 502..504: note = misc_feature - n is a, c, g, or t
  misc_difference 928..930: note = misc_feature - n is a, c, g, or t
  misc_difference 1228..1230: note = misc_feature - n is a, c, g, or t
  misc_difference 1336..1338: note = misc_feature - n is a, c, g, or t
  misc_difference 1381..1383: note = misc_feature - n is a, c, g, or t
  misc_difference 1411..1413: note = misc_feature - n is a, c, g, or t
  misc_difference 1423..1425: note = misc_feature - n is a, c, g, or t
  misc_difference 1510..1512: note = misc_feature - n is a, c, g, or t
  misc_difference 1615..1617: note = misc_feature - n is a, c, g, or t
atggctgctgacggttatcttccagattggctcgaggacaacctttctgaaggcattcgtgagtggtgggatctgaaacctggagcccctcaacccaaagcgaaccaacaacaccaggacgacnnncggggtcttgtgcttccgggttacaaatacctcggaccctttaacggactcgacaaaggagagccggtcaacgaggcggacgcggcagccctcgaacacgacaaagcttacgaccagcagctcaaggccggtgacaacccgtacctcaagtacaaccacgccgacgccgagtttcaggagcgtcttcaagaagatacgtcttttgggggcaaccttggcagagcagtcttccaggccaaaaagagggtccttgagcctcttggtctggttgaggaagcagctaaaacggctcctggaaagaagaggcctgtagaacagtctcctcaggaaccggactcatcatctggtattggcaaatcgggccaacagcctgccnnnaaaagactaaatttcggtcagactggagactcagagtcagtcccagaccctcaacctctcggagaaccaccagcagccccctcaggtgtgggatctaatacaatggcttcaggcggtggcgcaccaatggcagacaataacgagggtgccgatggagtgggtaattcctcaggaaattggcattgcgattccacatggctgggcgacagagtcatcaccaccagcaccagaacctgggccctgcccacttacaacaaccatctctacaagcaaatctccagccaatcaggagcttcaaacgacaaccactactttggctacagcaccccttgggggtattttgactttaacagattccactgccacttctcaccacgtgactggcagcgactcattaacaacaactggggattccggcccaagnnnctcaacttcaagctcttcaacatccaagttaaagaggtcacgcagaacgatggcacgacgactattgccaataaccttaccagcacggttcaagtgtttacggactcggagtatcagctcccgtacgtgctcgggtcggcgcaccaaggctgtctcccgccgtttccagcggacgtcttcatgatccctcagtatggatacctcaccctgaacaacggaagtcaagcggtgggacgctcatccttttactgcctggagtacttcccttcgcagatgctaaggactggaaataacttcnnnttcagctataccttcgaggatgtaccttttcacagcagctacgctcacagccagagtttggatcgcttgatgaatcctcttattgatcagtatctgtactacctgnnnagaacgcaaacaacctctggaacaacccaacaatcacggctgnnntttagccaggctgggccttcgtctatgnnncagcaggccnnnaattggctacctgggccctgctaccggcaacagagagtttcaaagactgctaacgacaacaacaacagtaactttgcttggacannngccaccaaatatcatctcaatggccgcgactcgctggtgaatccaggaccagctatggccagtcacaaggacgatgaagaaaaatttttccctatgcacggcnnnctaatatttggcaaacaagggacaggggcaagtaacgtagatttagataatgtaatgattacggatgaagaagagattcgtaccaccaatcctgtggcaacagagcagtatggaactgtggcaactaacttgcagagctcaaatacagctcccgcgactggaactgtcaatagtcagggggccttacctggcatggtgtggcaagatcgtgacgtgtaccttcaaggacctatctgggcaaagattcctcacacggatggacactttcatccttctcctctgatgggaggctttggactgaaacatccgcctcctcaaatcttgatcaaaaatactccggtaccggcaaatcctccgacgactttcagcccggccaagtttgcttcatttatcactcagtactccactggacaggtcagcgtggaaattgagtgggagctacagaaagaaaacagcaaacgttggaatccagagattcagtacacttccaactacaacaagtctgttaatgtggactttactgtagacactaatggtgtttatagtgaacctcgccctattggaacccggtatctcacacgaaacttg

SEQ ID NO: 1861 - protein, 736 aa, synthetic construct; identical to SEQ ID NO: 1569
  source 1..736: note = Description of Artificial Sequence: Synthetic polypeptide

SEQ ID NO: 1862 - protein, 736 aa, synthetic construct; identical to SEQ ID NO: 1570
  source 1..736: note = Description of Artificial Sequence: Synthetic polypeptide

SEQ ID NO: 1863 - protein, 736 aa, synthetic construct; identical to SEQ ID NO: 1571
  source 1..736: note = Description of Artificial Sequence: Synthetic polypeptide

SEQ ID NO: 1864 - protein, 736 aa, synthetic construct; identical to SEQ ID NO: 1572
  source 1..736: note = Description of Artificial Sequence: Synthetic polypeptide

SEQ ID NO: 1865 - protein, 736 aa, synthetic construct; identical to SEQ ID NO: 1573
  source 1..736: note = Description of Artificial Sequence: Synthetic polypeptide

SEQ ID NO: 1866 - protein, 736 aa, synthetic construct; identical to SEQ ID NO: 1574
  source 1..736: note = Description of Artificial Sequence: Synthetic polypeptide

SEQ ID NO: 1867 - protein, 736 aa, synthetic construct; identical to SEQ ID NO: 1575
  source 1..736: note = Description of Artificial Sequence: Synthetic polypeptide

SEQ ID NO: 1868 - protein, 736 aa, synthetic construct; identical to SEQ ID NO: 1576
  source 1..736: note = Description of Artificial Sequence: Synthetic polypeptide

SEQ ID NO: 1869 - DNA, 2211 bp, synthetic construct; identical to SEQ ID NO: 1577
  source 1..2211: mol_type = other DNA; note = Description of Artificial Sequence: Synthetic polynucleotide

SEQ ID NO: 1870 - protein, 738 aa, synthetic construct; identical to SEQ ID NO: 7
  source 1..738: note = Description of Artificial Sequence: Synthetic polypeptide

SEQ ID NO: 1871 - protein, 738 aa, synthetic construct; identical to SEQ ID NO: 7
  source 1..738: note = Description of Artificial Sequence: Synthetic polypeptide

SEQ ID NO: 1872 - protein, 738 aa, synthetic construct
  source 1..738: note = Description of Artificial Sequence: Synthetic polypeptide
  VARIANT 157: note = misc_feature - Xaa can be any naturally occurring amino acid
  VARIANT 169: note = misc_feature - Xaa can be any naturally occurring amino acid
  VARIANT 457: note = misc_feature - Xaa can be any naturally occurring amino acid
  VARIANT 463: note = misc_feature - Xaa can be any naturally occurring amino acid
  VARIANT 508: note = misc_feature - Xaa can be any naturally occurring amino acid
  VARIANT 510..511: note = misc_feature - Xaa can be any naturally occurring amino acid
  VARIANT 558: note = misc_feature - Xaa can be any naturally occurring amino acid
  VARIANT 585: note = misc_feature - Xaa can be any naturally occurring amino acid
  VARIANT 587: note = misc_feature - Xaa can be any naturally occurring amino acid
MAADGYLPDWLEDNLSEGIREWWDLKPGAPKPKANQQKQDDGRGLVLPGYKYLGPFNGLDKGEPVNAADAAALEHDKAYDQQLKAGDNPYLRYNHADAEFQERLQEDTSFGGNLGRAVFQAKKRVLEPLGLVEEGAKTAPGKKRPVEQSPQEPDSSXLGIGKTGQQPAXKRLNFGQTGDSESVPDPQPLGEPPAAPSGVGSNTMASGGGAPMADNNEGADGVGNSSGNWHCDSTWLGDRVITTSTRTWALPTYNNHLYKQISNGTSGGSTNDNTYFGYSTPWGYFDFNRFHCHFSPRDWQRLINNNWGFRPKRLNFKLFNIQVKEVTTNEGTKTIANNLTSTVQVFTDSEYQLPYVLGSAHQGCLPPFPADVFMIPQYGYLTLNNGSQAVGRSSFYCLEYFPSQMLRTGNNFQFSYTFEDVPFHSSYAHSQSLDRLMNPLIDQYLYYLSRTQTTGTXGTQTLXFSQAGPSSMANQARNWVPGPCYRQQRVSTTTNQNNNSNFAWTGAXKXXLNGRDSLMNPGVAMASHKDDEDRFFPSSGVLIFGKQGAGNDNVDYSXVMITNEEEIKTTNPVATEEYGAVATNXQXLANTQAQTGLVHNQGVLPGMVWQNRDVYLQGPIWAKIPHTDGNFHPSPLMGGFGLKHPPPQILIKNTPVPADPPTTFNQAKLNSFITQYSTGQVSVEIEWELQKENSKRWNPEIQYTSNYYKSTNVDFAVNTEGVYSEPRPIGTRYLTRNL

SEQ ID NO: 1873 - DNA, 2211 bp, synthetic construct
  source 1..2211: mol_type = other DNA; note = Description of Artificial Sequence: Synthetic polynucleotide
  misc_difference 469..471: note = misc_feature - n is a, c, g, or t
  misc_difference 502..504: note = misc_feature - n is a, c, g, or t
  misc_difference 1366..1368: note = misc_feature - n is a, c, g, or t
  misc_difference 1384..1386: note = misc_feature - n is a, c, g, or t
  misc_difference 1519..1521: note = misc_feature - n is a, c, g, or t
  misc_difference 1525..1530: note = misc_feature - n is a, c, g, or t
  misc_difference 1669..1671: note = misc_feature - n is a, c, g, or t
  misc_difference 1750..1752: note = misc_feature - n is a, c, g, or t
  misc_difference 1756..1758: note = misc_feature - n is a, c, g, or t
atggctgccgatggttatcttccagattggctcgaggacaacctctctgagggcattcgcgagtggtgggacttgaaacctggagccccgaaacccaaagccaaccagcaaaagcaggacgacggccggggtctggtgcttcctggctacaagtacctcggacccttcaacggactcgacaagggggagcccgtcaacgcggcggacgcagcggccctcgagcacgacaaagcctacgaccagcagctcaaagcgggtgacaatccgtacctgcggtataatcacgccgacgccgagtttcaggagcgtctgcaagaagatacgtcttttgggggcaacctcgggcgagcagtcttccaggccaagaagcgggttctcgaacctctcggtctggttgaggaaggcgctaagacggctcctggaaagaagaggccggtagagcagtcgccacaagagccagactcctccnnnggcatcggcaagacaggccagcagcccgctnnnaagagactcaattttggtcagactggcgactcagagtcagtccccgacccacaacctctcggagaacctccagcagccccctcaggtgtgggatctaatacaatggcttcaggcggtggcgctccaatggcagacaataacgaaggcgccgacggagtgggtaattcctcgggaaattggcattgcgattccacatggctgggggacagagtcatcaccaccagcacccgaacctgggccctgcccacctacaacaaccacctctacaagcaaatctccaacggcacctcgggaggaagcaccaacgacaacacctattttggctacagcaccccctgggggtattttgacttcaacagattccactgtcacttttcaccacgtgactggcaacgactcatcaacaacaattggggattccggcccaaaagactcaacttcaagctgttcaacatccaggtcaaggaagtcacgacgaacgaaggcaccaagaccatcgccaataatctcaccagcaccgtgcaggtctttacggactcggagtaccagttaccgtacgtgctaggatccgctcaccagggatgtctgcctccgttcccggcggacgtcttcatgattcctcagtacggctatttaactttaaacaatggaagccaagccgtgggacgttcctccttctactgtctggagtatttcccatcgcagatgctgagaaccggcaacaactttcagttcagctacaccttcgaggacgtgcctttccacagcagctacgcgcacagccagagcctggacaggctgatgaatcccctcatcgaccagtacctgtactacctgtccagaacgcaaacgactggaactnnngggacgcagactctgnnnttcagccaagcgggtcctagctcaatggccaaccaggctagaaattgggtgcccggaccttgctaccggcagcagcgcgtctccacgacaaccaaccagaacaacaacagcaactttgcctggacgggagctnnnaagnnnnnnctgaacggccgagactctctaatgaatccgggcgtggcaatggcttcccacaaggatgacgaggaccgcttcttcccttcgagcggggtcctgatttttggcaagcaaggagccgggaacgataatgtggattacagcnnngtgatgattacaaatgaggaagaaatcaagactaccaaccccgtggccacagaagaatatggagcagtggccaccaacnnncagnnngccaatacgcaggcgcagaccggactcgtgcacaaccagggggtgcttcccggcatggtgtggcagaatagagacgtgtacctgcagggtcccatctgggccaaaattcctcacacggacggcaactttcacccgtctcccctgatgggcggctttggactgaagcacccgcctcctcaaattctcatcaagaacacaccggttccagcggacccgccgactaccttcaaccaggccaagctgaactctttcatcacgcagtacagcaccggacaggtcagcgtggaaatcgagtgggagctgcagaaagaaaacagcaaacgctggaatccagagattcaatacacttccaactactacaaatctacaaatgtggactttgctgtcaacacggagggggtttatagcgagcctcgccccattggcacccgttacctcacccgcaacctgtaa

SEQ ID NO: 1874 - protein, 733 aa, synthetic construct; identical to SEQ ID NO: 423
  source 1..733: note = Description of Artificial Sequence: Synthetic polypeptide

SEQ ID NO: 1875 - DNA, 4472 bp, synthetic construct
  source 1..4472: mol_type = other DNA; note = Description of Artificial Sequence: Synthetic polynucleotide
ctccatcactaggggtaaccgcgaagcgcctcccacgctgccgcgtcagcgctgacgtaaattacgtcataggggagtggtcctgtattagctgtcacgtgagtgcttttgcgacattttgcgacaccacgtggccattcatggtatatatggccgagtgagcgagcaggatctccattttgaccgcgaaatttgaacgagcagcagccatgccgggcttctacgagatcgtgcttaaggtgccgagcgacctggacgagcacctgccgggcatttctgactcgtttgtgaactgggtggcagagaaggaatgggagctgcccccggattctgacatggatcggaatctgattgagcaggcacccctgaccgtggccgagaagctacagcgcgacttcctggtccaatggcgccgcgtgagtaaggccccggaggccctcttctttgttcagttcgagaagggcgagtcctacttccacctccatattctggtagagaccacgggggtcaaatccatggtgctgggccgcttcctgagtcagattcgggacaagctggtgcagaccatctaccgcgggatcgagccgaccctgcccaactggttcgcggtgacaaagacgcgtaatggcgccggaggggggaacaaggtggtggacgagtgctacatccccaactacctgctgcccaagactcagcccgagctgcagtgggcgtggactaacatggaggagtatataagcgcgtgcttgaacctggccgagcgcaaacggctcgtggcgcagcacctgacccacgtcagccagacccaggagcagaacaaggagaatctgaacccgaattctgacgcgcctgtcatccggtcaaaaacctccgcgcgctacatggagctggtcgggtggctggtggaccggggcatcacctccgagaagcagtggatccaggaggaccaggcctcgtacatctccttcaacgccgcctccaactcgcggtctcagatcaaggccgcgctggacaatgccggcaagatcatggcgctgaccaaatccgcgcccgactacctggtaggccccgctctgcccgcggacattaaatccaaccgcatctaccgcatcctggagctgaatggctacgaccctgcctacgccggttccgtctttctcggctgggcccagaaaaagtttggcaaaaggaacaccatctggctgtttgggccggccaccacgggcaagaccaacatcgcggaagccatcgcccacgccgtgcccttctacggctgcgtcaactggaccaatgagaactttcccttcaacgattgcgtcgacaagatggtgatctggtgggaggagggcaagatgacggccaaggtcgtggagtccgccaaggccattctcggcggcagcaaggtgcgcgtggaccaaaagtgcaagtcgtccgcccagatcgatcccacccccgtgatcgtcacctccaacaccaacatgtgcgccgtgattgacgggaacagcaccaccttcgagcaccagcagccgttgcaggaccggatgttcaaatttgaacttacccgccgtctggagcacgactttggcaaggtgacaaagcaggaagtcaaagagttcttccgctgggcgcaggatcacgtgaccgaggtggcgcatgagttctacgtcagaaagggtggagctaacaaaagacccgcccccgatgacgcggatataagcgagcccaagcgggcctgcccctcagtcgcggatccatcgacgtcagacgcggaaggagctccggtggactttgccgacaggtaccaaaacaaatgttctcgtcacgcgggcatgcttcagatgctgtttccctgcaaaacatgcgagagaatgaatcagaatttcaacatttgcttcacgcacgggaccagagactgttcagaatgtttccctggcgtgtcagaatctcaaccggtcgtcagaaaaaagacgtatcggaaactctgtgcgattcatcatctgctggggcgggcacccgagattgcttgctcggcctgcgacctggtcaacgtggacctggatgactgtgtttctgagcaataaatgacttaaaccaggtatggctgccgatggttatcttccagattggctcgaggacaacctctctgagggcattcgcgagtggtgggacctgaaacctggagccccgaaacccaaagccaaccagcaaaagcaggacaacggccggggtctggtgcttcctggctacaagtacctcggacccttcaacggactcgacaagggggagcccgtcaacgcggcggacgcagcggccctcgagcacgacaaggcctacgaccagcagctccaagcgggtgacaatccgtacctgcggtataatcacgccgacgccgagtttcaggagcgtctgcaagaagatacgtcttttgggggcaacctcgggcgcgcagtcttccaggccaaaaagcgggttctcgaacctctgggcctggttgaatcgccggttaagacggctcctggaaagaagagaccggtagagccatcaccccagcgctctccagactcctctacgggcatcggcaagaaaggccagcagcccgcaaaaaagagactcaattttgggcagactggcgactcagagtcagtccccgaccctcaaccaatcggagaaccaccagcaggcccctctggtctgggatctggtacaatggctgcaggcggtggcgctccaatggcagacaataacgaaggcgccgacggagtgggtagttcctcaggaaattggcattgcgattccacatggctgggcgacagagtcatcaccaccagcacccgcacctgggccctgcccacctacaacaaccacctctacaagcaaatctccaacgggacctcgggaggaagcaccaacgacaacacctacttcggctacagcaccccctgggggtattttgacttcaacagattccactgccacttttcaccacgtgactggcagcgactcatcaacaacaactggggattccggcccaagaggctcaacttcaagctcttcaacatccaagtcaaggaggtcacgcagaatgaaggcaccaagaccatcgccaataaccttaccagcacgattcaggtctttacggactcggaataccagctcccgtacgtgctcggctcggcgcaccagggctgcctgcctccgttcccggcggacgtcttcatgattcctcagtacgggtacctgactctgaacaatggcagtcaggctgtgggccggtcgtccttctactgcctggagtactttccttctcaaatgctgagaacgggcaacaactttgaattcagctacaacttcgaggacgtgcccttccacagcagctacgcgcacagccagagcctggaccggctgatgaaccctctcatcgaccagtacttgtactacctgtcccggactcaaagcacgggcggtactgcaggaactcagcagttgctattttctcaggccgggcctaacaacatgtcggctcaggccaagaactggctacccggtccctgctaccggcagcaacgcgtctccacgacactgtcgcagaacaacaacagcaactttgcctggacgggtgccaccaagtatcatctgaatggcagagactctctggtgaatcctggcgttgccatggctacccacaaggacgacgaagagcgattttttccatccagcggagtcttaatgtttgggaaacagggagctggaaaagacaacgtggactatagcagcgtgatgctaaccagcgaggaagaaataaagaccaccaacccagtggccacagaacagtacggcgtggtggccgataacctgcaacagcaaaacgccgctcctattgtaggggccgtcaatagtcaaggagccttacctggcatggtgtggcagaaccgggacgtgtacctgcagggtcccatctgggccaagattcctcatacggacggcaactttcatccctcgccgctgatgggaggctttggactgaagcatccgcctcctcagatcctgattaaaaacacacctgttcccgcggatcctccgaccaccttcactaaggccaagctggcttctttcatcacgcagtacagtaccggccaggtcagcgtggagatcgagtgggagctgcagaaggagaacagcaaacgctggaacccagagattcagtacacttccaactactacaaatctacaaatgtggactttgctgtcaatactgagggtacttattccgagcctcgccccattggcacccgttacctcacccgtaatctgtaattacatgttaatcaataaaccggttaattcgtttcagttgaactttggtctcctgtccttcttatcttatcggttaccatagaaactggttacttattaactgcttggtgcgcttcgcgataaaagacttacgtcatcgggttacccctagtgatgga

SEQ ID NO: 1876 - DNA, 2208 bp, synthetic construct
  source 1..2208: mol_type = other DNA; note = Description of Artificial Sequence: Synthetic polynucleotide
atggctgccgatggttatcttccagattggctcgaggacactctctctgaaggaataagacagtggtggaagctcaaacctggcccaccaccaccaaagcccgcagagcggcataaggacgacagcaggggtcttgtgcttcctgggtacaagtacctcggacccttcaacggactcgacaagggagagccggtcaacgaggcagacgccgcggccctcgagcacgacaaagcctacgaccggcagctcgacagcggagacaacccgtacctcaagtacaaccacgccgacgcggagtttcaggagcgccttaaagaagatacgtcttttgggggcaacctcggacgagcagtcttccaggcgaaaaagagggttcttgaacctctgggcctggttgaggaacctgttaagaaggctccgggaaaaaagaggccggtagagcactctcctgtggagccagactcctcctcgggaaccggaaaggcgggccagcagcctgcaagaaaaagattgaattttggtcagactggagacgcagactcagtacctgacccccagcctctcggacagccaccagcagccccctctggtctgggaactaataccatggctacaggcagtggcgcaccaatggcagacaataacgagggtgccgacggagtgggtaattcctcgggaaattggcattgcgattccacatggatgggcgacagagtcatcaccaccagcacccgaacctgggccctgcccacctacaacaaccacctctacaaacaaatttccagccaatcaggagcctcgaacgacaatcactactttggctacagcaccccttgggggtattttgacttcaacagattccactgccacttttcaccacgtgactggcaaagactcatcaacaacaactggggattccgacccaagagactcaacttcaagctctttaacattcaagtcaaagaggtcacgcagaatgacggtacgacgacgattgccaataaccttaccagcacggttcaggtgtttactgactcggagtaccagctcccgtacgtcctcggctcggcgcatcaaggatgcctcccgccgttcccagcagacgtcttcatggtgccacagtatggatacctcaccctgaacaacgggagtcaggcagtaggacgctcttcattttactgcctggagtactttccttctcagatgctgcgtaccggaaacaactttaccttcagctacacttttgaggacgttcctttccacagcagctacgctcacagccagagtctggaccgtctcatgaatcctctcatcgaccagtacctgtattacttgagcagaacaaacactccaagtggaaccaccacgcagtcaaggcttcagttttctcaggccggagcgagtgacattcgggaccagtctaggaactggcttcctggaccctgttaccgccagcagcgagtatcaaagacatctgcggataacaacaacagtgaatactcgtggactggagctaccaagtaccacctcaatggcagagactctctggtgaatccgggcccggctatggcaagccacaaggacgatgaagaaaagttttttcctcagagcggggttctcatctttgggaagcaaggctcagagaaaacaaatgtggacattgaaaaggtcatgattacagacgaagaggaaatcaggacaaccaatcccgtggctacggagcagtatggttctgtatctaccaacctccagagaggcaacagacaagcagctaccgcagatgtcaacacacaaggcgttcttccaggcatggtctggcaggacagagatgtgtaccttcaggggcccatctgggcaaagattccacacacggacggacattttcacccctctcccctcatgggtggattcggacttaaacaccctcctccacagattctcatcaagaacaccccggtgcctgcgaatccttcgaccaccttcagtgcggcaaagtttgcttccttcatcacacagtactccacgggacaggtcagcgtggagatcgagtgggagctgcagaaggaaaacagcaaacgctggaatcccgaaattcagtacacttccaactacaacaagtctgttaatgtggactttactgtggacactaatggcgtgtattcagagcctcgccccattggcaccagatacctgactcgtaatctgtaa

SEQ ID NO: 1877 - protein, 735 aa, synthetic construct
  source 1..735: note = Description of Artificial Sequence: Synthetic polypeptide
MAADGYLPDWLEDTLSEGIRQWWKLKPGPPPPKPAERHKDDSRGLVLPGYKYLGPFNGLDKGEPVNEADAAALEHDKAYDRQLDSGDNPYLKYNHADAEFQERLKEDTSFGGNLGRAVFQAKKRVLEPLGLVEEPVKKAPGKKRPVEHSPVEPDSSSGTGKAGQQPARKRLNFGQTGDADSVPDPQPLGQPPAAPSGLGTNTMATGSGAPMADNNEGADGVGNSSGNWHCDSTWMGDRVITTSTRTWALPTYNNHLYKQISSQSGASNDNHYFGYSTPWGYFDFNRFHCHFSPRDWQRLINNNWGFRPKRLNFKLFNIQVKEVTQNDGTTTIANNLTSTVQVFTDSEYQLPYVLGSAHQGCLPPFPADVFMVPQYGYLTLNNGSQAVGRSSFYCLEYFPSQMLRTGNNFTFSYTFEDVPFHSSYAHSQSLDRLMNPLIDQYLYYLSRTNTPSGTTTQSRLQFSQAGASDIRDQSRNWLPGPCYRQQRVSKTSADNNNSEYSWTGATKYHLNGRDSLVNPGPAMASHKDDEEKFFPQSGVLIFGKQGSEKTNVDIEKVMITDEEEIRTTNPVATEQYGSVSTNLQRGNRQAATADVNTQGVLPGMVWQDRDVYLQGPIWAKIPHTDGHFHPSPLMGGFGLKHPPPQILIKNTPVPANPSTTFSAAKFASFITQYSTGQVSVEIEWELQKENSKRWNPEIQYTSNYNKSVNVDFTVDTNGVYSEPRPIGTRYLTRNL

SEQ ID NO: 1878 - DNA, 8376 bp, synthetic construct
  source 1..8376: mol_type = other DNA; note = Description of Artificial Sequence: Synthetic polynucleotide
aattcccatcatcaataatataccttattttggattgaagccaatatgataatgagggggtggagtttgtgacgtggcgcggggcgtgggaacggggcgggtgacgtagtagtctctagagtcctgtattagaggtcacgtgagtgttttgcgacattttgcgacaccatgtggtcacgctgggtatttaagcccgagtgagcacgcagggtctccattttgaagcgggaggtttgaacgcgcagccaccacgccggggttttacgagattgtgattaaggtccccagcgaccttgacgggcatctgcccggcatttctgacagctttgtgaactgggtggccgagaaggaatgggagttgccgccagattctgacatggatctgaatctgattgagcaggcacccctgaccgtggccgagaagctgcagcgcgactttctgacggaatggcgccgtgtgagtaaggccccggaggcccttttctttgtgcaatttgagaagggagagagctacttccacatgcacgtgctcgtggaaaccaccggggtgaaatccatggttttgggacgtttcctgagtcagattcgcgaaaaactgattcagagaatttaccgcgggatcgagccgactttgccaaactggttcgcggtcacaaagaccagaaatggcgccggaggcgggaacaaggtggtggatgagtgctacatccccaattacttgctccccaaaacccagcctgagctccagtgggcgtggactaatatggaacagtatttaagcgcctgtttgaatctcacggagcgtaaacggttggtggcgcagcatctgacgcacgtgtcgcagacgcaggagcagaacaaagagaatcagaatcccaattctgatgcgccggtgatcagatcaaaaacttcagccaggtacatggagctggtcgggtggctcgtggacaaggggattacctcggagaagcagtggatccaggaggaccaggcctcatacatctccttcaatgcggcctccaactcgcggtcccaaatcaaggctgccttggacaatgcgggaaagattatgagcctgactaaaaccgcccccgactacctggtgggccagcagcccgtggaggacatttccagcaatcggatttataaaattttggaactaaacgggtacgatccccaatatgcggcttccgtctttctgggatgggccacgaaaaagttcggcaagaggaacaccatctggctgtttgggcctgcaactaccgggaagaccaacatcgcggaggccatagcccacactgtgcccttctacgggtgcgtaaactggaccaatgagaactttcccttcaacgactgtgtcgacaagatggtgatctggtgggaggaggggaagatgaccgccaaggtcgtggagtcggccaaagccattctcggaggaagcaaggtgcgcgtggaccagaaatgcaagtcctcggcccagatagacccgactcccgtgatcgtcacctccaacaccaacatgtgcgccgtgattgacgggaactcaacgaccttcgaacaccagcagccgttgcaagaccggatgttcaaatttgaactcacccgccgtctggatcatgactttgggaaggtcaccaagcaggaagtcaaagactttttccggtgggcaaaggatcacgtggttgaggtggagcatgaattctacgtcaaaaagggtggagccaagaaaagacccgcccccagtgacgcagatataagtgagcccaaacgggtgcgcgagtcagttgcgcagccatcgacgtcagacgcggaagcttcgatcaactacgcagacaggtaccaaaacaaatgttctcgtcacgtgggcatgaatctgatgctgtttccctgcagacaatgcgagagaatgaatcagaattcaaatatctgcttcactcacggacagaaagactgtttagagtgctttcccgtgtcagaatctcaacccgtttctgtcgtcaaaaaggcgtatcagaaactgtgctacattcatcatatcatgggaaaggtgccagacgcttgcactgcctgcgatctggtcaatgtggatttggatgactgcatctttgaacaataaatgatttaaatcaggtatggctgccgatggttatcttccagattggctcgaggacactctctctgaaggaataagacagtggtggaagctcaaacctggcccaccaccaccaaagcccgcagagcggcataaggacgacagcaggggtcttgtgcttcctgggtacaagtacctcggacccttcaacggactcgacaagggagagccggtcaacgaggcagacgccgcggccctcgagcacgacaaagcctacgaccggcagctcgacagcggagacaacccgtacctcaagtacaaccacgccgacgcggagtttcaggagcgccttaaagaagatacgtcttttgggggcaacctcggacgagcagtcttccaggcgaaaaagagggttcttgaacctctgggcctggttgaggaacctgttaagacggctccgggaaaaaagaggccggtagagcactctcctgtggagccagactcctcctcgggaaccggaaaggcgggccagcagcctgcaagaaaaagattgaattttggtcagactggagacgcagactcagtacctgacccccagcctctcggacagccaccagcagccccctctggtctgggaactaatacgatggctacaggcagtggcgcaccaatggcagacaataacgagggcgccgacggagtgggtaattcctcgggaaattggcattgcgattccacatggatgggcgacagagtcatcaccaccagcacccgaacctgggccctgcccacctacaacaaccacctctacaaacaaatttccagccaatcaggagcctcgaacgacaatcactactttggctacagcaccccttgggggtattttgacttcaacagattccactgccacttttcaccacgtgactggcaaagactcatcaacaacaactggggattccgacccaagagactcaacttcaagctctttaacattcaagtcaaagaggtcacgcagaatgacggtacgacgacgattgccaataaccttaccagcacggttcaggtgtttactgactcggagtaccagctcccgtacgtcctcggctcggcgcatcaaggatgcctcccgccgttcccagcagacgtcttcatggtgccacagtatggatacctcaccctgaacaacgggagtcaggcagtaggacgctcttcattttactgcctggagtactttccttctcagatgctgcgtaccggaaacaactttaccttcagctacacttttgaggacgttcctttccacagcagctacgctcacagccagagtctggaccgtctcatgaatcctctcatcgaccagtacctgtattacttgagcagaacaaacactccaagtggaaccaccacgcagtcaaggcttcagttttctcaggccggagcgagtgacattcgggaccagtctaggaactggcttcctggaccctgttaccgccagcagcgagtatcaaagacatctgcggataacaacaacagtgaatactcgtggactggagctaccaagtaccacctcaatggcagagactctctggtgaatccgggcccggccatggcaagccacaaggacgatgaagaaaagttttttcctcagagcggggttctcatctttgggaagcaaggctcagagaaaacaaatgtggacattgaaaaggtcatgattacagacgaagaggaaatcaggacaaccaatcccgtggctacggagcagtatggttctgtatctaccaacctccagagaggcaacagacaagcagctaccgcagatgtcaacacacaaggcgttcttccaggcatggtctggcaggacagagatgtgtaccttcaggggcccatctgggcaaagattccacacacggacggacattttcacccctctcccctcatgggtggattcggacttaaacaccctcctccacagattctcatcaagaacaccccggtacctgcgaatccttcgaccaccttcagtgcggcaaagtttgcttccttcatcacacagtactccacgggacaggtcagcgtggagatcgagtgggagctgcagaaggaaaacagcaaacgctggaatcccgaaattcagtacacttccaactacaacaagtctgttaatgtggactttactgtggacactaatggcgtgtattcagagcctcgccccattggcaccagatacctgactcgtaatctgtaattgcttgttaatcaataaaccgtttaattcgtttcagttgaactttggtctctgcgtatttctttcttatctagtttccatgctctagagtcctgtattagaggtcacgtgagtgttttgcgacattttgcgacaccatgtggtcacgctgggtatttaagcccgagtgagcacgcagggtctccattttgaagcgggaggtttgaacgcgcagccaccacggcggggttttacgagattgtgattaaggtccccagcgaccttgacgggcatctgcccggcatttctgacagctttgtgaactgggtggccgagaaggaatgggagttgccgccagattctgacatggatctgaatctgattgagcaggcacccctgaccgtggccgagaagctgcatcgctggcgtaatagcgaagaggcccgcaccgatcgcccttcccaacagttgcgcagcctgaatggcgaatggaattccagacgattgagcgtcaaaatgtaggtatttccatgagcgtttttcctgttgcaatggctggcggtaatattgttctggatattaccagcaaggccgatagtttgagttcttctactcaggcaagtgatgttattactaatcaaagaagtattgcgacaacggttaatttgcgtgatggacagactcttttactcggtggcctcactgattataaaaacacttctcaggattctggcgtaccgttcctgtctaaaatccctttaatcggcctcctgtttagctcccgctctgattctaacgaggaaagcacgttatacgtgctcgtcaaagcaaccatagtacgcgccctgtagcggcgcattaagcgcggcgggtgtggtggttacgcgcagcgtgaccgctacacttgccagcgccctagcgcccgctcctttcgctttcttcccttcctttctcgccacgttcgccggctttccccgtcaagctctaaatcgggggctccctttagggttccgatttagtgctttacggcacctcgaccccaaaaaacttgattagggtgatggttcacgtagtgggccatcgccctgatagacggtttttcgccctttgacgttggagtccacgttctttaatagtggactcttgttccaaactggaacaacactcaaccctatctcggtctattcttttgatttataagggattttgccgatttcggcctattggttaaaaaatgagctgatttaacaaaaatttaacgcgaattttaacaaaatattaacgtttacaatttaaatatttgcttatacaatcttcctgtttttggggcttttctgattatcaaccggggtacatatgattgacatgctagttttacgattaccgttcatcgattctcttgtttgctccagactctcaggcaatgacctgatagcctttgtagagacctctcaaaaatagctaccctctccggcatgaatttatcagctagaacggttgaatatcatattgatggtgatttgactgtctccggcctttctcacccgtttgaatctttacctacacattactcaggcattgcatttaaaatatatgagggttctaaaaatttttatccttgcgttgaaataaaggcttctcccgcaaaagtattacagggtcataatgtttttggtacaaccgatttagctttatgctctgaggctttattgcttaattttgctaattctttgccttgcctgtatgatttattggatgttggaattcctgatgcggtattttctccttacgcatctgtgcggtatttcacaccgcatatggtgcactctcagtacaatctgctctgatgccgcatagttaagccagccccgacacccgccaacacccgctgacgcgccctgacgggcttgtctgctcccggcatccgcttacagacaagctgtgaccgtctccgggagctgcatgtgtcagaggttttcaccgtcatcaccgaaacgcgcgagacgaaagggcctcgtgatacgcctatttttataggttaatgtcatgataataatggtttcttagacgtcaggtggcacttttcggggaaatgtgcgcggaacccctatttgtttatttttctaaatacattcaaatatgtatccgctcatgagacaataaccctgataaatgcttcaataatattgaaaaaggaagagtatgagtattcaacatttccgtgtcgcccttattcccttttttgcggcattttgccttcctgtttttgctcacccagaaacgctggtgaaagtaaaagatgctgaagatcagttgggtgcacgagtgggttacatcgaactggatctcaacagcggtaagatccttgagagttttcgccccgaagaacgttttccaatgatgagcacttttaaagttctgctatgtggcgcggtattatcccgtattgacgccgggcaagagcaactcggtcgccgcatacactattctcagaatgacttggttgagtactcaccagtcacagaaaagcatcttacggatggcatgacagtaagagaattatgcagtgctgccataaccatgagtgataacactgcggccaacttacttctgacaacgatcggaggaccgaaggagctaaccgcttttttgcacaacatgggggatcatgtaactcgccttgatcgttgggaaccggagctgaatgaagccataccaaacgacgagcgtgacaccacgatgcctgtagcaatggcaacaacgttgcgcaaactattaactggcgaactacttactctagcttcccggcaacaattaatagactggatggaggcggataaagttgcaggaccacttctgcgctcggcccttccggctggctggtttattgctgataaatctggagccggtgagcgtgggtctcgcggtatcattgcagcactggggccagatggtaagccctcccgtatcgtagttatctacacgacggggagtcaggcaactatggatgaacgaaatagacagatcgctgagataggtgcctcactgattaagcattggtaactgtcagaccaagtttactcatatatactttagattgatttaaaacttcatttttaatttaaaaggatctaggtgaagatcctttttgataatctcatgaccaaaatcccttaacgtgagttttcgttccactgagcgtcagaccccgtagaaaagatcaaaggatcttcttgagatcctttttttctgcgcgtaatctgctgcttgcaaacaaaaaaaccaccgctaccagcggtggtttgtttgccggatcaagagctaccaactctttttccgaaggtaactggcttcagcagagcgcagataccaaatactgtccttctagtgtagccgtagttaggccaccacttcaagaactctgtagcaccgcctacatacctcgctctgctaatcctgttaccagtggctgctgccagtggcgataagtcgtgtcttaccgggttggactcaagacgatagttaccggataaggcgcagcggtcgggctgaacggggggttcgtgcacacagcccagcttggagcgaacgacctacaccgaactgagatacctacagcgtgagctatgagaaagcgccacgcttcccgaagggagaaaggcggacaggtatccggtaagcggcagggtcggaacaggagagcgcacgagggagcttccagggggaaacgcctggtatctttatagtcctgtcgggtttcgccacctctgacttgagcgtcgatttttgtgatgctcgtcaggggggcggagcctatggaaaaacgccagcaacgcggcctttttacggttcctggccttttgctggccttttgctcacatgttctttcctgcgttatcccctgattctgtggataaccgtattaccgcctttgagtgagctgataccgctcgccgcagccgaacgaccgagcgcagcgagtcagtgagcgaggaagcggaagagcgcccaatacgcaaaccgcctctccccgcgcgttggccgattcattaatgca

SEQ ID NO: 1879 - DNA, 1085 bp, synthetic construct
  source 1..1085: mol_type = other DNA; note = Description of Artificial Sequence: Synthetic polynucleotide
  misc_difference 611: note = misc_feature - n is a, c, g, or t
  misc_difference 640: note = misc_feature - n is a, c, g, or t
  misc_difference 1039: note = misc_feature - n is a, c, g, or t
tgcccacttacaacaaccatctctacaagcaaatctccagcvvmdcaggagctascaacgacaaccactactttggctacagcaccccttgggggtattttgactttaacagattccactgccacttctcaccacgtgactggcagcgactcattaacaacaactggggattccggcccaagaaactcagcttcaagctcttcaacatccaagttagaggggtcacgcagaacgatggcacgacgactattgccaataaccttaccagcacggttcaagtgtttacggactcggagtatcagctcccgtacgtgctcgggtcggcgcaccaaggctgtctcccgccgtttccagcggacgtcttcatggtccctcagtatggatacctcaccctgaacaacggaagtcaagcggtgggacgctcatccttttactgcctggagtacttcccttcgcagatgctaaggactggaaataacttccaattcagctataccttcgaggatgtaccttttcacagcagctacgctcacagccagagtttggatcgcttgatgaatcctcttattgatcagtatctgtactacctgaacagaacgcaargcamcvcnrgcggaacarccrvcmhsmrsvvsctgvngtttagccaggctgggcctcagtctatgtctttgcaggccagaaattggctacctgggccctgctaccggcaacagagactttcaamarycbmcrvcsrsaacaacaacagtrastttccttggmcagcggccagcamatatcatctcaatggccgcgactcgctggtgaatccaggaccagctatggccagtcacrrggacgatrmsgrsaratttttccctatgcacggcaatctaatatttggcaaasaarrcrscrvsrvarvcratrycgmsdwcgrsvrsgtaatgattacggatgaagaagagattcgtaccaccaatcctgtggcaacagagcagtatggaactgtggcaaataacttgcagrvsvvsmrsrvcvvscccacgdhtvvsrnsgtcvmscatcagggggccttacctggcatggtgtggcaagatcgt

SEQ ID NO: 1880 - protein, 620 aa, synthetic construct
  source 1..620: note = Description of Artificial Sequence: Synthetic polypeptide
  VARIANT 263..264: note = misc_feature - Xaa can be any naturally occurring amino acid
  VARIANT 267: note = misc_feature - Xaa can be any naturally occurring amino acid
  VARIANT 450..453: note = misc_feature - Xaa can be any naturally occurring amino acid
  VARIANT 456..460: note = misc_feature - Xaa can be any naturally occurring amino acid
  VARIANT 462: note = misc_feature - Xaa can be any naturally occurring amino acid
  VARIANT 491..495: note = misc_feature - Xaa can be any naturally occurring amino acid
  VARIANT 500: note = misc_feature - Xaa can be any naturally occurring amino acid
  VARIANT 504: note = misc_feature - Xaa can be any naturally occurring amino acid
  VARIANT 508: note = misc_feature - Xaa can be any naturally occurring amino acid
  VARIANT 528: note = misc_feature - Xaa can be any naturally occurring amino acid
  VARIANT 531..533: note = misc_feature - Xaa can be any naturally occurring amino acid
  VARIANT 546..557: note = misc_feature - Xaa can be any naturally occurring amino acid
  VARIANT 586..590: note = misc_feature - Xaa can be any naturally occurring amino acid
  VARIANT 593..595: note = misc_feature - Xaa can be any naturally occurring amino acid
  VARIANT 597: note = misc_feature - Xaa can be any naturally occurring amino acid
MAADGYLPDWLEDNLSEGIREWWALKPGVPQPKANQQHQDNRRGLVLPGYKYLGPGNGLDKGEPVNEADAAALEHDKAYDQQLKAGDNPYLKYNHADAEFQERLQEDTSFGGNLGRAVFQAKKRILEPLGLVEEAAKTAPGKKGAVDQSPQEPDSSSGVGKSGKQPARKRLNFGQTGDSESVPDPQPLGEPPAAPTSLGSNTMASGGGAPMADNNEGADGVGNSSGNWHCDSQWLGDRVITTSTRTWALPTYNNHLYKQISSXXGAXNDNHYFGYSTPWGYFDFNRFHCHFSPRDWQRLINNNWGFRPKKLSFKLFNIQVRGVTQNDGTTTIANNLTSTVQVFTDSEYQLPYVLGSAHQGCLPPFPADVFMVPQYGYLTLNNGSQAVGRSSFYCLEYFPSQMLRTGNNFQFSYTFEDVPFHSSYAHSQSLDRLMNPLIDQYLYYLNRTQXXXXGTXXXXXLXFSQAGPQSMSLQARNWLPGPCYRQQRLSXXXXXNNNSXFPWXAASXYHLNGRDSLVNPGPAMASHXDDXXXFFPMHGNLIFGKXXXXXXXXXXXXVMITDEEEIRTTNPVATEQYGTVANNLQXXXXXPTXXXVXHQGALPGMVWQDRDVYLQGPIWA

SEQ ID NO: 1881 - DNA, 1491 bp, synthetic construct
  source 1..1491: mol_type = other DNA; note = Description of Artificial Sequence: Synthetic polynucleotide
accaccagcaccagaacctgggccctgcccacttacaacaaccatctctacaagcaaatctccagccaatcaggagcttcaaacgacaaccactactttggctacagcaccccttgggggtattttgactttaacagattccactgccacttctcaccacgtgactggcagcgactcattaacaacaactggggattccggcccaagaaactcagcttcaagctcttcaacatccaagttagaggggtcacgcagaacgatggcacgacgactattgccaataaccttaccagcacggttcaagtgtttacggactcggagtatcagctcccgtacgtgctcgggtcggcgcaccaaggctgtctcccgccgtttccagcggacgtcttcatggtccctcagtatggatacctcaccctgaacaacggaagtcaagcggtgggacgctcatccttttactgcctggagtacttcccttcgcagatgctaaggactggaaataacttccaattcagctataccttcgaggatgtaccttttcacagcagctacgctcacagccagagtttggatcgcttgatgaatcctcttattgatcagtatctgtactacctgaacagaacgcaaggaacaacctctggaacaaccaaccaatcacggctgctttttagccaggctgggcctcagtctatgtctttgcaggccagaaattggctacctgggccctgctaccggcaacagagactttcaaagactgctaacgacaacaacaacagtaactttccttggacagcggccagcaaatatcatctcaatggccgcgactcgctggtgaatccaggaccagctatggccagtcacaaggacgatgaagaaaaatttttccctatgcacggcaatctaatatttggcaaagaagggacaacggcaagtaacgcagaattagataatgtaatgattacggatgaagaagagattcgtaccaccaatcctgtggcaacagagcagtatggaactgtggcaaataacttgcagagctcaaatacagctcccacgactggaactgtcaatcatcagggggccttacctggcatggtgtggcaagatcgtgacgtctaccttcaaggacctatctgggcaaagattcctcacacggatggacactttcatccttctcctctgatgggaggctttggactgaaacatccgcctcctcaaatcatgatcaaaaatactccggtaccggcaaatcctccgacgactttcagcccggccaagtttgcttcatttatcactcagtactccactggacaggtcagcgtggaaattgagtgggagctacagaaagaaaacagcaaacgttggaatccagagattcagtacacttccaactacaacaagtctgttaatgtggactttactgtagacactaatggtgtttatagtgaacctcgccctattggaacccggtatctcacacgaaacttgtga

SEQ ID NO: 1882 - protein, 482 aa, synthetic construct
  source 1..482: note = Description of Artificial Sequence: Synthetic polypeptide
TTSTRTWALPTYNNHLYKQISSQSGASNDNHYFGYSTPWYFDFNRFHCHFSPRDWQRLNNNWGFRPKKLSFKLFNIQRGVTQNDGTTTIANNLTSTQVFTDSEYQLPYVLGSAHQCLPPFPADVFMVPQYGYLTNNGSQAVGRSSFYCLEYFPQMLRTGNNFQFSYTFEDVPHSSYAHSQSLDRLMNPLIDYLYYLNRTQGTTSGTTNQSLLFSQAGPQSMSLQARNWLGPCYRQQRLSKTANDNNNSFPWTAASKYHLNGRDSLVNGPAMASHKDDEEKFFPMHGLIFGKEGTTASNAELDNVMITDEEEIRTTNPVATEQYGTVANNLQSSNTAPTTGTVNHQGALPGMVWQDRDVYLQGPIWAKIPHTDGHFHPSPLMGGFGLKHPPPQIMIKNTPVPANPPTTFSPAKFASFITQYSTGQVSVEIEWELQKENSKRWNPEIQYTSNYNKSVNVDFTVDTNGVYSEPRPIGTRYLTRNL

SEQ ID NO: 1883 - DNA, 1140 bp, synthetic construct
  source 1..1140: mol_type = other DNA; note = Description of Artificial Sequence: Synthetic polynucleotide
  misc_difference 636: note = misc_feature - n is a, c, g, or t
  misc_difference 665: note = misc_feature - n is a, c, g, or t
  misc_difference 1064: note = misc_feature - n is a, c, g, or t
accaccagcaccagaacctgggccctgcccacttacaacaaccatctctacaagcaaatctccagcvvmdcaggagctascaacgacaaccactactttggctacagcaccccttgggggtattttgactttaacagattccactgccacttctcaccacgtgactggcagcgactcattaacaacaactggggattccggcccaagaaactcagcttcaagctcttcaacatccaagttagaggggtcacgcagaacgatggcacgacgactattgccaataaccttaccagcacggttcaagtgtttacggactcggagtatcagctcccgtacgtgctcgggtcggcgcaccaaggctgtctcccgccgtttccagcggacgtcttcatggtccctcagtatggatacctcaccctgaacaacggaagtcaagcggtgggacgctcatccttttactgcctggagtacttcccttcgcagatgctaaggactggaaataacttccaattcagctataccttcgaggatgtaccttttcacagcagctacgctcacagccagagtttggatcgcttgatgaatcctcttattgatcagtatctgtactacctgaacagaacgcaargcamcvcnrgcggaacarccrvcmhsmrsvvsctgvngtttagccaggctgggcctcagtctatgtctttgcaggccagaaattggctacctgggccctgctaccggcaacagagactttcaamarycbmcrvcsrsaacaacaacagtrastttccttggmcagcggccagcamatatcatctcaatggccgcgactcgctggtgaatccaggaccagctatggccagtcacrrggacgatrmsgrsaratttttccctatgcacggcaatctaatatttggcaaasaarrcrscrvsrvarvcratrycgmsdwcgrsvrsgtaatgattacggatgaagaagagattcgtaccaccaatcctgtggcaacagagcagtatggaactgtggcaaataacttgcagrvsvvsmrsrvcvvscccacgdhtvvsrnsgtcvmscatcagggggccttacctggcatggtgtggcaagatcgtgacgtctaccttcaaggacctatctgggca

SEQ ID NO: 1884 - protein, 620 aa, synthetic construct; identical to SEQ ID NO: 1880
  source 1..620: note = Description of Artificial Sequence: Synthetic polypeptide
  VARIANT 263..264: note = misc_feature - Xaa can be any naturally occurring amino acid
  VARIANT 267: note = misc_feature - Xaa can be any naturally occurring amino acid
  VARIANT 450..453: note = misc_feature - Xaa can be any naturally occurring amino acid
  VARIANT 456..460: note = misc_feature - Xaa can be any naturally occurring amino acid
  VARIANT 462: note = misc_feature - Xaa can be any naturally occurring amino acid
  VARIANT 491..495: note = misc_feature - Xaa can be any naturally occurring amino acid
  VARIANT 500: note = misc_feature - Xaa can be any naturally occurring amino acid
  VARIANT 504: note = misc_feature - Xaa can be any naturally occurring amino acid
  VARIANT 508: note = misc_feature - Xaa can be any naturally occurring amino acid
  VARIANT 528: note = misc_feature - Xaa can be any naturally occurring amino acid
  VARIANT 531..533: note = misc_feature - Xaa can be any naturally occurring amino acid
  VARIANT 546..557: note = misc_feature - Xaa can be any naturally occurring amino acid
  VARIANT 586..590: note = misc_feature - Xaa can be any naturally occurring amino acid
  VARIANT 593..595: note = misc_feature - Xaa can be any naturally occurring amino acid
  VARIANT 597: note = misc_feature - Xaa can be any naturally occurring amino acid

SEQ ID NO: 1885 - protein, 738 aa, synthetic construct; identical to SEQ ID NO: 7
  source 1..738: note = Description of Artificial Sequence: Synthetic polypeptide

SEQ ID NO: 1886 - DNA, 2258 bp, synthetic construct
  source 1..2258: mol_type = other DNA; note = Description of Artificial Sequence: Synthetic polynucleotide
tcgaggacaacctctctgagggcattcgcgagtggtgggacttgaaacctggagccccgaaacccaaagccaaccagcaaaagcaggacgacggccggggtctggtgcttcctggctacaagtacctcggacccttcaacggactcgacaagggggagcccgtcaacgcggcggacgcagcggccctcgagcacgacaaggcctacgaccagcagctcaaagcgggtgacaatccgtacctgcggtataaccacgccgacgccgagtttcaggagcgtctgcaagaagatacgtcttttgggggcaacctcgggcgagcagtcttccaggccaagaagcgggttctcgaacctctcggtctggttgaggaaggcgctaagacggctcctggaaagaagagaccggtagagccatcaccccagcgttctccagactcctctacgggcatcggcaagaaaggccagcagcccgcgaaaaagagactcaactttgggcagactggcgactcagagtcagtgcccgaccctcaaccaatcggagaaccccccgcaggcccctctggtctgggatctggtacaatggctgcaggcggtggcgctccaatggcagacaataacgaaggcgccgacggagtgggtagttcctcaggaaattggcattgcgattccacatggctgggcgacagagtcatcaccaccagcacccgaacctgggccctccccacctacaacaaccacctctacaagcaaatctccaacgggacttcgggaggaagcaccaacgacaacacctacttcggctacagcaccccctgggggtattttgactttaacagattccactgccacttctcaccacgtgactggcagcgactcatcaacaacaactggggattccggcccaagagactcaacttcaagctcttcaacatccaggtcaaggaggtcacgcagaatgaaggcaccaagaccatcgccaataaccttaccagcacgattcaggtctttacggactcggaataccagctcccgtacgtcctcggctctgcgcaccagggctgcctgcctccgttcccggcggacgtcttcatgattcctcagtacgggtacctgactctgaacaatggcagtcaggccgtgggccgttcctccttctactgcctggagtactttccttctcaaatgctgagaacgggcaacaactttgagttcagctaccagtttgaggacgtgccttttcacagcagctacgcgcacagccaaagcctggaccggctgatgaaccccctcatcgaccagtacctgtactacctgtctcggactcagtccacgggaggtaccgcaggaactcagcagttgctattttctcaggccgggcctaataacatgtcggctcaggccaaaaactggctacccgggccctgctaccggcagcaacgcgtctccacgacactgtcgcaaaataacaacagcaactttgcctggaccggtgccaccaagtatcatctgaatggcagagactctctggtaaatcccggtgtcgctatggcaacccacaaggacgacgaagagcgattttttccgtccagcggagtcttaatgtttgggaaacagggagctggaaaagacaacgtggactatagcagcgttatgctaaccagtgaggaagaaattaaaaccaccaacccagtggccacagaacagtacggcgtggtggccgataacctgcaacagcaaaacgccgctcctattgtaggggccgtcaacagtcaaggagccttacctggcatggtctggcagaaccgggacgtgtacctgcagggtcctatctgggccaagattcctcacacggacggaaactttcatccctcgccgctgatgggaggctttggactgaaacacccgcctcctcagatcctgattaagaatacacctgttcccgcggatcctccaactaccttcagtcaagctaagctggcgtcgttcatcacgcagtacagcaccggacaggtcagcgtggaaattgaatgggagctgcagaaagaaaacagcaaacgctggaacccagagattcaatacacttccaactactacaaatctacaaatgtggactttgctgttaacacagatggcacttattctgagcctcgccccatcggcacccgttacctcacccgtaatctgtaattgcttgttaatcaataaaccggttgattcgtttcagttgaactttggtctctgcgaagggcgaattcgttt

SEQ ID NO: 1887 - DNA, 2208 bp, synthetic construct
  source 1..2208: mol_type = other DNA; note = Description of Artificial Sequence: Synthetic polynucleotide
atggctgccgatggttatcttccagattggctcgaggacactctctctgaaggaataagacagtggtggaagctcaaacctggcccaccaccaccaaagcccgcagagcggcataaggacgacagcaggggtcttgtgcttcctgggtacaagtacctcggacccttcaacggactcgacaagggagagccggtcaacgaggcagacgccgcggccctcgagcacgacaaagcctacgaccggcagctcgacagcggagacaacccgtacctcaagtacaaccacgccgacgcggagtttcaggagcgccttaaagaagatacgtcttttgggggcaacctcggacgagcagtcttccaggcgaaaaagagggttcttgaacctctgggcctggttgaggaacctgttaagacggctccgggaaaaaagaggccggtagagcactctcctgtggagccagactcctcctcgggaaccggaaaggcgggccagcagcctgcaagaaaaagattgaattttggtcagactggagacgcagactcagtacctgacccccagcctctcggacagccaccagcagccccctctggtctgggaactaatacgatggctacaggcagtggcgcaccaatggcagacaataacgagggcgccgacggagtgggtaattcctcgggaaattggcattgcgattccacatggatgggcgacagagtcatcaccaccagcacccgaacctgggccctgcccacctacaacaaccacctctacaaacaaatttccagccaatcaggagcctcgaacgacaatcactactttggctacagcaccccttgggggtattttgacttcaacagattccactgccacttttcaccacgtgactggcaaagactcatcaacaacaactggggattccgacccaagagactcaacttcaagctctttaacattcaagtcaaagaggtcacgcagaatgacggtacgacgacgattgccaataaccttaccagcacggttcaggtgtttactgactcggagtaccagctcccgtacgtcctcggctcggcgcatcaaggatgcctcccgccgttcccagcagacgtcttcatggtgccacagtatggatacctcaccctgaacaacgggagtcaggcagtaggacgctcttcattttactgcctggagtactttccttctcagatgctgcgtaccggaaacaactttaccttcagctacacttttgaggacgttcctttccacagcagctacgctcacagccagagtctggaccgtctcatgaatcctctcatcgaccagtacctgtatttcttaagcagaacaaacactccaagtggaaccaccacgcagtcaaggcttcagttttctcaggccggagcgagtgacattcgggaccagtctaggaactggcttcctggaccctgttaccgccagcagcgagtatcaaagacatctgcggataacaacaacagtgaattctcgtggaccggtgctaccaagtaccacctcaatggcagagactctctggtgaatccgggcccggccatggcaagccacaaggacgatgaagaaaagttttttcctcagagcggggttctcatctttgggaagcaaggctcagagaaaacaaatgtggacattgaaaaggtcatgattacagacgaagaggaaatcaggacaaccaatcccgtggctacggagcagtatggttctgtatctaccaacctccagagaggcaacagacaagcagctaccgcagatgtcaacacacaaggcgttcttccaggcatggtctggcaggacagagatgtgtaccttcaggggcccatctgggcaaagattccacacacggacggacattttcacccctctcccctcatgggtggattcggacttaaacaccctcctccacagattctcatcaagaacaccccggtacctgcgaatccttcgaccaccttcagtgcggcaaagtttgcttccttcatcacacagtactccacgggacaggtcagcgtggagatcgagtgggagctgcagaaggaaaacagcaaacgctggaatcccgaaattcagtacacttccaactacaacaagtctgttaatgtggactttactgtggacactaatggcgtgtattcagagcctcgccccattggtaccagattcctgactcgtaatctgtaa

SEQ ID NO: 1888 - protein, 737 aa, synthetic construct
  source 1..737: note = Description of Artificial Sequence: Synthetic polypeptide
MAADGYLPDWLEDNLSEGIREWWDLKPGAPKPKANQQKQDNGRGLVLPGYKYLGPFNGLDKGEPVNAADAAALEHDKAYDQQLQAGDNPYLRYNHADAEFQERLQEDTSFGGNLGRAVFQAKKRVLEPLGLVESPVKTAPGKKRPVEPSPQRSPDSSTGIGKKGQQPAKKRLNFGQTGDSESVPDPQPIGEPPAAPSGVGPNTMAAGGGAPMADNNEGADGVGSSSGNWHCDSTWLGDRVITTSTRTWALPTYNNHLYKQISNGTSGGSTNDNTYFGYSTPWGYFDFNRFHCHFSPRDWQRLINNNWGFRPKRLNFKLFNIQVKEVTQNEGTKTIANNLTSTIQVFTDSEYQLPYVLGSAHQGCLPPFPADVFMIPQYGYLTLNNGSQAVGRSSFYCLEYFPSQMLRTGNNFEFSYNFEDVPFHSSYAHSQSLDRLMNPLIDQYLYYLSRTQSTGGTAGTQQLLFSQAGPNNMSAQAKNWLPGPCYRQQRVSTTLSQNNNSNFAWTGATKYHLNGRDSLVNPGVAMATHKDDEERFFPSSGVLMFGKQGAGKDNVDYSSVMLTSEEEIKTTNPVATEQYGWADNLQQQNAAPIVGAVNSQGALPGMVWQNRDVYLQGPIWAKIPHTDGNFHPSPLMGGFGLKHPPPQILIKNTPVPADPPTTFNQAKLASFITQYSTGQVSVEIEWELQKENSKRWNPEIQYTSNYYKSTNVDFAVNTEGTYSEPRPIGTRYLTRNL

SEQ ID NO: 1889 - DNA, 2211 bp, synthetic construct
  source 1..2211: mol_type = other DNA; note = Description of Artificial Sequence: Synthetic polynucleotide
atggctgccgatggttatcttccagattggctcgaggacactctctctgaaggaataagacagtggtggaagctcaaacctggcccaccaccaccaaagcccgcagagcggcataaggacgacagcaggggtcttgtgcttcctgggtacaagtacctcggacccttcaacggactcgacaagggagagccggtcaacgaggcagacgccgcggccctcgagcacgacaaagcctacgaccggcagctcgacagcggagacaacccgtacctcaagtacaaccacgccgacgcggagtttcaggagcgccttaaagaagatacgtcttttgggggcaacctcggacgagcagtcttccaggcgaaaaagagggttcttgaacctctgggcctggttgaggaacctgttaagacggctccgggaaaaaagaggccggtagagcactctcctgtggagccagactcctcctcgggaaccggaaaggcgggccagcagcctgcaagaaaaagattgaattttggtcagactggagacgcagactcagtacctgacccccagcctctcggacagccaccagcagccccctctggtctgggaactaatacgatggctacaggcagtggcgcaccaatggcagacaataacgagggcgccgacggagtgggtaattcctcgggaaattggcattgcgattccacatggatgggcgacagagtcatcaccaccagcacccgaacctgggccctgcccacctacaacaaccacctctacaaacaaatttccagcgcttcaacgggagcctcgaacgacaatcactactttggctacagcaccccttgggggtattttgacttcaacagattccactgccacttttcaccacgtgactggcaaagactcatcaacaacaactggggattccgacccaagagactcaacttcaagctctttaacattcaagtcaaagaggtcacgcagaatgacggtacgacgacgattgccaataaccttaccagcacggttcaggtgtttactgactcggagtaccagctcccgtacgtcctcggctcggcgcatcaaggatgcctcccgccgttcccagcagacgtcttcatggtgccacagtatggatacctcaccctgaacaacgggagtcaggcagtaggacgctcttcattttactgcctggagtactttccttctcagatgctgcgtaccggaaacaactttaccttcagctacacttttgaggacgttcctttccacagcagctacgctcacagccagagtctggaccgtctcatgaatcctctcatcgaccagtacctgtattacttgagcagaacaaacactccaagtggaaccaccacgcagtcaaggcttcagttttctcaggccggagcgagtgacattcgggaccagtctaggaactggcttcctggaccctgttaccgccagcagcgagtatcaaagacatctgcggataacaacaacagtgaatactcgtggactggagctaccaagtaccacctcaatggcagagactctctggtgaatccgggcccggccatggcaagccacaaggacgatgaagaaaagttttttcctcagagcggggttctcatctttgggaagcaaggctcagagaaaacaaatgtggacattgaaaaggtcatgattacagacgaagaggaaatcaggacaaccaatcccgtggctacggagcagtatggttctgtatctaccaacctccagagaggcaacagacaagcagctaccgcagatgtcaacacacaaggcgttcttccaggcatggtctggcaggacagagatgtgtaccttcaggggcccatctgggcaaagattccacacacggacggacattttcacccctctcccctcatgggtggattcggacttaaacaccctcctccacagattctcatcaagaacaccccggtacctgcgaatccttcgaccaccttcagtgcggcaaagtttgcttccttcatcacacagtactccacgggacaggtcagcgtggagatcgagtgggagctgcagaaggaaaacagcaaacgctggaatcccgaaattcagtacacttccaactacgccaagtctgtcaatgtggactttactgtggacaataatggcgtgtattcagagcctcgccccattggcaccagatacctgactcgtaatctgtaa

SEQ ID NO: 1890 - DNA, 2208 bp, synthetic construct
  source 1..2208: mol_type = other DNA; note = Description of Artificial Sequence: Synthetic polynucleotide
atggctgccgatggttatcttccagattggctcgaggacaacctctctgagggcattcgcgagtggtgggacttgaaacctggagccccgaagcccaaagccaaccagcaaaagcaggacgacggccggggtctggtgcttcctggctacaagtacctcggacccttcaacggactcgacaagggggagcccgtcaacgcggcggacgcagcggccctcgagcacgacaaggcctacgaccagcagctcaaagcgggtgacaatccgtacctgcggtataaccacgccgacgccgagtttcaggagcgtctgcaagaagatacgtcttttgggggcaacctcgggcgagcagtcttccaggccaagaagcgggttctcgaacctctcggtctggttgaggaaggcgctaagacggctcctggaaagaaacgtccggtagagcagtcgccacaagagccagactcctcctcgggcatcggcaagacaggccagcagcccgctaaaaagagactcaattttggtcagactggcgactcagagtcagtccccgatccacaacctctcggagaacctccagcaacccccgctgctgtgggacctactacaatggcttcaggcggtggcgcaccaatggcagacaataacgaaggcgccgacggagtgggtaatgcctcaggaaattggcattgcgattccacatggctgggcgacagagtcatcaccaccagcacccgcacctgggccttgcccacctacaataaccacctctacaagcaaatctccagtgcttcaggggccagcaacgacaaccactacttcggctacagcaccccctgggggtattttgatttcaacagattccactgccacttttcaccacgtgactggcagcgactcatcaacaacaattggggattccggcccaagagactcaacttcaaactcttcaacatccaagtcaaggaggtcacgacgaatgatggcgtcacaaccatcgctaataaccttaccagcacggttcaagtcttctcggactcggagtaccagcttccgtacgtcctcggctctgcgcaccagggctgcctccctccgttcccggcggacgtgttcatgattccgcaatacggctacctgacgctcaacaatggcagccaagccgtgggacgttcatccttttactgcctggaatatttcccttctcagatgctgagaacgggcaacaactttaccttcagctacacctttgaggaagtgcctttccacagcagctacgcgcacagccagagcctggaccggctgatgaatcctctcatcgaccaatacctgtattacctgaacagaactcaaaatcagtccggaagtgcccaaaacaaggacttgctgtttagccgtgggtctccagctggcatgtctgttcagcccaaaaactggctacctggaccctgttatcggcagcagcgcgtttctaaaacaaaaacagacaacaacaacagcaattttacctggactggtgcttcaaaatataacctcaatgggcgtgaatccatcatcaaccctggcactgctatggcctcacacaaagacgacgaagacaagttctttcccatgagcggtgtcatgatttttggaaaagagagcgccggagcttcaaacactgcattggacaatgtcatgattacagacgaagaggaaattaaagccactaaccctgtggccaccgaaagatttgggaccgtggcagtcaatttccagagcagcagcacagaccctgcgaccggagatgtgcatgctatgggagcattacctggcatggtgtggcaagatagagacgtgtacctgcagggtcccatttgggccaaaattcctcacacagatggacactttcacccgtctcctcttatgggcggctttggactcaagaacccgcctcctcagatcctcatcaaaaacacgcctgttcctgcgaatcctccggcggagttttcagctacaaagtttgcttcattcatcacccaatactccacaggacaagtgagtgtggaaattgaatgggagctgcagaaagaaaacagcaagcgctggaatcccgaagtgcagtacacatccaattatgcaaaatctgccaacgttgattttactgtggacaacaatggactttatactgagcctcgccccattggcacccgttaccttacccgtcccctgtaa

SEQ ID NO: 1891 - DNA, 2205 bp, synthetic construct
  source 1..2205: mol_type = other DNA; note = Description of Artificial Sequence: Synthetic polynucleotide
atggctgccgatggttatcttccagattggctcgaggacaacctctdgagggcattcgcgagtggtgggacttgaaacctggagccccgaaacccaaagccaaccagcaaaagcaggacgacggccggggtdggtgcttcctggctacaagtacctcggacccttcaacggactcgacaagggggagcccgtcaacgcggcggatgcagcggccctcgagcacgacaaggcctacgaccagcagctcaaagcgggtgacaatccgtacctgcggtataaccacgccgacgccgagtttcaggagcgtctgcaagaagatacgtcttttgggggcaacctcgggcgagcagtcttccaggccaagaagagggttctcgaaccttttggtdggttgaggaaggtgctaagacggctcctggaaagaaacgtccggtagagcagtcgccacaagagccagactcctcctcgggcattggcaagacaggccagcagcccgctaaaaagagactcaattttggtcagactggcgactcagagtcagtccccgacccacaacctctcggagaacctccagcaacccccgctgctgtgggacctactacaatggcttcaggcggtggcgcaccaatggcagacaataacgaaggcgccgacggagtgggtaatgcctcaggaaattggcattgcgattccacatggctgggcgacagagtcatcaccaccagcacccgaacatgggccttgcccacctataacaaccacctctacaagcaaatctccagtgcttcaggggccagcaacgacaaccactacttcggctacagcaccccctgggggtattttgatttcaacagattccactgccatttctcaccacgtgactggcagcgactcatcaacaacaattggggattccggcccaagagactcaacttcaagctcttcaacatccaagtcaaggaggtcacgacgaatgatggcgtcacgaccatcgctaataaccttaccagcacggttcaagtcttctcggactcggagtaccagttgccgtacgtcctcggctctgcgcaccagggctgcctccctccgttcccggcggacgtgttcatgattccgcagtacggctacctaacgctcaacaatggcagccaggcagtgggacggtcatccttttactgcctggaatatttcccatcgcagatgctgagaacgggcaataactttaccttcagctacaccttcgaggacgtgcctttccacagcagctacgcgcacagccagagcctggaccggctgatgaatcctctcatcgaccagtacctgtattacctgaacagaactcagaatcagtccggaagtgcccaaaacaaggacttgctgtttagccgggggtctccagctggcatgtctgttcagcccaaaaactggctacctggaccctgttaccggcagcagcgcgtttctaaaacaaaaacagacaacaacaacagcaactttacctggactggtgcttcaaaatataaccttaatgggcgtgaatctataatcaaccctggcactgctatggcctcacacaaagacgacaaagacaagttctttcccatgagcggtgtcatgatttttggaaaggagagcgccggagcttcaaacactgcattggacaatgtcatgatcacagacgaagaggaaatcaaagccactaaccccgtggccaccgaaagatttgggactgtggcagtcaatctccagagcagcagcacagaccctgcgaccggagatgtgcatgttatgggagccttacctggaatggtgtggcaagacagagacgtatacctgcagggtcctatttgggccaaaattcctcacacggatggacactttcacccgtctcctctcatgggcggctttggacttaagcacccgcctcctcagatcctcatcaaaaacacgcctgttcctgcgaatcctccggcagagttttcggctacaaagtttgcttcattcatcacccagtattccacaggacaagtgagcgtggagattgaatgggagctgcagaaagaaaacagcaaacgctggaatcccgaagtgcagtatacatctaactatgcaaaatctgccaacgttgatttcactgtggacaacaatggactttatactgagcctcgccccattggcacccgttacctcacccgtcccctgtaa

SEQ ID NO: 1892 - DNA, 2208 bp, synthetic construct
  source 1..2208: mol_type = other DNA; note = Description of Artificial Sequence: Synthetic polynucleotide
atggctgccgatggttatcttccagattggctcgaggacaacctctctgagggcattcgcgagtggtgggacttgaaacctggagccccgaaacccaaagccaaccagcaaaagcaggacgacggccggggtctggtgcttcctggctacaagtacctcggacccttcaacggactcgacaagggggagcccgtcaacgcggcggatgcagcggccctcgagcacgacaaggcctacgaccagcagctcaaagcgggtgacaatccgtacctgcggtataaccacgccgacgccgagtttcaggagcgtctgcaagaagatacgtcttttgggggcaacctcgggcgagcagtcttccaggccaagaagagggttctcgaaccttttggtctggttgaggaaggtgctaagacggctcctggaaagaaacgtccggtagagcagtcgccacaagagccagactcctcctcgggcattggcaagacaggccagcagcccgctaaaaagagactcaattttggtcagactggcgactcagagtcagtccccgacccacaacctctcggagaacctccagcaacccccgctgctgtgggacctactacaatggcttcaggcggtggcgcaccaatggcagacaataacgaaggcgccgacggagtgggtaatgcctcaggaaattggcattgcgattccacatggctgggcgacagagtcatcaccaccagcacccgaacatgggccttgcccacctataacaaccacctctacaagcaaatctccagtgcttcaggggccagcaacgacaaccactacttcggctacagcaccccctgggggtattttgatttcaacagattccactgccatttctcaccacgtgactggcagcgactcatcaacaacaattggggattccggcccaagagactcaacttcaagctcttcaacatccaagtcaaggaggtcacgacgaatgatggcgtcacgaccatcgctaataaccttaccagcacggttcaagtcttctcggactcggagtaccagttgccgtacgtcctcggctctgcgcaccagggctgcctccctccgttcccggcggacgtgttcatgattccgcagtacggctacctaacgctcaacaatggcagccaggcagtgggacggtcatccttttactgcctggaatatttcccatcgcagatgctgagaacgggcaataactttaccttcagctacaccttcgaggacgtgcctttccacagcagctacgcgcacagccagagcctggaccggctgatgaatcctctcatcgaccagtacctgtattacctgaacagaactcagaatcagtccggaagtgcccaaaacaaggacttgctgtttagccgggggtctccagctggcatgtctgttcagcccaaaaactggctacctggaccctgttaccggcagcagcgcgtttctaaaacaaaaacagacaacaacaacagcaactttacctggactggtgcttcaaaatataaccttaatgggcgtgaatctataatcaaccctggcactgctatggcctcacacaaagacgacgaagacaagttctttcccatgagcggtgtcatgatttttggaaaggagagcgccggagcttcaaacactgcattggacaatgtcatgatcacagacgaagaggaaatcaaagccactaaccccgtggccaccgaaagatttgggactgtggcagtcaatctccagagcagcagcacagaccctgcgaccggagatgtgcatgttatgggagccttacctggaatggtgtggcaagacagagacgtatacctgcagggtcctatttgggccaaaattcctcacacggatggacactttcacccgtctcctctcatgggcggctttggacttaagcacccgcctcctcagatcctcatcaaaaacacgcctgttcctgcgaatcctccggcagagttttcggctacaaagtttgcttcattcatcacccagtattccacaggacaagtgagcgtggagattgaatgggagctgcagaaagaaaacagcaaacgctggaatcccgaagtgcagtatacatctaactatgcaaaatctgccaacgttgatttcactgtggacaacaatggactttatactgagcctcgccccattggcacccgttacctcacccgtcccctgtaa

SEQ ID NO: 1893 - DNA, 2208 bp, synthetic construct
  source 1..2208: mol_type = other DNA; note = Description of Artificial Sequence: Synthetic polynucleotide
atggctgccgatggttatcttccagattggctcgaggacactctctctgaaggaataagacagtggtggaagctcaaacctggcccaccaccaccaaagcccgcagagcggcataaggacgacagcaggggtcttgtgcttcctgggtacaagtacctcggacccttcaacggactcgacaagggagagccggtcaacgaggcagacgccgcggccctcgagcacgacaaagcctacgaccggcagctcgacagcggagacaacccgtacctcaagtacaaccacgccgacgcggagtttcaggagcgccttaaagaagatacgtcttttgggggcaacctcggacgagcagtcttccaggcgaaaaagagggttcttgaacctctgggcctggttgaggaacctgttaagacggctccgggaaaaaagaggccggtagagcactctcctgtggagccagactcctcctcgggaaccggaaaggcgggccagcagcctgcaagaaaaagattgaattttggtcagactggagacgcagactcagtacctgacccccagcctctcggacagccaccagcagccccctctggtctgggaactaatacgatggctacaggcagtggcgcaccaatggcagacaataacgagggcgccgacggagtgggtaattcctcgggaaattggcattgcgattccacatggatgggcgacagagtcatcaccaccagcacccgaacctgggccctgcccacctacaacaaccacctctacaaacaaatttccagccaatcaggagcctcgaacgacaatcactactttggctacagcaccccttgggggtattttgacttcaacagattccactgccacttttcaccacgtgactggcaaagactcatcaacaacaactggggattccgacccaagagactcaacttcaagctctttaacattcaagtcaaagaggtcacgcagaatgacggtacgacgacgattgccaataaccttaccagcacggttcaggtgtttactgactcggagtaccagctcccgtacgtcctcggctcggcgcatcaaggatgcctcccgccgttcccagcagacgtcttcatggtgccacagtatggatacctcaccctgaacaacgggagtcaggcagtaggacgctcttcattttactgcctggagtactttccttctcagatgctgcgtaccggaaacaactttaccttcagctacacttttgaggacgttcctttccacagcagctacgctcacagccagagtctggaccgtctcatgaatcctctcatcgaccagtacctgtattacttgagcagaacaaacactccaagtggaaccaccacgcagtcaaggcttcagttttctgtggccggacccagtaacatggctgtccagggaaggaactggcttcctggaccctgttaccgccagcagcgagtatcaaagacatctgcggataacaacaacagtgaatttgcttggactggagctaccaagtaccacctcaatggcagagactctctggtgaatccgggcccggccatggcaagccacaaggacgatgaagaaaagttttttcctcagagcggggttctcatctttgggaagcaaggctcagagaaaacaaatgtggacattgaaaaggtcatgattacagacgaagaggaaatcaggacaaccaatcccgtggctacggagcagtatggttctgtatctaccaacctccagcaacagaacacagcaccagctaccgcagatgtcaacacacaaggcgttcttccaggcatggtctggcaggacagagatgtgtaccttcaggggcccatctgggcaaagattccacacacggacggacattttcacccctctcccctcatgggtggattcggacttaaacaccctcctccacagattctcatcaagaacaccccggtacctgcgaatccttcgaccaccttcagtgcggcaaagtttgcttccttcatcacacagtactccacgggacaggtcagcgtggagatcgagtgggagctgcagaaggaaaacagcaaacgctggaatcccgaaattcagtacacttccaactacaacaagtctgttaatgtggactttactgtggacactaatggcgtgtattcagagcctcgccccattggcaccagatacctgactcgtaatctgtaa

SEQ ID NO: 1894 - protein, 735 aa, synthetic construct
  source 1..735: note = Description of Artificial Sequence: Synthetic polypeptide
MAADGYLPDWLEDTLSEGIRQWWKLKPGPPPPKPAERHKDDSRGLVLPGYKYLGPFNGLDKGEPVNEADAAALEHDKAYDRQLDSGDNPYLKYNHADAEFQERLKEDTSFGGNLGRAVFQAKKRVLEPLGLVEEPVKTAPGKKRPVEHSPVEPDSSSGTGKAGQQPARKRLNFGQTGDADSVPDPQPLGQPPAAPSGLGTNTMATGSGAPMADNNEGADGVGNSSGNWHCDSTWMGDRVITTSTRTWALPTYNNHLYKQISSQSGASNDNHYFGYSTPWGYFDFNRFHCHFSPRDWQRLINNNWGFRPKRLNFKLFNIQVKEVTQNDGTTTIANNLTSTVQVFTDSEYQLPYVLGSAHQGCLPPFPADVFMVPQYGYLTLNNGSQAVGRSSFYCLEYFPSQMLRTGNNFTFSYTFEDVPFHSSYAHSQSLDRLMNPLIDQYLYYLSRTNTPSGTTTQSRLQFSVAGPSNMAVQGRNWLPGPCYRQQRVSKTSADNNNSEFAWTGATKYHLNGRDSLVNPGPAMASHKDDEEKFFPQSGVLIFGKQGSEKTNVDIEKVMITDEEEIRTTNPVATEQYGSVSTNLQQQNTAPATADVNTQGVLPGMVWQDRDVYLQGPIWAKIPHTDGHFHPSPLMGGFGLKHPPPQILIKNTPVPANPSTTFSAAKFASFITQYSTGQVSVEIEWELQKENSKRWNPEIQYTSNYNKSVNVDFTVDTNGVYSEPRPIGTRYLTRNL

SEQ ID NO: 1895 - DNA, 2208 bp, synthetic construct
  source 1..2208: mol_type = other DNA; note = Description of Artificial Sequence: Synthetic polynucleotide
atggctgccgatggttatcttccagattggctcgaggacactctctctgaaggaataagacagtggtggaagctcaaacctggcccaccaccaccaaagcccgcagagcggcataaggacgacagcaggggtcttgtgcttcctgggtacaagtacctcggacccttcaacggactcgacaagggagagccggtcaacgaggcagacgccgcggccctcgagcacgacaaagcctacgaccggcagctcgacagcggagacaacccgtacctcaagtacaaccacgccgacgcggagtttcaggagcgccttaaagaagatacgtcttttgggggcaacctcggacgagcagtcttccaggcgaaaaagaggattcttgaacctctgggcctggttgaggaacctgttaagacggctccgggaaaaaagaggccggtagagcactctcctgcggagccagactcctcctcgggaaccggaaagtcgggccagcagcctgcaagaaaaagattgaattttggtcagactggagacgcagactcagtacctgacccccagcctctcggacagccaccagcagccccctctggtctgggaactaatacgatggcttcaggcagtggcgcaccaatggcagacaataacgagggcgccgacggagtgggtaattcctcgggaaattggcattgcgattccacatggatgggcgacagagtcatcaccaccagcacccgaacctgggccctgcccacctacaacaaccacctctacaaacaaatttccagccaatcaggagcctcgaacgacaatcactactttggctacagcaccccttgggggtattttgacttcaacagattccactgccacttttcaccacgtgactggcaaagactcatcaacaacaactggggattccgacccaagagactcagcttcaagctctttaacattcaagtcaaagaggtcacgcagaatgacggtacgacgacgattgccaataaccttaccagcacggttcaggtgtttactgactcggagtaccagctcccgtacgtcctcggctcggcgcatcaaggatgcctcccgccgttcccagcagacgtcttcatggtgccacagtatggatacctcaccctgaacaacgggagtcaggcagtaggacgctcttcattttactgcctggagtactttccttctcagatgctgcgtaccggaaacaactttaccttcagctacacttttgaggacgttcctttccacagcagctacgctcacagccagagtctggaccgtctcatgaatcctctcatcgaccagtacctgtattacttgagcagaacaaacactccaagtggaaccaccacgatgtcaaggcttcagttttctcaggccggagcgagtgacattcgggaccagtctaggaactggcttcctggaccctgttaccgccagcagcgagtatcaaagacagctgcggataacaacaacagtgattactcgtggactggagctaccaagtaccacctcaatggcagagactctctggtgaatccgggcccggccatggcaagccacaaggacgatgaagaaaagtattttcctcagagcggggttctcatctttgggaagcaagactcaggaaaaacaaatgtggacattgaaaaggtcatgattacagacgaagaggaaatcaggacaaccaatcccgtggctacggagcagtatggttctgtatctaccaacctccagagcggcaacacacaagcagctacctcagatgtcaacacacaaggcgttcttccaggcatggtctggcaggacagagatgtgtaccttcaggggcccatctgggcaaagattccacacacggacggacattttcacccctctcccctcatgggtggattcggacttaaacaccctcctccacagattctcatcaagaacaccccggtacctgcgaatccttcgaccaccttcagtgcggcaaagtttgcttccttcatcacacagtactccacgggacaggtcagcgtggagatcgagtgggagctgcagaaggaaaacagcaaacgctggaatcccgaaattcagtacacttccaactacaacaagtctgttaatgtggactttactgtggacactaatggcgtgtattcagagcctcgccccattggcaccagatacctgactcgtaatctgtaa

SEQ ID NO: 1896 - DNA, 2208 bp, synthetic construct
  source 1..2208: mol_type = other DNA; note = Description of Artificial Sequence: Synthetic polynucleotide
atggctgccgatggttatcttccagattggctcgaggacactctctctgaaggaataagacagtggtggaagctcaaacctggcccaccaccaccaaagcccgcagagcggcataaggacgacagcaggggtcttgtgcttcctgggtacaagtacctcggacccttcaacggactcgacaagggagagccggtcaacgaggcagacgccgcggccctcgagcacgacaaagcctacgaccggcagctcgacagcggagacaacccgtacctcaagtacaaccacgccgacgcggagtttcaggagcgccttaaagaagatacgtcttttgggggcaacctcggacgagcagtcttccaggcgaaaaagaggattcttgaacctctgggcctggttgaggaacctgttaagacggctccgggaaaaaagaggccggtagagcactctcctgcggagccagactcctcctcgggaaccggaaagtcgggccagcagcctgcaagaaaaagattgaattttggtcagactggagacgcagactcagtacctgacccccagcctctcggacagccaccagcagccccctctggtctgggaactaatacgatggcttcaggcagtggcgcaccaatggcagacaataacgagggcgccgacggagtgggtaattcctcgggaaattggcattgcgattccacatggatgggcgacagagtcatcaccaccagcacccgaacctgggccctgcccacctacaacaaccacctctacaaacaaatttccagccaatcaggagcctcgaacgacaatcactactttggctacagcaccccttgggggtattttgacttcaacagattccactgccacttttcaccacgtgactggcaaagactcatcaacaacaactggggattccgacccaagagactcaacttcaagctctttaacattcaagtcaaagaggtcacgcagaatgacggtacgacgacgattgccaataaccttaccagcacggttcaggtgtttactgactcggagtaccagctcccgtacgtcctcggctcggcgcatcaaggatgcctcccgccgttcccagcagacgtcttcatggtgccacagtatggatacctcaccctgaacaacgggagtcaggcagtaggacgctcttcattttactgcctggagtactttccttctcagatgctgcgtaccggaaacaactttaccttcagctacacttttgaggacgttcctttccacagcagctacgctcacagccagagtctggaccgtctcatgaatcctctcatcgaccagtacctgtattacttgagcagaacaaacactccaagtggaaccaccacgatgtcaaggcttcagttttctcaggccggagcgagtgacattcgggaccagtctaggaactggcttcctggaccctgttaccgccagcagcgagtatcaaagacagctgcggataacaacaacagtgattactcgtggactggagctaccaagtaccacctcaatggcagagactctctggtgaatccgggcccggccatggcaagccacaaggacgatgaagaaaagtattttcctcagagcggggttctcatctttgggaagcaagactcaggaaaaacaaatgtggacattgaaaaggtcatgattacagacgaagaggaaatcaggacaaccaatcccgtggctacggagcagtatggttctgtatctaccaacctccagagcggcaacacacaagcagctacctcagatgtcaacacacaaggcgttcttccaggcatggtctggcaggacagagatgtgtaccttcaggggcccatctgggcaaagattccacacacggacggacattttcacccctctcccctcatgggtggattcggacttaaacaccctcctccacagattctcatcaagaacaccccggtacctgcgaatccttcgaccaccttcagtgcggcaaagtttgcttccttcatcacacagtactccacgggacaggtcagcgtggagatcgagtgggagctgcagaaggaaaacagcaaacgctggaatcccgaaattcagtacacttccaactacaacaagtctgttaatgtggactttactgtggacactaatggcgtgtattcagagcctcgccccattggcaccagatacctgactcgtaatctgtaa

SEQ ID NO: 1897 - protein, 735 aa, synthetic construct
  source 1..735: note = Description of Artificial Sequence: Synthetic polypeptide
MAADGYLPDWLEDTLSEGIRQWWKLKPGPPPPKPAERHKDDSRGLVLPGYKYLGPFNGLDKGEPVNEADAAALEHDKAYDRQLDSGDNPYLKYNHADAEFQERLKEDTSFGGNLGRAVFQAKKRILEPLGLVEEPVKTAPGKKRPVEHSPAEPDSSSGTGKSGQQPARKRLNFGQTGDADSVPDPQPLGQPPAAPSGLGTNTMASGSGAPMADNNEGADGVGNSSGNWHCDSTWMGDRVITTSTRTWALPTYNNHLYKQISSQSGASNDNHYFGYSTPWGYFDFNRFHCHFSPRDWQRLINNNWGFRPKRLNFKLFNIQVKEVTQNDGTTTIANNLTSTVQVFTDSEYQLPYVLGSAHQGCLPPFPADVFMVPQYGYLTLNNGSQAVGRSSFYCLEYFPSQMLRTGNNFTFSYTFEDVPFHSSYAHSQSLDRLMNPLIDQYLYYLSRTNTPSGTTTMSRLQFSQAGASDIRDQSRNWLPGPCYRQQRVSKTAADNNNSDYSWTGATKYHLNGRDSLVNPGPAMASHKDDEEKYFPQSGVLIFGKQDSGKTNVDIEKVMITDEEEIRTTNPVATEQYGSVSTNLQSGNTQAATSDVNTQGVLPGMVWQDRDVYLQGPIWAKIPHTDGHFHPSPLMGGFGLKHPPPQILIKNTPVPANPSTTFSAAKFASFITQYSTGQVSVEIEWELQKENSKRWNPEIQYTSNYNKSVNVDFTVDTNGVYSEPRPIGTRYLTRNL

SEQ ID NO: 1898 - protein, 736 aa, synthetic construct
  source 1..736: note = Description of Artificial Sequence: Synthetic polypeptide
MAADGYLPDWLEDNLSEGIREWWDLKPGAPKPKANQQKQDDGRGLVLPGYKYLGPFNGLDKGEPVNAADAAALEHDKAYDQQLKAGDNPYLRYNHADAEFQERLQEDTSFGGNLGRAVFQAKKRVLEPFGLVEEGAKTAPGKKRPVEQSPQEPDSSSGIGKTGQQPAKKRLNFGQTGDSESVPDPQPLGEPPATPAAVGPTTMASGGGAPMADNNEGADGVGNASGNWHCDSTWLGDRVITTSTRTWALPTYNNHLYKQISSASTGASNDNHYFGYSTPWGYFDFNRFHCHFSPRDWQRLINNNWGFRPKRLNFKLFNIQVKEVTTNDGVTTIANNLTSTVQVFSDSEYQLPYVLGSAHQGCLPPFPADVFMIPQYGYLTLNNGSQAVGRSSFYCLEYFPSQMLRTGNNFTFSYTFEDVPFHSSYAHSQSLDRLMNPLIDQYLYFLNRTQNQSGSAQNKDLLFSRGSPAGMSVQPKNWLPGPCYRQQRVSKTKTDNNNSNFTWTGASKYNLNGRESIINPGTAMASHKDDKDKFFPMSGVMIFGKESAGASNTALDNVMITDEEEIKATNPVATERFGTVAVNLQSSSTDPATGDVHVMGALPGMVWQDRDVYLQGPIWAKIPHTDGHFHPSPLMGGFGLKHPPPQILIKNTPVPANPPAEFSATKFASFITQYSTGQVSVEIEWELQKENSKRWNPEVQYTSNYAKSANVDFTVDNNGLYTEPRPIGTRYLTRPL

SEQ ID NO: 1899 - protein, 747 aa, synthetic construct
  source 1..747: note = Description of Artificial Sequence: Synthetic polypeptide
MAADGYLPDWLEDTLSEGIRQWWKLKPGPPPPKPAERHKDDSRGLVLPGYKYLGPFNGLDKGEPVNEADAAALEHDKAYDRQLDSGDNPYLKYNHADAEFQERLKEDTSFGGNLGRAVFQAKKRVLEPLGLVEEPVKTAPGKKRPVEHSPVEPDSSSGTGKAGQQPARKRLNFGQTGDADSVPDPQPLGQPPAAPSGLGTNTMATGSGAPMADNNEGADGVGNSSGNWHCDSTWMGDRVITTSTRTWALPTYNNHLYKQISSQSGASNDNHYFGYSTPWGYFDFNRFHCHFSPRDWQRLINNNWGFRPKRLNFKLFNIQVKEVTQNDGTTTIANNLTSTVQVFTDSEYQLPYVLGSAHQGCLPPFPADVFMVPQYGYLTLNNGSQAVGRSSFYCLEYFPSQMLRTGNNFTFSYTFEDVPFHSSYAHSQSLDRLMNPLIDQYLYYLSRTNTPSGTTTQSRLQFSQAGASDIRDQSRNWLPGPCYRQQRVSKTSADNNNSEYSWTGATKYHLNGRDSLVNPGPAMASHKDDEEKFFPQSGVLIFGKQGSEKTNVDIEKVMITDEEEIRTTNPVATEQYGSVSTNLQRGNAAAGSTPPPMAARQAATADVNTQGVLPGMVWQDRDVYLQGPIWAKIPHTDGHFHPSPLMGGFGLKHPPPQILIKNTPVPANPSTTFSAAKFASFITQYSTGQVSVEIEWELQKENSKRWNPEIQYTSNYNKSVNVDFTVDTNGVYSEPRPIGTRYLTRNL

SEQ ID NO: 1900 - protein, 747 aa, synthetic construct
  source 1..747: note = Description of Artificial Sequence: Synthetic polypeptide
MAADGYLPDWLEDTLSEGIRQWWKLKPGPPPPKPAERHKDDSRGLVLPGYKYLGPFNGLDKGEPVNEADAAALEHDKAYDRQLDSGDNPYLKYNHADAEFQERLKEDTSFGGNLGRAVFQAKKRVLEPLGLVEEPVKTAPGKKRPVEHSPVEPDSSSGTGKAGQQPARKRLNFGQTGDADSVPDPQPLGQPPAAPSGLGTNTMATGSGAPMADNNEGADGVGNSSGNWHCDSTWMGDRVITTSTRTWALPTYNNHLYKQISSQSGASNDNHYFGYSTPWGYFDFNRFHCHFSPRDWQRLINNNWGFRPKRLNFKLFNIQVKEVTQNDGTTTIANNLTSTVQVFTDSEYQLPYVLGSAHQGCLPPFPADVFMVPQYGYLTLNNGSQAVGRSSFYCLEYFPSQMLRTGNNFTFSYTFEDVPFHSSYAHSQSLDRLMNPLIDQYLYYLSRTNTPSGTTTQSRLQFSQAGASDIRDQSRNWLPGPCYRQQRVSKTSADNNNSEYSWTGATKYHLNGRDSLVNPGPAMASHKDDEEKFFPQSGVLIFGKQGSEKTNVDIEKVMITDEEEIRTTNPVATEQYGSVSTNLQRGNAAAGETRAPLAARQAATADVNTQGVLPGMVWQDRDVYLQGPIWAKIPHTDGHFHPSPLMGGFGLKHPPPQILIKNTPVPANPSTTFSAAKFASFITQYSTGQVSVEIEWELQKENSKRWNPEIQYTSNYNKSVNVDFTVDTNGVYSEPRPIGTRYLTRNL

SEQ ID NO: 1901 - protein, 10 aa, synthetic construct
  source 1..10: note = Description of Artificial Sequence: Synthetic polypeptide
VNLTWSRASG

SEQ ID NO: 1902 - protein, 14 aa, synthetic construct
  source 1..14: note = Description of Artificial Sequence: Synthetic polypeptide
EFCINHRGYWVCGD

SEQ ID NO: 1903 - protein, 11 aa, synthetic construct
  source 1..11: note = Description of Artificial Sequence: Synthetic polypeptide
EDGQVMDVDLS

SEQ ID NO: 1904 - protein, 9 aa, synthetic construct
  source 1..9: note = Description of Artificial Sequence: Synthetic polypeptide
EKQRNGTLT

SEQ ID NO: 1905 - protein, 17 aa, synthetic construct
  source 1..17: note = Description of Artificial Sequence: Synthetic polypeptide
TYQCRVTHPHLPRALMR

SEQ ID NO: 1906 - protein, 14 aa, synthetic construct
  source 1..14: note = Description of Artificial Sequence: Synthetic polypeptide
RHSTTQPRKTKGSG

SEQ ID NO: 1907 - protein, 13 aa, synthetic construct
  source 1..13: note = Description of Artificial Sequence: Synthetic polypeptide
DSNPRGVSAYLSR

SEQ ID NO: 1908 - protein, 12 aa, synthetic construct
  source 1..12: note = Description of Artificial Sequence: Synthetic polypeptide
TITCLWDLAPSK

SEQ ID NO: 1909 - protein, 10 aa, synthetic construct
  source 1..10: note = Description of Artificial Sequence: Synthetic polypeptide
KTKGSGFFVF

SEQ ID NO: 1910 - protein, 12 aa, synthetic construct
  source 1..12: note = Description of Artificial Sequence: Synthetic polypeptide
THPHLPRALMRS

SEQ ID NO: 1911 - protein, 23 aa, synthetic construct
  source 1..23: note = Description of Artificial Sequence: Synthetic polypeptide
GETYQCRVTHPHLPRALMRSTTK

SEQ ID NO: 1912 - protein, 8 aa, synthetic construct
  source 1..8: note = Description of Artificial Sequence: Synthetic polypeptide
LPRALMRS

SEQ ID NO: 1913 - protein, 8 aa, synthetic construct
  source 1..8: note = Description of Artificial Sequence: Synthetic polypeptide
INHRGYWV

SEQ ID NO: 1914 - protein, 12 aa, synthetic construct
  source 1..12: note = Description of Artificial Sequence: Synthetic polypeptide
CDAGSVRTNAPD

SEQ ID NO: 1915 - protein, 17 aa, synthetic construct
  source 1..17: note = Description of Artificial Sequence: Synthetic polypeptide
AKAVSNLTESRSESLQS

SEQ ID NO: 1916 - protein, 13 aa, synthetic construct
  source 1..13: note = Description of Artificial Sequence: Synthetic polypeptide
SLTGDEFKKVLET

SEQ ID NO: 1917 - protein, 11 aa, synthetic construct
  source 1..11: note = Description of Artificial Sequence: Synthetic polypeptide
REAVAYRFEED

SEQ ID NO: 1918 - protein, 10 aa, synthetic construct
  source 1..10: note = Description of Artificial Sequence: Synthetic polypeptide
INPEIITLDG

SEQ ID NO: 1919 - protein, 15 aa, synthetic construct
  source 1..15: note = Description of Artificial Sequence: Synthetic polypeptide
DISVTGAPVITATYL

SEQ ID NO: 1920 - protein, 12 aa, synthetic construct
  source 1..12: note = Description of Artificial Sequence: Synthetic polypeptide
DISVTGAPVITA

SEQ ID NO: 1921 - protein, 17 aa, synthetic construct
  source 1..17: note = Description of Artificial Sequence: Synthetic polypeptide
PKTVSNLTESSSESVQS

SEQ ID NO: 1922 - protein, 13 aa, synthetic construct
  source 1..13: note = Description of Artificial Sequence: Synthetic polypeptide
SLMGDEFKAVLET

SEQ ID NO: 1923 - protein, 11 aa, synthetic construct
  source 1..11: note = Description of Artificial Sequence: Synthetic polypeptide
QHSVAYTFEED

SEQ ID NO: 1924 - protein, 10 aa, synthetic construct
  source 1..10: note = Description of Artificial Sequence: Synthetic polypeptide
INPEIITRDG

SEQ ID NO: 1925 - protein, 15 aa, synthetic construct
  source 1..15: note = Description of Artificial Sequence: Synthetic polypeptide
DISLTGDPVITASYL

SEQ ID NO: 1926 - protein, 12 aa, synthetic construct
  source 1..12: note = Description of Artificial Sequence: Synthetic polypeptide
DISLTGDPVITA

SEQ ID NO: 1927 - protein, 11 aa, synthetic construct
  source 1..11: note = Description of Artificial Sequence: Synthetic polypeptide
DQSIDFEIDSA

SEQ ID NO: 1928 - protein, 20 aa, synthetic construct
  source 1..20: note = Description of Artificial Sequence: Synthetic polypeptide
KNVSEDLPLPTFSPTLLGDS

SEQ ID NO: 1929 - protein, 11 aa, synthetic construct
  source 1..11: note = Description of Artificial Sequence: Synthetic polypeptide
KNVSEDLPLPT

SEQ ID NO: 1930 - protein, 12 aa, synthetic construct
  source 1..12: note = Description of Artificial Sequence: Synthetic polypeptide
CDSGRVRTDAPD

SEQ ID NO: 1931 - protein, 14 aa, synthetic construct
  source 1..14: note = Description of Artificial Sequence: Synthetic polypeptide
FPEHLLVDFLQSLS

SEQ ID NO: 1932 - protein, 9 aa, synthetic construct
  source 1..9: note = Description of Artificial Sequence: Synthetic polypeptide
DAEFRHDSG

SEQ ID NO: 1933 - protein, 16 aa, synthetic construct
  source 1..16: note = Description of Artificial Sequence: Synthetic polypeptide
HYAAAQWDFGNTMCQL

SEQ ID NO: 1934 - protein, 13 aa, synthetic construct
  source 1..13: note = Description of Artificial Sequence: Synthetic polypeptide
YAAQWDFGNTMCQ

SEQ ID NO: 1935 - protein, 10 aa, synthetic construct
  source 1..10: note = Description of Artificial Sequence: Synthetic polypeptide
RSQKEGLHYT

SEQ ID NO: 1936 - protein, 19 aa, synthetic construct
  source 1..19: note = Description of Artificial Sequence: Synthetic polypeptide
SSRTPSDKPVAHWANPQAE

SEQ ID NO: 1937 - protein, 15 aa, synthetic construct
  source 1..15: note = Description of Artificial Sequence: Synthetic polypeptide
SRTPSDKPVAHWANP

SEQ ID NO: 1938 - protein, 9 aa, synthetic construct
  source 1..9: note = Description of Artificial Sequence: Synthetic polypeptide
SSRTPSDKP

SEQ ID NO: 1939 - protein, 14 aa, synthetic construct
  source 1..14: note = Description of Artificial Sequence: Synthetic polypeptide
NADGNVDYHMNSVP

SEQ ID NO: 1940 - protein, 11 aa, synthetic construct
  source 1..11: note = Description of Artificial Sequence: Synthetic polypeptide
DGNVDYHMNSV

SEQ ID NO: 1941 - protein, 16 aa, synthetic construct
  source 1..16: note = Description of Artificial Sequence: Synthetic polypeptide
RSFKEFLQSSLRALRQ

SEQ ID NO: 1942 - protein, 11 aa, synthetic construct
  source 1..11: note = Description of Artificial Sequence: Synthetic polypeptide
FKEFLQSSLRA

SEQ ID NO: 1943 - protein, 10 aa, synthetic construct
  source 1..10: note = Description of Artificial Sequence: Synthetic polypeptide
QMWAPQWGPD

SEQ ID NO: 1944 - protein, 6 aa, synthetic construct
  source 1..6: note = Description of Artificial Sequence: Synthetic polypeptide
RGNRQA

SEQ ID NO: 1945 - protein, 6 aa, synthetic construct
  source 1..6: note = Description of Artificial Sequence: Synthetic polypeptide
SSSTDP

SEQ ID NO: 1946 - protein, 6 aa, synthetic construct
  source 1..6: note = Description of Artificial Sequence: Synthetic polypeptide
SSNTAP

SEQ ID NO: 1947 - protein, 6 aa, synthetic construct
  source 1..6: note = Description of Artificial Sequence: Synthetic polypeptide
SNSNLP

SEQ ID NO: 1948 - protein, 6 aa, synthetic construct
  source 1..6: note = Description of Artificial Sequence: Synthetic polypeptide
SSTTAP

SEQ ID NO: 1949 - protein, 6 aa, synthetic construct
  source 1..6: note = Description of Artificial Sequence: Synthetic polypeptide
AANTAA

SEQ ID NO: 1950 - protein, 6 aa, synthetic construct
  source 1..6: note = Description of Artificial Sequence: Synthetic polypeptide
QQNTAP

SEQ ID NO: 1951 - protein, 6 aa, synthetic construct
  source 1..6: note = Description of Artificial Sequence: Synthetic polypeptide
SAQAQA

SEQ ID NO: 1952 - protein, 6 aa, synthetic construct
  source 1..6: note = Description of Artificial Sequence: Synthetic polypeptide
QANTGP

SEQ ID NO: 1953 - protein, 6 aa, synthetic construct
  source 1..6: note = Description of Artificial Sequence: Synthetic polypeptide
NATTAP

SEQ ID NO: 1954 - protein, 6 aa, synthetic construct
  source 1..6: note = Description of Artificial Sequence: Synthetic polypeptide
SSTAGP

SEQ ID NO: 1955 - protein, 6 aa, synthetic construct
  source 1..6: note = Description of Artificial Sequence: Synthetic polypeptide
QQNTAA

SEQ ID NO: 1956 - protein, 6 aa, synthetic construct
  source 1..6: note = Description of Artificial Sequence: Synthetic polypeptide
PSTAGP

SEQ ID NO: 1957 - protein, 6 aa, synthetic construct
  source 1..6: note = Description of Artificial Sequence: Synthetic polypeptide
NQNTAP

SEQ ID NO: 1958 - protein, 6 aa, synthetic construct
  source 1..6: note = Description of Artificial Sequence: Synthetic polypeptide
QAANAP

SEQ ID NO: 1959 - protein, 6 aa, synthetic construct
  source 1..6: note = Description of Artificial Sequence: Synthetic polypeptide
SIVGLP

SEQ ID NO: 1960 - protein, 6 aa, synthetic construct
  source 1..6: note = Description of Artificial Sequence: Synthetic polypeptide
AASTAA

SEQ ID NO: 1961 - protein, 6 aa, synthetic construct
  source 1..6: note = Description of Artificial Sequence: Synthetic polypeptide
SQNTTA

SEQ ID NO: 1962 - protein, 6 aa, synthetic construct
  source 1..6: note = Description of Artificial Sequence: Synthetic polypeptide
QQDTAP

SEQ ID NO: 1963 - protein, 6 aa, synthetic construct
  source 1..6: note = Description of Artificial Sequence: Synthetic polypeptide
QTNTGP

SEQ ID NO: 1964 - protein, 6 aa, synthetic construct
  source 1..6: note = Description of Artificial Sequence: Synthetic polypeptide
QTNGAP

SEQ ID NO: 1965 - protein, 6 aa, synthetic construct
  source 1..6: note = Description of Artificial Sequence: Synthetic polypeptide
QQNAAP

SEQ ID NO: 1966 - protein, 6 aa, synthetic construct
  source 1..6: note = Description of Artificial Sequence: Synthetic polypeptide
AANTQA

SEQ ID NO: 1967 - protein, 6 aa, synthetic construct
  source 1..6: note = Description of Artificial Sequence: Synthetic polypeptide
NGRAHA

SEQ ID NO: 1968 - protein, 7 aa, synthetic construct
  source 1..7: note = Description of Artificial Sequence: Synthetic polypeptide
QPEHSST

SEQ ID NO: 1969 - protein, 7 aa, synthetic construct
  source 1..7: note = Description of Artificial Sequence: Synthetic polypeptide
VNTANST

SEQ ID NO: 1970 - protein, 7 aa, synthetic construct
  source 1..7: note = Description of Artificial Sequence: Synthetic polypeptide
HGPMQKS

SEQ ID NO: 1971 - protein, 7 aa, synthetic construct
  source 1..7: note = Description of Artificial Sequence: Synthetic polypeptide
PHKPPLA

SEQ ID NO: 1972 - protein, 7 aa, synthetic construct
  source 1..7: note = Description of Artificial Sequence: Synthetic polypeptide
IKNNEMW

SEQ ID NO: 1973 - protein, 7 aa, synthetic construct
  source 1..7: note = Description of Artificial Sequence: Synthetic polypeptide
RNLDTPM

SEQ ID NO: 1974 - protein, 7 aa, synthetic construct
  source 1..7: note = Description of Artificial Sequence: Synthetic polypeptide
VDSHRQS

SEQ ID NO: 1975 - protein, 7 aa, synthetic construct
  source 1..7: note = Description of Artificial Sequence: Synthetic polypeptide
YDSKTKT

SEQ ID NO: 1976 - protein, 7 aa, synthetic construct
  source 1..7: note = Description of Artificial Sequence: Synthetic polypeptide
SQLPHQK

SEQ ID NO: 1977 - protein, 7 aa, synthetic construct
  source 1..7: note = Description of Artificial Sequence: Synthetic polypeptide
STMQQNT

SEQ ID NO: 1978 - protein, 7 aa, synthetic construct
  source 1..7: note = Description of Artificial Sequence: Synthetic polypeptide
TERYMTQ

SEQ ID NO: 1979 - protein, 7 aa, synthetic construct
  source 1..7: note = Description of Artificial Sequence: Synthetic polypeptide
DASLSTS

SEQ ID NO: 1980 - protein, 7 aa, synthetic construct
  source 1..7: note = Description of Artificial Sequence: Synthetic polypeptide
DLPNKKT

SEQ ID NO: 1981 - protein, 7 aa, synthetic construct
  source 1..7: note = Description of Artificial Sequence: Synthetic polypeptide
DLTAARL

SEQ ID NO: 1982 - protein, 7 aa, synthetic construct
  source 1..7: note = Description of Artificial Sequence: Synthetic polypeptide
EPHQFNY

SEQ ID NO: 1983 - protein, 7 aa, synthetic construct
  source 1..7: note = Description of Artificial Sequence: Synthetic polypeptide
EPQSNHT

SEQ ID NO: 1984 - protein, 7 aa, synthetic construct
  source 1..7: note = Description of Artificial Sequence: Synthetic polypeptide
MSSWPSQ

SEQ ID NO: 1985 - protein, 7 aa, synthetic construct
  source 1..7: note = Description of Artificial Sequence: Synthetic polypeptide
NPKHNAT

SEQ ID NO: 1986 - protein, 7 aa, synthetic construct
  source 1..7: note = Description of Artificial Sequence: Synthetic polypeptide
PDGMRTT

SEQ ID NO: 1987 - protein, 7 aa, synthetic construct
  source 1..7: note = Description of Artificial Sequence: Synthetic polypeptide
PNNNKTT

SEQ ID NO: 1988 - protein, 7 aa, synthetic construct
  source 1..7: note = Description of Artificial Sequence: Synthetic polypeptide
QSTTHDS

SEQ ID NO: 1989 - protein, 7 aa, synthetic construct
  source 1..7: note = Description of Artificial Sequence: Synthetic polypeptide
TGSKQKQ

SEQ ID NO: 1990 - protein, 7 aa, synthetic construct
  source 1..7: note = Description of Artificial Sequence: Synthetic polypeptide
SLKHQAL

SEQ ID NO: 1991 - protein, 7 aa, synthetic construct
  source 1..7: note = Description of Artificial Sequence: Synthetic polypeptide
SPIDGEQ

SEQ ID NO: 1992 - protein, 8 aa, synthetic construct
  source 1..8: note = Description of Artificial Sequence: Synthetic polypeptide
WIFPWIQL

SEQ ID NO: 1993 - protein, 9 aa, synthetic construct
  source 1..9: note = Description of Artificial Sequence: Synthetic polypeptide
CDCRGDCFC

SEQ ID NO: 1994 - protein, 5 aa, synthetic construct
  source 1..5: note = Description of Artificial Sequence: Synthetic polypeptide
CNGRC

SEQ ID NO: 1995 - protein, 7 aa, synthetic construct
  source 1..7: note = Description of Artificial Sequence: Synthetic polypeptide
CPRECES

SEQ ID NO: 1996 - protein, 10 aa, synthetic construct
  source 1..10: note = Description of Artificial Sequence: Synthetic polypeptide
CTTHWGFTLC

SEQ ID NO: 1997 - protein, 9 aa, synthetic construct
  source 1..9: note = Description of Artificial Sequence: Synthetic polypeptide
CGRRAGGSC

SEQ ID NO: 1998 - protein, 9 aa, synthetic construct
  source 1..9: note = Description of Artificial Sequence: Synthetic polypeptide
CKGGRAKDC

SEQ ID NO: 1999 - protein, 9 aa, synthetic construct
  source 1..9: note = Description of Artificial Sequence: Synthetic polypeptide
CVPELGHEC

SEQ ID NO: 2000 - protein, 9 aa, synthetic construct
  source 1..9: note = Description of Artificial Sequence: Synthetic polypeptide
CRRETAWAK

SEQ ID NO: 2001 - protein, 14 aa, synthetic construct
  source 1..14: note = Description of Artificial Sequence: Synthetic polypeptide
VSWFSHRYSPFAVS

SEQ ID NO: 2002 - protein, 13 aa, synthetic construct
  source 1..13: note = Description of Artificial Sequence: Synthetic polypeptide
GYRDGYAGPILYN

SEQ ID NO: 2003-2004 - skipped (2 entries)

(The sequence listing continues in the following parts.)

1.-35. (canceled)

36. An adeno-associated viral (AAV) genome comprising a first inverted terminal repeat (ITR), a promoter operably linked to a nucleic acid comprising a modulatory polynucleotide encoding a sense strand sequence and an antisense strand sequence, and a second ITR; wherein the encoded antisense strand sequence comprises a nucleotide sequences at least 80% identical to the nucleotide sequences of any one of SEQ ID NOs: 918, 920, 914-917, 919, or 921-1013; and wherein the AAV viral genome comprises one or more of:
(i) a first ITR sequence comprising the nucleotide sequence of any one of SEQ ID NOs: 1380 or 1381-1383;
(ii) a promoter comprises a CBA promoter, a CMV promoter, a PGK promoter, an H1 promoter a T7 promoter, a UBC promoter, a GUSB promoter, an NSE promoter, a synapsin promoter, a MeCP2 promoter, or a GFAP promoter;
(iii) a promoter comprising the nucleotide sequence of any one of SEQ ID NOs: 1410, 1411-1414; or
(iv) a second ITR sequence comprising the nucleotide sequence of any one of SEQ ID NOs: 1382, 1380, 1381, or 1383.

37. The AAV viral genome of claim 36, wherein:
(i) the encoded antisense strand sequence comprises the nucleotide sequence of any one of SEQ ID NOs: 918, 920, 914-917, 919, or 921-1013; and/or
(ii) the encoded sense strand sequence comprises the nucleotide sequence of any one of SEQ ID NOs: 1079, 1082, 1044, 1014-1043, 1045-1078, 1080, 1081, or 1083-1160, or a nucleotide sequence at least 80% identical thereto.

38. The AAV viral genome of claim 36, wherein:
(i) the encoded antisense strand sequence comprises the nucleotide sequence of SEQ ID NO: 918, and the encoded sense strand sequence comprises the nucleotide sequence of SEQ ID NO: 1079;
(ii) the encoded antisense strand sequence comprises the nucleotide sequence of SEQ ID NO: 918, and the encoded sense strand sequence comprises the nucleotide sequence of SEQ ID NO: 1082; or
(iii) the encoded antisense strand sequence comprises the nucleotide sequence of SEQ ID NO: 920, and the encoded sense strand sequence comprises the nucleotide sequence of SEQ ID NO: 1044.

39. The AAV viral genome of claim 36, wherein:
(i) the nucleotide sequence encoding the antisense strand sequence comprises the nucleotide sequence of any one of SEQ ID NOs: 1335, 1351, 1336, 1333, 1334, 1337-1345, or 1350;
(ii) the nucleotide sequence encoding the sense strand sequence comprises the nucleotide sequence of any one of SEQ ID NOs: 1331, 1349, 1309, 1280-1308, 1310-1330, 1332, or 1348;
(iii) the nucleotide sequence encoding the antisense strand sequence comprises the nucleotide sequence of SEQ ID NO: 1335, and the nucleotide sequence encoding the sense strand sequence comprises the nucleotide sequence of SEQ ID NO: 1331;
(iv) the nucleotide sequence encoding the antisense strand sequence comprises the nucleotide sequence of SEQ ID NO: 1351, and the nucleotide sequence encoding the sense strand sequence comprises the nucleotide sequence of SEQ ID NO: 1349; or
(v) the nucleotide sequence encoding the antisense strand sequence comprises the nucleotide sequence of SEQ ID NO: 1336, and the nucleotide sequence encoding the sense strand sequence comprises the nucleotide sequence of SEQ ID NO: 1309.

40. The AAV viral genome of claim 36, wherein:
(i) the encoded sense strand sequence and the encoded antisense strand sequence comprises a 3′ overhang of at least 1 or 2 nucleotide; and/or
(ii) the encoded antisense strand sequence and/or encoded sense strand sequence independently comprises at least 19, 20, 21, 22, 23 or 24 nucleotides in length.

41. The AAV viral genome of claim 36, wherein the modulatory polynucleotide further comprises:
(i) a 5′ flanking region;
(ii) a loop region; and/or
(iii) a 3′ flanking region.

42. The AAV viral genome of claim 41, wherein:
(i) the 5′ flanking region comprises the nucleotide sequence of any one of SEQ ID NOs: 1163, 1167, 1161, 1162, or 1164-1166;
(ii) the loop region comprises the nucleotide sequence of any one of SEQ ID NOs: 1172, 1175, 1169, 1168, 1170, 1171, 1173, or 1174; and/or
(iii) the 3′ flanking region comprises the nucleotide sequence of any one of SEQ ID NOs: 1178, 1182, or 1179-1181.

43. The AAV viral genome of claim 36, wherein the modulatory polynucleotide comprises in 5′ to 3′ order:
(i) a 5′ flanking region, the sense strand sequence, a loop region, the antisense strand sequence, and a 3′ flanking region; or
(ii) a 5′ flanking region, the antisense strand sequence, a loop region, the sense strand sequence, and a 3′ flanking region.

44. The AAV viral genome of claim 36, wherein the modulatory polynucleotide comprises:
(i) the nucleotide sequence of any one of SEQ ID NOs: 1262, 1347, 1250, 1183-1249, 1251-1261, 1263-1279 or 1346;
(ii) the nucleotide sequence of SEQ ID NO: 1262;
(iii) the nucleotide sequence of SEQ ID NO: 1347;
(iv) the nucleotide sequence of SEQ ID NO: 1250.

45. The AAV viral genome of claim 36, wherein:
(i) the first ITR sequence comprises the nucleotide sequence of any one of SEQ ID NOs: 1380 or 1381-1383;
(ii) the promoter comprises the nucleotide sequence of any one of SEQ ID NOs: 1410, 1411-1414; and
(iii) the second ITR sequence comprises the nucleotide sequence of any one of SEQ ID NOs: 1382, 1380, 1381, or 1383.

46. The AAV viral genome of claim 45, which further comprises:
(i) an enhancer;
(ii) a multiple cloning site (MCS), e.g., at least 1 or at least 2 MCSs;
(iii) an intron, e.g., at least 1, 2, or 3 introns;
(iv) an exon, e.g., at least 1, 2, or 3 exons;
(v) a filler sequence;
(vi) a miRNA binding site; and/or
(vii) a polyA signal sequence region.

47. The AAV viral genome of claim 46, wherein:
(i) the enhancer comprises a CMV enhancer;
(ii) the enhancer comprises SEQ ID NO: 1408 or 1409;
(iii) the MCS comprises the nucleotide sequence any one of SEQ ID NOs: 1384-1387 or 1389 or the nucleotide sequence of TCGAG;
(iv) the intron comprises an SV40 intron, an Ie1 intron or a beta-globin intron,
(v) the intron comprises the nucleotide sequence of any one of SEQ ID NOs: 1417-1419;
(vi) the exon comprises an Ie1 exon or a beta-globin exon;
(vii) the exon comprises the nucleotide sequence of SEQ ID NO: 1415 or 1416;
(viii) the polyA signal sequence region a rabbit globin polyadenylation signal sequence region; and/or
(ix) the polyA signal sequence region comprises the nucleotide sequence of any one of SEQ ID NOs: 1420-1423.

48. An AAV viral particle comprising the AAV viral genome of claim 36, and an AAV capsid protein, wherein the AAV capsid protein comprises an AAV1 capsid protein or variant thereof, an AAV5 capsid protein or variant thereof, or an AAV9 capsid protein or a variant thereof.

49. A vector comprising the AAV viral genome claim 36.

50. A cell comprising the AAV viral genome of claim 36, wherein the cell is a mammalian cell, a medium spiny neuron, a cortical neuron, or an astrocyte.

51. A pharmaceutical composition comprising an AAV particle comprising the AAV viral genome of claim 36, and a pharmaceutically acceptable excipient.

52. A method of inhibiting HTT expression in a cell a Huntingtin (HTT) gene, mRNA, and/or protein expression in a cell, comprising contacting the cell with the AAV viral genome of claim 36, optionally wherein the cell is a mammalian cell, a CNS cell, a neuron, a medium spiny neuron or a cortical neuron, and/or an astrocyte.

53. The method of claim 52, wherein the cell is in a subject, and the subject has or has been diagnosed with having Huntington's disease (HD).

54. A method of treating Huntington's disease (HD) in a subject, comprising administering to the subject an effective amount of an AAV viral particle comprising the AAV viral genome of claim 53, thereby treating HD in the subject.

55. The method of claim 54, wherein the HD is:
(i) a juvenile form HD, e.g., HD in a subject of 2 to 20 years of age;
(ii) an early stage HD;
(iii) a late stage HD;
(iv) a fully penetrant HD, e.g., wherein the HTT gene as least 41 or more CAG repeats;
(v) an incomplete penetrance HD, e.g., wherein the HTT gene has 36-40 CAG repeats; and/or
(vi) an asymptomatic HD.
